United States Patent Application Publication US 2007/0061916 A1 - sequence listing, part 13

SEQ ID NO: 64933 - protein, 174 aa, Gossypium hirsutum
  Clone ID: GOSHI-09MAY01-C6272_1.pep
MATHNLAVILKNPSNDAEFLLLKQTPPPKFSEDQYDSYVDSDLWDLPSTLLNLQHDHSHSGIVIQGAQSSHNIDLTKFDVQLALTGVLEKLGLTVNDVGEWSLFKYVEEAEFGPEFPVNTVFIMGNLLDGNQNCPGLCKWMSTESCLTWLLEVKPCIDRVGPLVVFALINDSLQ

SEQ ID NO: 64934 - protein, 303 aa, Gossypium hirsutum
  unsure (1)..(303): unsure at all Xaa locations
  Clone ID: GOSHI-09MAY01-C6212_1.pep
VMHIAAAMEINSILIPKLKILHCTLHSKSIESKDIVKIGRTHTQDATPLTLGQEFTGYTTQXVKYGIDRLFCTLPRMYQLAQSGTAVGTGLNTKKGFDAKIAAAVADETNLPFVTAENKFEAGPARDAFVETSGALNTVATSLMKVANDIRLLGSGPRCGLGELILPENEPGSSIMPGKVNPTQCEAITMVCAQVMGNHVAITVGGSNGHFELNVFKPMIANALLHSLRLLGDASASFEKNCVRGIQANRERISKLLHESLMLVTSLNPKIGYDNAAXVAKKAHKEGSTLKEAALSPCVLTSE

SEQ ID NO: 64935 - protein, 72 aa, Gossypium hirsutum
  Clone ID: LIB3196-054-P1-M1-A12.pep
YHMIDCQANDHMLSCDILTGLAVSNACHIFEPCKFSSLLLSRISCSSMSLLHFEHVSNDLFASRKLVTTMLQ

SEQ ID NO: 64936 - protein, 74 aa, Gossypium hirsutum
  Clone ID: GOSHI-09MAY01-C7992_7.pep
MYSNFKEQAIEYVKQAVQEDNAGNYSKAFPLYMNALEYFKTHLKYEKNPKIREAITQKFTEYLRRAEEIRAVLD

SEQ ID NO: 64937 - protein, 231 aa, Gossypium hirsutum
  unsure (1)..(231): unsure at all Xaa locations
  Clone ID: GOSHI-09MAY01-C7992_4.pep
SSDLVSKWMGESEKLVSNLFQMARDSAPSIIFIDEIDSLCGQRGEGNESEASRRIKTELLVQMQGVGHTDQKVLVLAATNTPYALDQAIRRRFDKRIYIPLPDLKARQHMFKVHLGDTPHNLTESDFENLARRTEGFSGSNISVCVKDVLFEPVRKTQDAMFFYKTPEDMWMPCGPRQPAAVQITMQELGAKRLAAQIPPPPISRSDFDXCLPEQRPTVSQADLEVPERIT

SEQ ID NO: 64938 - protein, 181 aa, Gossypium hirsutum
  unsure (1)..(181): unsure at all Xaa locations
  Clone ID: GOSHI-09MAY01-C7992_3.pep
MYSNFKEQAIEYVMQAVQEDNAGNYSKAFPLYMNALEYFKTHLKYEKNPKIREAITQKFTEYLRRAEEIRAVLDEGGPGPASNGDAAVATRPKSKPKNGGGGGEGGDGEDPEQAKLRAGLDSAIIREKPNVKWNDVAGLESAKQALQEAVILPVKFPQFFTGKRXPWRAFLLYGPPGPGSH

SEQ ID NO: 64939 - protein, 312 aa, Gossypium hirsutum
  unsure (1)..(312): unsure at all Xaa locations
  Clone ID: GOSHI-09MAY01-C7992_2.pep
MYSNFKEQAIEYVKQAVQEDNAGNYSKAFPLYMNALEYFKTHLKYEKNPKIREAITQKFTEYLRRAEEIRAVLDEGGPGPASNGDAAVATRPKSKPKSGGGEGGDGEDPEQAKLRAGLNSAIIREKPNVKWNDVAGLESAKQALQEAVILPVKFPQFFTGKRRPWRAFLLYGPPGTGKSYLAKAVATEADSTFFSVSSSDLVSKWMGESEKLVSNLFEMARDSAPSIIFIDEIDSLCGQRGEGNESEASRRIKTELLVQMQGVGHNDQKVLVLAATNTPYALDQAIXRRFDKRIYIKGNRMLLMSILRGHSC

SEQ ID NO: 64940 - protein, 243 aa, Gossypium hirsutum
  unsure (1)..(243): unsure at all Xaa locations
  Clone ID: GOSHI-09MAY01-C7992_1.pep
MYSNFKEQAIEYVKQAVQEDNAGNYSKAFPLYMNALEYFKTHLKYEKNPKIREAITQKFTEYLRRAEEIRTVLDEGGPGPATNGGAAVATRPKSKPKDGSGGGEGGDGEDPDQAKLRAGLDSAIIREKPNIKWNDVAGLESAKQALQEAVILPVKFPPFFTGKKRPWRAFLLXGPPGTGKFSLAQAVAPGTKSALFSVXSSELFSKWNGETKNLFQPFSKGRDVPLILFLESKSFVDPWWGNN

SEQ ID NO: 64941 - protein, 137 aa, Gossypium hirsutum
  unsure (1)..(137): unsure at all Xaa locations
  Clone ID: LIB3585-016-P1-K1-C4.pep
MYSNFKEQAIEYVKQAVHEDNEGNYSKAYPLYMNALEYFKTHLKYEKNPKIREAITQRFTEYLRRAEEIRAVLDEGGPGPASNGDAAGATRPKSKPKNGGGGGEGGDGGEDPDQAKLRSGLXNRLLIKEKPNVKWND

SEQ ID NO: 64942 - protein, 137 aa, Gossypium hirsutum
  unsure (1)..(137): unsure at all Xaa locations
  Clone ID: LIB3272-058-P1-K1-H8.pep
RDSAPSIIFIDEIDSLCGQRGEGNESEASRRIKTELLVQMQGVGHSDQKVLVLAATNTPYALDQAIRRRFDKRIYIPLPDLKARQHMFXFEPVRKTQDAMFFYKTPNDMWMPCGPKQAGVVQITMQELAAKGLAAQV

SEQ ID NO: 64943 - protein, 214 aa, Gossypium hirsutum
  unsure (1)..(214): unsure at all Xaa locations
  Clone ID: GOSHI-09MAY01-C7952_1.pep
DALNREVREKKERLERERQQREREEEEREQRRREVEREREEKEREQRRLEKERERIMQMERERERARQAVERATREAREXAAAEARARAERAAVEKAATEARERAERAAVQRAQAEARERAAAEARERAERAAAEARERTAATKAEAEARLRAERAAAERAAAEARERAAASARASQQKNDDDLESFFXVSRASSAPRPRANSSDPLFDGQNKG

SEQ ID NO: 64944 - protein, 122 aa, Gossypium hirsutum
  Clone ID: GOSHI-09MAY01-C7962_1.pep
MAFAVTSSPAAISGSSFSRSSASSDLKIPQIGSFRLADRHATVNLSQKRCAVKPVNAEPKRNDSMLSHAATTSAPEVSEKVEVEDFDQLAKELNNASPLEIMDKALEKFGNDIAIAFSGAED

SEQ ID NO: 64945 - protein, 97 aa, Gossypium hirsutum
  Clone ID: GOSHI-09MAY01-C7932_1.pep
MRSWVMDSGDGATTSQQMGSLTEDLRERHQQELENLTLTTQPFKTLRLFLLAIFQYYKRLALYLLAKGSWLALSSTLIAAFGIFACNNRGPHEKHVD

SEQ ID NO: 64946 - protein, 139 aa, Gossypium hirsutum
  Clone ID: GOSHI-09MAY01-C7882_1.pep
FVNPFNPCFNVPFFFLNYRENGIFQRQEEAAEPETICIKQQSELRFDGDSNEAVEEGKAGEWLNLSLGGNSVSTAGDSDTQLTPVSTRVFSCNFCMRKFYSSQALGGHQNAHKRERGAARRYHSQRMTSSSMMALPMIS

SEQ ID NO: 64947 - protein, 169 aa, Gossypium hirsutum
  Clone ID: GOSHI-09MAY01-C7872_2.pep
MMLGKRSRQPIKRTTSMTGITVDVSDAEDVVDQHHQDSIISHLPPPQIHPMHESPDGTSLYDHRFLAMVSPRNPTSFTNRIVDSSTTDTASFLRACWLCNRRLAPGRDIYMYRGDTSFCSQECREKQMKQDERKEKLNINSSKKEDRHAHSSSTTTSSKTSKAKPVVAA

SEQ ID NO: 64948 - protein, 131 aa, Gossypium hirsutum
  unsure (1)..(131): unsure at all Xaa locations
  Clone ID: uC-gsronu33B136h11b1.pep
MMLGKRSRQSIKRTTRMTGITVDVVDHHQDPIISHPPPQIHPLHESPDANSRYDQRFLAMVSPRNPASFTSHVIDSGTTAAAPFLRACWLCNRRLAPGRDIYMYRGDTAFXSQECREKQMKQDERKEKLNG

SEQ ID NO: 64949 - protein, 166 aa, Gossypium hirsutum
  unsure (1)..(166): unsure at all Xaa locations
  Clone ID: GOSHI-09MAY01-C7862_1.pep
VLSAYKLRGDFARLNFPNLRHHGSHVGXYKPLPSSVDAKLQAICESLVQNPKQGSKKKSSKVTADTKSRNNKKSDMAEPKPEENTAKVENSSSLSTVQSESEGSAVSSPLSDLTFSDFDEQPWPEVVSSSETFMLSKYPSEIDWDSILKAWREKPMCTFLCKSFDV

SEQ ID NO: 64950 - protein, 192 aa, Gossypium hirsutum
  Clone ID: GOSHI-09MAY01-C7482_1.pep
MASLFHGCFLFPREQSPVPTPETQFLSHLSSPPHPSMAAITNFLTKPPTSDLHFTPKLTSLCSHASFLPSLATRPRSFSTKLGTSTSSRFITKATAAPGTKNAPSDERVQKVHSIEEFDEALRKAKNRLVVVEYATSFSYHSSKIYPFMVDLSRTCNDVEFILVMGDESDETRELCKREKITKVPHFSFYKS

SEQ ID NO: 64951 - protein, 221 aa, Gossypium hirsutum
  Clone ID: GOSHI-09MAY01-C7772_1.pep
MDEEEHEVYGGEIPDEGEMEGELDPQNADVDMSAADEDAVKELDEMKKRLKEMEDEAAALREMQAKVEKEMGAVQDPAGATANQASKEEADSRSVFVGNVDYACTPEEVQQHFQSCGTVNRVTILTDKYGQPKGFAYVEFLEAEAVQEALVLNESELHGRQLKVMPKRTNVPGMKQYRPRRFNPYMGYRSRRPYIPPYSYSPYGFGKIPRFTRPMRYMPYY

SEQ ID NO: 64952 - protein, 136 aa, Gossypium hirsutum
  unsure (1)..(136): unsure at all Xaa locations
  Clone ID: GOSHI-09MAY01-C7712_1.pep
MFGTQSKRDLALELQAQFPILRPSIHARRANLTVKFQDLYGFTVEGNVDDVNVLNEVREKVRQQGRVWWALEASKGANWYLQPQVSSLSEGIVLKSSLKLAALANSITLKRLIRXGIPPVLRPKVWFSLSGAAKKN

SEQ ID NO: 64953 - protein, 119 aa, Gossypium hirsutum
  Clone ID: GOSHI-09MAY01-C7702_1.pep
MGLGHKIRTGYAKLSFLSRLARQSHDAKTLPALPCQIMKQDGDRLRSLALFGAGVSGLLGCATIAYSDEAEHGLAVPNYPWPHQGILSSYDHASMRRGHQVYQQVCASCHSMSLISFRD

SEQ ID NO: 64954 - protein, 202 aa, Gossypium hirsutum
  unsure (1)..(202): unsure at all Xaa locations
  Clone ID: GOSHI-09MAY01-C7732_1.pep
MLKKERGLLILCIHGXPELWHSWRHQXIDFFVIPKVHPAVAPDLRGYGDTDAPDLGTTYTCFHILGDLVQLLNIISPNEHKVLVVGHDWRPAIASYLCLFTPDKVKAVFNLSVSFIPHNPHMNPIDGWRAIYGNDYYMCTFQQPGKIEAEFAEMGTETVVKAFLTYRVPGPIMLPKGKPFGHSADTPIALPSWLSEEEGHYY

SEQ ID NO: 64955 - protein, 125 aa, Gossypium hirsutum
  unsure (1)..(125): unsure at all Xaa locations
  Clone ID: LIB3493-024-P1-M1-H5.pep
QNRPKMEGVEHRIVKVNGINMHVAEKGQGPVILFVHGFPELWYSWRHQIAALSSKGYRAVAPDLRGYGDTDAPDSVTCYTCFHIVGGFSWLLNTIGPDEQVFXVGHDWXAIIAWYLGLFRPDKVK

SEQ ID NO: 64956 - protein, 128 aa, Gossypium hirsutum
  Clone ID: LIB3165-020-P1-K1-D10.pep
KMEGVEHRVIKVNGINMHVAEKGEGPLILFIHGFPELWYSWRHQIASLSSKGYRAVAPDLRGYGDTDAPDLVTSYTCFHIVGDLVQLLNIISPNEHKVLVVGHDWGAAIAWYLCLFRPDKVKAVFNLS

SEQ ID NO: 64957 - protein, 106 aa, Gossypium hirsutum
  Clone ID: GOSHI-09MAY01-C7722_1.pep
TSFSKGNLSHPLASCLPAIAHVPRQHVLHSRVGSPSPLTPKWPPTSLTSSPTFFRFSATVYGGRRGGRRRSDDWTTAGVGPDIKGVERVFKPFFGRVGGRVGGRVG

SEQ ID NO: 64958 - protein, 77 aa, Gossypium hirsutum
  unsure (1)..(77): unsure at all Xaa locations
  Clone ID: LIB3120-045-P1-K1-F6.pep
INKKKKKKKKKKKTIKNKKKKKKKKKKKKNXIKTKKLKIKNNKKKKQKTNKKKTIKKVKEKKKKKRKKKKKKIKNTK

SEQ ID NO: 64959 - protein, 148 aa, Gossypium hirsutum
  unsure (1)..(148): unsure at all Xaa locations
  Clone ID: GOSHI-09MAY01-C7642_1.pep
PLLVICINLHSPLYSSTLVLAFLLLLLLQKLHPAIFPHSQNVLASICQVYNSEIKARISDCANNTYEVRDAKFKIWKPLLSTALAAAIVAFGSEYXLWREPNKFEAETRGEFRYXSAAQLGSADLKKAVHVNENFRRANFTSADMRES

SEQ ID NO: 64960 - protein, 100 aa, Gossypium hirsutum
  Clone ID: GOSHI-09MAY01-C7142_3.pep
MADTETFAFQAEINQLLSLIINTFYSNKEIFLRELISNASDALDKIRFESLTDKSKLDAQPELFIHIIPDKTNNTLSIIDSGVGMTKADLGNNLGTIARS

SEQ ID NO: 64961 - protein, 299 aa, Gossypium hirsutum
  unsure (1)..(299): unsure at all Xaa locations
  Clone ID: GOSHI-09MAY01-C7142_2.pep
MADTETFAFQAEINQLLSLIINTFYSNKEIFLRELISNASDALDKIRFESLTDKSKLDAQPELFIHIVPDKTNNTLSIIDSGIGMTKADLVNNLGTIARSGTKEFMEALAAGADVSMIGQFGVGFYSAYLVAERVVVTTKHNDDEQYVWESQAGGSXFTVTRDTSGENLGRGTKITLFLKEDQLEYLEERRLKDLIKKHSEFISYPISLWIEKTTEKEISDDEDEEDKKDEEGKVEDVDEEKEKEEKKKKKIKEVSHEWSLVNKQKPIWMRKPEEITKEEYAAFYKSLTNDWEEHLAVK

SEQ ID NO: 64962 - protein, 244 aa, Gossypium hirsutum
  unsure (1)..(244): unsure at all Xaa locations
  Clone ID: GOSHI-09MAY01-C7142_1.pep
MADTETFAFQAEINQLLSLIINTFYSNKEIFLRELISNASDALDKIRFESLTDKSKLDAQPELFIHIVPDKTNNTLSIIDSGIGMTKADLVNNLGTIARSGTKEFMEALAAGADVSMIGQFGVGFFPAYLVAEKVIVTAXHNDDEQYVWESQAGGSFTVARDTAGENLGRGSKTTLXVRQDQLEYLEERRLKNLILKPPAFISNPISLWIEQTAEKEISDXEDEEDKKDQEGTVSXVDEEKEKE

SEQ ID NO: 64963 - protein, 110 aa, Gossypium hirsutum
  unsure (1)..(110): unsure at all Xaa locations
  Clone ID: LIB3166-014-P1-K1-D9.pep
MVNGCTETFAFQADINHLVSLIINTIYSNKEIFIRELISSASDALDKIRFQSKTDKSKLDAQPELFIHIVPDKTNNTLSIIDSGIGMTNAYXVNNLGTIARFWTKEFMEA

SEQ ID NO: 64964 - protein, 50 aa, Gossypium hirsutum
  Clone ID: uC-gsronu33B146b11b1.pep
HASAHAYEADVVNNLGTGARSGTKEFMEALAAGADVSMIGQLGVDVYLLY

SEQ ID NO: 64965 - protein, 295 aa, Gossypium hirsutum
  Clone ID: GOSHI-09MAY01-C107159_1.pep
FHIDCGSSTPSTDSYNISWLPDKFFTGGSTSVVSEPLHFHLQHEKTLRYFPLSSGKKNCYNIPLPAGRYYIRTFTVYDNYDGKSHSPSFDASVEGTLVFSWRSPWPGALTRDGAYSDLFAFVKDGQLDFCFYSIATDPPVIASLEVVQIDPLSYNSAQTSDSYILVNYGRLSPGSSQWGPGFTSDPDAFGRSWQSDSDYRAGKSESAKVITTKEKLTGTDKAPNYFPMKLYQSAVTIEGRLEYELPVDAKLDYLVWFHFAEIDSTVKKAGERVFDVLVNDKNVSRVDILKEVGSF

SEQ ID NO: 64966 - protein, 173 aa, Gossypium hirsutum
  Clone ID: GOSHI-09MAY01-C7132_1.pep
MANAISISPYFRPSDTRSMGVLNVLGGRVLMENSLGKLRCGSSSPSQRSNMPHFRCSTNSHSVSPYQNKDPFLNMHPEVSMLRGEGNPIVTNPRKDSSSPESLGGMTGSSNYSEAKIKVIGVGGGGSNAVNRMIEIALKGVEFWIVNTDIQAMKLSPVFPEHRLQIGQELTRG

SEQ ID NO: 64967 - protein, 98 aa, Gossypium hirsutum
  Clone ID: GOSHI-09MAY01-C7082_5.pep
MFACTPCTIHKSPPSTRYNINEANKEDKASNTSINGLNKTSLTRFNNIKLKIYSDQMENPKSSFITIHHTNRTKTWFLLSIIFSRRLQIVVIKIDNWQ

SEQ ID NO: 64968 - protein, 78 aa, Gossypium hirsutum
  Clone ID: GOSHI-09MAY01-C7082_3.pep
MGGGNGQKSKMAREKNLEKQKAAAKGSQLESNKKAMSIQCKVCMQTFMCTTTEVKCREHAEAKHPKSDVYACFPHLKK

SEQ ID NO: 64969 - protein, 78 aa, Gossypium hirsutum
  Clone ID: GOSHI-09MAY01-C7082_1.pep
MGGGNAQKSKMAREKNLEKQKAAAKGSQLDSNKKAMTIQCKVCMQTFICTTTEVKCREHAEAKHPKSDLYTCFPHLKK

SEQ ID NO: 64970 - protein, 64 aa, Gossypium hirsutum
  Clone ID: uC-gsflmaxxa029h01b1.pep
GGGNAQKSKMARERNLEKQKAAAKGSQLDSNKKAMTIQVVSLLHLLGSTLCFFLLDLLAFFLIK

SEQ ID NO: 64971 - protein, 41 aa, Gossypium hirsutum
  Clone ID: LIB3148-047-Q1-K1-E11.pep
KQCKVCMQTFMCTTTEVKCREHAEAKHPKSDVYTCFPHLKK

SEQ ID NO: 64972 - protein, 338 aa, Gossypium hirsutum
  Clone ID: GOSHI-09MAY01-C7052_1.pep
MDRDWGSKPGSGGAASAQTEAMDRRERLRRLALETIDLAKDPYFMRNHLGSYECKLCLTLHNNEGNYLAHTQGKRHQTNLAKRAAREAKEAPAQPQPHKRKVSVRKTVKIGRPGYRVTKQYDPETKQRSLLFQIEYPEIEDNTKPRHRVMSSYEQRVQPFDRRYQYLLFAAEPYEIIAFKVPSTEIDKSTPKFFSHWDSDSKMFTLQVYFKTKPLEVNKPPPPPAVNGTAAPGAPPRPLPPPPHAPAPPPPPPPQGLPNPPRGPPPPAPGSLPPPPPPMGNGPRPMPPGGNPIAPPPPPGGSGTMGNFTPRPPTNPPPQGVPGHQMQGQGLLPPPLTS

SEQ ID NO: 64973 - protein, 291 aa, Gossypium hirsutum
  unsure (1)..(291): unsure at all Xaa locations
  Clone ID: GOSHI-09MAY01-C7042_1.pep
MRGHFFKLEYVKHRTSVSGAMIDSHVTAEYWKNXTRPPARPKIKMPETYVVHLGNSNELMQVAEDSVAKRVLREHVRESLGVRNDDLLFALINSVSRGKGQDLFLRAFYEALQLIKQKKMQVPPLHAVIVGSDMSAHTKLEMELRAYVTQKKIQDRVHFVNKTLTVAPYLAAVDVLVQNSQGRGECFGRITIEAMAFQLPVLXQGTAAGGTTEIVVNGTTGLLHPAGKEGVTTLAKHIVKLATHVERRLTIGKRGYERVKERFLEHHMAERIGEVLKEALRKSKIRSSKHL

SEQ ID NO: 64974 - protein, 123 aa, Gossypium hirsutum
  Clone ID: LIB3165-009-P1-K1-C9.pep
MRGHFFKLEYVKHRPSVAGAMIDSHVTAEYWKNRTQERLKIKMPETYVVHLGNSNELMQVAEDSVAKRVLREHVRESLGVRNDDLLFALINSVSRGKGQDLFLRAFYEALQLIKQKKMQVPPL

SEQ ID NO: 64975 - protein, 308 aa, Gossypium hirsutum
  unsure (1)..(308): unsure at all Xaa locations
  Clone ID: GOSHI-09MAY01-C107379_1.pep
QRPENITIYNFKXGVNIKYVAVGNEPFLKSYNGSFINTTVPALQNIQNALNDAGVGDTIKATVPLNADVYNSPESNPVPSAGRFRTDISGPMTQMVDFLAKNGAPFTVNIYPFLSLYGNDDFPFNYAFFDGGNPITDNGIKYTNVFDANFDTLVSALKAVGHGDMPIIVGEVGWPTDGDKNGNMANAQRFYNGLLPRLAANXGTPLRPGYIEVYLFGLIDEDAKSVAPGNFECHWGIFRYDGQPKFPLNLSGQNQNQFLIGAKDVKYLQQQWCMFNPNAKDIGKLTDNIKYACTFSDCTALGYGSSCN

SEQ ID NO: 64976 - protein, 127 aa, Gossypium hirsutum
  Clone ID: GOSHI-09MAY01-C7372_1.pep
MAATAAITTLPQFSGLRPKVSTAPVRSLAAVQPMRRKGKGALGARCDFIGSPTNLIMVTTTTLMLFAGRFGLAPSANRKATAGLKLEVRDSGLQTGDPAGFTLADTLACGVVGHIFGVGIVLGLKNI

SEQ ID NO: 64977 - protein, 97 aa, Gossypium hirsutum
  Clone ID: LIB3165-014-P1-K1-F2.pep
MAATAAITTLPQFSGLRPKVSTAPVRSLAAVQPMRRKGKGALGARCDFIGSPTNLIMVTTTTLMLFAGRFGLAPSANRKATAGLKLEVRDSGLQTGD

SEQ ID NO: 64978 - protein, 149 aa, Gossypium hirsutum
  Clone ID: GOSHI-09MAY01-C7302_3.pep
MASMLSSGTVLRPTPFLGQNRNANPLRDVSVGTAKYTMGNELWYGPDRVKYLGPFSAQIPSYLNGEFPGDYGWDTAGLSADPEAFARNRALEVIHGRWAMLGALGCITPEVLEKWLRVDFKEPYCGRVGGRVGGRVGGRVGSNLPYNSH

SEQ ID NO: 64979 - protein, 205 aa, Gossypium hirsutum
  unsure (1)..(205): unsure at all Xaa locations
  Clone ID: GOSHI-09MAY01-C7302_1.pep
MASMLSSGTVLRPTPFLGQTKNANPLRDVVSLGTPKYAMGNELWYGPDRVKYLGPFSAQTPSYLTGEFPGDYGWDTAGLSADPEAFARNRALEVIHGRWAMLGALGCITPEVLEKWLRVDFKEPVWFKAGAQIFSEGGLDYLGNPNLVHAQSILAVLGFQVVLMGLVEGFRINGLPGVGEGNDLYPGGQYFDPLXLADDPGTCAE

SEQ ID NO: 64980 - protein, 130 aa, Gossypium hirsutum
  Clone ID: LIB3584-029-P1-K1-D4.pep
MASMLSSGTVLRPTPFLGQNRNANPLRDVSVGTAKYTMGNELWYGPDRVKYLGPFSAQIPSYLNGEFPGDYGWDTAGLSADPEAFARNRALEVIHGRWAMLGALGCITPKVLEKWLRVDFQEPVWFKART

SEQ ID NO: 64981 - protein, 128 aa, Gossypium hirsutum
  unsure (1)..(128): unsure at all Xaa locations
  Clone ID: LIB3166-001-Q1-K1-F10.pep
MASMLSSGTVLRPTPFLGQTKNANPLRDVVSLGTPKYAMVSSLGFPFFYNFLLXGNELWYGPDRVKYLGPFSAQTPSYLTGEFPGDYGWDTAGLSADPEAFARNRALEVIHGRWAMLGALGCITPEVL

SEQ ID NO: 64982 - protein, 172 aa, Gossypium hirsutum
  Clone ID: GOSHI-09MAY01-C7322_1.pep
SSSMGAGRRILGGFNLAILMVMMLLSTNRHCAADAVKKNKSMSSRWCDDSSNKECLQLSDDIETMELLMDSEASKMVFEASAAINFASSKNPTTRALDPSQAACDRNTGKSCEPDSNPGTKVPPNCSLYNRAVATDLTTFSCYAGILCFNLSRYIYIYIYIYINKDDGETSL

SEQ ID NO: 64983 - protein, 97 aa, Gossypium hirsutum
  Clone ID: LIB3148-045-Q1-K1-B8.pep
WIQKRAGWYLKQVRQSTSPAVNVQLPEPLSLLQLPATVRLANVAFLIVIQAERNLQIVHYTPEVANDLLLFLAMLVYCVCVSFSIIMNNGKIIWLNH

SEQ ID NO: 64984 - protein, 125 aa, Gossypium hirsutum
  Clone ID: GOSHI-09MAY01-C7282_4.pep
IPHPVGQSFTPKKQSSIGMAVYCNSAPFSCKASRNRDPTPLSALLPTRLFSLLQPPISFHPDRLKLSTCRWDKVASAVVSEESAVGSSSSGTDVFNLTYLEGNSRLGDISGVRELRLNLLLCSAY

SEQ ID NO: 64985 - protein, 148 aa, Gossypium hirsutum
  Clone ID: GOSHI-09MAY01-C7282_3.pep
VLRFSGGKTFASETMAPFSLRSRLQASALSKRRLKSKAKHGRKGMKNMEESFKRLKSEMEEISEEQKNIREGQRQVKEKFGIIESECEELKRETRLIIQQSARTQVKLALMFRILKAREAGELNTAATLTEMLREIVGREREESKADI

SEQ ID NO: 64986 - protein, 213 aa, Gossypium hirsutum
  Clone ID: GOSHI-09MAY01-C7282_2.pep
MGMAVHCNSAPLSCKTWRNRGPTLLPARLCSLPQTPFSFRSDALKLSTCRWDKVASAVASEESAVGSSSSGTDVFNLTYLEGNSWLWDISGVRVLVDPILVGNLDFGIPWLYDAAKKFLKNFELTDLPQVDCLLITQSLDDHCHLKTLKPLSEMSPNLRVIATPNAKPLLDPVFRNVTYLEPGQESEVEAENGSGVRIRPTAGPVLGPPWQRP

SEQ ID NO: 64987 - protein, 149 aa, Gossypium hirsutum
  Clone ID: GOSHI-09MAY01-C7282_1.pep
PRVRPPGGKTFASETMAPFSLRSRLQASALSKRRLKSKAKHGRKGMKNMAESFKRLKSEMEEISEEQKNIREGQRQVKEKFGIIESECEELKRETRLIIQQSARTQVKLALMFRILKAREAGELNTAATLTEMLREIVGREREESKADI

SEQ ID NO: 64988 - protein, 132 aa, Gossypium hirsutum
  unsure (1)..(132): unsure at all Xaa locations
  Clone ID: LIB3829-022-Q6-K6-G2.pep
AYHSHSDVSFAFLPLSSYYFTKHFSESGXGIQLAGFPCFQYAEHKSKFNLSSRTLLDYEPSFPLQFLALGFDDSAPPPNLPLPFPDKNSSSLISSISDFNILKLSAMFFIPFLPCLALDETLLLSAEPQDGT

SEQ ID NO: 64989 - protein, 71 aa, Gossypium hirsutum
  Clone ID: uC-gsflnu33B094h09b1.pep
RHASAHASGKTVASETMAPFSIRSRLQASALSKRRLKSKAKHVIIIFFGWSFCKFSVPYLANLQLEWGTRE

SEQ ID NO: 64990 - protein, 300 aa, Gossypium hirsutum
  Clone ID: GOSHI-09MAY01-C7252_1.pep
MAVGLSAAVTPKPFRSFPLLKPAPIFHPLLHLPKITTYGARRKKSFAVCFVVDEEQKQSAPTQIVEQGFEEVRDRQILIPARLSEKLARKRSERFTYLVAAVMSSFGITSMSVMAVYYRFWWQMEGGEVPLSEMFGTFTLAVGAAVGMEFWARWAHRALWHASLWHMHESHHRPREGPFELNDRLASAHAGPAIALLSYGFFNKGLVPGLCFGAGLGITMFGMAYMFVHDGLVHKRFPVGPIANVPYFRKVAAAHQLHHSEKFNGVPYGLFLGPKEVEDVGGHEELEKEINRRIKSSKGS

SEQ ID NO: 64991 - protein, 54 aa, Gossypium hirsutum
  Clone ID: GOSHI-09MAY01-C7242_1.pep
LCYLRYFFRAIVLFKNMDDIEYNINEMELLIKVLYLYRKVGYSYIINLSNNNQI

SEQ ID NO: 64992 - protein, 163 aa, Gossypium hirsutum
  Clone ID: GOSHI-09MAY01-C7272_1.pep
TRPHASGTYKATMANFQMKKVQQCTHGKLWNSSSEALTLTDKKVWQGSHYADFPEIIEDGDASEFTHESVTDDADIHGSVAGLVYRRRDGTKWIVAWSNPQAENSKVYTDIQRQPVHWGQIKTNLEKRGKPKFKVTKFGYNASIEIDPVSRSPTMKASFELEA

SEQ ID NO: 64993 - protein, 226 aa, Gossypium hirsutum
  Clone ID: GOSHI-09MAY01-C7262_1.pep
MEGEAGSYEDVKPNVVAKQSNGDVVGDNGVGNLGSVEAPDFLSKKNFQNCSVATPASGLNSTGPAPSQLTIFYDGHVCVFDAIPVEKVREIMLIAATGAANSVDMKKVATDCATTSPVLTRSPSLQSTATATALASPQAQVYPTNRTPFCKLKELPIARRHSLQRFFEKRRDRLVNRNPYPNPSTPKSFDDTKANLSAATSSESGCFGKSPVAQEEFHPKAPAHVA

SEQ ID NO: 64994 - protein, 115 aa, Gossypium hirsutum
  Clone ID: LIB3165-012-P1-K1-E5.pep
MSGSKDCGGHHKSPRKNFRRVISCILILLLLVLITILLIWAILRPSKPNFTLLDTTVYAFNATTFNFLTSNFQITVRSENPNDDIGIYYDRLDVYATYRNQEITLRTRFPPTYQG

SEQ ID NO: 64995 - protein, 115 aa, Gossypium hirsutum
  Clone ID: LIB3165-050-Q1-K1-G10.pep
QTLTHTRLLFLLGRLQILGWTHTKTPRKNFRRVISCILILLLLVLITILLIWAILRPSKPNFTLLDTTVYAFNAATFNLLTSNSQITVPSKNPNQDIRFYFRPVHRFPSYPNPKN

SEQ ID NO: 64996 - protein, 145 aa, Gossypium hirsutum
  Clone ID: GOSHI-09MAY01-C7232_1.pep
RWLSQTQSRQLALSVSVLLINSIPHRHAFKSLKPPLFWPWQKVKMGPLTVSPMGFGTWAWGNQLLWGYQPSMDSQLQQVFNLAVENGINLFDTADSYGTGRLNGQSEKLLGKFIREFQGEKRIRDEIVIATKFAAYPWRLTSGQF

SEQ ID NO: 64997 - protein, 76 aa, Gossypium hirsutum
  Clone ID: LIB3825-028-Q6-N6-A9.pep
FLCVKANSWGCSGKQLLVYLLVSSASVAVPTIGQVERGTALRKGTIVSTSMAFATFLVMAICAILSGYKLCKRIGW

SEQ ID NO: 64998 - protein, 132 aa, Gossypium hirsutum
  Clone ID: LIB3825-027-Q6-N6-C3.pep
ALTLVTPSTNNKHHPSPSFTDYSELIYCFIVAIIALVYTAFQLFKGISDIAHRGILISDLTSDYLSFVLDQLLVYLLVSSASVAVPTIGQVERGTALRKGTIVSTSMAFATFLVMAICAILSGYKLCKRIGW

SEQ ID NO: 64999 - protein, 214 aa, Gossypium hirsutum
  Clone ID: GOSHI-09MAY01-C100709_1.pep
TEHQGSNLTPISTPKDTPQPAALRRNFSRSDSTASEGAQKERVVPPSQNAPTTSLRIDHFLRPFTLKAVQELLGKTGTVTSFWMDHIKTHCYATYSSVEEAIETRNAVYNLQWPPNGGRLLVADFVDPQEVKTRLDAPPQTPTTPGTSGSTAPQAQPASQPQPSPRQQVSRQQLPPPSALPPPPPLPNPPPVRERLPLPPPPAEKVDPPIVTLD

SEQ ID NO: 65000 - protein, 155 aa, Gossypium hirsutum
  unsure (1)..(155): unsure at all Xaa locations
  Clone ID: AI055152.1.pep
LHQKGFYITFVNTEFNHKRILKSRGPDALNGLPSFRFETIPDGLPPTDVDATQDIPSLCNSTSKTCLPHFKQLLRKLNDSASTSKVPPVSCIVSDGXVMSFTLDAAKELXVPEVLFWTTSACGFLGYVHYHQLMEKGYTPLXDXSYLTMGTWIPS

SEQ ID NO: 65001 - protein, 192 aa, Gossypium hirsutum
  Clone ID: LIB3825-024-Q6-K6-G12.pep
GNSTSKTCLPHFKQLLRKLNDSASTSKVPPVSCIVSDGVMSFTLDAAKELGVPEVLFWTRGACGFLGYVHYHQLMEKGYTPLKDESYLTNGYLDTVINWIPTMEGIRLRDLPSFLRTTDSNFVMLDFIFSETKRAQKASAIILNTFDDLEHESLDALNSMLPPVYSVGPLHLVLNHNVDNSELKQIGSNLWK

SEQ ID NO: 65002 - protein, 131 aa, Gossypium hirsutum
  Clone ID: GOSHI-09MAY01-C100659_1.pep
RTSLVDNQAEYEDVAAANDTEFLNVDDDELCEDDDDGMPCDESRLLENSGWSSRTRAVAKYLQNLLEDEALHGRKVLYMDSLLARKTRKEASRMFFETLVLKTRDYIHVEQVKPFDNICIKAGAKLVKSDF

SEQ ID NO: 65003 - protein, 75 aa, Gossypium hirsutum
  Clone ID: GOSHI-09MAY01-C100349_1.pep
RTRGRTRGSKPEKPERATYAAAPVMKKKTAKQRRAAQTIEDEEELTREYRLLKKLKKGAIDETEFAKLTGTEDLV

SEQ ID NO: 65004 - protein, 115 aa, Gossypium hirsutum
  Clone ID: GOSHI-09MAY01-C100289_1.pep
SKPPSLDAHLLPVDLPEIISLTGSQGIEKIAWDASGERLAVSYKGGDDIYKGLIAIYDTRRNPLISASLIGFIRGPGDNPKPIAFSFHDKFKQGPLLSVCWSSGFCCTYPLLFRS

SEQ ID NO: 65005 - protein, 138 aa, Gossypium hirsutum
  unsure (1)..(138): unsure at all Xaa locations
  Clone ID: GOSHI-09MAY01-C101969_1.pep
QKTTEATIRKLYGLELTDRNXTFALXCGTRSSPAVRIYTGDGVSTELEKSKQEYLQASIMVSNTKKIAFPELLLNNMFDFAVDMNSLVQWVCQQLPTSGSLRKSMVDCYRNHNAGKTSSPISVEKIPYDFEFQYLLAM

SEQ ID NO: 65006 - protein, 244 aa, Gossypium hirsutum
  unsure (1)..(244): unsure at all Xaa locations
  Clone ID: GOSHI-09MAY01-C1942_3.pep
MDEEVKAVVPESLLKKQKRAEEWELAKKQELEVAKKKKVENRKLIYTRAKQYAKEYEAQEKELIQLKREAKLKGGFYVDPEAKLLFIIRIRGINAMHPRTRKILQLLRLRQIFNGVFLKVNKATVNMLHLVEPYVTYGYPNLKSVRELIYKRGFGKLNKQRAALTDNAIVEQALGKYGIICVEDLIHEIMTVGPHFKEANNFLWPFKLKAPLGGLKKXKRNHYVEGGDAGNRENYINELIRRMN

SEQ ID NO: 65007 - protein, 243 aa, Gossypium hirsutum
  Clone ID: GOSHI-09MAY01-C1942_2.pep
MGEEAKAVVPESLLKKNKRNEEWELAKKQELEVAKKKKVENRKLIFSRAKQYAKEYEAQEKELIQLKREAKLKGGFYVDPEAKLLFIIRIRGINAMHPRTRKILQLLRLRQIFNGVFLKVNKATMNMLHLVEPYVTYGYPNLKSVRELIYKRGFGKLNKQRVALTDNAIVEQALGKFGIICVEDLIHEIMTVGPHFKEANNFLWPFKLKAPLGGLKKKRNHYVEGGDAGNRENYINELIRRMN

SEQ ID NO: 65008 - protein, 243 aa, Gossypium hirsutum
  Clone ID: GOSHI-09MAY01-C1942_1.pep
MGEEVKALVPESLLKKNKRNEEWELAKKQELEAAKKKKVENRKLIFNRAKQYAKEYEAQEKELIQLKREAKLKGGFYVDPEAKLLFIVRIRGINAMHPRTRKILQLLRLRQIFNGVFLKVNKATMNMLHLVEPYVTYGYPNLKSVRELIYKRGFGKLNKQRVALTDNAIVEQALGKFGIICVEDLIHEIMTVGPHFKEANNFLWPFKLKAPLGGLKKKRNHYVEGGDAGNRENYINELIRRMN

SEQ ID NO: 65009 - protein, 116 aa, Gossypium hirsutum
  unsure (1)..(116): unsure at all Xaa locations
  Clone ID: LIB3166-023-P1-K1-C5.pep
MVEEGKAVVPESLLKKNKRNEEWELAKKQELEVPKKKKVENRKLIFSRAKQYAKEYEAXEKELIQLKREAKLKGGFYVDPEAKLLFIIRIRGINAMHPRTRKILQLLRLRQIFNGV

SEQ ID NO: 65010 - protein, 109 aa, Gossypium hirsutum
  Clone ID: LIB3831-002-Q1-K6-B1.pep
MGEEVKAVIPESLLKKNKRNEEWELAKKQELEAAKKKKVENRKLIFNRAKQYAKEYEAQEKELIRLKREAKLKGGFYVDPEAKLLFIVRIRGINAMHPRTRKDLQLLRL

SEQ ID NO: 65011 - protein, 49 aa, Gossypium hirsutum
  unsure (1)..(49): unsure at all Xaa locations
  Clone ID: uC-gsronu33B079c01b1.pep
EEELIQLKRXAKLNGGCYGDPEDKLLFIVRIRGINAMHPRTRKILPVLR

SEQ ID NO: 65012 - protein, 59 aa, Gossypium hirsutum
  Clone ID: LIB3148-015-Q1-K1-F6.pep
LIHEIMTVGPHFKEANNFLWPFKLKAPLGGLKKKRNHYVEGGDAGNRENYINELIRRMN

SEQ ID NO: 65013 - protein, 334 aa, Gossypium hirsutum
  Clone ID: GOSHI-09MAY01-C1972_1.pep
MGWKGILGFDYGIVLAPMGHDIAGPELVAAVANAGGLALLHAPDWDSPEQLKELIRKTRELTDKPFGVGVLLPFPHKENIKAILEEKVAVLQVAWGECSKDLVLEAHNAGVMVVPQVGSLEEAKKVIDAGVDAIIVQGYEAGGHVIGQDGLISLLPRVVDAVAGCDIPVIAAGGIVDARGYVAALALGAKGICMGTRFLATRESYAHPTYKQKLIEHDETEYTDIFGRALWPGAPQRVLRTPFVCDWKSLPAHENESNQPAIGRSLIHGMETEIQRFSASDPNPTTTGEIENMALYAGQSVGLIKEILPAGEVVKRLVEGAQHLIRQRFNEDSV

SEQ ID NO: 65014 - protein, 196 aa, Gossypium hirsutum
  Clone ID: LIB3543-053-Q1-K6-B12.pep
MGWKGILGFDYGIVLAPMGHDIAGPELVAAVANAGALALVDAPEWDSPEQLKELIRKTRELTDKPFGVGVLLPFPHKENIKAILEEKVAVLQVAWGECSKELVLEAHNAGVMVVPQVGSLEEAKKVIDAGVDAIIVQGHEAGGHVLGQDGLISLLPRVVDAVADHDIPVIAAGGIVDARGYVAALALGAKGICMGT

SEQ ID NO: 65015 - protein, 73 aa, Gossypium hirsutum
  Clone ID: LIB3543-009-Q1-K6-A4.pep
GTHKQGYEFWKVRSSGILIIQLKPCNVIELKKCSNLSKYVPSSFMALNDNRIYTRINYFFCFLKTPNLQCSYI

SEQ ID NO: 65016 - protein, 247 aa, Gossypium hirsutum
  Clone ID: GOSHI-09MAY01-C101939_1.pep
LTEQTPKQNPNSFPTSLLLSSAFIQTPFAPPILKPSKPILVPENLIRDLHQSIVSTADNFLNSLQQNPVFKNIISLSTEFQSFFNEVKTCRNQYVKIMNYSPVSNHNFAAVLPGDSVAGVVVANGILNFLNIYNTLLIVRLVLTWFPNSPPAIVSPLSTICDPYLNIFRGIIPPLGGTLDLSPILAFLVLNAFTSTAAALPVELPVAGQPLRRASSPSFTALTSSQKKWMRRLNESRSKSSKSNATI

SEQ ID NO: 65017 - protein, 166 aa, Gossypium hirsutum
  unsure (1)..(166): unsure at all Xaa locations
  Clone ID: GOSHI-09MAY01-C101909_1.pep
MAAEVILKLTICFLALMVGVQGGDPYLFFTWNVTYGTISPLGVPQQGILINGQFPGPEINATSNNNIVVNVFNNLDEPFLLTWSGVQHRXKNSWQDGVLGTNCPIAPGTNFTYQFQXKDQIGSYIYYPSTALHRAAGGFGGLRVHSRLLIPVPYPDPADEYTVLTG

SEQ ID NO: 65018 - protein, 322 aa, Gossypium hirsutum
  Clone ID: GOSHI-09MAY01-C1892_1.pep
MLPFTCILFMCILASVSRATFNLSLPHQHPHPESGVLDVQWSLNASLSRRQTLSETPKDQCRTGNPIDDCWRCDPNWFNNRQRLADCSIGFARGTLGGKGGRIYTVTDSSPPRPVNPKPGTLRHAVIQDEPLWIVFSTNMVIELKHELIFNSFKTIDGRGVNVHITGNGCLTLQYVSHIIIHNIHVHHCKPSGNTDIASSPTHVGRRGRSDGDGISIFGSQKIWVDHCSLSYCTDGLVDAVMGSTGITISNSYFAHHDEVMLLGHDDRYLPDSGMQVTIAFNVFGVGLVQRMPRCRRGYIHVVNNDFTSWQMYAIGGSGNPT

SEQ ID NO: 65019 - protein, 63 aa, Gossypium hirsutum
  Clone ID: GOSHI-09MAY01-C1862_5.pep
VLCFVMVYRHFDLLIHPKVHRSKPESPHQVLLPVGIPRILPAASSEKVLTIKLPGPFSYRMIG

SEQ ID NO: 65020 - protein, 156 aa, Gossypium hirsutum
  Clone ID: GOSHI-09MAY01-C1862_2.pep
TIRECNRQLIVNTFPEEAAGKILGIPLAREPHEDFQAWSGEPLGEFSVRSAYKLLQSLDPRAYALQTNYKEFYKKLWSLDLPHKILITIWKISWNYLPTRVNILCRKLTNSTLCPRCGEELETMNHLFRHCPRPLFPKLNLSANYVVARYGPSGVT

SEQ ID NO: 65021 - protein, 116 aa, Gossypium hirsutum
  Clone ID: GOSHI-09MAY01-C1862_1.pep
PKTVIVARNSEGFVLLSCTKLHFGVPSAFAAKALACRTATRIGFDMQGKEIIIGGDSLSIIKRCNAKGEDKSKIGAFIHDIHQLKSRSGNLKFEYTPRSANSLAHILAKESLRRQE

SEQ ID NO: 65022 - protein, 92 aa, Gossypium hirsutum
  Clone ID: LIB3582-010-P1-K1-F8.pep
LFFFFFFFFFIFFRIVSRNASFYSGEVNSQDFKDAELINNYVREWNRELIVNNFSEEAAGKILGIPLAKEPHEDFQAWSDEPLGEFSVRSAT

SEQ ID NO: 65023 - protein, 112 aa, Gossypium hirsutum
  unsure (1)..(112): unsure at all Xaa locations
  Clone ID: LIB3828-019-Q1-K6-E3.pep
KKXIFFFFFFFFFFFFFFFWLSALFFFFFFFFFFFFFFFFLEMLVFILVRSIHKIFKVAELINNNVREWNRELIVNTFPEEAAGKILGIPLAREPHEDFQAWSGELRVNFGS

SEQ ID NO: 65024 - protein, 72 aa, Gossypium hirsutum
  Clone ID: LIB3197-049-Q1-M1-G12.pep
KNWKPNIVKEVKKWKPPPGQLIKINFDGAFDECNEQSASGIVARNSEEFVLLSCTKLHFGMPSAFAAEALAC

SEQ ID NO: 65025 - protein, 79 aa, Gossypium hirsutum
  unsure (1)..(79): unsure at all Xaa locations
  Clone ID: LIB3145-013-Q1-K1-D11.pep
EAFRNASFYSGEVNSQDFKDAELINNNVREWNRELIVNNFSEEAAGKILGIPLAKEPHEDFQAWSDEPLGEFSAYAXST

SEQ ID NO: 65026 - protein, 82 aa, Gossypium hirsutum
  Clone ID: LIB3145-020-Q1-K1-D12.pep
NIFFFFIFFLYILFFNFFFFYEWNRELIVNNFSEEAAGKILGIPLAKEPHEDFQAWSDEPLGQFSVRSAYKLLQSLDPRAYA

SEQ ID NO: 65027 - protein, 102 aa, Gossypium hirsutum
  unsure (1)..(102): unsure at all Xaa locations
  Clone ID: GOSHI-09MAY01-C1802_2.pep
MSSFLQSFLDPKKSWLAALHMKSLSKRLRKYGLRYDDLYDRYYDLDIKEALNRLPREIVNARNQRLKRSMDLSMKHEYLPENLQQMQTPFRSXYLQDMLCSW

SEQ ID NO: 65028 - protein, 122 aa, Gossypium hirsutum
  Clone ID: GOSHI-09MAY01-C1802_1.pep
MSSFLQSLLDPKKSWLASLHMKALTTRLRKYGLRYDDLYDPYYDLDIKEALNRLPREIVDARNQRLKRAMDLSMKHEYLPEDLQKMQTPFRSYLQDMLALVKKERAEREALGALPLYQRTIP

SEQ ID NO: 65029 - protein, 90 aa, Gossypium hirsutum
  Clone ID: LIB3146-053-Q1-K1-B3.pep
MSSFLQSLLDPKKSWLASLHMKALTTRLRKYGLRYDDLYDPYYDLDIKEALNRLPREIVDARNQRLKRAMDLSMKHEYLPKDLQKMQTPF

SEQ ID NO: 65030 - protein, 56 aa, Gossypium hirsutum
  Clone ID: LIB3584-002-P1-K1-F8.pep
IGAREIVDARTTLSGNDLHEHDIPEILKCNHLDYSNMLVWKRRATELGSLLVYEPS

SEQ ID NO: 65031 - protein, 154 aa, Gossypium hirsutum
  unsure (1)..(154): unsure at all Xaa locations
  Clone ID: GOSHI-09MAY01-C101589_1.pep
MESLLYKNLKVKCIARGSGCNSMEILSSDGNQKKGEAFYYDTPFSEETGIWVPVSVPPVSENXHEEWDRGLCLNGGYFPDDGVRSNQFIEESXDLTMWDVLSEMLIAARGKVSSIASGDVQRFGITWLSSPLLEQSWXEMAQTLAEAYFCNINE

SEQ ID NO: 65032 - protein, 203 aa, Gossypium hirsutum
  unsure (1)..(203): unsure at all Xaa locations
  Clone ID: GOSHI-09MAY01-C1512_4.pep
FLKHSSIFSSLLRPDRSIFLLRSLFQELANTQEPLVEETNKNQEVVLALYEALNTRDVETVHKILAPDLEWWFHGPPTHQFLMRLLTGASSYDSFRFEVDPLSVTTFGPTVIVEGCDHSRSISWVHAWTVTDGIITQVREYLNTSLTVTRLGNSTQSSLSDYNPSSSSSSSTAASSSVHCPSVWESXFSNRVGKSVPGLVLAI

SEQ ID NO: 65033 - protein, 177 aa, Gossypium hirsutum
  Clone ID: GOSHI-09MAY01-C1512_3.pep
IDEISCSNRSQIMSKSRVYADVNVLRPKEYWDYESLVVQWGDQDDYEVVRKVGRGKYSEVFEGINVNNNERCIIKILKPVKKKKIKREIKILQNLCGGPNIVKLLDVVRDHHSKTPSLIFEHVNSTDFKVLYPTLTDYDIRYYIYELLKALDYLGALPFRLGEQLFHRVGKSVPGLV

SEQ ID NO: 65034 - protein, 113 aa, Gossypium hirsutum
  Clone ID: GOSHI-09MAY01-C1512_2.pep
IFRKEPFFYGHDNYDQLVKIAKVLGTDELNAYLNKYHLELDPQLDALVGRHSRKPWSKFINADNQHLVSPEAIDFLDKLLRYDHQDRLTAREAMAHPYFSQVRAAESSRMRTQ

SEQ ID NO: 65035 - protein, 382 aa, Gossypium hirsutum
  Clone ID: GOSHI-09MAY01-C1512_1.pep
MNETRCANPPLLLCLLLICATVASRPPLAHAGAGYSKIDEISCPSRRRIMSKSRVYTDVNVLRPKEYWDYESLAVQWGDQDDYEVVRKVGRGKYSEVFEGINVNNNERCIIKILKPVKKKKIKREIKILQNLCGGPNIVKLLDVVRDQHSKTPSLIFEYVNSTDFKVLYPTLTDYDIRYYIYELLKALDYCHSQGIMHRDVKPHNVMIDHELRKLRLIDWGLAEFYHPGKEYNVRVASRYFKGPELLVDLQDYDYSLDMWSLGCMFAGMIFRKEPFFYGHDNHDQLVKIAKVLGTDELNAYLNKYHLELDPQLDALVGRHSRKPWSKFINADNQHLVSPEAIDFLDKLLRYDHQDRLTAREAMAHPYFAQVRAAESSRMRTQ

SEQ ID NO: 65036 - protein, 76 aa, Gossypium hirsutum
  Clone ID: LIB3146-001-P1-K2-G11.pep
PTRPPTRPPTLSPTRPSTRPATRSGPSLLCTSQGSREQQDADSVTQFPWEDFICKSEPDSSGVRDLMCCLMFSKIL

SEQ ID NO: 65037 - protein, 173 aa, Gossypium hirsutum
  Clone ID: GOSHI-09MAY01-C1502_1.pep
PRVRFILDNSMQLGPGGSTAVTAIVVDGKDLWVANIGDSRAVVCERGSANQITVDHEPHAERRRIEKQGGFVTTLPGDVPRVNGQLAVARAFGDQSLKAHLSSEPDVRHVPIDSTIDFVILASDGLWKVMKNEEAVNLVKSVKDPQAAAKLLTTEALARKSKDDISCIVIRFG

SEQ ID NO: 65038 - protein, 203 aa, Gossypium hirsutum
  unsure (1)..(203): unsure at all Xaa locations
  Clone ID: LIB3825-034-Q6-K6-D6.pep
VVLIHYPXTHRXPTIVTVNCPDKPGLGCDICRTLLEFGLSITRADFSTDGRWCYMVFWLVPNVSNSCEIDWESLKNRLVSMCPSCLVPFFSFNYQQGGDGNGSTTHPLIYLLKLCCLDRKGLLHDVTRILSELQFTIQRVKVMTTPDERVMYLVFITDGMELLHTKERRDDTREHLISVLKNYCISCELQLAGPEYEKSEALP

SEQ ID NO: 65039 - protein, 136 aa, Gossypium hirsutum
  Clone ID: uC-gsflmaxxa058a09b1.pep
SSRPIDSAGEGPLNYQPDVGIPNDDVVLIQLPKDPSEPTIVTVNCPDKPGLGCDICRTLLEFGLSITRADFSTDGRWCYMVFWLVPNVSNSCEIDWESLKNRLVSMCPSCLGPFFSFNYQQGGDGNGSTTHPLIIC

SEQ ID NO: 65040 - protein, 73 aa, Gossypium hirsutum
  Clone ID: GOSHI-09MAY01-C1522_1.pep
LISPRSFPTFTCLQNAFKGVFDFVWLYHINIILNVLPLTKVVLEMSIMKDVIFGREWYPWKGESNIVVHDMML

SEQ ID NO: 65041 - protein, 105 aa, Gossypium hirsutum
  Clone ID: GOSHI-09MAY01-C101489_1.pep
KETENREKKKRWFNLFESLFCFRLTGVRKKIQGSDLGLYSRFEQLSILLFLFVSVVCLCLASWLLRVHLSLQVAVVEAAEVSDAVAEACVGGVADEEATHGSLRR

SEQ ID NO: 65042 - protein, 120 aa, Gossypium hirsutum
  unsure (1)..(120): unsure at all Xaa locations
  Clone ID: GOSHI-09MAY01-C1452_3.pep
TNLARSGVLKVVYMILMVCMTMMSAPKAAKAAITCIDVVNHLIPCLSYVQNGCTPAVACCIGVKALYGEVQPASGRQNGCNRIKPAVNGXIPYTTNNPNLAAGLPAKCGLQLPYSISPST

SEQ ID NO: 65043 - protein, 123 aa, Gossypium hirsutum
  Clone ID: GOSHI-09MAY01-C1452_1.pep
MASSGVLKLVSMILMVCMTMMSAPKAAKAAITCSDVVNHLIPCLSYVQNGGTPAAACCSGVKALYGEVQTSPDRQNVCKCIKSAVNGIPYTSNNLNLAAGLPAKCGLQLPYSISPSTDCNKVQ

SEQ ID NO: 65044 - protein, 127 aa, Gossypium hirsutum
  Clone ID: LIB3584-005-P1-K1-E12.pep
MGSSGVLKLVSMILMVCMTMMSAPKAAKAAITCSDVVNHLIPCLSYVQRRWAPAAACCSGVKALYGEVQTSPDRQNVCKCIKSAVNGIPYTSNNLNLAAGLPAKCGLQLPYSISPSTDCNKVQCGFC

SEQ ID NO: 65045 - protein, 69 aa, Gossypium hirsutum
  Clone ID: LIB3585-003-P1-K1-C7.pep
PTRPPTRPPTRPPTRPAVLSNCISYVICIMCRNLYLLVMLLRFIRVCNDNSFPFSIYRKAHLEMLFAFG

SEQ ID NO: 65046 - protein, 78 aa, Gossypium hirsutum
  Clone ID: LIB3189-021-P1-K1-B4.pep
RRVLLPHYSIINLVNNRFVRRTSTGSSGSPRHSPYQRMPAQQTPQILFVQHLYLCETTSSDSVTLNMICKTKPSIRDM

SEQ ID NO: 65047 - protein, 163 aa, Gossypium hirsutum
  Clone ID: LIB3585-024-P1-K1-D7.pep
KRNLTSYRCCSRSLPLTPRSVVLYLRRRRPFPLPRHLSPAAFASPPHLWLCPSVGLASPPHLCLVLCQFVGRHRPSTFVLSSKMASLLKASSNVFWSEKLPFLSRSKTRQGVVPKKVTFRSVPVALSLSTSTGTVEHDPISNSPDIAIPIMVNGCTGKMGKSV

SEQ ID NO: 65048 - protein, 88 aa, Gossypium hirsutum
  Clone ID: uC-gsflnu33B099g10b1.pep
SPTRPENISNLLLLLSRALPPSPSAIPPASPSLSGGLRFASSSLALSVRRPCLASSSLPRSLSVCWFVFSRLPSVLSFILWLPPFRAP

SEQ ID NO: 65049 - protein, 127 aa, Gossypium hirsutum
  Clone ID: GOSHI-09MAY01-C1412_1.pep
GRVGASPAYEYLDTKFGIHGSALKVTNIAFRILARGSYLTISTLVSAMLPFLGDFESLTGALSTFPLTFILANHMFLMAKKNKLSSLQQSWHWLNVGFFALMSVAATVAGIRLIIVDSKEYHIFADV

SEQ ID NO: 65050 - protein, 188 aa, Gossypium hirsutum
  Clone ID: LIB3543-044-Q6-K6-A5.pep
MASLTPISHSHSHSLLKRPNVRPPPPPSFFSSFILKDFPYSKTLSLKLPRMLTRNVVVSATTAEKPRKRYPGEAKGFVEEMRFVAMKLHTKEQAKEGEKEVKQPEERPVQRWEPSVDGYLKFLVDSKLVYDTLEGIIDKAPFPSCGYPFSIFIESEFWLLHMFVFGFLISLDHSCACWTVFILIVLSV

SEQ ID NO: 65051 - protein, 187 aa, Gossypium hirsutum
  Clone ID: LIB3585-024-P1-K1-A10.pep
MASLTPISHSHSHSLLKRPNVRPPPPPSFFSSFILKDFPYSKTLSLKLPRMLTRNVVVSATTAEKPRKRYPGEAKGFVEEMRFVAMKLHTKEQAKEGEKEVKQPEERPVQRWEPSVDGYLKFLVDSKLVYDTLEGIIDKAPFPSYAEFRDTGLERSEKLAKDLQWFKEQGYTIPKPSSPGVTYAEYL

SEQ ID NO: 65052 - protein, 63 aa, Gossypium hirsutum
  Clone ID: GOSHI-09MAY01-C101769_1.pep
PRVRPRVRKKKPNTSPIHSTKPKSLIRTPLRFSSRRKVSYNGQSRSYSTIGPRVSLTSLRIVT

SEQ ID NO: 65053 - protein, 499 aa, Gossypium hirsutum
  Clone ID: GOSHI-09MAY01-C1752_1.pep
KTRQKPQERMNVLSIVLRTSNYGAEPMLKSCGVNINSNFTQVDGRILPAPRLRVGNGEDFFPRNGRWNFNNKKLVEPSRIERWAVVNFSAPRCDPNNIARDLIRCGEMKGIRIDPPFDIFNEMNQNRRLSPVVRVEKMFEQIQSKLPGAPQFLLCLLPDRKNSDLYGPWKRKNLSEYGIVTQCMAPARVNDQYLTNLLLKINAKLGGLNSMLTIEQTPSIPMISKVPTIILGMDVSHGSPGQSDVPSIAAVVSSRQWPLISRYRASVRTQSPKLEMIDSLFKPVSDKGDEGIMREALLDFYTSSGKRKPDQIIIFRDGVSESQFNQVLNKELDQVIEACKFLDENWNPKFVVIVAQKNHHTKFFQQGSPDNVLPGTVIDNKVCHPKNNDFYLCAHAGMIGTTRPTHYHVLLDQVGFSADDLQELVHSLSYVYQRSTTAISVVAPICYAHLAASQLGQFMKFEDASETSSSHGGVTAPGAISVPQLPRLKDNVSSSMFFC

SEQ ID NO: 65054 - protein, 155 aa, Gossypium hirsutum
  unsure (1)..(155): unsure at all Xaa locations
  Clone ID: LIB3166-015-P1-K1-A2.pep
RTGRPAQPHPYDHALYGPCKRXILSEYGIVAQGMSPARVNDQYLTNLLLKINAKLGGLNSMLTIEQTPSIPMISKVPTIILGMDVSHGSPGQSDVPSIAAVVSSRQWPLISRYRASVRTQSPKLEMIDSLFKPVSDKGDEGIMREALLDFYTSSG

SEQ ID NO: 65055 - protein, 73 aa, Gossypium hirsutum
  Clone ID: GOSHI-09MAY01-C1712_1.pep
GDIIEDRTDRTAQQKSSPNGMWNATCTVALHSARVVWTLRATGPLDWAVPYGPFALFPSFLVTSRGSARQAMN

SEQ ID NO: 65056 - protein, 145 aa, Gossypium hirsutum
  unsure (1)..(145): unsure at all Xaa locations
  Clone ID: LIB3585-050-P1-K1-H10.pep
HASAHASVYITSRPSSRYELTFPGRACHIFSILSPNLNSLHCPLQHNDWTNNTVTXLNLIALHHILVWSANIVETRTDRIXPSQQQPKLNMERDLHCSITFSACGVFAPRNLSTRLGSTLRSFPFVFFLSFHATLVCSSSYTLNA

SEQ ID NO: 65057 - protein, 110 aa, Gossypium hirsutum
  Clone ID: GOSHI-09MAY01-C1722_1.pep
MEAGDGGADRVVDSKDLQQQSKAFDKLTDRVEDRQLDSSRAQSAMASIAASAEAEKNAMRLREKELAAVKINAAEVDIIANELELDKKVAERTLREHKGDAVAAIRSLLH

SEQ ID NO: 65058 - protein, 100 aa, Gossypium hirsutum
  Clone ID: LIB3145-045-Q1-K1-A12.pep
MEAGDGGVDVVVDSKDLQQQSKAFDKLTDRVEDRQLDSSRAKSAMASIAASAEAEKNAMRLREKELAAVKINAADVDIIANELELDKKVAERTLREHKGD

SEQ ID NO: 65059 - protein, 433 aa, Gossypium hirsutum
  Clone ID: GOSHI-09MAY01-C1692_1.pep
PRVRPRVRPRVRPRVRANTLGKLQDTPPGKPFATRARAPPLPFLLSSLLQSRPQVKLPEEQYGDEDGLDDDLDESSDSEDEPEYDELPPFKRLSKAQIAKLSKAQKKAYFDELEYREKLFMKKQLKEEKKRRKMMKKMAAAAKDLPSEYGENAEEESSGASSVPVPMPDLVLPASFDSDNPTHRYRSLDSSNPWLVRPVLDTHGWDHDVGYEGINVERLFVAKEKFPISFSGQITKDKRDANVQMELASSLKHGEGKATSVGFDMQTVGKDLAYTLRSETRFSNLKKNKATAGISVTLLGDALSAGMKFEDKLIANKQFQVVMTGGAMTGRGDLAYGGSLEAQLRDKDYPLGRSLSTLGLSIMDWHGDLAIGCNIQSQVPVGRSTNLIARANLNNKGARQVSLRINSSEQLQLALTSLFPLLKKLFDYFHQVQ

SEQ ID NO: 65060 - protein, 109 aa, Gossypium hirsutum
  Clone ID: GOSHI-09MAY01-C101669_1.pep
CTVANPSSLHAHQLASIHATPQPPRAFVSTCRASALSCAFACAPQPRAPPPCATPSRATSPYGPHKPGLRSLRHNRGRTRLRVPWRLVSSSLRHNQSHSRDSESCRRLM

SEQ ID NO: 65061 - protein, 161 aa, Gossypium hirsutum
  Clone ID: GOSHI-09MAY01-C1652_3.pep
PLERLKTAPPAQNPHSIKYNGTVQGLKYIWRTEGFRGLFKGNGTNCARIVPNSAVKFFSYEQASKGILYLYQQQTGNEDAQLTPLLRLGAGACAGIIAMSATYPMDMVRGRLTVQTDSSPFQYRGMFHALSTVLRQEGPRALDKGWLPSVIGVIPYVGLNF

SEQ ID NO: 65062 - protein, 156 aa, Gossypium hirsutum
  Clone ID: GOSHI-09MAY01-C1652_2.pep
MASEDVKTSESAVSTIVNLAEEAKLAREGVKAPSYAILSICKSLAAGGVAGGVSRTAVAPLERLKILLQVQNPHSIKYNGTIQGLKYIWRTEGFRGLFKGNGTNCARIVPNSAVKFFSYEQASKGILYLHQRQTGNGMINIAIVFLLSNHLMFALH

SEQ ID NO: 65063 - protein, 354 aa, Gossypium hirsutum
  Clone ID: GOSHI-09MAY01-C1652_1.pep
MASEDVKTSESAVSTIVNLAEEAKLAREGVKAPSYAVLSICKSLVAGGVAGGVSRTAVAPLERLKILLQVQNPHSVKYNGTIQGLKYIWRTEGFRGLFKGNGTNCARIVPNSAVKFFSYEQASKGILYLHQRQTGNEDAQLTPLLRLGAGACAGIIAMSATYPMDMVRGRITVQTDRSPSPRPGMFHALSTVLREEGPRALYKGWLPSVIGVIPYVGLNFSVYESLKDWLIKSRPFGLVEDSELSVTTRLACGAAAGTVGQTVAYPLDVIRRRMQMVGWKDAASVVSGDGRNKASLEYTGMIDAFRKTVRHEGFGALYKGLVPNSVKVVPSIAIAFVSYEVVKDILGVEIRISD

SEQ ID NO: 65064 - protein, 185 aa, Gossypium hirsutum
  Clone ID: GOSHI-09MAY01-C1672_1.pep
MPWVFEQFNPCKCHLFCCALWAIWGAHNFVKINFDGAFNERQNKSASRIVARNQEGRVLVSRSELHHGITSAFAAEAIACWKAVQTGVEKGWHSIIIEGDSLTIIRKCRTQDQDRSLIATYIHDIQQENKKANIIRFNHTPRQTNTLAHTIATETLKRKEKVYLEMKVPTYAEDQERREWEREPD

SEQ ID NO: 65065 - protein, 113 aa, Gossypium hirsutum
  Clone ID: LIB3583-030-Q6-K1-G10.pep
YSPFIGIFIKTLVPSYTRKNKDYSLKFSRNYLPTKTNMRSRNLANCTNCPRCGKGVETIDHLFRECHGFLSSSILANVIFSVARFGPYGALIILSRLTSTVRSMRGRTSRHHV

SEQ ID NO: 65066 - protein, 107 aa, Gossypium hirsutum
  unsure (1)..(107): unsure at all Xaa locations
  Clone ID: LIB3829-009-Q6-N6-B11.pep
EIFIKKLWVLHIPERDKDYSVGKFSRSYLPTKTNMRSRNLANCTNWPPCGKGGXTIDHLFPECPVSMGVWTALSIQNNISGSKHGFYKVGYMGVLSRSILAKCASFL

SEQ ID NO: 65067 - protein, 194 aa, Gossypium hirsutum
  Clone ID: GOSHI-09MAY01-C1662_1.pep
HASAHASGKRAERSAFWGVYKKTDIYGISTSEQLDVDDLLDLSNDEFFPSASAATSHDQFPPSETPFSDASAASSSSAALTPSFSLDFNHDICLPSDDVAELEWLSQFVEDSFTDFPSYSLPGILNPRNDNSSFSSKARSKRSRAVTTLNGTNWTTTTSGAAGTLTGKTKTKREIQRQASPAAVEGMKRCSHCA

SEQ ID NO: 65068 - protein, 325 aa, Gossypium hirsutum
  Clone ID: GOSHI-09MAY01-C1192_1.pep
MADFKKATALILTVALLVNLALMVDADGDDDKKIRVRKHKGEKQCIQGWECSYWSKYCCNQTISDVFQVYQFEDLFAKRNSPVAHAVGFWDYHSFILAASIYEPLGFGTTGGKHMQMKEVAAFLAHVGAKTSCGDGVIDGGPLAWGLCFKREMSPSQDYCDDYYKYMYPCAPGAQYYGRGALPIYWNYNYGAAGDGIKVDLLHHPEYLEQNATIAFQAAIWRWMTPIKKNQPSAHDIFVGNWKPTKNDTEEKRGPTFGSTMNVLYGDYTCGQGDIDPMNIIISHYLHYLDLLGVGREEAGPHEELSCAEQKAFNPTPAPPAASAS

SEQ ID NO: 65069 - protein, 168 aa, Gossypium hirsutum
  Clone ID: LIB3543-039-Q1-K1-H8.pep
MADFKKATALILTVALLVNLALMVDADGDDDKKIRGGKHKGEKQCIQGWECSYWSKYCCNKTVSDVFQVYQFEDLFAKRNSPVAHAVGFWDYHSFILAASIYEPLGFGTTGGKRMQMKEVAAFLAHVGAKTSCGDGVIDGGPLAWGLCFKREMSPSQDYCDDYYKYMY

SEQ ID NO: 65070 - protein, 167 aa, Gossypium hirsutum
  unsure (1)..(167): unsure at all Xaa locations
  Clone ID: LIB3584-042-P1-K1-G9.pep
TEMSALQHYWGDDYKYMYSCAPGAXYYVRIALPIYWNYNYGAAGDGIKVDLLYHSEYIXQNETIAFQATIYRWMTPIKKNQPSSHDIFVGNXWKPTNNDTKEKRRSTFGSTMNVVYGDYTCGQGDFDPMNMIIFHYLYYLDLLMFVPEETRPNXELYLTEQKAFNPT

SEQ ID NO: 65071 - protein, 108 aa, Gossypium hirsutum
  Clone ID: uC-gsflnu33B144e02b1.pep
RSLGRTRGRTRGRTRGAHDIFVGNWKPTKNDTEEKRGPTFGSTMNVLYGDYTCGQGDIDPMNIIISHYLHYLDLLGVGREEAGPHEELSCAEQKAFNPTPAPPAASAF

SEQ ID NO: 65072 - protein, 109 aa, Gossypium hirsutum
  unsure (1)..(109): unsure at all Xaa locations
  Clone ID: LIB3149-020-Q1-K1-A8.pep
RNSPVAHAVGFWDYHSFILAASIYEPLGFGTTGGKRMQMKEVAAFLAHVGAKTSFGERVIYRGAFGWGVXLFKREMSPSQDYCDDYYKYMYPCAPGAQYYGRGALAIYW

SEQ ID NO: 65073 - protein, 237 aa, Gossypium hirsutum
  Clone ID: GOSHI-09MAY01-C1182_1.pep
IRLFTRPESKKIVSFFFSLLLQILFYNDPKKTAASSRKSSGPVLRSLSPSGRFSSHYVSHSPSSSSSAFAYSSSSFTSRSSTFFNQPRSISPPRVNVYNHTQSSQSVRFSLDSRPISPNRSISAVRRNTEALRNLQSKQPKRTCMCSPTTHPGSFRCSLHKGFNNSHASSGYAPSNRLNARRSAMTNSLVRIGGVEGDLVKRALSALIRPSSHQQRRRAAFQPRPSRLSVMSKAEDL

SEQ ID NO: 65074 - protein, 100 aa, Gossypium hirsutum
  Clone ID: LIB3165-017-P1-K1-D10.pep
MAASSRKSSGPVLRSLSPSGRFSSHYVSHSPSSSSSAFAYSSSSFTSRSSTFFNQPRSISPPRVNVYNHTQSSQSVRFSLDSRPISPNRSISAVRRNAEA

SEQ ID NO: 65075 - protein, 226 aa, Gossypium hirsutum
  Clone ID: GOSHI-09MAY01-C1152_2.pep
QNVKWFGAVSVGILASSANIDETVVEKRGEEENPRMPVQGPACNVSNMLAGWHTFNTLPFAGKTAVYIDDRATVLPRKLEWSGFILNSSLLWKDGDKPEWMKDIDTLDGDIESPLGLVNDPSVVEPLGNCGRQVLLWWLRVEARADSEFPPRWIIDPPLEITVPSKRTPWPDAPPELPANEKPAVGIQDPIVKHSTKRTSRSKHRSKRKHEPKTDTQVSTRHSEQN

SEQ ID NO: 65076 - protein, 482 aa, Gossypium hirsutum
  Clone ID: GOSHI-09MAY01-C1152_1.pep
MKLSALHQSYISRRTNSFRSSGPLDSSSDSAIKSPAAIFWLVFHALCCLISLLLGYRFSRLVFFFLFSTSSTNFYTSPFRSTAELVKTLDVHSVLSNNPVANLDLPLLNKTVTNSRVVVGRHGIRIRPWPHPDPVEVMKAHRIIEIVQKEQRSQFGIKNPRTVIVVTPTYVRTFQALHLTGVMHSLMLVPYDLVWIVVEAGGVSNETASLIAKSGLKTIHVGFNQRMPNSWEERHKLESKMRLRALRIIREKKLDGIVMFADDSNMHSMELFDEIQNVKWFGAVSVGILTHSVNTDEMADRKKDEEENPRMPVQGPACNASNMLAGWHTFNTLPFAGKSAVYIDDRATVLPRKLEWSGFVLNSRLLWKDGDKPEWMKDIDTLDGDIESPLDLVKDPSVVEPLGSCGRRVLLWWLRVEARADSKFPPRWIIDPPLEVTVPSKRTPWPDAPPGTPCSQEASDRNPRTNHQAYYKDTNIQIKTSK

SEQ ID NO: 65077 - protein, 85 aa, Gossypium hirsutum
  Clone ID: uC-gsflnu33B025a12b1.pep
SFTRPGKTAVYIDDRATVLPRKLEWSGFILNSSLLWKDGDKPEWMKDIDTLDGDIESPLDLVKDPSVEGLLKLWTRVMLWLASRV

SEQ ID NO: 65078 - protein, 100 aa, Gossypium hirsutum
  unsure (1)..(100): unsure at all Xaa locations
  Clone ID: uC-gsronu33b112a06b1.pep
GRTFQALHSTGVMHSIVLVPYDLGWIAEDAGGESSETAYVIAKSGLKTIHAGFNQRMPIPWEERHKLDAKMRLRALRIIREKXIDGTVMFADDSNXHSME

SEQ ID NO: 65079 - protein, 240 aa, Gossypium hirsutum
  Clone ID: GOSHI-09MAY01-C1142_1.pep
MAGEAAAAANFWGDTPEEDYYRSQGVRNTKSYFDTPNGTLFTQSFLPLDKKVKASVYMTHGYGSDTGWLFQKICINFSNWGYAVFAADLLGHGRSEGLRCYLGDMEKVAATSLSFFKHVRNSDEYKDLPAFLFGESMGGAATMLMYFQSDPETWTGLIFSAPLFVMPENMKPSKVRLFVYGLLFGLADTWATMPDNKMVGKAIKDPAKLKIIASNPRRYTGPPRVGTMRELARVCQYIQD

SEQ ID NO: 65080 - protein, 293 aa, Gossypium hirsutum
  unsure (1)..(293): unsure at all Xaa locations
  Clone ID: GOSHI-09MAY01-C1172_1.pep
APQTVPPSLTGALAIVPQPSKDKFEPKSAVWADTLSRGLVNLNISGPKTNPLSDIGVDFDAINRKEXRLEKPAPTAITSTVTMGKAMGSGSGIGRAGASVLRAPANPMVGSGMGMGMGGGPVGGVGMGGYVGMNQQPMGMGMGMNMGMNPGMGMNNMGMNPGMGMSNMGINPGMGMSNMGMNPGMGMSNMGMNPGMGMSNMGMNKGMGMSNMDMNNGMGMNMGMNPGMGMNNMGMNPGMEMNNMGMSAGMGMNMGMGQATHMQSQSGMPGGYNPMMGSSGYSQQQHGGGGGYR

SEQ ID NO: 65081 - protein, 52 aa, Gossypium hirsutum
  Clone ID: LIB3083-068-Q1-L1-C11.pep
RPSGHAIHILLPTVIDDTRTGAYCELFHPEQLICWMEDAVFSFVRGHYSLGK

SEQ ID NO: 65082 - protein, 120 aa, Gossypium hirsutum
  unsure (1)..(120): unsure at all Xaa locations
  Clone ID: GOSHI-09MAY01-C1102_1.pep
KHPYKYKSPPPPPXAPPKHPYKYKSPPPPSPPKHPYKYKSPPPPPPSPPKHPYKCKSPPPPSPPKHPYKYKSPPPPPPSPPKHPYKYKSPPPPPPVYKYKSPPPPPPHYVYASPPPPHHY

SEQ ID NO: 65083 - protein, 385 aa, Gossypium hirsutum
  Clone ID: GOSHI-09MAY01-C1132_2.pep
VEDAGTPSAGQQKNASSVSKFDEKHVAFVKFSEKHRKLLNAFIRQNPGLLEKSFSLMLKVPRFVDFPASPPHFRPKLKHQQHDHHHSPLRISVRRAYILEDSYNQLRLRSTQDLKGRLTVHFQGEEGIDAGGLTREWYQLLSRVIFDKGALLFTTVGNESTFQPNPNSVYQTEHLSYFKFVGRVVGKALFDGQLLDVHFTRSFYKHILGAKVTYHDIEAIDPDYFKNLKWMLENDISDVLDLTFSIDADEEKLILYERTQVTDYELIPGGRNIKVTEENKHQYVDLVAEHRLTTAIRPQINAFLEGFNELIPRELITIFNDKELELLISGLPEIDMDDMRANTEYSGFSAASPGIQWHMGVGMAYTQAYGFNHHNSPGKHHWFWV

SEQ ID NO: 65084 - protein, 191 aa, Gossypium hirsutum
  unsure (1)..(191): unsure at all Xaa locations
  Clone ID: GOSHI-09MAY01-C1132_1.pep
LNYELIPGGRXNIKVTEEIKHQYVDLVAEHRLTTAIRPQINAFLEGFNELIPRELISVFNDKELELLISGLPDIDLDDMRANTEYSGFSAASPVIQWFWEVVQGFSKEDKARLLQFVTGTSKVPLEGFSALQGISGSQKFQIHKAYGSPDHLPSAHTCFNQLDLPEYPSKEHLKKRLLLAIHETNERFGFG

SEQ ID NO: 65085 - protein, 168 aa, Gossypium hirsutum
  Clone ID: AI726738.1.pep
DVEDANTSSGQLKTSGPITKFDEKHVFVKFSEKHRKLLNAFIRQNPGLLDKSFSLLLKVPRFVDFDNKRAHFRSKIKHQHDHLHSPLRISVRRAYILEDSYNQLRMRSTQDLKGRLTVHFQGQEGIDAGGLTTEWYQLLSRVIFDKGALLFTTVGNESTFQPNPNSVY

SEQ ID NO: 65086 - protein, 147 aa, Gossypium hirsutum
  Clone ID: LIB3147-058-Q1-K1-H1.pep
PTRPPTRPPTRSNELIPRELMAIFNDKELELLISGLPEIDMDDMRANTEYSGFSAASPVIQWFWEVVQGFSKEDKARLLQFVTGTSKVPLEGFSALQGISGSQKFQIQKAYGSPDHLPSAHTCFNQLDLPEYPSKEHLKKKLLLAIH

SEQ ID NO: 65087 - protein, 178 aa, Gossypium hirsutum
  unsure (1)..(178): unsure at all Xaa locations
  Clone ID: GOSHI-09MAY01-C1122_1.pep
MTGNFMTSAYGAQAPPHQGLGVLPGTPLVGHSYFPHHGMPVMNPAFSGSSMEQMNXQFAGAGSHAQSGQLSGNGANFNMQQQSSSNLPSEKNVAIPPVVKFQASKDTEQRRCTASSPGERAEKDGTCNTAEGKNTPLILIAPAYPQGASKPNETDQRTRVIRVVPHNPRSATESAARI

SEQ ID NO: 65088 - protein, 71 aa, Gossypium hirsutum
  Clone ID: GOSHI-09MAY01-C1092_3.pep
HASAHASGDYIDPNFTWKNFNLEEQAKVIVAPRSNNKLDATKLKTEFPELLSIKESLIKYVFEPNKKTGGA

SEQ ID NO: 65089 - protein, 189 aa, Gossypium hirsutum
  Clone ID: GOSHI-09MAY01-C1092_2.pep
PRVRKIFGSVDQHHFPTGFGSGINATFHRILELQVPSEFMLTSESSVEINSIRTVNEAHSLDCNLNQFRCRVVAVHVLVLEKSNRKCDNIKSNTYTRPHSVDIPLACFILDDGSSSWCCWANAERAATLLRLQNTARTSTMYHLQRIVEEHDRITVKSARSTSDPFDQDFTVTVGSGRALTGLDEDFDV

SEQ ID NO: 65090 - protein, 300 aa, Gossypium hirsutum
  Clone ID: GOSHI-09MAY01-C1092_1.pep
MGFPANGSSDKPLKFLIYGRTGWIGGLLGKLCESQGIDYEYGSGRLESRISLESDIANVKPTHVFNAAGVTGRPNVDWCESHKVETIRTNVVGTLTLADVCRDKGLILINYATGCIFEYDEAHQIGTGIGFKEEDTPNFTGSFYSKTKAMVEELLKNYENVCTLRVRMPISSDLANPRNFITKITRYDKVVNIPNSMTILDELLPISIEMGKRNLTGIWNFTNPGVVSHNEILEMYRDYIDPNFTWKNFNLEEQAKVIVAPRSNNELDATKLKTEFPELLSIKESLVKYVFEPNKKTGGA

SEQ ID NO: 65091 - protein, 61 aa, Gossypium hirsutum
  Clone ID: uC-gsflnu33B079h10b1.pep
SKQVECQHYEVCFKNGPPCYHISGCSSLEPVHEQLQLCSGFDLYFFFNFVCFIFWSLFYTR

SEQ ID NO: 65092 - protein, 89 aa, Gossypium hirsutum
  Clone ID: uC-gsflnu33B085h10b1.pep
GFPLHTFYKAAQEKELWCPKKKIYVSLAAGHKIGHSKRAPPDFFLYISFYFMFFLFFFLFFLFFFFFFFFFFFFFFFFFFFLPDKTISN

SEQ ID NO: 65093 - protein, 60 aa, Gossypium hirsutum
  Clone ID: GOSHI-09MAY01-C101069_1.pep
MESGRLFFNPSTTHRNMLLLGNTEPIFRGARTMVSMEENPKKRLFFSSPEDLYDEEYYDE

SEQ ID NO: 65094 - protein, 118 aa, Gossypium hirsutum
  Clone ID: GOSHI-09MAY01-C1042_19.pep
FRSYQLEDLFAKRYTPVAHAVGFLDYHSFHFWFFSFFFSFILYFIFFIFFFFFFFYFFFFFFFFFFFFFFFFYFFYFFNFYFLFIFLFFFFFFFILLFFILFFLSFIFLFFFFISFIL

SEQ ID NO: 65095 - protein, 113 aa, Gossypium hirsutum
  Clone ID: GOSHI-09MAY01-C1042_15.pep
EEHKKKVEAKNALENYAYNMRNTVKDEKIGSKLSPDDKKRIEDAIEEAIQWLDSNQLAEADEFEDKMKELESVCNPIIAKMYQGAGGDMGGSMDEDAPPSGGSGAGPKIEEVD

SEQ ID NO: 65096 - protein, 146 aa, Gossypium hirsutum
  Clone ID: GOSHI-09MAY01-C1042_14.pep
MKYNPRVSSSRRKSRKAHFTAPSSVRRVLMSAPLSSDLRSKYNVRSMPVRKDDEVQLVRGTYKGREGKVVQVYRRKWVIHIERITREKVNGSTVNVGINPSKVVITKLWLDKDRKSFLDRKANGQAAADKDNGTKVSAEDIMQSVH

SEQ ID NO: 65097 - protein, 254 aa, Gossypium hirsutum
  unsure (1)..(254): unsure at all Xaa locations
  Clone ID: GOSHI-09MAY01-C1042_12.pep
HASALAAALASGTVHDVVLVGGSTRIPKXVQQLLQDFFNGKELCKSINPDAAVAYGAAVQAAILSGEGNEKVQDLLLLDVTPLSLGLETAGGVMTVLIPRNTTIPTKKEQVFSTYSDNQPGVLIQVYEGERTRTRDNNLLGKFELSGIPPAPRGVPQITVCFDIDANGILNVSAEDKTTGQKNKITITNDKGRLSKEEIEKMVQEAEKYKSGDEEHKKKVEAKNAWENYAYNMRNTVKDKGTKFSAEDIMQSVD

SEQ ID NO: 65098 - protein, 192 aa, Gossypium hirsutum
  unsure (1)..(192): unsure at all Xaa locations
  Clone ID: GOSHI-09MAY01-C1042_11.pep
MEAKWLVLFSVAAMLMALANCQESVKPLVKMVKGKKLCDKGWECKGWSKYCCNHTISDYFQTYQFEDLFAKRNTPVAHAVGFWDYHSFITAAAQYQPHGFGTTGEKLQNMKEVAAFLGHVGSKTSCGYGVATGGPLAWGLCYNKEMSPSKIYCDDYYKYTYPCTPGVSYHGXGEVALPIYWSVQSRSPVPRW

SEQ ID NO: 65099 - protein, 215 aa, Gossypium hirsutum
  Clone ID: GOSHI-09MAY01-C1042_10.pep
MAGKGEGPAIGIDLGTTYSCVGVWQHDRVEIIANDQGNRTTPSYVGFTDTERLIGDAAKNQVAMNPINTVFDAKRLIGRRFTDSSVQSDIKLWPFKVIAGPGDKPMIVVNYKGEEKQFAAEEISSMVLIKMREIAEAYLGFTVKNAVVTVPAYFNDSQRQATKDAGVIAGLNVMRIINEPTAAAIAYGLDKKATSVGEKNVLIFDLGGGTFDVSL

SEQ ID NO: 65100 - protein, 146 aa, Gossypium hirsutum
  Clone ID: GOSHI-09MAY01-C1042_9.pep
MKYNPRVSSSRRKSRKAHFTAPSSVRRVLMSAPLSSDLKSKYNVRSMPVRKDDEVQVVRGTYKGREGKVVQVYRRKWVIHIERITREKVNGSTVNVGINPSKVVITKLRLDKDRKSLLDRKAKGRAAADKDKGTKFSAEDIMQSVD

SEQ ID NO: 65101 - protein, 243 aa, Gossypium hirsutum
  unsure (1)..(243): unsure at all Xaa locations
  Clone ID: GOSHI-09MAY01-C1042_6.pep
PRVRATAGDTHLGGEDFDIRMGNHLVQEFKRKNMKDISGNPRALKRVRTFCERAKRTVSFTGETTIEIDTVYESIDYYXTITRARFDELNMDLFRKRLVPXEKCLRDAKMDKSTAHDVALVGGSTRIPKVQQLLQDFFNGKELCKSINPDEAVAYGAAVQAAILSGEGNEKVQDLLLLDVTPLSXLGLETAGGVMTVLIPRNTTIPTKKEQVFSTYSNQKRTSLLNLXDNQPGVLIQVYECER

SEQ ID NO: 65102 - protein, 136 aa, Gossypium hirsutum
  unsure (1)..(136): unsure at all Xaa locations
  Clone ID: GOSHI-09MAY01-C1042_5.pep
ETGDALKVDLWNQPEYIENNATLASQPAIWRWMTPVKKHQPSAHDVFVGSWKPTKNDTLAKRVPGXFGATMNVLYGDQVCGRGDVDTMNNIISHYLSYLDLMGVGREEAGPHEVLTCEEQKPFTVSPSSASSSSSS

SEQ ID NO: 65103 - protein, 148 aa, Gossypium hirsutum
  unsure (1)..(148): unsure at all Xaa locations
  Clone ID: GOSHI-09MAY01-C1042_4.pep
KNKITMHEECTKGLTSSKEEIEKMVQGSQRXPKSEDEEHKKKVEAKNALENYAYNMRNTVKDEKIGAKLPAADKKKIEDAIEQAIQWLDSNQLAEADEFEDKMKELESICNPIIAKMYQGAGGDMGGGMDEDVPAGGSGAGPKIEEVD

SEQ ID NO: 65104 - protein, 150 aa, Gossypium hirsutum
  Clone ID: GOSHI-09MAY01-C1042_3.pep
METSGKVKKGAGGRKGGGPKKKPVSRSVKAGLQFPVGRIGRYLKKGRYSQRVGTGAPVYLAAVLEYLAAEVLELAGNAARDNKKNRIIPRHVLLAVRNDEELGKLLAGVTIAHGGVLPNINPVLLPKKTEKAAGKEPKSPSKATKSPKKA

SEQ ID NO: 65105 - protein, 315 aa, Gossypium hirsutum
  Clone ID: GOSHI-09MAY01-C1042_2.pep
MEAKWLLCFTMAALMAVANGQESVKPLVKIVKGKKLCDKGWECKGWSQFCCNQTISDYFQTYQFENLFAKRNTPVAHAVGFWDYHSFITAAAQYQPHGFGTTGGKLQSMKEVAAFLGHVGSKTSCGYGVATGGPLAWGLCYNKEMSPSKLYCDDYYKYTYPCTPGVSYHGRGALPIYWNYNYGETGDALKVDLLNHPEYLENNATLAFQAAIWRWMTPVKKHQPSAHDVFVGNWKPTKNDTLAKRVPGFGTTMNVLYGDQVCGQGDSDSMNNMISHYLYYLDLLGVGREEAGPHDMLTCEEQEPFTVSPSSATSS

SEQ ID NO: 65106 - protein, 552 aa, Gossypium hirsutum
  Clone ID: GOSHI-09MAY01-C1042_1.pep
NGGRPRRPPTRPVVNYKGEEKQFAAEEISSMVLIKMREIAEAYLGFTVKNAVVTVPAYFNDSQRQATKDAGVIAGLNVMRIINEPTAAAIAYGLDKKATSVGEKNVLIFDLGGGTFDVSLLTIEEGIFEVKATAGDTHLGGEDFDNRMVNHFVQEFKRKNKKDISGNPRALRRLRTACERAKRTLSSTAQTTIEIDSLYEGIDFYSTITRARFEELNMDLFRKCMEPVEKCLRDAKMDKSTVHDVVLVGGSTRIPKVQQLLQDFFNGKELCKSINPDEAVACGAAVQAAILSGEGNEKVQDLLLLDVTPLSSGLETAGGVMTVLIPRNTTIPTKKEQVFSTYSDNQPGVLIQVYEGERTRTRDNNLLGKFELSGIPPAPRGVPQITVCFDIDANGILNVSAEDKTTGQKNKITITNDKGRLSKEEIEKMVQEAEKYKSEDEEHKKKVEAKNALENYAYNMRNTVKDEKIGAKLPATDKKKIEDAIEQAIQWLDSNQLAESDEFEDKMKELESICNPIIAKMYQGAGGDMGGGMDEDVPAGGSGAGPKIEEVD

SEQ ID NO: 65107 - protein, 102 aa, Gossypium hirsutum
  Clone ID: LIB3493-041-P1-M1-D3.pep
NHFVQEFKRKNKKDISGNPRALRRLRTACERAKRTLSSTAQTTIEIDSLYEGIDFYSTITRARFEELNMDLFRKCIEPIEKWLRDAYMDKNTAHDGVLEGDP

SEQ ID NO: 65108 - protein, 38 aa, Gossypium hirsutum
  Clone ID: LIB3146-012-Q1-K1-E11.pep
NPIIAKMYHCAGGDMDGGGDDDVPAGGSVSHPKIEEVD

SEQ ID NO: 65109 - protein, 190 aa, Gossypium hirsutum
  unsure (1)..(190): unsure at all Xaa locations
  Clone ID: AI055116.1.pep
MAALMAVANGQESVKPLVKIVKGKKLCDKGWECKGWSQFCCNQTISDYFQTYQFENLFAKRNTPVAHXXGFWDYHSFITAAAQYQPHGFGTTGGKLQSMKEVAAFLGHVGSKTSCGYXVATXGPLAWGLCYNKEMNPSKLYCDDYYKYTYPCTPGVSYYGRGAXPIYWNFNYGKTCDALKVDLFDHPDTL

SEQ ID NO: 65110 - protein, 154 aa, Gossypium hirsutum
  unsure (1)..(154): unsure at all Xaa locations
  Clone ID: LIB3585-061-P1-K1-A2.pep
MEAKWLLCFTMAALMAVSNGQESVKPLVKIVKGKKLCDKGWECKGWSQFCCNQTISDYFRTYQFENLFAKRNTPVAHAVGFWDYHSFITAAAQYQPHGFGXTTGGKLQSMKELAAFLGHVGSKTSCKKATKLNLGKNNGVAQTRTGDLQCVRLT

SEQ ID NO: 65111 - protein, 75 aa, Gossypium hirsutum
  Clone ID: uC-gsronu33B138f04b1.pep
SFTRPPTRPITVCFDIDANGILNVSAEDKTTGQKNKITITNDKGRLSKEEIEKMVQEAERRGLFYCIRSYNLLLV

SEQ ID NO: 65112 - protein, 97 aa, Gossypium hirsutum
  unsure (1)..(97): unsure at all Xaa locations
  Clone ID: LIB3083-118-Q1-L1-C4.pep
MEAKWLLCFTMAALMAVSNGQESVKPLVKIVKGKKLCDKGWECKGWSQFCCNQTISXDYFRTYQFENLFXKRNTPLAHAVXFWDYLSFISVLAYFYF

SEQ ID NO: 65113 - protein, 96 aa, Gossypium hirsutum
  Clone ID: uC-gsronu33B029b07b1.pep
RITREKVNGSTVNVGINPSKVVITKLRLDKDRKSLLDRKAKGRAAADKDKGTKFSAEDIMQSVDKVVFFFPFSIMCFATVEVLVLWSFIFVLFLCY

SEQ ID NO: 65114 - protein, 100 aa, Gossypium hirsutum
  Clone ID: LIB3135-026-Q1-K1-B11.pep
MPVRKDDEVQVVRGTYKGREGKVVQVYRRKWVIHIERITREKVNGSTVNVGINPSKVVITKLRLDKDRKSLLDRKAKGRAAADKDKGTKFSAEDIMQSVD

SEQ ID NO: 65115 - protein, 86 aa, Gossypium hirsutum
  Clone ID: LIB3197-025-Q1-M1-B3.pep
MAGKGEGPAIGIDLGTTYSCVGVWQHDRVEIIANDQGNRTTPSYVGFTDTERLIGDAANNQLVLNPINTVFLAQRLIVHQFKDASL

SEQ ID NO: 65116 - protein, 100 aa, Gossypium hirsutum
  unsure (1)..(100): unsure at all Xaa locations
  Clone ID: uC-gsflnu33B085c04b1.pep
VNYAYNMRNTVKDEKIGSKLSPDDKKKIEDAIEEAIQWLDSNQLAEADEFEDKMKELESVCNPIIAKMYQGAGGDMVEIXNDDAPTSGGRGAGPPFEDGD

SEQ ID NO: 65117 - protein, 55 aa, Gossypium hirsutum
  Clone ID: LIB3493-006-P1-M1-F4.pep
AESDEFEDKMKELESICNPIIAKMYQGAGGDMGGGMDEDVPAGGSGAGPKIEEVD

SEQ ID NO: 65118 - protein, 57 aa, Gossypium hirsutum
  unsure (1)..(57): unsure at all Xaa locations
  Clone ID: uC-gsronu33B157e07b1.pep
METSGKVKKGAGGRKGGGPKKKPVSRXSVKAGLQFLVGRIGLYLKKGMVLRLDGLLV

SEQ ID NO: 65119 - protein, 68 aa, Gossypium hirsutum
  unsure (1)..(68): unsure at all Xaa locations
  Clone ID: LIB3083-099-Q1-L1-C9.pep
TNNIKEPTQFQLQSHTPMIYIVQGKKLCDKGWECKGWSQFCCNQTISDYFQTYQFENLFAXRNTPVAH

SEQ ID NO: 65120 - protein, 52 aa, Gossypium hirsutum
  Clone ID: uC-gsronu33B007c11b1.pep
NPSKVVITKLRLDKDRKSLLDRKAKGRAAADKDKGTKFSAEDILQSVYSCGI

SEQ ID NO: 65121 - protein, 388 aa, Gossypium hirsutum
  Clone ID: GOSHI-09MAY01-C1072_1.pep
FKTVGRLTLMCGDGTNDVGGLKQAHVGVALLNAVPPTKSESSSGTSKDENTKALKSKKSKPTVEATGNSEASSNGKVVPRSESSNNATSNRHLNAAEKHRQKLKKMMDELNEEGDGRSAPIVKLGDASMASPFTAKHASVAPTTDIIRQGRSTLVTTLQMFKILGLNCLATAYVLSVMYLDGVKLGDVQATISGVFTAAFFLFISHARPLPTLSAARPHPNIFCSYVFLSLMGQFAMHLLFLISSVKEAEKHMPEECIEPESEFHPNLVNTVSYMVSMMLQVATFAVNYMGHPFNQSIPENKPFLYALGAAAGFFVGITSDLFRDLNDWLSLVPLPVGLRDKLLLWALLMFLCCYAWERLLRWAFPGKIPAWRKRQRVAAASSEKKLV

SEQ ID NO: 65122 - protein, 154 aa, Gossypium hirsutum
  Clone ID: GOSHI-09MAY01-C1062_1.pep
MAQRTEKEETEFKVPETLTLCVNNCGVTGNPATNNMCQKCFSATTAATSSSSSSSSTNNTATSATDDKSSRSTPTRSQDNRSDSAPPTTAATTATATTNSPMTASNRSGYDTAEKKSVNRCSGCRKRVGLTGFRCRCGELFCSDHRYSDRHDCS

SEQ ID NO: 65123 - protein, 52 aa, Gossypium hirsutum
  unsure (1)..(52): unsure at all Xaa locations
  Clone ID: LIB3145-045-Q1-K1-A8.pep
CPCYQVPLFSXXXFXSXKLICSIWPLVFIFFFFYFTTRDKIANLLQTFFFHN

SEQ ID NO: 65124 - protein, 60 aa, Gossypium hirsutum
  Clone ID: LIB3166-044-P1-K1-E12.pep
TLIILTASNRSGYDTAEKKSVNRCSGCRKRVGLTGFRCRCGELFCLDHRYLDRHYCSYDY

SEQ ID NO: 65125 - protein, 273 aa, Gossypium hirsutum
  Clone ID: GOSHI-09MAY01-C1012_1.pep
MGSLGKAIYTVGFWIRETGQALDRLGCRLQGNYFFQEQLSRHRTLMNVFDKSPLVDKDAFVAPSASVIGDVQVGRGSSIWYGCVLRGDVNSISVGSGTNIQDNSLVHVAKSNLSGKVLPTNIGNNVTVGHSAVLHGCTVEDEAFVGMGATLLDGVVVEKHAMVAAGALVRQNTRIPAGEVWGGNPAKFLRKLTEEEIAFISQSATNYTNLAQVHAAENAKPFDEIEFEKVLRKKFAKRDEEYDSMLGVVRETPPELILPDNVLPDKEQKSSQK

SEQ ID NO: 65126 - protein, 174 aa, Gossypium hirsutum
  unsure (1)..(174): unsure at all Xaa locations
  Clone ID: GOSHI-09MAY01-C1002_2.pep
MASEFGESASHSPQNPSCSSNNGNGDAGNFECNICFELAQDPIVTLCGHLFCWPXCLYKWLHIHSRSRECPICKALIEEEQLVPLYGRGKSSTDPRSKSIPGVNIPNRPAGQRPETAPPPEPNQFPQNGFGFMGGLGGFAPMATARFGNFTLSAAFGGLIPSLFNLQVHGFPDA

SEQ ID NO: 65127 - protein, 236 aa, Gossypium hirsutum
  Clone ID: GOSHI-09MAY01-C1002_1.pep
MASGFGESASHSPHNPSCSTNNANGDAGNFECNICFDLAQDPIVTLCGHLFCWPCLYKWLHTHSRSQECPVCKALVEEQKLVPLFGRGKSSTDPRSKSIPGVNIPNRPAGQRPETAPPPPPIQFPQNGFGFMGGLGGFAPMATARFGNFTLSAAFGGLIPSLFNLQVHGFPDAAMFGPAAGFPYGFPSSYLGGHAYGYHHHHHHHHHRTAQGQQDHYLKMLFLFIIVCVIFAMIYQ

SEQ ID NO: 65128 - protein, 113 aa, Gossypium hirsutum
  Clone ID: LIB3583-055-P1-K1-F7.pep
MAGGFGESASHSPHNPSCSTSNANGDAGDFECNICFDLAQDPIVTLCGHLFCWPCLYKWLHIHSRSQECPVCKALVEEQKLVPLYGRGKSSTDPRSKSIPGVNIPNRPAGQRP

SEQ ID NO: 65129 - protein, 104 aa, Gossypium hirsutum
  Clone ID: LIB3584-028-P1-K1-A9.pep
MLMVMLECPVCKALVDEQKLVPLYGKGKSSTDPRSKSIPGVNIPNRPAGQRPETGSPPTPNHIAQNGFRFMGSLGSFSPMATPQFGNFTLFAAFGGLIPFLLYL

SEQ ID NO: 65130 - protein, 57 aa, Gossypium hirsutum
  Clone ID: LIB3189-021-P1-K1-F7.pep
MASEFGESACHSPQNPSCSSNNGNGDAGNFECNICFEITHDPIRTLCGHFYCCPCLF

SEQ ID NO: 65131 - protein, 82 aa, Gossypium hirsutum
  Clone ID: LIB3145-031-Q1-K1-F4.pep
INTKFLRRVVFCDLHLGLFSFLMQVSSIFDFFGSVDCHIDRSLYLFNISLKESEFRMSRKRNGEWVWGISKPFSPQFILLHQ

SEQ ID NO: 65132 - protein, 108 aa, Gossypium hirsutum
  Clone ID: GOSHI-09MAY01-C1032_3.pep
MATNTTQEQHPAAGRHQEVGHKSLLQSDALYQYISETSVYPREPEPMKELRELTAKHTWNLMTTSADEGQFLNMLLKLINAKNTMEIGVYTAYSLLATALALPDDGKI

SEQ ID NO: 65133 - protein, 251 aa, Gossypium hirsutum
  Clone ID: GOSHI-09MAY01-C1032_2.pep
SLPTPPRTPPPPRPAAGRHQEVGHKSLLQSDALYQYILETSVYPREPEPMKELRELTAKHPWNLMTTSADEGQFLNMLLKLINAKNTMEIGVYTGYSLLATALALPDDGKILAMDINRENYELGLPVIRKAGVAHKIEFKEGPAMPVLDKLVEDEKNHGSYDFIFVDADKDNYLNYHKRLIELVKVGGLIGYDNTLWNGSVVAPPDAPLRKYVRYYRDFVLELNKALAVDPRIEICMLPVGDGITLCRRVK

SEQ ID NO: 65134 - protein, 195 aa, Gossypium hirsutum
  Clone ID: GOSHI-09MAY01-C1032_1.pep
PGSTSRPLMITSADEGDPSRPLLKLINAKNTMEIGVYTGYSLLATALALPDDGKILAMDINRENYELGLPVIQKAGVAHKIEFKEGPAMPVLDKLVEDEKNHGSYDFIFVDADKDNYLNYHKRLIELVKVGGLIGYDNTLWNGSVVAPPDAPLRKYVRYYRDFVLELNKALAVDPRIEICMLPVGDGITLCRRVK

SEQ ID NO: 65135 - protein, 101 aa, Gossypium hirsutum
  unsure (1)..(101): unsure at all Xaa locations
  Clone ID: LIB3146-036-P1-K1-D8.pep
LSTQPKTSSVQLDGSRNVAIRAFTHSDALYQNILETSVYPMXPEPMKELRWLTVKHTWNLMTTSADEGQFSNMLLKLINANNTMEIGVYTAYSLLATALPL

SEQ ID NO: 65136 - protein, 263 aa, Gossypium hirsutum
  Clone ID: GOSHI-09MAY01-C1022_1.pep
SYLSDGTNDKIQAVIESGVCPRLVELLMHPSPTVLIPALRTVGNIVTGDDMQTQCIIGHQALPCLLNLLTSTYKKSIKKEACWTISNITAGNVDQIQAVIGAGIFAPLVHLLQNAEFEIKKEAAWAISNATSGGTHEQIKFLVSQGCIKPLCDLLNCPDPRIVTVCLEGLENILKVGEAEKNLGHTGEVNLYAQLIDDAEGLEKIENLQSHDNNEIYEKAVKILETYWVEDEDEALPTGDASQPGFQFGGNQLPVPSGGFNFS

SEQ ID NO: 65137 - protein, 43 aa, Gossypium hirsutum
  Clone ID: uC-gsronu33B172g06b1.pep
EAAWAISNATSGGTHEQIKFLVSQGCIKPLCDLLNCPDPRIVT

SEQ ID NO: 65138 - protein, 161 aa, Gossypium hirsutum
  Clone ID: GOSHI-09MAY01-C1352_1.pep
MNRGGFLKMTKQRDNKLKKSPESDPSSENSDSGYFRNGPKKVESDDSVDGFLKNNEFKKPNIESGSGFRDRDATSSKCLSKFKSVKTGSPKYDLRRNGKNDYYSPQKGSKYECLTCSKTFDSHRALGGHRASHTKVNGYHESIQESYENNLGNDSFTAPMT

SEQ ID NO: 65139 - protein, 128 aa, Gossypium hirsutum
  unsure (1)..(128): unsure at all Xaa locations
  Clone ID: GOSHI-09MAY01-C1302_1.pep
KSSLFLLFWSSFSPFHPPTVMSPSKLDSTDSFGHEEASVSCSKPEXGCVDSLSIFHSEKAVEELLQQTPVAGMDEHLIEFSEALRTVAKALRRAAEGKASAQAEAAEWKRRYELERTRNIKMERKARM

SEQ ID NO: 65140 - protein, 132 aa, Gossypium hirsutum
  Clone ID: GOSHI-09MAY01-C1332_6.pep
LVDMECCYLTVEFFRKLPQDVDKGGSATQSIFDRYNDSYLRRIGSTVLSYVNMVCATLRHSIPKSIVYCQVREAQRSLLDFFYTELGKLEQKRLSALLNEDPAIMERRSALAKRLELYRSAQAEIDTVAWSK

SEQ ID NO: 65141 - protein, 126 aa, Gossypium hirsutum
  unsure (1)..(126): unsure at all Xaa locations
  Clone ID: GOSHI-09MAY01-C1332_5.pep
EICRLFDQNFREHXHEVRTGGDKVYNVFDNQLPAALKRLQFDRQLSMENIRKLVTEADGYQPHLIAPEQGYHRLIESTLVTIRGPAEAAVDATHSILKDLVHKAMSETPTSGDFQGDFQGNNRPPV

SEQ ID NO: 65142 - protein, 551 aa, Gossypium hirsutum
  unsure (1)..(551): unsure at all Xaa locations
  Clone ID: GOSHI-09MAY01-C1332_1.pep
MENLISLVNKIQRACTALGDHGEASALPTLWDSLPAIAVVGGQSSGKSSVLESIVGKDFLPRGSGIVTRRPLVLQLHKTDEGSREYAEFLHLPRKRFTDFAAVRKEIQDETDRETGRTKQISSVPIHLSIYSPNVVNLTLIDLPGLTKVAVEGQPESIVQDIENMVRSYIEKPNCIILAISPANQDLATSDAIKISREVDPTGERTLGVLTKIDLMGXGTDAVDILEGKSYRLKFPWVGVVNRSQADINKNVDMIAARRTEREYFSSTPEYRHLAHRMGSEHLAKMLSKHLETVIKSRIPGIQSLINKTIAELETELSRLGKPIAADAGGKLYTIMEICRLFDQNFREHLDGVRTGGDKVYNVFDNQLPAALKRLQFDRQLSMENIRKLITEADGYQPHLIAPEQGYRRLIESTLVTIRGPAEAAVDATHSILKDLVHKAMSETPELKQYPALRGEVGNAAIESLERMRDQSKKATLQLVDMECXYLTVEFFRKLPQDVDKGGSATQSIFDRYNDSYLRRIGRFIYTKSLSMDLNCLKLNRRILLFNVFYF

SEQ ID NO: 65143 - protein, 71 aa, Gossypium hirsutum
  Clone ID: LIB3146-019-Q1-K1-A9.pep
TGKLFREADKESGHKKTITSLTKSADCSHFLTGSLDKSAKLWDTRTLTLIKTYVTERPVNAVAMSPLLDHM

SEQ ID NO: 65144 - protein, 106 aa, Gossypium hirsutum
  unsure (1)..(106): unsure at all Xaa locations
  Clone ID: LIB3585-067-P1-K1-E3.pep
MGNLISLVNTIQRACSVLGDHGQAGALPTLWDSLPAIAVDGGQSSGKCSVLASIACKDFFPRGSGIVTLGPLVLQLNKTDGGCREYTVXLHLPRERFIDFAGARKE

SEQ ID NO: 65145 - protein, 84 aa, Gossypium hirsutum
  unsure (1)..(84): unsure at all Xaa locations
  Clone ID: LIB3135-045-Q1-K1-B4.pep
EGSTALSYVYMVCTTLSHSIPKSIVYCQVREAKISLFDFFYTELGKLEQKXLSALLNEDPAIMECRSALAKRLELYRSAQAEID

SEQ ID NO: 65146 - protein, 83 aa, Gossypium hirsutum
  Clone ID: LIB3120-036-Q1-K1-B11.pep
AGSTVLSYVYMVCATLRHSIPKSIVYCQVREAKRSLLDFFYTELGKLEQKQLSALLNEDPAIMECRSALAKRLKLYMSAQAEI

SEQ ID NO: 65147 - protein, 49 aa, Gossypium hirsutum
  Clone ID: uC-gsflnu33B129d02b1.pep
SNRSVPATIIGVRFNQADEQISNGTSDLRQFFFRTRGRTRGRTRGRTKE

SEQ ID NO: 65148 - protein, 76 aa, Gossypium hirsutum
  Clone ID: GOSHI-09MAY01-C1322_1.pep
VVVCPKCGVAECSRIVPAFHVEYFVALCGRSRGTSLCVGAHQLVPLPPSSGYGKTDRVHIGYHRMRLSINKQKSIR

SEQ ID NO: 65149 - protein, 142 aa, Gossypium hirsutum
  Clone ID: GOSHI-09MAY01-C1292_1.pep
MAGIGPLTQDWEPVVIRKKPPNAATKKDEKVVNAARRAGAEIESVKKSNAGTNKAASSSTTLNTRKLDEETENLAHERVPTELKKAIMHARMEKKLTQSQLAQMINEKPQIIQEYESGKAIPNQQIIGKLERALGAKLRGKK

SEQ ID NO: 65150 - protein, 96 aa, Gossypium hirsutum
  Clone ID: LIB3135-003-Q1-K1-G10.pep
NSPSFCNGDFERVFFPLQQSRTHFISSVIVIVSLQITSKTLLLHASHSNSRAHLFTSPFFRTQELDTIFNFCLINDKTLLTSSLSALHQVPSRVYL

SEQ ID NO: 65151 - protein, 84 aa, Gossypium hirsutum
  unsure (1)..(84): unsure at all Xaa locations
  Clone ID: LIB3148-020-Q1-K1-H2.pep
LIFCFLIIFFFXPLQQSRTHFISSVIVIVSLQITSKTLLLHASHSNSRAHLFTSPFFRTQELDTTFNFCLINDKTLLTSSLSAL

SEQ ID NO: 65152 - protein, 132 aa, Gossypium hirsutum
  Clone ID: GOSHI-09MAY01-C1252_2.pep
GRVGGRVGGRVGGRVGEMIVFRQLTKLGVKEIADIMLKEVFDRLKSKEIELQVTERFRERVVEEGYNPSYGARPLRRAIMRLLEDSMAEKMLAREIKEGDSVIVDVDSDGNVTVLNGSSGTSESLTDPIPVV

SEQ ID NO: 65153 - protein, 543 aa, Gossypium hirsutum
  Clone ID: GOSHI-09MAY01-C1252_1.pep
AAEGAIDAANILKSALARGELQCIGATTLDEYRKHIEKDPALERLFQPVKVPEPSVDETIQILKGLRERYEIHHKLRYTDEALISAAQLSYQYISDRFLPDKAIDLIDEAGSRVRLRHAQLPEEARELEKELRQITKSKNEAVRSQDFEKAGELRDREIELRAQITAIQEKDKEMNKAEAEAGDGGPVVTEVDIQHIVSSWTGIPVEKVSTDESDRLLKMEETLHKRVIGQDEAVKAISRAIRRARVGLKNPNRPIASFIFSGPTGVGKSELAKALAAYYFGSEEAMIRLDMSEFMERHTVSKLIGSPPGYVGYTEGGQLTEAVRRRPYTVVLFDEIEKAHPDVFNMMLQILEDGRLTDSKGRTVDFKNTLLIMTSNVGSSVIEKGGRRIGFDLDYDEKDSSYNRIKSLVTEELKQYFRPEFLNRLDEMIVFRQLTKLEVKEIADIMLKEVFDRLKSKEIELQVTERFRERVVEEGYNPSYGARPLRRAIMRLLEDSMAEKMLAREIKEGDSVIVDVDSDGNVTVLNGSSGTPESLGDPISVV

SEQ ID NO: 65154 - protein, 139 aa, Gossypium hirsutum
  unsure (1)..(139): unsure at all Xaa locations
  Clone ID: GOSHI-09MAY01-C1242_1.pep
VHEMENGFNIWSFNGRLLYRILKDHFFQFLWRPRPPSFLTPEKEEEIARNLKKYSXKYEAEDQDVSMLLSEQDREKRRMLKEEWEKWVSEWRRAQEEEKLERQKLRDGEASDEEEEYEAKEVEVEEVLDVSEEVLSFEE

SEQ ID NO: 65155 - protein, 251 aa, Gossypium hirsutum
  Clone ID: GOSHI-09MAY01-C1272_1.pep
MADRVYPKQATNGTAATSNPSFPATKAQQYGASRPVYRPQPERHRYRRSCCSCCLWTTIAILVLILIAAVASAILYVLYRPHRPTFTVSSLKISALNVTSASKLITNINLNVTAKNPNKKVVYSYNPITVALVTDDDIAIGEGSFGSFVHGTKNTTLLKAAITSSNQELDDASAAKLKKALKSKKGLPLKIKLDTKVEAKMGALKTPKVGIRVVCEGIKATGPKAKSATTASTSNAKCKVDLRLKIWKWTF

SEQ ID NO: 65156 - protein, 162 aa, Gossypium hirsutum
  Clone ID: LIB3584-039-P1-K1-G10.pep
PRVRPRVRPRVRGRVGTNGTAGATNPSFPATKAQQYGASRPVYRPQPERHRYRRSCCSCCLWTTIAILVLILIAAVASAILYVLYRPHRTTFTVSSLKISALNVTSASKLITNINLNVTAKNPNKKVVYSYNPITVALVTDDDIAIGEGSFGSFVHGTKNTT

SEQ ID NO: 65157 - protein, 307 aa, Gossypium hirsutum
  Clone ID: GOSHI-09MAY01-C1262_1.pep
MATSVKNNSLPPSLISNLNQVLLSRQQHTIDHQSTHSSSLPSHSRNVDEPDCSKPLLLITNCEGIDSPGLIFLVQALLSDARFTLHVCAPQSDKSVAGHSLTVRETVAVCSVEMSGATGFEVSGTPVDCVSLALSGALFSWSKPVLVISGINRGSSYGRNMFYSGAVAAAREALICGVPSLCLSFNWKKDVSSESDLKNAADFCLPLISAAVRDIERGKFPESCFLNIEIPSSPLANKGFKLTRQSLWRSPLSWKAVSANRHPAAGQYLSNQQSLGIKLAQLIRDASAAGAARRLNSHRKNVEIESV

SEQ ID NO: 65158 - protein, 252 aa, Gossypium hirsutum
  unsure (1)..(252): unsure at all Xaa locations
  Clone ID: GOSHI-09MAY01-C1202_2.pep
MEREQQVYLARLAEQAERYDEMVEAMKNVAKLDVELTVEERNLLSVGYKNVIGARRASWRILSSIEQKEEAKGNEQNVKRIKEYRQRVEDELSKICDDILSVIDKHLIPSSSTGESTVFYYKMKGDYFRYLAEFKAGDDRKEAADQSLKAYEAATTTANSDLPPTHPIRLGLALNFSVFYYEILNSAERACHLAKQAFDEAIAELDSXLNEESYKDSTLIMQLLRDNLTLWTSDLPEEGGEQSKVDEPQAES

SEQ ID NO: 65159 - protein, 253 aa, Gossypium hirsutum
  Clone ID: GOSHI-09MAY01-C1202_1.pep
MEKEREQQVYLARLAEQAERYDEMVEAMKSVAKLDVELTVEERNLLSVGYKNVIGARRASWRILSSIEQKEEAKGNEQNVKRIKDYRQRVEDELSKICNDILSVIDKHLIPSSSTGESTVFYYKMKGDYFRYLAEFKAGDDRKEAADQSLKAYEAATSTASSDLPPTHPIRLGLALNFSVFYYEILNSPERACHLAKQAFDEAIAELDSLNEESYKDSTLIMQLLRDNLTLWTSDLPEEGGEQSKADEPQAES

SEQ ID NO: 65160 - protein, 182 aa, Gossypium hirsutum
  Clone ID: uC-gsflnu33B140c12b1.pep
MECWERLQAHRCASSGIDPRALRFCTRTPTRAVIDKHLIPSSSTGESTVFYYKMKGDYFRYLAEFKAGDDRKEAADQSLKAYEAATSTASSELPPTHPIRLGLALNFSVCYYEILNSPERACHLAKQAFDEAIAELDSLNEESYKDSTLIMQLLRDNLTLWTSDLPEEGGEQSKADEPQVES

SEQ ID NO: 65161 - protein, 172 aa, Gossypium hirsutum
  unsure (1)..(172): unsure at all Xaa locations
  Clone ID: LIB3543-051-Q6-K6-H7.pep
PASAPRGGGGGPRVRPRVRILSVIDKHLIPSSSTGESTVFYYKMKGDYFRYLAEFKGGEEXEEAADQSLKAYEAATSTASSDLPPTHPIRLGLALNFSVFYYEILNSPERACHLAKQAFDEAIAELDSLNEESYKDSTLIMQLLRDNLTLWTSDLPEEGGEQSKADEPXAXE

SEQ ID NO: 65162 - protein, 59 aa, Gossypium hirsutum
  Clone ID: LIB3146-047-Q1-K1-H1.pep
KCASIRNTWKNKKLRQQKIEHKEVSHKDYKVTDSIMFKQKRTQNNSPKTSDKQIEPCHR

SEQ ID NO: 65163 - protein, 124 aa, Gossypium hirsutum
  Clone ID: GOSHI-09MAY01-C1232_1.pep
ENDDVTPSFETLSEYIESTKKSQDFEIISGRLAMIVFAATVTTEFVTGTSICRKMDLQGIAEAVGACLGAVTCAAAFAWLSSARNKVGRIFTVGCNSLIDSVIDQIVDGSFYETDGTSDWSDDI

SEQ ID NO: 65164 - protein, 207 aa, Gossypium hirsutum
  unsure (1)..(207): unsure at all Xaa locations
  Clone ID: GOSHI-09MAY01-C1222_1.pep
SYPGKPVTVICSLAESGNCESWLVSEGVLPPLIRLVESGSTVGKEKAIISLQRLSMTTETARAIVGHGGCXPLIEICRTGGSVSQAAAASTLKNISAVPELRQVLAEEGIIKVMINLLDCGILLGSKEYAAECLQNLTASNENLRRSVVSEGGIRSLLVYLDGPLPQESAVRALRNLVGSVSMEVLVSLGFVPRLVHVLKSGSLGAQ

SEQ ID NO: 65165 - protein, 208 aa, Gossypium hirsutum
  Clone ID: GOSHI-09MAY01-C2982_1.pep
MSSENGKRLLETDAGGLNFEATELTLGLPGEPRVTSDGGAKLGSKRGFSETVDLKLGDNNREVKLGHSLQEAAKSPVSKTQVVGWPPVRGFAKRGKKSCKYVKVAVDGAPYLRKVDLEIYNSYQQLLTSLEDMFSCFTIRNYLNEKKIEQVNGIEYMPTYEDKDGDWMLVGDVPWQMFVESCKRLRLMKSSEAVGLGLTTGPKYSSTN

SEQ ID NO: 65166 - protein, 138 aa, Gossypium hirsutum
  unsure (1)..(138): unsure at all Xaa locations
  Clone ID: LIB3584-009-P1-K1-C3.pep
XAAKSPVSXTQVVGWPPVRGFAKRGKKSCKYVKVAVDGAPYLRKVDLEIYNSYQQLLTSLEDMFSCFTIRNYLNEKKIEQVNGIEYMPTYEDKDGDWMLVGDVPWQMFVESCKRLRLMKSSEAVGLGLTTGPKYSSTN

SEQ ID NO: 65167 - protein, 44 aa, Gossypium hirsutum
  Clone ID: LIB3148-009-Q1-K1-F2.pep
GDWMLVGDVPWHMFVESCKRLRLMKSSEAVGLGLTTGPKYSSTN

SEQ ID NO: 65168 - protein, 247 aa, Gossypium hirsutum
  unsure (1)..(247): unsure at all Xaa locations
  Clone ID: GOSHI-09MAY01-C102999_1.pep
MNQGVLQSSPVQQLMAGNPDWWSINNAMRPPSTHHHHQQTASPFFPFPPPQPPXHRRQRRLLLLSSLNSSLLXTSSSSSWHDNNNQEVPESWSQLLLGGLVGEEQATALQHQASTGNNNIMKQENYVYGHAEXDYHHHHHHYQGSKATTNWSMATASSSPKSCVTTSFNSNMLDFSSNIKADTATRQHPPLMDPSPECNSCTASGGALKKTRVQPSATQSTFKVRKEKLGDRITALHQLVSPFGKTD

SEQ ID NO: 65169 - protein, 386 aa, Gossypium hirsutum
  Clone ID: GOSHI-09MAY01-C2952_1.pep
MSIAACLLTPSPLSSPSSLTITPKFPTTFPLHLHLRLSSSATCLRHSRSSPFLTFCAGGDGGDINSNNNNSGGGGGNDENGKHRGGDDENAGDKNRKEAMIVLAEAGRSTESLPKDLAAAIQAGRIPGSVIERFLGLEKSGLMRWLMQFGGFKERLLADDLFLAKVAMECGVGIFTKTAAEYERRRENFFKELEIVFADVVMAIIADFMLVYLPAPTVSLRPPLAVSAGAISKFFYSCPDNAFQVALPGTSYSLLQRLGAVMRNGAKLFAVGTTSSLVGTAITNALINARKAVDKTSAAEVENVPILSTSVAYGVYMAVSSNLRYQVLAGVIEQRILEPLLHQHKLMLSAICFAVRTGNTFLGSLLWVDYARLVGIQKAHEEDAAA

SEQ ID NO: 65170 - protein, 134 aa, Gossypium hirsutum
  Clone ID: LIB3272-036-P1-K1-H12.pep
IPHHFPSPPPPPPFLLRHLSPSQPIFPVLNSNNNNSGGGGGNDENGKHRGGDDENAGDKNRKEAMIVLAEAGRSTESLPKDLAAAIQAGRIPGSVIERFLGLEKSGLMRWLMQFGGFKERLLADDLFLAKSAME

SEQ ID NO: 65171 - protein, 249 aa, Gossypium hirsutum
  unsure (1)..(249): unsure at all Xaa locations
  Clone ID: GOSHI-09MAY01-C102949_1.pep
MYVKAGQFEKAEACLENLEKEIXPRQREAYHYLISLYAGTSNRDEVYRLWEDLKQRYPTVNNASYLIMVQALANLKDFKGLKKCFEEWDTSCSSYDRRLVTSTIRGFLSGDMLEEAEVVLDNAMKRSKGPYTKAREYFMVYFLRKCRFDMALKHMEAAVSEVKDWSPVNPETMTAFFDYFMNEGDVKAAEEFCKHLKNNNCLDSEVYHQLLRLYVAAGKVAPDMRRRLEDDAIEISKELEDLLVKVCPE

SEQ ID NO: 65172 - protein, 247 aa, Gossypium hirsutum
  Clone ID: GOSHI-09MAY01-C2962_1.pep
MAFPTKIKGMNPIVEMDGDEMTRIIWQSIKEKLIFPFLELDIKYFDLGLHNRDATNDEVTIASGEATLKYNVAIKCATITPDEGRVKEFNLKEMWKSPNGTIRNILNGTVFREPIICKNVPRLVPSWTKPICIGRHAFGDQYRATDLVVQESGKLMLVFVPDKSNEKKELEVFNFKGAGGVTLSMYNTDESIRAFAEASMTTAYQKKWPLYLSTKNTILKSYDGRFKDMFQEVYETQWKSKFEAEGI

SEQ ID NO: 65173 - protein, 265 aa, Gossypium hirsutum
  unsure (1)..(265): unsure at all Xaa locations
  Clone ID: GOSHI-09MAY01-C102939_1.pep
CSVKEDHARVIDTSYIFKFXDAPIYRKPSLNNLCKSVLGYEVRKPGAAHNCLDDACAAMKLVLAKLERGEITLVPDVSQPEREKLLLHRIPVYVHREEISKVIPGAVAIEVKPTKKLQGRHYSAIAVFSSPQEANQAYENMEGNEEKDSHGLPQKLVSFQFGDGSTASLYIRKMAQEDSHREVLSNKRAFEGEETSIESKKLKTDEKITKKVMEDNSQLDDHLKEIERLKQELQEKDAKIVLQDKMISNLLKKVEEMKKVLNKRK

SEQ ID NO: 65174 - protein, 252 aa, Gossypium hirsutum
  unsure (1)..(252): unsure at all Xaa locations
  Clone ID: GOSHI-09MAY01-C2932_1.pep
QQPEIVREITDVLDAVGNTTKATTKGFAIGSAALASFLLFSAYMDEVASFANESFKQVDIAIPEVFVGGLLGSMLIFLFSAWACSAVGRTAQEVVXEVRKQFIERPGIMDYKEKPDYGRGAAHAAAASLREMIKPGALAIISPIVVGFLFRVLGHYTGHPLLGAKVVAAMLMFATVSGILMALFLNTAGGAWDNAKKFIETGALGGKGSDSHKAAITGDTVGDPFKDTAGPSLHVLIKMLATITLDMAPVFL

SEQ ID NO: 65175 - protein, 62 aa, Gossypium hirsutum
  Clone ID: LIB3584-014-P1-K1-A6.pep
LGNLGTFSSGGLGFLQLKKPLAHIQSLIEALEYVNIAISYSNNLLSVDIYKFVQLLSIDINS

SEQ ID NO: 65176 - protein, 243 aa, Gossypium hirsutum
  Clone ID: GOSHI-09MAY01-C2922_1.pep
MAQGDSNFQQDMAKEEEEQRLKYLEFVQVAAVHAALCFTNLYLYAKERSGPLKPSVETVEGTVKCVVGPVYDKYHDVPVEFLKFVDSKVGESVTKLDRRVPPVIKQVSTEAISAAQKAPEVARGVASEVHRAGVVNTASGLAKSVYTKYEPTAKQLYAKYEPKAEQCAVSAWRKLNMLPLFPQVASVVVPTAAYCSDKYNETVASSAEKGYKVASYLPLVPTEKIAKVFGEQTTEMEPLVSES

SEQ ID NO: 65177 - protein, 149 aa, Gossypium hirsutum
  unsure (1)..(149): unsure at all Xaa locations
  Clone ID: AI055190.1.pep
MAQGDSNFQQDMAKEEEEQRLKYLEFVQVAAVHAALCFTNLYLYAKERSGPLKPSVETVEGTVKXLWLAXVYDKYHDVPVEFLKFVDSXVGEISDQALIVRVPSSHSNRSQTEAILAAQKAPRGARGVASEVTVLNGEHRSDSKSVSPV

SEQ ID NO: 65178 - protein, 126 aa, Gossypium hirsutum
  Clone ID: LIB3825-007-Q1-K6-D11.pep
KAKEEEEQRLKYLEFVQVAAVHAALCFTNLYLYAKERSGPLKPSVETVEGTVKSVVGPVYDKYHDVPVEFLKFVDSKVGESVTKLDRRVPPVIKQVSTEAILAAQKAPEVARGVASEVHRAGVVNT

SEQ ID NO: 65179 - protein, 80 aa, Gossypium hirsutum
  unsure (1)..(80): unsure at all Xaa locations
  Clone ID: LIB3146-001-P1-K2-C7.pep
STYCVTISFSDFYKLPLFREVRVIFVPTTAYCSDTYNXTVVSSAXKGYKVAYYLPLVPTEKIAKVFVEQTTEMDPLVSDS

SEQ ID NO: 65180 - protein, 299 aa, Gossypium hirsutum
  Clone ID: GOSHI-09MAY01-C2882_2.pep
SSITEATQSVDLISGTKLLAGGMTSDQMDLLVEQVKMLAGEIAFSTSTLKRLVDQSVNDPDSSKTQIQNLEREIQEKRRQMRVLEQRIIESGEASIANASFVDMQQTVMRLMTQCNEKSFELEIKSADNRILQEQLQNKCSENEELQNKVNLLEQRLASLSGDKLSLSSEQGISEEYADELRKKVQYQGTENEKLKLEQVQLSEENSGLRVQNQKLAEEASYAKELASAAAVELKNLASEVTKLSVQNAKLEKELLAARESANTRASSNQAVNGFNRKYSDCGRPGRKGRLSGRPHDLS

SEQ ID NO: 65181 - protein, 64 aa, Gossypium hirsutum
  Clone ID: LIB3543-053-Q1-K6-G4.pep
MVLCLPCTFELIKTKLCLSMQGTENEKLKLEQVQLSEENSGLRVQNQKLAEEASYAKELASAAA

SEQ ID NO: 65182 - protein, 209 aa, Gossypium hirsutum
  unsure (1)..(209): unsure at all Xaa locations
  Clone ID: GOSHI-09MAY01-C2852_1.pep
MKVRQMWKSXLECHRNQCQVVREAKTLGLIGSGKKLSDDHLKATLQFEHELISWTIRFSSWIDAQKGYVRGLNNWLLKCLYYEPEVTDDGVAPFSPSRIGAPSIFVICNQWSQAMDRISEREVINSMRVLVTGVLQLWEQDKSEMHRRMMANKDLERKARNLDREXQKLQKDIQALDKKIVLVXGDGSSLSVAGKCVYQSETSNSSLQG

SEQ ID NO: 65183 - protein, 393 aa, Gossypium hirsutum
  unsure (1)..(393): unsure at all Xaa locations
  Clone ID: GOSHI-09MAY01-C2842_1.pep
GSNKPDLFPGDLCIKLSELHSKAPEHSFAYTKKTIEKAFGRKLSEIFEAFEEEPVASGSIAQVHRASLRFRYPGQRVKPMVVAVKVRHPGVGESIRRDFVIINSVAKLSTFIPTLKWLRLDESVQQFAVFMMSQVDLAREAAHLNRFIYNFRSWRDVSFPKPVYPLVHPAVLVETYEQGESVAHYVDGLEGHDRVKSALAHIGTHALLKMLLVDNFIHADMHPGNILVRVSQSKASRKQLFKTKPHVIFLDVGMTAELSKGDRVNLLEFFKAVARRDGRTAAECTLRLSQRQNCPNPKAFIEEVEEAFTFWGTPEGDPVHPAECMQELLEKVRRHKVNIDGNVSTVMVTTLVLEGWQRKLDPGYDVMQTLQTLLLKADWXKSLSYTIDGLMAP

SEQ ID NO: 65184 - protein, 266 aa, Gossypium hirsutum
  unsure (1)..(266): unsure at all Xaa locations
  Clone ID: GOSHI-09MAY01-C2812_1.pep
PRVRLFMVDFHDMLLPFIKRINNLPGRKSYASRTVFFYTKTGILRPIAIELSLPPTPSSNRNKYVYTHGHDATTYWIWKLAKAHVCANDAGVHQLANHWLRTHACMEPYIIATHRQLSSMHPIYKLLHPHMRYTLEINALARQSLINGGGIIEASFSPGKYAMELSAAAYESWRFDREALPADLIHRGMAVEDPSAPGGLKLLIEDYPYAADGLPIWSATKIGYXSYVQHFLPDPDPVTSDVELPPCWIDIHNRRPHHKMNEPCLA

SEQ ID NO: 65185 - protein, 149 aa, Gossypium hirsutum
  unsure (1)..(149): unsure at all Xaa locations
  Clone ID: LIB3584-011-P1-K1-H11.pep
LARGRGSRGGGIIEASFSPXKXYAMELSAAAYESWRFDREALPADLIHRGMAXXDGGGGGVFFFXXXXYPYAADGLLIWSAIKEWVESYVEHFYTEPDSVTTDVELQAWWSEIKNRGHHDKRNEPWWPKLATKEDLSGILTTMIWPASG

SEQ ID NO: 65186 - protein, 224 aa, Gossypium hirsutum
  Clone ID: GOSHI-09MAY01-C102839_1.pep
MESETARRRISNIASHFSPCDDTLSVSHLLPMNCSGRCDNRMYFARQGSAFQACFMRQVSRPERTAPQCFAPPKSVSTPLESSNAIEAPLFSRPTMMDSNFDKMPLQSKKNTCWSISNGTKWSPKMDVAESGHNYIMMVEVPGVSIGDIRVEVDDQNLTVRGKRSSHCWKLAADCSDGSISAYHKREISQGPYQVVWPLPANVNRDSVSAEFLDGFLRIVIPKL

SEQ ID NO: 65187 - protein, 221 aa, Gossypium hirsutum
  Clone ID: GOSHI-09MAY01-C2802_1.pep
QCLRLLPAPLAGCEKALVWSWDDSTIGGLGGKFEGNLVKGSVLLHCLNSLLKYSAVIVQPFSRYDLDGSGKVVTLDIPLPLKNSDGSVAHVGDELGLCVAERSKLNDLLTNLADQIQLWTVGYIRVLRLFKERDMDHFGPDKEIYEWVPLTVEFGMPLFNPKLCKSICERIVSSELLQSDSLTEHHDSMQSIRRMLREVCAEYQATGPAAKLLYQKGQPKD

SEQ ID NO: 65188 - protein, 147 aa, Gossypium hirsutum
  unsure (1)..(147): unsure at all Xaa locations
  Clone ID: GOSHI-09MAY01-C102809_1.pep
LASRAPLIVAYQFCLTLLQNLILDRPPSTRXVEVESHLVDLCQEVFLFYIETARSGQTSETSPEEQSQWLIPSVSGKRRELASRAPLIVATLQAICSLGDTLFEKNLVQFFPLLASLISCEHGSNEVQVALSDMLSSSVGPVLLRSC

SEQ ID NO: 65189 - protein, 46 aa, Gossypium hirsutum
  Clone ID: GOSHI-09MAY01-C2832_3.pep
MALVAGGSSTLNPNAPLFVPAVYRQVEDFSPEWWKLVTTTTWYRDY

SEQ ID NO: 65190 - protein, 113 aa, Gossypium hirsutum
  Clone ID: GOSHI-09MAY01-C2832_2.pep
MALVAGGSSTLNPNAPLFVPAVYRQVEDFSPEWWKLVTTTTWYRDYWISQNQDEDGFYDNTEDDVFDVNDIVDLLADPFDFVSDEDLQFEEFIQSNEMETIAPPLPSNGGTYE

SEQ ID NO: 65191 - protein, 163 aa, Gossypium hirsutum
  unsure (1)..(163): unsure at all Xaa locations
  Clone ID: GOSHI-09MAY01-C2832_1.pep
MALVAGGSSTLNPNAPLFVPAVYRQVEDFSPEWWKLVTTTTWYRDYWISQNQDEDGFYDNTEDDVFDVNDIVDLLADPFDFVSDEDLQFEEFIQSNEMETIAPPLPSNGGFEKAXEKGVEALMKNLSLVPSSPRFSAEPAKYVEKPAKTVNAKSGRRCIHQPR

SEQ ID NO: 65192 - protein, 113 aa, Gossypium hirsutum
  Clone ID: LIB3584-045-P1-K2-C1.pep
MALVAGGSSTLNPNAPLFVPAVYRQVEDFSPEWWKLVTTTTWYRDYWISQNQDEDGFYDNTKDDIFDVNDIVDLLADPFDFVSDEDLQFEEFIQSNEMETIAPPLPSNGGTYE

SEQ ID NO: 65193 - protein, 79 aa, Gossypium hirsutum
  Clone ID: uC-gsronu33B029g06b1.pep
KERKKKKKQKRVIRITNKIERNKKQKQKRKKSRQNRGEMEYNVTDPTATKAILPILFTYPFNSSISVIENLFRNYQLNL

SEQ ID NO: 65194 - protein, 188 aa, Gossypium hirsutum
  unsure (1)..(188): unsure at all Xaa locations
  Clone ID: GOSHI-09MAY01-C102819_1.pep
AAWVGIDYKAMLKPELEIYADKIRECSXEKFEDMIVLQQQSKEMASKIEDKKNVLXELQSRIDEVEAPINLFKKEIQDCDHRSTAEAKKMVEDVQFETHKLDITEREATEILKASQLRLQEAIQQSEEEIQIHARQLFMVVDSVSKYKEHVESKISEMRVSLSETAAAVSDAYKGSLPAQFPGSANAN

SEQ ID NO: 65195 - protein, 115 aa, Gossypium hirsutum
  Clone ID: GOSHI-09MAY01-C2592_1.pep
MPCLNLSTNVNLDGVDTSAILSEATSSVAKLIGKPEAYVMIVLKGSVPMSFGGTEQPAAYGELVSIGGLNPDVNKKLSAAIAAILETKLQVPKSRFFLKFYDTKGSNFGWNGSTF

SEQ ID NO: 65196 - protein, 187 aa, Gossypium hirsutum
  Clone ID: LIB3584-005-P1-K1-A9.pep
RGRGGQLSTEELPCLNLSTNVNLDGVDTSAILSEATSSVAKLIGKPEAYVRGVGEGSVPMSFGGTEQPAAYGELVSIGGLNPDVNKKLSAAIAAILETKLQVPKSRFFLKFYVSLGSNFGWNGSTFWAWRVLYFSGLPCCLFFTFLLVCLSGVWRYCSPWPGFFCCVFSVFFWRSFSFSFLFPFFFH

SEQ ID NO: 65197 - protein, 90 aa, Gossypium hirsutum
  unsure (1)..(90): unsure at all Xaa locations
  Clone ID: LIB3585-034-P1-K1-B7.pep
MPCLNLSTNINLDCDYTYVILYEASLTXAKLIGKPEAYVMIVFKGSEPMSCGETEHPTAYGELVSIAGLNPDVNKILSAAIAAILVTKLQ

SEQ ID NO: 65198 - protein, 71 aa, Gossypium hirsutum
  Clone ID: LIB3584-034-P1-K1-A1.pep
MPCLNLSTNVNLDGVDTSAILSEATSSVAKLIGKPEAGSVPMSFGGTEQPAAYGELVSIGGLNPDVNKKLS

SEQ ID NO: 65199 - protein, 52 aa, Gossypium hirsutum
  Clone ID: GOSHI-09MAY01-C2552_4.pep
MANSNLPRRIIKETQRLLSEPAPGISASPSEDNMRYFNVMILGPTQSPYEGG

SEQ ID NO: 65200 - protein, 153 aa, Gossypium hirsutum
  Clone ID: GOSHI-09MAY01-C2552_3.pep
MANTNLPRRIIKETQRLPRVPAPGISASPSEDNMRYFNVMILGPTQSPYEGGVFKLELFLPEEYPMAAPKVRFLTKIYHPNIDKLGRICLDILKDKWSPALQIRTVLLSIQALLSAPNPDDPLSENIAKHWKTNEAEAVETAKEWTRLYATGA

SEQ ID NO: 65201 - protein, 153 aa, Gossypium hirsutum
  Clone ID: GOSHI-09MAY01-C2552_2.pep
MANSNLPRRIIKETQRLLSEPAPGISASPSEDNMRYFNVMILGPTQSPYEGGVFKLELFLPEEYPMAAPKVRFLTKIYHPNIDKLGRICLDILKDKWSPALQIRTVLLSIQALLSAPNPDDPLSENIAKHWKSNKAEAVETAKEWTRLYASGA

SEQ ID NO: 65202 - protein, 153 aa, Gossypium hirsutum
  Clone ID: GOSHI-09MAY01-C2552_1.pep
MANSNLPRRIIKETQRLLSEPAPGISASPSEDNMRYFNVMILGPTQSPYEGGVFKLELFLPEEYPMAAPKVRFLTKIYHPNIDKLGRICLDILKDKWSPALQIRTVLLSIQALLSAPNPDDPLSENIAKHWKSNEAEAVETAKEWTRLYASGA

SEQ ID NO: 65203 - protein, 81 aa, Gossypium hirsutum
  Clone ID: LIB3165-036-P1-K1-B12.pep
MANTNLPRRRIKETERLLSEPAPGISASPSEDNMRYFNVMILGPTQSPYEGGVFKLELFLPEEYPMTAPKVLNSPASLLNI

SEQ ID NO: 65204 - protein, 55 aa, Gossypium hirsutum
  unsure (1)..(55): unsure at all Xaa locations
  Clone ID: LIB3149-004-P1-K1-F12.pep
CFNFFFYIRYYNVMILCSTQSSYFXGVFKLELFLPEEYSMAAPKVRFLTKIYHPN

SEQ ID NO: 65205 - protein, 85 aa, Gossypium hirsutum
  Clone ID: GOSHI-09MAY01-C2542_1.pep
GKAVDCSYIRGPKYLEVDIDIGSSTVANGVLGLVIGVITTLVVDMAFLVQANTTDELPERLIGAVRVSHIELSPAIVPKLDADPS

SEQ ID NO: 65206 - protein, 352 aa, Gossypium hirsutum
  unsure (1)..(352): unsure at all Xaa locations
  Clone ID: GOSHI-09MAY01-C2512_1.pep
MVVRKVGKYEIGRTIGEGTFAKVKFAQNTETGESVAMKVLDRSTIIKHKMVDQIKREISIMKLVRHPYVVRLHEVIASRTKIYIILEFITGGELFDKIVHKGRLSESEARRFFQQLIDGVXYCHSKGVYHRDLKPENLLLDSLGNLKISDFGLSALPEQGVSLLRTTCPTPPPAPPEVLSHKGYDGAVADVWSCGVILYVLMAGYLPFDELDLTPPSSQIERADFSCPSWFPVGAKSLIHRILDPNPQTRITIEQIRSDEWFNKGYVPVRLLEYEDINLDEVNAVFDDPEVDKEERGNEPSRNEDMGPLSLNAFDLIILSQGLNLATLFDRGKDNMKYQTRFVSQKPARVVL

SEQ ID NO: 65207 - protein, 98 aa, Gossypium hirsutum
  unsure (1)..(98): unsure at all Xaa locations
  Clone ID: LIB3083-105-Q1-L1-D3.pep
RVGVYHRDWKAENLLLDSQGNLKISDFGLSALPXQGVSLLRTTCGTPNYVAPEVLSHKGYDGAVADVWSCGVILYVLMAGYLPFDELDLTTLYSKIER

SEQ ID NO: 65208 - protein, 123 aa, Gossypium hirsutum
  Clone ID: GOSHI-09MAY01-C102519_1.pep
KRWTSIYFSTFLFVFFLFGFFFSFLFTNFLMKRGPISKKRRGLPNPSSLVVGDCSSVVEFGLKRSRGGSSFFRIFLGLEDPHRRARFEQKGLNNPSLRGPRLPYTGGTTVASKSHDDDGDDGC

SEQ ID NO: 65209 - protein, 111 aa, Gossypium hirsutum
  Clone ID: GOSHI-09MAY01-C2522_4.pep
SKSQASPWVSEKGVDTGHDFWRHDARHIISRHVQNIFHPSAELSDTPAVAVVLGPPAFRVNADIALHVKPSDLSSDTDAPEQRIHVRPQPSICHRVHSKDAKSKRYISHSA

SEQ ID NO: 65210 - protein, 82 aa, Gossypium hirsutum
  Clone ID: GOSHI-09MAY01-C2522_3.pep
GFFYVSSFFFVIALFHLGYHLPTYQNHVIANKSHSFKLKQHNFEKSTPPFILLKNTPHPSAKPTQICITVSRKKGHNLVLIE

SEQ ID NO: 65211 - protein, 87 aa, Gossypium hirsutum
  Clone ID: GOSHI-09MAY01-C2522_1.pep
MANRWLRPEVYPLFAAVGVAVGICGFQLVRNICINPEVRVTKENRAAGVLDNFAEGEKYSEHFLRKYVRNKTPEIMPSINSFFTDPK

SEQ ID NO: 65212 - protein, 93 aa, Gossypium hirsutum
  Clone ID: uC-gsronu33B007e03b1.pep
MLAVHSMANRWLRPEVYPLFAAVGVAVGICGFQLVRNICINPEVRVTKENRAAGVLDNFAEGEKYSEHFLRKYVRNKTPEIMPSINSFFTDPK

SEQ ID NO: 65213 - protein, 82 aa, Gossypium hirsutum
  unsure (1)..(82): unsure at all Xaa locations
  Clone ID: LIB3135-060-Q1-K1-G3.pep
KRPYVYPLFTTLSFTVKIYLFHLTRNIFINPELRVTKHNRTSGTLDNFTXGEKYSEHFLRKYVRNKTPXIMPIINIFFTYPK

SEQ ID NO: 65214 - protein, 459 aa, Gossypium hirsutum
  Clone ID: GOSHI-09MAY01-C2482_1.pep
PFFCLTRGRALLFYHLPFLPFLFLFLHFIASLSSPTQNLNDTLSFSFPLTSLRISPDVKVQTLSSSLVAGANKHGTRRLARPNSGSYNYKTTFKYSMALIVALPIGTPPQTQQMVLDTGSQLSWIQCHKKLAKKPPPTASFDPSLSSSFSVLPCNHPLCKPRIPDFTLPTSCDQNRLCHYSYFYADGTLAEGNLVREKITFSRSQSTPPLILGCATDSSEDKGILGMNLGRFSFAYQSKISKFSYCVPTRRTKPGVSPTGSFYLGQNPNSHGFQYINLLAFPQSRTMPNMDPLAYTLPMLGIRIGAKKLAIPMHVFRPDAGGSGQTMIDSGSEFTYLVDEAYNKVREEVVRLVGPRLKKGYVYGGVADMCIDGNPVQFGRLVGDMVLEFEKGVEITVPKDRMLADVGGGVHCLGIGRSNMLGIASNIIGNFHQQNLWVEFDLANRRLGFGKADCSRAAV

SEQ ID NO: 65215 - protein, 193 aa, Gossypium hirsutum
  Clone ID: GOSHI-09MAY01-C2452_1.pep
RLFRDLFIREGYQFDYVFDWTIRRYPQVGSSSRARPSPKPGLNPPARAAERTERPSVGQEIGERGSGAIEPLTRRIGSGQGLHGDQSRYTSDDVPSSKDVQPDSEKVRSSSRNDSSSKRPVAAGSRLDSSGEPNENRSGRLVSSSSRLSTTQRILPGFQSRSASYTRTSATRGGQDDSLRSFEFLTIGSGKRK

SEQ ID NO: 65216 - protein, 82 aa, Gossypium hirsutum
  unsure (1)..(82): unsure at all Xaa locations
  Clone ID: uC-gsronu33B040f04b1.pep
TLSLLYYFVLLNYYWSFLLFLCFXFILLISYFIFLYLLIIIFLFFISFLYYFFFIYFYYLFFFFLPFFYIFIFXYYFYIITF

SEQ ID NO: 65217 - protein, 193 aa, Gossypium hirsutum
  unsure (1)..(193): unsure at all Xaa locations
  Clone ID: GOSHI-09MAY01-C2472_3.pep
KKQGAFSSLIAAKSIPKSLHCLAMRLMEERISHPDKYTDEGKPMPPEFEDPKLYPSALASDNVLAASVVXVTSATKNAXGPWKHLFHVVTDQMNLGAMHVMFTLTDYNGAHIEVKAGEDYKFLNPSYVPVVRQLESAYLQKFYFENTLENATKDTTNMKFMNPKHLSIVNHLTFYLPEMYPTLHRILFLDDYI

SEQ ID NO: 65218 - protein, 325 aa, Gossypium hirsutum
  Clone ID: GOSHI-09MAY01-C2472_1.pep
MVKLRILEFRRHWPTRPEPWKHVFHVVTDKMNLGAMQVMFKLKDYNGAHIEVKAVEDYKFLNSSYVPVLRQLESANLQKFYFENTLENATKDTTNMKFRNPKYLSILNHLRFYLPEMYPKLHRILFLDDDIVVQKDLTGLWKIDMDGKVNGAVETCFGSFHRYAQYMNFSHPLIKQKFNPKACAWAYGMNFFDLDAWRREKCTEEYHYWQNLNENRTLWKLGTLPPGLITFYSTTKPLDKSWHVLGLGYNPSISMDEIRNAAVVHFNGNMKPWLDIAMNQFKPLWSKYVDFDLEFVQACNFGVSLASERITSYKRACLTRSSTSP

SEQ ID NO: 65219 - protein, 77 aa, Gossypium hirsutum
  Clone ID: LIB3145-056-Q1-K1-D12.pep
ELNWNVLQDWDSLEYRSKFGEVWWSLVQVTLIDNATVELEMLELDVLWVFSRIMFFMAACHHYSAFLVQLSIIDELT

SEQ ID NO: 65220 - protein, 64 aa, Gossypium hirsutum
  Clone ID: GOSHI-09MAY01-C2412_1.pep
DAWVGVHRPNSIRALLTTPAHTVHYYWRKFDNAFMRPMFGGRGFVPFVPGSPTERSEPNLPQWQ

SEQ ID NO: 65221 - protein, 180 aa, Gossypium hirsutum
  Clone ID: GOSHI-09MAY01-C102439_1.pep
LRCGACTKVLKFSFVKGIHIVPYELVAAAPPPCEVSDRSEAINAAISTLASCSHGVLQADPMSNSDDCSHTFSKSCFTDGDPVSPGNTDTKTMFSSSYEHMEQRKDFVLKQSQNKHKTSTETFDSAEPSSTMSRSEEVSLEELPPTGWYIASSPHGIFFTKPTDIWIGVIHIGHKLSPLR

SEQ ID NO: 65222 - protein, 230 aa, Gossypium hirsutum
  Clone ID: GOSHI-09MAY01-C2432_1.pep
NSVSLQASVSKGSLSSANLSAIASKCLSYKEVAVAPPGTVLKPLHEGETEHQACTIRTETTKSEDGDHMSVIDNVVDNDDDETEGTHDSENQSEESAPELDNVSSEPATKEDGSNISSVETKGSKLSALAEPFNPGALYIAVTSVYDVTDCQAMLAEPVIEPAVAARVRCGPMFPLYHGNNHSYNMKQGFPRYQTLEQTEFRPPRVMNPHALEFVPTTEPATEAKALHGK

SEQ ID NO: 65223 - protein, 175 aa, Gossypium hirsutum
  Clone ID: GOSHI-09MAY01-C2782_3.pep
AEASGEFIERSAYKLLQSTANDPRTYALQVDYKDFYRKLWLLDLPSKIKITVWKISWNFLATHVNMLLRRLTNTSMCPRCGSGSESMEHLFRECPVTISVFINMCRKTRWGFYSGYSGILHKARHPSVGPSVLQYGPFGEIGITDCITKGVNLVRRFIKGFPQPSERKQLRVEKH

SEQ ID NO: 65224 - protein, 199 aa, Gossypium hirsutum
  Clone ID: GOSHI-09MAY01-C2782_1.pep
RLTNTSMCPRCGSGSESMEHLFRECPVTISVWRELSFHKYVQENQMGFLQWLTWVFTQSSASQRRIFCVAVRAIWGDRNNRLHNKGSKSGREIGRFVNSYILELDSVGKNSRQTSITVKKWKKPMDSFVTINFDAAYERGQNKAAIGVVARDKEGSVLLSCSEVHQRVSSAFGAEAIACLVGRVPGVAEFQAENKRVRE

SEQ ID NO: 65225 - protein, 202 aa, Gossypium hirsutum
  unsure (1)..(202): unsure at all Xaa locations
  Clone ID: LIB3582-058-P1-K1-B12.pep
HNKGSKSGIEIGRFVNSYILELDSVGKNSRQTSITVKKWKKPMDSFVKINFDAAYERGQNKADIGVVARDKEGSVLLSCSEVHQRVSSAFGAEAIACRKALQIGVHMQWERVIIEGDSLSIIKKYKTKXPDKSLVSALIHDIHQLLLYFKDCTFEHIPRSTNSLAHILATEAIKSNGGDYLVGRVPGVAEFQAENERVRDPD

SEQ ID NO: 65226 - protein, 106 aa, Gossypium hirsutum
  unsure (1)..(106): unsure at all Xaa locations
  Clone ID: LIB3584-007-P1-K1-H8.pep
VXTQSSVSQRWIXCXAVWAIWGDRNNRLHKKWSKSVKKWKKPLDRVVKINFDAAYEGGQNKAAIGVVARDKEGSVLLSCPPRSSKGFLSLWGGSNRVLESTGQTSP

SEQ ID NO: 65227 - protein, 114 aa, Gossypium hirsutum
  Clone ID: GOSHI-09MAY01-C2752_3.pep
SLGSILPLVIVCRHFWMKIHQNVLLTRLENHHVLLLLEEFAVSSVQCPLERNLVSSTDSLTYAFFSVTLLLPKRSSRKVKIKRNKIQVVIEGKTKFTRNRLDCKILYRGKFMCK

SEQ ID NO: 65228 - protein, 88 aa, Gossypium hirsutum
  Clone ID: GOSHI-09MAY01-C2752_1.pep
ITLNHLKYKLLLYLHMNLPRYKIFAIEPIPRKLCFSLDHDLNLVSLDLYTKLIYLIHTFIKTAPRTNFDKITILPLNFHIFTLLSQGS

SEQ ID NO: 65229 - protein, 66 aa, Gossypium hirsutum
  Clone ID: LIB3583-023-P1-K1-A4.pep
TRTQLNEFGCSTILMTCHLYPNLFLRFKRDFPRTHLLAIFRKIPKPILGSTLYLTNNTLNLHFIRK

SEQ ID NO: 65230 - protein, 115 aa, Gossypium hirsutum
  Clone ID: GOSHI-09MAY01-C102749_1.pep
FPVAVLVGGSQWVQGYQQAIQTVGKASTFYIWVLLSGIFYHLYNQSSYQALDEISPLTFSVGNTMKRIVVIVSTVLVFRNPVRPLNALGSGIAILGTFLYSQATAKKVSAPEKKS

SEQ ID NO: 65231 - protein, 264 aa, Gossypium hirsutum
  Clone ID: GOSHI-09MAY01-C2702_2.pep
MATEIMNNEVGVEKNEESEASNGIEKLEISNGTDEVSENSSSMQKDEDGVTEVAKKKKKKNKSKKKKEPLKQTDPPSIPVVELFPSREFPEGEIQQYKDDNLWRTTSEEKRDLERFEKPKYNAVRQAAEVHRQVRKYIRSILKPGMLMTDLCETLENTVRKLISENGLQARIAFPTGCSLNWVAAHWTPNSGDKTVLEYDDVMKLDFGTHIDGNIVDCAFTVAFNPMYDPLLEASREATNTGIKEAGIDVRLCDIGAALQEVME

SEQ ID NO: 65232 - protein, 318 aa, Gossypium hirsutum
  Clone ID: GOSHI-09MAY01-C2702_1.pep
RDEPQILRGGGGREVHRQVRKYIRSILKPGMLMTDLCETLENTVRKLISENGLQAGIAFAGGCSLNWVAAHWTPNSGDKTVLEYDDVMKLDFGTHIDGNIVDCAFTVAFNPMYDPLLEASREATNTGIKEAGIDVRLCDIGAAIQEVMESYEVEINGKVFQVKSIRNLNGHSIGPYQIHAGKSVPIVKGGEQTKMEEGEFYAIETFASTGKGYVREDLECSHYMKNFDAGHIPLRLPRAKQLLATINKNFSTLAFCRRYLDRLGETKYLMALKNLCDVGIVQPYPPLCDIKGSYVSQFEHTILLRPTCKEVISRGDDY

SEQ ID NO: 65233 - protein, 86 aa, Gossypium hirsutum
  Clone ID: LIB3166-020-P1-K1-G6.pep
MHFSAFLNCFLAEVAKKKKRKIKGKKKKEPLKQTDPPSIPVVELFPSREFPEGEIQQYKDDNLWRTTSEEKRDLERFEKPKYNAVR

SEQ ID NO: 65234 - protein, 154 aa, Gossypium hirsutum
  Clone ID: GOSHI-09MAY01-C2692_1.pep
KNWMSSVQLWNTDDDYSSISHKLDSKRKDGDSSQGCKYRGTATAFMPFKMNLGFAVRKEEKEEIPVHGLTLLTPGIKNLKEESCSTGSRTSCSRAVSSSAPNAQSTFRSVPQPLSYYQQQLQQHQQQSAWKQRRCWHLSCIAGLSMPCAFRRLS

SEQ ID NO: 65235 - protein, 104 aa, Gossypium hirsutum
  Clone ID: GOSHI-09MAY01-C2682_1.pep
RKKPASKREQPPSKNIQARPRKSTLTSQRPEDQQHQDIHPQTLLLFIDYHNTLHTLKNIFKPQFIPRSRKTINRSKNIQSINTTNQIKEKSQYSNNFFSQSHII

SEQ ID NO: 65236 - protein, 244 aa, Gossypium hirsutum
  Clone ID: GOSHI-09MAY01-C2652_1.pep
MRTLFSTTKRLISCTSATAVATHSRSFSLIPMVIEHSSRGERAYDIFSRLLKERIVCINGPINDDTAHVVVAQLLFLESENPSKPINMYLNSPGGQVTAGLAIYDTMQYIKSPINTICLGQAASMASLLLAAGAKGERRSLPSATIMIHQPSGGYSGQAKDMTIHTKQIVRVWDSLNALYCKHTGQSIDIIQKNMDRDYFMTPEEAKEFGLIDEVIDQRPMALVTDAVANEPKDSKDSKDKGSN

SEQ ID NO: 65237 - protein, 55 aa, Gossypium hirsutum
  Clone ID: LIB3493-025-P1-M1-D7.pep
VTSLVVLTIARETYLNLGIGPLAFSKIPSPISCGGSHEPYLTTTLFLTTHAGTFR

SEQ ID NO: 65238 - protein, 134 aa, Gossypium hirsutum
  Clone ID: GOSHI-09MAY01-C2642_1.pep
MVGDGKLFTLAQVSEHNTPKDCWLIINGKVYDVAKFLEDHPGGDEVLLSATGKDATDDFEDVGHSDSARDMMDQYYVGEIDISTIPKKTTYKPPNQPHYNQDKTSEFIIKLLQFLVPLAILCLAVGIHHYTKSS

SEQ ID NO: 65239 - protein, 345 aa, Gossypium hirsutum
  unsure (1)..(345): unsure at all Xaa locations
  Clone ID: GOSHI-09MAY01-C2662_1.pep
KECVQAYSNVRRDALDECWVILGVEKLSIEEVQKIEWKALDEKMKKWIQAVKITVRVLLNGEKRLCDQIFNGSNSIKEICFNETGEGCVMQLLNFGEAVAIGKRSSEKLFRIPDMYDVLADALLEFEMMFTDEYMCTEAKGVLAGLGDAAKGTFLEFENAVKNEASKKPMQNGEIHPLTRYVMNYVTLPADYSETLNSLLENDKDEADGLKSEDGELETMTPFAKRLLLLISSLESNLEEKSKLYEDGALHXIFLMNNNLYIVQKVKDSELRKLLGDNWVRKRRGSIRQYATSYLRTCWTKALHCLKDEGIGGSSNNASKVALKERFKSFNACFEDIYRIQTGWK

SEQ ID NO: 65240 - protein, 229 aa, Gossypium hirsutum
  unsure (1)..(229): unsure at all Xaa locations
  Clone ID: GOSHI-09MAY01-C2622_3.pep
GDPRAAIYVPPAQQGNVDXQSGILHAEEKDYKTAYSYFFEAFEAFNALEDPRAVFSLKYMLLCKRGVSQADDVAGIISSKAGLQYVGPELDAMKAVADAHAKRSLKLFEIALRDFKAQLEEDPIVHRHLSSLYDTLLEQNLCRLIEPFSRVEIAHIAELIELPVDHVEKKLSQMILDKKFAGTLDQGAGCLVIFDDPKTDAIFPATLETLSNIGKVVDXLYGGAANIMA

SEQ ID NO: 65241 - protein, 425 aa, Gossypium hirsutum
  Clone ID: GOSHI-09MAY01-C2622_2.pep
AFTMSSSYLPATTDSIALALEAKTPSEAISILYRVLENPASAPDALRIKEQAITNLSDLLRQENRAEELRSLLTQLRPFFALIPKAKTAKIVRGIIDDVAKIPGTSDLQISLCKEVVQWTRAEKRTFLRQRVEAKLAALLMENKEYSEALNLLSGLIKEVRRLDDKLLLVDIDLLESKLHFSLRNLPKAKASLTAARTAANAIYVPPAQQGNIDLQSGILHAEEKDYKTGYSYFFEAFEAFNALEDPRAVFSLKYMLLCKIMVSQADDVASIISSKAGLQYVGPELDAMKAVADAHAKRSLKLFEIALRDFKAQLEEDPIVHRHLSSLYDTLLEQNLCRLIEPFSRVEIAHIAELIELPVDHVEKKLSQMILDKKFAGTLDQGAGCLVIFDDPKTDAIFPATLETISNIGKVVDSLYVRSAKIMA

SEQ ID NO: 65242 - protein, 192 aa, Gossypium hirsutum
  Clone ID: GOSHI-09MAY01-C2622_1.pep
MPSPLGSPTSSRSVTQTVNGSHRFTIKGYSLAKGMGVGKHIASESFTVGGYQWAIYFYPDGKNPEDHSTYVSVFVALASEGTDVRALFELTLLDQSGKGKHKVHSHFDRALESGPYTLKYRGSMWGYKRFFRRAMLETSDFLKDDCLKINCTVGVVVSETDCPRLHSIQVPESDIGSHFGILLENEKGSDIT

SEQ ID NO: 65243 - protein, 94 aa, Gossypium hirsutum
  unsure (1)..(94): unsure at all Xaa locations
  Clone ID: uC-gsflmaxxa060g07b1.pep
MPSPLGSPTSSRSVTQTVNGSHRFTIKGYSLAKRSLKLLEIALHDFKAQLEEDPIVHRHLSXAXDTLLEQNLSRLSEPFSRVENAHIAELIELT

SEQ ID NO: 65244 - protein, 89 aa, Gossypium hirsutum
  unsure (1)..(89): unsure at all Xaa locations
  Clone ID: LIB3189-021-P1-K1-A8.pep
ENPAPAPDALRFKEQAITNLSDLLRQENRAEELRSLLTQLRPFFALIPKAKTAKIVRGIIDDVAXKIPGTSDLQISLCKEVVHWTLADK

SEQ ID NO: 65245 - protein, 145 aa, Gossypium hirsutum
  unsure (1)..(145): unsure at all Xaa locations
  Clone ID: GOSHI-09MAY01-C2182_8.pep
MREILHIQGGQCGNQIGAKFWEVICAEHGIDPTGRYNGDLDLQLERINVYYNESSCGRFVPRAVLMDLEPGTMDSIRSGPVGQIFRPDNFGFGQSGXAGNNWAKGHYTXEGAELIDSXLDVVRKKXNCDCLKXFQVCHSWEVDWI

SEQ ID NO: 65246 - protein, 150 aa, Gossypium hirsutum
  unsure (1)..(150): unsure at all Xaa locations
  Clone ID: GOSHI-09MAY01-C2182_7.pep
MSHTYLCYFHLARGPVGDLHHLISAALSGVTCCLRLPGQLNSDLRKLAANLIPFPRLHFFMVGFAPLTSRGSQQYRALTVPELTQHMWDAKNMMCAADPRYGRYLTASAMFCGXMSTKEVVEQMLFGSDLKLSIILFCLFLSNFSLLPFG

SEQ ID NO: 65247 - protein, 121 aa, Gossypium hirsutum
  Clone ID: GOSHI-09MAY01-C2182_4.pep
MREILHIQGGQCGNQIGAKFWEVVCSEHGIDPTGRYQGDLDLQLERINVYYNEASCGRFVPRAVLMDLEPGTMDSIRSGPVGQIFRPDNFVFGQSGAGNNWAKGHYTEGAELIDSVLDVAP

SEQ ID NO: 65248 - protein, 136 aa, Gossypium hirsutum
  Clone ID: GOSHI-09MAY01-C2182_3.pep
LCFRPRVRFRGKVSTKEVDEQMLNVQNKNSSYFVEWIPNNVKSTVCDIPPTGLKMASTFIGNSTSIQEMFRRVSEQFTAMFRRKAFLHWYTGEGMDEMEFTEAESNMNDLVSEYQQYQDATADEDEYEEEEAEYED

SEQ ID NO: 65249 - protein, 446 aa, Gossypium hirsutum
  Clone ID: GOSHI-09MAY01-C2182_1.pep
MREILHIQGGQCGNQIGAKFWEVVCAEHGIDATGRYQGDLDLQLERINVYYNEASCGRFVPRAVLMDLEPGTMDSIRSGPVGQIFRPDNFVFGQSGAGNNWAKGHYTEGAELIDSVLDVVRKEAENCDCLQGFQVCHSLGGGTGSGMGTLLISKIREEYPDRMMLTFSVFPSPKVSDTVVEPYNATLSVHQLVENADECMVLDNEALYDICFRTLKLTTPSFGDLNHLISATMSGVTCCLRFPGQLNSDLRKLAVNLIPFPRLHFFMVGFAPLTSRGSQQYRALTVPELTQQMWDAKNMMCAADPRHGRYLTASAMFRGKMSTKEVDEQMLNVQNKNSSYFVEWIPNNVKSTVCDIPPTGLKMASTFIGNSTSIQEMFRRVSEQFTAMFRRKAFLHWYTGEGMDEMEFTEAESNMNDLVSEYQQYQDATADDEEYEEEEEEREYED

SEQ ID NO: 65250 - protein, 106 aa, Gossypium hirsutum
  Clone ID: uC-gsflmaxxa009f08b1.pep
MREILHIQGGQCGNQIGAKFWEVDCSQHGINAPGLCLTNIMLSQKGLKLVLLVLVLKVVLINVVLLDVPVIVILVVLFYHFLKFQKSQEFQKSHKSHRSHISHIFH

SEQ ID NO: 65251 - protein, 74 aa, Gossypium hirsutum
  Clone ID: LIB3585-044-P1-K1-D5.pep
RPTTRTHIFSVSLSPASLPLLLSLLREGREILHIQGGQCGNQIRANFWKVVCAEQSINTNYQFPSILLSWLSNT

SEQ ID NO: 65252 - protein, 103 aa, Gossypium hirsutum
  unsure (1)..(103): unsure at all Xaa locations
  Clone ID: LIB3493-002-P1-M1-G4.pep
ETIPLSHQSKVREILHIQGGQCGNQIGAKFWEVICAEHGIDPTGRYNGDLDLQLERINVYYNESRCGRFGPRAALMDLEPGTMDSXRSGPAGNTFSPRRSLCC

SEQ ID NO: 65253 - protein, 86 aa, Gossypium hirsutum
  unsure (1)..(86): unsure at all Xaa locations
  Clone ID: uC-gsflnu33B081e06b1.pep
IIFDFLILNGFFIINFFIIIIFFFCLFFFFFFXPELHTRFAYNISSFSSFAFIKLKTIFRKKLQRKKNTSLQISRNATAVTAKVND

SEQ ID NO: 65254 - protein, 143 aa, Gossypium hirsutum
  Clone ID: uC-gsflmaxxa009f03b1.pep
MVYLLVPGLFSNHGPLYFVSTKTSFSKLGLTCHIGSKHSVDPTGRYQGDLDLQLERINVYYNEASCGRFVPRAVLMDLEPGTMDSIRSGPVGQIFRPDNFVFGQSGAGNNWAKGHYTEGAELIDSVLDVARKEAENCDCLQGF

SEQ ID NO: 65255 - protein, 105 aa, Gossypium hirsutum
  unsure (1)..(105): unsure at all Xaa locations
  Clone ID: LIB3135-013-Q1-K1-B11.pep
RKMSTKEVXEHMLNVQNKNSSYFVEWIPNNVKSTVCDIPPTGLKMASTFIGNSTSIQEMCRRVSEQFTAMFRRKAFLHWYTGEGMDEMEFTEADSNMNDLVSEYQ

SEQ ID NO: 65256 - protein, 93 aa, Gossypium hirsutum
  unsure (1)..(93): unsure at all Xaa locations
  Clone ID: LIB3583-028-Q6-K1-H2.pep
MXTGRYQGDXDLQLERINVYYNEASCGRFVPRAVLMDLEPGTMDSIRSGPVGQIFRPDNFVFGQSGAGNNWAKGHYTEGAGLIDSVLDVGRKE

SEQ ID NO: 65257 - protein, 134 aa, Gossypium hirsutum
  Clone ID: uC-gsflnu33B137e03b1.pep
MREILHIQGGQCGNQIGAKFWEVVCAEHRMMLTFSVFPSPKVSDTVVEPYNATLSVHQLVENADECMVLDNEALYDICFRTLKLTTPSFGDLNHLISATMSGVTCCLRFPGQLNFDLKKLAVNLIPFSRLHFFM

SEQ ID NO: 65258 - protein, 59 aa, Gossypium hirsutum
  Clone ID: LIB3166-007-P1-K1-B9.pep
TFSVFPSPKVFDTVVEPYNGTLSVHQLVENADECMVLDNEALYDICFRTLKLTTFSCKL

SEQ ID NO: 65259 - protein, 241 aa, Gossypium hirsutum
  unsure (1)..(241): unsure at all Xaa locations
  Clone ID: GOSHI-09MAY01-C102149_1.pep
KPKAEIPMXENEIRITTQGRIRNYITYATTLLLEKGSNEIVLKAMGGGINKTVMIAELIKTRVADLHQITSIGSTDITDMWEPLEEGLLPLEITRHVSMITVTLSKKELDMSSTGYQPPLQADQVKPLNEYEDDGAPEPSPKTRGRGRGGRGRIRAKGEYNGDGLGGKGRGRGRGRSFRGRGRGGAYGGGGYYGVYSESDAALTQVRGRGRERGRGGRVRGGGGRGRYSKTEPGPNQAKAA

SEQ ID NO: 65260 - protein, 250 aa, Gossypium hirsutum
  Clone ID: GOSHI-09MAY01-C2172_1.pep
VIQKALEVVNVDQQTRMVAELDGSIMKCVHDQNGNHVIQKCIECVPQDRIQFIISAFHGQVVALSSHPYGCRVIQRVLEHCNDAKTQQIIMDEIMQSVCTLAQDQYGNYVIQHVLEHGKPHERSTIISRLARRPVEMSQQKFASNVVEKCLTFGGPQERQILVNEMLGSTDENEPLQAMMKDQFGNYVVQKVLETCDDQNLELILSRIKVHLNGLKRYTYGKHIVSRVEKLIATGERRIGLLSSLSSLSS

SEQ ID NO: 65261 - protein, 172 aa, Gossypium hirsutum
  unsure (1)..(172): unsure at all Xaa locations
  Clone ID: LIB3585-016-P1-K1-D12.pep
PRVRPLSLQMYGCRVIQKALEVVNVDQQTRMVAELDGSIMKCVHDQNGNHVIQKCIECVPQDRIQFIISAFHGQVVALSSHPYGCRVIQRVLEHCNDAKTQQGIMDEIMQSVCTLAQDQYGNYVIQHVLEHGKPHERSTIISKLAGQIVKMSQQKVASNVVXKCLTFWWATK

SEQ ID NO: 65262 - protein, 367 aa, Gossypium hirsutum
  unsure (1)..(367): unsure at all Xaa locations
  Clone ID: GOSHI-09MAY01-C2162_1.pep
NRVSNGTSVVDLDIXPFRLGGFASTTIQLLGIVGVMTKVTWQVLLLVVPMAIACLWMPTRPPAPPPARPRIVSIQKSPVIHLFGESIAGAATIRGFGQEKRFMKRNLYLLDCFARPFFCSLAAIEWLCLRMELLSTFVFAFCMILLVSFPHGSIDPSMAGLAVTYGLNLNARLSRWILSFCKLENKIISIERIYQYSQIPSEAPPVIENSRPPSSWPECGTIELLDLKVRYGENLPVVLHGVSCAFPGGMKIGIVGRTGSGKSTLIQALFRLIEPAGGRIIIDNIDISTIGLHDLRSRLSIIPQDPTLFEGTIRGNLDPLEEHSDHEIWEALDKSQLGDIVREKEQRLDTPVLENGDNWSVGQRQLV

SEQ ID NO: 65263 - protein, 115 aa, Gossypium hirsutum
  Clone ID: GOSHI-09MAY01-C2112_2.pep
MGSSILPDLGAEILIPVCAVIGIVFSLAQWLLVSKVKLSPGRDSGSPGNNGAGGKNGYSDYLIEEEEGLNDHNVAIKCAEIQTAISEGATSFLFTEYQYVGIFMVAFAILIFLFL

SEQ ID NO: 65264 - protein, 251 aa, Gossypium hirsutum
  Clone ID: GOSHI-09MAY01-C2112_1.pep
MGASSILPDLGTEILIPVCAVIGIAFSLVQWLLVSKVKLSPGRDSGSPGNNGAGGKNGYADYLIEEEEGLNDHNVVIKCAEIQTAISEGATSFLFTEYQYVGIFMVAFAILIFLFLGSVEGFSTKSQPCTYDKSKMCKPALATAIFSTVSFLLGAVTSVVSGFLGMKIATYANARTTLEARKGVGKAFITAFRSGAVMGFLLAANGLLVLYIAINLFKLYYGDDWGGLFEAITGYGLGGSSMALFGRVGGG

SEQ ID NO: 65265 - protein, 112 aa, Gossypium hirsutum
  Clone ID: LIB3197-053-Q1-M1-D12.pep
MGASILSDLGTEILIPVCAVIGIAFSLLQWVLVSKVKLSPGRDPGSPRNNGAGGKNDCADYLIEEEEGLNDHNVGLKCAEIQSAISEGATSFLFTEDQYGGIFMGAFANLDF

SEQ ID NO: 65266 - protein, 109 aa, Gossypium hirsutum
  Clone ID: LIB3083-063-Q1-L1-G8.pep
ILSDFEPERLSPVCAVIGIAFSLVQWVLVSKVKLSPGRDSVNNGSGAKDGYSDYLIEEEEGLNDHSVVLKCAEIQSAISEGATSFLFTEYQYRGIFMVAFAILIFLFLG

SEQ ID NO: 65267 - protein, 58 aa, Gossypium hirsutum
  unsure (1)..(58): unsure at all Xaa locations
  Clone ID: LIB3166-056-P1-K1-A11.pep
MGASILSDFGAEILIPVCAEIGIAFSLVQRVLVSKXKLSPGRDSENXGSGAKNGYSDY

SEQ ID NO: 65268 - protein, 419 aa, Gossypium hirsutum
  unsure (1)..(419): unsure at all Xaa locations
  Clone ID: GOSHI-09MAY01-C2082_1.pep
RKPYAHIYTSNGVSLHELAISLSXGRLYSAKDNDVACIICADGGNLLLCDGCPRAFHKECASLPTIPHGRWYCKYCQNMFMREKCAEHNANAAAAGRILGVDAIEQITRRCIRIVKNIEAELSGCALCRACDFSKSGFGPRTVILCDQCEREYHIGCLRTHKMADLREIPKGKWFCCSDCGRIHSTLQKLLIHGAERLPDSLLDVLKKKYVEKGLDADINIDVRWRLLSGKFASPETRLLLSQAVGIFHECFNPIVDAATGRDLIPCMVYGRNLKGQEYGGMYCAVLTINSFVVSAGIIRVFGQEIAEIPLVATSIANHGKGYFQLLFSCIEKLLAFLNVKNIVLPAAEEAESIWTDKFGFKKLRPDQLSEYRKSCCQMVIFQGTSMLQKEVPSDQLVSSIERTELYKHMNQGRSYFLE

SEQ ID NO: 65269 - protein, 177 aa, Gossypium hirsutum
  unsure (1)..(177): unsure at all Xaa locations
  Clone ID: GOSHI-09MAY01-C2002_2.pep
GGGGSKKFEGSSEFVHMRYHMGPVLTAHITIHPIWYGRWQKSQKKIIREFINSISPVEPKHPSGAGSWXTVQLHTDQTGANISRTVLLREEKNDRFYSHGKSFTRSSIQXSVIKSAVTARTKPLPINPKSGLYLLLTSHDVYVENIGHTNLLITLLHVHLNHAVHAHLRIGIKHSKL

SEQ ID NO: 65270 - protein, 339 aa, Gossypium hirsutum
  Clone ID: GOSHI-09MAY01-C2002_1.pep
MHWVLPVLLAVIGVTALLVVTPVSGYRPWPYLKPNSSDLMFGGSKKFEGSSEFIHMRYHMGPVLTANITIHPIWYGRWQKSQKKIIREFINSISAVDSKHPSVAGWWKTVQLYTDQTGANISRTVLLGEEKNDRFYSHGKSITRLSIQSVIKSAVTSRTKPLPINPKSGLYLLLTSDDVYVEDFCGQVCGFHYFTFPSIVGYTLPYAWVGNSAKLCPGVCAYPFAVPQYMPGLKPLKSPNSDVGVDGMISVIGHEVAELATNPLVNAWYAGQDPVAPVEIADLCEGIYGTGGGGSYTGQLLNDKDGATYNMNGIRRRYLVQWVWNHIVSYCTGPNALDQ

SEQ ID NO: 65271 - protein, 76 aa, Gossypium hirsutum
  unsure (1)..(76): unsure at all Xaa locations
  Clone ID: LIB3166-037-P1-K1-E2.pep
KFEVLTEFIPFRYYFGXPALPVILTFHPICSGRWRNSQRKFIRGCINSISAVDSKHPSVAGWWKTVQFYTSQTGAN

SEQ ID NO: 65272 - protein, 260 aa, Gossypium hirsutum
  unsure (1)..(260): unsure at all Xaa locations
  Clone ID: GOSHI-09MAY01-C2392_1.pep
MRAPALSFCSNVFPGSTPQCEKQPGSGTAIFPRAQWGCRGSNSYQRLKKISFRSNCNKGDAGCGCGGGSDGGGGLSSIVTREVFEEMLPYRNDPRCPAAGFYTYDALMEAAKAYPAFAATGDDATRKREVAAFFGQTSHETSGGVGWNAPGGPYVWGYCFTKQINPPSDYLDKTCKEYPCVPGQKYYGRGPIQLTXRNYNYGQFGATIGMEKELLENPDLIVSDATLCFQSALWFWMTPQGLKPSCHDVITGAWTPSARD

SEQ ID NO: 65273 - protein, 75 aa, Gossypium hirsutum
  Clone ID: GOSHI-09MAY01-C2322_1.pep
INNSANMMYHKVNIPYSTSNKRDVKKGCVLMYPVKPQHNKCKLFRKEQKKKGNLSLAVKWKSPIFYNHLSFALYI

SEQ ID NO: 65274 - protein, 197 aa, Gossypium hirsutum
  Clone ID: GOSHI-09MAY01-C102319_1.pep
RRLYLWMARCPNGPSVKFLVNAVHTMEELKLTGNHLKGSRPLLTFSSNFEKDAHWKLLKEMIIQIFGTPKEHRKAKPYHDHVFVFSIADDHIWFRNYQISVPHNESDKMVRGGLDKMTLVEVAPRFCLNPIKIFAGSFGGPTLHENPFYVSPNQIRALEKRQKAGKYAKKVKAKTRRKMHELSNPLEPDEFADMWRE

SEQ ID NO: 65275 - protein, 187 aa, Gossypium hirsutum
  unsure (1)..(187): unsure at all Xaa locations
  Clone ID: GOSHI-09MAY01-C2242_1.pep
LLNDCPPNLYARLVSTVDSRDFLTRLKSLNESDIKVEFPFKEAAGDDIHSAEVLINVDQKEPSWWVWVTDEMVPSNVEEWSGIDDENYIVVSEEHVVDGVANFMAKCLLSNPKAQTLTPEELQKTMLKALEGVSKLEKVLSIWHAGKMFYVLSTWGLTLAGLYKSRTIVKXAAMGIHTTGKVVMRVL

SEQ ID NO: 65276 - protein, 133 aa, Gossypium hirsutum
  Clone ID: LIB3584-039-P1-K1-D12.pep
HASGGHEAVEVAKTVLEVADVAWTALECSHHLHHHHDAPHNLHNSELQKELETLKSENRRLRNQLEQNLKLLNNLSESPVLLNDCPPNLYARLVSTVDSRDFLTRLKSLNESDIKVEFPFKEAAGSYILNLFI

SEQ ID NO: 65277 - protein, 152 aa, Gossypium hirsutum
  Clone ID: GOSHI-09MAY01-C2202_2.pep
FRFASAPAPARAKYKLVFLGDQSVGKTSIITRFMYDKFDNTYQATIGIDFLSKTMYLEDRTVRLQLWDTAGQERFRSLIPSYIRDSSVAVIVYDVASRQSFLNTSNWIEEVRAERGSDVIIMLVGNKTDLVDKKQVSVEEGEAKARDINVMF

SEQ ID NO: 65278 - protein, 204 aa, Gossypium hirsutum
  Clone ID: GOSHI-09MAY01-C2202_1.pep
PISALAKYKLVFLGDQSVGKTSIISRFMYDKFDNNYQATIGIDFLSKTMYLEDRTVRLQLWDTAGQARASALAPGYIRDSSVAVTVYDVASRQSFLNTSKWIEEVRAERGSDVIIVLVGNKTDLVDKRQVSVEEAEAKARDLNVMFIEASAKAGFNIKALFRKIAAALPGMETLSSTKQEDMVDVNLKSTNANASQSQQQSGGC

SEQ ID NO: 65279 - protein, 72 aa, Gossypium hirsutum
  Clone ID: LIB3583-025-P1-K1-F9.pep
PTRPPTRPVIHCVVICVFRPLYVVFAFSFCGALSHSTWATYPHEFEEFATSLKCEKKKKSSNCSFFTIKYLC

SEQ ID NO: 65280 - protein, 75 aa, Gossypium hirsutum
  Clone ID: LIB3828-001-Q1-K6-B12.pep
TFTLFWPTEILLLLIYMFFIQLLDILFDSVLKCGRCYWIMDWHSVTIFLDKLRNKAITFTIFQATCVLLLYVESN

SEQ ID NO: 65281 - protein, 333 aa, Gossypium hirsutum
  unsure (1)..(333): unsure at all Xaa locations
  Clone ID: GOSHI-09MAY01-C2222_1.pep
MRYFNVNKLIDSNERICKKELINNTFSEXDARKILRIPLARVTHDDFLVWGGESSGAFSVRSTYKLLQTSDENPRTYFLQTIYRKFYKKLWLLNLSIKIKIIIWRFSWNYLPTKVKMQYRKLANNTSCPRCGERAETIDHLFRECPGCLISLPLSIPQFLLCTQGHMGDRNTRIPREFIKINFDSAYDRNYNHSALGIVVRNEEGIVLLSCSEIHQGVVSAFAAEAIACRKAVQIRVEKKWSAIIIKGESLAVIKKCKNKSQDRPLIGAFIYDIQQRTNRSRNFMFKHIPRFAIALAHILATETLKRKEKVYLEMNVPKYAENQRKVSFLKEK

SEQ ID NO: 65282 - protein, 145 aa, Gossypium hirsutum
  unsure (1)..(145): unsure at all Xaa locations
  Clone ID: LIB3145-011-Q1-K1-E1.pep
ISLPLSIPXFLLCTQGHMGDRNPRIHEXRISTCKEIVNFISNYIVELNGLEKRKSVITKETRSWSHPPREFIKINFDSAYDRNYNHSALGIVVRNEEGIVLLSCSEIHQGVVSAFAAEAIACRKAVQIRVEKKWAAIIIKGESLA

SEQ ID NO: 65283 - protein, 350 aa, Gossypium hirsutum
  unsure (1)..(350): unsure at all Xaa locations
  Clone ID: GOSHI-09MAY01-C3992_1.pep
RIRTWKKHSEFISYPIYLWTEKTTEKEISDDEEDEPKKDEEGNVEDVEDDESKSKKKKKIKEVSHEWQLINKQKPIWLRKPEEISKEEYASFYKSLTNDWEDHLAVKHFSVEGQLEFKAILFVPKRAPXFDLFDTRKKMNNIKLYVRRVFIMDNCEELIPEYLGFVKGVVDSDDLPLSISREMLQQNKILKVIRKNLVKKCIEMFNEIAENKEDYNKFYDAFSKNLKLGIHEDSQNRAKLADLLRYHSTKSGDELTSLKDYVTRMKEGQKDIYYITGESKKAVENSPFLEKLKKRGYEVLFMVDAIDEYAVGQLKEYDGKKLVSATKEGLNLEDETEEEKKKKEGKKKSF

SEQ ID NO: 65284 - protein, 446 aa, Gossypium hirsutum
  Clone ID: GOSHI-09MAY01-C3922_1.pep
LVLFEANGLAVLSEVLSAIFAEVMQGKPEFTDHLTHKLKHHPGQIEAAAIMEHILDGSSYIKAAQKLHELDPLQKPKQDRYALRTSPQWLGPQIETIRFATKMIEREINSVNDNPLIDVSRDKALHGGNFQGTPIGVSMDNTRLAIAAIGKLMFAQFSELVNDYYNNGLPSNLSASRNPSLDYGFKGAEIAMASYCSELQYRGNPVTNHVQSAEQHNQDVNSLGLISARKTAEAIDILKLMSSTFLVALCQAIDLRHLEENLKNTVKNTVSQVAKRVLTMGSNGELHPSRFCEKDLLRVVDREYLYAYADDPCSANYPLIQKLRQVLVDHALMNGDREKDSTTSIFQKIGVFEEELKTHLPKEVESARTEFENGSPAIPNKIEECRSYPLYKFVREVLGTHLLTGEKVISPGEECDKVFTAMCAGKLIDPLLDCLKDWNGAPLPIC

SEQ ID NO: 65285 - protein, 195 aa, Gossypium hirsutum
  Clone ID: GOSHI-09MAY01-C3852_1.pep
MSASRFIKCVTVGDGAVGKTCLLISYTSNTFPTDYVPTVFDNFSANVVVDGSTVNLGLWDTAGQEDYNRLRPLSYRGADVFILAFSLISKASYENVAKKWIPELKHYAPGVPIVLVGTKLDLRDDQQFLTDHPNAVPISTAQGEELKKQIAAPAYIECSSKTQQNVKAVFDAAIKVVLQPPNKNKKKKSGGCSIL

SEQ ID NO: 65286 - protein, 105 aa, Gossypium hirsutum
  Clone ID: uC-gsronu33B011c08b1.pep
MASICNRFISRSSPFIKSAVRSNGPKSSFSRSAAAPSISSPLPSPSISPLRRFSSRCPSELGSVQSLLPLHSAVAVARMTSCLSTTSRSCRALSQGTLCCTYPGL

SEQ ID NO: 65287 - protein, 86 aa, Gossypium hirsutum
  Clone ID: uC-gsflnu33B064g05b1.pep
NILTPKMLKLSFSSSSSSSSSSSSRIVAAFLKLYLNRLQVNPFSFFHHHHQLPLNPIFSNSALFHFLSCSSHPHARTTPFFNLYIA

SEQ ID NO: 65288 - protein, 81 aa, Gossypium hirsutum
  Clone ID: uC-gsflmaxxa076c08b1.pep
SSLLLLRRHHHHHHLQELPAVLRFSKVFQFSISFKKFSSQWLQFATDSSPPPPLREPPSEPRTFEEGFQYSLPFNSHGGRK

SEQ ID NO: 65289 - protein, 82 aa, Gossypium hirsutum
  Clone ID: LIB3583-007-P1-K1-G1.pep
MSASRFIKCVTVGDGAVGKTCLLISYTSNTFPTDYVPTVFDNFSANVVVDGSTVNLGLWDTAGQEDYNRLRPLSYRGADVFI

SEQ ID NO: 65290 - protein, 90 aa, Gossypium hirsutum
  Clone ID: uC-gsflmaxxa069b01b1.pep
EKGKEMGKKKEREEKGKRVEQRESKDEWRRRQKERKELQHFWGQNVLDSKNAQTQSTIKNKRSFLHRFDNQKLVKGDHQNSMVEKTWNRR

SEQ ID NO: 65291 - protein, 91 aa, Gossypium hirsutum
  unsure (1)..(91): unsure at all Xaa locations
  Clone ID: GOSHI-09MAY01-C3842_1.pep
VSVFRGSRXDLESGFPVLIPERRTVRVHAGRPVNSNSFVFLVTVLLLFMIMNSQQVSPNFLLWLVLGVFXMATTLRMYATCQQLQAQAQAH

SEQ ID NO: 65292 - protein, 346 aa, Gossypium hirsutum
  Clone ID: GOSHI-09MAY01-C3862_1.pep
SSKSKGGLPQSQSVSARNRRRDSPPGMVLLSLILPPILLLLLLYFIVRPRPVTIPIKNRHVFITGGSSGIGLALAQQAASQGARVSLLARSLNKLQEAKESIRRSSGLDVAIFSADVRDHDAVQKAANDAGPIDVLVVNQGVFVPQELEKQGLDEIKFMIDVNLMGSFNVIKAALPLMKERKDRLPASISLMSSQAGQVGIYGYTAYSASKFGLPGLAEALQQEVIADNIHVSVVYPPDTDTPGFEKENEVRPELTKSLAGSSGSMKADEVAKKALDGIKSGSFTVPCNFEGHMLAIATAGLSPERSFLMAFIEVASVGVLRLVGLFFQWNWYQTIQNWHAKKNRT

SEQ ID NO: 65293 - protein, 109 aa, Gossypium hirsutum
  Clone ID: LIB3585-066-P1-K1-F6.pep
LLPFYQCSLIVPYLACLIGQFPTGLALAIEKKSRRIEISLYCLARAIESLFTCMADVGYLPKSMNLKRADVVIFSLSTAIIMHCYAQEREVFRSKHLSVLDWVFGVPPP

SEQ ID NO: 65294 - protein, 137 aa, Gossypium hirsutum
  Clone ID: LIB3583-020-P1-K1-C10.pep
ARLRKSLIGTVRSSLFLSAYTASAWVWTCMVNRFWGKCDIPIVAMGTFPTGMALAIEKKSRRIEISLYCVARAIESLFTCMADVGYLPKSMNLKRADVVIFSLSTAIIMHCYAQEREVFRSKYLSVLDWVFGVPTPP

SEQ ID NO: 65295 - protein, 175 aa, Gossypium hirsutum
  Clone ID: GOSHI-09MAY01-C3822_1.pep
MERLLYSSSPTPLEISRKPSPFLSRLARFDSPTLGFVPSLTRPQLRRFISISCKAENNPSHFSYPLSNPSNELPSLGSPRVDSANGSTPTSNFLKLFAIKASAQRKAITAGTYIALSAIIMFLIQPIFVPTAFATFQAGTKASGTAAAASRGGVLRTELLSNASTGFLAGWLHSL

SEQ ID NO: 65296 - protein, 81 aa, Gossypium hirsutum
  unsure (1)..(81): unsure at all Xaa locations
  Clone ID: LIB3585-066-P1-K1-E8.pep
MFQAITAGTYIALSAIIMFLIQPIFAPAAFATFQAGAKAGGTAAAXVRGGVLRTELLSNAWTGFFAGCLHTLSGPDHLSCL

SEQ ID NO: 65297 - protein, 223 aa, Gossypium hirsutum
  Clone ID: GOSHI-09MAY01-C3512_1.pep
MDRITKAARLMIVSDLDHTMVDHHDPENMSLLRFNALWESNYRHDSLLVFSTGRSPTLYKQLRKEKPMLTPDITIMSVGTEITYGSSMLPDDGWVKILNQKWDRNIVIEETSKCPELTLQAETEQRPHKVSFYVDKTKAQVVMKELSSRLEKRGLDVKLIYSGGMDLDVLPQGAGKGQALSYLLNKLKTEGTLPVNTLACGDSRNDAVLFSIPDVYGVMVSNA

SEQ ID NO: 65298 - protein, 193 aa, Gossypium hirsutum
  Clone ID: LIB3583-051-P1-K6-G9.pep
MLCIQSYALFPSKYTERCTPDYNTLLDVKLIYSGGMDLDVLPQGAGKGQALSYLLNKLKTEGTLPVNTLACGDSGNDAELFSIPDVYGVMVSNAQEELLQWHAENAKGNPNIIHAKERCAAGIIEAIGHFNLGSNTSPRDVADFVECKLDRVNPGYEVVKFYLFYERWRRGEAANCETYIASLKASCDPTATF

SEQ ID NO: 65299 - protein, 326 aa, Gossypium hirsutum
  Clone ID: GOSHI-09MAY01-C3442_1.pep
LKYASLCRQNGRISQARSTLIKLLQYDPQTAPENVRYHGPPKVMLAYLKYQWSLGDDLKRTEAFSKLQNMARELSISPNIQSIPSTASMNGTSANVPLLARVYLKLGAWQWTLSSPGLDDDSIQEILSAFRNATQFAPKWAKAWHAWALFNTAVMSHYARGLQTIASQFVVAAVTGYFHSIACAAYAKGVDDSLQDILRLLTLGFNHGATAEVQMALQVGFALVNINTWLAVLPQIIARIHSNNHAVRELIQSLLVRIGQSHPQALMYPLLVACKSISNLRKAAAQEVVDKAHLVSKELIRVAILWHESWHEALEEASRLYFGEHN

SEQ ID NO: 65300 - protein, 123 aa, Gossypium hirsutum
  Clone ID: LIB3543-034-Q1-K1-G5.pep
FHFPNIQSIASTASTSGTNANVPLLARVYHKLGAWQWSLSPGLDDDSIQEILTAFRNATQCATKWAKAWHAWALFNTAVMSHYTLRGFPTIASQFVVAAVTGYFHSIACAANIQLYPLLVAGF

SEQ ID NO: 65301 - protein, 255 aa, Gossypium hirsutum
  unsure (1)..(255): unsure at all Xaa locations
  Clone ID: GOSHI-09MAY01-C3402_2.pep
PPSVRPASAGAWGEDESERTITRKAPRGKLVVREVGVPILGLVSHSKPLEFEASSQDSNCKTPTRRKRVLDTTLDDNALVVEAKGPVGVRRRKWGKWAAEIRHPLEKTRIWLGTFDTLEDAAGAYDAKKLEFGALAVAAAAAAATASSDKTYDISCSASTSHTSNSVASVPEESVSPSSHTTPSSVLELDTSASVAFFNSNHDSGGCEHRXFDANFANLVIPDLCFLDDPLLSGSVGQELNLDEEPSDYLFVNDS

SEQ ID NO: 65302 - protein, 338 aa, Gossypium hirsutum
  unsure (1)..(338): unsure at all Xaa locations
  Clone ID: GOSHI-09MAY01-C3402_1.pep
MLEHRKQTMNLSKSGKKPKKPESTMSEEETQMTRKVRVIFHDPYATDSSSSEDESXEVLLERLQGERRFVREIRVPVLGLAPQVKPLESETSSQDSYSKTPTSRKRVLSNARVGKPLVAKTKKPVGVRQRKWGKWAAEIRHPLKKTRIWLGTYDTLEEAAKAYEAKKLEFEALTVAAAASASSDKTNDLSCSAAASHNNTVPSASEESESLVSHTSPSSVHELDTSASGSVSNNNDDCGDANKEVFDANFADIPIPDLCFIDDPLLSGSVGQELNIDAEAADYLFVNDFGMMLGGYCSIEDLSICGIGADEPSDLPDCDFSTDDFVFDEVAPLNIACP

SEQ ID NO: 65303 - protein, 57 aa, Gossypium hirsutum
  Clone ID: LIB3189-018-P1-K1-D7.pep
APIKAKIKLSRHIFTNQPPLALPKRNRKQRSTKPPLCRFAFSREPKTRRKENRLRYC

SEQ ID NO: 65304 - protein, 76 aa, Gossypium hirsutum
  unsure (1)..(76): unsure at all Xaa locations
  Clone ID: LIB3583-050-P1-K6-H1.pep
QLCVWRIDGWXEKKKSRFIQAPAGRQSPLAGXTKVQFHNDQTHLLVAHESQIAIYDSKLECLRSVSCLPRIIFLVL

SEQ ID NO: 65305 - protein, 92 aa, Gossypium hirsutum
  Clone ID: LIB3493-057-P1-M1-A5.pep
SACRRNQSQFHNDQTHLLVVHESQIAIYDSKLECLRSWSPKESLNAPISSAIYSCDGSLVYAGFCDGAIGVFDSDNLRLRCRIAPSAYIPSL

SEQ ID NO: 65306 - protein, 149 aa, Gossypium hirsutum
  Clone ID: GOSHI-09MAY01-C3782_1.pep
MRSNYLTTIFPEVRLKRYLEMRGADGGPWRRLCALPAFWVGGLYDEVSLQSILDMTADWTCEEREMLRNKVPKTGLKTPFRDGLLWHIAEDVLKLAKDGLERRGFKESGFLNEVAEVVRTGVTPAEKLLELYNGKWGQSVDPVFEELLY

SEQ ID NO: 65307 - protein, 257 aa, Gossypium hirsutum
  Clone ID: GOSHI-09MAY01-C3752_1.pep
MRAVQQQSYPIKGVVNNLDFMRKRKPSDDLNMMEHKIYTCEFLQCPYSELRLGFRDRTARDNHQLTCPFRNSSAQFGGSNFNVNEVKPVIFPQPFAPSKPAAPSITSAPTPYELSGLGVPEDGQKMISELMSIYDNNIQGNKNMNPGNNPGTEGQNLLQSKSQPQQDEFFNGHQGVMMEGNFFEESSMPRNHQMFMQGEGQFDRFKGLNSPFEASHNNNSFQLMFGSPFDLASFDYKEDLQAVGVDTMPKQDVSIWF

SEQ ID NO: 65308 - protein, 154 aa, Gossypium hirsutum
  Clone ID: uC-gsflnu33B113e12b1.pep
HASAHASAHASAHASAFAPSKPAAPSITSAPTPYELSGLGVPEDGQKMISELMSIYDNNIQGNKNMNPGNNPGTEGQNLLQSKSQPQQDEFFNGHQGVMMEGNFFEESSMPRNHQMFMQGEGQFDRFKGLNSPFEASHNNNSFQLMFGSPFDLA

SEQ ID NO: 65309 - protein, 170 aa, Gossypium hirsutum
  Clone ID: GOSHI-09MAY01-C3742_2.pep
LRIRDRGREDSDRDVINEQVVQLQRELQLAETTITQQKDADSQKEMDREAALKHSIEELEAKNKEALHLKKQVKELEDKLQEAEAKMKVASSAAEAKDTVEVNSRDTDGLTFSTPTKRKSKKKSEAASVQVASSSSSATHTEASPLTNLKFVLGVALVSAIIGVILGKRY

SEQ ID NO: 65310 - protein, 507 aa, Gossypium hirsutum
  Clone ID: GOSHI-09MAY01-C3742_1.pep
RRREEHVRVLEEAKARNSELQSLHETLTRDSELKLREVMENFNSKDSETKSLFEKLKTFEDQIKVYEEQVAQAAGQSASSKEEMDQSLQKLASLESTNEQLKSKISEFENKALQSSSENELLVQTNIQLKGRIDELKELLNSALSEKESTDQETASHMSTIKELSDQHTKASELRAEAESRIVEAEAQLHEAIEKYSKKESESNNLIEKLNALEVQIKTYEEQAHEASTIAVSRQVEVEETLSKLKQLESFVEELQTKSAHFEKESGGLAEANFKLTQELAEYESKLGDLEGKLTVALTEKDETAEQLHISKKAIEDLTQKITSEGQSLQSQISSLMEENNLLNETHQNTKKELQSVISQLEEQLKNEKENEESLKSEINNLKAEIAESSLLQTHVKKLEEQLVTVEAQLKEEVESVKTAASVREAELTSKLEDHAQKISDRDVINEQVVQLQRELQLAETTITQQKDADSQKEMDQEAALKHSIEELEAKNKEALHLKKQVKELED

SEQ ID NO: 65311 - protein, 53 aa, Gossypium hirsutum
  Clone ID: LIB3048-016-Q1-L1-F12.pep
NVFNFWSVEFVSVSSMLKFSITSRSLSSESLVKVSCNDCSYEYVALASSNTIT

SEQ ID NO: 65312 - protein, 167 aa, Gossypium hirsutum
  Clone ID: GOSHI-09MAY01-C3712_2.pep
MALHVSWAFVFGILGNVVSFLVSLAPLPTFYQIYKKRTSEGYQSIPYVVSLFSAMLWIYYALLKKDAMLLITINTFCVFIQTFYIVVYFYYGPKKEKLVTLKLILLFNVFGFGAICFSTFFLKNPLIRLQILGYICMGFALCVFVAPLGILRKVIKTKSVEYMPFTL

SEQ ID NO: 65313 - protein, 278 aa, Gossypium hirsutum
  unsure (1)..(278): unsure at all Xaa locations
  Clone ID: GOSHI-09MAY01-C3712_1.pep
MALHLSWVFVFGILGNAVSFMVSLAPLPTFYQIFKKKTSEGFQSIPYVVSLFSAMLWIYYALLKKDAIFLITINTFCVFIQTFYIVTYFYYGPKKEKIVTVKLMLLFNVFGFGVIFLATYFLXNPSLRLLILGYICMAFALAVFVAPLAIVRKVIKTKSVEYMPFTLSVFLTLGAVMWFFYGLLLKDMNVAVPNVLGFIFGILQMILYAIYKNYPKKMVEDPKLQLSAQQVVVDVVKLGSTTVSLEVNAVGPNPNNGDGTGEAQNIKTNNTADASNEV

SEQ ID NO: 65314 - protein, 125 aa, Gossypium hirsutum
  Clone ID: LIB3584-031-P1-K1-E9.pep
MFLKQRKETYFTTDFMALQGAGAYVNGILENVVSFLVHLAPLPTFYQIYKKTTSEGYQSIPYMVSLFTSILCIYYTLLKKDAMLLITINTFCVIIHTFYIFIYYYYGPNNENYLTLKLILLFNVF

SEQ ID NO: 65315 - protein, 86 aa, Gossypium hirsutum
  unsure (1)..(86): unsure at all Xaa locations
  Clone ID: LIB3165-058-P1-K1-B1.pep
MALHLSWVFVFGILGNVVSFMVSLSPLPTFYQIYKKKTSEGFQSLPYVVSLFSAMLWIYYALLKKDAMLLXITINTFCCFIQSFYI

SEQ ID NO: 65316 - protein, 237 aa, Gossypium hirsutum
  Clone ID: GOSHI-09MAY01-C3702_1.pep
KLKKHGTSSGYNSTSVLQLITIVSCLVVLSCSGSVSAYKNYTVGGSLGWFDALEKPDVNYQKWADSKNFSLGDFLIFNTDNNHSVIQTYNFTTYKFCDYDDALQNDTIEWSAADPSSTAPHSISVAVPLLKEGMNYFFSSDYDGEQCNNGQHFKINVTHGQGLPKSLDQSDDAPAPNSPDYRGDDSAPETIVPANFNHPIEEESDKDEASGSGSVYFNTQFYGFLIFLQIVCIFFKI

SEQ ID NO: 65317 - protein, 240 aa, Gossypium hirsutum
  Clone ID: GOSHI-09MAY01-C3732_1.pep
TSYQRRISYFRSGWLVIAKPRVAIEPLDNSVVSKVVSDSAKESGKRTISTMLGILPSDHFSVSVSVSTPPLHRLLFSSIITGYTLWNAEYRVSLMRNLERAAPGEEVAGETEEAIRKRQGEVFEEKREERASQSDGFQEFEKIRPRVSGELSPEALKYIEKLQAELSDAVEELNVEKENVQIECEKENRNDLLEYLRSLDADMVTELSQPSSVQVQETIHQLVQNILQRPFKNELKRDSG

SEQ ID NO: 65318 - protein, 111 aa, Gossypium hirsutum
  unsure (1)..(111): unsure at all Xaa locations
  Clone ID: LIB3165-044-Q1-K1-E9.pep
MASTTATARAVVFSRITTLSAKPLTPSLSRFFRNRHNRAFSALTVSCLNSGGVCDDDYFVSTQKSNLDRGLLVIANMLKNIEPLDNSVVPRGXSDSAKESMKRTISTMLGI

SEQ ID NO: 65319 - protein, 132 aa, Gossypium hirsutum
  Clone ID: GOSHI-09MAY01-C3692_3.pep
MNNHHGFTEKKPNTKIVCTLGPASRPVPMIEKLLMAGMNVARFNFSHGSHAYHQETLDNLRSAMVNTGVLCAVMLDTNGPEIRTGFLKEGKVQLKQGQEITITTDYDIKGDEKLISMSYKKLAEDVKPGMVI

SEQ ID NO: 65320 - protein, 99 aa, Gossypium hirsutum
  Clone ID: GOSHI-09MAY01-C3692_2.pep
AKYRPGMPILSMVVPEIQTDSFDWSCSDEAPARHSLVYRGLIPVLYAGSARASHEETTEEALEFAIQHAKAKGLCQNGDSIVALHRIGTASVIKILTAK

SEQ ID NO: 65321 - protein, 506 aa, Gossypium hirsutum
  Clone ID: GOSHI-09MAY01-C3692_1.pep
MEINNHHEGGFEMEKKPKTKIVCTLGPASRSVPMIEKLLRAGMNVARFNFSHGSHAYHQETLDNLRAAMLNTGILCAVMLDTKGPEIRTGFLKDGKIQLKQGQEITITTDYSIKGDETLISMSYKKLAEDVKPGMVILCADGTISFTVLSCDKQKGLVHCRCENSAVLGERKNVNLPGVVVDLPTLTEKDKEDILEWGVPNQIDMIALSFVRKGSDLVEVRKLLGKHAKNILLMSKVENQEGVANFDDILTNSDAFMVARGDLGMEIPIEKIFLAQKVMIYKCNIQGKPVVTATQMLESMIKSPRPTRAEATDVANAVLDGTDCVMLSGETAAGAYPELAVRTMAKICVEAESTLDYGDVFKRIMEHSPVPMSPLESLASSAVRTANSAKAALILVLTRGGSTAKLVAKYRPGIPILSVVVPEIQTDSFDWSCSDETPARHSLVFRGLIPVLYAGSARASHEETTGEALEFAIQHAKTKGLCQNGDSIVALHRIGTASVIKILNVK

SEQ ID NO: 65322 - protein, 78 aa, Gossypium hirsutum
  Clone ID: GOSHI-09MAY01-C3112_9.pep
QQLDSELVQSRPQAGGSSFKFVQPTMMAYYGALNGSMNQYVSRENPSEARGVEIPPLNPSYAFPPEHGKNTTRSVKIY

SEQ ID NO: 65323 - protein, 100 aa, Gossypium hirsutum
  Clone ID: GOSHI-09MAY01-C3112_6.pep
MGFDFLPLKQLWFFYLFLDVEYYSFLVFLFCIVCQCHLYMNIFFSSTNVVGKKQVLLLQSKIGGAFLCNRICKIFKQYEWLLAWNPCFAWKKKKKKKTNN

SEQ ID NO: 65324 - protein, 216 aa, Gossypium hirsutum
  unsure (1)..(216): unsure at all Xaa locations
  Clone ID: GOSHI-09MAY01-C3112_5.pep
MAHRVDHEYDYLFKIVLIGDSGVGKSNILSRFTRNEFCLESKSTIGVEFSTRTVQVEGKTVKAHIWDTAGQERYRAITSAYYRGAVGALLVYDITKRQTFDNVQRWLRELREHADSNIVVMMAGNKSDLNHLRAVSEVDGHGLAEKEGLSFLETSALEATNIEKAFQTILTEIYHIMCKKALAAQEAAAXPSFPWQGTTINVADASGNTKKGCCST

SEQ ID NO: 65325 - protein, 591 aa, Gossypium hirsutum
  Clone ID: GOSHI-09MAY01-C3112_3.pep
AAWVKAEPSPTTGSLIKPQAVHASVACSTYSATTACSNAFDERNPSTFEFRPHPRSNMAPADLDPQRSEQSRQIQIQYQAVSFNSSASVKSEMAGSSNVLSLSVPVHTATSVASAHAGVDAEELNRRGGPRGGGPAGQSDHRGVGPVSSEDGYNWRKYGQKHVKGCEFPRSYYKCTHPNCEVKKLFERSHDGQITEIIYKGTHDHPKPQPSRRYSSGNIMSGQEERSDKVSSLNGRDDKSYCGYGQMAHSIEPNSTADISPVTANDDNLDEVEDDDPFSKRRKMDGGIDITPVVKPIREPRVVVQTVSEVDILDDGYRWRKYGQKVVRGNPNPRSYYKCTNAGCPVRKHVERASHDPKAVITTYEGKHNHDVPTAKTGSHDTAGPVAMCGPSRVRSEENDAISLDLGVGISSVPEHASNEQQQLDSELVQSRPQAGGSSFKFVQPTMMAYYGALNGSMNQYVSRENPSEGRGVEITPLNHSYAFPQSMGRILTGPYKSFYNEGEVEFKYGLGFISPSFYWVKGRVLSDFAISVFYICWMYDGKDVKLPFHLSYKVFIISDLLVVFYDYLYCFFLSIITYIPFYVLLTFSPF

SEQ ID NO: 65326 - protein, 216 aa, Gossypium hirsutum
  Clone ID: GOSHI-09MAY01-C3112_2.pep
MAHRVHHEYDYLFKIVLIGDSGVGKTNILSRFTRNEFCLESKSTIGVEFATRTLQVEGKTVKAQIWDTAGQERYRAITSAYYRGAVGALMVYDITKRQTFDNVQRWLRELRDHADSSIVLMMAGNKSDLNHLRSVSEEDGHAVAEKEGLSFLETSALEATNIEKAFQTILNEIYHIVSKKALAAQEAAASASIPGQGTTINVGDESGNTKTACCST

SEQ ID NO: 65327 - protein, 216 aa, Gossypium hirsutum
  Clone ID: GOSHI-09MAY01-C3112_1.pep
MAHRVDHEYDYLFKIVLIGDSGVGKSNILSRFTRNEFCLESKSTIGVEFATRTLQVEGKTVKAQIWDTAGQERYRAITSAYYRGAVGALLVYDITKRQTFDNVQRWLRELRDHADSNIVVMMAGNKSDLNHLRAVTEEDGQALAEREGLSFLETSALEATNIEKAFQTILTEIYHIISKKALAAQEAAASTAIPGQGTTINVTDTSGNTKRGCCST

SEQ ID NO: 65328 - protein, 95 aa, Gossypium hirsutum
  Clone ID: LIB3582-017-P1-K1-D9.pep
MAHRVDHEYDYLFKIVLIGDSGVGKSNILSRFTRNEFCLESKSTIGVEFATRTLQVLLDSSSYMFIFPVEKSIVIEVSKILPYIILFTFDSLTCV

SEQ ID NO: 65329 - protein, 88 aa, Gossypium hirsutum
  Clone ID: LIB3584-032-P1-K1-D5.pep
YEPSGHTCWMTCHLYQSKVAFNIIFCFCFFIVFSFFIFFFCQASNHSYCLKILQILLQRNAPPILDCKSSTCFLPTTLVLEKKIFIYR

SEQ ID NO: 65330 - protein, 179 aa, Gossypium hirsutum
  Clone ID: LIB3584-032-P1-K1-D11.pep
DELNQSGNSNSGMLSGQTDHRVSGSSTISDDGYNWRKYGQKHVKGSEFPRSYYKCTHPNCEVKKLFERSHDGQITEIIYKGTHDHPKPQPSRRYSSGNTMSVQEERFDKVPPLTGRDDKSSNMYGQMAHSIEPNNTADSSPVTANDDNVDDVDDDDPFSKRRKMDGGILLYALTLKKIT

SEQ ID NO: 65331 - protein, 64 aa, Gossypium hirsutum
  Clone ID: LIB3147-020-Q1-K1-E10.pep
KGRLKLYSENSDFSTYVCMYVCNVCISLPSQLISIMLPITVCINLGVCTKVERIQVLFSHRKML

SEQ ID NO: 65332 - protein, 114 aa, Gossypium hirsutum
  Clone ID: uC-gsronu33B163b05b2.pep
LASAKTGSHDTAGAVAMCGPSRIRSEENDAISLDLGVGISSDPEHALNEHQQLHSELVQSRPRTGGSSFKFAQPSMMAYYGALKGGLNQFVFRVIYCEGRLFSFFTLLTFFFSF

SEQ ID NO: 65333 - protein, 220 aa, Gossypium hirsutum
  Clone ID: GOSHI-09MAY01-C3042_1.pep
ELDASENSKELRITRLRYVDEQLRQQRALQQFGMMQQHAWRPQRGLPESSVSILRAWLFEHFLHPYPKDSDKIMLARQTGLTRSQVSNWFINARVRLWKPMVEEMYKEEFDAEMDSNSSSDNVVKAATKGDTMTSEDRGEDLQQSGSSSATERCSNGQLMDSKSENVHDADISGSTIGAGFLNASCGEAETEYVLQTLREEQRLTMDDSNIFPDASVHLD

SEQ ID NO: 65334 - protein, 108 aa, Gossypium hirsutum
  Clone ID: GOSHI-09MAY01-C3012_1.pep
PSYMTHSPKLIKLVQIISAQVAQDSKIGQNPSNLFAPQQPQPPYRLRTLQQPRPRQHSLRTMPTHPVPAKNRQTTAVANRKTKKSCIFYFLCFDLFGILAIKPCVFRL

SEQ ID NO: 65335 - protein, 89 aa, Gossypium hirsutum
  Clone ID: LIB3146-056-Q1-K1-F12.pep
KTSPIYISPSGPRLKIRQNLSNLFAQQQHQLQYRLSTLQQLRKCQHSLRTMPTHTVPAKNSQTAAVANRKTKKSCIFYFLCFDLFGFWL

SEQ ID NO: 65336 - protein, 144 aa, Gossypium hirsutum
  unsure (1)..(144): unsure at all Xaa locations
  Clone ID: GOSHI-09MAY01-C3332_2.pep
MLPPRQQQQQQQQPGSLQTSLSLISLDPHTSSNAQEPRFNSDNIHESPTESASSRETWPTADAITTKKMVNGKTENDCTEQSVIRRVSNAEKITLRDIARERVXDVISEKMHHLPDEFLDELKNQLKIILEGMGGSQNHRSFKF

SEQ ID NO: 65337 - protein, 526 aa, Gossypium hirsutum
  unsure (1)..(526): unsure at all Xaa locations
  Clone ID: GOSHI-09MAY01-C3332_1.pep
HASAHASAHSFAHASGVTAKKMENGGSENDCPEQSVIRRVSSADKITLRDIARERVDVISEKMHRLPDEFLDELKNQLKAILEGNGGSQNREEFLILQKLVQSRSDLTAKTLIRAHRAQLEILVAINTGIQAFLHPNISLSQTSLIEVFVYKRCRNIACQNQLPADDCTCELCANRNGFCNLCMCVICNKFDFELNTCRWIGCDLCSHWTHTDCAIRDGQICMGPSVKSGSGPTEMLFRCRACNRTSELFGWVKDVFQHCAPAWDREALMRELDFVSRIFRGSDDPRGKKLFWKCEDLLEKMRGGQAESTACRSILIFFQELDMDSPTSLENGEGGRLIAPQEACNRIADVVQEAIRKMEMVADEKMRMFKKARLALDACDRELEDKAKEVAELKLERQKKKLQVEELERIVRLKQAEADMFQLKANEAKREAERLQRIALAKSDKSEEEYASSYLKLRLSEAEAEKQYLFEKLKLQESSRASQSSSGGDPSLMYSKIRDLLHGYNXIPAETESQPNERHGFRANP

SEQ ID NO: 65338 - protein, 163 aa, Gossypium hirsutum
  Clone ID: LIB3583-018-P1-K1-G9.pep
MLPPRQQPRPGSLQTSLSLVSSEHRLSPDAQEPRSNSDNVHESPTESASSQETWPTADAVTAKKMENGKIENDCPEQSVIRRVSSADKITLRDIARERVDVISEKMHRLPDELLDELKNQLKAILEGNGGSQNREEFLILQKLVQSRSDLTAKTLIRAQRAQL

SEQ ID NO: 65339 - protein, 111 aa, Gossypium hirsutum
  Clone ID: LIB3272-008-P1-K1-F4.pep
MGTSSGSNINHQHSSKMLPPRQQPRPGSLQTSLSLVSSEHRLSPDAQEPRSNSDNVHESPTESASSQETWPTADAVTAKKMENGKIENDCPEQSVIRRVSSADKITLRDIA

SEQ ID NO: 65340 - protein, 260 aa, Gossypium hirsutum
  Clone ID: GOSHI-09MAY01-C3282_1.pep
MLCFRANPPTLFLLFLLSLFLFRPEVVSEASIFPTSHIQGYHKSLVSGEKEQGEVLPWRKIERRNLVEGNEGANNSSLILAEKRTQRKDPLNDFKKYTGGWNISNQHYWASVGFTAAPFFGIAGIWFVLFALCLFVICIRHCCCQLDSYGYSRIAYALSLIFLILFTIAAIVGCIVLYIGQGKFHASTTNTLDFAVHKADVTAENLRNVSDYLSAAKTISVDSTILSPDIQKSIDDVVKKINASASTLSTQTGDNKDRIQ

SEQ ID NO: 65341 - protein, 63 aa, Gossypium hirsutum
  Clone ID: GOSHI-09MAY01-C3252_1.pep
RLTSMARMMGLSTSQLQVLWSEMKKGQYYYLARRFVKGFFSDFAAEAIACRKVVQVGFEQDWP

SEQ ID NO: 65342 - protein, 302 aa, Gossypium hirsutum
  unsure (1)..(302): unsure at all Xaa locations
  Clone ID: GOSHI-09MAY01-C3242_1.pep
MGFTPIRFLFIVSFFFFVFASVTFSQDSGFQAEKEESDGSIKDLGRRGMIVSKNSENGVLDQKVGTDSIGSNLGFDPAGLGVLDAFFASFSMIIVSEIGDETFIIAALMAMRHPKSTVLSGALAALFVMTVLSTGSRQNGSVXLGKRIVPNLISRKHTNSAATVLYAFFGLRLLYIAWRADTKGSQKKEMEEVEEKLETGQGKTYYRRFLTRFCTPIFLESFILTFLAEWGDRSQIATIALATHKNAVGVAVGAIIGHTICTSLAVVGGSMLAAKISQRTVAAIGGFLFLGFSLSSYFYPPL

SEQ ID NO: 65343 - protein, 146 aa, Gossypium hirsutum
  Clone ID: LIB3197-031-Q1-M1-C9.pep
FFFFVFASVWFSQDSGFQAEKEESDGSIKDLGRRGMIVSKNSENGVVDEKVGTDSIGTNLGFDPAGLGVLDAFVASFSMIIVSEIGDETFIIAALMAMRHPKSTVLSGALAALFVMTVLSTGLGRIVPNLISRKHTNSAATSLYCI

SEQ ID NO: 65344 - protein, 213 aa, Gossypium hirsutum
  Clone ID: GOSHI-09MAY01-C3262_1.pep
MAQATGKVCVTGAGGYLGSWVVKHLLSNNYTVHGTVRQPGDAKYAHLNQLERASHNLQLFKADVLDYDSLCSAITGCTGVFHVASPVPSTIVPNPQEEVIEPAVKGTLTVLKACVESNVKRVVVVSSVTAVSLNPRWPVGQIKDEACWSDKEYCAATKNWYCLSKTEAESEAFEFAKKSGLDVVTVCPTLIWGPTLQSTINASSKGFINLLKE

SEQ ID NO: 65345 - protein, 148 aa, Gossypium hirsutum
  Clone ID: GOSHI-09MAY01-C3232_2.pep
MGEKSLIAKDVTELIGNTPLVYLNNVVDGCVAKIAAKLEAMEPCSSVKDRIGYSMIADAEEKGLIVPGESVLIEPTSGNTGIGLAFMAAAKGYRLIITMPSSMSLERRMVLRAFGAELVLTDPARGMKGAVQKPEEIMSKTPNSYILH

SEQ ID NO: 65346 - protein, 327 aa, Gossypium hirsutum
  Clone ID: GOSHI-09MAY01-C3232_1.pep
LKKNGGKDLIAKDVTELIGNTPLVYLNNVVDGCVAKIAAKLEAMEPCSSVKDRIGYSMIADAEEKGLIVPGESVLIEPTSGNTGIGLAFMAAAKGYRLIITMPSSMSLERRMVLRAFGAELVLTDPARGMKGAVQKAEEIMSKTPNSYILQQFENPANPKIHYLTTGPEIWKGSGGKVDVLVSGIGTGGTVTGAGKYLKEQNPDIKLVGVEPVESAVLSGGKPGPHKIQGIGAGFIPGVLDVNLIDEVVQISSEVAIETAKQLALKEGLLVGISSGAAAAAAIEIAKRPENAGKLIVVVFPSFGERYLSSVLFESVKREAESMVFEP

SEQ ID NO: 65347 - protein, 132 aa, Gossypium hirsutum
  Clone ID: LIB3189-039-P1-K1-A5.pep
MGEKSLIAKDVTELIGNTPLVYLNNVVDGCAAKIAAKLEAMEPCSSVKDRIGYSMIADAEEKGLIVPGESVLIEPTSGNTGIGLAFMAAAKGYRLIITMPSSMSLERRMVLRAFGAELVLTDPARCMKGAVQ

SEQ ID NO: 65348 - protein, 61 aa, Gossypium hirsutum
  Clone ID: uC-gsronu33B104b07b1.pep
YFVFESNVTYLLICVKTLKRNTVNSNKQGSTPCPNTFFFFYITLEENKNHQWGKLVMLLDQ

SEQ ID NO: 65349 - protein, 623 aa, Gossypium hirsutum
  Clone ID: GOSHI-09MAY01-C2_2.pep
MPAVYGSRLTTFEDSEKESEYGYVRKVSGPVVVADGMAGAAMYELVRVGHDNLIGEIIRLEGDSATIQVYEETAGLMVNDPVLRTHKPLSVELGPGILGNIFDGIQRPLKTIAKRSGDVYIPRGVSVPALDKDALWDFQPKKIGEGDLLTGGDLYATVFENSLMQHHVALPPDAMGKITYIAPPGQYSLKDTVLELEFQGVKKQFTMLQTWPVRTPRPVATKLAADTPLLTGQRVLDALFPSVLGGTCAIPGAFGCGKTVISQALSKYSNSDAVVYVGCGERGNEMAEVLMDFPQLTMTLPDGREESVMKRTTLVANTSNMPVAAREASIYTGITIAEYFRDMGYNVSMMADSTSRWAEALREISGRLAEMPADSGYPAYLAARLASFYERAGKVKCLGGPERTGSVTIVGAVSPPGGDFSDPVTSATLSIVQVFWGLDKKLAQRKHFPSVNWLISYSKYSGALESFYEKFDPDFISIRTKAREVLQREDDLNEIVQLVGKDALAETDKITLETAKLLREDYLAQNAFTPYDKFCPFYKSVWMMRNIVHFNALANQAVEKAAGMDGQKITYSLIKHRLGDLFYRLVSQKFEDPAEGEEALVAKFKMLNEDLTAGFRALEDETR

SEQ ID NO: 65350 - protein, 627 aa, Gossypium hirsutum
  unsure (1)..(627): unsure at all Xaa locations
  Clone ID: GOSHI-09MAY01-C2_1.pep
MPAVYGARLTTFEDSQKESEFGYVRKASGPVGVADGMAGAAMYELVRVGHDNLIGEIIRVRPRGXGDSATIQVYEETAGLMVNDPVLRTHKPLSVELGPGILGNIFDGIQRPLKTIAKRSGDVYIPRGVSVPALDKDTLWEFQPKKIGEGDLLTGGDLYATVFENSLMQHHVALPPDAMGKITYIAPPGQYSLKDTVLELEFQGVKKQFTMLQTWPVRTPRPVATKLAADTPLLTGQRVLDALFPSVLGGTCAIPGAFGCGKTVISQALSKYSNSDAVVYVGCGERGNEMAEVLMDFPQLTMTLPDGREESVMKRTTLVANTSNMPVAAREASIYTGITIAEYFRDMGYNVSMMADSTSRWAEALREISGRLAEMPADSGYPAYLAARLASFYERAGKVKCLGGPERTGSVTIVGAVSPPGGDFSDPVTSATLSIVQVFWGLDKKLAQRKHFPSVNWLISYSKYSGALESFYEKFDPDFISIRTKAREVLQREDDLNEIVQLVGKDALAETDKITLETAKLLREDYLAQNAFTPYDKFCPFYKSVWMMRNIVHFNALANQAVEKAAGMDGQKITYSLIKHRLGDLFYRLVSQKFEDPAEGEEALVAKFKKLNEDLTAGFRALEDETR

SEQ ID NO: 65351 - protein, 205 aa, Gossypium hirsutum
  unsure (1)..(205): unsure at all Xaa locations
  Clone ID: AI726015.1.pep
MPAVYGSRLTTFEDSEKESEYGYVRKVSGPVVVADGMAGAAMYELXRVGHDNLIGEIIRLEGDSATIQVYEETAGLMVNDPFLRTHKPLSVEFGTRILGNIFDGIQRPLKTIAKKIGDVYIPKRISVPALEKDALWEFQPKKIREGELLTGGDLYATVFEXSXLMQHHVCPALLNAIGKRXTYIWLPPRFPDFLFEREYRCVGKL

SEQ ID NO: 65352 - protein, 67 aa, Gossypium hirsutum
  unsure (1)..(67): unsure at all Xaa locations
  Clone ID: LIB3197-010-P1-M1-A6.pep
MPAVYGARLTTFEDSEKESEFGYVRKVSRPSRCADGMAGAAMYELVRVGHDNLIGEXIRLEGDSATI

SEQ ID NO: 65353 - protein, 111 aa, Gossypium hirsutum
  unsure (1)..(111): unsure at all Xaa locations
  Clone ID: LIB3146-034-Q1-K1-A7.pep
VEEACRNSKKSKTIKRSYEKFDPDFISIMTKAREVLYRXDDLNEIVQLVXKDALSXTDKITLETAKLLREDYLAQNAFTPYDKLCPFXYKFVWMMRNIVHFNALANQSVEK

SEQ ID NO: 65354 - protein, 59 aa, Gossypium hirsutum
  Clone ID: LIB3120-046-P1-K1-H1.pep
PTRPPTRPPTRPPTRPPTRPGCGKTVISQALSKYSNSDAVVYVGCGERGTEMAGVLMDF

SEQ ID NO: 65355 - protein, 193 aa, Gossypium hirsutum
  unsure (1)..(193): unsure at all Xaa locations
  Clone ID: GOSHI-09MAY01-C92_1.pep
MVRMSDERPLQRLNAIAEYRKKLLQHKEYESRVRAGRENLRAAKKEFNKTEDDLKSLQSVGQIIGEVLRPLDNERLIVKASSGPRYVVGCRSKVDKEKLTSGTRVGLDMTTLTIMPALPREVDPVVYNMLHEXIPGNVSYSAXVGGLSDQNSRAXRESIELPLMNPELFLRVGIKPPKGVLLYGPSGTGKTLL

SEQ ID NO: 65356 - protein, 324 aa, Gossypium hirsutum
  Clone ID: GOSHI-09MAY01-C82_1.pep
MSFLQALSVFLLFLSYVVVGSAEQCGRQAGGALCPGGLCCSQFGWCGSTADYCTVPGCQSQCSGSGPAPGPGGLTNLISRETFNRMLLHRNDGACPARGFYTYDAFIAAARSFPAFATTGDQATRKREIAAFLAQTSHETTGGAGWAAPDGPYAWGYCYNRELNPPSSYCASDPNYPCAPGKQYFGRGPMQLSWNYNYGQCGRAIGVDLLNNPDLLSSDPTISFKSAFWFWMTPQSPKPSCHNVIIGAWSPSSSDRAAGRVPGYGVITNIINGGLECGKGWNAQVEDRIGFYKRYCDILGVSYGNNLDCYNQRPFGNGVSVDSM

SEQ ID NO: 65357 - protein, 129 aa, Gossypium hirsutum
  Clone ID: GOSHI-09MAY01-C42_5.pep
HASARASAQIPILTMPNDDITHPTPDLTGYITEGQIYIDRQLHNRQIYPPINVLPSLSRLMKSAIGEGMTRRDHADVSNQLYANYAIGKDVQAMKAVVGEEALSSEDLLYLEFLDKFERKFVTQGAYDT

SEQ ID NO: 65358 - protein, 217 aa, Gossypium hirsutum
  Clone ID: GOSHI-09MAY01-C42_3.pep
MGAEKNFIDMEEGTLEIGMEYRTVSGVAGPLVILDKVKGPKYQEIVNIRLGDGTTRRGQVLEVDGEKAVVQVFEGTSGIDNKYTTVQFTGEVLKTPVSLDMLGRIFNGSGKPIDNGPPILPEAYLDISGSSINPSERTYPEEMIQTGISTIDVMNSIARGQKIPLFSAAGLPHNEIAAQNCRQAGLVKRLESLISPCDQEKIICHGLLAWGTWDRSF

SEQ ID NO: 65359 - protein, 488 aa, Gossypium hirsutum
  Clone ID: GOSHI-09MAY01-C42_2.pep
MGKAENNHNMEEGTLEIGMEYRTVSGVAGPLVILDKVKGPKYQEIVNIRLGDGTTRRGQVLEVDGEKAVVQVFEGTSGIDNKYTTVQFTGEVLKTPVSLDMLGRIFNGSGKPIDNGPPILPEAYLDISGSSINPSERTYPEEMIQTGISTIDVMNSIARGQKIPLFSAAGLPHNEIAAQICRQAGLVKRLEKSDNLLDDQEEDNFAIVFAAMGVNMETAQFFKRDFEENGSMERVTLFLNLANDPTIERIITPRIALTTAEYLAYECGKHVLVILTDMSSYADALREVSAAREKFPGRRGYPGYMYTDLATIYERAGRIEGRKGSITQIPILTMPNDDITHPTPDLTGYITEGQIYIDRQLHNRQIYPPINVLPSLSRLMKSAIGEGMTRRDHADVSNQLYANYAIGKDVQAMKAVVGEEALSSEDLLYLEFLDKFERKFVTQGAYDTRNIFQSLDLAWTLLRIFPRELLHRIPAKTLDQYYSRDAAN

SEQ ID NO: 65360 - protein, 488 aa, Gossypium hirsutum
  Clone ID: GOSHI-09MAY01-C42_1.pep
MGMAENTNGMEEGTLEIGMEYRTVSGVAGPLVILDKVKGPKYQEIVNIRLGDGTTRRGQVLEVDGEKAVVQVFEGTSGIDNKYTTVQFTGEVLKTPVSLDMLGRIFNGSGKPIDNGPPILPEAYLDISGSSINPSERTYPEEMIQTGISTIDVMNSIARGQKIPLFSAAGLPHNEIAAQICRQAGLVKRLEKTGDLLEDGEEDNFAIVFAAMGVNMETAQFFKRDFEENGSMERVTLFLNLANDPTIERIITPRIALTTAEYLAYECGKHVLVILTDMSSYADALREVSAAREEVPGRRGYPGYMYTDLATIYERAGRIEGRKGSITQIPILTMPNDDITHPTPDLTGYITEGQIYIDRQLHNRQIYPPINVLPSLSRLMKSAIGEGMTRRDHADVSNQLYANYAIGKDVQAMKAVVGEEALSSEDLLYLEFLDKFERKFVTQGAYDTRNIFQSLDLAWTLLRIFPRELLHRIPAKTLDQYYSRDAGN

SEQ ID NO: 65361 - protein, 149 aa, Gossypium hirsutum
  Clone ID: AI054950.1.pep
GYPGYMFTDLAPIFKRAGRIEGRKGSITQIPILTMPNDDITHPTPDLTGYITEGQIYIDRQLHNRQIYPPINVLPSLSRLMNSAIGDGMTRMDHADVFNLLYAYYAIGKDVHAMNASVGYYSLSFEDLLYLVFLDHYVCIIVLLDFLHS

SEQ ID NO: 65362 - protein, 185 aa, Gossypium hirsutum
  Clone ID: LIB3583-004-P1-K1-D1.pep
DAWADAWADPGVPGRRGYPGSCMRDLATIYERAGRIEGRKGSITQIPILTMPNDDITHPTPDLTGYITEGQIYIDRQLHNRQIYPPINVLPSLSRLMKSAIGEGMTRRDHADVSNQLYANYAIGKDVQAMKAVVGEEALSSEDLLYLEFLDKFERKFVTQGAYDTRNIFQSLDLAWTLLRVFPRE

SEQ ID NO: 65363 - protein, 101 aa, Gossypium hirsutum
  Clone ID: LIB3272-005-P1-K1-B12.pep
MGAEKNFIDMEEGTLEIGMEYRTVSGVAGPLVILDKVKGPKYQEIVNIRLGDGTTRRGQVLEVDGEKAVVQVFEGTSGIDNKYTTVQFTGEVLKTSVSLDM

SEQ ID NO: 65364 - protein, 234 aa, Gossypium hirsutum
  Clone ID: GOSHI-09MAY01-C72_1.pep
FAEYFRLATPELEYGRMNIGSRPSKRKPSGGIESLRAIPWIFAWTQTRFHLPVWLGFGAAFKHVIQKDIKNLLMLQEMYNEWPFFRVTIDLVEMVFAKGDPGIAALYDKLLVSEELWSFGERLRTNFEETKSLLLQIAGHKDLLEGDPYLKQRLRLRDSYITTLNVCQAYTLKRIRDPNYSVKLRPHISREIMESSKPADELVKLNPTSEYAPGLEDTLILTMKGIAAGMQNTG

SEQ ID NO: 65365 - protein, 36 aa, Gossypium hirsutum
  Clone ID: GOSHI-09MAY01-C62_22.pep
TKGAFVQPALYEAFGLTVVEAMTCGLPTFATCNGGQ

SEQ ID NO: 65366 - protein, 91 aa, Gossypium hirsutum
  Clone ID: GOSHI-09MAY01-C62_18.pep
MAERVITRVHSLRERLDDTLIAHRNEVLALLTRIEGKGKGILQHHQIILEFEAIPEETRKKLADGAFSEILRSSQEAIVLPPWVALAVRPR

SEQ ID NO: 65367 - protein, 138 aa, Gossypium hirsutum
  Clone ID: GOSHI-09MAY01-C62_16.pep
MVISRTALCNIRWGVSHCTIAHALENTKYPYSDIYWKKLVDKYHFSCRFTADLFAMNHTDFIITSTFQEIAGSKDTVGQYESHTVFTLSGLFPFLPGSVVFSFSLLFSFFSFTLLFFSFFFLFLSFFFSIISLFLLLF

SEQ ID NO: 65368 - protein, 237 aa, Gossypium hirsutum
  Clone ID: GOSHI-09MAY01-C62_11.pep
LNSLQHVLRKAEEYLGTPPAETPYAEPGHKFQEIGLERGWGDTAGRVLEMIQLLLDLLEAPDPCTLEKFLGRVPMVFNVVILTPHGYFAQDNVLGYPDTGGQVVYILDQVRALENEMLLRIKQQGLNITPRILIITRLLPDAVGTTCGQRVEKVYGTEYSDILRVPFRTEKGIVRRWISRFVVWPYLETYTEDVAHEISKELQGKPDLIIGNYSDGNIVASLLAHKLGVTQCTIAHA

SEQ ID NO: 65369 - protein, 113 aa, Gossypium hirsutum
  Clone ID: GOSHI-09MAY01-C62_10.pep
MAERALTRVHSLRERLDSTLTAHRNEILALLSRIEGKGKGILLHHQIILEFEAIPEENRKKLADGAFFEILKASQEAIVLPPWVALAVRPRPGVWEYIRVNVHALVVEGLTVA

SEQ ID NO: 65370 - protein, 76 aa, Gossypium hirsutum
  unsure (1)..(76): unsure at all Xaa locations
  Clone ID: GOSHI-09MAY01-C62_6.pep
TGGLGSYGGGFTLEGLKRIEKKYTXIYSKRLLTLTGVYGFWKHVSNLERRESRRYLEMFYALKYRKLAESVPLAEE

SEQ ID NO: 65371 - protein, 529 aa, Gossypium hirsutum
  unsure (1)..(529): unsure at all Xaa locations
  Clone ID: GOSHI-09MAY01-C62_5.pep
RIQNLNSLQHVLRKAEEYVGALPAETPYAELEHKFQEIGLERGWGDTAGRVLEMIQLLLDLLEAPDPCTLEKFLGRVPMVFNVVILTPHGYFAQDNVLGYPDTGGQVVYILDQVRALENEMLLRIKQQGLNITPRILIITRLLPGAVGTTCGQRVEKVYGTEYSDILRVPFWTHEGVLPSAISRCVVWPYLETYTEDVAHEISKELQGKPDLIIGNYSDGNIVASLLAHKLGVTQGTIAHALEKTKYPDSDIYWKKLEDKYHFSCQFTADLIAMNHTDFIITSTFQEIAGSKDTVGQYESHTAFTLPGLYRVVHGIDVFDPKFNIVSPGADMSIYFPYTEKKRRLKHFHPEIEDLLYSKVENEEHLCVLNDRNKPILFTMARLDRVKNLTGLVEWYGKNAKLRELVNLVVVGGDRRKESKDLEEKAEMKKMFELIKTYKLNGQFRWISSQMNRVRNGELYRYICDTKGAFVQPALYEAFGLTVVEAMTCGLPTFATCKGGPXEIIVHGKSGFNIDPYHGDQAAEILVDF

SEQ ID NO: 65372 - protein, 219 aa, Gossypium hirsutum
  unsure (1)..(219): unsure at all Xaa locations
  Clone ID: GOSHI-09MAY01-C62_4.pep
AARVRKNAKLRELVNLVVVGGDRRKESKDLEEKAEMKKMFELIEKYKLNGQFRWISSQMNRVRNGELYRYICDTXGAFVQPALYEAFGLTVVEAMTCGLPTFATCNGGPAEIIVHGKSGFNIDPYHGDQAAEILVDFFEKCKTDXPSYWTKISEGGLKRIEEKYTWKIYSERLLTLTGVYGFWKHVSNLDRLESRRYLEMFYALKYRKLAESVPLAVEE

SEQ ID NO: 65373 - protein, 332 aa, Gossypium hirsutum
  unsure (1)..(332): unsure at all Xaa locations
  Clone ID: GOSHI-09MAY01-C62_3.pep
RTPGLETYTEDVAHEISKELQGRXDLIIGNYSDGNIVASLLAHKLGVTQCTIAHAWEKTKYPDSDIYWKKLEDKYHFSCQFTADLFAMNHTDFIITSTFQEIAGSKDTVGQYESHTAFTLPGLYRVVHGIDVFDPKFNIVSPGADMSIYYPYTEEKKRLKHFHSEIEELLYSKVENEEHWCVLNDHNKPILFTMARLDRVKNLSGLVEWYGKNAKLRELVNLVVVGGDRRKESKDLEEKAEMKKMFELIEKYKLNGQFRWISSQMNRVRNGELYRYICDTKGAFVQPALYEAFGLTVVEAMTCGCPTVAACCRPNFVRNTGYMSFPEPMCIF

SEQ ID NO: 65374 - protein, 805 aa, Gossypium hirsutum
  Clone ID: GOSHI-09MAY01-C62_1.pep
MADPVITRVHSLRERLDETLLAHRNEILALLSRIEGKGKGILQHHQIILEFEAIPEENRKKLADGAFFEVLKASQEAIVLPPWVALAVRPRPGVWEYIRVNVHALVVEELTVAEYLHFKEELVDGSSNGNFVLELDFEPFNSSFPRPTLSKSIGNGVEFLNRHLSAKLFHDKESMHPLLEFLRVHCHKGKNMMLNDRIQNLNALQHVLRKAEEYLGTLPPETPCAEFEHRFQEIGLERGWGDTAERVLEMIQLLLDLLEAPDPCTLEKFLGRIPMVFNVVILTPHGYFAQDNVLGYPDTGGQVVYILDQVRALENEMLNRIKQQGLNITPRILIITRLLPDAVGTTCGQRLEKVYGTEYSDILRVPFRTEKGIVRKWISRFEVWPYLETYTEDVAHEISKELQGKPDLIIGNYSDGNIVASLLAHKLGVTQCTIAHALEKTKYPDSDIYWKKLEDKYHFSCQFTADLFAMNHTDFIITSTFQEIAGSKDTVGQYESHTAFTLPGLYRVVHGIDVFDPKFNIVSPGADMEIYFPYTEEKRRLKHFHTEIEDLLYSKVENEEHLCVLNDRNKPILFTMARLDRVKNLTGLVEWYGKNAKLRELANLVVVGGDRRKESKDLEEKAEMKKMFELIEKYNLNGQFRWISSQMNRIRNGELYRYICDTKGAFVQPALYEAFGLTVVEAMTCGLPTFATCNGGPAEIIVHGKSGFNIDPYHGDQAADILVDFFEKCKKDPSHWDKISQGGLKRIEEKYTWKIYSERLLTLTGVYGFWKHVSNLERRESRRYLEMFYALKYRKLAESVPLAEE

SEQ ID NO: 65375 - protein, 213 aa, Gossypium hirsutum
  Clone ID: uC-gsronu33B032f04b1.pep
PTLSPAEIIVHGKSGFNIDPYHGDQAADILVDFFEKCQKDPFYWDKIFQGGLIRIEVLYTLLTVLSRPFFISYVFLLFFFFFFFIIYLYCLYSIVFIILFFSFIVFMFYSFVSFSYIPLFFVCFFFFFLFFFLFFHFPFHYLFFILPLIPLFFFIFYSLYFFFPLFFPILFFYTLFFIIDYALVIVSLYFLFLFFPFFSFSICLFSSFLFYFI

SEQ ID NO: 65376 - protein, 192 aa, Gossypium hirsutum
  unsure (1)..(192): unsure at all Xaa locations
  Clone ID: AI054891.1.pep
EMLNRIKQQGLNITPRILIITRLLPDAVGTTCGQRLEKVYGTEYSDILRIPFRTEKGIVRRWISRFEVWPYLETYTXDVAXKISKELQGKPDLIIXNYSDGNIVASLLHISXXVHXCTIAHALEXTXYPESDIYWKXKLEDKYHFSAHYXXDLFAMTYXFHXNSTFKKCWKQTWSRIHCFTFRLTVVTMMVI

SEQ ID NO: 65377 - protein, 172 aa, Gossypium hirsutum
  unsure (1)..(172): unsure at all Xaa locations
  Clone ID: uC-gsronu33B061g03b1.pep
FLLKKLEEKNSSNDPQGEGVGVFVTGVNCIFFLPFXRVFLDNHILLCNFTWISSFVFHLVFSFSFFRRHCLNMGLCALHFQFIIVTFVFQVPIFFIFIFLNAYCHYRFFQISTLYINILEFFLPSCFLLFSFLSFLFFWSSSLLFSVFLSLPSSFFFFFCFPLIQFLFPSFP

SEQ ID NO: 65378 - protein, 52 aa, Gossypium hirsutum
  unsure (1)..(52): unsure at all Xaa locations
  Clone ID: LIB3148-023-Q1-K1-G1.pep
VHYERLTTLTIYYGDWKQVSYLYRLXSRYYLAMLLALKYRKLAESVPLAVEE

SEQ ID NO: 65379 - protein, 175 aa, Gossypium hirsutum
  unsure (1)..(175): unsure at all Xaa locations
  Clone ID: LIB3585-029-P1-K1-E10.pep
PRVRPRVRPRVRPRVRILEFEAIPEETRKKLADGAFSEILRASQEAIVLPPWVALAVRPRPGVWEYIKVNVHALVVEELTVAEYLHFKEELVDGSANGNFVLELDFEPFNASFPRSTLSKSIGNGVEFLNRHLSAKLFHDKESMHPLLEFLKVHCHKGKNMMLNDRIXNLNSLSY

SEQ ID NO: 65380 - protein, 97 aa, Gossypium hirsutum
  unsure (1)..(97): unsure at all Xaa locations
  Clone ID: LIB3828-021-Q1-N6-E2.pep
IIDPDHGDQAADILFDLFQKCKKDPSLWDKISQGGLTRIEEKYTCXICSERLLSMTGVYGFCKHVSSLEPRKSRCYLXMFYGLKSRNLVESVPVAGE

SEQ ID NO: 65381 - protein, 79 aa, Gossypium hirsutum
  Clone ID: uC-gsflnu33B016e02b1.pep
EHALVVEELTVAEYLRFKEELVDGSSNANFVLELYFESFNAWFPSPTLSKYIGNIVHFHNLQLSDLLFHGKVRLPSLLY

SEQ ID NO: 65382 - protein, 96 aa, Gossypium hirsutum
  Clone ID: uC-gsronu33B156e09b1.pep
IDPYHGDQAADILVDFFEKCKKDPSHWDKISQGGLKRIEEKYTWKIYSERLLTLTGVYGFWKHVSNLERRESRRYLEMFYALKYRKLAESVPLAEE

SEQ ID NO: 65383 - protein, 160 aa, Gossypium hirsutum
  unsure (1)..(160): unsure at all Xaa locations
  Clone ID: uC-gsronu33B172a04b1.pep
PRTELLGLPIRTPTLIFFKNKEXANPVFTRVHSLRARSDETLLAHRNEILALLSRIEGKGKGILQHHQIILEFEAIPEENRKKLADGAFFEVLKASQEAIVLPPWVALAVRPRPGVWEYIRVNVHALVVEELTVAEYLHFKEELCDGSSNGNFGLDWILS

SEQ ID NO: 65384 - protein, 69 aa, Gossypium hirsutum
  unsure (1)..(69): unsure at all Xaa locations
  Clone ID: uC-gsflnu33B055b06b1.pep
SAGRSGARKDIIRQRLEKSYRTEYSDIPRVPLRTKKGIVRKWIPRFEIXPYLETYTEDVXAHEISKEFA

SEQ ID NO: 65385 - protein, 97 aa, Gossypium hirsutum
  unsure (1)..(97): unsure at all Xaa locations
  Clone ID: LIB3135-037-Q1-K1-H3.pep
SIIVWWFFFXEAKVAMFYFTRIDGLNAQMLKQCPKHEQRQIHIKEQRKQKSWIKMPKQQRLFSRTRKSLPILSPATSIYSSTAKGTESATDAWADAW

SEQ ID NO: 65386 - protein, 84 aa, Gossypium hirsutum
  Clone ID: LIB3083-074-Q1-L1-F2.pep
MSKCLITMVRINGAIKFPMHNNLGGVLRYISDTKGAFAQPALYEAFGLTVVEAMTCGLPTFATCNGGPAEIIVHRCRSRQLWRQ

SEQ ID NO: 65387 - protein, 75 aa, Gossypium hirsutum
  Clone ID: uC-gsflmaxxa093h09b1.pep
HVFEGKGKGILQHHQIILEFEAIPEENRKKLADGAFFEVLKASQEAIVLPPWVALAVIPSTGVSDFSPVILSYFL

SEQ ID NO: 65388 - protein, 256 aa, Gossypium hirsutum
  unsure (1)..(256): unsure at all Xaa locations
  Clone ID: GOSHI-09MAY01-C32_2.pep
FSLSSCLRLLGLFLYGSLQGPILLEDYHLVEKLANFDRERIPERVVHARGASAKGFIEVTQDISHLSCADFLRAPGVQTPVIAPPSTVIHERGSPETLRDPRGFAVKFYTREGNFDLVGNNFPVFFIRDGMKFPDMVHALKPNPKSHIQENWRILDFFSHHPESLHMFTFLFDDWGVPQDYRHMGRFXCVNTYTLINKAGKAHYVKFHWKPTCWGQMLAEDEASKVXGANHSHATQDLYDSLLLALSEWSFSQTLS

SEQ ID NO: 65389 - protein, 492 aa, Gossypium hirsutum
  Clone ID: GOSHI-09MAY01-C32_1.pep
MDPYKHRPSSAFNSPFWTTNSGAPVWNNNSSLTVGPRGPILLEDYHLVEKLANFDRERIPERVVHARGASAKGFFEVTHDISHLTCADFLRAPGVQTPVIVRFSTVIHERGSPETLRDPRGFAVKFYTREGNFDLVGNNFPVFFIRDGMKFPDMVHALKPNPKSHIQENWRILDFFSHHPESLHMFTFLFDDLGVPQDYRHMEGSGVNTYTLINKAGKAHYVKFHWKPTCGVKCLLEDEAIKVGGANHSHATQDLYDSIAAGNYPEWKLFIQTIDPDHEDKFDFDPLDVTKTWPEDILPLQPVGRLVLNKNIDNFFAENEQLAFCPAIVVPGIYYSDDKLLQTRIFSYSDTQRHRLGPNYLQLPANAPKCAHHNNHHEGFMNFMHRDEEINYFPSRYDPVRHAEMFPIPPAVCTGRREKCIIEKENNFKQPGERYRSWAADRQERFICRWVDALSDPRVTHEIRSIWISYWSQADKSLGQKLASRLNVRPSI

SEQ ID NO: 65390 - protein, 75 aa, Gossypium hirsutum
  Clone ID: AI731093.1.pep
EKCIIEKENNFKQPGERYRSWAPDRQERFINRWVDALSDPRVTHEIRSIWITYWSQADKSLGQKLASRLNVRPSI

SEQ ID NO: 65391 - protein, 122 aa, Gossypium hirsutum
  Clone ID: LIB3493-038-P1-M1-H2.pep
MDPYKHRPSSAFNSPFWTTNSGAPIWNNNSSLTVGPRGPILLEDYHLVEKLANFDRERIPERVVHARGASAKGFFEVTHDISQLTCADFLRAPGVQTPVIVRFSTVIHERGSPETLRDPRGF

SEQ ID NO: 65392 - protein, 135 aa, Gossypium hirsutum
  unsure (1)..(135): unsure at all Xaa locations
  Clone ID: LIB3166-005-P1-K1-A8.pep
GRVCEPILTGLRLLRCLDTGAFGRRRRRAFNSPFWTTNSGAPVWNNNSSFTVGPRGPILLEDYHLVEKLVNFDRERISXRVCHARGACAKGFFEVTHDIFYLTCADFLGAPGVXTLCIVRFLTCIHERGSPVTLR

SEQ ID NO: 65393 - protein, 86 aa, Gossypium hirsutum
  unsure (1)..(86): unsure at all Xaa locations
  Clone ID: LIB3189-049-P1-K1-H11.pep
MDPYKHRASXSAFNSPFWTTNSGAPIWNNNSSLTVGPRGPILLEDYHLVVKLANFDRXRIPNLVDHSRLACSLCFLLMVIHEHFFI

SEQ ID NO: 65394 - protein, 145 aa, Gossypium hirsutum
  Clone ID: GOSHI-09MAY01-C992_1.pep
INTQVSVPCSSLFDSVTVRCGHCTNLWSVNMAAAFQSLSWQDAQAASYATQDYRTDLGSSSKCNTKFSMRAPSKNATEERGGNRPPEKRQRVPSAYNQFIKEEIQRIKANNPDISHREAFSTAAKNWAHFPHIHFGLMLENQKSN

SEQ ID NO: 65395 - protein, 163 aa, Gossypium hirsutum
  unsure (1)..(163): unsure at all Xaa locations
  Clone ID: LIB3583-052-P1-K6-F3.pep
MSSCIEVVSEQLCYIPCNFCNIVLAVSVPCSSLFDIVTVRCGHCTNLWSVNMAAAASQSLSWQDIQAPNNAIEDYRRDLGSSSKCSHNKLSMRPPLPNNATEERVVNRPPEKXQRVPSAYNRFIKEXIQRIKANNPDISHREAFSTAAKNWAHFSHXHFGLML

SEQ ID NO: 65396 - protein, 46 aa, Gossypium hirsutum
  Clone ID: LIB3583-055-P1-K1-E8.pep
INTQVSVPCSSLFDSVTVRCGHCTNLWSVNMAAAFQSLSWQDAQVI

SEQ ID NO: 65397 - protein, 149 aa, Gossypium hirsutum
  unsure (1)..(149): unsure at all Xaa locations
  Clone ID: GOSHI-09MAY01-C962_4.pep
FYNWAIAISVCAKMRGRTKDPRVRWEQAPKNYEKAVQLTWNSPQALNIGGLALQDLRAIVPAREKQKMVRTAISKFRAAIQLQFDFHRALYNLGTVLYGLAEDTLRHGSPNLKEVSPDELYSQSAIYIAAAHXLKPNYSVFSSALRLVR

SEQ ID NO: 65398 - protein, 205 aa, Gossypium hirsutum
  Clone ID: GOSHI-09MAY01-C962_2.pep
MPEATEESELHNGHQPQAEPEPESKAESQPESKTEPGPENKPEEALKLEPVVTGADPNTKEEDKESSIQSNDAATPSSTDQNARPQLRKDEGNRTFTMRELLTEFKSDEEEVGSPYTRESTQRQSNQNSAAMELVSSVTGADEEGQSRQRVLVYAAKRYAAALEKNPEDYDALYNWALVLQESADNVSPDSTSPSKNDLLEEACK

SEQ ID NO: 65399 - protein, 329 aa, Gossypium hirsutum
  Clone ID: GOSHI-09MAY01-C962_1.pep
MSETTEGSELQNGFQPQPRPEPEPESELKVESQPEQQPEEELKPEPVVTDADPKPEPNNESSIQSNETTKQASTDQVAPPGRRKDEENRTFTMRELLSELKSDEDDAGSPYSQENKQRQSYQNNAAMELINSVTGTDEEGRSRQRILVYAARRYATALERNPEDYDALYNWALVLQESADNVSPDSTSPSKDALLEEACKKYDEATRLCPTLHDAFYNWAIAISDRAKMRGRTKEAEELWEQATKNYEKAVQLNWNSPQALNNWGLALQELSAIVPAREKQKIVRAAISKFRAAIQLQFDFHRAIYNLGTVLYGPTEDTQNWRLDNPKE

SEQ ID NO: 65400 - protein, 141 aa, Gossypium hirsutum
  Clone ID: LIB3083-065-Q1-L1-F3.pep
MGPKAVKDKASSMRLSEAAKPASISHIARPEVLKEEDNRTSTIRRLSDLKSDDDDAGSPNSQESTQQQSYQNNAAIELINSVTGADEEGRSRQRVLVYAARRYASALERNPEDYDALYNWALVLQESADNVSPDSTSPSKD

SEQ ID NO: 65401 - protein, 249 aa, Gossypium hirsutum
  Clone ID: GOSHI-09MAY01-C902_1.pep
MATSNLIRVSSPSYSTSSPNHAPFKRVGTHNGSFHCDEALGCFMIRLTDKFSNSEIIRTRDPKVLEGLDAVLDVGGVYDPNHDRYDHHQKGFEEVFGHGFNTKLSSAGLVYKHFGKEIIAKELQLGEDHPDVHRLFLAIYKSFMEAIDAIDNGINQFDTDKPPKYVNNTHISSRVGRLNLDWTDPDQSPEKENEAFQRAMALAGSEFLESVRFHARSWLPARSIVLECLAEGFDLNPRGKFWVWKRFGP

SEQ ID NO: 65402 - protein, 123 aa, Gossypium hirsutum
  unsure (1)..(123): unsure at all Xaa locations
  Clone ID: LIB3196-043-P1-M1-H2.pep
HASDGFNTKLSSAGLVYKHFGKEIIAKELQLGEDHPDVHRLFLAFYKSLMEAMDAMDIGFNQLDTARPPNLVXHSKLFSKSGRINLGLTNSGPXLEKEMEXFQPGMGLTGSEVLERVPFHARS

SEQ ID NO: 65403 - protein, 97 aa, Gossypium hirsutum
  Clone ID: GOSHI-09MAY01-C582_1.pep
MKVKSLQVPIQVNKYLAYSDGMRVIESGKLSVQSTASYVLPHAELDQPSGQLCLDSEEFKIVGDLNEAISQERYKDAADLRDKLDKFWAARNLRKFK

SEQ ID NO: 65404 - protein, 170 aa, Gossypium hirsutum
  Clone ID: AW187811.1.pep
MRFVWFLRKYFIRVWKIFFTTSLFHFPEKMLDLTEIPKLDLASSNEISTQKISVSDHIGGFQYTVDKHDSFVIDMDSFSYGGLNKGINQNPRITVPIQVNKYLAYSDGMRVIESGKLSVQSTASDVLPHAELDQPSGQPCLDSEEFKIVSNLNEAISHERYKDAADLRDN

SEQ ID NO: 65405 - protein, 64 aa, Gossypium hirsutum
  unsure (1)..(64): unsure at all Xaa locations
  Clone ID: AW187214.1.pep
QFLSSRXIASSFLLNSSQSSRLHEAASIIIKFSSPFPLCSGSTPTWDFPSSPTFSQENETKRWN

SEQ ID NO: 65406 - protein, 85 aa, Gossypium hirsutum
  Clone ID: AI055106.1.pep
IYKASTIPNPISFICMYLITFFSLHLNQIPISNFLPSLIFMFFFLISLQHISVKASTFIPKYKILILKNISLCSFVYKSRDLFGF

SEQ ID NO: 65407 - protein, 68 aa, Gossypium hirsutum
  Clone ID: LIB3583-046-P1-K1-H8.pep
SLDFTSSFHFPEKMLDLTENPKLDLASSNEISTQKISVSDHISGFQYTADKPVSFVIDMDSFSHGGPH

SEQ ID NO: 65408 - protein, 67 aa, Gossypium hirsutum
  Clone ID: LIB3582-045-P1-K1-E5.pep
SFNLYTQIQYFEFKKASVFVLLCINHEICLVSKKIFYSCLEDFLHHFRGCLCFSFFHSIYNQVVLKY

SEQ ID NO: 65409 - protein, 49 aa, Gossypium hirsutum
  Clone ID: uC-gsflnu33B140b04b1.pep
SFNLYTQIQDFEFKKASVFVLLCINHEICLVSKKIFYSCLEDFLHHFRG

SEQ ID NO: 65410 - protein, 173 aa, Gossypium hirsutum
  unsure (1)..(173): unsure at all Xaa locations
  Clone ID: GOSHI-09MAY01-C552_1.pep
MTEVLQSSPSHFPSFSSSTCTPHALTNSNVSTVEDIITQESDQEEEDRQEEEERKERDXEGEGDQLSLLTLLVAAFRKSLIGCSLSGSKELCSMEIGLPTNVRHVAHVTFDRFHGFLGLPVEFEPEVPRRAPSASASVFGVSTESMQLSLDSRGNSVPTILLLMQSHLYARGG

SEQ ID NO: 65411 - protein, 143 aa, Gossypium hirsutum
  Clone ID: LIB3585-003-P1-K1-H10.pep
GRVGENRQVGERRGRDKGGEQQLPLVTILVTAFRKSVIGCSISGSKELCAMEIGLPTNVKHVAHVTFDRFHGFLGLPVEFEPEVPRKAPSASANVFGVSTESMQLSIDCRGNSVPTILLLMQRHLYDKGGLQAEGIFRINAEN

SEQ ID NO: 65412 - protein, 209 aa, Gossypium hirsutum
  Clone ID: GOSHI-09MAY01-C542_1.pep
MEHTLEKRYPVNPKDYKLYEEIGEGVSATVSRASGIPLNEIVAIKVLDLEKCNSDLDGIRREVQTMSLIDHPNLLWALCSFTTGHSLWIVMPYMAGGSCLHIMKSAYPEGFEEPVIATLLREVLKALVYLHAHGHIHRDVKAGNILIDSDGSVKLADFGVSASMFDAGDRQRSRNTFVGTPCWMAPEVMQQLHGYDFKADIWSFGITAL

SEQ ID NO: 65413 - protein, 181 aa, Gossypium hirsutum
  Clone ID: GOSHI-09MAY01-C512_1.pep
MLHCHNGTSGQEYEAIVFPPVPEHQTNRDVIDEANIDKYFPDRLFRTVSDLSLSMLETEDTSRLELQQVQLFEHIAPNYRRSKSSTRMKQERTARREKLDSHCKGELMGIIQNAVSKLCFSDGLEMSGKDYAVEITAIYRMLNNKHGVKYTMLKDVILEQLLIACSTSEEEMVIRASGTVL

SEQ ID NO: 65414 - protein, 56 aa, Gossypium hirsutum
  Clone ID: LIB3189-003-P1-K1-G1.pep
NRDVIDEANIDKYFPDRLFRTVSDLSLSMLETEDTSRLELQHVQLFEHILPIYLMS

SEQ ID NO: 65415 - protein, 234 aa, Gossypium hirsutum
  Clone ID: GOSHI-09MAY01-C502_1.pep
ESGVGKDPTNEELKKRAKQIDLKKLEQEPREAQVSKALVEAKDLVSAIEDRRLKLGNAMYRELTGLRKPVGRVGGILHWPVLLLYAEFMSSDFIEDFCETDMFSAHLDIMFSESCPPLPWDKENHYSRDAIELYYEAGSGICLSKSKILRYLLEGTAAANVESIGEEEKDAADGSPYDSSAGSYKWVKVNEKRTLHDVLNEPNFIIPMIPVFYVVSKRSGFYKDFITGKWRPPA

SEQ ID NO: 65416 - protein, 209 aa, Gossypium hirsutum
  unsure (1)..(209): unsure at all Xaa locations
  Clone ID: GOSHI-09MAY01-C522_1.pep
MDVPKEQITALLDNALFNSAQLLGSFLVSSSTVNAETSPHLKAENLVLLGDALFREREYRRAIHTYKQALQYYKIIPKQNSTSSRSALSASNRSSSPNSFNICAINENEVKFKIASCHFALSENKVALVEMEGIPSKARNLQMSLLMAKLYRNTKHTRGAVTCYRECLRQCPYVIEAIIALAELGASAKDIISXVPQTPNRGGRAQLDH

SEQ ID NO: 65417 - protein, 327 aa, Gossypium hirsutum
  Clone ID: GOSHI-09MAY01-C452_3.pep
MMIGEPTRPNPTVKIPAWDPLNDPTSNYSSVNYNCNAPSSPCPVDYLSSLHRYLPSNDFESSDSLSEDSDFPVDAFSCDHFRMYEFKVRRCARGRSHDWTECPYAHPGEKARRRDPRKFHYSGTACPDFRKGICKKGDSCEFAHGVFECWLHPARYRTQPCKDGTSCKRRVCFFAHTPEQLRLLPQQSPRGNGSSSGDLDYVGSPIRHRFDIVSSPTSILASPPLSPPSDSPPLSPSGSFYSVSELAASMRSMQLGKSKMNGAGACSWGMQMGSGYGSLRGSTLRPGFCRSPSTPTRSGLGQFDLWECNNGFEEEPAMERVESGRDL

SEQ ID NO: 65418 - protein, 350 aa, Gossypium hirsutum
  Clone ID: GOSHI-09MAY01-C452_2.pep
MMIRKPITRPFPTVNIPDWEPLNDSADNFLAVGFNCNAPCSPCPVEYLTALRRYLPSNDLEPDTLSDDSDVHIIDAFSCDHFRMYEFKVRRCARGRSHDWTECPYAHPGEKARRRDPRKFHYSGSACPDFRKGNCKKGDSCEFAHGVFECWLHPTRYRTQPCKDGTCCKRRVCFFAHTPEQLRVLPQQSPRGNGSGSGSGSSDMDYFGSPIRYRLDYVSSPTSILASPPISPPSDSPPTSPSGSFNSVSELTSSVRNLQFGKAKMGTTCSRGSCFVSPRSSMLRPGSPLTPTRTPTRSGLSKFELWESNNAFDEPAMERVESGRDLRTRMFAKLSEENSLDLLDPTGSGP

SEQ ID NO: 65419 - protein, 362 aa, Gossypium hirsutum
  Clone ID: GOSHI-09MAY01-C452_1.pep
MMIGESIQPNPTIKIPVGDPFNDPTASFHSVNFNYNNAVSSPCPVDYLGSLHRYLPSNDYESDSLSDDSDLPVDAFSCDHFRMYEFKVRRCARGRSHDWTECPYAHPGEKARRRDPQKFHYSGTACPDFRKGSCKKGDSCEFAHGVFECWLHPARYRTQPCKDGTSCQRRVCFFAHTPEQLRVLPQQSPRGNGSASADLDYVGSPMRHRLEFVSSPTSILASPPISPPSESPPMSPSGSFNSVSELAASMRSLQLGKSKMNGACSWGLQMGSGFSSPRGSTLRPGFCSSPSTPTRTPTRSSLGQFDIWEFNAVQEEPAMERVESGRNLRARMYAKLSKENSPARPEPTGSGPDVGWVSELVK

SEQ ID NO: 65420 - protein, 55 aa, Gossypium hirsutum
  Clone ID: uC-gsronu33B113d08b1.pep
SPTRPVLGTRHPIVINEAVDLAKRFCDGAAPRIINGCPRLRPQTQNWKCHFKYES

SEQ ID NO: 65421 - protein, 147 aa, Gossypium hirsutum
  Clone ID: LIB3493-028-P1-M1-H1.pep
MMIGESIQPKPTIKIPVGDPFNDPTASFHSFNFNYNNAVSSPCPVDYLGSLHRYLPSNDYESDSLSDAFSCDHFRMYEFKVRRCARGRSHDWTECPYAHPGEKARRRDPRKFHYSGTACPDFRKGSCKKGDSCEFAHGVFECWLHPA

SEQ ID NO: 65422 - protein, 146 aa, Gossypium hirsutum
  Clone ID: uC-gsronu33B044f09b1.pep
MMIGESIQPNPTIKIPVGDPFNDPTASFPSVNFNYNNAVSSPCPVDYLGSLHRYLPSNDYESDSFSDDSDLPVDAFSCDHFRMYEFKVRRCARGRSHDWTECPYAHPGEKARRRDPEKFQFFTWFHTANRFLQLFFNFNSYADFVL

SEQ ID NO: 65423 - protein, 97 aa, Gossypium hirsutum
  Clone ID: uC-gsronu33B111f08b1.pep
VGAPVVVTGHVQKPGRSVEPRGELKPDPICRPQEQAPFVLHCPSCSCRIEAASSLCQFNDPGGHRAGAAQGGDIGGEAPIQVGEDPNSSRWRMGEPA

SEQ ID NO: 65424 - protein, 275 aa, Gossypium hirsutum
  Clone ID: GOSHI-09MAY01-C462_1.pep
NHISFQSIPSIAMTAVFILIGVLLQLFTATTSIGVNYGMTADNLPPPSVVANFLRTQTIFDSVKLFDANPDVLRAFANTGISVSVTVGNGDIPGLTNTVTARRWVADHISPFHPQTKIKYICVGTEVLFSKNDDWINNLVPAMRSLHYALNKAGFQDIKVTSAHALNIFRRDTIPSLMRFMVGYDQSFFAPLLQFHQRTKSPFMVNPYPYFSPDITRRLNYALFKPNSGIYDKYSKKNYTNMFDSIMDSTYTAMKALGYGNVEIAIGETGWPTQG

SEQ ID NO: 65425 - protein, 495 aa, Gossypium hirsutum
  Clone ID: GOSHI-09MAY01-C412_1.pep
EAVDLLMEVEDLDLLVEHVDKTNVKRTCLYLTSAARYLPGPDDMLVLDIAYTIYLKFEEFASALQIALSLDNMQHVRQVFTSCDNQLKKMQFCYILARHGITFELDDEMVADDEERETLQDIINNTKLSESYLSLARDIEVMEPKSPDHICGAHLLEGRASARASVDSTRQNLAATFVNAFVNAGFGQDKLMTAPADSSIGGSSGNWLFKNKEHGKTSAAASLGMILLWDVDSGLAQIDKYFHSNDNHVIAGALLGVGIVNCGVKNDCDPALALLSDYISKEDSSVRIGAIMGLGIAYAGAQNEQIRSSLTLILNDAKAPLDVIAFTAISLGLIYVGSCNEEVAQAIIFALMDRSESELGEPLTRLLPLALGLLYLGKQERVEATAEVSKTFNEKIRKYCDMTLLSCAYAGTGNVLKVQNLLGHCAQHLEKGETHQGPAVLGIAMVAMAEELGLDMSIRSLEHLLQYGEQNIRRAGSLALGLLWISNPKVNVMDT

SEQ ID NO: 65426 - protein, 104 aa, Gossypium hirsutum
  unsure (1)..(104): unsure at all Xaa locations
  Clone ID: LIB3272-009-P1-K1-B3.pep
GALLGVGIVNCGGKNDCDAALALLSDYISKEDSNIRIDAXLGVXIAYAGAQNEQIRSSLTLILNDAKAPLDVIAFTEMCSGLTYVGAPTDEGAXSSMSTLMDRY

SEQ ID NO: 65427 - protein, 162 aa, Gossypium hirsutum
  unsure (1)..(162): unsure at all Xaa locations
  Clone ID: GOSHI-09MAY01-C432_1.pep
RTKKPYEEIAKKNKEKXMEEMEVYKRKKEEEALNVKKQDEEMMTLQEQEALQLLKKKEKTDHIIKKTKEKRQQKKQQNSDPNKPKKPASSFLLFSKEARKTLVQERQGINNSTLNALISVKWKELSGEERDVWNAKASEAMEVYKKQMEQYNKSAEEKEQQH

SEQ ID NO: 65428 - protein, 102 aa, Gossypium hirsutum
  Clone ID: LIB3146-041-Q1-K1-A2.pep
RTRGRTRGPTRGVEALDVKKTGEEMMKLQKQEALQLLKKKEKTDHIIKKTQEKRQQKKQQNSDPNKPKKPASSFLLFSKEARKTLVQERQGINNSTLNALIS

SEQ ID NO: 65429 - protein, 302 aa, Gossypium hirsutum
  Clone ID: GOSHI-09MAY01-C782_1.pep
MAQVLDDAEFWLPPQFLTDDDLGIDNSKAKSNPKYVDGGFGLELGGSKSLFPYEFPYGFGSLGFSSDPSSPVESVVGSTETESDEEDYLAGLTRQMAHSTLEDGIRRNGRAFSSENPKGRVMSSSPQSTLCVSRSGCSCMQGCSRGSPTCQSRVPPPPGTWDLLYAAAEEVARMRMSEESYGGLNNRGLLGYSARKFSPNADVTGFYLPTQSLAHQKLQTAQFQMLKQQQLMKQQNASVWAGQKQQLHSHHHNHVVQSRVRSNNSSNRPMGLSQSAWPPLQQQTQTPNGSGMRAVFLGNPTG

SEQ ID NO: 65430 - protein, 107 aa, Gossypium hirsutum
  Clone ID: LIB3582-047-P1-K1-G1.pep
MFFSILNGTLTVCRDAAGIAGNIFAFGLFISPIPTFKRIIRNQSTENFSGLPYIYALLNCLICTWYGTPLVSHDNVLVMTVNSIGAVFQITYIVTFIVYADKEKKVV

SEQ ID NO: 65431 - protein, 125 aa, Gossypium hirsutum
  unsure (1)..(125): unsure at all Xaa locations
  Clone ID: LIB3145-011-Q1-K1-C6.pep
MFFSILNGTLTVCRDAAGIAGNIFAFGLFISPIPTFKRIIRNQSTENFSGLPYIYALLNCLICTWYGTPLVSHDNVLVMTVNSIGAVFQITYIVTFIVYADKEKKMRMXGMLLGVFGLLAIIVAG

SEQ ID NO: 65432 - protein, 174 aa, Gossypium hirsutum
  Clone ID: GOSHI-09MAY01-C742_1.pep
SISARSVFCRLGLPLVFKSSFDKANRTSSKSFRGPGMAEGLQILEKVKVAYDIPIVTDVHETIQCEAVGRVADVIQIPAFLCRQTDLLVEAAKTGRIINIKKGQFCAPSVMVNSAEKIRLAGNPNVMVCERGTMFGYNDLIGDPRNLEWMREANCPGGADITHSLQQPAGRKLD

SEQ ID NO: 65433 - protein, 124 aa, Gossypium hirsutum
  Clone ID: LIB3145-008-Q1-K1-E12.pep
MDSSASLLNKLMGADPFFLLAGPNVIESEDHILRMAGYIKTITTKLGLPLVFKSSFDKANRTSSKSFRGPGMAEGLQILEKVKVAYDIPIVTDVHETIQCEAVGRVADVIQIPAFLCRQTDLLV

SEQ ID NO: 65434 - protein, 223 aa, Gossypium hirsutum
  unsure (1)..(223): unsure at all Xaa locations
  Clone ID: GOSHI-09MAY01-C702_2.pep
MASKPGILTDWPWKPLGSFKYILLLPLTTVHIYSFMEKDDDIDVSMLVLFPFMLWRMLHHQLWSSLSRYLTXKGTNMIVDKGIEFDQVDRERDWDDQIMFNAILFYWGNKYVPGGSHLPFWRLDGVIITMLLHAGPVEFLYYWLHRALHHHYLYSRYHSHHHSSIVTEPITSVIHPFAEHIAYFLLFAIPILTTVLTGTVSIVCLXAYITYLNFMNNMGHCNF

SEQ ID NO: 65435 - protein, 624 aa, Gossypium hirsutum
  Clone ID: GOSHI-09MAY01-C702_1.pep
MASKPGILTDWPWTPLESFKYIILGPWVTETIYSIMVKDPKEWDLTNFSVIPFMLWRMLHNQLWISLSRYRTAKGTNRIVDKGIEFDQVDRERNWDDQILFNGILFFLANKYVPGASHLPLWRTDGVIITMLLHVGPVEFLYYWLHRALHHHYLYSRYHSHHHSSIVTEPITSVIHPFAENIVYFALFAIPMLTVVLTGTGSIIAIAGYITYIDLMNNMGHCNFELIPNWVFSIFPPLKYLMYTPSFHSLHHTQFRTNYSLFMPFYDYIYDTMDKSSDTLYENSLKRKEETPNVVHLTHLTTPESIYHLRFGFASLASKPYSSAWYLWLLWPVTLWSMVLTRIYRRTFVVERNRFHQLRLQTWAIPKYGIQYRLKWQKESVNNMIEEAVLEAEEKGASVLSLGLMNQGEELNRYGEVYVKKHPQLKVKLVDGSSLAVAVLLNSIPKGTTQVLLRGNLTKVAFAVAFALCEKGIQVTVLREDEYEKLDKSLGTKSEGKLVTSKSYSSCKVWLVGDDLTEEEQRKANKGTLFIPFSQLPPKKLRKDCFYHTTPAMQTPTALENVDSCENWLPRRVMSVWRIAGILHALEGWEEHECGYTMSNIDKVWEACLKHGFQPLKVPTQSKS

SEQ ID NO: 65436 - protein, 165 aa, Gossypium hirsutum
  Clone ID: LIB3828-006-Q1-K6-F5.pep
VAFAVAFALCEKGIQVTVLREDEYEKLDKSLGTKSEGKLVTSKSYSSCKVWLVGDDLTEEEQRKANKGTLFIPFSQLPPKKLRKDCFYHTTPAMQTPTALENVDSCENWLPRRVMSVWRIAGILHALEGWEEHECGYTMSNIDKVWEACLKHGFQPLKVPTQSKS

SEQ ID NO: 65437 - protein, 272 aa, Gossypium hirsutum
  Clone ID: GOSHI-09MAY01-C722_1.pep
MKLDTSGLESAAPVWGAPSELVDGFSAAPSFDLPNTTDFDGFQKEAIQMVKPAKGTTTLAFIFKEGVMVAADSRASMGGYISSQSVKKIIEINPYMLGTMAGGAADCQFWHRNLGIKCRLHELANKRRISVTGASKLLANILYSYRGMGLSVGTMIAGWDETGPGLYYVDSEGGRLKGMRFSVGSGSPYAYGVLDNGYRYDMSVEEAAELARRAIYHATFRDGASGGVASVYYVGPNGWKKLSGDDVGELHYKYYPVMPSTVEQEMVEGGGA

SEQ ID NO: 65438 - protein, 118 aa, Gossypium hirsutum
  Clone ID: LIB3582-049-P1-K1-H6.pep
MKLDTTGMESAAPVWGSHNELVDGFSAAPSFELPNTTDFDGFQKEAIQMVKPAKGTTTLAFIFKEGVMVAADSRASMGGYISSQSVKKIIEINPYMLGTMAGGAADCQFWHRNLGIKV

SEQ ID NO: 65439 - protein, 134 aa, Gossypium hirsutum
  unsure (1)..(134): unsure at all Xaa locations
  Clone ID: uC-gsflmaxxa089h02b1.pep
MYHRKEVKEPIMKLDTTRLKSAAPGSGAPIELVDGFSAAPWIDLPNTTDCDGFQKEALQMVXPDXGTTTLALIFNEXVMVAADSRASMGGYISSQSVNKTIEINAYMLGTIAGGAADCQLWRRDFSIKCRLHEL

SEQ ID NO: 65440 - protein, 90 aa, Gossypium hirsutum
  Clone ID: uC-gsflnu33B051f03b1.pep
MKLDTTGMESAVPVWGSHNEFVDELAVAATFELPNTTDFDGLQKEAIHMVKPVKGTTTLAFIFKEGVMVAADFRACMGGYILSQLVKKII

SEQ ID NO: 65441 - protein, 569 aa, Gossypium hirsutum
  Clone ID: GOSHI-09MAY01-C692_1.pep
MAETDQAPPPSDQLAALNLTDTVEKHAFSDRVLIRSIVGRPDGGAGLAGQRVRAGGWVKTGREQGKGTFAFLELNDGSCPANLQVIVDAGLAVLSKLVATGTCVVVDGILKVPPEGTRQKIELRVEKVVSVGEVDPAKYPIPKTKLTLEFLRDHLHLRARTNTIAAIARIRNALAFATHSFFQEHNFLYVHTPILTTSDCEGAGEMFQVTTLISESEKLEKELIKNPPPSEVDIEAARQVVSERGEAVKQLKAAKASKSEITASVAALNKAKENLSKLEERSKLKPGIPKKDGKIDYTQDFFARQAFLTVSGQLQVETYACAVSNVYTFGPTFRAEHSHTSRHLAEFWMVEPEIAFADLQDDMNCAEAYVKYMCNWLLDKCLDDMLFMAKSYDKGCIDRLRMVASIPFVRISYTEAVELLEEAVRGGKKFENEVKWGIDLASEHERYLTEVKFQKPVIVYNYPKGIKAFYMRLNDDLKTVAAMVVLVPKVGELIGGSQREERYEVIRERILEVGLPLEPYEWYLDLRRYGTVKHCGFGLGFERMILFATGIENIRDVIPFPRYPGRADL

SEQ ID NO: 65442 - protein, 147 aa, Gossypium hirsutum
  unsure (1)..(147): unsure at all Xaa locations
  Clone ID: LIB3828-010-Q1-K6-A4.pep
RXDMNCAEAYVKYMCNWLLDKCLDDMLFMAKSYDKGCIDRLRMVASVPFVRISYTEAVELLEEAVRGGKKFENEVKWGIDLASEHERYLTEVKFQKPLIVYNYPKGIKAFYMRLNDDLKTVAAMDVLVPKVGELIGGSQREERYEVI

SEQ ID NO: 65443 - protein, 80 aa, Gossypium hirsutum
  Clone ID: LIB3828-010-Q1-N6-A4.pep
MMVFLFCTADLSWFVAIPRRILEVGLPLEPYEWYLDLRRYGTVKHCGFGLGFERMILFATGIENIRDVIPFPRYPGRADL

SEQ ID NO: 65444 - protein, 231 aa, Gossypium hirsutum
  Clone ID: GOSHI-09MAY01-C632_2.pep
VEDGTTFAADAVIVAVPLGVLKAKTIKFEPRLPEWKEAAIDELGVGIENKIILHFDKVFWPNVEFLGVVADTSYHCSYFLNLHKATGHSVLVYMPAGQLARDIEKMSDEAAVEFAFMQLKKILPEAWAPIQYLVSRWGTDVNTLGSYSYDAVGMSHDLYERLRVPVDNIFFAGEATSMSYPGSIHGAFSTGQMAAEDCRMRVLERYGELNLLQPVMGEEAGLCVPLLITRL

SEQ ID NO: 65445 - protein, 156 aa, Gossypium hirsutum
  unsure (1)..(156): unsure at all Xaa locations
  Clone ID: AI055130.1.pep
EELLPGGHGLMVRGYLPVINTLAKGIDIRLSHRVTNIVRXRYTGVKVTVEDGTTFAADACYRAVPLSVLKAKNIKFEPRLSEWKEAAIDELGVGIENKIILHFDKVXWPKXVEFFGMFADTSYHCSYFLNXHKAKXICARYMPAGCQRLEKWLMNL

SEQ ID NO: 65446 - protein, 108 aa, Gossypium hirsutum
  unsure (1)..(108): unsure at all Xaa locations
  Clone ID: LIB3135-053-Q1-K1-H12.pep
TAKKATGLNSVRYMPAGQLARNIEKMSDEAAVEIAFMQLKKILPEACAPIQNLVSRWGTYVNTLCSYSYDXVGMSHDLDDMLRKPXGNIFFAGEATQMSYPRSIHGGI

SEQ ID NO: 65447 - protein, 168 aa, Gossypium hirsutum
  unsure (1)..(168): unsure at all Xaa locations
  Clone ID: GOSHI-09MAY01-C182_1.pep
RVRAGKDCINTGSIKLVMAGRGCXSAEEVEQVLLQVDGDVDAAIEFLIAEQGAEECTAANDSLTCHANGSYGXAGNDENGNSEQHKEENVGKTCEQDPYSDGTKTLGGNTPRLDEKKIPRNKLCPCGSKKKYKACCGSVSGRSSTKIMVNQPMEARKGRKERKQNNKG

SEQ ID NO: 65448 - protein, 136 aa, Gossypium hirsutum
  unsure (1)..(136): unsure at all Xaa locations
  Clone ID: GOSHI-09MAY01-C142_5.pep
LHIIFLVDNIPIRVFKNAESIGVXFPKSQPMRIYSSLWNADDWATRGGLVKTDWANAPFTAYYRNFIDNACVWSGRSSSCAKTNSVYDGAWETYELDAPGRRGLIWDQKYFMIYNYCTDLKRFPQGVPPECKRPRF

SEQ ID NO: 65449 - protein, 207 aa, Gossypium hirsutum
  unsure (1)..(207): unsure at all Xaa locations
  Clone ID: GOSHI-09MAY01-C142_4.pep
MYFFVYVLQLSSQGPTHDEIDFEFLGNLSGDPYILHTNVFTQGKGNREQQFYLWFDPTRNFHTYSIIWKPQHIIFLVDNIPIRVFKNAESIGVPFPKSQPMRIYSSLWNADDWATRGGXLVKTDWAKAPFTAYYRNFIANACVWSGRSSSCAKTNSVSAGAWETTHPAAPASGRLRWVQKYFMIYNYCTDLKRFPQGVPPECKRPRF

SEQ ID NO: 65450 - protein, 215 aa, Gossypium hirsutum
  Clone ID: GOSHI-09MAY01-C142_3.pep
IPTPLLFTNHLAPFTAYYPSSQGPTHDEIDFEFLGNLSGDPYILHTNVFTQGKGNREQQFYLWFDPTRNFHTYSIIWKPQHIIFLVDNTPIRVFKNAESIGVPFPKSQPMRIYSSLWNADDWATRGGLVKTDWAKAPFTAYYRNFNANACVWSGTSSSCAKTNSVSAGAWETNELDAPGRRRLRWVQKYFMIYNYCTDLKRFPQGVPPECKRPRF

SEQ ID NO: 65451 - protein, 271 aa, Gossypium hirsutum
  unsure (1)..(271): unsure at all Xaa locations
  Clone ID: GOSHI-09MAY01-C142_1.pep
MGSSCNVVSMALLACLVLNSLVFVAHGGDFYQDFDLTWGDRRGKIFNGGKLLSLSLDRVSGSGFQSKKEYLFGRIDMQLKLVAGNSAGTVTAYYLSSQGPTHDEIDFEFLGNLSGDPYILHTNVFTQGKGNREQQFYLWFDPTRNFHTYSIIWKPQHIIFLVDNTPIRVFKNAESIGVPFPKSQPMRIYSSLWNADDWATRGGLVKTDWAKAPFTAYYRNFNANACVWSGTSSSCAKTNSVSAGAWETNELCCTRKKXLEWVQKFFMDYNY

SEQ ID NO: 65452 - protein, 211 aa, Gossypium hirsutum
  unsure (1)..(211): unsure at all Xaa locations
  Clone ID: AI728990.1.pep
MGSSCNVVSMALLACLVLNSLVFVAHGGDFYHDFDLTWGDRIGNIFNGGKLLSLSLNRVSGSGFQSNKQYSSGTIHMQLKLVAGNSAGTVTAYYLSSQGPTLDDIHSEFSGNLNGDPYLLHTHVLFQRSCLIXLPSYLWFDPSINFPPYXSLIWKPPPFLFLVENPPLYNSPTFPNPSCFSLPPLSHPSRNHLLFTSNSQIIGVPRGSIYS

SEQ ID NO: 65453 - protein, 68 aa, Gossypium hirsutum
  Clone ID: uC-gsronu33B049f04b1.pep
YILFFTTFLLCIQVALNLMLGDGWNKLLLLLFFFLCIFISFCCFLNHLENRCKFPVSDNKIFLFFSTY

SEQ ID NO: 65454 - protein, 56 aa, Gossypium hirsutum
  Clone ID: GOSHI-09MAY01-C162_6.pep
KFNVAKVLQSLIPTVHPSVVEKTIRPCLVELSEDPDVDVRFFATQALESCGRVGMS

SEQ ID NO: 65455 - protein, 135 aa, Gossypium hirsutum
  Clone ID: GOSHI-09MAY01-C162_2.pep
RPVTAMIDEPLYPCPASIDELKNEDIQLRLNSIRRLSTIARALGEERTRKELIPFLSENNDDDDEVLLAMAEEIGVFIPYVGGVQYANVLLPPLETLCTVEETCVREKAEESSCRIGAHMMEQDSVESFIPSVNR

SEQ ID NO: 65456 - protein, 588 aa, Gossypium hirsutum
  Clone ID: GOSHI-09MAY01-C162_1.pep
MAMIDEPLYPIAVLIDELKNEDIQLRLNSIRRLSTIARALGEERTRKELIPFLSENNDDDDEVLLAMAEELGVFIPYVGGVEHANVLLPPLETLCIVEETCVRDKAVESLCRIGAQMREQDLVEFFIPLLKRLAAGEWFTARVSSCGLFHIAYPSAPEALKTELRTLYGQLCQDDMPMVRRSAATNLGKFAATVEAPHLKVDIMSMFDDLTQDDQDSVRLLAVEGCAALGKLLEPQDCVAHILPVIVNFSQDKSWRVRYMVANQLYELCEAVGPEPTRSDLVPAYVRLLRDNEAEVRIAAAGKVTKFCRILNSELAIQHILPCVKELSTDSSQHVRSALASVIMGMAPVLGKDATIEQLLPIFLSLLKDEFPDVRLNIISKLDQVNQVIGIDLLSQSLLPAIVELAEDRHWRVRLAIIEYIPLLASQLGVGFFDDKLGALCMQWLKDKVYSIRDAAANNVKRLAEEFGPDWAMQHIVPQVLDMINNPHYLYRMTILHAVSLLAPVMGKDITCSKLLPVVINASKDRVPNIKFNVAKVLQSLIPIVDQSVVEKTIRPCLVELSEDPDVDVRYFATQALQSSDQQMMMSS

SEQ ID NO: 65457 - protein, 53 aa, Gossypium hirsutum
  Clone ID: LIB3825-023-Q6-K6-B3.pep
DPFQTCCSSLLRKLCRLISGLSHHMAFTYTVIILMMEIKEILDVVLVLLHIQD

SEQ ID NO: 65458 - protein, 75 aa, Gossypium hirsutum
  Clone ID: LIB3196-058-P1-M1-E8.pep
LAPVMGKDITCSKLLPVVINASKDRVPNIKFNVAKVLQSLIPIVDQSVSKFIFVLKGKSYIRSIFYPLVRKCVGY

SEQ ID NO: 65459 - protein, 42 aa, Gossypium hirsutum
  Clone ID: LIB3149-053-Q1-K1-E2.pep
IYFTLKLSFCFFPYFNCISFFHIETLLCYICNLSKIDKKIKH

SEQ ID NO: 65460 - protein, 36 aa, Gossypium hirsutum
  Clone ID: LIB3149-053-Q1-K1-E1.pep
TIRPCLVELSEDPDVDVRCFATQALQSSDQQMMMSS

SEQ ID NO: 65461 - protein, 105 aa, Gossypium hirsutum
  unsure (1)..(105): unsure at all Xaa locations
  Clone ID: GOSHI-09MAY01-C112_6.pep
RHFFGPGVGPHIGWFPRSQNALIATIKTNRTIKFVDRRPSGFKCGINYXQPPTVVPGGDLAKVQRAVCMIANSTSVAEVFPRIDHMFDLMYSKRAFIHWYVLYVF

SEQ ID NO: 65462 - protein, 121 aa, Gossypium hirsutum
  Clone ID: GOSHI-09MAY01-C112_2.pep
SYALESTSLKPSAPSISHLWGPTAFKCGINYQPPTVAPGGDLPKVQRAACMMSNSTSVAEVFSRIDHKCDLMYAKRAFIHWYVGEGIEDGEFSEAREDLAALEKDYEERGAESAVGAEGDV

SEQ ID NO: 65463 - protein, 248 aa, Gossypium hirsutum
  Clone ID: GOSHI-09MAY01-C112_1.pep
MRIRPAIHGIRGRSLVIVRPTYTNLNRLVSQVISSLTASLRFDGALNVDVTEFQTNLVPYPRIHFMLSSYAPVISAEKAYHEQLSVAEITNSAFEPSSMMAKCDPRHGKYMACCLMYRGDVVPKDVNAAVASIKTKRTIQFVDWCPTGFKCGINYQPPTVVPGGDLAKVQRAVCMISNSTSVAEVFSRIDHKFDLMYAKRAFIHWYVGEGMEEGEFSEAREDLAALEKDYEEVGAESAEGDEGEDDEY

SEQ ID NO: 65464 - protein, 77 aa, Gossypium hirsutum
  Clone ID: LIB3493-038-P1-M1-F1.pep
MQQDPHEPLRILLLPYPHQHTIKTKRTIQFVDRCPTGCKCGINYQPPTVVPGGDLAKVQRADCMIHNCTSVAEVFSR

SEQ ID NO: 65465 - protein, 179 aa, Gossypium hirsutum
  unsure (1)..(179): unsure at all Xaa locations
  Clone ID: LIB3584-008-P1-K1-E11.pep
QLGFTGWAAGGVSTSVVEPYNSVLSTHSLLEHTDVAVLLDNEAIYDICRRSLDIERAGGGVXFFVSQVISSLTASLRFDGALNVDVTEFQTNLVPYPRIHFMLSSYAPVISAEKAYHEQLSVAEITNSAFEPSSMMAKCDPRHGKYMACCLMYRGDVVPKDXNAAVATIKTKRTIQFVD

SEQ ID NO: 65466 - protein, 137 aa, Gossypium hirsutum
  Clone ID: LIB3189-049-P1-K1-B6.pep
GFNLETPLNRLVSQVISSLTASLRFDGALNVDVTEFQTNLVPYPRIHFMLSSYAPVISAEKAYHEQLSVAEITNSAFEPSSMMAKCDPRHGKYMACCLMYRGDVGPKDVNAAVGSIKTKRTIQFVDWCPTGFKCRIN

SEQ ID NO: 65467 - protein, 179 aa, Gossypium hirsutum
  Clone ID: GOSHI-09MAY01-C102_5.pep
MATLKVPVHVPSPSEDAEQLRKAFEGWGTNEQLIIDILAHRNAAQRNSIRKVYGEAYGEDLLKCLEKELTSDFERAVLLFTLDPAERDAHLANEATKKFTSSNWILMEIACSRSSHELLNVKKGLSCSVLRNPFDEDVGHHTTGEYCELLVPFVSAFRFEGEEVNMTLANLRLKTDDKI

SEQ ID NO: 65468 - protein, 278 aa, Gossypium hirsutum
  unsure (1)..(278): unsure at all Xaa locations
  Clone ID: GOSHI-09MAY01-C102_4.pep
DSFSDTWAVSWVLFPLCPRRPVWGAVYFWTPAERDAFLAHEATKKXFTSSHWVLMEIACTRSSHEXLFNVRKAYHDLYKKXPLKKNVAHHTKGXYRKLLVPLXVSAFRYPGXKEVNMTLARSEGQRYLREKEYQTSSTSDEXEVIRNCNQHGVRAQLNGXPLNHYXNTAFGKMAINKEFEGPPXEEHEFLKLLRXAAIKGLPVPEKYFEKVVRQAINKLGXDEWALTRGVPPRAEVDMGGIKGESQRRTSVPLEKAIAGDPSGAYEKIPPALIGAGDV

SEQ ID NO: 65469 - protein, 237 aa, Gossypium hirsutum
  unsure (1)..(237): unsure at all Xaa locations
  Clone ID: GOSHI-09MAY01-C102_3.pep
FFTKKKPGGGGGGQPLKVPAHVPAPSEDAEQLRKAFEGWGTNEQLIIDPRARRNAAQRGGRRXSYREAYGEDLLKSLDEELPRDFERAVVLFTLDPAERDAFLAHEATKRFTSSHWVLMEIACTRSSHELFNVRKAYHDLYKKSLEEDVAHHTKGGYRKLLVPLVSAFRYQGEEVNMTLARSEAKILREEISDKQYSDEEVIRIVTTRSKAQLNATLNHYNTAFGNAINKVYILVFF

SEQ ID NO: 65470 - protein, 139 aa, Gossypium hirsutum
  Clone ID: GOSHI-09MAY01-C102_2.pep
MISDKLFCDVVVIRIVTTRSKAQLNATLNHYNTAFGNAINKDLKADPEDEFLKLLRAAIKCLTVPEKYFEKVLRQAINKLGTDEWALTRVVATRAEVDMVRIKEEYQRRNSVTLEKAIAGDTSGDYEKMLLALIGAGDV

SEQ ID NO: 65471 - protein, 343 aa, Gossypium hirsutum
  Clone ID: GOSHI-09MAY01-C102_1.pep
MRTHAAIFPHHHRLLFFTKKKRKITVKMATLKVPAHVPAPSEDAEQLRKAFEGWGTNEQLIIDILAHRNAAQRNLIRKTYREAYGEDLLKSLDEELSSDFERAVVLFTLDPAERDAFLAHEATKRFTSSHWVLMEIACTRSSHELFNVRKAYHDLYKKSLEEDVAHHTKGDYRKLLVPLVSAFRYQGEEVNMTLARSEAKILREKISDKQYSDEEVIRIVTTRSKAQLNATLNHYNTAFGNAINKDLKADPEDEFLKLLRAVIKCLTTPEQYFEKVLRQAINKLGSDEWALTRVVTTRAEVDMVRIKEAYQRRNSIPLEQAIAKDTSGDYEKFLLALIGAGDA

SEQ ID NO: 65472 - protein, 103 aa, Gossypium hirsutum
  unsure (1)..(103): unsure at all Xaa locations
  Clone ID: LIB3166-052-P1-K1-C3.pep
IGGADASGANDIDYLVSDEFTSPLRXSTYXSEKLLHLPHCXTVNDYKQKNRDEMHPHCQHKRSDYGLPEDKFIFACFNQLYKMDPAICAAFYVGPCRARCSSG

SEQ ID NO: 65473 - protein, 106 aa, Gossypium hirsutum
  Clone ID: LIB3083-089-Q1-L1-B3.pep
MATLKVPVHVPSPSDDAEQLRKAFEGWGTNEQLIIDILAHRNAAQRNSIRKVYGEAYGEDLLKCLEKELTSDFERAVLLFTLDPAERDAHLANEATKNFTSSNWIL

SEQ ID NO: 65474 - protein, 78 aa, Gossypium hirsutum
  unsure (1)..(78): unsure at all Xaa locations
  Clone ID: LIB3165-032-P1-K1-A2.pep
EGIGWDRPQSGKVSNGXPFKGSQFKRSFXPSEGVLXSTCGKGFXEGCGYRTXXNXDYSXHIGFTXXMQXTAQFKFGKV

SEQ ID NO: 65475 - protein, 104 aa, Gossypium hirsutum
  Clone ID: LIB3145-047-Q1-K1-F10.pep
LNLIRKTYREAYGEDLLKSLDDELSSDFERAVELFTLDPAERDAFLAHEATKRFTSSHWVLMEIACTMSSHELFNVRKAYHDLYKKFLEEDVAHHTKGDYRKLF

SEQ ID NO: 65476 - protein, 90 aa, Gossypium hirsutum
  unsure (1)..(90): unsure at all Xaa locations
  Clone ID: LIB3135-047-Q1-K1-B5.pep
KEILDFFIFXTAATLISRIIGKYIHKHIIFERSNTEAAAYKSHVHTTQPNKHNSHLKLQTKFSYQQLNIGKQLRRLQLQSTQAAFSHSLQ

SEQ ID NO: 65477 - protein, 160 aa, Gossypium hirsutum
  Clone ID: GOSHI-09MAY01-C132_11.pep
HAPVTISQLFSSLSLSAVAAAISTVAAAAAANRALGVSVPTSAFMGKKVSSRFNNTRQVPSGSFKVMAAEKEIDEETQTEKDRWKGLAYDISDDQQDITRGKGMVDSLFQAPMNDGTHYAVMSSYEYISQGLKTYNLDNNMDGFYIAPAFMDKLVVHISK

SEQ ID NO: 65478 - protein, 135 aa, Gossypium hirsutum
  unsure (1)..(135): unsure at all Xaa locations
  Clone ID: GOSHI-09MAY01-C132_8.pep
APTREDRIGVCTGIFRTDNVPVDDLVKLVDTFPGQSIDFFGALRARVYDDEVRKWIGEVGVNGVGKKLVNSREGKTIRYRPXSQPKMTIEQLLEYGYMLGAEQENVNRVQLADKYLSAAXALGNANADAIKRGAF

SEQ ID NO: 65479 - protein, 123 aa, Gossypium hirsutum
  Clone ID: GOSHI-09MAY01-C132_7.pep
MASTSAVSMALPLTRATQNRVPASEAFFKPLPLKPSGAIPTTTSNGRLQVKAAASSLKDKAITGLTASAITTSMVIPEVAQAADGVSPSLKNFLLSIVAGGVVLVAIVGAVIGVSNFDPVKRT

SEQ ID NO: 65480 - protein, 124 aa, Gossypium hirsutum
  Clone ID: GOSHI-09MAY01-C132_6.pep
MASSSAASMALPLAGATQNRMPSSEAFFKPLPVKPWRSMGGVKRPNGRLQVKAGSSSFKEKAVTGLTAAALTTSMMIPEVAQAADGVTPSLKNFLLSIAAGGVVLVAIVGAVIGVSNFDPVKRT

SEQ ID NO: 65481 - protein, 72 aa, Gossypium hirsutum
  Clone ID: GOSHI-09MAY01-C132_5.pep
VGRNSVGKKLVNSREGPPSFEQPKMTIEKLLEYGYMLVAEQENVKRVQLADKYLSEAALGNANDDAIKRGAF

SEQ ID NO: 65482 - protein, 167 aa, Gossypium hirsutum
  Clone ID: GOSHI-09MAY01-C132_4.pep
MGKKVSSRFNSTRQVPSGSFKVMAAEKEIDEETQTEKDRWKGLAYDISDDQQDITRGKGMVDSLFQAPMNDGTHYAVMSSYEYLSQGLKTYNLDNNMDGFYIAPAFMDKLVVHITKNFMSLPNIKVPLILGIWGGKGQGKSFQCELVFAKMGINPIMMSAGELESGN

SEQ ID NO: 65483 - protein, 258 aa, Gossypium hirsutum
  Clone ID: GOSHI-09MAY01-C132_3.pep
FWNNLTSLHKIEKGFSFSTQYYYNTRLKLVSASSTLRNTRPDNPTRPLQLPGMYNKEENPRVPIIGTGNDFSTLYPPLIRDGRMEKFYWAPTRDDRVGVCKGIFRTDGIRDEDIVKLVDTFPGQSIDFFGALRARVYDDEVRKWISEVGVASVGKKLVNSREGPPTFEQPKMTIEKLLEYGNMLVAEQENVKRVQLADKYLSEAALGEANEDSINRGTFYGKAAQQVGVPVPEGCTDPNADNFDPTARSDDGTCTYKF

SEQ ID NO: 65484 - protein, 255 aa, Gossypium hirsutum
  Clone ID: GOSHI-09MAY01-C132_2.pep
MAAAVSTIGAVNRAPLSLNGSGAGASAPSSAFMGNSLKKVSARFNNNGKAPVGSFMIVAAKEIDEDTQTDQDRWKGLAYDISDDQQDITRGKGMVDSLFQAPMNDGTHYAVMSSYEYISQGLRTYDLDNNMDGFYIAPAFMDKLVVHITKNYMTLPNIKVPLILGIWGGKGQGKSFQCELVFAKMGINPIMMSAGELESGNAGEPAKWIRQRYREAADIIKKGKMCCLFINDLDAGAGRMGGTTQYTVYNQMVNA

SEQ ID NO: 65485 - protein, 431 aa, Gossypium hirsutum
  Clone ID: GOSHI-09MAY01-C132_1.pep
MAAAISTVAAAAAANRALGVSVPTSAFMGKKVSSRFNSTRQVPSGSFKVMAAEKEIDEETQTEKDRWKGLAYDISDDQQDITRGKGMVDSLFQAPMNDGTHYAVMSSYEYISQGLKTYNLDNNMDGFYIAPAFMDKLVVHITKNFMTLPNIKVPLILGIWGGKGQGKSFQCELVFAKMGINPIMMSAGELESGNAGEPAKLIRQRYREAADIIKKGKMCCLFINDLDAGAGRMGGTTQYTVNNQMVNATLMNIADNPTNVQLPGMYNKEENPRVPIIVTGNDFSTLYAPLIRDGRMEKFYWAPTREDRIGVCTGIFRTDNVPVDDIVKLVDTFPGQSIDFFGALRARVYDDEVRKWIGEVGVNGVGKKLVNSREGPPSFEQPKMTIEKLLEYGYMLVAEQENVKRVQLADKYLSEAALGNANDDAIKRGAF

SEQ ID NO: 65486 - protein, 142 aa, Gossypium hirsutum
  unsure (1)..(142): unsure at all Xaa locations
  Clone ID: LIB3165-021-P1-K1-H5.pep
YRIGSAGARPYPYRCNSPIIHDGFMXKIYWARTREDRIGVCTGIFRTDNVPVDDIVKLVDTFPGQSIDFFGALRARVYDDEVRKWIGEVGVNSVGKKLVNSREGPPSFEQPTMTIEKLLEYWNMLVAEQENVKRVQLLQIFE

SEQ ID NO: 65487 - protein, 133 aa, Gossypium hirsutum
  Clone ID: LIB3165-036-P1-K1-G6.pep
RPPTRPPTRPFTRPGIVDSLFQAPMSDGTHYAVMSSYEYLSQGLRTYDLDNNMDGFYIAPAFMDKLVVHITKNFMTLPNIKVPLILGVWGGKGQGKSFQCELVFAKMGINPIMMSAGELESGNAGEPAKLIRQ

SEQ ID NO: 65488 - protein, 104 aa, Gossypium hirsutum
  Clone ID: LIB3120-017-Q1-K1-G5.pep
MFQYYRTCITHMYNMHNQLYNINIVTKYMQMIEAAKEIDEDTQTDQDRWKGLAYDISDDQQDITRWKGVGDSLMQAPMNDGTHYAVMISYDHISQGLGTFYLDN

SEQ ID NO: 65489 - protein, 123 aa, Gossypium hirsutum
  unsure (1)..(123): unsure at all Xaa locations
  Clone ID: LIB3165-036-P1-K1-A4.pep
GAGASVPSXSAFMGNSLKRVSARCNNNGKAPAGSFKIVAAKEIDEDTQTDQDRWKGLAYDISDDQQDITRGKGMVDSLFQAPMNDGTHYAVMSSYEYLSQGLRTYDLDNFASVTGQTSKQLHP

SEQ ID NO: 65490 - protein, 73 aa, Gossypium hirsutum
  unsure (1)..(73): unsure at all Xaa locations
  Clone ID: LIB3165-019-P1-K1-H6.pep
AFMGKKVSSRFNNTRQVPSGSFKVMAAEKEIDEETQTEKDRWKGLAYRYWDDQQDITRGKXGMVDSLFQAPMN

SEQ ID NO: 65491 - protein, 155 aa, Gossypium hirsutum
  unsure (1)..(155): unsure at all Xaa locations
  Clone ID: GOSHI-09MAY01-C122_15.pep
RFEIVNVEFFKGICQLFEMFFYFVFETFGLQNMNSSGKTSTDSLNYRLKTALSQVTQDCEEWXIKTSSGPLSSSTAHADLTPTAPQNTNFGSPAGTSFGLKERCAGADTVAFVARILHRSRTNLQSLLLKSNTAIVEAFFVHLVGAVPDLVEHIH

SEQ ID NO: 65492 - protein, 218 aa, Gossypium hirsutum
  Clone ID: GOSHI-09MAY01-C122_13.pep
KGRACNSNTSSSTSSGSAERELDIVIPTIRNLDFLEMWGAFFQPYHLIIVQDGDPSKTIKVPEGFDYELYNRNDIRRILGPKASCISFKDSACRCFGYMVSKKKYIFTIDDDCFVAKDPSGKAINALEQHIKNLLSPSTPFFFNTLYDPFREGADFVRGYPFSLREGVPTAASHGLWLNIPDYDAPTQLVKPLEKNTRYVDAVLTISKGTFVPMCGMN

SEQ ID NO: 65493 - protein, 268 aa, Gossypium hirsutum
  Clone ID: GOSHI-09MAY01-C122_9.pep
LFAQRVMDLAEYRKNLYDYLVTKMNDIAPNLASLIGEVVGARLISHAGSLTNLAKCPSSTLQILGAEKALFRALKTRGNTPKYGLIFHSSFIGRASAKNKGRMARYLANKCSIASRIDCFAERGTTVFGEKLREQVEERLEFCDKGVAPRKNIDVMKSAIESTQNKDTEMEEVEPEEASAKKSKKKKSKTEDAPAAATNGDALEDGKSEKKKKKEKRKKEQEAHEEDGKTNGVNEQDGTAKKKKKKSKDEAATNENTKKKKKKKKSHE

SEQ ID NO: 65494 - protein, 84 aa, Gossypium hirsutum
  Clone ID: GOSHI-09MAY01-C122_8.pep
FVTKTIKVPEGFDYELYNRNDINRILGPKDSSISFKDSACRCFWYMVSKKKYIYTIDDDCFASCGSPCSMLLICCYWWFPVLQL

SEQ ID NO: 65495 - protein, 121 aa, Gossypium hirsutum
  Clone ID: GOSHI-09MAY01-C122_7.pep
FVTKIIKVPKGFDYELYNRTTSTGFWVLSLLISLSRILLVGALGTWFPKRNTSIYTIDDDCFERCAGADTVALVARILHRSRTNLQSLLLKSNTAVVEDFFVHLAPGCPLPPEKGPSVINY

SEQ ID NO: 65496 - protein, 328 aa, Gossypium hirsutum
  unsure (1)..(328): unsure at all Xaa locations
  Clone ID: GOSHI-09MAY01-C122_6.pep
MAEPSTISPAPLLKDELDIVIPTIRNLDFLEMWRPFFQPYHLIIVQDGDPSKTIKVPEGFDYELYNRNDINRILGPKSSCISFKDSACRCFGYMVSKKKYIYTIDDDCFVAKDPSGKDINALEQHIKNLLCPSTPFFFNTLYDPYRAGADFVRGYPFSLREGVPTAVSHGLWLNIPDYDAPTQLVKPLERNPRSVDAIMTIPKGTLFPMCGMNLAFNRELIGPAMYFGLMGDGQPIGRYDDMWAGWCTKVICDHLGMGIETRPSLFWSINASNPXVNLLMDSKDFLVYELIPVFQSVDFPRTVPSFRIVLESSCNVLHIGWVRLLNIL

SEQ ID NO: 65497 - protein, 224 aa, Gossypium hirsutum
  Clone ID: GOSHI-09MAY01-C122_5.pep
MAFVSEEEKTEDYLFKIVLVGDSAVGKSNLLARFARNEFYPNSKSTIGVEFQTQKLDINGKEVKAQIWDTAGQERFRAVTSAYYRGPVGALLVYDISRRQTFDSIGRWLNELQTHSDMNVVTILVGNKSDLRDAREVSTAEGKALAEAQGLFFMETSALDSSNVAAAFQTVVKEIYNILSRKVMMSHELKKQDAPLDGKTVVLQGDENQERATESPKSGGCCSS

SEQ ID NO: 65498 - protein, 355 aa, Gossypium hirsutum
  Clone ID: GOSHI-09MAY01-C122_4.pep
MADPATISPATLLKDELDIVIPTIRNLDFLEMWRPFFQPYHLIIVQDGDPSKAIKVPEGFDYELYNRNDINRILGPKASCISFKDSACRCFGYMVSKKKYIYTIDDDCFVAKDPSGKDINALEQHIKNLLSPSTPFFFNTLYDPYRAGADFVRGYPFSLREGVPTAVSHGLWLNIPDYDAPTQLVKPLERNTRYVDAVMTIPKPTRPPMCGMNLAFDRELSGPAMYFGLMGDGQPIGRYDDMWAGWCTKVICDHLGWGVKTGLPYIWHSKASNPFVNLRKEYKGIYWQEELIPFFQSVTLPKDCTSVQKCYTEIAKQVKAKLGKVDDYFNKLADAMVTWIEAWDELNPIRCLKIF

SEQ ID NO: 65499 - protein, 225 aa, Gossypium hirsutum
  unsure (1)..(225): unsure at all Xaa locations
  Clone ID: GOSHI-09MAY01-C122_3.pep
MAFVSEEEKTEDYLFKIVLDGDSAVGKSNLLARFARNEFYPDSKSTIGVELQTQKLDINGKEVKAQIWDTAGQERFRAVTSAYYRGAVGALLVYDISRRQTFDSIGRWLNELQXTHSDMNVVTILVGNKSDLRDAREVSTAEGKALAEAQGLFFMETSALDSSNVAAAFQTVVKEIYNILSRKVMMSHELKKQDAPLDGKTVVLQGDENQEPATEAPKSGGCCSS

SEQ ID NO: 65500 - protein, 114 aa, Gossypium hirsutum
  Clone ID: GOSHI-09MAY01-C122_2.pep
TVAWAHPGPGAWAGLPYIWHSKASNPFVNLKKEYKGIYWQEELIPFFQSVTLPKDCTSVQKCYIEISKQVKAKLGKVDDYFNKLADAMVTWIEAWDELNPSGAKSAELSNGASK

SEQ ID NO: 65501 - protein, 359 aa, Gossypium hirsutum
  Clone ID: GOSHI-09MAY01-C122_1.pep
MATVSPTPLLKDELDIVIPTIRNLDFLEMWRPFFQPYHLIIVQDGDPTKTIKVPEGFDYELYNRNDINRILGPKASCISFKDSACRCFGYMVSKKKYIYTIDDDCFVAKDPSGKDINALEQHIQNLLSPSTPFFFNTLYDPYRSGADFVRGYPFSLREGVPTAVSHGLWLNIPDYDAPTQLVKPLERNTRYVDAIMTIPKGTLFPMCGMNLAFNRELIGPAMYFGLMGDGQPIGRYDDMWAGWCTKVICDHLGWGVKTGLPYIWHSKASNPFVNLKKEYKGIYWQEELIPFFQSVALPKDCTTVQKCYIEISKQVKAKLGKVDDYFNKLADAMVTWIEAWDELNPSGDISAKIPNGASK

SEQ ID NO: 65502 - protein, 41 aa, Gossypium hirsutum
  Clone ID: LIB3146-005-Q1-K1-C4.pep
HFIHIVHDLFIELINLLRQLINKRTRVHNRISWYRLNVPKP

SEQ ID NO: 65503 - protein, 118 aa, Gossypium hirsutum
  unsure (1)..(118): unsure at all Xaa locations
  Clone ID: AI728951.1.pep
FVTKIIKVPEGFDYELYNRNDINRILGPKASCISFKDSACRCFGYMVSKKKYIXIYTTDDDCFRMPLDFLQGDKFCEAAVSYIQPLLTKGVPSLFSDLSPLYNHYGKGTAGVALAGLL

SEQ ID NO: 65504 - protein, 179 aa, Gossypium hirsutum
  unsure (1)..(179): unsure at all Xaa locations
  Clone ID: AI730967.1.pep
PTIFSHRKYLILPPSSNLFSSLPITNQFSIPKHNKRLTKKHPFFIVLNSSIVFSTSPPSSALQWLSPPQTXTKKHPFVYTQCQCIHARSIFPCQDTPSTRIRYSALLNVPRKLSAVSNVGAAAGIRRGHRGRIKRRQAAEVEEVKGIKTGLRMKKLFPISPNKKPLLPSSILRIITRSR

SEQ ID NO: 65505 - protein, 84 aa, Gossypium hirsutum
  Clone ID: LIB3828-003-Q1-K6-E8.pep
MAFVSKEEKIEDYLFKIVLVSDSTDGILNLLARFAKNEFYPNSKSTIGVEFQTQKLDINGNEVKAQMWIMLTRTKWIYLKYVRI

SEQ ID NO: 65506 - protein, 135 aa, Gossypium hirsutum
  unsure (1)..(135): unsure at all Xaa locations
  Clone ID: LIB3149-033-Q1-K1-C3.pep
SKPFFLSAPCTISAGFFSKDGLYIIISTILNXDLLEMWRLFSQPYHLIIVQDGDPSKTIKVPEGFYYELYNMNDINRILGPKSSCISFKDXSACRCFGYMVSKNMYIYTIDDDCFCAKDPVGKYINALVQHIKNL

SEQ ID NO: 65507 - protein, 99 aa, Gossypium hirsutum
  Clone ID: LIB3584-036-P1-K1-G11.pep
KALEIKFLLWYSKLSPKKHQPCIMFKNRNGFIEEKNKGTLEKEAKIGIKSTNVSFSNCLHENTFIVKQILGQLNKKGINSIPLSPSCNIDKSILSALRM

SEQ ID NO: 65508 - protein, 149 aa, Gossypium hirsutum
  Clone ID: uC-gsflmaxxa048g05b1.pep
MADPATISPATLLKDELDIVIPTIRNLDFLEMWRPFFQPYHLIIVQDGDPSKAIKVPEGFDYELYNRNDINRILGPKASCISFKDSACRCFGYMVSKKKYIYTIDDDCFVSSIFISHVAKDPSGKDINALEQHIKNLLSSSTSFFFTPF

SEQ ID NO: 65509 - protein, 83 aa, Gossypium hirsutum
  unsure (1)..(83): unsure at all Xaa locations
  Clone ID: uC-gsflmaxxa067c01b1.pep
PLATVFPTALGKEELAMEAPTVRNLDFLEMWRPFFQPDHLIIVQDGDPTMTIKVPEGFDYELXYNRNDLNSMTKVLHLVKTSM

SEQ ID NO: 65510 - protein, 148 aa, Gossypium hirsutum
  unsure (1)..(148): unsure at all Xaa locations
  Clone ID: uC-gsflmaxxa091a03b1.pep
LLYSLSSAPDPIRGTYLTILLPDDHVLNSFFIVFSTSPSSSALQWLSPPQTFNKXHPFVYAQCQCIHARSIFPCQNTPAAGIRYSALLCSMSILGPKASCISFKDSTCRCFGYMVSKKKYIYTIDDDCFVSSTLVSSLFYFLFLNFAF

SEQ ID NO: 65511 - protein, 104 aa, Gossypium hirsutum
  Clone ID: LIB3196-003-P1-M1-F7.pep
MATVSPTPLLKDELDIVIPTIRNLDFLEMWRPFFQPYHLIIVQDGDPTKTIKVPEGFDYELYNRNDINRILGPKASCISFKDSACRCFGYMVSKKKYIYTIDDD

SEQ ID NO: 65512 - protein, 125 aa, Gossypium hirsutum
  Clone ID: LIB3146-001-P1-K2-C5.pep
HASAHAFAHAFAHAFDHASAHAFAFSLREGVTTAVSHGLWLNIPDYDAPTQLVKPLERNTTYVDAIMTIPKGTLFPMCGMNLAFNRELIGPAMYFGLMGDGQPIGRYDDMWAGWCTKVICDHLGW

SEQ ID NO: 65513 - protein, 74 aa, Gossypium hirsutum
  Clone ID: LIB3149-003-P1-K1-F9.pep
GTHLGYGWSGALQGRYTSVQKCYIEISKQVKAKLGKVDDYFNKLADAMGTWIETWDELNPSGAKSRELSNGASK

SEQ ID NO: 65514 - protein, 395 aa, Gossypium hirsutum
  Clone ID: GOSHI-09MAY01-C382_1.pep
MSVTLKSPPSSFLSSSLPKSRLGFANGSSSSTLLFKFNRSFPVLRASSGSSSSVDTGLSTELDAVSTFSEIVPDTVIFDDFEKFPPTAATVSSSLLLGILSLPDTIFRNAVDMALADSTCSPLDNPELRLSCFVNKALVNVGGDLAKLVPGRVSTEVDARLAYDTHGIIRRVHDLLRLYDEIAVPPERLLFKIPSTWQGIEASRLLESEGIQTHLTFVYSFAQAAAAAQAGASVIQIFVGRVRDWARNHSGDPEIEAAIQRGEDPGLALVTKAYNYIHKYGHKSKLMAAAVRNKQDIFSLLGVDYIIAPLKVLQSLKESITSPDEKYSYVRRLSPQSAARYDFTAEELTKWDQLSLASAMGPASVELLAAGLDGYVNQAKRVEELLDKIWPPPNV

SEQ ID NO: 65515 - protein, 88 aa, Gossypium hirsutum
  unsure (1)..(88): unsure at all Xaa locations
  Clone ID: GOSHI-09MAY01-C352_23.pep
MLGVFSTAIVSPPDELVAAGXCRTPSPMITADALVKRFLETNSSGVSMHIGDHVQAAYSHHKESPLQPRSFAVKENHIWYWLLDDLNR

SEQ ID NO: 65516 - protein, 85 aa, Gossypium hirsutum
  Clone ID: GOSHI-09MAY01-C352_17.pep
PNSSYSSLFYSSFHFPFYKYWDSVIHMETDPYAMHLQLLYSRGRGDLEGESKGLLCGSNNCWPFHLEFSTPRDNLNNLHNKIMLV

SEQ ID NO: 65517 - protein, 137 aa, Gossypium hirsutum
  Clone ID: GOSHI-09MAY01-C352_16.pep
MGGERKVYTLAEVSQHNHAKDCWLVIEGKVFDVTKFLEDHPGGDDVLLSSTGKDATDDFEDVGHSSSARAMMDEFYVGDIDTSTIPSKRKYTPPKQPHYEQDKTSEFAIKLLQFLVPLLILGLAFGVRSYTKTPASS

SEQ ID NO: 65518 - protein, 245 aa, Gossypium hirsutum
  unsure (1)..(245): unsure at all Xaa locations
  Clone ID: GOSHI-09MAY01-C352_13.pep
MLGVSSSAIVSPSDELVAAGCRTPSPKITADALVKRFLETNSYGVSMQIGDHVQFAYSHHKESALRTRSFAVKDEIFCLFAGALDNLGSLKQQFGLGHXAPTVRVICGHLKLYRGPCRDRALLFLQTMWLAHLXGAFAFSLVFDQIHLHFCLDQFGKVPLYWGITADGHVAFADNADLLKGACGKSLASFPQGCFFSTAVGELMSYENPKNKITAVPAEDEEMWGATYKVEGPTVAGTESPMLSF

SEQ ID NO: 65519 - protein, 91 aa, Gossypium hirsutum
  Clone ID: GOSHI-09MAY01-C352_12.pep
IQEHSNKTCNFRNELKHPTLAKNKEKSKEANFYQKNIKATPAWIIQEIFTNKKMYLSLNDKPTAFGIVVLRNLSQSIDLSFSTHNFFFLLV

SEQ ID NO: 65520 - protein, 198 aa, Gossypium hirsutum
  Clone ID: GOSHI-09MAY01-C352_11.pep
LACRGLQKTSFFPPFSFSPPPARPRNLNLPLGQKQASRIIAGDGNPKRFEKAKRFGITEFGNPKDYHKPVQKGIGEMTGGGVDRSGECTGSVQAMISAFECLHAGWGVRVLGGVPKKDDAFKTHPMNLLRERTLKGAFYGNYKPRTDIPMVVDKYLNKELGLDMDKFITHSVPFADINKAFDYMLQGIGLRCMIHLDA

SEQ ID NO: 65521 - protein, 240 aa, Gossypium hirsutum
  unsure (1)..(240): unsure at all Xaa locations
  Clone ID: GOSHI-09MAY01-C352_10.pep
MLGVFSSAIVSPPDELVAAGCRTPSPKITADALVKRFLETNSSGVSMQIGDHVQFAYSHHKESPLRPRSFASANEVKDEIFCLFEGALDNLGSLKQQYGLAKSANEVILVIEAYXALRDRAPYPXNHVVGHLIGSFAFIVFDKSTSTLFVASDQFGKVPLYWGITADGYVAFADNAELLKGACGKSLASFPQGCFYSTAVGGLRSYENPKNKITAVPAEEEEIWGAKFKVEGPTVVAATE

SEQ ID NO: 65522 - protein, 114 aa, Gossypium hirsutum
  unsure (1)..(114): unsure at all Xaa locations
  Clone ID: GOSHI-09MAY01-C352_9.pep
RVSEKKSYAGSTAGQVMRCKAAVAWEAGKPLSIEEVEVAPPQKHEVRIXKIVFTALCHTDAYYWECKGFTPSVSSIYMNITTFIFYKYCHCFPLIWQGYTPLVPPILGHEASGY

SEQ ID NO: 65523 - protein, 68 aa, Gossypium hirsutum
  Clone ID: GOSHI-09MAY01-C352_8.pep
MLGVFSSAIVSPPDELVAAGCRTPSPKITADALVKRFLETNSSGVSMQIGDHVQFAYSHHKESPLRPR

SEQ ID NO: 65524 - protein, 130 aa, Gossypium hirsutum
  unsure (1)..(130): unsure at all Xaa locations
  Clone ID: GOSHI-09MAY01-C352_7.pep
LSLQALRDRAPYPPNHVXVGHLIGSFAFIVFDKSTSTLFVASDQFGKVPLYWGITADGYVAFADNAELLKGACGKSLASFPQGCFYSTAVGGLRSYENPKNKITAVPAEEEEIWGAKFKVEGPAVVAATE

SEQ ID NO: 65525 - protein, 144 aa, Gossypium hirsutum
  Clone ID: GOSHI-09MAY01-C352_6.pep
VPDNSRVRPHASVVIEAYKALRDRAPYPPNHVVGHLIGSFAFIVFDKSTSTLFVASDQFGKVPLYWGITADGYVAFADNAELLKGACGKSLASFPQGCFYSTAVGGLRSYENPKNKITAVPAEEEEIWGAKFKVEGPTVVAATE

SEQ ID NO: 65526 - protein, 154 aa, Gossypium hirsutum
  Clone ID: GOSHI-09MAY01-C352_5.pep
SATLCSSSSLNKQNKKKKIMGGEGKVYTLAEVSQHNNAKDCWLIIEGKVYDVTKFLEDHPGGDEVLLSATGKDASDDFEDVGHSSSARAMMDEFYVGDVDTSTIPTKTKYTPPKQPHYEQDKTSDFVIKLLQFLVPLLILGLAFGVRFYTKSPA

SEQ ID NO: 65527 - protein, 137 aa, Gossypium hirsutum
  Clone ID: GOSHI-09MAY01-C352_4.pep
MGGERKVYTLAEVSQHNHAKDCWLVIEGKVFDVTKFLEDHPGGDDVLLSSTGKDATDDFEDVGHSSSARAMMDEFYVGDIDTSTIPSKRKYTPPKQPHYEQDKTSEFVIKLLQFLVPLLILGLAFGVRSYTKTPASS

SEQ ID NO: 65528 - protein, 192 aa, Gossypium hirsutum
  unsure (1)..(192): unsure at all Xaa locations
  Clone ID: GOSHI-09MAY01-C352_3.pep
TQKGQTVAVFGLGAVGLAAAEGARVCGASRIIAVDVNPRRFEEAKRFGITEFVNPKDYDKPVQEVIVEMTGGGVDRSVECTGSVQAMISAFECVXHDGWGVCVLXVGVPKKDDAFKTHPMNLLSERTLKGAFYGSYKPRTDIPMVVGKYLNKELGLDMDKFITHSVPFADINKAFDYMLQGIGLRCMIHLDA

SEQ ID NO: 65529 - protein, 236 aa, Gossypium hirsutum
  Clone ID: GOSHI-09MAY01-C352_2.pep
MLGVFSSAIVSPPDELVAAGCRTPSPKITADALVKRFLETNSSGVSMQIGDHVQFAYSHHKESPLRPRSFAVKDEIFCLFEGALDNLGSLKQQYGLAKSANEVILVIEAYKALRDRAPYPPNHVVGHLIGSFAFIVFDKSTSTLFVASDQFGKVPLYWGITADGYVAFADNAELLKGACGKSLASFPQGCFYSTAVGGLRSYENPKNKITAVPAEEEEIWGAKFKVEGPTVVAATE

SEQ ID NO: 65530 - protein, 382 aa, Gossypium hirsutum
  Clone ID: GOSHI-09MAY01-C352_1.pep
MSTAGQVIRCKAAVAWEAGKPLSIEEVEVAPPQKHEVRIKILFTALCHTDVYYWECKGYTPLFPRILGHEASGIVESVGEGVNDLKPGDHVLPIFTGECKECRHCLSEESNNMCELLRINCDRGVMLADGKTRFSINGKPIYHFVGTSTFSQYTVVHVGQVAKISPTAPLDKVCPISCGICTGFGATVNVAKPKKGQTVAVFGLGAVGLAAAEGARVCGASRIIAVDVNPRRFEEAKRFGITEFVNPKDYDKPVQEVIVEMTGGGVDRSVECTGSVQAMISAFECVHDGWGVCVLVGVPKKDDAFKTHPMNLLSERTLKGAFYGNYKPRTDIPMVVDKYLNKELGLDMDKFITHSVPFADINKAFDYMLQGIGLRCMIHLDA

SEQ ID NO: 65531 - protein, 65 aa, Gossypium hirsutum
  unsure (1)..(65): unsure at all Xaa locations
  Clone ID: LIB3585-063-P1-K2-F12.pep
HYYVERGXTGIKASFNIELPKQKVTTISHNQTVLFLLFISHSTSTFIWRLIHMLCICSSYNSMDP

SEQ ID NO: 65532 - protein, 135 aa, Gossypium hirsutum
  unsure (1)..(135): unsure at all Xaa locations
  Clone ID: uC-gsronu33B108e12b1.pep
CVGRPPVHRIMFLDENPRGFEQANRFGITEFANPKDYYKPIQEVIVEITDXGVDRSVECTGSIQAMISAFECVHDGWGVCVLIGVPKKDDAFKTHPMNLLHERTLKGALYGNYKPRTDIPMVVDKYLNNESSFGS

SEQ ID NO: 65533 - protein, 169 aa, Gossypium hirsutum
  unsure (1)..(169): unsure at all Xaa locations
  Clone ID: AI729158.1.pep
MKMGGEGKVYTLXQFSQHNNAKDCWLLIGGKVYNVTKFLEDHPGGDEVLLSASGKDATDDFEDVGHSSSARPMLDELYVGDIDASTIPTKTNYTPPNQPHYDQHKTSEFVVKLLQFLVPLLILGLAFRISFNTKSPAYPSTSFYNLAIFSPIRLFGSNFPQFFPIVSSP

SEQ ID NO: 65534 - protein, 66 aa, Gossypium hirsutum
  Clone ID: LIB3829-036-Q1-N6-C6.pep
QCLLNKSRYGVLHSRWKGHLLLLPQSSPLRSPSESMDPWYYRGRKCIAYGSVSQIEERVEWEIHRS

SEQ ID NO: 65535 - protein, 147 aa, Gossypium hirsutum
  Clone ID: LIB3831-001-Q1-K6-G9.pep
DSHSFLILLLLWSRNSLEEKKQEICHRHLSAIQHYQQRPHMCELLRINCDRGVMLADGKTRFSINGKPIYHFVGTSTFSQYTVVHVGQVAKISPTAPLDKVCPISCGICTGFGATVNVAKPKKGQTVAVFGLGAVGLAAAEGARGCG

SEQ ID NO: 65536 - protein, 62 aa, Gossypium hirsutum
  Clone ID: LIB3145-030-Q1-K1-H9.pep
GRPRVRPRVRPRVRVVFKYLNKELGLDMDKFITHSVPFADINKAFDYMLQGIGLRCMIHLDA

SEQ ID NO: 65537 - protein, 93 aa, Gossypium hirsutum
  Clone ID: LIB3147-031-Q1-K1-E5.pep
KAPPYAVFSAISARFIVYLQYHVTTCSVPLLNIVSTVSVDILLLSTGKDNYQIITIGGESEFVQLHWSKCLNKNIQPFTTLQYVKIPNKFKLA

SEQ ID NO: 65538 - protein, 112 aa, Gossypium hirsutum
  Clone ID: LIB3145-021-Q1-K1-C4.pep
AAEGARVCGASRIIAVDVNPRRFEEAKRFGITEFVNPKDYDKPVQEVIVEMTGGGVDRSVECTGSVQAMISAFECVHDGWGVCVLVGVPKKDDAFKTHPMNLLSERTLKGAF

SEQ ID NO: 65539 - protein, 73 aa, Gossypium hirsutum
  unsure (1)..(73): unsure at all Xaa locations
  Clone ID: uC-gsronu33B047b06b1.pep
GFSLVEVSQHNHAKDCCLFSLFXNNFYSIXSFWRTHPGGDDVLLSSTGICASDDFEDVGHSISARAMMDEFYV

SEQ ID NO: 65540 - protein, 69 aa, Gossypium hirsutum
  unsure (1)..(69): unsure at all Xaa locations
  Clone ID: uC-gsronu33B144a07b1.pep
AAAPWLWFFFFFFFFFFXXLKTGKDNYQIITIGGESEFFQLHWSKCLNKNIQPFTNLQYVKIPKKFKLA

SEQ ID NO: 65541 - protein, 67 aa, Gossypium hirsutum
  Clone ID: LIB3584-039-P1-K1-F7.pep
SICYAFAAPIIPWIHRFRRRKQRTTLWQQQQLALPPALCVRILINLVRLLSIGESQATDMWPTLIHA

SEQ ID NO: 65542 - protein, 65 aa, Gossypium hirsutum
  Clone ID: LIB3189-008-P1-K1-D8.pep
HASVLLLQTSLKTRGKKWVEKERSTLWLRSLNTTMLKTVGLSLRARYNFFYSVEISWISISPISD

SEQ ID NO: 65543 - protein, 48 aa, Gossypium hirsutum
  Clone ID: LIB3148-034-Q1-K1-H11.pep
CTKDETGIKASFNIKLPKQKVTAISHNPTVLFRTRGRTRGRTRGRTRG

SEQ ID NO: 65544 - protein, 47 aa, Gossypium hirsutum
  Clone ID: LIB3146-013-Q1-K1-B4.pep
PRVRPRVRPRVRLLLLPQSSPLLSPSKTKDPWNYRSCKCIAYGSVCI

SEQ ID NO: 65545 - protein, 86 aa, Gossypium hirsutum
  Clone ID: uC-gsronu33B029d04b1.pep
GISLASFPQGCFYSTAVGGLRRYENPKNKITAFAFCPRVLLSLLYPILPSFFIYFITFFYSSINFPSSSSYYFYFFFTSSIFFFFF

SEQ ID NO: 65546 - protein, 57 aa, Gossypium hirsutum
  Clone ID: LIB3120-039-P1-K1-C7.pep
DIVSIVPNRVTTISHMDLDTEHRRLGACNSCWPFHVICSTPHLLVFSTTSSQAVPSV

SEQ ID NO: 65547 - protein, 56 aa, Gossypium hirsutum
  Clone ID: LIB3166-040-P1-K1-C6.pep
ENIKLQIKNSFLFFFLFCQHMCYIMCLLKLPFPVIKSAYIELFLSKKLLHWQGFFI

SEQ ID NO: 65548 - protein, 43 aa, Gossypium hirsutum
  Clone ID: uC-gsflnu33B022a02b1.pep
TRPPTRPPTRPEMAVTFCLGSFMLKLAFIPVSSFVHHNVSFNF

SEQ ID NO: 65549 - protein, 100 aa, Gossypium hirsutum
  Clone ID: GOSHI-09MAY01-C312_3.pep
GTEWLGPTRPPTRPPTRPPTRPASFGGSNIDPTAWEDKKCKGESRFPAQVRIRIRKLCKALEEDAFRPVLHHYDGPKFRLELSIPETLDLLDLCEQAGSP

SEQ ID NO: 65550 - protein, 303 aa, Gossypium hirsutum
  Clone ID: GOSHI-09MAY01-C312_2.pep
MGSMDSFWQLGDYLRGQSKASEDNQWLMVASKLAEQTRTKGERLSNLDLSKGPAEIRTRDKFGFREDNKFENLNFNMLNLDSKIGDNVSKSSFRNGTYNINAVYQKNNSNSLEDLAGNKYSGNNHSNKDVNNNSSTSNNNSNENSANNAVDKRFKTLPAAEALPRNEVLGGYIFVCNNDTMQEDLKRQLFGLPPRYRDSVMAITPGLPLFLYNYTTHPAPGVFEAATFGGSNIDPTAWEDKKCKGESRFPAQVRIRIRKLCKALEEDAFRPVLHHYDGPKFRLELSVPETLDLLDLCEQAGSP

SEQ ID NO: 65551 - protein, 303 aa, Gossypium hirsutum
  Clone ID: GOSHI-09MAY01-C312_1.pep
MESMNSFWQLGDDLRGQSKASEDHKWLMVASKLAEQTRIKGERMNNLDLSKGPAEVRTRDKFGFHEDNKFENLNFNMLNLDSKIGDSVSKSTFRNGIYNTDAVYQKNNSHNIGNLSANKYSGNNHSNKDINNNSNTNSNNNENSNANNAVDKRFKTLPATETLPRNEVLGGYIFVCNNDTMQEDLKRQLFGLPPRYRDSVRAITPGLPLFLYNYTTHQLHGIFEAASFGGSNIDPTAWEDKKCKGESRFPAQVRIRIRKVCKALEEDAFRPVLHHYDGPKFRLELSVPETLDLMDLCEQAGSP

SEQ ID NO: 65552 - protein, 138 aa, Gossypium hirsutum
  Clone ID: LIB3585-043-P1-K1-F5.pep
MESMNSFWQLGNDLRGQSKASEDHKWLMVASKLAEQTRIKGERMNNLDLSKGPAEVRTRDKFGFHEDNKFENLNFNMLNLDSKIGDSVSKSTFRNGIYNTDAVYQKNNSHNIGNLSANKYSGNNHSNKDINNNSNTNF

SEQ ID NO: 65553 - protein, 107 aa, Gossypium hirsutum
  Clone ID: LIB3585-001-P2-M1-A5.pep
MESMNSFWQLGDDLRGQSKASEDHKWLMVASKLAEQTRIKGERMNNLDLSKGPAEVRTRDKFGFHEDNKFENLNFNMLNLDSKIGDSVSKSTFRNGIYNTDAVYQKN

SEQ ID NO: 65554 - protein, 112 aa, Gossypium hirsutum
  Clone ID: LIB3493-009-P1-M1-H10.pep
RCRGYDLTRSGISKSTFRNGIYNTDAVYQKNNSHNIGNLSANKYSGNNHCNKDINNNSNTNFNFNNNENSNANNAADKRFKTLPAAETLPRNEVLGGYIFVCNNDTMQEDLK

SEQ ID NO: 65555 - protein, 51 aa, Gossypium hirsutum
  unsure (1)..(51): unsure at all Xaa locations
  Clone ID: LIB3147-006-Q1-K1-H2.pep
KMHWKTFALICYELKSYQIYLQDVKRKWQRRVMVKSPTXXKELDDGLILNI

SEQ ID NO: 65556 - protein, 140 aa, Gossypium hirsutum
  Clone ID: GOSHI-09MAY01-C302_2.pep
MAANGFVGDERKVQKNYWIEHSVDLTVEAMMLDSKAADIDKEERPEVLSLLPPYEGKTILELGAGIGRFTGDLAKKAGHVIALDFIENVIKKNETINGHYKNVKFLCADVTFPDLAFTEGSLDLILLNWLLMYLSDKEVE

SEQ ID NO: 65557 - protein, 396 aa, Gossypium hirsutum
  Clone ID: GOSHI-09MAY01-C302_1.pep
STRAPTRPPTRPPTRRACARGPVGLIFSNWLLMYLSDKEVENLAERMLKWLKVGGHIFFRESCFHQSGDCKRKNNPTHYREPRFYTKVFKECQATDDSGNSFELSLVGCKCIGAYVKNKKNQNQICWIFQKVVSDNDKGFQRFLDSVQYKSNSILRYERVFGPGYVSTGGIETTKEFVGKLDLKPGQKVLDVGCGIGGGDIYMAEEFDVHVVGIDLSVNMISFALERATGLKCSVEFEVADCPKKVYPDNSFDVIYSRDTILHIHDKPALFRSFYKWLKPGGKLLISDYCKSSKTPSREFAEYIKQRGYDLHDVKSYGQMLEDAGFDVILAEDRTDQFLQVLRRELNQVEKEKDAFISDFSKEDYDEIVGGWKAKLIRSSSGEQRWALFLAKKKKN

SEQ ID NO: 65558 - protein, 86 aa, Gossypium hirsutum
  unsure (1)..(86): unsure at all Xaa locations
  Clone ID: LIB3165-042-Q1-K1-G2.pep
DLHDVXSYXQMLEDAGFDVILAEDRTDQFXKSMQRELSPVEKEKDAFISDFSKEDYDEIVGGWKAKLINSSSGEQRWGLFLAKKKN

SEQ ID NO: 65559 - protein, 591 aa, Gossypium hirsutum
  unsure (1)..(591): unsure at all Xaa locations
  Clone ID: GOSHI-09MAY01-C332_1.pep
FFCSGYEASNGXKMNETSEFRSPRVTDGHGTHTASIAAGRYVFPASTLGYAKGVAAGMAPKARLAAYKVCWTAGCFDSDILAAFDAAVADGVDVISLSVGGVVVPYHLDAIAIGAFSAADQGVFVSASAGNGGPGGLTVTNVAPWVATIGAGTIDRDFPADVKLGNGKVVPGVSVYNGLGLSPGRMYPLVYGGTGGGDGYSSSLCLEGSLDPVFVKGKIVVCDRGINSRAAKGEVVKKXGGIGMILANGVFDGEGLVADCHVLPATAVGASNGDEIRGYIVSASKSKSPATATILFKGTRLGVRPAPVVASFSARGPNPETPEILKPDVIAPGLNILAAWPDQVGPSGVSSDSRNTEFNILSGTSMACPHVSGLAALLKAAHPEWSPAAIKSALMTSAYTVDNRGETMLDESNGNTSTVLDFGSGHVHPSKAMDPGLVYDITTMDYIDFLCNSNYTINNIRVLTRKNADCSGAKRAGHVGNLNYPSLSAVFQQYGRRNMSTHFIRRVTNVGEPNSIYKVTIRPPSGTVVTVEPEQLVFRRVGQKLNFLVRVQTMAVKLSPGGTSMQAGSIVWSDGKHEVTSPLTVTMQQPI

SEQ ID NO: 65560 - protein, 86 aa, Gossypium hirsutum
  unsure (1)..(86): unsure at all Xaa locations
  Clone ID: LIB3583-033-Q6-K7-B3.pep
VTXMLPTHSILLNXSFHAKVPPGERASLPXXLNXLTXXSXXFLAXTLXKYKXCXWFDRNHXVPLGGRVGGXXGQDAWXRTRXGPVP

SEQ ID NO: 65561 - protein, 144 aa, Gossypium hirsutum
  Clone ID: GOSHI-09MAY01-C322_2.pep
MEEVSQTTTKKKTKMTTVRSLTSPSIVKAATPNRFTSPIAKAPTSLGSVKTISRSFGLKCSSNHRTSMAMYKIKLVGPKGEVNEFEVPDNQYILEAAEAAGVELPYCCRAGACSICTAKVVSGTVHQPEAIYLEDDQIKDGYML

SEQ ID NO: 65562 - protein, 155 aa, Gossypium hirsutum
  Clone ID: GOSHI-09MAY01-C322_1.pep
MTTVRSLTSPSIVKAPTPNRFTSPIVRAPTSLGSVKTISRSFGLKCSSNQRTSMAMYKIKLVGPNGEVNEFEVPDNQYILEAAEAAGVELPYCCRAGACSICTAKVVSGTVHQPEAIYLEDDQIKDGYMLTCVSKPTSDCEIHTHKELDLYSPSK

SEQ ID NO: 65563 - protein, 285 aa, Gossypium hirsutum
  Clone ID: GOSHI-09MAY01-C292_1.pep
HASGILAELISGKPIMPGRTEVEQLHKIFKLCGSPSEQYWKKSKLPNATLFKPQQPYKRCIADTFKDFPPSSLPLIETLLSIDPEERSTATAALNSEFFTTEPYACEPSRPPKYPPSKEMDVKLRDEQARRQRGLASKVNAVDGARKVKVSERANRAVPAPEANAEIQANLDKWRVMTQTNAKSKSEKFPPPHQDGAVGHPLDASHKGPLSFSATDTTFGSSIFNSKSSESAKNPGPVVGSSRRKKTNKDPQRAPSRKFIRGFKPSSIGLSMDFLFRGKSEVIRS

SEQ ID NO: 65564 - protein, 204 aa, Gossypium hirsutum
  unsure (1)..(204): unsure at all Xaa locations
  Clone ID: AI727974.1.pep
AETFKDVPSSSLPLIETLLSIDPEERNTATAALNNEFFMTEPYACNPSSLPKYPPSKEIDVKLRDEEARRXRNIAGKVNAVDGTRRSKGHERPTRAVPAPEANAEIQANLDKWRVLTQRNAKCKSEKFPPPHQDGAVGHPVDASNKGPVSFGASDSSFNSSIFNSKSSGSSKCSRQAGGPSRNKNRRSAVKVHPRFQTILNKYI

SEQ ID NO: 65565 - protein, 191 aa, Gossypium hirsutum
  Clone ID: GOSHI-09MAY01-C252_2.pep
MMRTRARTTLPGFSNSSVQFSSPTFGRVNIFNQVERELHGGLPKSSFKGGTPSSGSFRSGCSKDDAGTCSQTTSLYGSQISSLVELGHTTRHNSSLSTAYSKRNDETSKPNRKRLKPGENPRPRPKDRQMIQDRVKELREIVPNGAKCSIDALLEKTIKHMLFMQSVTKHADKIKHMGESKIKENFKGGTT

SEQ ID NO: 65566 - protein, 120 aa, Gossypium hirsutum
  Clone ID: LIB3582-040-P1-K1-E5.pep
QCSIDALLEKTIKHMLFMQSVTKHADKLKHMGESKIKENFKGGTTWAFEVGSRSMICPIIVEDLNPPRQMLVEMLCEEQGFFLEIADLIRGMGLTILKGVMETRNDKIWARFAVEVSKSY

SEQ ID NO: 65567 - protein, 647 aa, Gossypium hirsutum
  unsure (1)..(647): unsure at all Xaa locations
  Clone ID: GOSHI-09MAY01-C242_1.pep
KEVEDPKLRPHRYVGVTDKPFLGMMISLMGRLSRTHQYWXKTKIEKHGGTVSNSVIGVTCLVASPAERERGGSSKLVEAMEREVRVVSEAWLLDSIEKQEAQPLEAYDIVTDLAVDGKGIPWDKQVPEEHAIESLSAELKLYGKRGVYKDTRLQEQGGQIFEEDGILYNCVFSLCDQGGAINEYCIMQLVKVPDSNLHLYYKKGRVGDDPNAQERLEEWKDVDGAVKEFVRLFEEVTGNEFEPWEREKKFQKKPLKFYPIDIDDGVDVRCGGLGLRQLGVAAAHCKLEPMVANFMKVLCGQEIYKYALMEMDLDAPDLPMGMLSNVHLERCEEVLQEFIEKVKSMKESGPKAEAVWSDFSQRWFTLMHSSRPFIFRDYQELADHAAASFECVRDIVVASHMIGHMGDDTLDDPLSDRYKKIGCSISPLDKDSEDYKMILNYVEKTYEPVKLADIEYGISVENIFNVETKEGPSFDEVKKLPNKRLLWCGTRSSNLLRHLHKGFLPASCSLPVPGYMFGKGIVCSDAAAEAARYGFTAVDRPEGFLVLAVFSQGEEIMELKNPPEDTKPLEEKKVCVKGLGRKKPDESEYIDWKDDIKVPCGRLIPSEHQDSPLEYNEYTVYDPKQVSMRFLVGVKFEEKDTVMDAQD

SEQ ID NO: 65568 - protein, 81 aa, Gossypium hirsutum
  Clone ID: LIB3825-021-Q1-N6-B7.pep
PPEDNKPLEEKKVCVKGLGRKKPDESEYIDWKDDIKVPCGSLIPSEHQDSPLEYNEYTVYDPRQVCLGRFFFISENCLEPR

SEQ ID NO: 65569 - protein, 128 aa, Gossypium hirsutum
  unsure (1)..(128): unsure at all Xaa locations
  Clone ID: LIB3825-007-Q1-K6-B11.pep
RVKSMKDSGPKAEADWSDFSQRXLTLMHTFTPCIFTDYQELADHAETSXSVVETLIGAYHMIGHMGDDTIDDPLSDKYKKIXCSIATLDKDSNDYNMILNYLEKTYEPVKLADIQYQISNENIFNVET

SEQ ID NO: 65570 - protein, 215 aa, Gossypium hirsutum
  Clone ID: GOSHI-09MAY01-C212_2.pep
MAAPPARARADYDYLIKLLLIGDSGVGKSCLLLRFSDGSFTTSFITTIGIDFKIRTIELDGKRIKLQIWDTAGQERFRTITTAYYRGAMGILLVYDVTDESSFNNIRNWIRNIEQHASDNVNKILVGNKADMDESKRPVPTSKGQALADEYGIKFFETSAKTNLNVEEVFFSIAKDIKQRLADSDTKAEPSTIKINQPDAAGGAGQAAQKLGCCG

SEQ ID NO: 65571 - protein, 217 aa, Gossypium hirsutum
  Clone ID: GOSHI-09MAY01-C212_1.pep
MAAPPARARADYDYLIKLLLIGDSGVGKSCLLLRFSDGSFTTSFITTIGIDFKIRTIELDGKRIKLQIWDTAGQERFRTITTAYYRGAMGILLVYDVTDESSFNNIRNWIRNIEQHASDNVNKILVGNKADMDESKRAVPTSKGQALADEYGIKFFETSAKTNLNVEEVFFSIARDIKQRLVDTDLKAEPSTIKINKPDQAAGAGQAAQRPACCGST

SEQ ID NO: 65572 - protein, 44 aa, Gossypium hirsutum
  Clone ID: uC-gsflnu33B145b07b1.pep
ENSGTHHPVTTISFLVPLHFLKQSSFEHTIRVPPGLSPLRLNHS

SEQ ID NO: 65573 - protein, 314 aa, Gossypium hirsutum
  Clone ID: GOSHI-09MAY01-C222_1.pep
MEKTDASSAAAVADAKISSIFIYPVKSCRGISVPHAPLTPTGFRWDRQWLVVNQRGRAYTQRVEPKLALVEVNLPAEAFSEGWEPTKTSYLEIKAPGMDLLKISLCKPPKVSDGVSVWEWSGSALDEGDEASKWFTNYLGKPSRMVRFNAASETRPVDPVYAQGYSIMFSDMFPFMLASQGSLDELNKLLKEPVPMNRFRPNILVDGCEPFSEDLWTEIKISQFSFQGVRLCSRCKVPTINQDTAIAGPEPNETLMKYRSDKVLRPDKKQQGKIYFGQNMVCKESLTEGKAKLVKVGDPIFVLQKVSTAAEAVA

SEQ ID NO: 65574 - protein, 193 aa, Gossypium hirsutum
  Clone ID: LIB3582-007-P1-K1-B8.pep
HASAHASADAWDPVKSCRGISVPHAPLTPTGFRWDRQWLVVNQRGRAYTQRVEPKLALVEVNLPAEAFSEGWEPTKTSYLEIKAPGMDLLKISLCKPPKVSDGVSVWEWSGSALDEGDEASKWFTNYLGKPSRMVRFNAASETRPVDPVYAQGYSIMFSDMFPFMLASQGSLDELNKLLKEPVPMNRFRPKYF

SEQ ID NO: 65575 - protein, 191 aa, Gossypium hirsutum
  unsure (1)..(191): unsure at all Xaa locations
  Clone ID: LIB3543-037-Q1-K1-H2.pep
RPPTRPVHAVRPRRPPTPSAHSYWVXRWDRQWXXVVNQRGRAYTQRVEPKLALVEVNLPGGGFSEGWEPTKTSYLEIKAPGMDLLKISLCKPPKVSDGVSVWEWSGSALDEGDEASKWFTNYLGKPSRMVRFNAASETRPVDPVYAQGYSIMFSDMFPFMLASQGSLDELNKLLKEPVPMNRFRPNILVDG

SEQ ID NO: 65576 - protein, 194 aa, Gossypium hirsutum
  unsure (1)..(194): unsure at all Xaa locations
  Clone ID: LIB3583-015-P1-K1-A12.pep
LSLSPKEERGKEKTEASSAAAAAAAAVAEAKISSIFIYPVKSSRGISVPQAPLTPTEFRRDRQRLVENQRGWAYTQRVEPKLALVEENLPAEAFSEGWEPTKTSYXEIKAPGKDLLKISLCKPPKESEGVSVRVEAGSALDEGDEASKRFTNYLGKPSKMVRFNAASETRPENPVYAHRYSIMFSDKFPFMLAS

SEQ ID NO: 65577 - protein, 150 aa, Gossypium hirsutum
  Clone ID: GOSHI-09MAY01-C38911_1.pep
AHAISHSSGLTLRLVNPNQLKGIKYEPLNVTAYDFPNKSNVIGNILMPAFYQGYRQKATKPGQGTANTTVALRAASENGTGVLRIDMATAVKLKTLYGYSKRHKIRIGAYVVVNASGVNVHRKGIRLRSMAPKMGNSCVVLLGALFNILL

SEQ ID NO: 65578 - protein, 81 aa, Gossypium hirsutum
  Clone ID: GOSHI-09MAY01-C38921_1.pep
MATGTAPPRGSAAAAANMRRRRTTSGAGASGGAAGTMLQFYTDDAPGLKISPNVVLVMSIGFIAFVAILHVMGKLYFVRKE

SEQ ID NO: 65579 - protein, 40 aa, Gossypium hirsutum
  Clone ID: LIB3148-059-Q1-K1-A5.pep
FFYLFLFFIFFFFFFFFFIYFFFFFFFFFFFFFFTRKLNF

SEQ ID NO: 65580 - protein, 89 aa, Gossypium hirsutum
  Clone ID: GOSHI-09MAY01-C38591_1.pep
ALVNNNQMQNAGSDEASRTAGGLSGNLHEPDLEMHGNIPLPQEEIQPGSGGDSACEANPTSATNVVTKAESHLAQQPVAKLSKDAESTK

SEQ ID NO: 65581 - protein, 165 aa, Gossypium hirsutum
  unsure (1)..(165): unsure at all Xaa locations
  Clone ID: uC-gsronu33B149e05b1.pep
MGWAIALHGGAGDIPHSLPPDRRLPREVGLRHCLDVGIAALKAHKHPLDVVELVVRELENYPHFNAGKGSVLTSSGTVEMEASIMDGKSKKCGAASGLSTVVNAVSLARLVMEKTPHIYLGFHGAEASAREQGVETADXSYFITPENXXXAKQAQDAHRVQIDTP

SEQ ID NO: 65582 - protein, 125 aa, Gossypium hirsutum
  Clone ID: LIB3145-056-Q1-K1-H10.pep
MGWAIAVHGGAGDIPLSLPPEKRLPREAGLRRCLDVGIAALKAHNHPLDVVELVVRELENNPHFNAGKGSVLTTSGTVEMEACIMDGKTMKCGAVSGVSTVVNAISLAPLVMDKTSHIYLAFDGA

SEQ ID NO: 65583 - protein, 104 aa, Gossypium hirsutum
  Clone ID: GOSHI-09MAY01-C38531_1.pep
VADARFCKPLDIKLLRWLCSNHDILITVEEGSVGGFSSHVAQFIALDGQLDGRLKWRPIVLPDNYIEHASPKEQLALAGLTGHHIAATTLSLLGRTREALLLIC

SEQ ID NO: 65584 - protein, 152 aa, Gossypium hirsutum
  Clone ID: GOSHI-09MAY01-C38781_1.pep
PRVRPRVRIEAQAQMNEELSGWKLVVGDVFREPNHSKLLCVMIGDGVQIMGMALVTIVFAALGFMSPASRGMLLTGMIILYLFLGIAAGYVAVCLWRTLKGTAEGWRSLSWSVACFFPGIVFVILTALNFILWGSKSTGAIPISLYFILLSL

SEQ ID NO: 65585 - protein, 409 aa, Gossypium hirsutum
  Clone ID: GOSHI-09MAY01-C38751_1.pep
LEAGIGRVKANLGSRVKKGQMTREKFEKTMSLLRGVLDFESFRDVDMVIEAVIENVSLKQQIFADLEKYCPPHCILASNTSTIDLNLIGKRTKSQDRIIGAHFFSPAHIMPLLEIVRTEHTSPQIIVDLVDVGKKIKKTPIIVGNCTGFAVNRMFFPYTQAGLFLVERGADVYWIDRAITKFGMPMGPFRLADLVGFGVALATGSQFIENFPERTYKSMLIPIMHEDKRARESTRKGFYLYDNKRKANPDPELKMYIEKARSISGVAVDPKFVKLSENDIVEMIFFPVVNEACRVFAEGIAVKASDIDIAAVMGMGFPPYRGGLMFWADSLGSKYIYSRLEEWSNLYGGFFKPCAFLAERAAKGAPLSAPLEMGKSRLLNCFDCGARRWPLMFWFYQFAAIDRMIKLSR

SEQ ID NO: 65586 - protein, 73 aa, Gossypium hirsutum
  Clone ID: GOSHI-09MAY01-C38771_1.pep
PYKHSLDRRCSDLEQAETEVDLLGDEVEVLLGLLEKIYIALDHYSPILKHYPGIMEILKLVRRELSGECDTSL

SEQ ID NO: 65587 - protein, 70 aa, Gossypium hirsutum
  Clone ID: LIB3145-057-Q1-K1-E8.pep
GLTNFVLTVVGVSAVVLLLRSDVKQSAASFRRNVKHIKNWLEEESSAASKAAEKVKPKELDSKVPPKEKD

SEQ ID NO: 65588 - protein, 70 aa, Gossypium hirsutum
  Clone ID: LIB3146-051-Q1-K1-B7.pep
MALTNFILTVAGVSAVVLLLRSDVKQSAAIFRRNVKHIRNWLEEESSAASKAAEKAKPKELESKVPPKKD

SEQ ID NO: 65589 - protein, 255 aa, Gossypium hirsutum
  Clone ID: GOSHI-09MAY01-C38011_1.pep
EREFRVEVDILSRLDHPNLVSLIGYCADGKHRFLVYEYMQKGNLQDHLNGIGETKMDWPSRLKVALGAARGLAYLHSSSAVGISIVHRDFKSTNVLLNANFEAKISDFGLAKLMPEGHDIYVTARVLGTFGYFDPEYTSTGKLTLRSDVYAFGVVLLELLTGRRAVDINQGPNDQNLVLQVRHILNDRKKLRKVIDPEMAQSSYTIESIAMFANLASRCVRVESGERPSMPECVRELQLIFSTNAKGLGMGFRMR

SEQ ID NO: 65590 - protein, 68 aa, Gossypium hirsutum
  Clone ID: LIB3145-049-Q1-K1-D1.pep
MFQVRHILNDRKKLRKVIDPEMAQSSYTIESIAMFANLASRCVRVESGKRPSMPECVRELQLIFSTNA

SEQ ID NO: 65591 - protein, 270 aa, Gossypium hirsutum
  unsure (1)..(270): unsure at all Xaa locations
  Clone ID: GOSHI-09MAY01-C38001_1.pep
GRVGVEFYHSIMRRDSKRDAGGCNVPXALPATANARDMIGEIENRSAYLLAIKTDVETQGDFIRFSIKEVENVSFTDIENAVPFVKWLDDELSYLVDERAVLKHFEWPEHKADALREAAFGYCDLKKLESEAASFRDDARQPCGSALKKMQALLEKLELGVYNLSRMRESATKRYKGFGIPTDWMLETGIVSQIKLASVKLAMKYMRRVSAELEAVGGGPEEEELIVRGVRFAFRVHQVNDILINSYEFNLPTLLFQGLRRQLKKETVFL

SEQ ID NO: 65592 - protein, 107 aa, Gossypium hirsutum
  Clone ID: GOSHI-09MAY01-C38391_1.pep
VLIKSDVSLVGLVSALLNSSKLQLKKVFSSFKDVKVIQFSSMQDAFLGFTDKTREEKFRKRVKQYVGIWCCVENHIPGHIYYDMYWDEKPGWKPVPPKTPEDDHPPF

SEQ ID NO: 65593 - protein, 70 aa, Gossypium hirsutum
  unsure (1)..(70): unsure at all Xaa locations
  Clone ID: LIB3148-021-Q1-K1-C12.pep
PKYPITQXPIHPKIFQQHWKLLERARISQRVRAPTSDSSHGLLRTSLRSTVQPSLQKNTPEGANNRIHSR

SEQ ID NO: 65594 - protein, 53 aa, Gossypium hirsutum
  Clone ID: LIB3145-054-Q1-K1-C5.pep
PITPGPIHPKISQQHWKLLERARISQRVRAPTSDSSHGLLRTSLRSTVQPSLC

SEQ ID NO: 65595 - protein, 142 aa, Gossypium hirsutum
  Clone ID: GOSHI-09MAY01-C38311_1.pep
MEFLAKEYGYVALVVVAYCFLSIWMGIQVGMARKKYKVYYPTLYALESENKDAKLFNCVQRGHQNSLEMMPMFFVLMILGGMAHPCISAALGLFYTVTRYFYFTGYSTGDPQKRLTIGKYGFLALLGLKICTISLAINLLRR

SEQ ID NO: 65596 - protein, 74 aa, Gossypium hirsutum
  Clone ID: LIB3584-033-P1-K1-G1.pep
LQRGHQNSLEMMPMFFVLMILGGMAHPCISAALGLFYTVTRYFYFTGYSTGDPQKRLTIGYISSSLLFFIIREG

SEQ ID NO: 65597 - protein, 277 aa, Gossypium hirsutum
  unsure (1)..(277): unsure at all Xaa locations
  Clone ID: GOSHI-09MAY01-C38301_1.pep
FVWSAFIRRGSRNDDKKMVSDDKSGAYTPPIIFKHPTHLVTPSEILMAATSSETTNVNEGKSEGEVHIQDVVVNNDARNAELEVKVVGEARSSQNNEFGSHGDSQNRNLENREKFFCSQASDLGIQMSRESSAISRDAYVVDESQQADGVGASGSYVKPNIAEEEINDSRKDLSGKGLESAIPSTYQQSPTSGAKGKKHKGKGSQASAHTSPSSSAFNSADSTTEPGANSNLPSAAAAFPQIAAMQDMLNQLITTPKEMQXQMSNIVQPPVSRKKKT

SEQ ID NO: 65598 - protein, 212 aa, Gossypium hirsutum
  unsure (1)..(212): unsure at all Xaa locations
  Clone ID: GOSHI-09MAY01-C38331_1.pep
RSFGSDVTDIGLGLLKECSSLQALTFNHCENISEIGLKHISGLTNLTSLSFKKSAAITAEGMCAFSSLINLEKLDLERRTGIHGGFVHIKGLSKLESLNIRCCKCITDLDLKAISGLNNLKELQISNSNVTDFGLSYLRGLHKLVMLNLEGCNVTAGCLDXISALVALAFLNLGRCGLTDDGCDKFSGLESLKVLNLAFNNITDACLVHLKD

SEQ ID NO: 65599 - protein, 101 aa, Gossypium hirsutum
  Clone ID: LIB3145-053-Q1-K1-G5.pep
PRVRKKQTTDTADHSDDISAEVETSITETDAIVANHLKPGAPVNAGMNNNVGQSSNSSLKESNKIRGLQSILQITNSVEKTKVISNLSRVDSRIERIEAWR

SEQ ID NO: 65600 - protein, 58 aa, Gossypium hirsutum
  Clone ID: LIB3145-053-Q1-K1-A8.pep
IRCDEPYLGLLLAMRLSNFHGILLLHFMLNITNRVLRHYYETTTCLVKCLIERIEAWR

SEQ ID NO: 65601 - protein, 136 aa, Gossypium hirsutum
  Clone ID: GOSHI-09MAY01-C38221_2.pep
MARTKQTARKSTGGKAPRKQLATKAARKSAPATGGVKKPHRFWPGTVALREIRKYQKSTELLIRKLPFQRLVREIAQDFKTDLRFQSSAVAALQEAAEAYLVGLFEDTNLCAIHAKRVTIMPKDIQLARRIRGERA

SEQ ID NO: 65602 - protein, 137 aa, Gossypium hirsutum
  unsure (1)..(137): unsure at all Xaa locations
  Clone ID: GOSHI-09MAY01-C38221_1.pep
MARTKQTAXRKSTGGKAPRKQLATKAARKSAPATGGVKKPHRFRPGTVALREIRKYQKSTELLIRKLPFQRLVREIAQDFKTDLRFQSSAVAALQEAAEAYLVGLFEDTNLCAIHAKRVTIMPKDIQLARRIMGERA

SEQ ID NO: 65603 - protein, 105 aa, Gossypium hirsutum
  Clone ID: GOSHI-09MAY01-C39931_1.pep
MNTDITASAKPEYPVIDRNPPFTKVVGNFNTLDYLRFTTITGVSVTVGYLSGIKPGLKGPSMVTGGLIGLMGGFMYAYQNSAGRLMGFFPNDGEVARYQKRGLKN

SEQ ID NO: 65604 - protein, 67 aa, Gossypium hirsutum
  Clone ID: LIB3582-027-P1-K1-C12.pep
VPIWFPHKFFSSFSLIFLVRLCNFVNPQLPATFQKGNKSPFLCFYLFVFGLGFLEKLTETTSIFRVR

SEQ ID NO: 65605 - protein, 53 aa, Gossypium hirsutum
  Clone ID: LIB3582-040-P1-K1-B3.pep
LQNRKRNGFDLFDLEMNFLVEIDIVSRYCLFFFLWRIALSLFISYIQFSTSYN

SEQ ID NO: 65606 - protein, 51 aa, Gossypium hirsutum
  Clone ID: LIB3147-019-Q1-K1-A7.pep
INTSTPKAHPTEIKAYLQINKKIITYPSSVLFLESCRELSVDKVAEKNKNN

SEQ ID NO: 65607 - protein, 334 aa, Gossypium hirsutum
  Clone ID: GOSHI-09MAY01-C39851_1.pep
MSWCTIESDPGVFTELIQQMQVKGVQVEELYSLDLDSLNNLRPVYGLIFLFKWHPGEKDERLVIKDPNPDLFFASQVINNACATQAILSILLNCPDIDIGPELSKLKEFTKNFPPELKGLAINNSEAIRTAHNSFARPEPFVPEEQKAAGKDDDVYHFISYIPVDGVLYELDGLKEGPISLGQCPASPGDMEWLKLVQPVIQERIERYSQSEIRFNLMAVIKNRKELYTAELKELQKKRERILQQLATIQSERPTDKTSFEALNKQLSEVNSGIEGATEKILMEEEKFKKWRTENIRRKHNYIPFLFNFLKILAEKKQLKPLIEKAKQKNSSSR

SEQ ID NO: 65608 - protein, 110 aa, Gossypium hirsutum
  Clone ID: GOSHI-09MAY01-C39401_1.pep
MAPSQPKTGLSVGLNKGHVVTKKELAPHPSNRKGKTSKRVHFVRSLIREVAGFAPYEKRITELLKVGKDKRALKVAKRKLGTHKRAKKKREEMSSVLRKMRSAGGGEKKK

SEQ ID NO: 65609 - protein, 128 aa, Gossypium hirsutum
  unsure (1)..(128): unsure at all Xaa locations
  Clone ID: LIB3825-009-Q1-K6-A3.pep
MCSKSTLKSGLSXGLKQRILFFSXKELASRAGGGEGKTSKRVHFVRRGVREVAGFAPYEKRITELLKVGKDKRALKVANRKLGTHKRALKKREEMSSVLRMMRSAGGGVKKKCVAPAVGLKGSSFYIC

SEQ ID NO: 65610 - protein, 132 aa, Gossypium hirsutum
  Clone ID: GOSHI-09MAY01-C39781_1.pep
GVHGFPTLFLLNSKMRVRYHGNRSFESLSTFYNEVTGFQIKSLDKTSRDKTRHVPKHENHKSSEQESWSFSWARSPQNLLRQETYLALATTFVLFRLLYLFYPTLLVFARFTWKRINRDVKLGTMLEHPLLI

SEQ ID NO: 65611 - protein, 106 aa, Gossypium hirsutum
  Clone ID: GOSHI-09MAY01-C39671_1.pep
LKYEDVKKEPLGCVRKLAGLLGVPFTPEEENNETVAEIVKLCSFESLSNQNVNKSQTSSGERPVGNSDFFRKGEVGDWVNHLSPKMVEKLNQITEQKLNSRYWIQL

SEQ ID NO: 65612 - protein, 182 aa, Gossypium hirsutum
  Clone ID: GOSHI-09MAY01-C39101_1.pep
MKEQDSPTTPPIPITSQQLATPSVVKKDSSVTAGFLGKSGYKFWVLAAILLLAFWSMFTGSVSLKWSSGHLTAFSDDIDFSVYDDLDVLVCAQSEKVVRKMWDVYTHSASVRLPRFWLEAFEAAYEYLSSDVPGVRDTAMSEIAKLSMRSLNLDSPSLRSKSISVGKENSNRKEISASRRSL

SEQ ID NO: 65613 - protein, 88 aa, Gossypium hirsutum
  Clone ID: LIB3196-065-P1-M1-D9.pep
MKEQVSPTTPPIPITSQQLATPSVVKKDSSVTAGFLGKSGYKFWVLAAILLLAFWSMFIGSVSLKWSSGHLTAFSDDIDFSVYDAFAV

SEQ ID NO: 65614 - protein, 92 aa, Gossypium hirsutum
  Clone ID: GOSHI-09MAY01-C39131_1.pep
DGRTDASEGTKDFPQCGGSNTVVQILNAWNVPFETINILENEMLRMGLKEYSNWPTFPQLYIEGEFFGGCDITVEAYKNGELQELLEKAMCS

SEQ ID NO: 65615 - protein, 69 aa, Gossypium hirsutum
  Clone ID: GOSHI-09MAY01-C39071_1.pep
VRDNSYTGSSVGGTYWVYRVRITIKRRLKRRIFHQMMLRMLKSGPLPHSPDSVMTKCHSSSTIQSNSTT

SEQ ID NO: 65616 - protein, 71 aa, Gossypium hirsutum
  Clone ID: GOSHI-09MAY01-C39021_1.pep
MGGGMEANKNRFIEDWSSARENLEHNFRWTRRNFALVGIFGIAIPVLVYKGIVREFHMQDEDNGRPYRKFL

SEQ ID NO: 65617 - protein, 92 aa, Gossypium hirsutum
  Clone ID: LIB3827-002-Q1-N6-D1.pep
TRQHLLSSFAEKNSQELPVWPTIIFILHMLLEKLPNHSAIQLEKCTKGNKIGKSTISIAQCSCKQHRTEIKQELATKKWESTAEIVKSNPPN

SEQ ID NO: 65618 - protein, 100 aa, Gossypium hirsutum
  Clone ID: LIB3147-008-Q1-K1-E1.pep
PPLLSHHLCQPPTSLCSTVQPPPCLGRSESRTEKFLLIFVGFREVFGRFNYGSRVRGTKGLKRGRFCASSRRIQRSPMTDGRWSERRKSSLPRASRRTRG

SEQ ID NO: 65619 - protein, 69 aa, Gossypium hirsutum
  Clone ID: LIB3146-032-Q1-K1-F9.pep
PRVRGRVGCYTVYFPIFCWCCVFCLLCRWWLNGGAEAGWGLTEMMGQKRRVGIFFLIMVWADVSGLGVV

SEQ ID NO: 65620 - protein, 170 aa, Gossypium hirsutum
  Clone ID: GOSHI-09MAY01-C39311_2.pep
MEAKPEEKAEFEEAEIEYVSYGGEHHLPLIMNLVDQELSEPYSIFTYRYFVYLWPQLSFLAFHKGKCIGTVVCKMGEHRNTFRGYIAMLVVIKPYRGRGIATELVTRSIRMMMESGCEEVTLEAEVTNKGALALYGRLGFIRAKRLFHYYLNGVDAFRLKLLFPPPRQVL

SEQ ID NO: 65621 - protein, 136 aa, Gossypium hirsutum
  Clone ID: LIB3583-012-P1-K1-A3.pep
MEAKPEEKAEIEEPEIEYVSYGGEHHLPLIMNLVDQELSEPYSIFTYRYFVYLWPQLSFLAFHKGKCVGTVVCKMGEHRNTFRGYTAMLVVIKPYRGRGIATELVTRSIRMMMESGCEEYVYILHRVLTELILKGR

SEQ ID NO: 65622 - protein, 266 aa, Gossypium hirsutum
  Clone ID: GOSHI-09MAY01-C39321_1.pep
HFPPLRPRPRNKVPTLSNRHLIPATTTTCSTTTLATLSSHPNPTSFKIATKNPAPLQNIVKSSSPVPGIVGFSMMASATAGEDGHFKLSETSVLKINKGDITKWFIDGSSDAIVNPANPRMLGGGGADGAIHRAAGPELKEACYKVPEVQPGIRCPTGEARITPGFKLPASHVIHTVGPIYDSDKDPKGSLRNAYKNCLTVAKENNIKYIAFPSISCGVYGYPYEEAATVALSTIKEFANDIKEVHFVLFADDIYDIWTKKAKELL

SEQ ID NO: 65623 - protein, 116 aa, Gossypium hirsutum
  Clone ID: GOSHI-09MAY01-C39241_1.pep
PRVRPRVRVTLYQPHSWNSGETIFFPREERTMAKPDEFNPPQRVPDWPSLVHGQVSTTLMPLFSHAASSRFSFSATPPSTATAILPSKPQNTTAVHSLCFAASTSNTINTPQHSRS

SEQ ID NO: 65624 - protein, 66 aa, Gossypium hirsutum
  unsure (1)..(66): unsure at all Xaa locations
  Clone ID: LIB3147-056-Q1-K1-B2.pep
DMVVSDLVRELKRVYSLCLALRHVGPQLSYILMWCIKAYHQELSVRLKKKKKKKKKKKKKKKXXXI

SEQ ID NO: 65625 - protein, 185 aa, Gossypium hirsutum
  Clone ID: GOSHI-09MAY01-C39231_1.pep
MSYLGVGVSPGNVPVYHGTNLKVIDRRVRVAELVLRCLICGLSVLAAVLVGTDTQIKEIFTIQKRARFTDMKALVFLVAANGITAAYSLVQGVRCVVGMGRGSVLFSKPLALAIFSGDQALAYLNLAAVGAAAQSAAFAKLGQTKLQWMVICNMYGKFCNQVGERIAVSLLVSICMVGLSCISAF

SEQ ID NO: 65626 - protein, 73 aa, Gossypium hirsutum
  Clone ID: GOSHI-09MAY01-C34981_1.pep
STLSRKFMSTSVLDDMVSTINKELQCQNLFSVLYLVSCMVIAIRSTKRIFLLTDRLFLLCRFHLHSSRNSMKV

SEQ ID NO: 65627 - protein, 124 aa, Gossypium hirsutum
  unsure (1)..(124): unsure at all Xaa locations
  Clone ID: GOSHI-09MAY01-C34951_1.pep
RVLDFESHNVXKALYRRAQAYMKTSDLISAEMDIKKALEADPQNRXVKLLQKTLRQLQIESNKRDAKLFTNMFARMSKRSSMPIKKLKVEIAEPEKSEEAAATERECVAEPSTPSEDRMAVDQS

SEQ ID NO: 65628 - protein, 132 aa, Gossypium hirsutum
  Clone ID: LIB3825-001-Q1-N6-C9.pep
AYMKPSDLISAEMDIKKALEAAPQNREVKLLQKTLRHLQVESNKRDAKLFTNMFAQMSKGSSMPVKKLKVEIAEPEKSEEAAATERECVAEPSTPSEDRMAVDLVFFIPFVTCYSPLRRGDRPFSLCSCSPV

SEQ ID NO: 65629 - protein, 212 aa, Gossypium hirsutum
  unsure (1)..(212): unsure at all Xaa locations
  Clone ID: GOSHI-09MAY01-C34941_1.pep
DFGLSALGEPAHQDGLLHTTCGTPAYVAPEVINRKGYDGAKADIWSCGVILFVLLAGYLPFHDSNLIGMYKKISKADYKFPSWFSPDVTKLLSRILNPNPKSRISTAKIMTNSWFTKGFKLKSSHKTAEKDLPSTDTNVVFGSEANTQHSKQRITRISSPXLNAFDIISLSSGLDLSGLFTETGXEKEVRFTSMHXASAITSKLKDFAEHLN

SEQ ID NO: 65630 - protein, 79 aa, Gossypium hirsutum
  Clone ID: GOSHI-09MAY01-C34971_1.pep
MISILAQERLLGATLGCALTGIVVFEQRKRIYDSVSSYQSEMKELIFGKKSRSEFALLWNKTVDQIFVPVIEAISSRRW

SEQ ID NO: 65631 - protein, 144 aa, Gossypium hirsutum
  Clone ID: GOSHI-09MAY01-C34911_1.pep
PRVRGIISFIPYFNWLSWVWAWLDSGKRRYAVYSVVYLVPYLRSNFSLSPEDSWLPIASILFCIVHVQLEASIRNGDLQGFQIFSEAAGHLSSRSREEDEHFKGYNEPKKGEHRNLPDAEEHSRNEIPHWGIPKRPSQHHETAE

SEQ ID NO: 65632 - protein, 79 aa, Gossypium hirsutum
  Clone ID: GOSHI-09MAY01-C34901_6.pep
MDMKKVSTAIIVAAASISVVMAADAPAPSPSAGGSIPSSSPGSAPASGPDSSVAAAALPVLGSLVGASIVSLFSYMLHV

SEQ ID NO: 65633 - protein, 78 aa, Gossypium hirsutum
  Clone ID: GOSHI-09MAY01-C34901_5.pep
MDMKKVSTAIIVAAASMSAVMAADAPAASPSAGGSSPSSSPAFAPAAGPDSSVAAATLPVLGSLVGASIVSLFSYILQ

SEQ ID NO: 65634 - protein, 83 aa, Gossypium hirsutum
  Clone ID: GOSHI-09MAY01-C34901_4.pep
FKNPPLNFIFFSLKKKYNFPNPPTKTLFPLNPPPFFFFFFFFFFFFFFFFFFFFYILFIFYFFLFFFFFIFYLIIFNFFFFFF

SEQ ID NO: 65635 - protein, 97 aa, Gossypium hirsutum
  Clone ID: GOSHI-09MAY01-C34901_3.pep
GPYKKKLFKFANPREVKIVDPPKRGAPLFFFFFFFFFFFFFFFFFYFFFFFFFFFFFFFFFFFFFFFFFFHQSSILFISNIFNIHRMVFIHLDDYRK

SEQ ID NO: 65636 - protein, 78 aa, Gossypium hirsutum
  Clone ID: GOSHI-09MAY01-C34901_2.pep
MDMKKISTAIIVAAASMSAVMAASAPATSPSAGGAEHISSPDSGPAPGPDSSVAAAALPVLGSLVGASLVSLFSYILQ

SEQ ID NO: 65637 - protein, 80 aa, Gossypium hirsutum
  Clone ID: GOSHI-09MAY01-C34901_1.pep
MDMKKISPAIIVAAASMSAVMAASAPATSPSASGTGPGPISSPESGPAPGPDSSVAAATLPVLGSLVGASIVSLFSYILH

SEQ ID NO: 65638 - protein, 107 aa, Gossypium hirsutum
  Clone ID: uC-gsflmaxxa026d07b1.pep
QSPADPHSPAIKRRSCSFLVRLIIPLYAMDMKKVSTAIIVAAASISVVMAADAPAPSPSAGGSIPSSSPGSAPSSGPDFSVAARVLPVLGSLVGASIVSLFFYMLHV

SEQ ID NO: 65639 - protein, 106 aa, Gossypium hirsutum
  Clone ID: LIB3828-011-Q1-K6-D2.pep
LYTIFVHMLFFIHVAYCSMQENKVTMEAPTNDPRTGKVAAATLESGPDAGAEAGEELGLEPPAEGEGAGAPAAMTALIEAAATMMAVETFFMSMAYKGIIKRTGNE

SEQ ID NO: 65640 - protein, 54 aa, Gossypium hirsutum
  Clone ID: LIB3148-032-Q1-K1-G10.pep
THVRVVIVLVTYLVPLHHEDRISEWLPLPCLFLDHWLGPPLVLCFLTCYNKLHI

SEQ ID NO: 65641 - protein, 82 aa, Gossypium hirsutum
  Clone ID: LIB3148-045-Q1-K1-E5.pep
SLIFLNGVLTFSSYLVWEKCVIAFLLVLFGIQSSILFNFIQYSSHVSFKRNKIIYFVDMLSYDTCSLVQHVRKQRNNGSPHQ

SEQ ID NO: 65642 - protein, 53 aa, Gossypium hirsutum
  Clone ID: LIB3145-016-Q1-K1-A6.pep
KLAIDFSLLLKNTGDAHFAILFAGIPRMWFPYLFIICRIYEVEPEKSETCKRL

SEQ ID NO: 65643 - protein, 77 aa, Gossypium hirsutum
  Clone ID: LIB3135-022-Q1-K1-B4.pep
TTDIDMWSFGCIVAELFLRRCLFPGASEFDLLRRMIEILGVKTTGLSFKWEMVLFLELVIFRIYEVEPEKSETFKML

SEQ ID NO: 65644 - protein, 196 aa, Gossypium hirsutum
  Clone ID: GOSHI-09MAY01-C34411_2.pep
HKNKIKKKNVIILKCCYFKRLSSQRHKDPEELPSKEQPCSTSGNTDEAFVQRVHEHAPRPGKEPEEQPCSTSDIKRPELTFKLGKEKACSSSRTSETLAHNTKAPTLSNLCTTCPPKLALQFKNLVEDWVMPTLQSELTSSGDDDWLFQKKQNLNTEVKTHKDGNLNSNQMSSATWPRACFLPEADIYAVPFTVPL

SEQ ID NO: 65645 - protein, 177 aa, Gossypium hirsutum
  Clone ID: GOSHI-09MAY01-C34411_1.pep
MSRCFPYPPPGYVKNGIRDEALIESIKIKREEEKAKKERKKEKKEKKEEKREKKERDKSRDSGEAESKKRGHKKRHKDERSKEDQKGGDRQKKRENEVECFEKSTLTEEHGQAVGPQNSSDSTLNSSKRQKLSSPPDSGQNPGECVCISSFPEGGCLLVGFVCFTWALMLCIPNCYY

SEQ ID NO: 65646 - protein, 117 aa, Gossypium hirsutum
  Clone ID: LIB3828-026-Q6-N6-B1.pep
TDTLSCNLKIKREEEKAKKERKKEKKEKKEKKREKKERDKSRDSGEAESKKRGHKKRHKDERSKEDQKGGDRQKKRENEVECFEKSTLTEEHGQAVGPQNSSDSTLNSSKRQKLSSP

SEQ ID NO: 65647 - protein, 158 aa, Gossypium hirsutum
  unsure (1)..(158): unsure at all Xaa locations
  Clone ID: GOSHI-09MAY01-C34741_1.pep
IHRNNSFTEEDAVRILRIPLARTPHKDFLIWGGEMSGEFTVRSAYKLLQSSDENPRAYALQTIYRKFYKKLXSLNLPTKIKLTIWRLSWNYLPTKVNMEDRKVAVNPKWSXCGEIAEPMTHLFRECPVTVEVWITLSFQNIMMNQNRTRGRTRGRTRG

SEQ ID NO: 65648 - protein, 99 aa, Gossypium hirsutum
  Clone ID: GOSHI-09MAY01-C34731_1.pep
HASGRIVEPLLSPIVTPEGLELPPFRELNELCDSLGYFIKEKCINKGEVVHAELLLQLDHDLLVGEGFDRSRKVAKGKAASCLLKDLENRGISRKKKET

SEQ ID NO: 65649 - protein, 124 aa, Gossypium hirsutum
  Clone ID: GOSHI-09MAY01-C34721_1.pep
SPPPSDPVVNPAVALECTAPLQQRRPHTIEGDRAPRSLRSNPTSHTETLDRTLAEHMFPSFHSILAPTASCRAPHLPILKITESRKIVARNSPNCNLYLDGRSRVHNFFVNCLDLTCKLLRPSC

SEQ ID NO: 65650 - protein, 38 aa, Gossypium hirsutum
  Clone ID: GOSHI-09MAY01-C34661_1.pep
LGEAIVHDNIDNVMTMSFDKHLARIGRVKLISGLIYEE

SEQ ID NO: 65651 - protein, 123 aa, Gossypium hirsutum
  Clone ID: GOSHI-09MAY01-C34611_1.pep
MGSTSAHKVPSDTEMEGSEATIEIKIKTLDSQTYTLRVDKQMPVPALKEQIASVTGVLSEQQRLICRGKVLKDDQLLSAYHVEDGHTLHLVVRQPVPPSSDGSPYHSANDPASGTSRGHSNHA

SEQ ID NO: 65652 - protein, 231 aa, Gossypium hirsutum
  Clone ID: GOSHI-09MAY01-C34631_1.pep
SRVRKTLGLTDKRWACGMLVHALFPESSWKEKKGKGPEFSRNIGERAAEVVDRWKGQLDGEKEGLTPGEAVMFLHMVVGFELKERFDEGFLRKLVLDFSSRRDMAKLAAALGFEDKLLHIMDELVKNGNEIEAVYLARPAGLTERFPPVSLLTSYQQNSKKNATTILNNGNYSAAAMEESKNVELNSIKAIIKCVVDHMLESEFSTDSLRKRATQLEKVKSDRKKSSAAAG

SEQ ID NO: 65653 - protein, 107 aa, Gossypium hirsutum
  Clone ID: GOSHI-09MAY01-C34041_1.pep
SVTPKQNYRIFAEYTRNRRQRIADVISSFESLYLSSHRFVFYGNHSPFLKKSIVRPVTEKPYRASTLQISPPLFVEIEVEEGSPAKIPPGSKSMYLMEMNRRWKEKV

SEQ ID NO: 65654 - protein, 79 aa, Gossypium hirsutum
  Clone ID: LIB3828-016-Q1-K6-A9.pep
TPKGESPPKFFFFFFFFFFFFFFFFFFFFFFFFFIPSFFQINNNITEPKLYPYSFLVSKFNFDGIIAKHINIIDQTIKI

SEQ ID NO: 65655 - protein, 70 aa, Gossypium hirsutum
  Clone ID: LIB3135-012-Q1-K1-E12.pep
HASVLMCFAIIPSKLNLDTRKEYGYIFWFCNIIINLEKGWYEIVTSRHLYLFLIILCYINIFILNFRILS

SEQ ID NO: 65656 - protein, 208 aa, Gossypium hirsutum
  unsure (1)..(208): unsure at all Xaa locations
  Clone ID: GOSHI-09MAY01-C34261_1.pep
MRGKSILRPFLTCRTFSVRSVSSSSSSSRILFNQSYLMSTPQTNSSIPKTPFPVWTPKNLNLSRPFSDSSPDFFKPSFMETEPVPVPENVVPVKSEEEFDAALSKAKDESVPAVFYFTATWCAPCRFIGPVMDELARRTPEVTVYKMDIDEEGLARKLEKLKITAVPTVQYFKEGXNREGEVVGGDATRIIQTMKKLYNMRYPKTDDS

SEQ ID NO: 65657 - protein, 105 aa, Gossypium hirsutum
  Clone ID: GOSHI-09MAY01-C35971_1.pep
PPPWPTMGSSGASPRPCLERQSVLSETGPFGPLPNWFEGGAFIAHRDGREKGKPPFWFVVPFHGHWLNPQGFNDLQIGEGTPEHPQTVNRRYVFTIVIFVLLFHM

SEQ ID NO: 65658 - protein, 60 aa, Gossypium hirsutum
  Clone ID: GOSHI-09MAY01-C35811_1.pep
RPHVLKKPIVLHEDGISSITMEVEANGKVFKHTSTACDKKMAKKLAFKEVLKSLKGANFS

SEQ ID NO: 65659 - protein, 62 aa, Gossypium hirsutum
  unsure (1)..(62): unsure at all Xaa locations
  Clone ID: LIB3145-019-Q1-K1-C2.pep
PELRSNIYYIAVALAKIENMGDSTCRRVFGLPSSTRGTNDDMIGFMGRDYXDXQRKNMILYG

SEQ ID NO: 65660 - protein, 157 aa, Gossypium hirsutum
  Clone ID: GOSHI-09MAY01-C35541_1.pep
ICSLSACLVAVVCSSEQPPFRPLGSPAGDGASVILKSVLERATQVLTHPSGNFPMPHYTFWRASFDEFFTLLTKYCVTKYESIIQSIHNQSLPTTEVIGSEAIRREMPCELLRASLPHTNEAQRKLLMDFSQRSVPDNGSNSPAGSNSQINSESVRG

SEQ ID NO: 65661 - protein, 168 aa, Gossypium hirsutum
  Clone ID: GOSHI-09MAY01-C35511_2.pep
PTRPCLSTSHGSSIFGTTGQERRQHAPPLQPAMSATALLQKAAQMGAAASNASLLRGLGIVASSAPQENLQWGQAQVDPDNASIAAGLGLGLPCDGRSGLKELMMGTPVFGPKQTTLDFLGLGVAAGGNPNASLSALITPIGGGFDAATAAASFRGGDYTDKDIGRSS

SEQ ID NO: 65662 - protein, 135 aa, Gossypium hirsutum
  unsure (1)..(135): unsure at all Xaa locations
  Clone ID: AI055194.1.pep
KLMNQMYISMXVVRKFGTQHLCKEXLVAXDMXVSVXFFFLKLGNISKRAVFSSLKSQQWSGQSQLLTSVLXSLYYNYNLNVIKKKKKNSRGAVPIXHSEVTIIGGLHVDGKPGTHYRCKIPCPCYTKATMLHMER

SEQ ID NO: 65663 - protein, 79 aa, Gossypium hirsutum
  Clone ID: GOSHI-09MAY01-C35531_1.pep
MADSQHSSSGKTYVNSQEFSSEEETSEESKLKFSEDEETLIIRMFNLVGERWALIAGRIPGRTAEEIEEYWDTRYSTSE

SEQ ID NO: 65664 - protein, 160 aa, Gossypium hirsutum
  Clone ID: GOSHI-09MAY01-C35401_1.pep
GRVAGRPRTKMAGAANWVSITLLFSVCLSASYGKRTGISTMADGADGFQPSNGFPHEADPDSSTSIDPDPTGFGAGIGIGYERSPYCIDCDDVDIMGGSFCGTCNYGCPYRRFNNGCGGGIAYMDELKRTIKDLTMKLDANGLLGKKKAMNIQAMAPESS

SEQ ID NO: 65665 - protein, 123 aa, Gossypium hirsutum
  unsure (1)..(123): unsure at all Xaa locations
  Clone ID: LIB3828-026-Q6-K6-C8.pep
STGRRXVDISWXXAAFLXGAXXNYRXMPXXPQXFKIMXXVXWWYFAYYLDEXXKRTNXXDXXPXKXLMPXWSFXGKKKXAMNIPKLXGAXESSFRNLHXIYYIGLFRKLXGFYYXRRKGKLKE

SEQ ID NO: 65666 - protein, 71 aa, Gossypium hirsutum
  Clone ID: LIB3146-048-Q1-K1-E3.pep
KTIGIKFHGKVFNRSFSSTHISDTTSTPVIELRVRASVIAGAAKAAAHDIHIVAVDTVRASSITYAYASTK

SEQ ID NO: 65667 - protein, 131 aa, Gossypium hirsutum
  Clone ID: uC-gsflmaxxa055e10b1.pep
ASYGKRTGISTMADGADGFQPSNGFPHEADPDSSTSIDPDPTGFGAGIGIGYERSPYCIDCDDVDIMGGSFCGACNYGCPYRKFNNGCGGGIAYMDELKPTIKDLTMKLDANGLLREKKAMNIQAMVPESL

SEQ ID NO: 65668 - protein, 65 aa, Gossypium hirsutum
  Clone ID: uC-gsflmaxxa057a08b1.pep
TDWGKLNCGDYRCPYRRFNNGCGGGIAYMDELKRTIKDLTMKLDANGLLGKKKAMNIQAMAPESS

SEQ ID NO: 65669 - protein, 79 aa, Gossypium hirsutum
  Clone ID: uC-gsflmaxxa070e09b1.pep
PTRTPTRAHIDGGGCILGFHILTVLSSVYRRAMVRGPESPPWLTVPMGFNQATVLRMKLILNVQPLSILILPDSVLAYV

SEQ ID NO: 65670 - protein, 56 aa, Gossypium hirsutum
  Clone ID: LIB3493-006-P1-M1-B8.pep
GYEYPMCGASHLCEILRAYMDELKRTIKDLTMKLDANGLLGKKKAMNIQAMAPESS

SEQ ID NO: 65671 - protein, 286 aa, Gossypium hirsutum
  Clone ID: GOSHI-09MAY01-C35711_1.pep
MAEEGQKVILNVYDLSQGLARQLSMTLLGKPIEGIWHTGVVVYGNEYYFGGGIQHSPAGTTPYGTPIRVIDLGVTHVPKDVFEMYLQEISPRYTAETYSLLTHNCNNFSNEVAQFLVGSNIPDYILQLPNEVMSSPMGALLMPMIQNLETTLRAGAVPQVPQFRPSVSAQSSQSTTISVNGSSISSQPKEVDNKVKDGEQPKSEEVETSEKTVPPSKPTGTKEKSKSNGAAADPLGDARAKVQEEITREFAAVMASGTLRASEAAALATRKVMQKYGHLNVAMQQS

SEQ ID NO: 65672 - protein, 126 aa, Gossypium hirsutum
  Clone ID: GOSHI-09MAY01-C35691_1.pep
YPFLISQSLSLFLSAKHAQPEARAVITANLVLKQAKSIFFNAVLIIWVAFHYRFAINVENIAQGFLDDVSQARVQTCFDGKSFRQLVASRGCRCGGCHNHHRQHQSKLLIVLHFLVLNLIINPRVR

SEQ ID NO: 65673 - protein, 195 aa, Gossypium hirsutum
  unsure (1)..(195): unsure at all Xaa locations
  Clone ID: GOSHI-09MAY01-C35651_1.pep
VVLNRKKEFRWERLALFMRVGATRRSLQLVEASSGETSLDNLPSRTDGVFDVAYLLLRLLPSKDGVVLRRLIMTADGASLVRAAVSKEAKAFRFQLCKIIADILYQRMVKALGQLVPASQYSYKLRLGRWASXTELHPSARLSTSSTVYDYQSLLSDRRLKLILSKILNSARKEPALMLRFYWVSFVTFIAASAL

SEQ ID NO: 65674 - protein, 98 aa, Gossypium hirsutum
  Clone ID: GOSHI-09MAY01-C35601_1.pep
RFCSNLGMNNQAVKAAQEAVQKSEEFDIRRSPISIAAAVIYIITQLSDDKKPLKDISVATGVAEGTIRNSYKDLYPHVSKIIPNWYAKEEDLKNLCSP

SEQ ID NO: 65675 - protein, 217 aa, Gossypium hirsutum
  Clone ID: GOSHI-09MAY01-C35181_1.pep
MTFSGTTEKCKACDKTVHVIDLLTADGISYHKTCFKCSHCHGVLVMGNYCSMDSVLYCKPHFEQLFKETGTYQNKNAKPSSENSNGTGKAPSKFASFFSGTQDKCGACKKTAYPLEKVTIEGENYHKSCFRCSHGGCVLTPSTYAALEGFLYCKHHFSQLFKEKGTYAHLTETSTSKKSSAAPSPEVRSEAESDSESKPKEDESQPKAEAAEEEIEA

SEQ ID NO: 65676 - protein, 129 aa, Gossypium hirsutum
  Clone ID: LIB3145-011-Q1-K1-D7.pep
MTFSGTTEKCKACDKTVHVIDLLTADGISYHKTCFKCSHCHGVLVMGNYCSMDGVLYCKPHFEQLFKETGTYQNKNAKPSSEKSNGTGKAPSKFASFFSGTQDKCGVCKKTAYPLEKVTVEGENYHKSC

SEQ ID NO: 65677 - protein, 44 aa, Gossypium hirsutum
  Clone ID: GOSHI-09MAY01-C35131_1.pep
SPIILLIIVWSKIMTNISYPTCSIKPRGLLQDLKKDDRFLLLIY

SEQ ID NO: 65678 - protein, 156 aa, Gossypium hirsutum
  unsure (1)..(156): unsure at all Xaa locations
  Clone ID: GOSHI-09MAY01-C35121_1.pep
SYAFFLEKGQIAQLVDPYLVKKKQTQHFHHLEXFGKLTLIPRTINGFIWVGEXNVEARDSMVVDPKLIVLNQSRVPEEKNQTHTPLEMRQNICRIANAVRVLSTLGFSIEADLILETGELSSTVKIDIHDMLGSEFHVLVAEREAERRSLVGKRKR

SEQ ID NO: 65679 - protein, 158 aa, Gossypium hirsutum
  Clone ID: GOSHI-09MAY01-C35281_1.pep
MWVEIICGLVFYRLFRRFFYGARPRVRFETSDFDATFSVANRLEKLHGGKVYVGLHIPDVNTGSRQNIDIVLVTKREAAVISVQNLAGFISIHEDGSWTCEGGSSQSAVCSPDPVSEAKNQASVLESYIEQRGVAIPEGYFSYKVVIPNPKFRTFYKH

SEQ ID NO: 65680 - protein, 410 aa, Gossypium hirsutum
  unsure (1)..(410): unsure at all Xaa locations
  Clone ID: GOSHI-09MAY01-C35271_1.pep
EIVAVGEVKQPMPYLLYLQGGPGFECPRPTEASGWILKACEEFRVVLMDQRGTGLSTPLTPSSMQQIKSAPKLADYLTRFRADSIVNDAEFIRVRLVPEARPWSVLGQSYGGFCGVTYLSFAPQGLILVLLTGGIPPIGDGCTADSVYRACFEQIIHQNEKYYKRFPQDIEXIVQDVVTFLAESEAGGVPLPXGGGGAQGLQFLGLSGLGSSAGFERLHYMFERAWDPILVPGAPKQISSYFLNTYENWVSFDTNPLYAILHESIYCQGASSRWSAHRVRADHESKFDAIKAAKEGRPVLFTGEMIFPWMFDEVKALRPFKEATQLLAEKEDWPPLYDGTALNNNKVPVAAAVYYEDMYVNFKLVKETASQIAGIRLWITNEYMHSGLRDGGGQVFDHLMGMLNGKKPLF

SEQ ID NO: 65681 - protein, 100 aa, Gossypium hirsutum
  Clone ID: LIB3145-012-Q1-K1-E12.pep
IFYILFFFFFFFFFFFFFLFFFFFKTKTLPVRLIMIKKPNNRIKYKLGAEQSLVPHYVHRQYPNFDFRTKASSRLAFEFSPRLCKFLFFFFFSSIGADAW

SEQ ID NO: 65682 - protein, 102 aa, Gossypium hirsutum
  Clone ID: LIB3145-019-Q1-K1-C7.pep
GAFDSCCSSSLSLFSSLFFFSCYIYLKTKTLPVRLIMIKKPNNRIKYKLGAEQSLVPHYVHRQYPNFDFRTKASSRLAFEFSPRLCKFLFFFFFSSIGADAW

SEQ ID NO: 65683 - protein, 152 aa, Gossypium hirsutum
  Clone ID: GOSHI-09MAY01-C35261_1.pep
RVIAERLSEEEIGGLKELFKMIDTDNSGTITFQELKDGLKKVGSELTETEIKDLMEAADIDNSGTIDYGEFLAATLHINKIEREENLVAAFSFFDKDGSGYITIDELQQACKEFGLCDVHLDEMIKEFDQDNDGRIDYGEFAAMMRTGDGGM

SEQ ID NO: 65684 - protein, 93 aa, Gossypium hirsutum
  Clone ID: GOSHI-09MAY01-C35231_2.pep
GVRCDKHVNTETQSDEILDYSHVPGRAVFHRGRHRHGARATTSGHRVNLLLWCRSSVFRELRKYQKDFSSWCGECQREKKERQSQLPLPNRNY

SEQ ID NO: 65685 - protein, 317 aa, Gossypium hirsutum
  Clone ID: GOSHI-09MAY01-C35231_1.pep
YMPPPMLSLSRDSKLHYMRDIILRYSPEGERTRVQKQREYRQKIISHYQPLQRELYAMHASNFFAPSFLKAINENKGESFRSIMAEPTQGVFTFEMLQPHFCELLLSEVENFEKWVHETKFRIMRPNTMNKFGAVLDDFGLETMLGKLMEDFIRPISKVFFSDVGGSTLDSHHGFVVEYGVNRDVELGFHVDDSEVTLNVCLGKQFSGGDLFFRGVRCDKHVNTETQSDEILDYSHVPGRAVLHRGRHRHGARATTSGHRVNLLLWCRSSVFRELRKYQKDFSIWCGECQREKKEHQRVSISATKQELLKREGKPAT

SEQ ID NO: 65686 - protein, 108 aa, Gossypium hirsutum
  Clone ID: uC-gsronu33B089b08b1.pep
HASVKAINENEEESFRSIMAEPTQGVFTFEMLQPHFCELVVSEDLNAYVENFEKWVHETKFRIMRPNTMNKFGAVLDDFGLETMLGKLMEDFIRPIFKDFFFDGGGAT

SEQ ID NO: 65687 - protein, 57 aa, Gossypium hirsutum
  Clone ID: GOSHI-09MAY01-C36911_1.pep
MPFKTMIEVEPPSPLRYIIGAAVMMIGVVLPVGYMMFRNKRVPSSSSYSKQTNKVLI

SEQ ID NO: 65688 - protein, 147 aa, Gossypium hirsutum
  Clone ID: GOSHI-09MAY01-C36841_1.pep
WHACTLPVPYWLDPRVRSDTPNLDEEDSNSPPTFDSDDCDSDCDSTHFTDLSAGLRVFSDSILRMELAGMEMVKAMEASRCEAEKRRAESEAELTRMMLRTQSQIASFVAGDADTRKRKRGAEDEPRDSSVRQGALLLSLLQCNLIF

SEQ ID NO: 65689 - protein, 121 aa, Gossypium hirsutum
  Clone ID: LIB3146-058-Q1-K1-F3.pep
MADPGAGPNPTLTKDDNCLKYTCDAGFFSNPHPSDTPNLDEEDSNSPPTFDSDDCDSDCDSTHFTDLSAGLRVFSDSILRMELAGMEMVKAMEASRCEAEKRRAESEAELTRMMFRTQSQI

SEQ ID NO: 65690 - protein, 149 aa, Gossypium hirsutum
  unsure (1)..(149): unsure at all Xaa locations
  Clone ID: GOSHI-09MAY01-C36821_3.pep
CLAFGGVSLGAVHKVGDSTGWTSLGNIDYLKWASTKNSHVGDSLLFQYNPQFHNVMQVTXPVPPRAPEHLPCASYTSGSRLRNPQKGLAHFYFLCGGPGHCQAGQKRXTYGANTSATAPIASPSPSTLGSSPAYPTVRNVGCSWPSSEQ

SEQ ID NO: 65691 - protein, 187 aa, Gossypium hirsutum
  Clone ID: GOSHI-09MAY01-C36821_1.pep
MACTKRTLAFLLMLAFVGVSLGAVHKVGDSTGWTSLGNIDYLKWASTKNFHVGDSLLFQYNPQFHNAMQVTHDDFQSCNGTSAIASYTSGSDSVTLKRPGHFYFLCGVPGHCQAGQKVDVLVKSSSKAPIASPSPSTLGSSPANPPSEMLGAPGPAQSSALSLFSSKNSLAWSLVAVGGVFGFAFYF

SEQ ID NO: 65692 - protein, 183 aa, Gossypium hirsutum
  unsure (1)..(183): unsure at all Xaa locations
  Clone ID: uC-gsronu33B155b12b2.pep
EQNVALDLARREAETAIRARNDFLAVMNHEMRTPMHAIIALSSLLQETELTPEQRLMVETILKSSNLLSTLINDVLDLSRLEDGSLQLDLGTFNLFAVFREVLNLIKPIASVKKLHVSLNLAPDLPEYAIGDEKHLMXTILNVVGNAVKFSKEGSISITAIGAKSELLRDSRTPEFFPVPSDN

SEQ ID NO: 65693 - protein, 334 aa, Gossypium hirsutum
  unsure (1)..(334): unsure at all Xaa locations
  Clone ID: GOSHI-09MAY01-C36581_1.pep
RKMINKAHVWTYFYLLIYILLSSGVILYNKWVLSPKYFNFPFPITLTMIHMAFSGIVAFFLIRVFKVVAPVKMTFEIYATCVIPISAFFASSLWFGNTAYLHISVAFIQMLKALMPVATFFMGVMCGTDKPRCDVFLNMVLVSVGVVVSSYGEIHFNIVGTVYQVTGILAEALRLVLTQVLLQKKGLTLNPITSLYYIAPCSFVFLFVPWCLLEKXPGMEVSQIQFNFWIFFSNALCALALNLSIFLVIGRTGAVTIRVAGVLKDWILIALSTVVFPESTITGLNIIGYAIALCGVVMYNYIKVKDGRTPQLPSDSIPERLTKDWKLEKKSSDI

SEQ ID NO: 65694 - protein, 180 aa, Gossypium hirsutum
  unsure (1)..(180): unsure at all Xaa locations
  Clone ID: LIB3583-004-P1-K1-B5.pep
ALFIFCSQYRCGNTAYLHISVAFIQMLKALMPVATFFMGVMCGTDKPRCDVFLNMVLVSVGVVVSSYGEIHFNIVGTVYQVTGILAEALRLVLTQVLLQKKGLTLNPITSLYYIAPCSFVFLFVPWCLLEKPGMEVXQIQFNFWIFFSNALCALALNLSIFLRIGRTGAVTIRVAGVLKD

SEQ ID NO: 65695 - protein, 56 aa, Gossypium hirsutum
  unsure (1)..(56): unsure at all Xaa locations
  Clone ID: LIB3585-065-P1-K2-D7.pep
FNFPFPITLTMIHMAFSGIVXFFLIRVFKVVAPVKMTFEIYATCVIPISAFFASSL

SEQ ID NO: 65696 - protein, 68 aa, Gossypium hirsutum
  Clone ID: GOSHI-09MAY01-C36781_2.pep
PTRPPTRPPTRPSGLIYEETRGVLKIFLENVIRDAVTYTEHARRKTVTAMDVVYALKRQGRTLYGFGG

SEQ ID NO: 65697 - protein, 108 aa, Gossypium hirsutum
  Clone ID: GOSHI-09MAY01-C36781_1.pep
VQDSKMSGRGKGGKGLGKGGAKRHRKVLRDNIQGITKPAIRRLARRGGVKRISGLIYEETRGVLKIFLENVIRDAVTYTEHARRKTVTAMDVVYALKRQGRTLYGFGG

SEQ ID NO: 65698 - protein, 44 aa, Gossypium hirsutum
  Clone ID: uC-gsflnu33B100h11b1.pep
KILLENVIRDAVTYTQHARRKTVTAMDEVYALKRQGRTLNGCGG

SEQ ID NO: 65699 - protein, 230 aa, Gossypium hirsutum
  Clone ID: GOSHI-09MAY01-C36741_1.pep
DVPGIKRLLPSGWRESEFFNNIYELVGVPVVTVQLRYNGWVTELRDLQRARQLRQAIGLDNLLYTPAADFSCFADLALTSPEVYYIEGQGSLLQCVLTPGDPYMPLPNDEIIKRVAKQVLPLFPSARGFRELLGHLVVKIGAISYIAKDPGKDPFRPDQKTPIKNFFLAGSYTKQDYIDSMEGATLSGRQASAYICDAGEGLLALQKKLAAIESHQQLETSSSSDELSLV

SEQ ID NO: 65700 - protein, 100 aa, Gossypium hirsutum
  unsure (1)..(100): unsure at all Xaa locations
  Clone ID: uC-gsflnu33B146e02b1.pep
RSLVRPRVRKIGQSLYREGPGKDPFLPDQKTPIKNFFLAGSYTKQDYLDSMEGATLSGRQASAYICDAGEELAALLKKLVMVGSXEQMETSSVTDELSLV

SEQ ID NO: 65701 - protein, 116 aa, Gossypium hirsutum
  unsure (1)..(116): unsure at all Xaa locations
  Clone ID: LIB3146-005-Q1-K1-C2.pep
RPRXRGIKRMLPSEGEELQFFNNIYELVGVPVVTVQLRYNGWVTELRDLEQSKKLRQAVGLDNLLYTPDADFSCFADLALTSPEDYYIEGQGSLLQCVLTPGDPYMPLPNDEIIKR

SEQ ID NO: 65702 - protein, 60 aa, Gossypium hirsutum
  Clone ID: GOSHI-09MAY01-C36731_1.pep
KFFYWIIEILYFFFIHGVKDLVILINPSNSWTIAFVNIEYALNILISNRMHSTFTKKKNK

SEQ ID NO: 65703 - protein, 265 aa, Gossypium hirsutum
  Clone ID: GOSHI-09MAY01-C36691_1.pep
LIFCCRCVLDPGDKIVDCPPTFTMYEFDAGVNGAQVIKVPRKPDFSLNIEAIAEAVEHEKPKCIFLTSPNNPDGSIISDEVLLKILDMPILVVLDEAYIEFSGNESRMQWVKKHDNLIVLRTFSKRAGLAGLRVGYGSFPLSIIEYLWRAKQPYNVSVAAEVAACAALQNPKYLELVKDALIQERDRLFKLLKEIPFLNPYPSYSNFILCEVTSGMDAKKLKDDLSKMGVMVRHYNNKELKGYIRVTAGKPEQTDALMEGLSRLS

SEQ ID NO: 65704 - protein, 154 aa, Gossypium hirsutum
  Clone ID: GOSHI-09MAY01-C36641_1.pep
KMSSDDSLDKLIKGTFVDPSPENSLELREDLRQYGIPATEAQIGANVPPLPGDDNQVNSLSLMSSSRMKRNLEFVFDNFSGDKGEEKKKQRRGGFYIGESSNPQQQRGTESKEEDLSKLEMVKAFKDRINSQIKMDDMAYMESVILIFHQMIEM

SEQ ID NO: 65705 - protein, 170 aa, Gossypium hirsutum
  unsure (1)..(170): unsure at all Xaa locations
  Clone ID: GOSHI-09MAY01-C36661_1.pep
MKNRNPKGNGNGEGSTMDGPKPMTMKKKKNMNRLGGSGTGLSLQAFANAKSTSNHYNPALIKKKKEFYKNAKYVNKFKKSLKQQNQGKNSLPSAQRTIEYENEDINGSGXNNMNNKKKKNGSQSLRQVSEKQWEEKEKAWMEREAAMQVKKEQREKAEAQRKVEGKYSSK

SEQ ID NO: 65706 - protein, 177 aa, Gossypium hirsutum
  Clone ID: GOSHI-09MAY01-C36611_1.pep
MRDHLVVCVDRLTKPESLKPVNEPEVAGPSGEGSSVVAEPHVCAIDVEEVEEHGSCDEEEPLIQTVECRICQDEDNINNLETPCSCSGSLKFAHRKCVQRWCNEKGDITCEICHQPYQPGYTAPPPPPQPEVATIDISEWTVAGAPLGLHDQRILAVAAERHILEQGYDEYAEPDSS

SEQ ID NO: 65707 - protein, 118 aa, Gossypium hirsutum
  Clone ID: LIB3145-030-Q1-K1-A12.pep
HASETVECRICQDEDNINNLETPCSCSGSLKFAHRKCVQRWCNEKGDITCEICHQPYQPGYTVPPPPPQPEVATIDIRPVFTIMHLPKNRHDEDRCRSNFACFVFPVCEDLYMSEPVQ

SEQ ID NO: 65708 - protein, 226 aa, Gossypium hirsutum
  unsure (1)..(226): unsure at all Xaa locations
  Clone ID: GOSHI-09MAY01-C36171_1.pep
KTSVPPGRRLIVPLQICVLQGLSFVKARLLSMEIPAYVGESPSNPANVDGNHSNKAVGYGSKIKRLVKIDPFRGSWGLRFLELDMSNPPDMVFEGSASVLEKPSNEDDVSVGYAAEYGYPQTRIVREYFSRVVIPLEHFKLPFLDXSFFSKDLQLDESTRCKNSSLSDRSTKSELNASIKXIVSRIKVTWQSGXNSCGELNITDAIRVALPSSIMDILLPDPLTFS

SEQ ID NO: 65709 - protein, 240 aa, Gossypium hirsutum
  Clone ID: GOSHI-09MAY01-C36001_1.pep
MEKEVEFEKKKHGLKHIAFVRVAAIRTLVYVSNLYGYAKQNSGPLWSTAGTVEVAVAAIVGPVYEKYKDVPDHLLVFLDSKVDEASQKYDEHVPPAGKQMVNQAKYLVHMAAQKAHKLIDEARTNGARGALHYAATEYKQLVLVSSTKVWVKLNRSSAFHSVAEKIVPTASNLSDKYNCLVKDLSGKGYPVFAYLPLIPVGELRKAVKQAEAKDKAHVTADTRKSDSDSGSGSGSDSDSG

SEQ ID NO: 65710 - protein, 187 aa, Gossypium hirsutum
  Clone ID: GOSHI-09MAY01-C36341_1.pep
HASAKPAASWLDDFLVWLSPEAFGCCRKFTNGSYCPPDDQPPCCSPDGGSCGLGGVCKDCTTCFRHSDLVNDRPSTEQFREKLPWFLNALPSADCAKGGHGAYTSSVDLSGYESGVIKASEFRTYHTPLNGQGDYVNALRAAREFSSRISDSLKMQIFPYSVFYIFFEQYLDIWTIALTNIAIALGA

SEQ ID NO: 65711 - protein, 145 aa, Gossypium hirsutum
  Clone ID: GOSHI-09MAY01-C36331_1.pep
MGGKRKTNENEGMEGEEDSKHNIKKMKKEKSEILPSSIKNKEKRSAVHAKLKHQKKLDKRKKLKARDAAAKRALELGEEPPPKQIPRTIENTREADETVCMPDDEELFAGNDADEFSAVLKQDRTPKILITTWPFQFHLGDRLLS

SEQ ID NO: 65712 - protein, 69 aa, Gossypium hirsutum
  Clone ID: LIB3583-037-P1-K1-C2.pep
HSRELRLHVRAHSTATEPAKKGDVQRSNNRVTVKNATNIEEKIFLLILLSFFGYLKADLDHVKGGPILY

SEQ ID NO: 65713 - protein, 139 aa, Gossypium hirsutum
  Clone ID: LIB3145-023-Q1-K1-H4.pep
FPEEKPDPFRVSSTLKRRRSASRQGSDCDGDSADSTNPAREVRWPWSAPVRGGATRANGGYCCGGGSAQARGGWRGFQQIDFAGLGFENWLLGLLLGLLVLDWLFFWLGLLCGPGHYWACTIYIYMKLVVRERQFHFLQ

SEQ ID NO: 65714 - protein, 118 aa, Gossypium hirsutum
  Clone ID: GOSHI-09MAY01-C37981_1.pep
NCYVYRARLEETEQYWRGWYEGLSEKFLSSPVPKLLLLAGTDRLDRALTIGQMQGKFQMVVVRHTGHAIQEDVPDEFATLIINFISRNRIGPHGVEIPGLARPNPAQAQGQSPAQTKS

SEQ ID NO: 65715 - protein, 180 aa, Gossypium hirsutum
  Clone ID: GOSHI-09MAY01-C37831_1.pep
MAKVQQITLVSLAICLSTLLGFAAAANPEEKFIVEGRVYCDTCRVEFETKISKPIKGASVKLECRNITNEKIVSHSQDVVTDEAGGYKIEVKGDHEDEICEVSLVKSPRADCNEPTEVWRKARVVLTKADGVSGTYRFANNLGYMKKEALPECKKVLTEMGYFELQDEIGEEVEGHSTAP

SEQ ID NO: 65716 - protein, 266 aa, Gossypium hirsutum
  Clone ID: GOSHI-09MAY01-C37791_1.pep
PSQTVPIPATEPIVSPLSNMERFLESVMPSVPALYLSKTTMRGWRTCDIEFEPYFVLGDLWESFKEWSAYGVGVPLILNDCDSVVQYYVPYLSGIQIYSDSRKMSSKSRQPGEDSDSDFRDSSSDGSSDCEPERGPNVLREKTNHMASEMSLRMERLFMGDQQMLQEDFSSDEGESVNSRSCLIFEYFEQDTPYSREPLANKIADLAFQFPELRTLTSCDLLSSSWISVAWYPIYRIPTGPTLKDLDACFLTYHYLHTPIVDGHRP

SEQ ID NO: 65717 - protein, 146 aa, Gossypium hirsutum
  Clone ID: LIB3147-043-Q1-K1-E9.pep
PRVRPRVRPLFRPRVRAFQLPELKTLKSCDLLSSSWISVSWYPIYRIPTGPTLKDLDACFLTYHCLHTPIGGGESAQAPFITCPNDMDDVPKMSLPVFGLASYKFKGSLWTPNGTTDCHLANSLFQAADNWLRLLHVNQPHFTIFL

SEQ ID NO: 65718 - protein, 95 aa, Gossypium hirsutum
  Clone ID: GOSHI-09MAY01-C37691_1.pep
RSTAFLRPPGFSFLINSMARQIVVLALVTMALFALVSTAAAATAPAPGGSPSGSPGDASSPPSQASAPSPSSGAALELSAIVGVGAAAVAGYFMF

SEQ ID NO: 65719 - protein, 123 aa, Gossypium hirsutum
  Clone ID: GOSHI-09MAY01-C37121_1.pep
VNLSFHSFSGTAEQSKPPVNEPTKLPGAPQPREPPAVVATESSTLEDIIMLEDNSKKDEQVDGSGSPEVNDTPGKESCMAPSSETEKEDETMSLSDLSTSFPTVLRVYESKQKSSYSEEIKRS

SEQ ID NO: 65720 - protein, 205 aa, Gossypium hirsutum
  Clone ID: GOSHI-09MAY01-C37081_1.pep
RSPRVRLEVKSKAGVKLLVKEVKSLRTSQSELKQELSRVMKEKLGLERVVQEEKKRMEHANAAGAKLLHECNLLWDRLQECSVNFLSEEEDKLNVDTSSPSDALDLLTTSDNRIGLLLAEAQLLAQDVENSVVRSEESHKMKDGDKRIDDELRKMLTDMFVDNARLRKQVNSVVRCALNAYVKTDEDDDDDDSEEEEQRKRRKPI

SEQ ID NO: 65721 - protein, 189 aa, Gossypium hirsutum
  unsure (1)..(189): unsure at all Xaa locations
  Clone ID: GOSHI-09MAY01-C37041_1.pep
VKGLVSDSXKNNFLSQRAETLLHSLRVRFPGLPQTALDMNKIQYNNVGGQSILESYSRVMESLAFNIMARIDDVLYVDDAIKQRAAAETVSLFSRSGFSGRPIQRRLSPSPFSIQQTPYASPFATPTFCSPTPLTGSPRRAASSLKRNDIKEEPDRKFEKPFASEFEKVWSYTDSLSARRVSENAPERD

SEQ ID NO: 65722 - protein, 57 aa, Gossypium hirsutum
  Clone ID: GOSHI-09MAY01-C37351_1.pep
TKKPYPIASNHVDSKWPLLHRLCTSRRSPATETRRRAVVARRDLTGLGPAEREQRKV

SEQ ID NO: 65723 - protein, 204 aa, Gossypium hirsutum
  Clone ID: GOSHI-09MAY01-C37361_1.pep
LRVRLAAAAPKPNIDVPKPKEFKGTRSARDVDNFGGGIEQYFCAKGITEDVTKVTTAAMYLSDVALLWWRRRSTDVRRGGSEIETWEEFRCEFKAQFYTEYAEDEARARLRRLAQQGTVREYVQEFSELMLQISDMGEKEAFFSFMDGLKPWAKQELQRRGVQELTKAMSVAESLAEFGGRKDNSNSSKPRLKGNSGGDKERPT

SEQ ID NO: 65724 - protein, 140 aa, Gossypium hirsutum
  unsure (1)..(140): unsure at all Xaa locations
  Clone ID: AI055432.1.pep
VIFIIMLPTNRIQCYESLSTLMDNKFNIFRGTLMGGCAVFGVPSLTFPYLVENIYNQAKWCGPKEEEPSSQSTLSQHIHTITVKIHMKVFPLKGHPVIRSKMMLIDAMKLLXXQQGTDLYTLVRICYIESLLWKPFVVVL

SEQ ID NO: 65725 - protein, 108 aa, Gossypium hirsutum
  Clone ID: AI054833.1.pep
WWWRLLRSLFYIFYFVENIYNQANGCGPKEEEPSSQSTLSQHIHTITVKIHMKSLRLKGNPVIRSRMMLIDALKLLGWHQVLTYILGFYWLLEGPLLRILGLSWKSLP

SEQ ID NO: 65726 - protein, 187 aa, Gossypium hirsutum
  Clone ID: GOSHI-09MAY01-C30811_1.pep
MDTLLFTSESVNEGHPDKICDQVSDAILDACLEQDPESKVACETCTKTNMVMVFGEITTNAKVDYEKIVRDTCRGIGFTSADVGLDADNCKVLVNIEQQSPDIAQGVHGHLTKKPEEIGAGDQGHMFGYATDETPEFMPLTHVLATKLGARLTEVRKNKTCPWLRPDGKTQVTVEYRNEGGAMVPIR

SEQ ID NO: 65727 - protein, 392 aa, Gossypium hirsutum
  unsure (1)..(392): unsure at all Xaa locations
  Clone ID: GOSHI-09MAY01-C30591_1.pep
PDVDKQQFVRLIRWLRTPPPPPLVCTANDLSAWKDFPKGLTVLLLDGDTNSAAELKSKLEAMDLYCLFLFHATKMKLLRQFRVDPESFHVAIVEVCTHSNNGRFKFLETAKDLPTIMTSNIHCISTMMKCIARGAVEFLKKPLSEDKLRNIWQHVVHKAFNTGGNDLTESLKPVKESVVSMLQQQPENLKPKNEDSETTEDASMIHENDSEPPAGNDEYPAPSTPQLEQGGRLLDDRDCQDHTHCSIEKGSGEQDGEAESVETTGGNTTATGGQPQGPSETNVKEEDDSVDGTMGESPQNRVDSKGSDVVAGKPSSXLIKLIGKKSKVDWDTRLHXKFVKQVDQLGIRSSYPRSRLQLWEVEGLTRAYVASHLQKFDAGTHFTKVMIECFKT

SEQ ID NO: 65728 - protein, 140 aa, Gossypium hirsutum
  Clone ID: LIB3583-041-P1-K1-G1.pep
MVCTRNDLSAWKDFPKGLRVLLLDEDTNSAAEIKSKLEAMDYIVYTFCNENEALAAVSSRPESFHVAIVEVCTNSNNGGFKFLETAKDLPTIMTSNIHCISTMMKCIALGAVEFLRKPLSEDKLRNIWQHVVHKAFSVGG

SEQ ID NO: 65729 - protein, 51 aa, Gossypium hirsutum
  Clone ID: LIB3196-049-P1-M1-B2.pep
MVCTRNDLSAWKDFPKGLRDLLLDEDTNSAAEIKSKLEAMDYIVYTFCNEN

SEQ ID NO: 65730 - protein, 122 aa, Gossypium hirsutum
  Clone ID: GOSHI-09MAY01-C30501_1.pep
MATAASSSSSMVATAVLIPRFPAASVGTTRCSALPPLPPRVSTASLSFSSSVKLIPESKRFSLLQTKASEETSVDAGDLFADLKEKWDKVEDKTTVVLYGGGALVAVWLSSILIGAINSVPL

SEQ ID NO: 65731 - protein, 66 aa, Gossypium hirsutum
  unsure (1)..(66): unsure at all Xaa locations
  Clone ID: LIB3120-024-Q1-K1-D1.pep
RRLPENEESKRRWLPWRMKRMQLSPFLNEFSQFXICGRSKRYTILHFSGLVLQFIEALFKDSPRVR

SEQ ID NO: 65732 - protein, 111 aa, Gossypium hirsutum
  Clone ID: GOSHI-09MAY01-C30771_1.pep
SLWTISLESVPGFCGELSASESNVWMCFVDSLVRSRTMAKWRHPTGSIVKINFDGVFEKERCRLCSGIIARNAHDEVPISRAVIHPNVGSPFAAEAIACLWVVKTCAPCGE

SEQ ID NO: 65733 - protein, 189 aa, Gossypium hirsutum
  Clone ID: GOSHI-09MAY01-C130759_1.pep
MQDPIGIPACFSSGEKPTDHDPAVTRWGQSVFMSVYRTKMADHCRLITVTWCKNLLLHGLSISVEGPEGESQYTCKIELKPWYFWRKQGSKRFTVDDGKPFDIFWDLKSAKFNGETEPGSDYYVAVVSEEEIVLLLGDLKQDAYRKTGCRPASFNPIFVSRKEHIFGKKKFSSRAKFHEKGRFHEISID

SEQ ID NO: 65734 - protein, 120 aa, Gossypium hirsutum
  Clone ID: GOSHI-09MAY01-C30701_1.pep
RWWKLIPYFPEKKLWSVKMKSLPLSAGTYIPKILNPKILNKNVENPVIRWSKTKPKMGSIAIVEQQNDKAIVLLKRREAVGLGLYVGIADVLLQLLPQPCPSGAAVEVAPAACELTVSPS

SEQ ID NO: 65735 - protein, 115 aa, Gossypium hirsutum
  Clone ID: GOSHI-09MAY01-C30691_2.pep
MAFEITNEMLVGSLMPVIVYWVYGGLYTILGYSCNNYRLHPKEDEDEKNFASKKTVIKGVLGQQFRQFIATNLLYMITRGNDPGASSGQSTSFFVIARQFIVAMFVFHTYQYFLY

SEQ ID NO: 65736 - protein, 169 aa, Gossypium hirsutum
  Clone ID: GOSHI-09MAY01-C30691_1.pep
GRVGGRVGGRVGGHVGGRVAPVIVYWVYGGLYTILGYSCNNYRLHPKEDEDEKNFASKKTVIKGVLGQQFRQFIATNLLYMITRGNDPGASSGQSTSFFVIARQFIVAMFVFDTYQYFLHRYLHQNKFLYKHLHSKHHRLVVSYPFGAIYRHPIEGLLFDIICGTMAIY

SEQ ID NO: 65737 - protein, 81 aa, Gossypium hirsutum
  Clone ID: GOSHI-09MAY01-C30631_1.pep
DDDSPRVRVVPGLLLWNRTRQQWGGNKKSENRPQKVREPKLSWNASYESLLGNNKPFPQPIPLPEMIDFLVDIWEQEGLYD

SEQ ID NO: 65738 - protein, 48 aa, Gossypium hirsutum
  Clone ID: LIB3493-043-P1-M1-A3.pep
MGNPFWPCSWNATYESLLGNNKPFPQPISLPEMIDFLVDIWEHEGLYD

SEQ ID NO: 65739 - protein, 92 aa, Gossypium hirsutum
  Clone ID: LIB3120-009-Q1-K1-D11.pep
QSSGCLGCYKEPKSDPLMNDTSKGLEVPGQTVRKTSISEDFWTTSACDMDNSAAQSQGSISSISVINQSLDPHGNANSPSEFVNHGSLLWNR

SEQ ID NO: 65740 - protein, 116 aa, Gossypium hirsutum
  Clone ID: uC-gsflmaxxa090h10b1.pep
MNDTSKGLEVPGQTVRKTSISEDFWTTSACDMDNSAAQSQGSISSISVINQSLDPHGNANSPSEFVNHGLLLWNRTRQQWIGNTKSENRPQKVREPKLSWNASYESLLGNNKPFPN

SEQ ID NO: 65741 - protein, 100 aa, Gossypium hirsutum
  Clone ID: LIB3146-021-Q1-K1-B2.pep
FADLFLLPLVLDFCIYGSSGCLGCYKEPKSDPLMNDTSKGLEVPGQTVRKTSISEDFWTTSACDMDNSAAQSQGSISSISVINQSLDPHGNANSPSEFVN

SEQ ID NO: 65742 - protein, 198 aa, Gossypium hirsutum
  unsure (1)..(198): unsure at all Xaa locations
  Clone ID: GOSHI-09MAY01-C30181_1.pep
GAVEADPLDQFRKWFDDAGVXLKEPNAMALSTTGKDGKPSSRMVLLKGVDKDGFVWFTNYESQKARQLSENPHAALLFYWDGLNRQVRVEGSAEKVSDEESEQYFHSRPRGSQLGAIVSKQSTVVPGRHVLHQLYKELEEKYSKESLIPKPKYWGGYRLKPERFEFWQGQPSRLHDRLEYSPQETDGKRVWKIVRLAP

SEQ ID NO: 65743 - protein, 119 aa, Gossypium hirsutum
  Clone ID: GOSHI-09MAY01-C130299_1.pep
PNSEDKETQQGNQAEDLKQTPEIKISSLSSSKDSSQGNLDIRTVSLDDVDPIKLLEKEVVIHESDDENYDSHDSSFHMNTSMFKVRAQDEDKNYECTEKTALMFQNSFDKQIPSSLRVA

SEQ ID NO: 65744 - protein, 105 aa, Gossypium hirsutum
  Clone ID: AI055737.1.pep
GNSFINEILYTSSLFSVPPISLIYSGPRFKMLGPFKHDLWNLNLNSFLKPHSLPHFDRPLIILLLLFHSLVQSFQKGPIFSLVIKPFLLPVVLLSNWCAVHIPNT

SEQ ID NO: 65745 - protein, 107 aa, Gossypium hirsutum
  Clone ID: GOSHI-09MAY01-C31981_1.pep
MKTAEATAATTTVLSRGYKRSPKSNGKVNGTAAKKTGVNHGNGGDISNGKASFMKWTLDDVVYVAKYHRLPCFFAAWFLFFIYVEYTLRMVPDSSPPFDLGFVVTRS

SEQ ID NO: 65746 - protein, 179 aa, Gossypium hirsutum
  unsure (1)..(179): unsure at all Xaa locations
  Clone ID: LIB3829-008-Q6-K6-F8.pep
MKTRKGKRFEAFWPSIVMXEWLNIKPKXYDFSEDEVETETETESEDDAYSIKDSRLNGGDDYIHSTLQNQDCSSQISDSSSKVYRLRHRRGKSETLRVQYINTKDVRVTIGTWNVAGRLPCDDLIIDDWLCTEQLADIYIIGFQEVVPLNAGNVLGAEDNRPIPKWEAIIRRTLNKSLK

SEQ ID NO: 65747 - protein, 120 aa, Gossypium hirsutum
  Clone ID: LIB3120-025-Q1-K1-H1.pep
AHAFDPTYSLKDSRLHGSEDDTRRTLENHSECRNQIPDAPSKGYRLGHRRGKSETLRAQYINTKDVRVTISTWNVAGRLPSDDLEIDDWLCTKEPADVYIIGFQEVVPLNAGNVFGAEDS

SEQ ID NO: 65748 - protein, 203 aa, Gossypium hirsutum
  Clone ID: GOSHI-09MAY01-C131979_1.pep
DFKASNILLDAEFNAKLSDFGLAKAGPTGDRTHVSTQVMGTQGYAAPEYVATGRLTAKSDVYSFGVVLLELLSGQRAVDKTKVGVERSLVNWAKPYLGDKRKLFRIMDTKLGGQYPQKGAFTAATLALQCLNSEAKLRPRMSEVLAALEQLEAPKTASKHSQAEQHAVPLPVRRSPMRHHRSPMHLTPSASPLPSHRQSPRVH

SEQ ID NO: 65749 - protein, 349 aa, Gossypium hirsutum
  unsure (1)..(349): unsure at all Xaa locations
  Clone ID: GOSHI-09MAY01-C31971_1.pep
GKSPLSPKGILSQLQNICGQLVQGKEEDAHEFLRYVIDVMQFDCLKEAGVRSSRCSEEETTLIGLTFGGFLRSKIMCVKCQGKSERHERMMDLTVEIEGDIETLEEALHRFTRTEILDGENKYQCGRCNSYEKAKKKLTISEAPNVLTIALKRFQSGKFGKLNKAIQFPEILNLAPYIPRARDNSPIYRLYGVVVHLDVMNAAFSGHYVCYVKNAQNKWFKIDDSKVTSSELGNVLTKGAYMLFYARCSPRAPRSIRSRSKSILSKINSKNYPKSSSTHPDSSGSIESFYSXYNRLQKIXEEDSSSDTSSLFGSNSDNTSSCTDSTQDDSLDSVFGDSDASSSPSSSSS

SEQ ID NO: 65750 - protein, 90 aa, Gossypium hirsutum
  Clone ID: LIB3120-020-Q1-K1-F8.pep
CLLVCLQVHGGVRMWYGRVDVEARAMVVLEAAGGYCIGKRMGLGLGFPRTFKGLGLSGSIFGSRLILVVGPLSIELGLIRVWGLNICLGL

SEQ ID NO: 65751 - protein, 85 aa, Gossypium hirsutum
  Clone ID: LIB3146-016-Q1-K1-E10.pep
PKVKKNEEKRKKIQKAAPFLSLFCCCLLVCLQERGGVRRWYDCVDVEARTMLVLEDAEGCCSAKRMGLGLGFPRNFQRIRPIGLY

SEQ ID NO: 65752 - protein, 145 aa, Gossypium hirsutum
  unsure (1)..(145): unsure at all Xaa locations
  Clone ID: GOSHI-09MAY01-C31471_1.pep
MKLSALQQSYLGRRSNSFRSSGPLDSSSDGAFKSPAAVFWLVLHGLSCLISLLLGFRFSRLVFLLLSTSSTYTSPFHSPTELAKTLDIRSVIPADPVGNVPLPFPNKTATNSRVVVGRHGIRIRPXPHPNPVEVMKAHRIIERVQ

SEQ ID NO: 65753 - protein, 163 aa, Gossypium hirsutum
  unsure (1)..(163): unsure at all Xaa locations
  Clone ID: LIB3585-026-P1-K1-B6.pep
PRVAKGAGKSPAASLWLVLHGLTRLIRPLLEFSLSRAVVLSIPTNSTXIPKRIIHPTELAKTLDIRSAIAADPGGNVPVPLPNKTETNSRVVVGRHGIRIRPXPHPNTVEVMKAHRIIXRVQTEQTLQLGEKDPRKSIVLTPTYARTFQALQLTDVKHSMMLV

SEQ ID NO: 65754 - protein, 74 aa, Gossypium hirsutum
  Clone ID: GOSHI-09MAY01-C31461_1.pep
MSLLSNADWGPIVVAVVLFILLSPGMMFQLPTRTRVIEFGNMCTSGIAILVHAIIYFSLFTILIMAIGIHIHVY

SEQ ID NO: 65755 - protein, 131 aa, Gossypium hirsutum
  Clone ID: AI730532.1.pep
MAAATAQGMDPAVLDDIIRRLTEVRSARPGKQVQLSESEIKQLCVASKDIFVQQPNLLELEAPIKICGDIHGQYSDLLRLFEYGGVPPHANYLFLGDYVDRGKQSLETICLLLAYKIKYPEKFFLLRRNHV

SEQ ID NO: 65756 - protein, 96 aa, Gossypium hirsutum
  Clone ID: LIB3120-019-Q1-K1-E10.pep
MEAATAQGMDPAVLDNIIRRPTEVRSAKLVKQVQLSESEIKQLCVASKDIFVQQPNLLELEAPIKICGDIHGQYSDLLRLFEYGGFPPHANYFLVQ

SEQ ID NO: 65757 - protein, 103 aa, Gossypium hirsutum
  Clone ID: GOSHI-09MAY01-C31751_1.pep
MGFLDLLVVALVPILKVLLVTGVGLFLGIENINLLGPEARDYLNKIVFYVLSPCLLLSTWAETITYKSWVTLWFMPPNVLLTFLRWLSFWVGFFANLTKTPRH

SEQ ID NO: 65758 - protein, 202 aa, Gossypium hirsutum
  Clone ID: GOSHI-09MAY01-C131709_1.pep
QLPFVLFILVCFWVCFLFNISMEEAIVVNKGDDELIDLPPGFRFHPTDEEIITHYLTEKVMNSNFSASAIGEVDLNKCEPWDLPKKAKMGEKQWYFFCQRDRKYPTGMRTNRATEAGYWKATGKDKEIFKGKGCLVGMKKTLVFYKGRAPKGEKSNWVMHEYRLEGKFSYYNLPKGAKDDGVVCGFIRIYRDQKVNPDHHHC

SEQ ID NO: 65759 - protein, 108 aa, Gossypium hirsutum
  Clone ID: GOSHI-09MAY01-C31111_1.pep
IFVGLFFLQQMMAGNPSWWSMHLHPPSQHPSTLLTTPSPSLFPQYVVEYSATSLPDNQELPQSCSQLLSGGFSGEEERLCPSNFQPKKLENWENQILNPSLRVPVVEL

SEQ ID NO: 65760 - protein, 123 aa, Gossypium hirsutum
  unsure (1)..(123): unsure at all Xaa locations
  Clone ID: LIB3543-035-Q1-K1-D7.pep
TKFLLVFFFLQQMMAGNPSWWSMHLHPPSQHPSTLLTTPSPSLFPQYVVEYSATSLPDNQELSQSCSQLLSGGFSGEEERLCPSNFQPKKFXKIWGGVVSPPPFFWSLFLFFCGLVPFGAFLP

SEQ ID NO: 65761 - protein, 117 aa, Gossypium hirsutum
  Clone ID: GOSHI-09MAY01-C31071_1.pep
SKWGFCKRPKCLLHRLVHLRLLGPLLHLKPLSACKSWAVNVKLSNACSSTSLRLRKIGGGVVGVGKEGVQPVRIGEDDNGHDTSLSATAQPEEDEDLQCVRQIQRVLQLLRKNRDML

SEQ ID NO: 65762 - protein, 167 aa, Gossypium hirsutum
  Clone ID: GOSHI-09MAY01-C31251_1.pep
MGELLGLLKVVVVQGKRLVIRDFKSSDPYVIAKLGDQVAKTKVINSCLNPVWNEELTFSLTEPVGVLNLEVFDKDRFKADDKMGHAYLNLQPLVSAARLSHALRVSSGEMTLRKVVPDTDNCLVRESSISLINGEVVQSVWLRLCTVESGEIELKVRLIETRDGPSR

SEQ ID NO: 65763 - protein, 140 aa, Gossypium hirsutum
  Clone ID: GOSHI-09MAY01-C31211_1.pep
MVSLCLNSLPLPPSSCPQKLTETSSSFSNGSIGTALKPIVVNGNPPTFVSAPGRRIVAVGDLHGDLDQARYALEMAGVLSSDGQDLWTGEDAVLVQLGDVLDRGDDEIAILSLLRSLDIQAKAKGGAVFQVNGNHETMNV

SEQ ID NO: 65764 - protein, 84 aa, Gossypium hirsutum
  unsure (1)..(84): unsure at all Xaa locations
  Clone ID: LIB3145-045-Q1-K1-C11.pep
LPSVVGDLHGDLDQARYALEMAGVLSSDGQDLWTGEDAVLVQLGDVLDRXDDEIAILSLVRSLDIQAKAKGGAVFQVNGNHETM

SEQ ID NO: 65765 - protein, 235 aa, Gossypium hirsutum
  unsure (1)..(235): unsure at all Xaa locations
  Clone ID: GOSHI-09MAY01-C131239_1.pep
DAKRSRSDKKAKKRHARRNNLQKSDEPLILEKEITSQREDDTAMSGTDQALSSGSRSPVDSRSRKTPKELTQGSTSDQLLKMSRNLSGQSGDLLKEGYVIAMHARDRPALHLSRQRVKGGGWFLDSMSNVTKRDPAAQFLVVCRSKDTIGLRSFAAGGKLLQINRRMEFVFASHSFDIWESWTLQGSXLEECRLVNCRNPSAFLDVRIEILAAVCEDYGVTRDLNSCHRYSGYSR

SEQ ID NO: 65766 - protein, 110 aa, Gossypium hirsutum
  Clone ID: GOSHI-09MAY01-C31201_1.pep
MAASISGIGIGLGLSCSSNLSKSLHSSQSSGFRVKMTASVEDKKKNYTLQKSEEAFNAAKNLMPGGVNSPVRAFKNPLVDKPIVIDSVKGSHMWDIDGNEYIDYVGSWGP

SEQ ID NO: 65767 - protein, 78 aa, Gossypium hirsutum
  Clone ID: GOSHI-09MAY01-C32901_4.pep
DDPRVPGPGGAFPSGSFVPRRIKLGPCCLSLFHLFPFPLTTWGLALMTSLRQPRSSVCCAPLSLWASASDSPPRSLFD

SEQ ID NO: 65768 - protein, 157 aa, Gossypium hirsutum
  Clone ID: GOSHI-09MAY01-C32901_3.pep
RIPTSAECSPGATENQRLHSLTTLKKLQVVARVNNMVRAWVTRKLLAIAVHTTVLARDRHNIQGKKVSLVSLLYYLEPLPLHFNPLIHCGCRSSSGFLFCFSICFLCFRQNKVRTLLPLVISSFPLPTHNMGLGPHDFSPTAPILSLLCTAVTLVLR

SEQ ID NO: 65769 - protein, 137 aa, Gossypium hirsutum
  Clone ID: GOSHI-09MAY01-C32901_1.pep
KKMRVVNKRDGGLISLSVLFVMAILLIFNAKCFRVAVLAEKFNDTAFWGGHGGGDSVGLDDDDYSSFIGDDMELEMLTDSYIRRVLAGSNGKSTIAFTNNAKKTPSCGKGKQYGPCMGDKKVASNCSTYHRTCQGSS

SEQ ID NO: 65770 - protein, 113 aa, Gossypium hirsutum
  Clone ID: LIB3829-012-Q6-N6-H7.pep
RIPTSAECSPVATENQRLHSLTTLKKLQVVARVNNMVRAWVTRKLLAIAVHTTVLARDRHNIKGKKNKVRTLLPLVISSFPLPTHNMGLGPHDFSPTAPILSLLCTAVTLVLR

SEQ ID NO: 65771 - protein, 144 aa, Gossypium hirsutum
  unsure (1)..(144): unsure at all Xaa locations
  Clone ID: LIB3120-036-Q1-K1-E4.pep
LLSAIKAAVTSFFPLFSTCLVTQLIGSGISLILGLAFSAVVILGFQVHYPXPYFIFLCLVYVIILLFIVEHLQVNWIFAYVVVVVESSWGFEPLKRSRNLIKGMKGVALKIILXFGLVISINTWRSVMTYRNSAADKWTSWLFV

SEQ ID NO: 65772 - protein, 103 aa, Gossypium hirsutum
  Clone ID: uC-gsflnu33B009f05b1.pep
QLIVSGISLILGLAFSAVVILGIQFHYPSPYFIFLCLVYMIILLFIVVHLQVNWIFAYVVVVVESSWGFKPLKRSRNLVKGMKGAALMIILLLGLLSFLIPYA

SEQ ID NO: 65773 - protein, 199 aa, Gossypium hirsutum
  unsure (1)..(199): unsure at all Xaa locations
  Clone ID: GOSHI-09MAY01-C132479_1.pep
PMLAIMLPVFVILVYYFIRKDVYDLHHAILGLLFSVLITGVITDAIKDAVGRPRPNFFWRCFPDGKRVFDPVTKDVMCTGIKSVIKEGHKSFPSGHTSWSFAGLGFLALYLSGKIRVFDRQGHVAKLCIVFLPLLIAALVGISRVDXYWHPWARCFXGVLLGLPVSSFCXSNSFPAPYEVDGXWGLHPYFQNLTRLSKC

SEQ ID NO: 65774 - protein, 216 aa, Gossypium hirsutum
  unsure (1)..(216): unsure at all Xaa locations
  Clone ID: GOSHI-09MAY01-C132419_1.pep
MANSDPEGVDGVRMTXEVWPRTKVEASKCVIPLAVSMAPIPPQSDIRTLPYAPLRCRTCSAALNAYSRVDFLAKIWICPFCYQRNQFPPHYAMISETNLPCELYPQYTTVQYTLQTNPDPNNPSNAPQLQPVFVFVLDTCMIEEELVFAKSALKQAIGLLPEQALVGFVSFGTQAHVHELGFTEISKVYVFKGSKEISKEQVLEQLGLPAAGRRST

SEQ ID NO: 65775 - protein, 194 aa, Gossypium hirsutum
  Clone ID: GOSHI-09MAY01-C132769_1.pep
AFEPTYLYTMEKGYFLLPDAAKSRHNVRTVNISISARHPCFGNRWQQLLINRFVGYDTILMNSLLHQPGKGYLYNFQTKEFYNLTYARELPDGSARVGEYLVTKCGVLMMSLFVFFTTTMSVSFTLRETQTRMLKFTVQLQHHARHRLPTFQLIFVHVIESLVFVPIMIGILFFLFEFYDDQLLAFMGPNSGSG

SEQ ID NO: 65776 - protein, 122 aa, Gossypium hirsutum
  Clone ID: GOSHI-09MAY01-C132649_1.pep
MATTSKNMNVFYRQKKNSSASTGKKSTKSPSPKHAATFGSDITQPPALVSHGGSLDLKDDFDEQEQVLRQFDMNMAYGPCVGITRLDRWERAQRMGLNPPKEIESLLRGGKVKLESLFDGRV

SEQ ID NO: 65777 - protein, 193 aa, Gossypium hirsutum
  Clone ID: GOSHI-09MAY01-C32151_1.pep
QGTGSPAPVPLQMGSVPGPKVPQFVAPTPTPKGFMPVTDTPVVQRPGMSPVQSTSLTQSASIQLAAAPAAPPPTVQTADTSNVPAHQKPVITTLTRLFNETSQALGGPRANPAKKREIEDNSQKIGALFAKLNSGDISKNASDKLIQLCQALDNNDFGTALHIQVLLTTNEWDECNFWLATLKRMIKTRQNVR

SEQ ID NO: 65778 - protein, 204 aa, Gossypium hirsutum
  unsure (1)..(204): unsure at all Xaa locations
  Clone ID: GOSHI-09MAY01-C32081_1.pep
MESQDQSPVVLITGCSQGGIGHALARAFANNNCKVVATSRSLRSMSDLQRDPRFYLQELDVLSEQSVQHVMSNVINKFGRVDVLVNNAGIQCVGPLAEVPLPSMESAFNTNVFGAMRLVQAVVPHMASKKKGKIVNVGSVSALAPGPWSGVYFASKAALHALTDTLRLELSHFGINVINVVPXAVRSNIGXSAIASYNRMPDWN

SEQ ID NO: 65779 - protein, 178 aa, Gossypium hirsutum
  Clone ID: GOSHI-09MAY01-C132029_1.pep
FGYGSPGPIAAAFGENEFFCAIDAGGEQQVICWDKTNKTSSVPTFDLVPSMASLSGGEGFLCGITANNSQAFCWDLLNFGINLVPKAFRYNSYSQIAAGKSHVCAIKGSYFSSSNDFSNVDCWELDRSLGKSNFTTSSFSNHYVNNVIVKNIVSGDGFSCGIAKETTLIFCWGLCHWL

SEQ ID NO: 65780 - protein, 183 aa, Gossypium hirsutum
  Clone ID: GOSHI-09MAY01-C132389_1.pep
LVLLLQKYQSQWKEELAKEQHPHSLPRTSVSCQIKANTPPSFTPLPSSDIPNSLWPRQDDPSTSTNLGDFGASPIIADAAGFRLAPLLMQQDAGPPDNLEVLPRLKSMTWTMENLNSAPANKAAIIHLKLQDYIKSPSGEREVKFQLTKDTIEALLRSLTYISEQLSNMTGTSSEPAQKKQKQ

SEQ ID NO: 65781 - protein, 67 aa, Gossypium hirsutum
  Clone ID: GOSHI-09MAY01-C32201_1.pep
NAKDTSKQEWGMVSAVLFDMHGALCNCENPPRKAAADRFAEMGVQVTAEDFAPFTGMGEANFLGGVA

SEQ ID NO: 65782 - protein, 132 aa, Gossypium hirsutum
  unsure (1)..(132): unsure at all Xaa locations
  Clone ID: GOSHI-09MAY01-C33931_1.pep
PRVRFKVHLGDTPHNLTENDFESLAHRTDGFSGSXISVCVKDVLFEPVRKTQDAMFFFKTPDDMWMPCGPKQPGAVQITMQELAAKGLAAQILPPPISRSDFDKVLARQRPTVSKADLEVHERFTNEFGEEG

SEQ ID NO: 65783 - protein, 112 aa, Gossypium hirsutum
  Clone ID: GOSHI-09MAY01-C33841_1.pep
MAVRMLLGLGVLLLCLAKVSSDLKAEEVITNVGEVGSLVTRGGNRRLMLEIDCGGLCKKRCSQHSRPNRCNRACGTCCLRCKCVPPGTSGNREVCGTCYTGMTTHGNVAKCP

SEQ ID NO: 65784 - protein, 108 aa, Gossypium hirsutum
  Clone ID: LIB3828-028-Q6-K6-C1.pep
MLLGLGVLLLCLAKVSSDLKAEEVITNVGEVGSLVTRGGNRRLMLEIDCGGLCKKRCSQHSRPNRCNRACGTCCLRCKCVPPGTSGNREVCGTCYTGMTTHGNVAKCP

SEQ ID NO: 65785 - protein, 65 aa, Gossypium hirsutum
  unsure (1)..(65): unsure at all Xaa locations
  Clone ID: LIB3148-022-Q1-K1-F9.pep
MLEIDCVGLCKKRCSQHSRPNRCNRACGTCXLRCKCVPPGTSGNREVCGTCYTGMTTHGNVSKCP

SEQ ID NO: 65786 - protein, 63 aa, Gossypium hirsutum
  Clone ID: LIB3272-052-P1-K1-F11.pep
LHLFLQNPPQSISSISHLFPPLVTKEPTSPTLVITSSAFRSDETFARQSSRTPNPRSIRSAMA

SEQ ID NO: 65787 - protein, 109 aa, Gossypium hirsutum
  Clone ID: GOSHI-09MAY01-C33861_3.pep
MDARKRGRREAGFNANGGIKKSKPEMESLSTGVGSKSKPCTKFFSTAGCQFGESCHFLHYVPGGYNAVAQMMNLAPAVPPASRNVTATAAVPHGSGSQVKTRLCNKFSG

SEQ ID NO: 65788 - protein, 216 aa, Gossypium hirsutum
  unsure (1)..(216): unsure at all Xaa locations
  Clone ID: GOSHI-09MAY01-C33861_2.pep
TKPSANPSVEVPIGSGSQVKTRLCNKFSGPEGCKYGDKCHFAHGEWELGKPIAPSQDDPRSMAPLPGRMGSRMEPPPPSGPAATFGASATAXKISVDASLAGAIIGKGGVHSKQICRQTGAKLSIREHESDPSLRNIELEGSFEQIKEASAMVRELISSLGPVPGPAKTAGAHGGQGHPGSNYKTKLCDNFAKGSCTFGERCHFAHGAAELRKSVV

SEQ ID NO: 65789 - protein, 294 aa, Gossypium hirsutum
  Clone ID: GOSHI-09MAY01-C33861_1.pep
MDTRKRGRREAGFNANGGIKKSKPELESLSTGVGSKSKPCTKFFSTAGCQFGESCHFLHYVPGGYNAVAQMMNLAPAVQPASRNVAATAAIPHGSASAVKTRLCNKFSSPEGCKFGDKCHFAHGEWELGTPIAPSLDDPRSMAPLPGRMGSRMEPPPPSGPAATFGASATAKISVDASLAGAIIGKGGVHSKQICRQTGAKLSIREHESDPSLRNIELEGSFEQIKEASAMVRELISSLGPVPGPAKTPGAHGGQGHPGSNYKTKLCDNFAKGSCTFGERCHFAHGARSAEVIV

SEQ ID NO: 65790 - protein, 91 aa, Gossypium hirsutum
  Clone ID: GOSHI-09MAY01-C33801_1.pep
PSTKHALTQNACTWHFTSKIFTRIKCNLTSILTHDEIRDKTKECGLHTSISYFLLFFSSFFSSGISLNYAHISMKMKCGLSSLTIFLGPTH

SEQ ID NO: 65791 - protein, 306 aa, Gossypium hirsutum
  unsure (1)..(306): unsure at all Xaa locations
  Clone ID: GOSHI-09MAY01-C33831_1.pep
NGLYFAMKTMDKGIMLNRNKRIELVHEREILDMLDHPFLPALYASFQTKXHICLIMDYCPGGELFMLLDRQPMKVMKEDAVRFYAAEVVVALEYLHCQGIIYRDLKPENVLLQDNGHVALTDFDLSCLTSCKPQLLIPAADEKIKRQKGQPKPVFMAEPMRASNSFVGTEEYIAPEIITGAGHTSAVDWWALGILVYEMLYGYTPFRGRTRQKTFANVLRKDLKFPRSTQVSLHAKQLIFRLLDRDPKSRLGWREGANEIKRHPFFKGVNWALVRCMNPPQLDVPGALKEDQLSHLQLHDLQTNIF

SEQ ID NO: 65792 - protein, 109 aa, Gossypium hirsutum
  Clone ID: GOSHI-09MAY01-C33541_1.pep
RIAETTEKFLPPLCSPSHLLVSNAKCLDCCRSLHLLLTHWSLQPNCFSLFLSLTTALAALLDTILSTLYFFLHHSSPTHTSIYTSIAVLLWRFFIQPHFRRSCMLIGFP

SEQ ID NO: 65793 - protein, 68 aa, Gossypium hirsutum
  Clone ID: LIB3135-005-Q1-K1-B8.pep
VKKSNEWFEVGNQKFQEKSLKLNLRCFIRCKMSLLGTIITFARNTLRIAAKCANQQELVSRSCISSYA

SEQ ID NO: 65794 - protein, 171 aa, Gossypium hirsutum
  unsure (1)..(171): unsure at all Xaa locations
  Clone ID: GOSHI-09MAY01-C33451_1.pep
HIAAGDLLRAEVAAASENGKLAKEYMEKGELVPDEIVVMMVKERLLQPDSQQRGWLLDGYPRSSSQAAALEDYGIRPDLFILLDVSEDILVERVVGRRLDPLTGKIYHLKYSPPEDDEIASRLTQRFDDTXEEKVKLRLRTHXQNVDAVLSVYKDITVKVNGNEAKEHVFA

SEQ ID NO: 65795 - protein, 207 aa, Gossypium hirsutum
  Clone ID: GOSHI-09MAY01-C33471_3.pep
MVEREGVAVSKSTDAQGKLVVNEAIADHTVCECQYNPYDLRGITLSPSPSPTIRNIQWTAPSPSPAAAPTTGDVVDQSGITIGEALEATVLSVGDKPVDQGDAAAIRVAEARAASSRLTQHSGLGTRAQAAATFNDRASYGHNKITISDVLSDASEKLPTVKAVTNEDAEEVRGAEQRNKADMIATAGGVADTMATAAKLNRDIHTP

SEQ ID NO: 65796 - protein, 169 aa, Gossypium hirsutum
  Clone ID: GOSHI-09MAY01-C33471_2.pep
MNQRQAIRPQAADQAVDYGDVFGVTGATPSFPTPTGAVGESGITIGEALEATAISVGDKPVDRGDAAAIRAAEARAAGGNVTQRSGLGAKAQAAVNFNDRVAYDYNKITISDVLSDASGKLPHDKAVTSEDADGVRGAELSNSTEAMPTPGGVADTMATAARVNRDDKP

SEQ ID NO: 65797 - protein, 169 aa, Gossypium hirsutum
  Clone ID: GOSHI-09MAY01-C33471_1.pep
MNQRRPIRPQAADQAVDYGDVFGVTGATPSSPTPTGAGGQSGITIGEALEATAISVGDKPVDRGDAAAIRAAEARAAGGNVTQRSGLGAKAQAAVNFNDRVAYDYNKITISDVLSDASAKLPHDKAVTSEDADGVRGAELSNNTEAMPTPGGVADTMATAARVNRDDKP

SEQ ID NO: 65798 - protein, 142 aa, Gossypium hirsutum
  Clone ID: GOSHI-09MAY01-C33411_1.pep
MGSISKSFLLLALLAATVLLISSEVAARDLAETTTEKNNGEVATETTEAEAQVEEAKYGYGGYGSRGGYGGYGGRGGYGGYGGRGGYGGGYGGRGRGRGRGGYGGGCAYGCCHSDYYGRGCRRCCAYVGEAVNVETHADPLY

SEQ ID NO: 65799 - protein, 109 aa, Gossypium hirsutum
  Clone ID: GOSHI-09MAY01-C33771_2.pep
MGSISKSFLLLALLAAVVLLISSEVAARDLAETTTENNNGEVATETTQPELEDKRSAYNGRGHGGKGGYGGGHGGYGGGHGGYGGGHGGYGGGHGGYGGGHGGYGGGGH

SEQ ID NO: 65800 - protein, 150 aa, Gossypium hirsutum
  Clone ID: GOSHI-09MAY01-C33771_1.pep
HASGKKEIKYGSISKSFLLLALLAAVVLLISSEVAARDLAETTTENNNGEVATETTQAELEDGRGGYNGRGHGGKGGYGGGHGGYGGGGHGGYGGGHGGYGGGGHGGHGGHGGGYKGGCAYGCPRARHHGRGCQRCCSYAGEAGEVETHA

SEQ ID NO: 65801 - protein, 80 aa, Gossypium hirsutum
  unsure (1)..(80): unsure at all Xaa locations
  Clone ID: LIB3165-033-P1-K1-A12.pep
MGSISKSFLLLALLAAGVLLISSEVAARDLAETTTENNNGEXATETTQPELEDKRSAYNGRGHGGKGGYGGGHGGYGGDH

SEQ ID NO: 65802 - protein, 52 aa, Gossypium hirsutum
  Clone ID: LIB3146-051-Q1-K1-C11.pep
MVVVATDVYGGGGHGGGDKGGCAYGCCRSNYGRGCQRCCSYAGEAVEVETHA

SEQ ID NO: 65803 - protein, 54 aa, Gossypium hirsutum
  Clone ID: LIB3493-004-P1-M1-H8.pep
HASVLNENASLIWGCKWKYKAIKLCFYFFPIWLLRSCSKRTTAELIKFKAYLLS

SEQ ID NO: 65804 - protein, 53 aa, Gossypium hirsutum
  Clone ID: GOSHI-09MAY01-C33641_1.pep
MASPPGPYSGTSTLALVARASAFSFGLVYGSIKLKYLKAKARSQRKAEAKAHH

SEQ ID NO: 65805 - protein, 80 aa, Gossypium hirsutum
  Clone ID: uC-gsflmaxxa004d09b1.pep
KSGTILFLCFIPTPNSIHSCKPAMNKNHPCFSGEPLLQLSFETLPWREQECWCRSMVQEAAPSICFVWEVGDGVSDQMKQ

SEQ ID NO: 65806 - protein, 151 aa, Gossypium hirsutum
  Clone ID: GOSHI-09MAY01-C33041_1.pep
MQVLRGGIRQSKRINDNPESSASLVPTARNAAPNRGRGRGRGRGRGRGGMNPEENQKLVGPSACGRGCNGINLPVRQVVEKSAEKPVAVKEEGSTSSLPERVQLGNSPVYKLDRKLGKGGFGQVFVGRRISGGTGCSGPDAFEVALKFEHQ

SEQ ID NO: 65807 - protein, 310 aa, Gossypium hirsutum
  Clone ID: GOSHI-09MAY01-C33391_1.pep
MGKNTLPPGFRFHPTDVELVMYYLKRKVLGQKLLLNVIAKVDVYKFAPWDLPDMSCMKTGDLKWYFYCPIEKKYARGDRVNRATIFGYWKATGKDRPVKYNDEVVGMIKTLVFHKGKAPRGDRTDWVMHEYRLEEKILADRGPVQDMYMLYVVFKKDGLGPRNGSQYGAPFKEEEWSDDEQADVPGAGARAGPSTVAVGGDNSSCVPESVCAGPSVESSGWCTQPSMGHTNGDVNVTTAIDTNAYAAPTCADAPEVPVVAVAEDVPTLLEAPQPALVPQDQESNDNMLSMLECFFEEGAFGTHESQRRGN

SEQ ID NO: 65808 - protein, 108 aa, Gossypium hirsutum
  Clone ID: GOSHI-09MAY01-C33381_1.pep
MASSKLQALWNHPAGPKTIHFWAPTFKWGISIANVADFAKPPEKLSYPQQIAVTATGIIWSRYSTVITPKNWNLFSVNIAMAGTGIYQLTRKIKHDYFSEAEPAVASE

SEQ ID NO: 65809 - protein, 120 aa, Gossypium hirsutum
  unsure (1)..(120): unsure at all Xaa locations
  Clone ID: LIB3828-024-Q6-K6-B1.pep
IWGVVGLQTMWNHPAGPKTIHFWAPTFKWGISITNGADFAKLFFXLSYPQQRGGGATGIIRARYTTGRAAKNWNLFSVNIAMAXTGIYQLXRKIKHDYFFEAKPCIASDMMMKSSKILCF

SEQ ID NO: 65810 - protein, 107 aa, Gossypium hirsutum
  Clone ID: uC-gsflnu33B016b09b1.pep
MASWKLQALWNHPAGPKTIHFWAPTYKWGISIANAADFAEPPEKLSYPQQIAVTATGIIWSRYSTVITPKDWNLLSVNIAMAGTGIYQLTRTIKHDDFSEAEHSRCI

SEQ ID NO: 65811 - protein, 154 aa, Gossypium hirsutum
  Clone ID: GOSHI-09MAY01-C33351_1.pep
MKDSSGDYPSEKRSKRENDQSYIPSQNPQQASVPPFSHPESHQHNVVTTTQQLALNEVPPPPSSSPPPLPPLPPMPPYAVPQYMPTAGSINGVTYSYSMTSQQPSLPGYSIAGAAMSGISLFATSSTNSYQSFQSSEGFHNQPSSLPTAPISRQ

SEQ ID NO: 65812 - protein, 312 aa, Gossypium hirsutum
  Clone ID: GOSHI-09MAY01-C33341_1.pep
PRVRPRVRPRVRVILGKPNVSDIFPVLARFDIQGLEKEMTKIVNSFDKLFNSMIEERELFSNKLSKEDGNTEAKDFLQLLLDLKQKNDSGISITMNQVKALLMDIVVGGTDTTSTMMEWTMAELIANPEAMKKVKQEIDDVVGSDAAVDETHLPKLRYLDAAVKETFRLHPPMPLLVPRCPGDLSNVGGYSVPKGTRVFLNIWCIQRDPQLWENPLEFKPERFLTDHQKLDYLGNDSRYMPFGSGRRMCAGVSLGEKMLYSSLAAMIHAYDWNLADGEENDLIGLFGIIMKKKKPLILVPTPRPSNLQHYMK

SEQ ID NO: 65813 - protein, 107 aa, Gossypium hirsutum
  Clone ID: GOSHI-09MAY01-C33361_1.pep
MGSLMAGWDSPVSESDPTSVIRQRNRSLTKEEIEAYWKSKKQTEEEHLKATFSPSYTCTHSYLETPLEEHGSKNLRSNSSQEDAETSLENIIKKNGWWTRSNWAFLN

SEQ ID NO: 65814 - protein, 60 aa, Gossypium hirsutum
  Clone ID: GOSHI-09MAY01-C33311_1.pep
VKGYMILERDDDVGFFLPGSFRQVDQQGAGVNVGHAQSANACLIPMVPTPPQAYTSPDLT

SEQ ID NO: 65815 - protein, 121 aa, Gossypium hirsutum
  unsure (1)..(121): unsure at all Xaa locations
  Clone ID: GOSHI-09MAY01-C33321_1.pep
KEDKERRDAIDXKNQADSVVYQTEKQLKELGDKVPGPVKEKVEAKLQELRDAISGGSTQGMKDAMAALNQEVMQLGQSLYNQPGAAGGPGGPAPGGETGPSDSSNKGPDGDVIEADFTDSK

SEQ ID NO: 65816 - protein, 40 aa, Gossypium hirsutum
  Clone ID: LIB3135-002-Q1-K1-D9.pep
SKKYSLKPHNGSVNLICECTQYLDLARRSPFMYFSSLFFF

SEQ ID NO: 65817 - protein, 68 aa, Gossypium hirsutum
  Clone ID: GOSHI-09MAY01-C28981_1.pep
NSFVFLLNLFSLVFSRKPFFQSLQLIKYLFFLHGCHTRDLATLIFFSLLIKRIQENKLLYVKIKSRKL

SEQ ID NO: 65818 - protein, 54 aa, Gossypium hirsutum
  Clone ID: GOSHI-09MAY01-C28501_1.pep
GKCYYSLPYLSLAFDPLLLLPFSLIPTKNKKRCSVLTPLAPFLPCIKIKTGFQH

SEQ ID NO: 65819 - protein, 57 aa, Gossypium hirsutum
  Clone ID: GOSHI-09MAY01-C28531_1.pep
VTKYYTAIISIPFTRIDSIMQIQTQRTKNIKHKVLRPHNQTLFITINKMESIGRKRK

SEQ ID NO: 65820 - protein, 220 aa, Gossypium hirsutum
  Clone ID: AW187426.1.pep
ARLVCKKWRHLTTTPRFLQMRREGSCQKPWLFLFGAVKDGYCSGEIHALDVSQDQWHRICADILRGRFMFSVASMQDDIYIVGGCSSLTNFGRVDRSSFKTHKGVLVFSPLTKSWRKASSMKFARSMPILGISEVCSDFSVIQSHQNRHDRQFPRSRVGGVSDVYEDPHRLSLKLQYRNAFDENGPSLLPNKRSYKCIRTRNEQANMKGCKRFVSIAVGG

SEQ ID NO: 65821 - protein, 103 aa, Gossypium hirsutum
  Clone ID: uC-gsronu33B044d09b1.pep
LILPLTSLMNARLVCKKWRHLTTTPRFLQMRREGSCQKPWLFLFGAVKDGYCSGEIHALDVSQDQWHRICADILRGRFMFLVASMQDVFYIVWHVSFFFLPNF

SEQ ID NO: 65822 - protein, 157 aa, Gossypium hirsutum
  Clone ID: GOSHI-09MAY01-C28421_1.pep
MDASQKTILVTGGAGFIGTHTVVQLLNEGFKVSIIDNLDNSVIEAVDRVKELVGPELSKKLQFNLGDLRNRDDLDKLFSKTKFDAVIHFAGLKAVGESVGNPRRYFDNNLIGTINLYEIMAKYNCKKMVFSSSATVYGQPEKIPCVEDFELKAMNPY

SEQ ID NO: 65823 - protein, 218 aa, Gossypium hirsutum
  Clone ID: GOSHI-09MAY01-C28751_1.pep
KNTPLADAEGAKKHNMIELLKSHGGLSYGQNGSHFESKPVPPPLPNKCDWEIDPSELDFSNSNIIGKGSFGEILKASWRGTPVAVKRILPSLSDDRLVIQDFRHEVKLLVKLRHPNIVQFLGAVTDRKPLMLITEYLRGGDLHQHLKEKGALHPSTAINFALDIARGMAYLHTEPNVIIHRDLKPRNVLLVNSSADHLKVGDFGLSKLIKVQNSHDVY

SEQ ID NO: 65824 - protein, 167 aa, Gossypium hirsutum
  Clone ID: GOSHI-09MAY01-C28111_1.pep
MLEMCTRPLEMCFGGGGGGGDELLWHMDLKPYVSGDYSIAVVQANSSLEDQGQVFTSPSVTYVGVYDGHGGPEASRFITQHLVPFLHKFASEHGGLSAEVIKKAFDATEEEFLHLVKRSWPARPQIASVGSCCLVGAIANDVLYVANLGDSRAVLGRRVSPNGPNNQ

SEQ ID NO: 65825 - protein, 232 aa, Gossypium hirsutum
  Clone ID: GOSHI-09MAY01-C28071_1.pep
MDFLNWLMYFVFYLILFQAFLLITRRKLVRSHKLPPGPPTIPIFGNLFQVGDKPHRFLAKLAKIHGDIMTLKLGHTTTVVFSSATMAKEILQKHDAVSCNRTIPDALRALQHHEAGLPWMPVSTTWRNLRKICNLHIFATHKLDANQYLRRSKVEQLLAGVRESSLIGEAIEIRQAAFKSTLSLISNTMFAIDLADSTHTSEECREIVQGIMDELGKPNFGDYFPIAIRLVA

SEQ ID NO: 65826 - protein, 95 aa, Gossypium hirsutum
  unsure (1)..(95): unsure at all Xaa locations
  Clone ID: uC-gsflmaxxa090d03b1.pep
MDFLNWLMYSGFYLILLQAFLLITRRKLVRSHMVPPGPPTIPIFGNLFQVGDKPHRFPAKLVKIHGDIMTLKPGHTTTRVFSSATMAXKEILQKA

SEQ ID NO: 65827 - protein, 90 aa, Gossypium hirsutum
  Clone ID: GOSHI-09MAY01-C28371_1.pep
QRYWTAGGALRNVPVGAGRRKAKPPGPGLGLGGFQEGCLYDGSSAVQQFEVEGMVLDEWHVAATNGGGFQQVFPMKRRRISCSAAQLQPY

SEQ ID NO: 65828 - protein, 76 aa, Gossypium hirsutum
  Clone ID: GOSHI-09MAY01-C28211_1.pep
IFLCSSPSTCFPLCRKLLLSDFILWDFSLKAECLGKQDFLHQQTPNHNSLQEQKEKNKKKISNLHPPLSTFLSSLT

SEQ ID NO: 65829 - protein, 290 aa, Gossypium hirsutum
  Clone ID: GOSHI-09MAY01-C28201_1.pep
FPRAGNITTTFVDIGDLEAVKNAIVEGKTKVLYFESMSNPTLTVANIPALSRIGHEKGTTVVVDNTFAPMVLSPARLGADVVLHSISKLISGGADVIAGAVCGPASLVNSMMDLHQGALMLLGPTMNAKVAFELSERIPHLGLRMKEHCRRAMEYAIRMKKLGLKVIYPGLEDHPQHELLKSMANKEYGYGGLLCVDMETEERANRLMHHLQNYTQFGFMAVSLGYYETLMSCSGSSTSSEMNAEEKELAGISPGLVRMSIGYIGTLEQKWSQLEKALSRMQDGTLLNKN

SEQ ID NO: 65830 - protein, 112 aa, Gossypium hirsutum
  Clone ID: GOSHI-09MAY01-C129889_1.pep
LGSSLKPGGTARQQGVYFYGSKHNWESCSFCFLQRWNGERSNPCKISESREGTWKAKRELQMKLKGKIGRGPQPKREGPQPRFMSQRNQCTCNCKQTSRMLLGMIQSHTTTP

SEQ ID NO: 65831 - protein, 65 aa, Gossypium hirsutum
  Clone ID: GOSHI-09MAY01-C129899_1.pep
LQLTRYCLSMFKTSPYKQHKIHYIMILTYNQIQTMAENYMHTHTHNKHPSILYPYKKKCITEPTK

SEQ ID NO: 65832 - protein, 166 aa, Gossypium hirsutum
  Clone ID: GOSHI-09MAY01-C129829_1.pep
SFIDYFLSKICNDQYPSSMSISRSLQLILSTIKGIDFLEFRPSEIAAAIAISVSGDMQTLSIDKAVSSFAFVGKGRVLKCVELMKDLTFINGAAAKTANVATQHSASTVPQSPIGVLDAAACLSYKSDEITVGSCANSSHSSPDIRRRKQDHDDNNNKASEHGFKS

SEQ ID NO: 65833 - protein, 96 aa, Gossypium hirsutum
  Clone ID: AW187097.1.pep
FLVSNICFCLLLFSVDFCQGFLFSYSKSHCYVLLKLWISVWASVLAFGPVPSLVYGLLGFYPAWRLSDPICKCTKTKVSLLWTSAIHINPRYLSTI

SEQ ID NO: 65834 - protein, 138 aa, Gossypium hirsutum
  unsure (1)..(138): unsure at all Xaa locations
  Clone ID: AW187151.1.pep
NPLIHWRFISWMNMYLTLFLSFSSLFLVSNICFCLLLFSVDFCQGFLFSYSKSHCYVLLKLWISVWASVLAFGPVPSLFYGLLGFYPAWRLSDPICKCTKTKVSLLWTSAIHINPRMLLMDSLTKISFXRCCMRGMIL

SEQ ID NO: 65835 - protein, 180 aa, Gossypium hirsutum
  Clone ID: GOSHI-09MAY01-C29291_1.pep
KNCPDLVVFRLCIMGRHRADPVTGEPMDDGFGAIVMNCKKLTRLAVSGLLTDKAFGYIGRHGKLVRTLSVAFAGDSDMALKYVLEGCPQLQKLEIRDSPFGDAALRSGLHHYYNMRFLWMSSCRLTRHGCQEIARAMPRLVVEVIRSADEEEMDDVVGTLYMYRSLEGPRTDAPKFVTIL

SEQ ID NO: 65836 - protein, 181 aa, Gossypium hirsutum
  Clone ID: GOSHI-09MAY01-C129239_1.pep
FLGRISIRRNQVNAMEGYHEQEIEDLELFQKQLSDRFAELLSAPDDAPTEAFLSISWIRKLVDVFLCCETECKAILLMERDAAQISKPPLDRLIPELLERVVKAMDICNAVTNGLELVRHCQKLAEIAVSALEQKPFGEGQARRAKKALVSLMSAMHVDDKESSVQKTAERSWSFGRRSGN

SEQ ID NO: 65837 - protein, 227 aa, Gossypium hirsutum
  Clone ID: GOSHI-09MAY01-C24951_1.pep
TENQNTYGTIDENKRFEHALGIYGDDVPDRWIKVAEMIPGKTVLDVIKQYRELEEDVYDIEAGRITIPGYSTSYFTLELVDNHDFDGYRKRPNGAKGHDHERKKGVPWTEDEHRRFLMGLVKYGKGDWRNISWNFVASKTPTQVASHAQKYYQRQLSGGKDKRRPSIHDITVLNLTSTTTFSDHRKALSVNQSNVLALQHKIASMSKAVSLNGSDTSFDSENGNRFT

SEQ ID NO: 65838 - protein, 169 aa, Gossypium hirsutum
  Clone ID: GOSHI-09MAY01-C24941_1.pep
MPPAPSASPPTPSHPTTHHVLQALLASSRPFLRGELQHVDKNLPNLVAVLRSVGAGECWHKHGSFLEHLVDIYRILKIWKAQDSVCLCGLFHSAYSNSYVNLAIFDPSTGRDVVRGHVGDAAERLIHLFCVVPRQPLIHDDLLFKYTDSEIVEHLAASEVSLKNAKEKG

SEQ ID NO: 65839 - protein, 44 aa, Gossypium hirsutum
  Clone ID: GOSHI-09MAY01-C24961_2.pep
ITILKGSIFYLFPPILATLLFGPNLTIHPFYRRKPCIWLMVLNA

SEQ ID NO: 65840 - protein, 69 aa, Gossypium hirsutum
  Clone ID: GOSHI-09MAY01-C24961_1.pep
MSPFSITRKKTPFQKHREEEEAKKKRAEDETARLYEEFVASFQGDNTPGSKAFVRGGTINPNERLKSDS

SEQ ID NO: 65841 - protein, 74 aa, Gossypium hirsutum
  Clone ID: LIB3828-001-Q1-N6-A2.pep
LHLSVETWKPDSRRMVHNPWIKGKKDNICYSDKLFWWNGQASHLRAVKEGTQSFLCLAQNPFFLAESFSDTDLP

SEQ ID NO: 65842 - protein, 91 aa, Gossypium hirsutum
  Clone ID: LIB3146-006-Q1-K1-B2.pep
HIMSRNKEISSSPWTLKIPLPLDDHITYRIPNYTFLLCSNSKLVALKTHALPTTSLSATKITENTKGAQVIRWVSHQCRKFSMAILLTVLP

SEQ ID NO: 65843 - protein, 300 aa, Gossypium hirsutum
  Clone ID: GOSHI-09MAY01-C24821_1.pep
MEVEVDEKDLKSAGAELLKDGRRGLRIHGWEIESLKRSILNSSTLQQWEQKLHTSHFPEMIFGESCLVLKHLGSGTKIHFNTFDALAAWKQEGLPPVEVPAAAKWKFRSKPFQQVILDYDYTFTTPYCGSETVELELDSDKHGSGGISGGDSGLHWEDCKEQLDMAALTLREPILFYDEVVLYEDELADSGVSLLTVKVRVMPSSWFLRRRRWLRVDGVLMRLRDTRLHCVFDESARPVILRERCWREGTFEALSAKGYPTDSASYSDPSIISQRLPVIMHQTQKLVVPGNVNCHAQQIH

SEQ ID NO: 65844 - protein, 124 aa, Gossypium hirsutum
  unsure (1)..(124): unsure at all Xaa locations
  Clone ID: LIB3146-001-P1-K2-F12.pep
PTRPPTRPIGFRFRRKYLLLWPVIIFSLLVFLSQVAYLVRWAVGGYKQSVGDAWWLKLIGFMIIQSXRSPTVIYFLVTQLLVLVVALLDIHGNRFGLVPXRYTCWGHFLTVVEQLGLKYAWSRK

SEQ ID NO: 65845 - protein, 115 aa, Gossypium hirsutum
  unsure (1)..(115): unsure at all Xaa locations
  Clone ID: LIB3828-024-Q6-N6-B3.pep
AVGGYKQSVEDTWWLKLIGFMIIXSWRSPTVIYFLVTQLLVLVVALLDIHGNRFGLVPWRYTCWGHFLTIVEQLGXSHLKVASCLLLPAIQLVLGISHPSWISLVTPLNLNPSPN

SEQ ID NO: 65846 - protein, 184 aa, Gossypium hirsutum
  Clone ID: GOSHI-09MAY01-C24521_1.pep
DAETFVSINRYSFNWSVNNTSVSPDGKLLAVLGDSVECLIVDAQSGKITNSLKGHLDYSFASAWHPDGHILATGNQDTSCRLWDIRNLSKSLAILKGRMGAIRGVKFTSDGRFLAIAEPADFVHIFDTKLGYVNCQEIDIFGEIAGISFSPDTEALFVGVADRTYGGLLAYNRRRYNQYLDSML

SEQ ID NO: 65847 - protein, 198 aa, Gossypium hirsutum
  Clone ID: GOSHI-09MAY01-C24741_1.pep
MALSLTISNGISSSSNANGGPILPNNQLPFGLPHRRNVLFPISPRTFHLTSAAKKFSSRTGRFDSKNRRSNLTTKEQDEEQELKRTAEIEESNIAIGVGLEDVGGSSSEISADGKPFPDLPGLQPDLWEGPKWDVLGFLVQYLWAFGIVFALIACGIAVATYNEGATDFKETPAYKESIQSQELLEQPDASNQNVFES

SEQ ID NO: 65848 - protein, 115 aa, Gossypium hirsutum
  unsure (1)..(115): unsure at all Xaa locations
  Clone ID: GOSHI-09MAY01-C24731_1.pep
AGPTGTQLPGPFTRLQLPVVHAGTPPEPYPTPIPDPSPPDPDPIPTPVPGPFQLFPPDPIPTPYPTLFPDXPPFPVPNPIPVPNWFPFPIPYPIPVPNWFPFPVPYPMPYPMLFP

SEQ ID NO: 65849 - protein, 177 aa, Gossypium hirsutum
  Clone ID: GOSHI-09MAY01-C24651_1.pep
AHASADAWAGASISGGLKANYSITAAKGMYYSARGPDPEDSSLDDADIMKPNLIAPGNLIWAAWSSLGTDSVEFQGESFAMMSGTSMAAPHIAGLAALIKQKFSHFSPAAIASALSTTASLYDKSGGPIMAQRAYANPDVNQSSATPFDMGSGFVNATAALDPGLILDSTYEDYMSL

SEQ ID NO: 65850 - protein, 143 aa, Gossypium hirsutum
  Clone ID: GOSHI-09MAY01-C24671_1.pep
MSFRGGNASSGMGVAEHSKSTYLELQRKKVFRYVIFKIDEKKKEVIVEKTGGPTESYDDFAASLPESDCRYAVYDFDFVTSENCQKSKIFFIAWSPSVSRIRSKMLYATSKDRFRRELEGIHYEIQATDPTEMDLEVIRERAH

SEQ ID NO: 65851 - protein, 143 aa, Gossypium hirsutum
  Clone ID: LIB3543-055-Q1-K6-E12.pep
MSFRGGNASSGMGVAEHSKSTYLELQRKKVFRCGGGKIDEKKKEVIVEKTGGPTESYDDFAASLPESDCRYAVYDFDFVTSENCQKSKIFFIAWSPSVSRIRSKMLYATSKDRFRRELEGIHYEIQATDPTEMDLEVIRERAH

SEQ ID NO: 65852 - protein, 144 aa, Gossypium hirsutum
  Clone ID: GOSHI-09MAY01-C24151_1.pep
TKKKIFFVMEHVRGGELFAKVYKGKLKEHVARKYFQQLISAVDFCHSRGVSHRDLKPENLLLDENEDLKISDFGLSALPEQLLNDGLLHTQCGTPAYVAPEVLRKKGYDGSRADIWSCGVDLYVLLARFLPFQDENMMTMYRKV

SEQ ID NO: 65853 - protein, 169 aa, Gossypium hirsutum
  Clone ID: GOSHI-09MAY01-C24031_1.pep
MRKGRGAAAAADAAMKPAVEANGSVEELRSRGAWKRPWGRFAAEIRDPLKKTRVWLGTFDSAEEAALAYDASAITLRGNKAKTNFPFNSSDFPAFGIDRHHRRNNEGFIADGHRLHQTGGDYEDPEVNPQRPARSSMSSSVESFSGPRPTQPPRKPSDFEAVSTKKYHP

SEQ ID NO: 65854 - protein, 113 aa, Gossypium hirsutum
  Clone ID: GOSHI-09MAY01-C25941_1.pep
TTEFRLPLTFSDIIWFKFPPVERLFFYQFDELTPACFNSVILPKLKRSLSLTLVHYLPLAGNLKWPPNEPKPIILYTPNDGVSLTVAHSDADCNILCSDGVYDAAELHAIKPD

SEQ ID NO: 65855 - protein, 115 aa, Gossypium hirsutum
  Clone ID: GOSHI-09MAY01-C25891_1.pep
EAEMLLVENLGSFEPNHEFIEKFLNYKELLPADVIEIAFQSRYDRKLTELGSGYVNSSNASVANFDPEVGVGLDGSSTGGGMKKGKKGKKVSPAVLGFNVVSNRIMMGEIQTVED

SEQ ID NO: 65856 - protein, 52 aa, Gossypium hirsutum
  Clone ID: LIB3048-023-Q1-L1-G2.pep
EAEMLLVENLGSCDRDHEFIEIFLNYNELLPADVIDIVSQSLYYIKLTELRC

SEQ ID NO: 65857 - protein, 119 aa, Gossypium hirsutum
  Clone ID: GOSHI-09MAY01-C25811_1.pep
EGDHHQQQLRRGPWTIEEDSVLVHYIARHGEGRWNFLAKHAGLRRTGKSCRLRWLNYLKPDVKRGNLTAEEQFLILELHSKLGNRWSKIAQHLPGRTDNEIKNYWRTRVQKQARQLNID

SEQ ID NO: 65858 - protein, 99 aa, Gossypium hirsutum
  unsure (1)..(99): unsure at all Xaa locations
  Clone ID: GOSHI-09MAY01-C25801_1.pep
MAVEKTLGEKLFSIXRKISSQAVTNCRISSTTIQNRISKNAGKGTAEMAPDPGDLNGAGNGVFKRFLHKGSAVSPAMRTLPRGKDLIEKLKEIDMSKDR

SEQ ID NO: 65859 - protein, 207 aa, Gossypium hirsutum
  unsure (1)..(207): unsure at all Xaa locations
  Clone ID: GOSHI-09MAY01-C25831_1.pep
LTSPSFLASKSPLLPRRHLLPPSLKPITAVHSADPTKSTKSTAAAASTSSPSIPTQWSLESWKSKKALQLPEYPDQNDLVSVLETLSTFPPVVFAGEARSLEEKLGQAALGNAFLLQGGDCAESFKEFDANNIRDTFRVLLQMGVVLMFGGQMPIIKVGRMAGQFAKPRSDPFEEKDGVKLPSYRGDNINGDSFDEKXKIPDPHRMI

SEQ ID NO: 65860 - protein, 264 aa, Gossypium hirsutum
  Clone ID: GOSHI-09MAY01-C25591_2.pep
STRASTRPRTRSSYLNYHVQMATIAAGAYGLTQFRMRAFFWGARPNQKLPQYPLATHDLVLRGVIPVEFEMNTVGWEEGKKIELEKKLLLEDAISDLPSVGNYEDKDEMDYDKDPKTEFQRFIRLRREEMPGFSSLNAKPTKHLLYDHRPLQLNTDDYQRVCRVPKRKGANFRDFPGVIVNSGNKVEWDPNVERVYLESGKPLVPDYAMSFVGGSSSKPFARLWWDETVPTVVTRAEPHNQAILHPVQDRVLSIRENARLQGFP

SEQ ID NO: 65861 - protein, 170 aa, Gossypium hirsutum
  Clone ID: GOSHI-09MAY01-C25591_1.pep
FYQLYGAFFIDFPGVIVRGVFKVRWDPNVERVYLESGKPLVPDYAMSFVGGSSSIPFARLWWDETVPTVVTRAEPHNQAILHPVQDRVLSIRENARLQGFPDYYKLFGPVKERYIQVGNAVAVPVSRALGYALGLAYQGVVSNDEPLTKLPPRFPNISEKASSDSSQDNS

SEQ ID NO: 65862 - protein, 145 aa, Gossypium hirsutum
  Clone ID: GOSHI-09MAY01-C25581_1.pep
MEYQKVFLQLLKTKMAVSSFRSGRLPLFHHPQLPNKAASAACTTRSIGGFKKPNGRFSSNPKCGRALFLFAQYSQPSQAQTQQDRFSSRLQSSLENLPKLLEDIVQTSISTGPRGALRLAQGIQAFGGVGGGWLADVSRSTNEPT

SEQ ID NO: 65863 - protein, 238 aa, Gossypium hirsutum
  Clone ID: GOSHI-09MAY01-C25491_1.pep
GPTKWSVIAKSLPGRIGKQCRERWHNHLNPDIKKDAWTLEEELALMNAHRIYGNKWADFAKVLPGRTGNAIKNHWNSSMKKKLDFYLATGKLPPVVKIVLKNETKDIETPAATENLLVCSKKESDSTAQTSSGTIDICKPEEDGKDQLESSTPVQDMAATSSIIPSESVETESAEFKPQSFDANPCSCNSVSVVKFESRRTSSAIVKDKVVETQLRSDTPTYWPFMYEPPRLQGGTSL

SEQ ID NO: 65864 - protein, 86 aa, Gossypium hirsutum
  Clone ID: GOSHI-09MAY01-C25431_1.pep
GPHHGPFHAIHRLQVSKQRHAHKWLYCHLSKQKTVNFLEKRAMHLLKTALKDLLAEKHRCIDILRRRKTDEGLRTRESWQCLHLRP

SEQ ID NO: 65865 - protein, 138 aa, Gossypium hirsutum
  Clone ID: GOSHI-09MAY01-C25751_1.pep
LGIYSGSTCKQGEIEAVVIATGVHTFFGKAAHLVDTTNQVGHFQKVLTAIGNFCICSIAVGMVIEIIVMYPIQDRDYRPGIDNLLVLLIGGIPIAMPTVLSVTMAIGSHRLSQQGAITKRMTAIEEMAVMDVLCSDKT

SEQ ID NO: 65866 - protein, 94 aa, Gossypium hirsutum
  Clone ID: GOSHI-09MAY01-C25771_2.pep
RYHFICLFLSIDFIAAENLSQNKKPHFFPYFPPFLHFFLLNLFVSKTPILKKYILIWFLESGFSLLGRVLNISNGCFTSWVLYWRTFFVHLWKE

SEQ ID NO: 65867 - protein, 156 aa, Gossypium hirsutum
  unsure (1)..(156): unsure at all Xaa locations
  Clone ID: AI054583.1.pep
YLFLLDVAKRQNQKQRVKGSAIRVQVPTNKSYNLIGNFYTQRIQHCARGILETSTVFQKSNTKFLVNATSGHPLESEPKAYPNTPWNSAKNALDASYSVSRSHTVIGTALIIFSDSLLAVQXLSEYSSLIINGVLXRLYCCSFLNIYIVGYIFVEL

SEQ ID NO: 65868 - protein, 132 aa, Gossypium hirsutum
  Clone ID: GOSHI-09MAY01-C25651_1.pep
PNVSQETEPILNEDHSSVHDEQESQSSGEVESVNILLAENRDVHHDVVEIILRDGENQLGTESNLSGAPPISLLEFNSREIHSRPELVTEDSSSSSSSSSSSSSLSSSETDEEISDVKEERFASFEPRDHET

SEQ ID NO: 65869 - protein, 158 aa, Gossypium hirsutum
  Clone ID: GOSHI-09MAY01-C25621_1.pep
VDLKSHKDVALNGDLEETIKSNHAEKKPPSHEMSQSRHPSTLQGKCEEKMARAMCNGNKKSQLADSAQEDTGIGNTTEITVSHKFENDEATQYGSEGRKNKLDEIHGLSSNYVLDNLIRNHMALLEGGNINPENDRGEAFCSFPARRNQLIPMRQWMT

SEQ ID NO: 65870 - protein, 82 aa, Gossypium hirsutum
  Clone ID: LIB3149-004-P1-K1-A10.pep
THAHGQDKGNQCHILKYKSIPSGPNGVIDASFGFDSSYDSFSVTSSVSSSPHPLFIRSISLDQFLRLLSLNRMFVDFLISPR

SEQ ID NO: 65871 - protein, 38 aa, Gossypium hirsutum
  Clone ID: LIB3146-007-Q1-K1-F5.pep
ADISTSPIHVRKFGHKRQQISYETHQLHIKEQLLLICR

SEQ ID NO: 65872 - protein, 275 aa, Gossypium hirsutum
  unsure (1)..(275): unsure at all Xaa locations
  Clone ID: GOSHI-09MAY01-C25121_1.pep
MIRRILPSISSVSSHFLKTKPICSPSPLHHFHSLQSLQCSNPISKNGSLWFQGIRSYSLLSLNDLRDNVPRKQKTRKGRGIGSGKGKTAGRGHKGQKARGNGKLGFEGGQTPMRRRLPKRGFKNPFSLTFQPVGLGKIAKLINAGKIDSHELITMKTLKDAGAIGKQIEDGVRLMGRGAEXIKWPIHLEVSRVTVRAKEAVEAAGGSVRRVHYNKLGLRALLKPEWFEKKGRLLPKPARPPPKLKDKVDSIGRLPSPTKPIPFFTEEEASASPAL

SEQ ID NO: 65873 - protein, 44 aa, Gossypium hirsutum
  Clone ID: LIB3149-004-P1-K1-B7.pep
RLLPKPARPPPKLKDKVDRIGRLPSPTKPIPFFTEEEASASPAL

SEQ ID NO: 65874 - protein, 67 aa, Gossypium hirsutum
  Clone ID: GOSHI-09MAY01-C25011_2.pep
PKACCDGIRSLNMMARTTPERQTVCGCLQTAAKAVKIKGNLAETLPAKCSVNIPYKISTSTNCKNVK

SEQ ID NO: 65875 - protein, 114 aa, Gossypium hirsutum
  Clone ID: GOSHI-09MAY01-C25011_1.pep
MAALKLVCALVLCMLVVEPIATTTITCGDVTSKVAGCLSYLQNGGNVPKACCDGIRSLNNMARTTPDRQTVCGCLQAAAKAVKIKGNLAETLPAKCSVNIPYKISTSTNCKNVK

SEQ ID NO: 65876 - protein, 77 aa, Gossypium hirsutum
  Clone ID: LIB3135-049-Q1-K1-E5.pep
SLFLGKKNSTPKSGCGGLLSLFNHIVISSKLVQNPLFFRLLHIFAVSESADLVRDVDNTFGWEGLSQVAFNFDSIKD

SEQ ID NO: 65877 - protein, 55 aa, Gossypium hirsutum
  Clone ID: GOSHI-09MAY01-C25021_1.pep
INTLFLNTNYIIKEENFGWHSQLRLLIRIHITSIAQCILPLSQLDIFTLCVSRGS

SEQ ID NO: 65878 - protein, 318 aa, Gossypium hirsutum
  unsure (1)..(318): unsure at all Xaa locations
  Clone ID: GOSHI-09MAY01-C25391_1.pep
RVRGYGGGGGGHERGFPLGDHCKDSPSGVRTMPINNLDEATQLEYHQFVLHQDFEHXGTGGNGTGFSGEDAMLHTSSYLPSICLPPSAFLGPKCALWDCPRPAQVLDWSQDYCSSFHAALAMNEGPPGMGPILRPGGIGLKDGLLFAALSAKAQGKDVGIPECEGAATAKSPWNAPELFDLSVLDGESIREWLFFDKPRRAFESGNRKQRSLPDYNGRGWHESRKQVMNEFGGLKRSYYMDPQPLNHFEWHLYEYEINKCDACALYRLELKLVDGKKSAKGKPVKDTVSYPHKHMGRLPDGFPSEKNCCVKGRTKVNA

SEQ ID NO: 65879 - protein, 136 aa, Gossypium hirsutum
  Clone ID: GOSHI-09MAY01-C25351_1.pep
HGNHFSCNYFTNSRNSREFEFQMSSISIEKEPTSSPADELFYNGKLLPLHLPPQLLQFSGSAYGTPLTTTVTTPTSTSTPFESCNISPCDSCYVSGELNPDEYSSMSLFYEYSTETEVSRCFDENPKKSWTKKLKL

SEQ ID NO: 65880 - protein, 145 aa, Gossypium hirsutum
  Clone ID: GOSHI-09MAY01-C25301_1.pep
KLDRFNKQQEKCQSMLSNIAGKSLSSRAAAAPKPAPAPPFSGARPSAPVKFSNDTERLQHINSIRKSPVGAQMKRVIDILFQTRQAFTPEQINEACYVDVNGNRDVFEGLRKNPKVYYDGKRFSYKAKHDVKNKNELLVLNSKFI

SEQ ID NO: 65881 - protein, 271 aa, Gossypium hirsutum
  unsure (1)..(271): unsure at all Xaa locations
  Clone ID: GOSHI-09MAY01-C25241_1.pep
MAIISEFQEDEAKKPSPSSSPASKPLLFSATLDPSNPVVFLEKVFDFIGKESDFLVKENADKEIAAIVRAAKEKSKKKAEEMARKVETKNREVKEEKEIKKEVKEEAMEVNKKEETKDEETSSCSRVPNKGNGLDLENYAWTQSLHEVTVNVPFPSGTRSKLVACEIKKNHLKVGLKGRPPIIDGELFQPVKPDDCYWSIEDNXIISILLTKHNQMEWWKILVKGEPEIDTPKVEPENSNLSDLDPQTPTAVEKMMFDPGPKGLGLPPSDE

SEQ ID NO: 65882 - protein, 154 aa, Gossypium hirsutum
  Clone ID: LIB3584-011-P1-K1-B5.pep
MAIISEFQEDEAKKPSPSSSPASKPLLFSATLDPSNPVLLGGRVFDFIGKESDFLVKENADKEIAAIVRAAKEKSKKKAEEVARKVETKNRKVKEEKDIKKEVKKEAMEVNKKEETSSCSRVPNKGNGLDLENYSWTQSLHEVTVNVPVSSGTR

SEQ ID NO: 65883 - protein, 184 aa, Gossypium hirsutum
  Clone ID: GOSHI-09MAY01-C25231_1.pep
KSDSMLGRSILELPRCRGAPWRIPRQIMPQCSSPFIYSRKQFSTSSGENGTPKPESKSGLSKFVLGTSLIGGAILVAYQTGYLEQYGARPKVSIDSTKTGFDEKDEKDIQVVSSRDEEINKLTPHVDLPEQKAATNIDLPPEPEISSETQGENQSYVEDKLNEIIEDSTTSVPDKALPEYSQNN

SEQ ID NO: 65884 - protein, 69 aa, Gossypium hirsutum
  Clone ID: GOSHI-09MAY01-C26951_1.pep
ILPALNLPCQVLWFQRGVKPSFYGQLVSKSWKSSQLPNRVNHSVGHLENPSGRLQIKAVATLEPKGSVP

SEQ ID NO: 65885 - protein, 128 aa, Gossypium hirsutum
  Clone ID: GOSHI-09MAY01-C26901_1.pep
VTLGCSIFILFPGGADVSPYSKGRESTVWGVSLMVGYLGFDGFTSTFQDKSFKGYHMEIHNQIFYTTSCSCILSLTGLLLQGHLLSAIDFVYRHSDCFLDIVLLSTVATVSQFFMSYTIRTFGAIAFA

SEQ ID NO: 65886 - protein, 212 aa, Gossypium hirsutum
  unsure (1)..(212): unsure at all Xaa locations
  Clone ID: GOSHI-09MAY01-C26881_1.pep
LVRALIPLHKPRGVXMYHQQLSYCITQFVEKDCKLADTAIRGLLKYWPITNSSKEVMFLSELEEILEATQPAEFQRCMVPLFQNIARCLSSSHFQVAERALDLWNNDHIESLIRQNRRVILPIIFPALEQNGHNHWNQVVQSLTLNVRKIFSDTDPELFEECLNKFQENTEKREEIKTKHEAAWKRIEEIAVSNAANGEAVLVPHVVASETS

SEQ ID NO: 65887 - protein, 126 aa, Gossypium hirsutum
  Clone ID: GOSHI-09MAY01-C26841_1.pep
MGCCVSRPEGCVGQRSRSSKKKSRKRRKTFKKRAPSRLSEGSSDNVDRRSSFTNPAFQDTLSLNGLEGVASSNISSLRDANYGEHSSLVDQMQNPGGLSTGNSARNSASEAARISNSQILCSKDVN

SEQ ID NO: 65888 - protein, 91 aa, Gossypium hirsutum
  Clone ID: uC-gsflmaxxa002f04b1.pep
MGSCVSRPEGCIGQRSRSSKKKSRKRRKTFKKRAPSRLSEGSSDNVDRRSSFTNPTFQGSCFFYIWHLLFGTWELKECSRTSLLDPILMGS

SEQ ID NO: 65889 - protein, 122 aa, Gossypium hirsutum
  Clone ID: LIB3048-029-Q1-L1-E7.pep
CFDDATLAGSQELWFDPVSVFDSDCEEEFESVQEDTLSLNGLEGVASSNISSLRDANYGEHSSLVDQMQKPGGLSTGNSARNSASEAARISNSQILCSKDVNPQLKYDGASNEVKQPVFLDD

SEQ ID NO: 65890 - protein, 124 aa, Gossypium hirsutum
  unsure (1)..(124): unsure at all Xaa locations
  Clone ID: GOSHI-09MAY01-C26861_1.pep
MVRICCIGAGYVGGPTMAVIALNCPSIEVVVVDISVTRISAWNSDQLPIYEPSLNEVVKQCKGRDLFFSTDIXKHVFEADIIFVSVNTPTKTRGLGAGKAADLTYWESAPRMIADVSKSNKIVG

SEQ ID NO: 65891 - protein, 81 aa, Gossypium hirsutum
  unsure (1)..(81): unsure at all Xaa locations
  Clone ID: LIB3048-025-Q1-L1-H9.pep
ILLRHSDQLPIYEPGITEVVKQXLGRNLFFSTDIEKHVCKADIIFGSVNTPTKTRRLSAGKAADLTYWESATRMIADVSKS

SEQ ID NO: 65892 - protein, 72 aa, Gossypium hirsutum
  unsure (1)..(72): unsure at all Xaa locations
  Clone ID: LIB3048-016-Q1-L1-F3.pep
LAIALNCAYIEVVVVDISVTRISAWNSDQLPIYEPCLNEVVKQCKGRNLFFSTDIEKXHVSEADLIFVSVNT

SEQ ID NO: 65893 - protein, 100 aa, Gossypium hirsutum
  Clone ID: GOSHI-09MAY01-C26801_1.pep
FSSIFLLVRVSKVTLNVVKVRGRMLKGWKVFPLKDKQMNISISCMCSAITLSQLHTFWYSNPSFRGILNYLHWTLISNFHMACLLVNIILLYHNLITSLY

SEQ ID NO: 65894 - protein, 208 aa, Gossypium hirsutum
  Clone ID: GOSHI-09MAY01-C26571_1.pep
MALYLLFESSSGYALFHAQGLDEIGQNTEAVRNSVADLNRFGKVVQLTAFQPFESAIDGLNQCNSVSEGLMTDELRSFLELNLPKVKEGKKSKFSLGVAEPKLGSHISETTKIPCQSGEFVLDLLRGVRLHFDKFIKDLKSGDLEKAQLGLAHSYSRAKVKFNVNRVDNMVIQAIFLLDTLDKDINSFSMRVREWYSWHFPELVKIVN

SEQ ID NO: 65895 - protein, 229 aa, Gossypium hirsutum
  Clone ID: GOSHI-09MAY01-C26481_1.pep
MPAKPGNDDQQIDRGAQSVLQSTAYSEPWWKGVGTNPFGEAASKSPSVEQLNGSVANGDVHSQAHGDLGNEDGRNRQDRQHLKHVPSTTPLTLGEHHEPNSQMELVGHSIVLTSYPYSDPQYCGILTSYGPQMMVSPHLYGMHHARMPLPLKMEEEPVYVNAKQYHGILRRRQIRAKAELEKKAIKVRKPYLHESRHLHAMRRARGCGGRFLNTKKQGDDVTSPTSQKA

SEQ ID NO: 65896 - protein, 110 aa, Gossypium hirsutum
  Clone ID: LIB3145-048-Q1-K1-E9.pep
GQDRQHLKHVPSTTPLTLGEHHEPNSQMELVGHSIVLTSYPYSDPQYCGILTSYGPQMMVSPHLYGMHHARMPLPLKMEEEPVYVNAKQYHGILRRRQIRAKAELEKKSH

SEQ ID NO: 65897 - protein, 162 aa, Gossypium hirsutum
  Clone ID: GOSHI-09MAY01-C26451_1.pep
MAKAANVDKVKRLRGWVQNYDWGRCGAEAQVARLLALNSGAEVKPDRPYAEFWMGTHDSGPSFLADGYGEGQNVGLKEWIRKNPNVLGHKVLEKWGPDLPFLFKVLSVAKALSIQAHPDKELAKELLKLKPNLYKDGNHKPEMALAITEFRALCGFITLEEL

SEQ ID NO: 65898 - protein, 54 aa, Gossypium hirsutum
  Clone ID: GOSHI-09MAY01-C26611_1.pep
ETPLPSMDSVIQLKQAVAHHGKVIILITIAYHELRELQHHWITAETENLQGANS

SEQ ID NO: 65899 - protein, 241 aa, Gossypium hirsutum
  Clone ID: GOSHI-09MAY01-C26601_1.pep
LPLSSLWSLTDDEIEKREWNRDKNSPQQQDENEGFLHNFSQNKKKAINFGAELEKDLDDLDDEDAEEEEASASSSKPAKPEDYNDEEWEIKSSIGRDCTLDYEEEEDAYDKVAVGRDKNGDRLYMKDVNDYDIDADSCNTLPTTFKDFSRDPRANHIAAKLRLMEDEEATKRRLEEDAEAAKKIDSLHVSDSDAAVGVDAHSSTFEDGNPKSILKRKDAESNSKSQKRVRFDSECCKNDCS

SEQ ID NO: 65900 - protein, 128 aa, Gossypium hirsutum
  Clone ID: GOSHI-09MAY01-C26621_1.pep
QFGVTYLVTHKETDQQFACKSIATRKLINRDDIEDVRREVQIMYHLTGHRNIVELKGAYEDRHSVNLIMELCAGGELFDRIIAKGHYSEREAANLCRQIVTVVHNCHSMGVMHRDLKPENFLLLSKRG

SEQ ID NO: 65901 - protein, 179 aa, Gossypium hirsutum
  Clone ID: GOSHI-09MAY01-C26161_1.pep
MASLKFPIVLFISSLLLHSSLAEMICEDLPKDVCAFSIASSGKRCVLETAVKKDGDVEYQCRTSEVVVERMAEYIETDECVAACGVDRNSVGISSDSLLDQQFTAKLCTPACYQKCPNIVDLYFNLAAGEGVFLPDLCNAQRSNPRRSMVELILSSGVAPGPVSSQATAVEAPAPAPMW

SEQ ID NO: 65902 - protein, 126 aa, Gossypium hirsutum
  Clone ID: LIB3048-007-Q1-L1-G1.pep
MSNPWSFLKPCFVYLILMVFVVFLAAEMICEDLPKDLCAFSIASSGKRCVLETAVKKDGDVQYQCRTSEVVVERMAEYIETDECVAACGADRNSVGISSDSLLDQQFTAKLCTPACYQKLSNICDL

SEQ ID NO: 65903 - protein, 99 aa, Gossypium hirsutum
  unsure (1)..(99): unsure at all Xaa locations
  Clone ID: uC-gsronu33B002g08b1.pep
EDLPKDACAQTIASSGKRCVLETAADKGGDAXHQCRTSEVVAERMADYIXRDECVAACGVNRNAIGISSDXLLDQQFTVKLCAPAWHQNWPNSYRPFTS

SEQ ID NO: 65904 - protein, 325 aa, Gossypium hirsutum
  unsure (1)..(325): unsure at all Xaa locations
  Clone ID: GOSHI-09MAY01-C26121_1.pep
MAIIPCGSTFVAQWHIRPQLTTRSYVPNRIMTARLGVTSTMSYLRASNSGLFARDSLPLLSFVRPSQTSHHRRGAQFIVRAETDYYTVLGVSRNASKSEIKSPTRPAYRKPARSYHPDVNKDPGAETKFKEISNAYEVLSDDEKRSLYDKYGEAGLKGAGMGMGDFSNPFDLFESLFEGMGGMGGMGXMGMGGRSSRNRAVDGQDEYYSLVLNFKDAVFGVEKEIEITRLESCGTCNGSGAKPGTTPSKCTTCGGQGQVISSARTPLGVFQQVMTCSSCGGTGEISTPCNTWSGDGRVRRTKRISLKVPAGVDSGSRLRVRSEGN

SEQ ID NO: 65905 - protein, 82 aa, Gossypium hirsutum
  Clone ID: GOSHI-09MAY01-C26051_2.pep
MEEESYKKSEGCTIKECQDMIQRSLRTPMVKFLMEHMEKTGCKVGDNFIKAVNCNRKMGGGYVRGEGVIIFMLLYVRNIALN

SEQ ID NO: 65906 - protein, 119 aa, Gossypium hirsutum
  unsure (1)..(119): unsure at all Xaa locations
  Clone ID: GOSHI-09MAY01-C26051_1.pep
MEEESYKKSEGCTIKECQDMIQRSLRTPMVKFVMEHMEKTGCKVGDNFIKAVNCNKKMGGGYVRGERIMVXTDQVKIQDDVNQVVIHELIHAYDECRASNLDWTNCAHHACSEIRAGHL

SEQ ID NO: 65907 - protein, 68 aa, Gossypium hirsutum
  Clone ID: GOSHI-09MAY01-C26351_1.pep
LHTHTKEIYIACWLLHKACQLSPSSLAIPSILIIFFSYYIYRILVLSRETNFLASFKPLNNFRGKERR

SEQ ID NO: 65908 - protein, 143 aa, Gossypium hirsutum
  Clone ID: GOSHI-09MAY01-C26271_1.pep
DDARALGSLSVLATLLQTKELDESMLDGLGILPQRKQHKKLLLQALVGEGSGEEQLFSFESGSARDSISSELDGYLKKLKEQYGVSIGGAAASPRIRRNQVLDALVKLLCRSDISTEILWDGGWLLRQLLPYSEAEFKSHHLK

SEQ ID NO: 65909 - protein, 194 aa, Gossypium hirsutum
  Clone ID: GOSHI-09MAY01-C27921_1.pep
MDLSGRQVPKTLGRILSLPDYNSSPIGSPARNPEPSSIAAQSRFASPDKLQKLQNNVSKLSQSAEEPESRPGVSDNKNGDEVRGDNAILNKLDACVNDDKEDQSHSSSTKDEMGCEGDAGVVVVAEETEITVEEETELLDASSETNDYSITRDDKNVDMSEVYDEKQYPECLKQDLTEEDQQLVSPLASPSNSS

SEQ ID NO: 65910 - protein, 75 aa, Gossypium hirsutum
  Clone ID: GOSHI-09MAY01-C27891_2.pep
EIPSSLLKLKRRRNLVVEIVVPRSPNLFVTIDRGRSVLKRGVLGSIEGKSREVRVLIFLVGQMKIDMVKDFLHLL

SEQ ID NO: 65911 - protein, 58 aa, Gossypium hirsutum
  Clone ID: GOSHI-09MAY01-C27891_1.pep
EIPSSSLKSKRRRNLVVEIVVLRGPNLFVTIDRGRSVLKRGVLGSVEGKSREVRVLIS

SEQ ID NO: 65912 - protein, 57 aa, Gossypium hirsutum
  Clone ID: uC-gsflnu33B028h04b1.pep
NPKPKKGPKPKSCLQQTLALAAAAPPIASVRANYPVTLPPYLEDVLRDSVFFVEIEA

SEQ ID NO: 65913 - protein, 55 aa, Gossypium hirsutum
  Clone ID: GOSHI-09MAY01-C27551_1.pep
ILQESLKCLMIGLHGIMIAELGMLQTCCLTGNGGSIELLHMPVSSLMSNLSYFSN

SEQ ID NO: 65914 - protein, 165 aa, Gossypium hirsutum
  Clone ID: GOSHI-09MAY01-C27531_1.pep
MKMLARRVSPQHALILSVGKRLEAGKSPVKDSFLPSIFSVGNTVPRHVVTLDEKYLRRCLELICINAAKAAQCNISVSLSSVEMSILSDGLNSPNIGDEDACDFQRFVFDRPLAVGTGGVVIRPVGQWARSSKTGSRSMANILKSPLLQKFGASDVRPSSNALKD

SEQ ID NO: 65915 - protein, 146 aa, Gossypium hirsutum
  Clone ID: GOSHI-09MAY01-C27421_1.pep
LMRDLCLSKAKQQNFMHIIGSLPSSTYSRPTPVSKIRRCAIHLDQNNQDPGLPEYQKNPNLRSLFFFRPKKHRIHNERLLKSVFDKFKLLKVLDLEGIKGLEEKLPEDIGFLVQMRFLSLKKTRIRELPTSLVNLIGLQTLNLQTI

SEQ ID NO: 65916 - protein, 78 aa, Gossypium hirsutum
  Clone ID: GOSHI-09MAY01-C27181_1.pep
MEPATGKSSLFRNILARALIFGVPIMVFRFAYVVSITRESCTLSSFCFFSLRQNLNFIVPGASVSAIVGNDAVSRSDP

SEQ ID NO: 65917 - protein, 173 aa, Gossypium hirsutum
  Clone ID: GOSHI-09MAY01-C27141_2.pep
MIVFVLLAYHRAQVKEFRGRSGFSETTTVGDAKLGGFSRPSVFKFHSNVRTPQTSLSFSNDHLLPSLARPLPYSKQHHSKLVCYITKELMDTENPPQVLPNGYVYSSKALKEMAEKNNGKITCPRTGLVCNYSDLVKAYISYNYTINTAKVKKKKLFLACFLLMLVLNFMHHL

SEQ ID NO: 65918 - protein, 286 aa, Gossypium hirsutum
  unsure (1)..(286): unsure at all Xaa locations
  Clone ID: GOSHI-09MAY01-C27141_1.pep
KSLNLSGNHLSGVIPLQGSRVNELLVMSSYPQMESLDLSYNSLTGGLPSEIGNIAALKLLNLANNDLSGQLPSELSKLSNLEYLDLSGNNFKGKIPDRLSTSLNGFNVSYNDLSGPIPENLRGFPLSSFSPXNRLLIFPHGMPSANSAQVQPPDHAGHHNSKSDVRVSIIVASVVAAVMIVFVLLAYHRAQVKEFRGRSGFSETTTAGDAKLVRFSRPSVFKFHSNVQTPHTSLSFSNDHLLTSKSRSLSGLQEFVAEIVEHDAPERATTSSAYVNTNLLDNEPTT

SEQ ID NO: 65919 - protein, 98 aa, Gossypium hirsutum
  Clone ID: LIB3145-016-Q1-K1-E3.pep
KTPYCFEDDCTKEDPLSQENFRKLAMPLPYSKQHHSKLVCYITKELMDTENPPQVLPNGYVYSSKALKEMAEKNNGKITCPRTGLVCNYSDLVKAYIS

SEQ ID NO: 65920 - protein, 278 aa, Gossypium hirsutum
  unsure (1)..(278): unsure at all Xaa locations
  Clone ID: GOSHI-09MAY01-C27111_1.pep
HQRYNQLKNGGDEEAATLVFVWTDRGYYRRRRPKILSFLLLSLLACGFILAPHFFSFSSALSHLYFFGVQNDGLAGDLYVNAPLCSSISNGSVCCDRRHFRSDICFMKGDIRTHSPSSSVFLYSPKKXDDDASSTVDGDELQHEKIKPYTRKWETSVMATIDELNLISKRRNSDVDHSCDVIHDVPAVIFSTGGYTGHVYHEFNDGIIPLYITSQQFNTEVVFVILEYHDWWVMKYADILPHLSXYPPIDFNGDNRTHCFTEAITGLRIHDELLWTLF

SEQ ID NO: 65921 - protein, 156 aa, Gossypium hirsutum
  Clone ID: GOSHI-09MAY01-C20951_1.pep
VGYMWYECIYKLDKVAYNKYHPYTSWIPITVYICLRNCTQQLRSYSLTLFAWLGKITLETYISQFHIWLRSDMPNGQPKWLLSFIPEYPLLNFMLTTAIYVLISHRLFDLTNKLKSVFIPTKDNRRLLYNFIAGVVVSVCLYCTSLILLQIPHSTA

SEQ ID NO: 65922 - protein, 197 aa, Gossypium hirsutum
  Clone ID: GOSHI-09MAY01-C20891_1.pep
MESKKRTAESAPVFQEGISLILTRWSALTAAVENEWGGRDSLGKANAICTDVFAFFTEARAEPLYIDDLENLLEEGLLSLNTLVEDGSIEEVAEKLMIMHEECLEGNYQSVEKLRTTNPPPVAHVRPSNDEDEDDDDDENDSMSADIAANMMVDVPNSQSSLNPVSMLTEEPKQNQSAEAEDGWVVVSSRKNKGRRN

SEQ ID NO: 65923 - protein, 79 aa, Gossypium hirsutum
  Clone ID: GOSHI-09MAY01-C20581_1.pep
VKSAFSVKQIIIMTRKAAKSISIITNPDQWKQSLTKCSLPLSLTNYLTENLNLANYNTFTTYGTQFPLLQAFPKLKIHN

SEQ ID NO: 65924 - protein, 49 aa, Gossypium hirsutum
  Clone ID: LIB3149-064-Q1-K1-E10.pep
KQSITKCSLPLSLTNYLTKNLNLANYDTFTTYGTQFPFLQAFPKLKIHN

SEQ ID NO: 65925 - protein, 75 aa, Gossypium hirsutum
  Clone ID: AW187338.2.pep
NNSLQSETKTIPDDRQQLSGQEPASQNKNGKRKKFSTLLFDVPLLARLCRRRLPEYMSRNLIVHLTHQPTFSLLP

SEQ ID NO: 65926 - protein, 58 aa, Gossypium hirsutum
  Clone ID: LIB3083-047-Q1-G1-G3.pep
ADIVIRQLYIEFTNPSPVYSPYFMTSAIQITVPPPLGSNSSTRLSISNTVASNIILGG

SEQ ID NO: 65927 - protein, 161 aa, Gossypium hirsutum
  Clone ID: GOSHI-09MAY01-C20411_1.pep
SSRPEGCGSSHMLCHEVKSLSCSPSSVEDVSTQHSKFSGKEPVSTNSIVILLDTMHNLSKLLLHHCSNESSELKEQDRKSLEKVIKNLNTCMSKNVGQESFLSDLHEGTSMGTPQVAAIDVWSQHVQEKTKHSGRKDDKCSGFIPFESGAGIKARNDKMTQ

SEQ ID NO: 65928 - protein, 194 aa, Gossypium hirsutum
  Clone ID: GOSHI-09MAY01-C20401_1.pep
DSSHYNSFSLDWDDRFTEDVIRLMDAIEATPPPPPPSSSRKRRKSAVHHQDNLKTGRQLPHSILSPPPSFPSSFARCQSNTRLTYPPLRFGGHTLYSFTEDEVENAAMELFKIVEIKKKEMGQVALGFDIEWKPSFQKGILPGKAAVMQICCDSQYCYVMHIFHSGIPQSLQVLLEDSEIIKVGVAIDGDAIKV

SEQ ID NO: 65929 - protein, 161 aa, Gossypium hirsutum
  Clone ID: GOSHI-09MAY01-C20421_1.pep
ATRNVWGNVGLSNATNASSPASYLGSGNGSFGSLGNSGANWRPSLPARSGGNASGYTGGSADDNYSLGGGGYGRNIGIVAAPPSSFAGSTGNIECSYGDLYRNASVYGDSTWKFASPDLDGSSSFGYGLGNTSADVTTRPSEDYVGSYNVASRQSNRGIAA

SEQ ID NO: 65930 - protein, 116 aa, Gossypium hirsutum
  Clone ID: GOSHI-09MAY01-C20781_1.pep
KSKAAELGIDKLSLADKGNQKEPILSIKPPPPPPTPLSPVASALKSPQPHPPAQLSPVETTGNSPTSSPPDLQLDGTSEKKASKSEKEHRDEQQCGESQSTEDIEEDDFGDFQAAG

SEQ ID NO: 65931 - protein, 78 aa, Gossypium hirsutum
  Clone ID: GOSHI-09MAY01-C120799_1.pep
KKLAFALDGLRFCSTHDSPYPQLFLVLHKRLNIIFEHFLESLSQRQCSYLISRPIVHMFFTKNIAAPVIEVEICSLPS

SEQ ID NO: 65932 - protein, 190 aa, Gossypium hirsutum
  Clone ID: GOSHI-09MAY01-C20691_1.pep
GNKARSRGGGGGLEKLNLSFTVVSDGGLRELSGLTSLKSLNLDARQIPDAGLAALTSGAGLTHLDLFGARITDSGTSHLRNLKNLRSLEICGGGLTDAGVKNIKDLSSLSLLNLSQNCNLTDKTLEMISGLTGLISLNVSNSRVTSAGLRHLKPLKNLRSLTLEACKVTANDIRRLQSAGLPNLVNFRPE

SEQ ID NO: 65933 - protein, 144 aa, Gossypium hirsutum
  Clone ID: LIB3083-051-Q1-L1-D3.pep
RIGDNGLVHLTGLRSLKCLELSDTEVGSNGLRYLSGLCKLESINLSFTVVSDGGLRELSGLTSLKSLNLDARQITDAGLAALTSLTGLTHLDLFGARITDSGTSHLRNLKNLRSLEICGGRLTDAGVKNIKDLSSLSLLNLSQN

SEQ ID NO: 65934 - protein, 97 aa, Gossypium hirsutum
  Clone ID: GOSHI-09MAY01-C120639_1.pep
YGQGTRTIRHVFGPFLTSSTMFLDGFGLPGTVVGHSYARYRVLGVGESNYGGGHADIWPSLVLGRSPPMEIEYPPPCELQTEAGVRGSQRGVLVIIR

SEQ ID NO: 65935 - protein, 123 aa, Gossypium hirsutum
  Clone ID: GOSHI-09MAY01-C20181_1.pep
LIKSLEEIEKQLQMESVSQDLELGKSPNADVCTRLGYEETSISEIGKCFLQYTIRVADKTERNEVEEMLKSQMVLCLSSLGYCLNDLKREATETEKEIAELLKWENPTRHVNFPDLLSKLHAT

SEQ ID NO: 65936 - protein, 190 aa, Gossypium hirsutum
  Clone ID: GOSHI-09MAY01-C20161_1.pep
RRKVGVFVRRGKGGPLTVVEYSELDSSLASAVNQQTGRLRFCWSNVCLHMFTLDFLSQVADGLEKDGIYHLAEKKVPSIHGYTMGLKLEQFVFDAFPYAPSTALFEVLREEEFAPVKNANGSNYDTPDSARLLVLRLHTRWVVAAGGFLTHSVPLYATGVEVSPLCSYTGENLESICRGRTFHAPCEIAF

SEQ ID NO: 65937 - protein, 90 aa, Gossypium hirsutum
  Clone ID: uC-gsronu33B055e02b1.pep
LYPVKNANGSNYDTPDSARLLVLRLHTRWVVAAGGFLTHSVPLYATGVEVSLFCTIFVVNLFSIFFVIYTNVFFFFSIFLSSLSYLSFSF

SEQ ID NO: 65938 - protein, 118 aa, Gossypium hirsutum
  Clone ID: GOSHI-09MAY01-C20091_1.pep
MEGVQHRMVEVNGINIHIAEKGEGPVILFLHGFPELWYSWRHQILALSNMGFRTVAPDLRGYGDSDIPESVDSYTCFHMVGDLVELIDVLDPREGKVFVVGHDWGAILARDWGQNRPV

SEQ ID NO: 65939 - protein, 134 aa, Gossypium hirsutum
  Clone ID: LIB3272-009-P1-K1-C6.pep
EKRKMEGIKHQMVKVNGINIHIAEKGEGPVILFLHGFPELWYSWRHQILALSSMGYRAVAPDLRGYGDSDAPDSVESYTCFHIIGDLVELIDVLDPDVGKVFVVGHDWGAYMAWLLCLFRPDKVKALVNLSVPF

SEQ ID NO: 65940 - protein, 109 aa, Gossypium hirsutum
  Clone ID: GOSHI-09MAY01-C20051_1.pep
QFYSEGVYIGQCGIKLTHGVAAVGYGTTLDGTKNWIVKNSWGPDWGEKGYIRMERGIKDKQGLCGIAMQASYPIKNSSSNPTTPSFYPKDETVKFYPTDSNFVLIITIE

SEQ ID NO: 65941 - protein, 222 aa, Gossypium hirsutum
  unsure (1)..(222): unsure at all Xaa locations
  Clone ID: GOSHI-09MAY01-C20041_1.pep
MAAIFARNSLNALRARHLAVSGQVLQGSQHYGLRLSSRSYGTQKDDEEREQLAKEISKDWSSVFERSINTLFLTEMVRGLMLTLKYFFERKVTINYPFEKGPLSPRFRGEHALRRYPTGEERCIACKLCEAVCPAQAITIKAEEREDGSRRTTKYDIDMTKCIYCGLCQEACPVDAIXLKGPNFEFATETHEELLYDKEKLLENXERWETEIARISIFFFFF

SEQ ID NO: 65942 - protein, 100 aa, Gossypium hirsutum
  unsure (1)..(100): unsure at all Xaa locations
  Clone ID: LIB3196-035-P1-M1-E10.pep
MAAIFARNSLTALRARHLALSGQALQGSSQHYGLRLGAHSYGTMEDDEEREQLAKEISKDWSSVFERSINTLFLTEMVRGLMXTLKYFFERKVTINYPFE

SEQ ID NO: 65943 - protein, 79 aa, Gossypium hirsutum
  Clone ID: LIB3083-028-Q1-L1-C9.pep
IVRVVLNFTEFLAGYTNGCKYVQKRSAAKGYAASCLGRLLVESIVTGRRGGVDLPSALDRLIPGSYDPKSPLILRQRPP

SEQ ID NO: 65944 - protein, 71 aa, Gossypium hirsutum
  Clone ID: LIB3083-027-Q1-L1-F9.pep
TRRSYPKYTSDGPRKNLAYATSLISREEGYVRFSMKADTNPPSGPGAARRKQHFGVPRSTTRLPEVQTRSI

SEQ ID NO: 65945 - protein, 133 aa, Gossypium hirsutum
  Clone ID: GOSHI-09MAY01-C20371_1.pep
HSSAHASDFFLFSEILHTTQYTEEKKKEMEGLIPFVYRAIVQYKSGKEDHVLATWFNESPSASYMRLPTGDSDRFQISDDRIFESDNYGKFSTSSSSSSSSSMVAPSASTKIILSTGVQSPAVCRLTPRRVVT

SEQ ID NO: 65946 - protein, 71 aa, Gossypium hirsutum
  Clone ID: uC-gsronu33B039h09b1.pep
IKNKREMEGLIPFVYRAIVQYKSGKEDHVLATWFNESPSASYMRLPTGDSDRFQISDDRIFESDNYGKFCT

SEQ ID NO: 65947 - protein, 63 aa, Gossypium hirsutum
  Clone ID: uC-gsronu33B039g01b1.pep
RRNRSQIVIFRFLHETPYLLFLIVSKYTMIESLNQIIMGSFPLHYHHHHHLPWLLLLLVLRLF

SEQ ID NO: 65948 - protein, 295 aa, Gossypium hirsutum
  Clone ID: GOSHI-09MAY01-C20361_1.pep
MTILIEKPELVSQSDCQIHVDESKELVLDGGFPVPKSLSGEGFLAPEVNSFGNSFRDYNAESERQKSVEEFYKQQHVNQTYDFVQKMREEYSKLNRMEMSIWECCELLNEVVDDSDPDLDEPQIQHLLQSAEAIRKDYPNEDWLHLTALIHDLGKVLLLPKFGGLPQWAVVGDTFPLGCAFDEANIHHRYFKENPDYNNPSYNTKNGIYWDGCRPDNVTISWGHDDYMFLVAKENGTTLPSAGLFIIRYHSLYPLHKEEAYMQFLNDEDKENLKWLRIFNKYDLYSKSKVAVDVE

SEQ ID NO: 65949 - protein, 298 aa, Gossypium hirsutum
  unsure (1)..(298): unsure at all Xaa locations
  Clone ID: GOSHI-09MAY01-C20311_1.pep
EIEMLSQFRHRHLVSLIGYWDEKNEMILIYEYMENGXTLKSHLYGSGHPSLSWKQRLEICIGAARGLHYLHTGYAKAVIHRDVKSANILLDENLMAKVADFGLSKTGPELDQTHVSTAVKGSFGYLDPEYFRRQQLTEKSDVYSFGVVLFEVLCARPVIDPTLPREMVNLAEWAMKWQKKGQLEQIIDPSLKGNIRPNSLRKFGETAEKCLADFGVDRPSMGDVLWNLEYALQLQEAVVQGDPEENSTNMIGELSPQINNFSQLDPTGSAKFEVSSVDDLLRVSMSKVFSQLVKSERR

SEQ ID NO: 65950 - protein, 127 aa, Gossypium hirsutum
  Clone ID: GOSHI-09MAY01-C20331_1.pep
TALTDSAPAVQHRATSMPTFQPATNQNDVAPHPPSASSETVTNFDFANSFSANAHSAPNSTNSQFLPQEMSTQNQGSAYSQTTQPGIYGQQAQSSANMYSQPTQPSANPYGQPAQPGANAYDQVGPT

SEQ ID NO: 65951 - protein, 97 aa, Gossypium hirsutum
  unsure (1)..(97): unsure at all Xaa locations
  Clone ID: AI054862.1.pep
LSHLLQVPRQSQILTLGTHSLQMLTLHPIAQTPSFFLKKCQLKIREVLIAKQHSQVSMVNRHIQVLICSANRHXQVXNPYGQPALAGANAYXQVGQX

SEQ ID NO: 65952 - protein, 99 aa, Gossypium hirsutum
  Clone ID: GOSHI-09MAY01-C20281_1.pep
VFQERFAKGQNKLRSPGSVARNSNVLNRHKNGKKKIKITKTEIQICRLFYQNLRSSNQLSFMLITMIFSSCLLISNHAHLYLSFSHFYSIGLRSCWISH

SEQ ID NO: 65953 - protein, 393 aa, Gossypium hirsutum
  Clone ID: GOSHI-09MAY01-C21841_1.pep
MTDTSSDLQKYGVPFYGAGWVPYNHIKSKLASQEKIEEDKKEEKDPTPSNDDEITTPLNYVVLAGGGGEGRSGIPNAIVVSHVNFTSNSLSDQPVVKHETGSDLPYRMTVHPHGDGIICAFQQSCRLFEWKESNGNEAHKLGVKVSEKVLIQLEDVGQQLALTFNSEGSVLAVGGEDGSLRVFKWPSMKIVLNEAQAHSSVKNLDFSCDGKFLVSLGSGLCRIWDVTSSKVVASLAKGNDEVFAFCRFSQINDKNPHLYIAAVTDYGGSILTYNTTTWKRIRSSRVVREAISAFNVSSDGKFLAVGTVGGDLFIIDSANMRVQMMVKKAHLGLVTALTFSPDSRALVSASLDSSARLTPIKDKTSSGGMTWMIILMVLLAIAVYFMKEKGIIP

SEQ ID NO: 65954 - protein, 86 aa, Gossypium hirsutum
  Clone ID: GOSHI-09MAY01-C21861_2.pep
SLLKDYSLMNGTLRDQEKEIEQLRNDLLQLKREHEKQNVLVLTLSGFLADQMRLENEKLKDENASLRKNANPNCNLPQLAEENAKL

SEQ ID NO: 65955 - protein, 157 aa, Gossypium hirsutum
  Clone ID: GOSHI-09MAY01-C21861_1.pep
QFRGRSLIPLKVPQRSCSDADEDFPQNWRSASPSLQPWDPGSFLYPDWAQSHNQPGISSGGVVPNQISNHSPSLKELTNNHSILKRNLSSVSGSERALRKKRIDQAYRERCKNHKMEMQSNVENLKDENDFFKEREFVLTKGLFLNESNFERSRKRD

SEQ ID NO: 65956 - protein, 78 aa, Gossypium hirsutum
  Clone ID: LIB3145-044-Q1-K1-E9.pep
RDFMLSNTKKLLTSFPKLANNLMRHVVVYVYPRAIPSIVNESHEVYLVSMWSTACCIKTGLLILYSGFILKRSCSYLV

SEQ ID NO: 65957 - protein, 96 aa, Gossypium hirsutum
  Clone ID: LIB3196-017-P1-M1-F8.pep
NKSMDEFFQAISWEEPHPSQKFPSESCSDADEDVIKSKVFFSQNWRSACPSLQPWDPGSLLYSNWAQSHNQPGISSGGVVPNQISNHPPTLKELTN

SEQ ID NO: 65958 - protein, 106 aa, Gossypium hirsutum
  Clone ID: GOSHI-09MAY01-C21501_2.pep
NPIQNRVKAQQITQNLTHISQPNTQNIKPTQNPSSRRKSAPQASSPSSVRCAPSFRIVRYSMPRSHASEISGSSATAVCVWGRWSRDDGRSMPLRREKGKTPPRVR

SEQ ID NO: 65959 - protein, 161 aa, Gossypium hirsutum
  unsure (1)..(161): unsure at all Xaa locations
  Clone ID: AW187510.1.pep
GPLTILFYCYFLKLCFNIGKKKKKKQIRNEGLRIKTRKRIKIHNHLCFYWVVLKYYSKNLLYLSVISLYFQKKSPLYGYLGGVGAWHGVXHDSEAWRASYAAWSRSLRRRFPSAAGVLGWLYVLCIGLKNVGXXLGNLLGFGSVLYWVLIGVFIXGFXXFI

SEQ ID NO: 65960 - protein, 99 aa, Gossypium hirsutum
  Clone ID: LIB3146-048-Q1-K1-A6.pep
KHLLKPNTKQTQSPTDYPKPNPHLSTQYTKHKANPKPQLQKEIGAASFETKQRTTRAKLPIRALLHATLPHLRDIWLVGHRGVRLGKVEPRRWAIYALA

SEQ ID NO: 65961 - protein, 84 aa, Gossypium hirsutum
  unsure (1)..(84): unsure at all Xaa locations
  Clone ID: LIB3543-029-Q1-K6-F12.pep
NPIQNRPKAQQITQNLTHISQPNTQNIKPTQNSSCRRKXXXXXXKKKSAPPRQVXDWXDKKRKAPTPPRYLARRPPRCAFGEGG

SEQ ID NO: 65962 - protein, 98 aa, Gossypium hirsutum
  Clone ID: uC-gsflnu33B129h06b1.pep
VKALSLLSANHGHKPPKPQQQRESAPQASSPSSVRCAPSFRIVRYSMPRSLASDICGIVGHRGVHLWKVDPRPWPIYALPEVKGWSPSFLPLIVRTSE

SEQ ID NO: 65963 - protein, 158 aa, Gossypium hirsutum
  Clone ID: GOSHI-09MAY01-C21461_1.pep
MGFFNYGVAGVGFILIGFWEFINSLNPTLNPNPTPSSSSLSTQIKSASISKTKEDPFSSSPSFIFVSIFSLSIFLNSVVSIFDAFSSKDRVGTVLQLQVLSLALLFLLYSALGLLNNKKGSYFWPDPVLELVLLLAFVEEFLLYYLQRKDTSGIENRY

SEQ ID NO: 65964 - protein, 104 aa, Gossypium hirsutum
  unsure (1)..(104): unsure at all Xaa locations
  Clone ID: GOSHI-09MAY01-C121439_1.pep
SHASACQHGGALNLANSEPKPKSRNLNQNPNPNANPTVLAPRDDGGKVSSMVGPEXTPMAEATNVEAEKEWKSPAGYPSDRKRETRKAKGRPLGVQFVCCSSAN

SEQ ID NO: 65965 - protein, 54 aa, Gossypium hirsutum
  Clone ID: GOSHI-09MAY01-C121419_1.pep
SFVRLPQDPNTIKDRETHSDCPPYQYLNHVRTYPTFMFGGSLGAHVATVAFVRN

SEQ ID NO: 65966 - protein, 73 aa, Gossypium hirsutum
  Clone ID: GOSHI-09MAY01-C21741_1.pep
MDPEAARTARESLDLAFHMSNILDTGLDRHTLSVLVALCDLGLNPEALAAVVKELQREPPPSTPVSSSSSQVP

SEQ ID NO: 65967 - protein, 73 aa, Gossypium hirsutum
  Clone ID: LIB3083-071-Q1-L1-D3.pep
MDPETARTARESLDLAFHMSNILDTGLDRHTLSVLIALCDLGLNPEALAAVVKELQREPPPSTPLSSSSSQVP

SEQ ID NO: 65968 - protein, 171 aa, Gossypium hirsutum
  Clone ID: GOSHI-09MAY01-C21731_1.pep
SDGAFFLVPKDLKSETDGELQKRADESMGFRAEAGELKDGGNGNVETEEEGILKDSSFKHSSTADDVSGKTGADLLALCKFAKVPTKTRSSLTLKNLKPDSVSTIGQEGVSDFDPPCAPQALLEDNSLGGSSGDLLLNKTQDSKPDSELSKDLSVHSFGLDHMYGVEQVSV

SEQ ID NO: 65969 - protein, 162 aa, Gossypium hirsutum
  Clone ID: GOSHI-09MAY01-C21181_1.pep
VFDYSTLSAIIDGTWLCVHGGLAPDVRTVDQIRVIDRNCEIPHEGPFCDLMWSDPEDIETWAVSPRGAGWLFGSRVTSEFNHINKLDLVCRAHQLVQEGLKYMFQDKGLVTVWSAPNYCYRCGNVASILSFNENMEREVKFFTETEENNQMRGPRTGVPYFL

SEQ ID NO: 65970 - protein, 82 aa, Gossypium hirsutum
  Clone ID: LIB3493-038-P1-M1-F7.pep
NVLQMGPALEIVWSKPCFNLEMFLFDLRLRLFLHFSHSVFFFLLIDAASTLCLANVCVFELLGMCICFIYVYWLSTLGLKLA

SEQ ID NO: 65971 - protein, 250 aa, Gossypium hirsutum
  Clone ID: GOSHI-09MAY01-C21161_1.pep
MLELRLVQGSLLKKVLEAIKDLVNDANFDCSATGFSLQAMDSSHVALVALLLRSEGFEHYRCDRNISMGMNLGNMSKMLKCAGNDDIITIKADDGSDTVTFMFESPTQDKISDFEMKLMDMDSEHLGIPEAEYHAIVRMPSAEFARICKDLASIGDTVVISVTKEGVKFSTRGDIGTANIVLRQNTTVDKPEEATIIEMNEPVSLTFALRYMNSFTKATPLSSTVTISLSSELPVVVEYKIAEKGHIRFY

SEQ ID NO: 65972 - protein, 88 aa, Gossypium hirsutum
  Clone ID: LIB3083-060-Q1-L1-B1.pep
RGSSRRERGTANIALRQNTTVDKPEEATIIEMNEPVSLTFALRYMNSFTKATPLSNIVTISLSSELPVVVEYNIAEMGYIRVYLAPKI

SEQ ID NO: 65973 - protein, 193 aa, Gossypium hirsutum
  Clone ID: GOSHI-09MAY01-C21371_7.pep
LFLLPFCALLLCFYRSFVQTGGSVCRTSLCNQIRHFYHIVRSSGTVAYTSVSSSSTINARALFPNSAQYKVPAYLGAISGFACFMAALVSLGISISIVPRQVMPWTGLLLMYEWTFSIFFLSFGAFLHLIYLWGKREPGPVSSRMDPIDSDSRKGYRQASSCDIVTWYYGLRMAFLAIAGPSLPCIFGITALF

SEQ ID NO: 65974 - protein, 213 aa, Gossypium hirsutum
  unsure (1)..(213): unsure at all Xaa locations
  Clone ID: GOSHI-09MAY01-C21371_6.pep
MAALVSLGISISIEPRQVIPMSGQFMPFQSLKLDLPELQGEPEEISKEKACLAAVQVNGPVLVEDTCLCFNALKGLPGPYVKWFVXGRRGREGLNNLLVAYEDKSAYALCAFSFALGPDVEPVTFLGKTPGKIVPAGGPSDFGWDPIFQPDGCDQTYAEMPEEEKNMISHRSRALDVVKSHFAGAGYIFSTSFLRGISGTVETVNACFSLGKH

SEQ ID NO: 65975 - protein, 135 aa, Gossypium hirsutum
  unsure (1)..(135): unsure at all Xaa locations
  Clone ID: GOSHI-09MAY01-C21371_4.pep
TLPGTGXGKNPNDELLVKFRLLLPFCVLVCYYRSFLHVRGFLFRTSLCNHIRHLYFIIRSSGTVAYSGVSSSSNINTKVPVYLGGISVFVCFMAAVVSLGISIAIVPPQVIEWTFTIFFLLFGAFLHLIYQREGE

SEQ ID NO: 65976 - protein, 202 aa, Gossypium hirsutum
  unsure (1)..(202): unsure at all Xaa locations
  Clone ID: GOSHI-09MAY01-C21371_3.pep
MAAAPPPAVLVSRPVTFVTGNAKKLEEVKSILGQSIPFQSLKLDLPELQGEPEEISKEKLXLAAVQVNGPVLVEDTCLCFNALKGLPGPYVKWFLQKIGHEGLNNLLMAYEDKSAYALCAFSFALGPDVEPVTFLGKTPGKIVPARGPNDFGWDPIFQPDGYDQTYAEMPKEEKNKISHRSRALDMVKSHFAEAGYNFSTSN

SEQ ID NO: 65977 - protein, 229 aa, Gossypium hirsutum
  unsure (1)..(229): unsure at all Xaa locations
  Clone ID: GOSHI-09MAY01-C21371_1.pep
KTLPGTGGGKNPNDELLVKFLFLLPFCVLVCYYRSFLHVRGFLFRTSLCNHIRHLYFIIRSSGTVAYSGVSSSSNINVNNPTKVPVYLGGISVFVCFMAAVVSLGISITIVPQQVMPWTGKXIVTQLTPVSADTDLFNSDSKKDHRQASSCDIVSWYYGLGMAFLAIVAPSLPCIFGITTLFLRLGLMVVGGIILASFMTYASEHLASRSFLKGCEDRDTTQSRECFLC

SEQ ID NO: 65978 - protein, 177 aa, Gossypium hirsutum
  unsure (1)..(177): unsure at all Xaa locations
  Clone ID: LIB3584-042-P1-K1-E12.pep
PTRPLYFIIRSSGTVAYSGVSSSSNINVNNPTKVPVYLGGISVFVCFMAAVVSLGISIAIVPXNEWTFTIFFLLFGAFLHLIYQRGRRIVTQLTPVSADTDLFNSDPKKDHLQASSCDIVSWYYGLGMAFLVIVAPSLPCIFGITALFLRLGLMVVGGIILASFMTYASEHLAIRSF

SEQ ID NO: 65979 - protein, 120 aa, Gossypium hirsutum
  Clone ID: LIB3146-022-Q1-K1-B4.pep
GRVGGRVGKVPVYLGGISVGVCFMAAVVSLGISITIVPQQVMPWTGLFLMYEWTFTIFFLLFGAFLHLIYQQGRRIVTQLTPVSADTDLFNSDSKKSLQIHKILYIVMIKYNVSSLFIFV

SEQ ID NO: 65980 - protein, 212 aa, Gossypium hirsutum
  Clone ID: GOSHI-09MAY01-C21281_1.pep
LELDAFLVQHDMENGYMWVFKERPENALGKMQLRSYMNGHSRQGERPFPFSVGKGFVRSHRMQRKHYRGLSNPQCLHGIEVVPSPNLSNLDDEEKRRWRELTGRDINFSIPPEASDFAAWRNLTSTEFELERPPATLKSSLNAHTRKLLNGTGLNLSTQPIEHSNGNGMDLSPVCNKRKKDYFRHGNDEDPCLPNNLHSNRVLDMKIHRFEP

SEQ ID NO: 65981 - protein, 262 aa, Gossypium hirsutum
  Clone ID: GOSHI-09MAY01-C21251_1.pep
KYMQLLVRVQSRIQSRRIQMLENQARRQAQFKKDKEAESGFGKWTFGQSETGNENWDDSLLTKEEMEARMQRKVEAVIKRERAMAYAYSHQLWKDAMKSPHTGVPNIRSGVFPWWWNWLERRLPPTDLPENQATKTFQFTPTMPNSELKPSPRPQSSQFTFDNIIDIPTPKSTRSTILPTTRPMQAPTPPSKLAPLATNAGLLNSKHSRPRPTIIDSPSNLPLKDDDSLTCCPPFSVPNYMTPTVSAKAKARANGNMKERFM

SEQ ID NO: 65982 - protein, 208 aa, Gossypium hirsutum
  unsure (1)..(208): unsure at all Xaa locations
  Clone ID: GOSHI-09MAY01-C21241_1.pep
QQEKKKKKGIYISIQMKLYLYIILILILVMINHGSCDSTIHVGHRVXLTIPLEYNDGFIGKAFLMDYGDDTKQIEPSFRVALSTEANKGGYSCSLEVFLGDVKVWNSGHYSKFYTSDVCFLELTEDGDLQLKGPKNRMGWRTGTSGQGVERLQILRTGNLVLLDVLNQIKWQSFNFPTDVMLWGQRLDVSTWLTSFPRNTTSFYTFEI

SEQ ID NO: 65983 - protein, 138 aa, Gossypium hirsutum
  unsure (1)..(138): unsure at all Xaa locations
  Clone ID: GOSHI-09MAY01-C21271_1.pep
MSLIPSFFGSRRSSIFDXVSLDVWDPFKDFPFSSPSSSLSTRSSETSAFVNTRIDWKETPEAHVFKADVPGLKKEEVKVDVEDDRVLQIIWERNAXNEDKNDSWHRVERSSGKFMRRFRLPENAKIDHIKAFMENGVL

SEQ ID NO: 65984 - protein, 154 aa, Gossypium hirsutum
  Clone ID: GOSHI-09MAY01-C21201_1.pep
CTSLIEIFIERVCDEDVLRCKIGAGSNREMDFDSFLDFVLALENKDTPEGLTYLFRCLDLNGTGFLTTADIHSLFRDVHQKWIEGGNYELCIEDVRDEIWDMVKPADPLRITLADLLACKQGGTVASMLIDVRGFWAHDNRENLLQEEEPEEES

SEQ ID NO: 65985 - protein, 90 aa, Gossypium hirsutum
  Clone ID: GOSHI-09MAY01-C122529_1.pep
KSFTRAFTTHCILLNIPCQFSPHLPHMVPERNQGHLIIRRLGIGYRDQFRPIFFSSIRLCYCSTICSFYIFRCMFCIQISIGYRTRYCDK

SEQ ID NO: 65986 - protein, 155 aa, Gossypium hirsutum
  Clone ID: GOSHI-09MAY01-C22531_1.pep
MKAPLSSSTSSSSGILRRSRLSTYLYTLLAFIVFVAVIHGEYSIANFGRVDPIIPSPVFSTTPVKKREKVVAQLPSFAVEESEEGCDIFSGKWVKDELTRPHYDESECPYIQPQLTCRAHGRPDTEYQKWRWQPHGCDIPRFNATLMLESLRGRE

SEQ ID NO: 65987 - protein, 123 aa, Gossypium hirsutum
  Clone ID: GOSHI-09MAY01-C22471_1.pep
MADPKQEAIEVIHSWSAPRSLSTSLMYSFSQRDDTEVLDEPLYGTFLRVTGVERPYREDVLSKMECDGNKVVDNIIYGPGKNRYRYCKHIAKQRVPGLPNDLLQKGKHFILIQNPLNILSSFE

SEQ ID NO: 65988 - protein, 94 aa, Gossypium hirsutum
  Clone ID: GOSHI-09MAY01-C22681_1.pep
KPYKTLKCHPKDITKVAFHRSYPLFASCSDDCTAYIFHGMVYADLNQNPLIVPLEILRGHTSYDGRGVMDCKFHPRQPWLFTAGADSSIKLYCH

SEQ ID NO: 65989 - protein, 53 aa, Gossypium hirsutum
  Clone ID: GOSHI-09MAY01-C122649_1.pep
VHQNVWSATLFHSDLTKIPQYDLIFTNIPFPAYSGIALNIAAHFLLPFPRTRG

SEQ ID NO: 65990 - protein, 121 aa, Gossypium hirsutum
  Clone ID: GOSHI-09MAY01-C22611_1.pep
LKQKQALANHLTLPPRQVEVWFQTRRARTKLKQTEVDCEFLKKCCEPLPDENRSLQKELQELKALKLAAQPFYMHMPAATLTMCPSCERIGGVADGNSKSPFSVASKPHFYNPYSNPSAAC

SEQ ID NO: 65991 - protein, 72 aa, Gossypium hirsutum
  Clone ID: GOSHI-09MAY01-C22141_1.pep
FEASMAISSLPGIEPVRGRFKVCSFFLAGVCGGFNNKKMINACVFSSLRKISNDIYIESKVLFLLMCICLMK

SEQ ID NO: 65992 - protein, 181 aa, Gossypium hirsutum
  Clone ID: LIB3584-050-P1-K2-D11.pep
ANWLDLVKGGFIANVQCAEVWCPMTKEFFAEYLKKENSKKKQALYVMNPNKFRACEFLIRFHERERGDKIIVFADNLFALVEYAMKLRKPMIYGATSHLERTKILQAFKTSRDVNTIFLSKVGDNSIDIPEANVIIQISSHAGSRRQEAQRLGRILRAKGKLEDRMAGGKEEYNAFFYSLV

SEQ ID NO: 65993 - protein, 92 aa, Gossypium hirsutum
  unsure (1)..(92): unsure at all Xaa locations
  Clone ID: LIB3083-078-Q1-L1-B6.pep
MKREVKRVVVLSLKIFPMALYVMNPNKFRACEFLIWFHEXERGDKITVFADNLFALVEYAIKLRKPIIYGATSHLERTKILQAFKTSRDVNT

SEQ ID NO: 65994 - protein, 167 aa, Gossypium hirsutum
  Clone ID: GOSHI-09MAY01-C22081_1.pep
MNSVITGNFRPAFFPSQLSKNSAQFLFRPFTTLVFTRSLTAKVRAFVETKPTAPIAVEKEESGGGSGSCGLACPICYNLLMVITDSPIYVGSTVGTNLQCNTCKKTYSGTQTHLDLVASSGSKQYDESMPLATELFRTPVVSFLYERGWRQNFVFGGFPGPEKEFDM

SEQ ID NO: 65995 - protein, 186 aa, Gossypium hirsutum
  unsure (1)..(186): unsure at all Xaa locations
  Clone ID: LIB3825-003-Q1-K6-D10.pep
IQLLPAPIEVEKEESGGGSGSCGLACPICYNPLTGINSWVXLQCNTCKKTYSGTQTHLDLVASSGSKQYDESMPLATELFRTPVVSFLYERGWRQNFVFGGFPGPEKEFDMAKNYLKRVLGGKIVDASCGSGMFTRLFAKSGLFSQVIALDYSENMLRQCYEFIEQEENFPKEKVTLVRADISRLP

SEQ ID NO: 65996 - protein, 175 aa, Gossypium hirsutum
  unsure (1)..(175): unsure at all Xaa locations
  Clone ID: GOSHI-09MAY01-C22001_1.pep
MKQKTWPDRSDGVRFTAFPLSKPNDNEENIILSRRSKIGSKPSLSPTDGPDFSALPFDILTKIAASFNFPNLLAASLVCRSWRDALRPLREAMMLLRYGKRFKHGRGGVRRNLDKALDSFLKGAARGSTLAMVDAGLXYWEXGLKEEAIAFYQKAAALGDPAGQCNXGISYLHAQ

SEQ ID NO: 65997 - protein, 197 aa, Gossypium hirsutum
  Clone ID: GOSHI-09MAY01-C22021_1.pep
VNAVLWVVVAMALVLGIAESFDFHEKDLASEESLWDLYERWRSHLMVSRSLDEKHKRFNVFKQNVKHVLHTNNDNKPYKLMLNKFADMTNHEFRNAYASSKIRHHRMFQGTPRGTSSFTYENVNNVPTSVDWRKKGAVTAVKDQGQCGSCWAFSSVVAVEGINQIKTNKLVSLSEQELIDCDTEKNQRCNGSLMDIA

SEQ ID NO: 65998 - protein, 139 aa, Gossypium hirsutum
  Clone ID: GOSHI-09MAY01-C122349_1.pep
DSLLMPPPEGVQPFSSGSKKLFLVHPSCIGNFLHAIYYQEHSSLIWRHHKPCWYINCLKQVDLKERNRSLVHPLVQWNFSWAISYQGYSGLIWCHHEPCRYENCLKQLISKFFFSSSVIMKPYHSTMLVLVCITWPPDG

SEQ ID NO: 65999 - protein, 124 aa, Gossypium hirsutum
  Clone ID: GOSHI-09MAY01-C22201_1.pep
MMHMTLYWGKDVTLLIDSWKTDSWLSYLLTLLACFLFSSFYQYMEDRRLRFRSLASSNPSPPSSAGASVPLLPKYRRSAKFATALLFGINSAIGYLLMLAIMSFNGGIFLAIVLGLAGGYLILR

SEQ ID NO: 66000 - protein, 242 aa, Gossypium hirsutum
  unsure (1)..(242): unsure at all Xaa locations
  Clone ID: GOSHI-09MAY01-C23991_1.pep
NHGIVQELNRNSAGSDIGASNKSSDIFKTCYNLPPSSQSFMLELQRENHVAYLTKGLTGLGPSFCVLDANRPWICYWILHSIALLDEFVDPELEDNTIDFLSRCQGPNGGYAGGPGQMPHLATTYAAVNSLVTLGGDKALSSINRXEKLYMFLRQMKDASGGFRMHDGGEIDVRACYTAISVASLLNILDDELVQNVGNYILSCQTYEGGISGEPGSEAHGGYTFCGLATMILINEVDRLDL

SEQ ID NO: 66001 - protein, 129 aa, Gossypium hirsutum
  unsure (1)..(129): unsure at all Xaa locations
  Clone ID: GOSHI-09MAY01-C23961_2.pep
QSKKFFYLPLNEKLKVLRNEXHRGYTPMFDEVLDPDNQVHVCVQLXVSSFFSPVGVAGDYKEGYYIGVDVPENDPESEKPFNGPNVWPADGVLPGWRQTMEKFHHEALEVGKAVSRIIALALDLEVDFF

SEQ ID NO: 66002 - protein, 246 aa, Gossypium hirsutum
  unsure (1)..(246): unsure at all Xaa locations
  Clone ID: AI727878.1.pep
YRFGTSSMFDEFLDPDNQVHGDYKEGYYIGVDVPENDPESEKPFNGPNVWPADGVLPGWRQTMEKFHHEALEVGKAVSRIIXLALDLKVDFFDKPEVLGKPIATLRLLHYEDQFSDPAKGIYGAGAHSDFGFITLLATDDVMGLQICKDKDAKPQIWEYVTPIKGAFIVNLGDMLERWSNCMFKSTLHKVLGNGQDRYSIAYFVEPYHDCLVECLPTCKTEXSPPKFPXIXCSTYLSKRYKDTHAN

SEQ ID NO: 66003 - protein, 118 aa, Gossypium hirsutum
  Clone ID: LIB3083-110-Q1-L1-A12.pep
MANQKQSGPEPPIKVSTINCIDLSNPDIGESVALLKQACLDCGFFYVVNHGISQEFMDEVFAQSKKFFYLPLNEKLKVLRNEKHRGYTPMFDEVLDPDNQVHGDYKEGYYIGVDVPEN

SEQ ID NO: 66004 - protein, 192 aa, Gossypium hirsutum
  Clone ID: GOSHI-09MAY01-C23841_1.pep
MPDVTEAMASETQDNLANASSCLGELDEVAGSSAADGPVSCDSEALMLSSVLTSNCQFPELTNGIICCTLNTEDPEVPCNEDVFSKQLCPSVVSSTQHVFKEAGNPLSASFKDFSGGQKTDGGPFLVQRDQRDPGQSIGASQTKESQMVPEMGQLHPVNNCRVKCEDSSCVAPKTDGFLANVSPQTNSKNIT

SEQ ID NO: 66005 - protein, 179 aa, Gossypium hirsutum
  unsure (1)..(179): unsure at all Xaa locations
  Clone ID: GOSHI-09MAY01-C23861_1.pep
MLMQTSAIFSSKPAWVKAVHRTSSTDSNSMAATVPAPKWAQKTVTLPPLRRGCHLVTSQILKEIRPDLSEFKCGLAHLFLQHTSASLTINENYDSDVRDDTETFLNKIVPEGRSAPWKHTLEGPDDMPAHIKSSMFGCALTIPITDGLLNMGTXWQGIWLCEHRGAPTASKVVVTLNGI

SEQ ID NO: 66006 - protein, 82 aa, Gossypium hirsutum
  Clone ID: GOSHI-09MAY01-C23591_1.pep
MSEPPVKPVLQKPPGYKDPSSPAGQRRFRPPPRKPVLPPSFHPKKRKTSYGRACCCCFCIFFLIFLLLILICGAVFYLWFDP

SEQ ID NO: 66007 - protein, 279 aa, Gossypium hirsutum
  unsure (1)..(279): unsure at all Xaa locations
  Clone ID: GOSHI-09MAY01-C23581_2.pep
RASEATVTAYLQRADELQKHEPLLAYYCRLYAMEKGLRIPQSERTKTTNSLLVSLMKQLEKDKKTLRLGPEDHLHLEGFALNVFGKADKQDRAGRADLNTAKTFYAASIFFEIINQFGELQPDLEQKQKYAAWKAADIRKALKEGRKPTCGPPNGDEDLSVLSSTHSGSYDHGPGELPVTSPRQDSDPSPQFHDEINNQHQANIPPSTQFHDKIDRQHSFDILASHPSFPPRSYPSXDNPFHKIPKTLSLPPPQAXEESTYPHAYHHQPYSQEPHHICT

SEQ ID NO: 66008 - protein, 146 aa, Gossypium hirsutum
  Clone ID: GOSHI-09MAY01-C23581_1.pep
NDVGRLYAMEKGLRIPQNERTKTTNSLLVSLMKQLEKDKKTLKLGPEDHLHLEGFALNVFGKADKQDRAGRADLNTAKTFYAASIFFEIINQFGELQPDLEQKQKYAVWKAADIRKALKEGRKPIPGPPNGDEDLSIPSATSGCCI

SEQ ID NO: 66009 - protein, 89 aa, Gossypium hirsutum
  Clone ID: LIB3585-055-P1-K1-B10.pep
MASDNEPAKLLLPYLQRADELQKHEPLVAYYCRLYAMEKGLRIPQSERTKTTNSLLVSLMKQLEKDKKTLRLGPEDHLHLEGFALNVFG

SEQ ID NO: 66010 - protein, 73 aa, Gossypium hirsutum
  Clone ID: GOSHI-09MAY01-C23541_3.pep
MDSATRRRSQGGLFEGLYRVIMRRNSVYVTFVIAGAFLGERAVDYGVHRLWEYNNVGKRYEDIPVLGQRQSEE

SEQ ID NO: 66011 - protein, 72 aa, Gossypium hirsutum
  Clone ID: GOSHI-09MAY01-C23541_1.pep
MDYASRRSQGGLFEGLYRVIMRRNSVYVTFVIAGAFLGERAVDYGVHKLWEYNNVGKRYKDISVLGQRQSEE

SEQ ID NO: 66012 - protein, 59 aa, Gossypium hirsutum
  Clone ID: uC-gsronu33B005d09b1.pep
MDYASRRSQGGLFEGLYRVIMRRNSVYVTFVIAGAFLGERAVDYGVHKLWEYNNVGVNF

SEQ ID NO: 66013 - protein, 85 aa, Gossypium hirsutum
  Clone ID: LIB3148-049-Q1-K1-B1.pep
IYAHTHSSNKKLQNIHKEKEKDEFIPLIASVLAQKCLCIVSQHCCIPRAYELHLSSVRFFSIAFFYFLCYVFIVLVFYLEDQTFD

SEQ ID NO: 66014 - protein, 107 aa, Gossypium hirsutum
  unsure (1)..(107): unsure at all Xaa locations
  Clone ID: GOSHI-09MAY01-C23511_1.pep
AGLFWGFCSAPYDARKXSLTGTAQASFVAKSVGKFGFQSGLVAGVFATTRCGLQKYRKRNDPLNTLIAGAVAGAAVAAQTRNWNNIIGVACLVSAFSVAADHISRAN

SEQ ID NO: 66015 - protein, 138 aa, Gossypium hirsutum
  unsure (1)..(138): unsure at all Xaa locations
  Clone ID: LIB3584-050-P1-K2-F12.pep
DAWADAWVEEEFTAVVPCSSLAVDSVLRFAAAGVFWGFCSAPYDARKRGLTGIAQASFVAKSVGKFGFQSGLVAGVFATTRCGLQKYRKRNDPLNTLIAGAIAGAAVAAQTRNLNNIIGVACLVSAXSVAADHISRAN

SEQ ID NO: 66016 - protein, 158 aa, Gossypium hirsutum
  unsure (1)..(158): unsure at all Xaa locations
  Clone ID: GOSHI-09MAY01-C23461_1.pep
GSSDLNESDIGIITPYRQQVLKIKKVLETWDLLDVKXLGSVAQFQGQERGVIIASTVRSTVQHSEVDRTYCLGFLSNPKRVNVAITRAKSLLIIVGNPHIVCKDPYWEKLVWHCHENNSYQGCPPPERVNHDFEESCSETGLSNEIEGSRWNDGTWDC

SEQ ID NO: 66017 - protein, 90 aa, Gossypium hirsutum
  Clone ID: GOSHI-09MAY01-C23401_1.pep
RLTRFDSINSSKDFGSGFSRFDSVNNSEDFGSRFSPQPETLTRFDSISSSKDFGHGFSFDDSDPFGSSGPFKVSSDQQSPKKSSDNWRAF

SEQ ID NO: 66018 - protein, 154 aa, Gossypium hirsutum
  Clone ID: GOSHI-09MAY01-C23791_1.pep
MAGQRNSYGKRAHSHSGYSENGSNKRRNAGDDREQFVIDSDDTVYRYLCPARKIGSIIGRGGEIVKQLRAETKSKIRIGETIPGSDERVVTIYSSRDERNALEDGDTFVSPAQDALFRVHDKVVAEDLHSDDESEGHQITARLLVSSDQIGCVI

SEQ ID NO: 66019 - protein, 142 aa, Gossypium hirsutum
  Clone ID: uC-gsflnu33B023g12b1.pep
YSYGKRAHSHSGYSENGSNKRRNAGDELVQISGEAAVVKKALHQIASRLHENPSRSQHLLASAVSNAYPAAGAMLGPAAGAQIVGITSLVGPYGRYKGDTGEWPRSMDSGSRDEMALKEFSFRLVCPTAYIGGVIGKVVLLS

SEQ ID NO: 66020 - protein, 161 aa, Gossypium hirsutum
  Clone ID: GOSHI-09MAY01-C23661_1.pep
MATTGQPKRQGQQQQQQQQQNKTTEKRKPVFVKVDQLKPGTKGHTLVAKVLSSNMVLQKGRAASRNLRQTRIAECLVGDETGTVLFTARNEQVDLMKPDDTVILRNAKIDMFKGSMRLAVDKWGRIEVTDPANFVVKEDNNLSLVEYELVSVLENDEIAET

SEQ ID NO: 66021 - protein, 161 aa, Gossypium hirsutum
  Clone ID: GOSHI-09MAY01-C23151_1.pep
MPSDKKKNVLVGIRLDSESRDLLSWALGKVAEPGDCVVAGQVTRNSDHALGQKLLLEGYLEAYEGLCSIKKVDLKGQIHKGNSIRKVLIREAINYGAVALVVGIDKTSPLGGWTSTARYCTKRLPTTTNVVAINMGKIVFERSNKNELSRLKGDPRPSLYL

SEQ ID NO: 66022 - protein, 142 aa, Gossypium hirsutum
  Clone ID: GOSHI-09MAY01-C23101_1.pep
MRGPNRGIYSNSTKERAPGSMKFTMEEIFKATRNFSPAFKIGQGGFGTVYKGKLDDGTLVAIKRAKKSVYDKHLGVEFQSEVTTLAQVEHLNLVRFYGYLEHGDERVVVVEYVPNGTLREHLDGVNGKELDFASRLDIAIDV

SEQ ID NO: 66023 - protein, 185 aa, Gossypium hirsutum
  unsure (1)..(185): unsure at all Xaa locations
  Clone ID: GOSHI-09MAY01-C23041_1.pep
MPPHRSKSEKNDGMAKQLRRDPYEVLGVSRNSTDQEIKSAYRKMALKYHPDKNGNDPVAADMFKEVTFSYNILSDPDKRHQYDTAGFEAVEAENQELELDLSSLGAVNTMFAALFSKLGVPIKTTVSATVLEEALNGXVTIQTPLLGPPVSRKGEKPCPPSSPFKYQKGTKMVCLAIQSLNKTSS

SEQ ID NO: 66024 - protein, 100 aa, Gossypium hirsutum
  Clone ID: GOSHI-09MAY01-C23071_1.pep
MSMNSRIFFRFLVWWIFFSFFSGLISSAVVRLDSIEIYNTHDWITKPTVYFVCKGENMTVLPDVTKANTVYTFKGEESWQPLTELTSEKCKRCGFYEKDT

SEQ ID NO: 66025 - protein, 98 aa, Gossypium hirsutum
  Clone ID: GOSHI-09MAY01-C23031_1.pep
RPCFWNYLLTKTWIVPISGSRGDDLLTRESSRLDHHLHYRRFVGVNKRAKVFNFPTWLCLSSVGVGTWEHLHVPPRVFLSQFTTPNVSSSHVGTTIIE

SEQ ID NO: 66026 - protein, 189 aa, Gossypium hirsutum
  unsure (1)..(189): unsure at all Xaa locations
  Clone ID: GOSHI-09MAY01-C23391_1.pep
MMSGGGAGGVEWHVRPPNPKNPIVFFDITIGSIPAGRIKMELFADIAPKTAENFRQLCTGEYRKAGLPVGYKGCQFHRVIKDFMIQAGDFLKGDGSGCTSIYGLKFDDENFIAKHTGPGLLSMANSGPNTNGCQFFITCAKCEWLDNKHVVFGRVLGDSLLVVRKIENVATGPNNXPKLPCIIPECGEM

SEQ ID NO: 66027 - protein, 180 aa, Gossypium hirsutum
  Clone ID: GOSHI-09MAY01-C23341_1.pep
AVFKRNLFSRVSALLLSERREDRIDDFAQQMEINGFWPVDKREAIVQTLLKNVDVKNEYHCSMKFETAEELSLHMPTCSFRVMTGDNEGCDDRFSANKSEKHDSTCPFKIIPCEQKCPDFIMRRDMDRHCITVCPMKLVNCPFFSVGCKAAVPHCKIDEHQSEELHYHILYILKAFTREH

SEQ ID NO: 66028 - protein, 88 aa, Gossypium hirsutum
  Clone ID: GOSHI-09MAY01-C98901_1.pep
LSFTYSGVVNKLEIPSLLWQFLGNLRNLRDSHAALAVGSSETVAGEPSPVTRIISECESALTSLNCDLGILSASIAREKAMQGQQVNF

SEQ ID NO: 66029 - protein, 163 aa, Gossypium hirsutum
  Clone ID: GOSHI-09MAY01-C98851_1.pep
NSPVRANWMNEFSGVMKNVYGPVTAAKTIYEDDESFLIIVSLPFSDLPRVKVAWRNTPSHGIVKISCVSTACMPFIKRQDRTFKLTDPAPEHCPPGEFIREIPLPNRIPENAKLEAYHDETGTMLEIIVPKHRVGPEEHEVRVCFRPSPWSERPFMDLEESIL

SEQ ID NO: 66030 - protein, 69 aa, Gossypium hirsutum
  Clone ID: GOSHI-09MAY01-C98581_1.pep
GRVGEHSFEQKLGIIKNPTAHSSQSQTHSKSSRDDDNKRTRGQDQVMMTTTDALPSPRDYGNGSSSWFW

SEQ ID NO: 66031 - protein, 57 aa, Gossypium hirsutum
  Clone ID: GOSHI-09MAY01-C98551_1.pep
EGAASKRMGFFHMNPFSRINSQNKSRQAKREKKKRGAPTHFCPSKVSYEKRSKILLV

SEQ ID NO: 66032 - protein, 242 aa, Gossypium hirsutum
  unsure (1)..(242): unsure at all Xaa locations
  Clone ID: GOSHI-09MAY01-C98401_1.pep
RRVGKSEEDEQVHEEERLLDALMDVKDEKGETLDDEEIIDIMLMYLNAGHESSGHTTMWATIFLQQHPEFLEKAKAEQERIVKKRPPTQXGLTLKDIREMEYLSKVIDETLRLITFSLMVFREAKTDVKISGYTIPKGWKVLAWFRSIHLDPEIYPNPKEFDPSRWDDYNAKAGTFLPFGAGSRLCPGNDLAKLEISIFLHHFLLNYQLERHNPESKIRYLPHTRPNDNCLAVIKKNLPSPP

SEQ ID NO: 66033 - protein, 267 aa, Gossypium hirsutum
  Clone ID: GOSHI-09MAY01-C98181_1.pep
PLKKQKGYFSNGKTSRPISSMAEGLLGLLLHFTRSLDQETISVVKEHQIMSIFCEQLSFPAKPRVRQLAAVGLKNLSEAGRSVAAADSEPPPPQGFCAPLVFMCVRASPKPSTCPIHNAPCENNNQLCLLKSNCIRPLVDHLRDEDTFVQIAAIEALSTLMLDTGNGYKRSVDELEKQDVIMAVIELFTEIRPGVLQEKALWMIEKALRVDGPAHKYSLNQALVRALVEAFKHGNANAKRHAQDALTNLKQISGVSGKASSHSRPRR

SEQ ID NO: 66034 - protein, 85 aa, Gossypium hirsutum
  Clone ID: GOSHI-09MAY01-C98071_1.pep
CSIGKTITSIQLFVGNTPRLNPNTPMDKPQILTIFRRTIIKCIYHPMQGEGSHSLAAAFSSIFSFQEKLWGQEETFSKTELQTAI

SEQ ID NO: 66035 - protein, 102 aa, Gossypium hirsutum
  Clone ID: GOSHI-09MAY01-C98391_1.pep
LLFHRFSNSFFPPTIRCWGWHKLCITLLALRQVQQQIIKNPTNCGCKTESCFHAEMSLKMPATVQFFICQLLHLNSLLRNFVSFLFAESHKEIRSQSVLWML

SEQ ID NO: 66036 - protein, 57 aa, Gossypium hirsutum
  unsure (1)..(57): unsure at all Xaa locations
  Clone ID: LIB3829-005-Q6-K6-F1.pep
XWXNLIYVFNEEYHQKYPSCLCEISAENGKCSWRRVPRLPLPVNKFHKVISFCSPFL

SEQ ID NO: 66037 - protein, 167 aa, Gossypium hirsutum
  Clone ID: GOSHI-09MAY01-C99941_1.pep
MMTSKLKGDGDGDGNNGEMEGDTALKGTLLAGVLLAGVVGGFASAGYVYKDQINAFLNQLSTFIEGYGPAGYALFVAVYAGLEVLAIPAIPLTMAAGLLFGSVIGTILVSISGTVAASIAFLIARYFARERILKLVEGNKKFLAIDKAIGENGFRVVTLLRLSPLLP

SEQ ID NO: 66038 - protein, 273 aa, Gossypium hirsutum
  Clone ID: GOSHI-09MAY01-C99841_1.pep
DQNLKVYDFKDLEAATENFSNKYKMGASVYRGVFFVELLAIKQMSKAVDKEVSLLQRINHFNLISLRGACEHSGVFYLVYEFMENGSLKEWLQNKSCQKFQVWGYRIHIALDVANGLHYLHNFTTPAYVHKDICSDNVLLDRDLRAKISNFSLARSAEREDSRKSSMWSSLGTKGYKAPEYIEYGLVTPEMDIYAFGVLLLELKGHLWMKLARQMLKLSIDCLAEEPETTLSMAEVVSYLLRIQLDAQRSEEPFHGRLKSMDNKLNFSNAHFS

SEQ ID NO: 66039 - protein, 111 aa, Gossypium hirsutum
  Clone ID: GOSHI-09MAY01-C99581_1.pep
LESKQEVANSGLWYLCQFAEGVKDGVNTKFFQDVGAKLAIDSAVKYEEKSVKGLQFLTETNESAPNQKPTVDPDKTDVDSPVKKVPTMKTKVHRSYPVGISWARDIIGSDT

SEQ ID NO: 66040 - protein, 177 aa, Gossypium hirsutum
  unsure (1)..(177): unsure at all Xaa locations
  Clone ID: GOSHI-09MAY01-C99541_1.pep
MEAALAELERVQLQILRRISKLELSHLPQNAEPILSSSPLTNGDASSDVEACLSNILRSNGVNDFIFKRVASDYYDWPLESRRDVLGAASVHHLCKSIVLXRLAPEETSIKLTGYEHNAVTCIGMQTDIPVILDEAIVKLDPDFFWLGGGEVDLKLGIRTSEFINFVKPFIVSCSGT

SEQ ID NO: 66041 - protein, 216 aa, Gossypium hirsutum
  Clone ID: GOSHI-09MAY01-C99441_1.pep
AFWLQYLEVLSTHCLKRFEVGGIDLTKLLAQELGKSNPMVNLSLSDVEKLKEQFSCCAEDEVAYDRMLRSCETEEHTLPDGQVIRIGRERFTVGEALFQPSILGLEAHGIVEQLVRSIATVSSENQKQLLENTVLCGGTTSMTGFESRFQKEASLCSSAIRPSLVKPPEYMPENLSVYSAWVGGAILAKVVFPQNQHVTKADYDETGPSVVHRKCF

SEQ ID NO: 66042 - protein, 116 aa, Gossypium hirsutum
  Clone ID: GOSHI-09MAY01-C99421_1.pep
LCSVQGIVFCYLNVTVHAWTNAKGVFFGLGCSAAALMRSVESPSSSKVSNMDECVHGQGREVHCSFRLPHSRPELNRSLQHGVQSLVKHSRPVQASFCTICDRFGLRFLYIGFFHH

SEQ ID NO: 66043 - protein, 142 aa, Gossypium hirsutum
  Clone ID: GOSHI-09MAY01-C99631_1.pep
RSGDVYKRAEHSVLDWHHSNLRRGPITIVQNSILAPVFRRPLNPEAVAEGEKILSAALSKIESFWLDDNRPFLLGENQPSIADLSLVCDIMQVKLVGETDWNRLLGPYKKVQQWIENTRNATNPHFDELHKVLKELKEKLQN

SEQ ID NO: 66044 - protein, 275 aa, Gossypium hirsutum
  unsure (1)..(275): unsure at all Xaa locations
  Clone ID: GOSHI-09MAY01-C99041_1.pep
EPIGFREPKRFSPFGPGRLDREWTGTSAPVRDEVDSCLVEEERIRVLGDPLTEEEIEELVEKYRHSDCARQINLEXGVTHNMLDDIHNHWKRAEAVRIKCLGVPTLDMDNVCFLLEEKSGGKIIYRHINILILYRGPNYDPPNPPVIPLMLWKPYAPYFSEXLVKNFADGLTFEEPTELRNRGLPSPAPMKLTRNGVYVNVVARVREAFETEEVIRLDCTHVGTSDCKRIGVKLRDLVPCVPILFKDEQIILWRGKRDQERNSDISDANEKSAGT

SEQ ID NO: 66045 - protein, 90 aa, Gossypium hirsutum
  Clone ID: GOSHI-09MAY01-C99351_1.pep
RTRGANLDVLRAKILVVESTFVDNSVSVEHARDYGHVHLSEIINYADKFNNRAILLIHFSARYALETIQEAIAALPSPLAGRVFALTEGF

SEQ ID NO: 66046 - protein, 173 aa, Gossypium hirsutum
  Clone ID: GOSHI-09MAY01-C99211_1.pep
GRVGGRVGGRVGCEVRVILKGLGVRIDERDVSMHSGFKEELKELIGEGFKGGLPRVFVGEKYIGGAEEVRRMHEEGKLEKAVEGCEMVGDDGDGNGGGSGACEACGDIRFVPCETCSGSCKVYYEDDEREEQEQQEQQEEDDDENGGEKGEYGFQRCPDCNENGLIRCPICCY

SEQ ID NO: 66047 - protein, 196 aa, Gossypium hirsutum
  Clone ID: GOSHI-09MAY01-C94451_1.pep
IPSSCLDTIRSWTTKLANRLNVCGLMNCQYAITASGDVFLLEANPRASRTVPFVSKAIGHPLAKYAALVVSGKSLYDLDFTKEVTPKHVSVKEAVLPFEKFQGCDVLLGPEMKSTGEVMGIDFEFAIAFAKAQIAAGQKLPLSGTVFLSLNDLTKPYLERIAKAFLGLGFHIISTSGTAHCLELKGIPVEPVLKMH

SEQ ID NO: 66048 - protein, 295 aa, Gossypium hirsutum
  unsure (1)..(295): unsure at all Xaa locations
  Clone ID: GOSHI-09MAY01-C94121_1.pep
MKKKRSKATEDAAAASHNNKDESHYLREEEEEEEEEDKTEIPHVTHGYDLVKGKMDHGMEDYVVVESRRINGHDIRLYAIFDGHSGRDVAKYFHTHLFDKMLSQSDFWRNPEGAIKRAYKEMDDEILEDVAGSRGGSTAVTAILIDRKKLMVANVGDSRAILCGGDGVKQVTIDHEPNKEKQVVESRGGFVSKKPGNVPRVDGQLAMTRAFGDGKLKEHITSEPDVRIEIIEPNTVEFIILASDGLWKVMSNEEAFDEIREYDDAXEASQVLIKEALARGSRDDISCIVVAFGWS

SEQ ID NO: 66049 - protein, 56 aa, Gossypium hirsutum
  unsure (1)..(56): unsure at all Xaa locations
  Clone ID: GOSHI-09MAY01-C94061_1.pep
EGEDSRXLPVHYSDNYFSLVPGEEMSIKISFKVPPGVSPRVTLRGWNYHHGVHTVL

SEQ ID NO: 66050 - protein, 58 aa, Gossypium hirsutum
  Clone ID: GOSHI-09MAY01-C94011_1.pep
HITKCQVPIHVVLKIIRVAIPKWAGERGNMPPTGTGPRANLGKTIPNDSTRRGGDTTN

SEQ ID NO: 66051 - protein, 123 aa, Gossypium hirsutum
  Clone ID: GOSHI-09MAY01-C94351_1.pep
MNLRLSSALLTVFLALSALSSSSHATENWSRSMFWSKLQVRDRRLSSDQICHGHPGKCLEETDLDIPRRELSARKYISYAALRMNAVPCNQPGRSYYNCGIGEVANPYTRGCSVLTRCRRFTA

SEQ ID NO: 66052 - protein, 36 aa, Gossypium hirsutum
  Clone ID: GOSHI-09MAY01-C94311_1.pep
SFEFRPFITLPSHTSVLIHLLLYNILVCNLYYKNYG

SEQ ID NO: 66053 - protein, 83 aa, Gossypium hirsutum
  Clone ID: GOSHI-09MAY01-C94301_1.pep
DNVESVEYAARNLNRGSYSWSLGLRAFYLCFPLLLWIFGRVPFIMCCCIMTCVLYFLDTTTSFTRQLHRRSFKEETLKTGYLE

SEQ ID NO: 66054 - protein, 183 aa, Gossypium hirsutum
  unsure (1)..(183): unsure at all Xaa locations
  Clone ID: GOSHI-09MAY01-C94211_1.pep
DLWGALLGACRVIKSRNCQKAAXKFLELDPXNGAVYVLLCNIYAYCKKWDSLHELRESMMHRGIRKTPGCSLIEMNGVVHEFVAGDRTHPRSKEIYLKLDNMTRDLKLSGYSPDTSEVFLDIGEEDXQHSKRLVLASGLSSSEPGVTLRSVKNLRMXIVRDRTRFNHFRLESCSCKDYWLELN

SEQ ID NO: 66055 - protein, 94 aa, Gossypium hirsutum
  Clone ID: GOSHI-09MAY01-C95351_1.pep
HASGRVRRAWRGPSLSLAATGHSLEAATARLSGARVSAFNVLGLGFVLGLLLYLFYYLWGLGHLGLLQFSYYFIVLIVKYVLFLKKCLLNVLGK

SEQ ID NO: 66056 - protein, 270 aa, Gossypium hirsutum
  unsure (1)..(270): unsure at all Xaa locations
  Clone ID: GOSHI-09MAY01-C96731_1.pep
TLRRQSSGVDIGSXGTEGPPKLRRYASVSENINSLASQCSPGNLAPLRRTSSLSFDEKLLIQALYKVLIYVSKASPIVLYLRDVDKLLSRSQRIYNLFQKMLKKLSGNVLILGSRVVDLNNDDREFDDRLSAIFPYNIEIRPPADEKHLVSWKSQLEKDMKMIQAQDNRNHIMEVLSANDLDCDDLDSICIADTMALSRYIEEVVVSAISYHLMNNKDPEYRNGKLVISSKSLSHGLSIFQEGKSIGKDTLKREPQSETLKETGAGSVGV

SEQ ID NO: 66057 - protein, 87 aa, Gossypium hirsutum
  Clone ID: GOSHI-09MAY01-C96041_1.pep
PFHMARDQIEESLRTKMASVKERMVQLQDAQKGAEVTSEATERELELEAQLVEARSIIQEQASIMSKHLATADRPRESIIPSPAEGV

SEQ ID NO: 66058 - protein, 93 aa, Gossypium hirsutum
  Clone ID: GOSHI-09MAY01-C97961_1.pep
DDVALPFVVPAPKYGPKDRPATAQAMREALAELSEREAKSLAEVEITENMTEEVSDEDNEEVNEATNYVIEEKEEDKTYAEKLWSQVDSSQSS

SEQ ID NO: 66059 - protein, 182 aa, Gossypium hirsutum
  Clone ID: GOSHI-09MAY01-C97461_1.pep
MRLCVYIFRAVNVFSCAYLINLVRPAHRQIPSKHQKALCYSGLRGAMAFALALQSVHDLQEGHGQIIFTATTAIVVLTVLLIGGSTGTMLEALQVVGDGHDAHLGEGFEGNNGYVPTSREEDETTGNKLRMKLKEFHRSAASFSEIDRNYLTPFFTSQNGDSEDEEDDPMPSSRRGVYHGHS

SEQ ID NO: 66060 - protein, 54 aa, Gossypium hirsutum
  Clone ID: LIB3825-026-Q6-N6-D3.pep
LRMKLKEFHRSAASFSEIDRNYLTPFFTSQNGDSEDEEDDPMPSSRRGIYHGHS

SEQ ID NO: 66061 - protein, 52 aa, Gossypium hirsutum
  Clone ID: GOSHI-09MAY01-C97151_1.pep
LLYLNLSPTHARTWASRYGPPRVLQIHSILEKIKNTQVRCLCPTLTPESELT

SEQ ID NO: 66062 - protein, 299 aa, Gossypium hirsutum
  unsure (1)..(299): unsure at all Xaa locations
  Clone ID: GOSHI-09MAY01-C90911_1.pep
GRVGEKFDAKLFLSRIHQGTPAADLEAGALGLKTDLQGRTQQRKQLVKDNFDCFVSCKTTIDDIESKLKRIEEDPEGSGTTHLFKCMQGVCSLADRAFEPLFERQAQAEKIRSVQGMLQRFRTLFNLPSTIRGSISKGEYDLAVREYKKAKSIALPSHVKILKRVLEEVEKVMQEFKGTLYKSMEDPQIDLTSLENTVRXLLLGPEPESDPVWHYLNVQNHRIRGLLEKCTSDHEARMETLHNELREKAISDAKWLQIQQNLSQSSDANYSLGNIELPIELQPLALTGEEVDVLRGKYI

SEQ ID NO: 66063 - protein, 79 aa, Gossypium hirsutum
  Clone ID: GOSHI-09MAY01-C90901_1.pep
LKTIFILFNEEQNWEKFVGFINGKTNAPKMFEGPYMILTNNSHLVGVLKFSRSATINYIFKYYNSFIGFCLHPQGSSWK

SEQ ID NO: 66064 - protein, 234 aa, Gossypium hirsutum
  unsure (1)..(234): unsure at all Xaa locations
  Clone ID: GOSHI-09MAY01-C90461_1.pep
LFSSKCFEDLDIPICLTGYEWGXRGNNLMRILNVAAFAVSGYSSTEGRICKPFNPLLGETYEADFPDKGVRFFSEKVSHHPMIVACHCQGTGWKLWGDSNLKSKFWGRSIQLDPGGVLTLXFDDGDVFQWSKVTTSIYNLIXERMYXDHYGTMRIEGNRDFSCKLKFREQSIIDRNPHQVLGGVQDRNGRTVASLLGKWDESMHLRWGIVCKGKRQDSLQNPLSEADKPLILTD

SEQ ID NO: 66065 - protein, 198 aa, Gossypium hirsutum
  Clone ID: GOSHI-09MAY01-C90641_1.pep
MASALTVLRRLYLSIYNWLVFIGWFQVLFLALKALKESGHEHVYNAVEKPLLLAQSAAVMEILHGLIGLVRSPVSSTLPQIGSRLYLTWGILWSFPEIRTHILVTSLVISWAITEIIRYSFFGMKEAFGFAPSWHLWLRYSTFLVLYPTGISSEVGLIYFALPYIKASEKYCFKMPNKGNFSFDYFYAAILALGIYVP

SEQ ID NO: 66066 - protein, 68 aa, Gossypium hirsutum
  unsure (1)..(68): unsure at all Xaa locations
  Clone ID: GOSHI-09MAY01-C91941_1.pep
SDCLDFGVAXGAPLLHVVNPTFDYVPPKLVSLFITDTGGHNPSYMYRLIADYYSADDLVLERRTASGN

SEQ ID NO: 66067 - protein, 60 aa, Gossypium hirsutum
  unsure (1)..(60): unsure at all Xaa locations
  Clone ID: LIB3829-017-Q6-K6-G9.pep
NIGKGHISTQLIIELQLAHNNQIKALTGITWHYKLNFLKQFFVPVQDHQQSNXPPDAGRT

SEQ ID NO: 66068 - protein, 104 aa, Gossypium hirsutum
  unsure (1)..(104): unsure at all Xaa locations
  Clone ID: GOSHI-09MAY01-C91971_1.pep
NVELGLPVDSREYGIGAQILRDXGVRTMKLMTNNPAKYSGPRGRGLAIAGRVPLLSPITKDNKRYLATKRAKMGHVYDFTSSMNSVIIGGNGNTTSAVDAVSES

SEQ ID NO: 66069 - protein, 129 aa, Gossypium hirsutum
  unsure (1)..(129): unsure at all Xaa locations
  Clone ID: GOSHI-09MAY01-C91891_2.pep
AAITETLRLYPAVPVXRKGDMIAYQPYAMGRMRFIWGDNAEEFRPERWLDKNGMFQLENPFKFTAFQAGPRICLGKEFAYRQMKIFSAVLLSYFVFKLSDENRTVTYRTMINLHIEGGLHVRAFHRCQT

SEQ ID NO: 66070 - protein, 264 aa, Gossypium hirsutum
  unsure (1)..(264): unsure at all Xaa locations
  Clone ID: GOSHI-09MAY01-C91891_1.pep
GAWDNFVYKLIHNKIEQLRDSKTXSAVIKKEDDLTRYLQVKDTDXKYLRDTIINFXVLGKDTTASTLSWFIYMLCKHPDVQERLXVEVKEATKSMEVKDVDEFAASLREEALEKMHYLHAAITETIRLYPAVPMDGKICFSDDTLPDGFSVRKDDLIVYQPYAMGRMKFIWGDDAEEFRPERWLDKNGMFRSESPFKFTAFQAGPRVCLGKDFAYRQMKIFSAVLLRCFVFKLSDENRAVTYRTMINLHIDGGLHVRAFHRCRT

SEQ ID NO: 66071 - protein, 52 aa, Gossypium hirsutum
  Clone ID: LIB3828-009-Q1-N6-G2.pep
DLRHRKTLVLSPTSVKCTNMKAPVYMKIDHRPVCHCSILITQFEYEATEKNS

SEQ ID NO: 66072 - protein, 76 aa, Gossypium hirsutum
  Clone ID: GOSHI-09MAY01-C91811_1.pep
FVADAAVGPLRSSVIIKRKASLGNTFFFVSLILSLLLEANMFSDHESGSQMVQEFIAICNFVEKMEFADYIRLLAK

SEQ ID NO: 66073 - protein, 73 aa, Gossypium hirsutum
  Clone ID: GOSHI-09MAY01-C91821_1.pep
SREAHFAYCNREKGYQNQEVISDLNRWALFYSIFFFSFSLALLFSSCCFFYFYLKTRIKKAKGLPFRTRHRSP

SEQ ID NO: 66074 - protein, 165 aa, Gossypium hirsutum
  Clone ID: GOSHI-09MAY01-C91581_1.pep
GLGINLTAADTCILYDSDWNPQMDLQAMDRCHRIGQTKPVHVYRLATAQSVECRILKRAYSKLKLEHVVIGKGQFHQERKQSNDLVEEEDLLALLRDEETAEDKMIQTDISDEDLERILDRSDLIADTSDKEKAQASADAVPLKGPGWEVVLPTGTGGMLSTLNS

SEQ ID NO: 66075 - protein, 210 aa, Gossypium hirsutum
  unsure (1)..(210): unsure at all Xaa locations
  Clone ID: GOSHI-09MAY01-C91571_1.pep
MHRSDPTCVPIYTIFIGPNDEQPLLLGWTHSHLGIWAAANLIAHGVYTGPRHMRPVYKSIKFKAPSNYQLCNLXASLAGFXIPLMLLLASQRGLMQPHLPFLPFAVLLGPYMLLLSVQVLTEILTWHWKSPVWLVTPIVYEGYRVLQLMRGLKLGAEIDAPAWVMHSIRGLVCWWILVLGMQLMRVAWFVGFTAQASQQQVSSSASDAQH

SEQ ID NO: 66076 - protein, 226 aa, Gossypium hirsutum
  Clone ID: GOSHI-09MAY01-C91511_1.pep
MGVTPKIAPSMLSSDFANLASEAKRMLDFGADWLHMDIMDGHFVPNLTIGAPVIESLRKHTKAYLDCHLMVTNPIDYVELLGKAGASGFTFHVEVSKENWQELIQKIKLKGMRPGVALKPGTPIEEVYPLINSENPVEMVLVMTVEPGFGGQKFMPEMMDKVRVLRNKYPSLDIEVDGGLGPSTIDVAASAGANCIVAGSSVFGAPEPATVISLMRKSVLENQEKS

SEQ ID NO: 66077 - protein, 57 aa, Gossypium hirsutum
  Clone ID: GOSHI-09MAY01-C91611_1.pep
KCMILMDVMNVEGMTVDVIHTTLKVWQSGSSRLLVLMSAVLKFSSAEKEMFSHFKPA

SEQ ID NO: 66078 - protein, 140 aa, Gossypium hirsutum
  Clone ID: GOSHI-09MAY01-C91061_1.pep
MHDPNVENYSSRDFYSNLLCNTLKTHTVRRGHVTCFATVTPAVANYFGGLHGGAVAAIAERVAIATTRTVVGEDKEIFLVDLGMSYLSAAPKDAELIVDGAVVKSGRNITAVSIEFKMKKTGKLLFTSRATFHNSPLAKL

SEQ ID NO: 66079 - protein, 199 aa, Gossypium hirsutum
  unsure (1)..(199): unsure at all Xaa locations
  Clone ID: GOSHI-09MAY01-C91301_1.pep
QLRSMGDAKNLLQYMFNSLXDTRCQLWEKAMEIKEMKEQLKELVGLLRQSELRRKEVENELREQADAIALATAATGNSPNSLKHVADGMNGSLSPMSVPAQKQLKYSPGIVNGPARESAAFIGQTRKMLPLGQLPMKKLVAIGQAGNGKLWRWKRSHHQWLLQFKWKWQKPWRLSEWIRHSDETMIRARPRSQALTHRV

SEQ ID NO: 66080 - protein, 44 aa, Gossypium hirsutum
  Clone ID: GOSHI-09MAY01-C91291_1.pep
SFNASQSWLLIGILYTVLNAFTMTMFLFRPFPWDHEPGVQRFIW

SEQ ID NO: 66081 - protein, 234 aa, Gossypium hirsutum
  Clone ID: GOSHI-09MAY01-C91251_1.pep
PFLAYPNLKSHMATLYTRNNCPFIVWPGTLTGAGIPQLSNTGFELAPQAWNAITVIAPWSGRLWARTQCSTSSGLFTCATANCGSGQVACNGVGAVPPATLVEFSLAPNGGQDFYDISLVDGFNLPISVTPQGGSGPNCPITSCSANVNAICPPELIVKASCGNAIACKSACLAFNQPKDCCSGESNSPPKCEPPNYSMVFKNQGPQAYSYAYDDKTSLFPCSGAPNSLIPFCP

SEQ ID NO: 66082 - protein, 163 aa, Gossypium hirsutum
  Clone ID: GOSHI-09MAY01-C92981_1.pep
GGQVNLFQSPAVSSVKPAAAANAKFFIPMPISTTMSEQSMEAITENAQEENATNNNPSTPTSTSSVNDFCQSPRTLPAVTRPRFPSMDNIPQEVITTNPDAYPSPHSRRTVSWSGGNFDDPLSPPSKPEIRPSGEAPGKPPPSFMPGPANGSFGDEQLHEVEL

SEQ ID NO: 66083 - protein, 141 aa, Gossypium hirsutum
  Clone ID: GOSHI-09MAY01-C92811_1.pep
TRNMQAFFSHFGVEGLIVSAMCAAAQAVVSPKQSQHLWYQLAMFFRDEMLSWSWRRPLGMPLAPSAGGGSMNPTDFKHKVTTNVENVIGRISGIAPQCFSEEEENVMDPPQSVQRGVTELVDAALLPRNLCMMDPTWHPWF

SEQ ID NO: 66084 - protein, 141 aa, Gossypium hirsutum
  Clone ID: LIB3828-018-Q1-N6-A1.pep
TRNMQAFFSHFGVEGLIVSAMCAAAQAVVSPKQTQHLWYQLAMFFRDELLSWSWRRPLGMPLAPAAGGGSMNPTDFKHKITTNVENVIGRISGIAPQCFFEEEENVMDPPQSVQRGVTELVDAALLPRNLCMMDPTWHPWF

SEQ ID NO: 66085 - protein, 69 aa, Gossypium hirsutum
  Clone ID: GOSHI-09MAY01-C92411_1.pep
PTKKNIYRATIQRAKTDKQRYILTMKIIDCLKHHIVFKSIKLQQALKPFPFVNSQLLASLIKSYVQLID

SEQ ID NO: 66086 - protein, 211 aa, Gossypium hirsutum
  unsure (1)..(211): unsure at all Xaa locations
  Clone ID: GOSHI-09MAY01-C92421_1.pep
HFVLIPFMAQXHLIPMVVIGRLLAQRDVTVTIGTAPYNAGSSPKISXRAIESGLPIRLLQLQFPGTEXGSPDGVENIDMLHSMEDLIKFVSAANKMEEAMLKLFEKLTPRPNCIISDINLFYTRKIATKFQVPRVSFHGFCCFCLLCLRNIQSSKINETVTSDSEYFTVPGLTDKVEFTRVQLPLDYDGSWKEIFEPMWEADRASYGVVIN

SEQ ID NO: 66087 - protein, 121 aa, Gossypium hirsutum
  Clone ID: GOSHI-09MAY01-C92781_1.pep
IKIQILTVHHQSPKSKIIPMAYSSNQLQAQMAQNMLEIKTLRFLLLCAATEQQPSASWHHSHARASVRQHTVSYMRHAYPIPARRDKRNSKYKMEKICIFLYCFIGYKAQDRKNVFFLHNR

SEQ ID NO: 66088 - protein, 170 aa, Gossypium hirsutum
  unsure (1)..(170): unsure at all Xaa locations
  Clone ID: GOSHI-09MAY01-C92641_1.pep
ADNLLWLVDILIDKRMANDFVKLWADQKELAELHSRIPTMYRHEISRITAQLCIAIGRGNILVPKDSRFSLLSTWLDALYEDFRWMRRASRSVDKKLIEEGLGQTILTLSLRQQQVILLNWFHRFLNKGDDYPNIQRAFEVWWRRXAFIRQYGDVPDSSQMQITICNYPT

SEQ ID NO: 66089 - protein, 310 aa, Gossypium hirsutum
  Clone ID: GOSHI-09MAY01-C92661_1.pep
NRPLALSTIIYEVVFPLLKFSYDNLPNATMKYCFLYCCLYPKDYCIPKKRLVEYWFCEGLLNEFDRVSDAQMQSDDIISSLLNACLLENGGEIHGEECVKMHDMMHDMALWITSESEATENNFFVKAGARLCKEPNVVAWESVKRMSMMENKIEDLKGTPKCPNLRTLFLSQNELQVISDGFFQFMPRLTVLDLSRNLRLRALPKGISQLVCLECLDLSFTGISELPIGLKLLTKLKMLDFSYMHNLKKIPQHLVSSFSQLQIFRMWWSGCGGYPNEDNVLYGSNEKLMEELNGLQYLNILTIHKKARFV

SEQ ID NO: 66090 - protein, 89 aa, Gossypium hirsutum
  Clone ID: GOSHI-09MAY01-C92081_1.pep
SYGGKSAILVFSRFARILFWWFVHNTILVVYPHNLISSITSIIFFYRWFNHNELRLLLIWCVWLDMVCSGWMGRKTTLKFMYMCINSRI

SEQ ID NO: 66091 - protein, 94 aa, Gossypium hirsutum
  Clone ID: GOSHI-09MAY01-C92051_1.pep
TFQNSKLSSHPALSCEFTFPLVAQDCLVNQAHPIAKIKQRRKQVTLRITNDSGIQLMIHLQPFQVMTLMVATDGDPLHLIVYCLKGYAGNLNSF

SEQ ID NO: 66092 - protein, 160 aa, Gossypium hirsutum
  Clone ID: GOSHI-09MAY01-C92371_1.pep
EYRLVNVMDMKANLGSFAAALSNKEVWVMNVVPEDGPNTLKIVYDRGLLGSVHNWCESYSTYPRTYDLIHAWPVFSDIERRGCSIVDMLLEMDRILRPQGYIIYNDKRSIAEVIKRYLGALHWESVAISDSQLVEQDEDDVVFIIQKAMWLTRESLKDSE

SEQ ID NO: 66093 - protein, 378 aa, Gossypium hirsutum
  Clone ID: GOSHI-09MAY01-C93921_1.pep
KSGSRKSMEEVNHKAGSCVEKTDGDDMESAKPKLKPLHWDKVRATSERATVWDQLKSSSFQLNEDMMETLFGCNSTNSVPREPIRRSVLPPVERENRVLNPKKSQNIAILLRALSVTRDEVSEALLDGNPESLGAELLETLVKMAPSKEGEITLLEYSGDISKLGSAERFLKTILDIPFAFKRIEAMLYRANFDTEVKYLRKSFQTLEEASEEVKNSRLFLKLLEAVLRTGNRMNDGTNRGDAKAFKLDTLLKLVDIKGTDGKTTLLHFVAQEIIRSEGAGTDSANGNLKEDDFRKQGLQVVGGLTKTSQCQIAAGMDSDVLSSYVSKLEMGLEKVRLVLQYEKPDMQGNFFNSMRMFLKDAEEEIAKIRHMKKSFVA

SEQ ID NO: 66094 - protein, 104 aa, Gossypium hirsutum
  Clone ID: GOSHI-09MAY01-C93821_1.pep
MNSNDIVVFFSDEGKVRKVLKVEPLPDGSGHFFNLGVQNKLLNVDENVYIPITRGEFTVLKSAFSFILPYLLGWHAFANSTKPDDTSRANNANPRYGGDYEWSR

SEQ ID NO: 66095 - protein, 101 aa, Gossypium hirsutum
  Clone ID: GOSHI-09MAY01-C93541_1.pep
MKRQGSNIEAMAQAAGKHQVRNKSRRGLDADEGEVALCSMQSTLVWWEEWAYVDEQMSWASIWSPFWDVDFVDMAYGALFNDVAWDDDIWDLKNVTVIPKQ

SEQ ID NO: 66096 - protein, 185 aa, Gossypium hirsutum
  Clone ID: GOSHI-09MAY01-C93521_1.pep
MAVRVQNFPKKTFDESSVRSLSHLSVSCTPWWSLNEQQIEEPLPHNVSLKVETPSQLYHQAKHLDLQLPDQELTTVQAIGRTHCEVGAIGATSSQRDPSESAGPVESCEKDTEGQVKPVFLGNNPNTLFSPSHQNYYLSMAGTQYPYANAYFNGLFTPYGATGYYFSPSWGECSTRIHCSRSCRR

SEQ ID NO: 66097 - protein, 162 aa, Gossypium hirsutum
  unsure (1)..(162): unsure at all Xaa locations
  Clone ID: LIB3825-008-Q1-K6-H6.pep
MQLTGKEWRQILEEYRRTHPEXTVLDPPDAIQHLHNRQSMLQCVADMNLSETYGKVGVPRQLVIKRDSSSIPDAVTKAGLILPLVAKPLVADGSAKSHELSLAYDEYSLQKLEPPLVLQEFVNHGGVLFKVYIVGEAIKVVRRLSLPDVTKRELSKMPVFSV

SEQ ID NO: 66098 - protein, 118 aa, Gossypium hirsutum
  Clone ID: LIB3825-033-Q6-K6-A2.pep
ELFKAKTRRFSQLTGKEWRQILEEYRRTHPEVTVLDPPDAIQHLHNRQSMLQCVADMNLSDTYGKVGVPRQLVIKRDSSSIPDAVTKAGLILPLVAKPLVADGSAKSHELSLAYDEYS

SEQ ID NO: 66099 - protein, 55 aa, Gossypium hirsutum
  Clone ID: GOSHI-09MAY01-C93791_1.pep
FLFGLNKWIWRSCCELWTKQAVVLQKRFYLNLQACFSVGLSSLWFFFFLVFTKGT

SEQ ID NO: 66100 - protein, 153 aa, Gossypium hirsutum
  Clone ID: GOSHI-09MAY01-C93761_1.pep
MELGDCCLTSSPASGEKRKLHRTQQKEKPFRGIRMRKWGKWVAEIREPNKRSRIWLGSYTTPVAAARAYDTAVFYLRGPSARLNFPDLIFQEDELRDISAASIRKKATEVGAKVDALQTSLHHASASSSESSNPTRVFRKPDLNKYPDSSDED

SEQ ID NO: 66101 - protein, 35 aa, Gossypium hirsutum
  Clone ID: GOSHI-09MAY01-C93721_1.pep
MKLKTISIESQISNTVLPQMTNYTPFINHTFKPRK

SEQ ID NO: 66102 - protein, 110 aa, Gossypium hirsutum
  Clone ID: GOSHI-09MAY01-C93691_2.pep
YMFHASFILTFEPKQLPLTRPKSPNLTRRMSCGDLVPATQVEKAKACSRTHRHSLGNEVQRPTTANMVKSKIQVSGQNSNSNGTHKVKDQAKQVKEMTKTAPTKIAEQSN

SEQ ID NO: 66103 - protein, 160 aa, Gossypium hirsutum
  Clone ID: GOSHI-09MAY01-C93691_1.pep
VGSSPTFRSAERAEKRREFYQKLEEKYRALEAERSQWEARTKEEQAEALKELRKSMVVKANPVPSFYYEGPLPKVELKKLPLTRPKSPNLTRRMSCGDLVPSTQVEKTKACSRTNRHSLGNEVQRPTTANMVKSKIQVSGQISNSNGTHKVKDQAKQDFN

SEQ ID NO: 66104 - protein, 150 aa, Gossypium hirsutum
  Clone ID: GOSHI-09MAY01-C93641_1.pep
EEEEEEEEEEETNGVQNEVIKGDISIEREEEELKEDIIEEEARRREEEEEASTEEEEEARRREEEDARRREEEEGASRRETKKRREEEARREQEEAWKQEEERQRRAEEAAAKGWREREKQRGQPEEKETEEGGDEGPNRRRAAKKVWLI

SEQ ID NO: 66105 - protein, 122 aa, Gossypium hirsutum
  unsure (1)..(122): unsure at all Xaa locations
  Clone ID: LIB3828-024-Q6-K6-C1.pep
GGGGGXRKKEEEEARRREEGGGARREEEEEARRREEEDARIFFFEEEAXXWGGGGGREEEARREHEEGGGQEAERQRRAXEAAAKGWREREKQRGQPEEKETEEGGDEGPNRRRAAKKVWLI

SEQ ID NO: 66106 - protein, 138 aa, Gossypium hirsutum
  Clone ID: GOSHI-09MAY01-C93601_1.pep
QRDVVRSDPLRLTEREYRTYDLGATREMQPTVSAATANTSGVVASILDSYIADPYYGRYSGDPLVDAYLSRPREAHLIQTDHLGRIESNQAERLYSQYPSDVLVDHNRMQRHQDVNPASASTSVSSRYSFGGASLPYR

SEQ ID NO: 66107 - protein, 178 aa, Gossypium hirsutum
  Clone ID: GOSHI-09MAY01-C93631_1.pep
KTDAEFLKEDVSGGTCCVTALIQNGNLIVSTAGAGRAVMSRGGAAEALTSDHRPSREDERSRIETSGGYVDLCRGVWRIQGCLAVSRGIGDQPLKQWVIAEPETKIITIKPEYEFLILASDGLWDKVSNQEAVDIARPSCVGINKQNPLSACKKLVDLSVSRGSSDDISVMLVQLGQY

SEQ ID NO: 66108 - protein, 167 aa, Gossypium hirsutum
  unsure (1)..(167): unsure at all Xaa locations
  Clone ID: GOSHI-09MAY01-C93141_1.pep
RPRGRTRGRTRGPTDTFKALLDMAAVHSSCRLCIHIATAIWEKEEKIXDAKKRPCKCNKGSETVYHLYVRERGRFEMDSIFLRSXNMTLKALEAAVHTHFKFRKHVPIWKPERPESLRGGDELKVYRIYPLGLTQRQALYTFKFKGDADLKNHIENNPCAKFEVIFV

SEQ ID NO: 66109 - protein, 203 aa, Gossypium hirsutum
  Clone ID: GOSHI-09MAY01-C93111_1.pep
MNAEYDYLFKLLLIGDSGVGKSCLLLRFADDSYLESYISTIGVDFKIRTVEQDGKTLKLQIWDTAGQERFRTITSSYYRGAHGIIIVYDVTDQASFNNVKQWLNEIDRYASGNVNKLLVGNKCDLTAKKVVSYETAKAFADDLGIPFMETSAKNATNVEQAFMAMAGDIKNRMASQPALNNARPPMVQIRGQPVNQKTGCCSS

SEQ ID NO: 66110 - protein, 99 aa, Gossypium hirsutum
  Clone ID: GOSHI-09MAY01-C93131_1.pep
QIFVPKLKKKNQKRKKRSFEGDHWGFVFSLSCLLFFISFSSLVLFKTKRKKRERRKTYRRGVVGKPFHFAVVGAKWVGNDGEQRCCCGTFWEWQRGIIF

SEQ ID NO: 66111 - protein, 149 aa, Gossypium hirsutum
  Clone ID: GOSHI-09MAY01-C93001_1.pep
MFRLYKGFKELLASSATASVPSTAAKFYAAAAAKSASPKVAQKTPKKPTASKPKTKKPAALRSETRPTGISKVTPVSPALGQFLGAQQASRTEAVKQIWFYIKSQNLQNPNNRKEIFCDEKLKTIFNGKERVGFLEIGKMLTPHFVKTT

SEQ ID NO: 66112 - protein, 173 aa, Gossypium hirsutum
  unsure (1)..(173): unsure at all Xaa locations
  Clone ID: uC-gsronu33B029e11b1.pep
MFRLYKGFKELLASSATASVPSTAAKFYAAAAAKSASPKVAQKTPKKPTASKPKTKKPAALRSETRPXGISKVTPXVSPALGQFLGAQQXSRTXAVSRFWSYIKSQNLQNPNTXREIFCDEKLKTIFNGKXKVGFLEIGKCYPYFVRLPANSLLALVHIAHQLAFQVCMLALS

SEQ ID NO: 66113 - protein, 231 aa, Gossypium hirsutum
  Clone ID: GOSHI-09MAY01-C93311_1.pep
MSGLESGSGSRYVHQLLGPELQLQPQLRDTKHSPDKEGTDHGGTTTSSGGGERRPRGRPAGSKNKPKPPIIVTRDSPNSLRSHVLEISSGSDIVDSVANYARRRGRGVCVLSGTGAVTNVTLRQPAAPSGSVITLHGRFEVLSLTVYDRLPLDNQEEEPAVQLQPAASQTSGVTGSGGGGQLGDGGNGTTSNSGGATGTGGGGGVPFYNLGSYPFPGDVFGWSGTATRPTF

SEQ ID NO: 66114 - protein, 119 aa, Gossypium hirsutum
  unsure (1)..(119): unsure at all Xaa locations
  Clone ID: GOSHI-09MAY01-C93291_1.pep
MGSSFNAQILVEKLAKLNNSQASIESILSENNCRFXLLWLFRTAKQVVETWDRQFHCSPREQRLAFLYLANDILQNSRRKGSEFVGEFWKVLPNALRDVIENGDEFGRNAALRLIRIWE

SEQ ID NO: 66115 - protein, 205 aa, Gossypium hirsutum
  Clone ID: GOSHI-09MAY01-C88821_1.pep
SPVLVFVVAALVFVVINSLRQRRHYGLPVWPFLGMLPSLVSGLRSDLYEWISDILCEQNGTFRFKGPWFSSLNCVVTADPRNLEHLLKSKFSVFPKGPYFRDTVRDLLGDGIFNADDETWQRQRKTASIQFHSAKFRQLTAESVLELVHARLLPVLENAVNQSISIDLQDVLLRLTFDNVCMTAFGVDPGCLRLGLPEIPFAKAF

SEQ ID NO: 66116 - protein, 85 aa, Gossypium hirsutum
  Clone ID: GOSHI-09MAY01-C88481_1.pep
GVFFFFFFFFFFFFFFFLKKNNTCVYFAKNSYKWLLSDPTFQRGDSTQTINQKKSYNIFWNLKGASKTKIAVWRIIHSYIPTLSN

SEQ ID NO: 66117 - protein, 93 aa, Gossypium hirsutum
  Clone ID: GOSHI-09MAY01-C88791_1.pep
RRNKTRQQQWSVDGHESVHQNPPNWTALSCLHSRAKLEFLSPMDEMLCSIPASQVHATTLFYSIPFIRFTAMEIPENQTPPSLSPISDSRSRT

SEQ ID NO: 66118 - protein, 276 aa, Gossypium hirsutum
  unsure (1)..(276): unsure at all Xaa locations
  Clone ID: GOSHI-09MAY01-C88611_1.pep
MRAWFSGGSSGNEEERGKEGSSLLSDWNSYAASKEAEEGTTTVFGFDLESAARSANDTVTGTFNVVSKGVRDLPGNLQSATSSVPSGKAFIYFGLFLAAGVFFXFIAFTMFLPVMVLMPQKFAICFTLGCGFIIGSFFALRGPKNQLAHMSSKERLPFTLGFIGSMVGTMYVSMVLHSYILSVLFSVVQVLALAYYAVSYFPGGSAWLGFLTSALTSSVSRCFGKCMVYFDFVFSLVYISDSCDFNGLRYIALLLPCSHYCCYRYFPERKSSKSVP

SEQ ID NO: 66119 - protein, 134 aa, Gossypium hirsutum
  Clone ID: GOSHI-09MAY01-C88121_1.pep
RTRGRTRGFCEMLIDIIKHSFLAKFNGIKPIEYSEFLEDLCKQTLNMQTEDSKKNLTFVPLAPACVVIRVLTPVYAAHLPYSPLLWRLFWILFLISVTYVMLTSLKVMIGMGLQKHATWYVNRCRKRKHHLHFD

SEQ ID NO: 66120 - protein, 117 aa, Gossypium hirsutum
  unsure (1)..(117): unsure at all Xaa locations
  Clone ID: AI054515.1.pep
KHSFLAKFNGIKPIEYSEFLEDLCKQTLNMQTEDSKKNLTFVPLAPACVVIRVLTPVYAAHLPYSPLLWRLFWILFLISVTYVMLTSLKVMIGMGLQKHATWYXNRCRKRKHHLHFD

SEQ ID NO: 66121 - protein, 84 aa, Gossypium hirsutum
  Clone ID: uC-gsflmaxxa029g06b1.pep
RQQEKSHFCSSCSSLCGKNRLILCSIVFFAPSSTLPLFLHFVYCLHWEKIANNVMGKKLTDVHRLYSSMEVIRYWFWNVLDARQ

SEQ ID NO: 66122 - protein, 93 aa, Gossypium hirsutum
  Clone ID: GOSHI-09MAY01-C88091_1.pep
FIHIFLKKNPPFDYISLGSYSRLHICFLQLFVSVIFAFFLLLFLSVFLAGKMKSTRGVFAISVQGIAGGGRPRALYVSKVHMGSSGERKSREL

SEQ ID NO: 66123 - protein, 145 aa, Gossypium hirsutum
  Clone ID: GOSHI-09MAY01-C88041_1.pep
KEKRRKNKKREPPFEEYSTSLYSIAIVCILSLFSCFCCVFSHNPLQVILFWLYNREKKRKEKNENKIYNFFCLLFSCTYWLLWFVPFFAGTGALACVRELSWRTEAWRGRWKRCTESGVGARLWLRRESEEEALGYFLKILGLTG

SEQ ID NO: 66124 - protein, 92 aa, Gossypium hirsutum
  unsure (1)..(92): unsure at all Xaa locations
  Clone ID: LIB3828-002-Q1-N6-D1.pep
LTRRNQRRAPAPVPYARAXTSTALVHPRQAPTRPSYTRQHDPRTRALLRTCKKTNRDNRRKKIAKMGIFLLSSSLGYKSLIFFRLETPFGFF

SEQ ID NO: 66125 - protein, 120 aa, Gossypium hirsutum
  Clone ID: GOSHI-09MAY01-C88001_1.pep
IHSFLFYSYFLFFTLTQKTKMAKIALVIVLISMIVLVSIHSVVGDTAATSPTASTESNAAKAEAPGHEGHDSSNESWTDWAKDKISGIGGMFASSPSSSPASEPAPTPASSSAETPEVKV

SEQ ID NO: 66126 - protein, 115 aa, Gossypium hirsutum
  Clone ID: GOSHI-09MAY01-C88391_1.pep
IPGMLKLETPNDNGKFVGSLEKLLKICQGVGAEIDEIGACLYPPQEIDEIKLALEKMSSRINEIQQEVESFPTSSEPFVEACSGLRTVLKQMEAQLNCLSATELTTKMQNVAVIN

SEQ ID NO: 66127 - protein, 226 aa, Gossypium hirsutum
  Clone ID: GOSHI-09MAY01-C89981_1.pep
PCFSSGYCKHGNDRLLIYSYMENGSLDYWLHESVDGSSVLKWDVRLKIAQGAARGLAYLHKVCEPHIVHRDVKSSNILLDEKFEAHLADFGLSRLLRPYDTHVTTDLVGTLGYIPPEYSQTLTATCRGDVYSFGVVLLELLTGRRPVEVCKGKNCRDLVSWVFQMKFEKRESEIIDSSLWDKELEKQLLDMLEIACRCLDQDPRRRPLIDEVVSWLNSIGNEVVCQ

SEQ ID NO: 66128 - protein, 94 aa, Gossypium hirsutum
  Clone ID: LIB3828-017-Q1-N6-G7.pep
KTAQKVKFVYPKNKDSMELMKSYFDVEDLPGEFGGNGTLKYDHEEFSRLMAEDDVKTAKFWGIDDKPYHIANGNGHSAAEVAPEPAAPIAQRVS

SEQ ID NO: 66129 - protein, 104 aa, Gossypium hirsutum
  unsure (1)..(104): unsure at all Xaa locations
  Clone ID: LIB3543-027-Q6-K6-H5.pep
GNQVFLDPXTAQKVKFVYPXKNKYSMELMKSYFDVEDLPGEFGGNGTLKYDHEEFSRLMAEDDVKTAKFWGIDDKPYHIANGSGHSAAEVAPEPAAAPIAQRVS

SEQ ID NO: 66130 - protein, 341 aa, Gossypium hirsutum
  unsure (1)..(341): unsure at all Xaa locations
  Clone ID: GOSHI-09MAY01-C89561_1.pep
LEIKSCSDPFFPPTAVSLEVYEQQKELILIGERVVLATLGFDLNVHHPYKPLVEAIXKKFKVAQNALAQVAWNFVNDGLRTSLCLQFKPHHIAAGAIFLAAKFLKVKLPSDGEKVWWQEFDVTPRQLEEVSNQMLELYEQNRVPPSQGSEVEGGGVGGDTSHRTPAKHPSGSEEKQVSSRSVADHSSVDKHGMSTRTAQNQNSANGEMGGVITDHKLDTETKDGNQHHELLPHKEHMREVSNKSRSGTERTGGEDQERTGGRNDTAETGEWRDEGASRKGSGVVGRNLDIREGPVGQSPKEAIKIDKNKLKAALEKRRKSRGETMKKKDVMDEDDLIEREL

SEQ ID NO: 66131 - protein, 193 aa, Gossypium hirsutum
  Clone ID: LIB3543-029-Q1-K6-B11.pep
FPASAHAVRGGREPYKPLVEAIKKFKVAQNALAQVAWNFVNDGLRTSLCLQFKPHHIAAGGVGLAAKFLKVKLPSDGEKVWWQEFDVTPRQLEEVSNQMLELYEQNRVPPSQGSEVEGSAGGGASHRAPAKHPSGSEEKQASSRSAADHSSADNHGMPSRTAQNQSNDNGSGEMGSVITDHKMDMETQDNQHP

SEQ ID NO: 66132 - protein, 202 aa, Gossypium hirsutum
  Clone ID: GOSHI-09MAY01-C89771_1.pep
RLQSHSLTVTQMEFSHDDNLLLAVSRDRQFSTFKINRAGNDEIDYKLVARQEAHKRIIWACSWNPFGHESATGSRDKTVKIWGVEKTSSVKPLLTLPQFDSSVTALSWVGLDRQRNDGLLAVGMESGLLQIWSLHVERSDDSIPTPGVATAQIIRLDPFMCHVSAVNRLAWKNPENNENSANLQLASCGADHCVRLYEVIVH

SEQ ID NO: 66133 - protein, 166 aa, Gossypium hirsutum
  unsure (1)..(166): unsure at all Xaa locations
  Clone ID: GOSHI-09MAY01-C89651_1.pep
EVKKYIEERSFRRXVEACLEETAIVYVDHLLTXKNYIKEETIERMRLDEEVLMDFFREYISVSKVESRIRILSDLRDLASAESLDTFTLIYSNILEHQPDCPPDVVEKLVSLREGIPRKDAKEVVQECKEIYENSLVGGKPPRTGFVFPRVKCLTATKGYIWRKLT

SEQ ID NO: 66134 - protein, 117 aa, Gossypium hirsutum
  Clone ID: GOSHI-09MAY01-C89191_1.pep
MEESDHVARRWEDLDIDILVKIFQSFDIVELTSGIATVCTSWRMACCDPLLWRTLDLSMMKSNFIKIPLEPYVYVDARSDKTLNHLLKTSLSLSQGNIMTLIFPFNLYVSDDLLTYT

SEQ ID NO: 66135 - protein, 196 aa, Gossypium hirsutum
  unsure (1)..(196): unsure at all Xaa locations
  Clone ID: LIB3543-047-Q6-K6-G7.pep
MDLELNFEISRTAEFILNRNFTRVALQFPDDLLKHSTKVVTCLRNKLGSGNKVGLFVMADTTFGSCCVDEVGASHIGADCVIHYGHTCLSPTSTLPAFCVFGKASISIPLCVEKLSSYFGTNGKPIVVLYGLEYAHAISHIKEAMVEAMPKTKLELIXADVMCSIINPLEDHRKSDELGYLGSWSSVNSLGVATGT

SEQ ID NO: 66136 - protein, 60 aa, Gossypium hirsutum
  Clone ID: LIB3543-047-Q6-K6-A7.pep
AFTKASIIIPLCDENLSRCFQTKGQPIGGLYGLEYAHAISHMTEAMVGAMPNTKPELILG

SEQ ID NO: 66137 - protein, 115 aa, Gossypium hirsutum
  unsure (1)..(115): unsure at all Xaa locations
  Clone ID: GOSHI-09MAY01-C89091_1.pep
RPRGSRSRTVRFTRVKLLRPTDTLSLGHAYRLITSQEVMKFMRAKKYAKTKRXSMKKLQHHGQDNLTSGGKFDAHITNQELKNERQISRTSSVNAASMRSKSWRPSLQSISEAVG

SEQ ID NO: 66138 - protein, 154 aa, Gossypium hirsutum
  unsure (1)..(154): unsure at all Xaa locations
  Clone ID: GOSHI-09MAY01-C89341_1.pep
VDEAQLSYPLIIVRPSYLSHLLFDFNPFESLIESVSSRYRPLQVEAKKQTFNSFDDLLANSDKPVLVDFYATXWCGPCQFMVPVLNEVSATLKDKIQVVKIDTEKYPSIADKYNIQGLPTFIIFKDGKPLDRFEGALGADQLIQRIETSLSVKQ

SEQ ID NO: 66139 - protein, 188 aa, Gossypium hirsutum
  Clone ID: GOSHI-09MAY01-C89251_1.pep
MRSPFSLKQEFLKKWILGLQRCRSSKKNMSIFERKKVIKLSADVAMASARKGTTCWSRALIADAVKEGNADKHLAEKILGPASERQPTKKVPLGAMAYNKRIRSKKILKRSSVIRRTIKCAPQAARPSSIVKTLVGKRRQILRSLIPGGEFMNGVSLIEETLDYIISLRAQVDVMRSLASASKLVNLN

SEQ ID NO: 66140 - protein, 163 aa, Gossypium hirsutum
  Clone ID: GOSHI-09MAY01-C84961_1.pep
MALLPLYFFFLSLSGSSGEFSSQAGVNYGQLGNNLPSPKQSVKLIQSLGAKRVKIYDANHDILNALNGTNLQVCIMVPNEIINNISTSQKLADSCGETNVVPFYSTTKIRYLLVGNEVISGSPQDIWPNIVPAMRKIKKSLKAHGLDKIKVSTSMAMDVLESS

SEQ ID NO: 66141 - protein, 206 aa, Gossypium hirsutum
  Clone ID: GOSHI-09MAY01-C84411_1.pep
TKREKKKKKKKTEEIMESGGSKRRVVVVGGGIAGSILARSIQFNADLTIIDPKEYLEIKWAQLRSKVEPSFAERAVVNYRDFFTNGRIVTSTAINITENEVLTADGRHIGYDFPVIATGHSDNVPVTRTERLHYYDAENQKIQSARSILIVGGGPSGVELAGEISTDFPDKKVTLVHKGTRLLEYIGPKASDKGLSLLKSKKVDIK

SEQ ID NO: 66142 - protein, 215 aa, Gossypium hirsutum
  Clone ID: GOSHI-09MAY01-C84701_1.pep
MYAETGLFFPYMQKVSQEFHQFEEFCETQKSNASMNNMGQTSAISEYYLGGEGDLFKAPEPIIEEPIVDLNPMTAAISLSLCGEDVITSQGFKAADIESIQNEQFLEVLYECEKDLMARAVIETPLSEVLDVKIPLKTDENQNHENEVLCDVQFQKSVSSDCLSSMEGMQGAAMKPNFLDFPGIDFGSAYGMRRAFSEGDMKTLGNGNVSVIHSP

SEQ ID NO: 66143 - protein, 103 aa, Gossypium hirsutum
  unsure (1)..(103): unsure at all Xaa locations
  Clone ID: AI054810.1.pep
QEVGRPCEGCFTSDQGISVSIAGSEDSDNPFKSSTSASINSNNINSSNSDLSYPDDDEDCDDYADDVSDYGDNDDXLYEDDYAIMASHFDMWIFLXGXGFISC

SEQ ID NO: 66144 - protein, 152 aa, Gossypium hirsutum
  unsure (1)..(152): unsure at all Xaa locations
  Clone ID: LIB3582-027-P1-K1-B2.pep
KIRLPFYELVEKSVFFMDLRVDDASISKRLKPTQILLSDAMDIEQVEDPTTVLIDSEKAGMGTKGKTKICCDKKWEDHVKDASASDQGISVSIAGSEDSDNPFKSSTSASINSNNINSSNSDLSYPDDDEDCDDYADDXSDYGDNDDFYMKM

SEQ ID NO: 66145 - protein, 149 aa, Gossypium hirsutum
  Clone ID: LIB3582-027-P1-K1-A4.pep
FLVQSVVTPDGTTSKDITPEMFNKEDGRVVNEFKMRVIYIPANPPSPVPEGSEEGTPPRASSQENGNQNFEEVSRSLEDTKEKSSEAWSAISKLTDEKSSALQQNQRLRQELEQIRKDISKSRAGEFSLMFVMLVGLLGVLVGYFVKRG

SEQ ID NO: 66146 - protein, 73 aa, Gossypium hirsutum
  Clone ID: AI054732.1.pep
MFNKEDGRVVNEFKMRVIYIPANPPSPVPEGSEEGTPPRASSQENGNQNFEEVSRSLEDTKEKSSEVCHFSVA

SEQ ID NO: 66147 - protein, 157 aa, Gossypium hirsutum
  unsure (1)..(157): unsure at all Xaa locations
  Clone ID: GOSHI-09MAY01-C85421_2.pep
MLSPTRPSNLLLSSSPNILPRVGMETPSSTRRVTRSQTLAALNNXISLFPRGNREKPHERSALIDITDDSPIDGLAAETPPSVIGKQRSSRATSMMMTPGSGEALLRGQVKTLLPKGEEEAEVSKVSMESRAFLRLQAGCGNSPMGLMAPTPANTPH

SEQ ID NO: 66148 - protein, 117 aa, Gossypium hirsutum
  Clone ID: LIB3582-060-P1-K1-D11.pep
SQKPKLKEPKERRFSTPLGPDFSDGDGEEGSDDVAAGFSGVRGVEGWWLARGEAKGSAPRVAAEKIKPKLAITMMTRRSYNPPVVKGHQQLQRRQLTHRPLLSHQPKRVKKKRMALH

SEQ ID NO: 66149 - protein, 114 aa, Gossypium hirsutum
  unsure (1)..(114): unsure at all Xaa locations
  Clone ID: LIB3543-064-Q6-K6-A12.pep
NAKLRRVYGSLSGDGILLHCFLVNRKQPQERSALVDITNDYSPIVGLAMETPSSAIGKQRSSRAKSMMMTSGSGEALLSGQVKTXLQKVEEEAELSNVSMQSHPFLLHPFWLVT

SEQ ID NO: 66150 - protein, 202 aa, Gossypium hirsutum
  Clone ID: GOSHI-09MAY01-C85651_1.pep
MADTEVSYVVSDFIGFLNASPTAFHAVDEAKKRLQKVGYEQVIEREDWKLEAGERYFFTRNHSTIVAFAIGEKYVAGNGFHVVGAHTDSPCLKLKPVSKVKKADYLEVGVQTYGGGLWHTWFDRDLTVAGRVMIREEKGGSVSYSHRLVRIEEPIMRVPTLAIHLDRGVNDGFKVNTQNHLLPVLATSVKVELNKEFAENGH

SEQ ID NO: 66151 - protein, 63 aa, Gossypium hirsutum
  unsure (1)..(63): unsure at all Xaa locations
  Clone ID: LIB3583-036-P1-K1-D6.pep
MLRYVAGNGFHVVGAHTDSPCLKLKPVSKVXKTDYLEVGVQTYGGGLWHTWFDRDLTVAGRVM

SEQ ID NO: 66152 - protein, 120 aa, Gossypium hirsutum
  Clone ID: GOSHI-09MAY01-C85021_1.pep
MAAKPLTSEAIALTEKKMDMTLDDIIKMSKTSSNKTKKQRRVLNKGPKPFNNAAKAKALKVRQYMDSRSSVRQGVLAQRRSNIPGNQFPLAAEAARRAAVAPVRIKNVNGVRVANLNKPR

SEQ ID NO: 66153 - protein, 116 aa, Gossypium hirsutum
  unsure (1)..(116): unsure at all Xaa locations
  Clone ID: AI054840.1.pep
MAAKPLTSEAIALTEKKMDMTLDDIIKMSKTSSNKTKKQRRVLNKGQKPFNNAAKXKALKGQQLGXXGPXCQQGFLAXRRSNIPGNQFPLAAEAARSLAVAPVRIRCCVKVANLTT

SEQ ID NO: 66154 - protein, 88 aa, Gossypium hirsutum
  Clone ID: GOSHI-09MAY01-C85251_1.pep
SFLLALNFGPLRPIVFGLGLICKWVDLGLYRVLVWVKTGKWTVIGFKFYLGFIFIVLCLQWAGQIGLLTKVFTIYRLHTILYEILFGT

SEQ ID NO: 66155 - protein, 83 aa, Gossypium hirsutum
  Clone ID: uC-gsflnu33B003g05b1.pep
SLPPFAVQLTPRMLLSSSMRHHERRSAHSNSKGVIFSLETPFGLRFQRSEGEMTANLHGTGAVLTYGGCAGAGVAVGGYGGQG

SEQ ID NO: 66156 - protein, 55 aa, Gossypium hirsutum
  Clone ID: uC-gsronu33B046c01b1.pep
AQVAQNLKQAKNPSLMLAPQPDNASVRCQRLNIDATPKPQYPSSYAWSDAWSNAR

SEQ ID NO: 66157 - protein, 220 aa, Gossypium hirsutum
  unsure (1)..(220): unsure at all Xaa locations
  Clone ID: GOSHI-09MAY01-C86901_1.pep
GMVLLKKYLSLADQVKIVRACRALGLGSGGFYQPXYRDGAKLHLKMMCLGKNWDPETGNYGDLRPIDRAVPPGIPREFFQLVEKVIKDSHSLVQLKTKASHVEHILPSMKPNICIVNFYSASGRLGLHQDKDESPESLHKGLPVISFSIGDAAEFLYGDQREVDKAEKVELESGDVLVFGGSSRLIFHGVTAIKQKTAPGSLLEETNLRPGRLNLTFREY

SEQ ID NO: 66158 - protein, 200 aa, Gossypium hirsutum
  Clone ID: GOSHI-09MAY01-C86881_1.pep
AYGMSVWVTFISSYILAGQLPRQQFGVVQSKIYPVYFRAMAYSIGMALLGHLLWHRKRSISSPPEVFQAINLLSSLFMVLVNGLYLEPKATKVMFERMKMEKEDGRGRHDFVAEGSRATESPSVADPVAKNSRKGPSTAPAPAPAVAPTSSEQEVIKRTMGRLNVRLKKLNTNSSMLNILTLMALTWHLVYLGQRLTLNC

SEQ ID NO: 66159 - protein, 68 aa, Gossypium hirsutum
  Clone ID: GOSHI-09MAY01-C86741_1.pep
MNSNVKSSNQENLLEEAMVCMGRDCYQQTFIWWGCISLLGLISSLLLFFRTRLAYYGYQRNRSRTQVS

SEQ ID NO: 66160 - protein, 228 aa, Gossypium hirsutum
  unsure (1)..(228): unsure at all Xaa locations
  Clone ID: GOSHI-09MAY01-C86371_1.pep
MKFCILDYYKETCPLAEEIVSRNVEIAVLKDPRMAASLLRLHFHDCFVMGCDASILLDNHGDIISEKQAGPNLNSVRGFKVIDEIKYILEEACPLTVSCADILAIAARDAVALRGGPRWKVWLGRRDSMKASLDGANQFIPAPNSSLETLISNFNEPGLDLEDLVALSGGHTLGMARCVSFRQRVYDIEEKRVKFKRYRTFRXILRSICPDSGRDEAIAPLDFSTPAK

SEQ ID NO: 66161 - protein, 257 aa, Gossypium hirsutum
  Clone ID: GOSHI-09MAY01-C86241_1.pep
AGGGGGGDKARNLLENRARKLFLDKIARKIDASVGEERMEGLNMLRKITNGFMEGGEGFFFDCLPGLQIYTLMMNSAGVQHEILVKLHKIMSTYTGYPLELELLITLASIHPSLVRTSNCSAKFFSAEEVLELEKIKFDFRKGSKVMFVLNLVYRIIKNEKVLIFCHNIAPIYLLAEMFERIFRWPKGREILVLTGDLELFERGRVMDKFEEPGGASRVLLASITACAEGISLTAASRVILLDSEWNPSKTKQAIAR

SEQ ID NO: 66162 - protein, 71 aa, Gossypium hirsutum
  Clone ID: GOSHI-09MAY01-C87951_1.pep
MWGNKLKSSETEYDLSAIYIDTTRPQGCYGTRNQSALTVKSNGEVCFYERYLDKDRWKENTVTYQTPMTTK

SEQ ID NO: 66163 - protein, 62 aa, Gossypium hirsutum
  Clone ID: GOSHI-09MAY01-C87831_1.pep
ADKSRAPPWSVIPTERRVESFADDLNTRRGIVSGRVALLPRSTEIQPFVASIRKKEKKKKKK

SEQ ID NO: 66164 - protein, 110 aa, Gossypium hirsutum
  Clone ID: GOSHI-09MAY01-C87411_1.pep
GDDVAPIPEGKRGNTRLAVREKLYKSSILKAKEIFQFKMMASGLGVKIEKERVTVESLMATKIDAAESVASLERLKMRRKKLTKKLKRRIKDFQKLQTLEVELTSEMSSP

SEQ ID NO: 66165 - protein, 62 aa, Gossypium hirsutum
  Clone ID: GOSHI-09MAY01-C87781_1.pep
QKNHGLPCKLLRSNKTDHNQIHPATVATNISHSTVTAHVQVGKLPFSTLFSTTQISIQNKTS

SEQ ID NO: 66166 - protein, 381 aa, Gossypium hirsutum
  Clone ID: GOSHI-09MAY01-C87671_1.pep
MKCLEKFTQFSCRLNRLAKEFNLINSSFIGMDCESLKIIARLALSCSLLAFSAGFPHFFPNLPAYKYLRTCEREHSQQSNLSSMLLQDLLGRLLHIDQEVSMDLCKLLDNGGCPRKCSHLQSGNYILKSGHEVKGILDIIRYAVSTVMHLQIETNRIQNEAIISHVTKNGVELLLEIIRKWLQIPFQMPKQFFNTRPIIGSELFVYSTDSRNQSQITVSSGLHLSLNLCLQLRNASPELSLGLPRLYCVLHSRVSFQKQCHRERNDEEMEWQCQPWESEEIVEMNEKLFQYVTECAKKTTSYGKLFRDDDMNDQMVYEFVCFEPNAKGQGFSSCVLDVSHFPMGCYRIEWYSCCIDNEGSYWSLLPLNSRPVFTVQESLFV

SEQ ID NO: 66167 - protein, 37 aa, Gossypium hirsutum
  Clone ID: GOSHI-09MAY01-C87191_1.pep
AIKLEEIPELINFQPPRCGSVTPQLIFLLLLPLPAVI

SEQ ID NO: 66168 - protein, 49 aa, Gossypium hirsutum
  Clone ID: GOSHI-09MAY01-C87091_1.pep
HASAHAGAPVYNIGVQGYLPELIYSSATTNNGFSICSLLVLAIAYLISS

SEQ ID NO: 66169 - protein, 127 aa, Gossypium hirsutum
  Clone ID: GOSHI-09MAY01-C87041_1.pep
DAWADAWADAWADAWVYCGKVNVYDNIPGCKAEAILQFAASPVSFPQETLVDQRTSPLSIPCHVQAAGDKVSQRSPGVILSSMQAVKVAENCRFPRDDCNVSYEDSLEGATSRNALLQRYLEKKKDR

SEQ ID NO: 66170 - protein, 224 aa, Gossypium hirsutum
  Clone ID: GOSHI-09MAY01-C80881_1.pep
VPWKIDFKQYELRCQLRGPRNDVRGICVCGSEGIATSSRDRTVRFWSLDSSDKRKYVSSKMLLGHSSFVGPLAWIAPDEEFPEGRIVSGGMDTMVFVWDLRTGEKVQSLKGHQLQVTGVVLDGGDIISSSVDCTLRRWRKGQPVESWEAHKSAIQAVIKLPSGELVSGSTDTTLKLCRGKTCLHTFSGHTDTVRGLAVMHGLGILSASHDGSIMLWAQSGEVLM

SEQ ID NO: 66171 - protein, 255 aa, Gossypium hirsutum
  unsure (1)..(255): unsure at all Xaa locations
  Clone ID: GOSHI-09MAY01-C80401_1.pep
MAEGFEPYHVPQQSRRDKLRIMAQNEPTTGVSLSGCSGLLPFYDPPFLSSDLLTCAAAAAGSHEYHHPPPSGTKDGVNFTGFVGGIFNSSPSLDHLNSSSIHDMNNNSXATQFLYTPQNLSYDTNNGGGGAGEVVVYKPEPLSLSLSSHYTHQNSSIYTDMVPAIFSGADGSTSNSVPLGPFTGYASILKGSRFLRPAQQLLEELCDVGKGIYTEKASLMELPPLQNSHTNPLDGGDSGGSGGGGDGQRKKSTLI

SEQ ID NO: 66172 - protein, 175 aa, Gossypium hirsutum
  Clone ID: GOSHI-09MAY01-C80791_1.pep
MGSGNLFKSIINIVKDDNSKKVKGSSASEKSSGFKWKKHQQKASTRPGLISGNSNTLGMPIEDLAATRIQTAFRAYRARKQLRRLKGIVRLQAQTLNSSIKKQATTTLNYLHSWSIIQAQIKARRLCMVTEGHLKQKKIANQIKLEAKLHDIKVEWSCGPETMEEILTKIHHREK

SEQ ID NO: 66173 - protein, 65 aa, Gossypium hirsutum
  Clone ID: LIB3585-051-P1-K1-D1.pep
PTRPPTRPARERGATWGPFNEVKFILEAVLEVFALDLGCLNPSWSGVPQAIHSWLWLLMVKGVII

SEQ ID NO: 66174 - protein, 51 aa, Gossypium hirsutum
  Clone ID: uC-gsflnu33B050c02b1.pep
EIETTTDGIYIIKATLMEKCKALFSIHKFSSPLTLKLMEICLKFLHIHNWL

SEQ ID NO: 66175 - protein, 233 aa, Gossypium hirsutum
  unsure (1)..(233): unsure at all Xaa locations
  Clone ID: GOSHI-09MAY01-C80391_1.pep
RNLSTSEERPLANDGPNKVCEELVKCLSTIFLRMSSXKRNSAADSFPSLSMLGSQENSDVTKFQDPYGICSNFGRRDIGPYKHLFPIDAGSINLNRTSNSLFLLRRLKLLLGRLATTNLQNLNHQEKLAFWINIYNSCMMNAFLEHGVPESPEMVVELMRKATINVGRRLLNAITIEHFILRLPYHSKFTFXKGAKNDEMTARSMFGLELSEPLVTFALSCGSWSSXAVRVYT

SEQ ID NO: 66176 - protein, 115 aa, Gossypium hirsutum
  unsure (1)..(115): unsure at all Xaa locations
  Clone ID: GOSHI-09MAY01-C81551_1.pep
VVWRPLEQVRLNRKHGISXAAATTSCVAGASLITLYKGPTVFSPIPPLNRPTPTCVSLGDAHGKNWTLGCLYLIGHCLSWSGWLGLQAPVLKKCPARLCVTFYTCFFGLIQFLGI

SEQ ID NO: 66177 - protein, 114 aa, Gossypium hirsutum
  Clone ID: LIB3493-038-P1-M1-G2.pep
GFYLLGLDNTSPTCASAIQNSVPAITFLMAAILRIEKVRLNRKDGISKVAGTILCVAGASVITLYKGPTIYSPIPPLNRPTPTFVSLGDAEGKNWTLGCLYLIGHCLSWSGWLV

SEQ ID NO: 66178 - protein, 259 aa, Gossypium hirsutum
  Clone ID: GOSHI-09MAY01-C81491_1.pep
NEKSFSLKTMEDGPVLLYSNSVNARESRIPYPWLVFNEKIKVNSVFLRDSTAVSDSVLLLFGGSISRGDVDGHLKMLGGYLEFFMQPAIAEKYLSLRREFDELIQNKLLNPQIVLHLHHELISAIRLLVSEDQCDGRFALGRPDLIPSNMPVVPPQRSLIPRTESGPGGDNSKCQLQTLVTRAGYAAPIYKTGQLENNQFQATVEFNGMQIIGQPCNTKKSAEKDAAAEALQWLMSGTRTGHEYINYMSMFLKKSKRDN

SEQ ID NO: 66179 - protein, 197 aa, Gossypium hirsutum
  Clone ID: GOSHI-09MAY01-C81701_1.pep
MDEQPSASKSRTQKSRKRSRDGNQNPGGAKHENLQVKIQLFQDQPNKIPPLVAYFPSGYNPQTQQRQDEEEPNYQNNSPKVPKVKVFRNMAQRKGNRLQVVGSPGGSNVDFVGSSFTGEAAAAQVRRYSLGVLDKEAETLKIIPIATNKICRLEPTVRTAETANEKLRIPQKVNLLPIKWTSWESLLHFTERERDED

SEQ ID NO: 66180 - protein, 304 aa, Gossypium hirsutum
  unsure (1)..(304): unsure at all Xaa locations
  Clone ID: GOSHI-09MAY01-C81651_1.pep
PRVRPRVRNDQAQMMNQPPQMMMNTVQVQVPVQPQMMNQSHQLMASAAHSQAMNQLAASQSQPINSGPLMMTQPPPPMMLNRSYKPWQSQDPNQNPNPNKKFSSFNRNNNWKGKKVSFGKDSWKFENKPLPMGSASAISSVPAASGCFTQGYKPPTLNELQNLNRLKARKFYGNKKEXNNSHNRFAPYAPRNTTSFIIRAKKSGGIASLVSPCPVTPAVLTTPIFSPSREVLGDMAKEEWGVDGYGSMKGLIRLRSPXLVMMTXEDDYGGNGGGSSDSDVEEHVEAERRLDHDLRRFEMIYPSY

SEQ ID NO: 66181 - protein, 64 aa, Gossypium hirsutum
  Clone ID: GOSHI-09MAY01-C81051_1.pep
MGLLLKSLLSPLKKLWFRLHSVQKKRRGIYILYEDVKSCPCEDVHVLWSMLVESNASSMLPAKQ

SEQ ID NO: 66182 - protein, 205 aa, Gossypium hirsutum
  Clone ID: GOSHI-09MAY01-C81271_1.pep
GRVGFKVPFEFHAAAMSGCEVQREHLQVRPGEALAVNFAFMLHHMPDESVSTENHRDRLLRLVKSLSPKVVTLVEQESNTNTAPFFARFLETLNYYTAMFESIDVTLPREHKERIDVEQQCLARDVVNIIACEGAERVERHELLGKWRSRFRMAGFTPYPLSSLVNATIKTLLENYCDRYRLEERDGALYLGWMNRDLVASCAWK

SEQ ID NO: 66183 - protein, 247 aa, Gossypium hirsutum
  unsure (1)..(247): unsure at all Xaa locations
  Clone ID: GOSHI-09MAY01-C82161_1.pep
LLELTSSYEAKLNEALXGPVEAFLDGANNETWPSIKKLLRRETVSAVSGLSDALSGFDMDEKTKEKMLTSLEDHARGVVEAKAREEAGRALIRMKDRFSTLFSHDSDSMPRVWTGKEDIRAITKTARSASLKLLSVMAAIRLDDNADNIENTLTSALVDTKNNAAVTDRSITTFDPLASSTWEQVPPAKTLITPVQCKSLWRXQFRAETEYTVTQAISAQEANKRTNNWLPPPWAIGALIVLGFNEF

SEQ ID NO: 66184 - protein, 148 aa, Gossypium hirsutum
  Clone ID: GOSHI-09MAY01-C82121_1.pep
MVAMVSAYFFVFLALFGMVASDPDHLQDLCVANKAAGIKVNGFPCKEEANVTEADFFFSGLANPGVINNSVGSVVTGANVEKIPGLNTLGVSLARIDYEPGGLNPPHTHPRATEIIFVLDGELDVGFITTSNKLISKSVKKGDIFVFP

SEQ ID NO: 66185 - protein, 126 aa, Gossypium hirsutum
  Clone ID: GOSHI-09MAY01-C82061_1.pep
MAACFNFQLPFPSLLITPSSHQSHNNGISWKTHEFRPRRSLKICAFSIKRPRSGRKVKSNEELCNDIREFVAEVGLPEGHVPSFKELSQHGRNDLANIVRRRGYKLIQKLLSSSTRTQMDLWQIQA

SEQ ID NO: 66186 - protein, 207 aa, Gossypium hirsutum
  Clone ID: GOSHI-09MAY01-C82001_1.pep
MGGNFPSSSSLWLAANPSKRWGELFFLCYTPFWLTLCLGIVVPFKLYENFTELEYLLLGLVSAIPSFLIPMLVVGKADSSLHWKDRYWVKASVWIVIFSYVGNYFWTHYFFTVLGASYTFPSWKMNDVPHTTFLLTHVVFLFYHVTSNMTLRRLRHSIASLPENIQLATEVAWILALSYSLSLPVSSARSYFPYYDFVDRASMYKVG

SEQ ID NO: 66187 - protein, 197 aa, Gossypium hirsutum
  Clone ID: GOSHI-09MAY01-C82351_2.pep
AEGIQEFTVFGEVVTNFDITRYDVERIMASNTLLAGEFARRNKDVGPGGNDNLLTGNTNAETNINISPKNNGGQPDWKMILYQSSEQQQPNIIENFKAQAFSLAPATLVGHREVDDSSKIGTTHFSNASSLVTSLSSSREGSPERSSLPMAFAMPPPPSSKLFTTSPNTVNSWIPSAQLRPAISMPQMPVFAAWTDS

SEQ ID NO: 66188 - protein, 118 aa, Gossypium hirsutum
  Clone ID: GOSHI-09MAY01-C82351_1.pep
AEGIQEFTVFGEVVTNFDITRYDVERIMASNTLLAGEFARRNKDVGPGGNDNLLTGNTNAETNINISPKNNGGQPDWKMILYQSSEQHQPTIIENFKAQAFSLAPETMGGLREVADSC

SEQ ID NO: 66189 - protein, 96 aa, Gossypium hirsutum
  Clone ID: GOSHI-09MAY01-C82301_1.pep
RLPADGSHMVASQESDLLHWHGFRGFTSDDDDQRWLEPFVMHVKQSGEGRSGRFFLKYMISRRRLPLTYPSICRFYRFACCLSTLLYYHTSLVRGH

SEQ ID NO: 66190 - protein, 188 aa, Gossypium hirsutum
  Clone ID: GOSHI-09MAY01-C82231_1.pep
MFSCAPHFTSLNFSEMFYPKIISSICSPKADFKVFASASNVNEAPNYIPAAPILLPDGDGVWKQIPGGVTAAKGFKASGLYGGLRAKGEKPDLALVTCDVDANVAGAFTTNVVAAAPVVYCQNVLNNTKTARAVLINAGQANAATGDAGYQDVIECANALATILQIKPEEVLIESTGVIGQRIKKKHF

SEQ ID NO: 66191 - protein, 160 aa, Gossypium hirsutum
  Clone ID: GOSHI-09MAY01-C83841_1.pep
MSMEFYSFGPYKIDPTEVFYTTPLSYAMVNLRPVVPGHVLVCPRREVKRFADLTVEETQDLWLTAQKIGGRLECFHKASSLTFTIQDGPKAGQTVPHVHIHILPRKDGDFERNDEIYDEIDVKENELKEKLNLDKERKDRSREEMCKEAEEYRSLFILQS

SEQ ID NO: 66192 - protein, 174 aa, Gossypium hirsutum
  unsure (1)..(174): unsure at all Xaa locations
  Clone ID: GOSHI-09MAY01-C83871_1.pep
GSWPMTLRALSSPALTPHYVLRSLIAQWCEANGVEPPXRPSTRPSKTTSACSPAERTKIEILLRKLASSSPEDQRMAAGEIRLLAKRIADNRVAIAEAGAIPLLVSLLSTPDSRIQEHAVTALLNLSICEDNKXVIISSGAVPGIVQVLKMGCMVAXRGCSSHSFSLSVVDENR

SEQ ID NO: 66193 - protein, 142 aa, Gossypium hirsutum
  unsure (1)..(142): unsure at all Xaa locations
  Clone ID: LIB3493-037-P1-M1-E9.pep
GIEPPKRPSSWERSKTKFGCSPAELTKIQILLCKLSSSNPEDQRMAAGEIRLLAKRNADNRVAIAEAGAIPLLVKILSTPDSRTQEHAVTALLNLSICEDNKGSIISSGAVPGIGQVLKKGSMEARENAXSTGFSLSVVDEK

SEQ ID NO: 66194 - protein, 198 aa, Gossypium hirsutum
  Clone ID: GOSHI-09MAY01-C83471_1.pep
MPNIVSEAGLQTRAGQWWDSIPFLTSAVVIVCGVIYLICILVGYDSFYEVCFLPEAIVSHFQVYRIYTSIIFHGSLLHVLFNMLALVPLGSELERIMGSIRLLYTIILLATSNAIFHLIIALVVAHNPFHPFEHLMNECAIGFSGILFSMIVIETSLSGVQSRSVFGLFNVPAKWYAFILLVVFQLLMTNVSLLGHLC

SEQ ID NO: 66195 - protein, 175 aa, Gossypium hirsutum
  unsure (1)..(175): unsure at all Xaa locations
  Clone ID: GOSHI-09MAY01-C83181_1.pep
MSRVYVGNLDPRVMERDLEDEFRIFGVLRSVWVARRGGGYAFIEFDDRRDAMDAIRELDXGWRVELSHNSKGVGGRGGRRGGGEDLKCYECGEPGHFVRECRSRIGSWGDGNGXRRSPSPHRRKSPSYGYGRRSYSPHGRRSPQCHSISPCRGRSYSRSPPYRHSRRDSPYANGD

SEQ ID NO: 66196 - protein, 153 aa, Gossypium hirsutum
  Clone ID: GOSHI-09MAY01-C83281_1.pep
MDIVFSWQFRRDRPKGKEVVKHQLLVADHDLPKSAEVMQVLNGTANSFRMFNIYPRYFRVTGSGDLRFLEQLVEKVSGDLVLNHGNPEWWSFQDIDASSGTGCCEFAGPVAIIVSEETPQGILGDTLSKFSIWGLYITFVLAVGRFIRLQCSD

SEQ ID NO: 66197 - protein, 71 aa, Gossypium hirsutum
  Clone ID: GOSHI-09MAY01-C83211_1.pep
NYLTRRNDGQTHFGYINGLEYGSSQLQLGRNIKSPIITMAREQIKIFFLDGNYQPLHTFSIISSKGKVEIF

SEQ ID NO: 66198 - protein, 48 aa, Gossypium hirsutum
  Clone ID: GOSHI-09MAY01-C58940_1.pep
CNELVGLIMAFSCFMLNHVPLYSIEFQILSKKPYRKNKKRQTIEKKKC

SEQ ID NO: 66199 - protein, 183 aa, Gossypium hirsutum
  unsure (1)..(183): unsure at all Xaa locations
  Clone ID: GOSHI-09MAY01-C58860_1.pep
MCGGAIISEFIPXESGRHVTAADIWPNSPFVKINGFCSYRDHSVYHFKRSQPEPPSSLGDEQVEKKPKRQRKNLYRGIRQRPWGIWAAEIRDPRKGVRVWLGTFNTAEEAARAYDREARKIRGKKAKVNFPNEDDSFSTPYNLNRSTPNSNPCVYQQHINSNYGFNYDLNEIGGYATDPIVYL

SEQ ID NO: 66200 - protein, 207 aa, Gossypium hirsutum
  Clone ID: GOSHI-09MAY01-C58830_1.pep
SRVRGRVGGKLPMTWYPQEYVSNLPMTDMAMRSSPNRNYPGRTYKFYKGPVVYPYGHGLSYTNFVHTIASAPKAVTDPLDGHRHSGNATISGKAIKVNHVRCNKLSVGLQVDVKNTGSKDGTHTMLGFSKPPAGHWAPQKQLVAFAKVHVPARSQRRVGINIHVCKFLSVVDRSGVRRIPTGVHNLHIGGAKHSLSLQPVTLGVIKS

SEQ ID NO: 66201 - protein, 165 aa, Gossypium hirsutum
  Clone ID: GOSHI-09MAY01-C58820_1.pep
RLDSNNATCNGDTSEVQMTKVFKDSGKDAECIIDVEDGESSGRSNDVSCGLERTTGTRKTWCSPNLGTLNIVIADKYNDRTKTRSGIESTPKEKGSKPFFRKQRCGDLPQAKGAFNLFYQRFGWISGLLRHLQSPVHLQFSCSLQLTLALLIAIFLIVPFVLYSS

SEQ ID NO: 66202 - protein, 89 aa, Gossypium hirsutum
  unsure (1)..(89): unsure at all Xaa locations
  Clone ID: LIB3149-054-Q1-K1-F12.pep
LLIATYTCFTDCYFSICAFCALFELRASGCHVLLIKRGVVSIPPGFGFPLEAYIASFNLXPCHFQDLGETSSRAKLEQERLVAIFIATL

SEQ ID NO: 66203 - protein, 151 aa, Gossypium hirsutum
  Clone ID: GOSHI-09MAY01-C58500_1.pep
PPSVRGRVGVDVYAFGVVLLELLTGQRISDLQYYKGQNFLSDWFHPLAALDSNQIMTNIYQLLDPCLASGKVRDYTHQLQAMARATFLCLSHDPESRHPMSKILRILEGGDTNVPLSLDLNSIGNRSGHLRGLKTQTQPESTRRHSRKLSH

SEQ ID NO: 66204 - protein, 169 aa, Gossypium hirsutum
  unsure (1)..(169): unsure at all Xaa locations
  Clone ID: GOSHI-09MAY01-C58660_1.pep
FILAFDVKVTPLARELADELGVRMNIADIIYHLFDXFKAYMDGLKEERKREAADEAVFPCVLKILPNCIFNKKDPIVLGVDILEGILRVGTPICIPQREFIDIGRIASIENNHRPVDSAKKGQKVAIKIVGSNTEEQQKMYGRHFELEDELVSHISRRSIDILKANYRD

SEQ ID NO: 66205 - protein, 221 aa, Gossypium hirsutum
  unsure (1)..(221): unsure at all Xaa locations
  Clone ID: GOSHI-09MAY01-C58080_1.pep
KDAISAGVDGYDADVKNAVRKAAHGLRLTREAAMSIASKAVRKVFLNYVKRSRSVDNRTESARELKKLIAFNTLRVTELVADIKGESSDIPSEEPAKEEVKEVDEDDEWESLQTLRKIKPIMDLNAXLGKPRRAEITLKDDLSERDRMDLYKTYLLYCLTGEVTRIPFGAQITTKKDDSEYVLLNQLGGILGLTSEETVEVHRSLAEQAFKQQAEVNLADG

SEQ ID NO: 66206 - protein, 69 aa, Gossypium hirsutum
  Clone ID: GOSHI-09MAY01-C58060_1.pep
VTIFFMPAILGAFFLIFPWLQIETYYNKNLGILESSKSGREKHLKGFEDTDLGGIRRFRGKFGDKTAPF

SEQ ID NO: 66207 - protein, 136 aa, Gossypium hirsutum
  Clone ID: GOSHI-09MAY01-C58360_1.pep
YFFALFETISKLLGYSRLNFVVTAKVADKEALKRYDGELIEFGATSPMFDILATLAMLNLFGIFGALKKVILDVDEDLQVLEKFGLQILLCFVLVTINLPVYQALFFRNDNGKMPSRVTYKSMIFAMLACTATMCF

SEQ ID NO: 66208 - protein, 104 aa, Gossypium hirsutum
  Clone ID: GOSHI-09MAY01-C58290_1.pep
RNSKFWINTLIYMKLEKYLGQREPLKSPKMEGEVVSSLLGILCDGVDCLVSGDHADEFKDYFSKIMMEREIAATMKVFDGGCSAIIVGRWGERTKTETLLRKVV

SEQ ID NO: 66209 - protein, 172 aa, Gossypium hirsutum
  Clone ID: GOSHI-09MAY01-C58250_1.pep
MATLQSLALASPVSHSSLNQPRSLSGMPSWVAHRSANSQFNGQSLQVAQSRISPTRWNSKRCSPIVMMVKPKIQFIQGTDEQTIPDVRLTKSRDGTNGMAIFRFDQPSVFDSSSEVGDITGFYMIDEEGVLQSVDVNAKFVNGKPAGIEAKYIMRTPPEWDRFMRFMERYSK

SEQ ID NO: 66210 - protein, 67 aa, Gossypium hirsutum
  Clone ID: GOSHI-09MAY01-C58240_1.pep
SGQNPGSKIGSLKRAAPLIYFNYFFFFINFYFFYFFFFFYFFFFLFFFFFFFFFFFLNENIFLQTYK

SEQ ID NO: 66211 - protein, 50 aa, Gossypium hirsutum
  Clone ID: LIB3149-044-Q1-K1-A9.pep
NENTNIEFNQVYELRKYYKQNHHRTKNLHRQTLSFKHLIVKETPMLSLQS

SEQ ID NO: 66212 - protein, 134 aa, Gossypium hirsutum
  Clone ID: GOSHI-09MAY01-C58260_1.pep
KQLSSSPVHFLGKFSLFPFFPSASFSPNMGISWSNTSNSNRRRNQAYLHGPPPPPPFYYPQEPTFLPPPPPPPPSQPSTTHPYPAHTPPPPPPIPNNYYCSPPYNPCCYSNPVMGRYPIQYPPYFANQASAWPP

SEQ ID NO: 66213 - protein, 178 aa, Gossypium hirsutum
  Clone ID: GOSHI-09MAY01-C59990_1.pep
MSLSPCRAQRGFSSRSACSARSRGCSRGGFSSRSLNSFGGCLGGSRGSTWGSGGRLGVQFGEWSAGPGLSLCPPGGIQEVTINQNLLTPLKIEIDPQFQVVRTQETQEIRTLNNQFASFIDKVRFLEQHNKVLETKWHLLQQQGLSGSQQGLEPVFEACLDQLMKQLQQLQGERGALD

SEQ ID NO: 66214 - protein, 148 aa, Gossypium hirsutum
  Clone ID: GOSHI-09MAY01-C59840_1.pep
FFTYGTWFGVKGLVAARKNFNNLSSIQKACNFLLSKQLPSGGWGESYLSCQNKVYSNVEGNKPHMVNTGWAMLALIDAGQAERDPTPLHKGAKYLINSQMEDGDFPQQEIMGVFNRNCMISYSAYRSIFPIWALGEYRTRVLQLRTTS

SEQ ID NO: 66215 - protein, 117 aa, Gossypium hirsutum
  Clone ID: GOSHI-09MAY01-C59860_1.pep
MESNFFILVILFQTVGLALSTPQKYESIFNFGDSLSDTGNLLLSGALVFPVIGQLPYGETFFQHATGRCSDGRLIIDFIAEAFSLPYLQPYLAVKQGQSSPHGVNFAFSGATALDAE

SEQ ID NO: 66216 - protein, 210 aa, Gossypium hirsutum
  Clone ID: GOSHI-09MAY01-C59540_1.pep
MPQLLRNINGIIEAFRRYARTEGSCTALTRGELKRLLEQEFADVIVKPHDPATVDEVLRLLDEDHTGTVEFKEFLVLVFKVAQACFKTLSESPEGACSSQESGSLHSGAWQELSEGQRSGTEVGRAGKGQHYEGSSHGQSKQPSRGQSRPGAQTQGQATGSAWVSSYDRQAESQSQERTSPQIQCSGHTEQTQRAGEGKRHQTTQMRPER

SEQ ID NO: 66217 - protein, 46 aa, Gossypium hirsutum
  Clone ID: GOSHI-09MAY01-C59670_1.pep
MKMQKGNVLLTFCLLLHLEAAINPSGTRTSANTGPTVTSSGISTVM

SEQ ID NO: 66218 - protein, 64 aa, Gossypium hirsutum
  Clone ID: GOSHI-09MAY01-C59110_2.pep
LACALTASFFSTSRGSKINGPVRHRLMIPIVGARGSNKRENKSTEHEARCKKHFYLLTNVQQGS

SEQ ID NO: 66219 - protein, 96 aa, Gossypium hirsutum
  Clone ID: GOSHI-09MAY01-C59110_1.pep
LTHLTIPVFCAKDLFTKWSFSPSQPWLTTCFFLHKQFLSIVACLHSAILACNNTTHIELPHVAELTPLTDSHLCILSSTGVFISSHFAKLAALTSC

SEQ ID NO: 66220 - protein, 94 aa, Gossypium hirsutum
  unsure (1)..(94): unsure at all Xaa locations
  Clone ID: LIB3272-026-P1-K1-G4.pep
ASKNASCTLLHVLGSCSLFCGCILHQQLPWWLGKFAEVERSILNTAPCHFLLKIPSFSFLSKDGLEKYXSGEVQAGGYKWKPVLCPNGNTNTNV

SEQ ID NO: 66221 - protein, 195 aa, Gossypium hirsutum
  unsure (1)..(195): unsure at all Xaa locations
  Clone ID: GOSHI-09MAY01-C54850_1.pep
AKLTRIAKPPFCHCNSATNTGYSDYEFDVIVVGAGVMGSSTAYQLAKRGQKTLLLEQFDFLHHRGSSHGESRTIRATYPEDYYFGLVDESYRLWEQAQSEIGFKVYFKAQQFDMGPSDAKSLLSVIATCRKNAIPYQVLDHREVXEXFSGRIDIPEDWIGVSCELGGIIKPTKAVSMFQMLAFKNGACLKDNIKW

SEQ ID NO: 66222 - protein, 118 aa, Gossypium hirsutum
  Clone ID: GOSHI-09MAY01-C54860_1.pep
MQKSGSLSRSSNSPSVRVSSPPPPPSQQSVRRLSLCSQIATHSSPIVFPEKRTKKLKASSKRSEAPVTDDQTDKSKGEEHRIDIGGDEKSDLLGYVVYTGKLILDKRKIPQILLIPPM

SEQ ID NO: 66223 - protein, 95 aa, Gossypium hirsutum
  Clone ID: GOSHI-09MAY01-C54090_1.pep
MQNPSTVTQESGPAAFDLVTQLGHLAFNKSFRSSNTDGFCSFKPNHVYFSGFRDSISQKKRRVAAAASLSLGARNSVSSSVRRILNDFYRAIKFH

SEQ ID NO: 66224 - protein, 174 aa, Gossypium hirsutum
  Clone ID: GOSHI-09MAY01-C54200_1.pep
MAFLPPITTFAAALLLFLHTPLATSSPLNLTGDSLSPYEVLQGYNFPVGLLPQGVLKYDLDESTGRFHAYLEGSCSFSLEGSYQLKYKSTISGIISNNRLKNLSGISVKVLFLWLNIVEVVRDEDELEFSVGIASASFPIDNFYECPQCGCGLECVDSKGQVSKLRNKSSFSSI

SEQ ID NO: 66225 - protein, 143 aa, Gossypium hirsutum
  Clone ID: GOSHI-09MAY01-C55940_1.pep
MANSVADSRSNRAAVQATNDDASASKLSCVKKGYMKDDYIHLFVRRPVRRSPIINRGYFARWAAFRKLLYQFLDCEGSNSEKGKTRRQILSLGAGFDTTYFQLQDEGKAPYLYVELDFKEVTSKKASLIESYSQLRDKIGATA

SEQ ID NO: 66226 - protein, 60 aa, Gossypium hirsutum
  Clone ID: GOSHI-09MAY01-C55820_1.pep
QWRQSRLLALNSLGRSRRKPLMLPPSPNPLLPSPAAKKAAPKPQEPNKKKGKGGKAATKQ

SEQ ID NO: 66227 - protein, 314 aa, Gossypium hirsutum
  unsure (1)..(314): unsure at all Xaa locations
  Clone ID: GOSHI-09MAY01-C55430_1.pep
MRPEFASPSSSSSSSADRRLNALVRHLATPSMVSQTAVAFSPTSGFHGDSVFSHVVRAPEDPILGVTVAYNKDPSPVKLNLGVGAYRTEEGKPLVLNVVRKAEQMLLNDKSRVKEYLPIVGIAEFNKLSAKLIFGADSPAIRENRVTTVQCLSGTGSLRVGAEFLARHYHQKTIYIPQPTWGNHPKVFTLAGLSVKTYRYYDPTTRGMNFQGLLEDLGSAPSGSIVLLHACAHNPTGVDPTLQQWEQIRQLMRSKALLPFFDSAYQGFASGNLDEDAQSIRMFVADGGECFVAQRYAKNMGXLYGERVGALKCV

SEQ ID NO: 66228 - protein, 148 aa, Gossypium hirsutum
  Clone ID: GOSHI-09MAY01-C55320_1.pep
FQRRITEKGIDVKRFGELLMSSGVVLNDDVHWVTFHSGYDFGYLLKLLTCRSLPDSQAGFFDLIKIYFPMVYDIKHMMKFCNSLHGGLNKLAELLEVERVGVCHQAGSDSLLTSCTFRKLRDNFFNGSTEKYAGVLYGLGVQNGQNTN

SEQ ID NO: 66229 - protein, 86 aa, Gossypium hirsutum
  unsure (1)..(86): unsure at all Xaa locations
  Clone ID: LIB3543-028-Q1-K6-C8.pep
INNPFFLIGPKLLGGGADINPMMKFCTSLHGGLNKLAELLEVERVGVGHQAGSDGWLTSCTFGRLGDNFFNGSXENFAGXWFGLGV

SEQ ID NO: 66230 - protein, 140 aa, Gossypium hirsutum
  Clone ID: GOSHI-09MAY01-C56720_1.pep
EMENGEAFRVCSARIGSSSIWRNNAMEAFSMSAREEDDEEDLKWAAIEKLPTYLRVRRGIFTEGEGQSREKKKNYTTNLKLMLFIKKKQKKKKKKKKKKKKKKKKKKKKKKKKKKKKKKNGGGPLKGPNFKTGGWKKIIF

SEQ ID NO: 66231 - protein, 171 aa, Gossypium hirsutum
  unsure (1)..(171): unsure at all Xaa locations
  Clone ID: GOSHI-09MAY01-C56190_1.pep
MDSYEATRIVFSRIQNLEPENASKIMGLLLIQDHGEKERIRLAFGPEASLQSVILKAKKELGLPSNSPSTPSTPSSPSPFLANNPNPVNIQRQSSXCFQAPTQRGINLPSSLTIPTNLSTSSGTSSWSPLAELPNPDELISPSRGSLNPSSLPSMETEELLIWDENLKTTS

SEQ ID NO: 66232 - protein, 39 aa, Gossypium hirsutum
  Clone ID: LIB3165-060-Q1-K1-B6.pep
MDSYEATRIVFSRIQNLEPENASKIMGLLLIQDHGEKEM

SEQ ID NO: 66233 - protein, 55 aa, Gossypium hirsutum
  Clone ID: GOSHI-09MAY01-C56050_1.pep
KCYHFSLPLHRNMQQLKGFDAGKFQQHMAPCLVSRFARVGRRQRYYPPIELTSSE

SEQ ID NO: 66234 - protein, 83 aa, Gossypium hirsutum
  Clone ID: GOSHI-09MAY01-C57450_1.pep
ITIQIVIFLNIIIYIFLINQKKNKGSEFRDVRTINVQWQQNLFLWKRSGKLYRFHDRNYKHSNHTIEMENILSIIKWKTIGGD

SEQ ID NO: 66235 - protein, 97 aa, Gossypium hirsutum
  Clone ID: GOSHI-09MAY01-C57750_3.pep
VIPVVLVENTGRCNKNDIDEKILPNGEAWVPNLVKAITGVATNKSRAIVVSKKLVDGSDANDKGKLWIPVILGVQWLVLKWIQGAIKKDIATGSGPL

SEQ ID NO: 66236 - protein, 173 aa, Gossypium hirsutum
  Clone ID: GOSHI-09MAY01-C57750_2.pep
MGTPLPREWLGLQQFPAATQTKLFELLGKLKQENVNTLTIVVMGKGGVGKSSTINSLIGEQVVRVTAFQSEGLRPVMVSRSWAGFTLNVIDTPGLVEAGYVNHQALELIKGFLLNKTIDVLLYVDRLDVYRVDNLDKQIIRAITNSFGKEIWRKSLLVLTHATACPPDGLHYD

SEQ ID NO: 66237 - protein, 298 aa, Gossypium hirsutum
  Clone ID: GOSHI-09MAY01-C57750_1.pep
MGTPLPREWVGLQQFPAATQTKLFELLGKLKQKNVNTLTILVMGKGGVGKSSTINSLIGEQVVRVTAFQSEGLRPVMASRSWAGFTLNVIDTPGLVEAGYVNHQALQLIKGFLLNKTIDVLLYVDRLDAYRVDDLDKQIIRAITNSFGKEIWRKSLLVLTHAQLCPPDGLSYDVFSSKRSEGVLKAIRIGARIRKKDFDDSVIPVVLVENSGRCNKNDSDEKILPNDDAWIPNLVKAITSVATNKSQAIVVSKKLVDGSDASEKGKLWIPVILGLQWFVIKWIQGAIKRDIATGNGPI

SEQ ID NO: 66238 - protein, 131 aa, Gossypium hirsutum
  unsure (1)..(131): unsure at all Xaa locations
  Clone ID: LIB3582-019-P1-K1-H1.pep
PTRPGKSSTINSLIGEQVVRVTAFQSEGLRPVMASRSWAGFTLNVIDTPGLVEAGYVNHQALQLIKGFLLNKTIDVLLYVDRLDAYRVDDLDKQIIRAITNSFGKEIWRXNLLVLTHAQLCPPDGLSYDVF

SEQ ID NO: 66239 - protein, 168 aa, Gossypium hirsutum
  Clone ID: GOSHI-09MAY01-C57150_1.pep
KNTKDSDEHHKLETSPVLLEKVDYSNRGSDSDSKGSDKRRTKHKDGKRKHKRSERRKVTSDDDDSSYDSEIDDRKEAKRRKKEEKRLRKEEKRKRSEERRRKREARRAEKLKTKRHDDDSSSDGEHAGTGKSRPGDDEEEAETEQKKLEIELRKKALESLKAKKGISH

SEQ ID NO: 66240 - protein, 53 aa, Gossypium hirsutum
  Clone ID: GOSHI-09MAY01-C57160_1.pep
VKIDLALACIRYNPRSTHLLRCKNILQLDPYTFRYCLFVLYFIAVLCLEATFN

SEQ ID NO: 66241 - protein, 147 aa, Gossypium hirsutum
  Clone ID: GOSHI-09MAY01-C57290_1.pep
MGVQDYAESKLKPSVDLTGSAKECSNGPSIGVIDIGVSQSAFLFRVALPGIRSDQSKLKCEIQRDGKVLIQGIVTQGSEVLQGLSSVCQMTVEKLCSPGPFTISFNLPGPVDPRLFSPKFRPDGILEVVVMRYRRPSDPVDAWAPPS

SEQ ID NO: 66242 - protein, 78 aa, Gossypium hirsutum
  Clone ID: LIB3149-029-Q1-K1-E1.pep
MGVQDYAESKLKPSVDLTGSAKECSNGPSIGVIDIGVSQSAFLFRVALPGIRSDQSKLKCEIQRDGKVLIQGIVTQGS

SEQ ID NO: 66243 - protein, 62 aa, Gossypium hirsutum
  Clone ID: uC-gsflmaxxa045f01b1.pep
TPHAAPSLYPRQPQSFYLKVQIGIDELKCKKSLSFVYFSSQLKTSISKNNEELHSCKRALFY

SEQ ID NO: 66244 - protein, 265 aa, Gossypium hirsutum
  Clone ID: GOSHI-09MAY01-C50550_1.pep
LLKMAPTNEEERKLKDFTDESPFKLGPAEKFLKAVLDIPFAFKRVVPWLLFANPDSEFEYLKRSFETGEAACGELRNTKMFLKLLEAALKTGNRMNVGTNRGDAHAFKLDTLLKLVDVKGTDGKTTLLHFVVQEIITAEGSRLSNANQNPKAEKIQQSDLQDDVEFRKLGLEVVSGLSGELTNVKKAAAMDSDLLSIDVAKLATGISKIREVIKLNEEVALKDSCRKFSESMNEFLKKAEEEIVQIQAQDRVALSMVKEITEYFH

SEQ ID NO: 66245 - protein, 179 aa, Gossypium hirsutum
  unsure (1)..(179): unsure at all Xaa locations
  Clone ID: uC-gsronu33B136d05b1.pep
VTLKPKLKPLHWDKVRASSDRAMVWDQIKASSFQLNEEMIETLFTANNLNSATKESGRRQSLPSVNQENRVLDPKKSQNIAILLRALNVTIEEVCEALMEGNSDTLGTELLESLLKMSPTNEEKRKLKDFTDESPFKLGPADKLLXAVLDIPFAFXRVDAMLYIAKFDSEIEYLKRSFE

SEQ ID NO: 66246 - protein, 192 aa, Gossypium hirsutum
  Clone ID: GOSHI-09MAY01-C50450_1.pep
YASGILLVNIAATVFACQYYNDQLQLPWWGVLLACGIAIVFTLPIGIITAITNQTPGLNIITEYIIGYIYPGYPVANMCFKVYGYISMTQAITFLQDFKLGHYMKIPPRTMFMAQIVGTLIACFVYLGTAWWLMENIPDICDTTASNSVWTCPSDTVFYDASVIWGLIAPRRIFRDLGPYEAVNWFFLARTV

SEQ ID NO: 66247 - protein, 63 aa, Gossypium hirsutum
  Clone ID: GOSHI-09MAY01-C50170_1.pep
LKLLQLKTTSSKKRQNEQRYKVAEKKKNNKDTATTTPLPVAIYTNKRIKAATQMTTPFFTYKA

SEQ ID NO: 66248 - protein, 166 aa, Gossypium hirsutum
  Clone ID: GOSHI-09MAY01-C50060_1.pep
QDVSAQAETGQLVNLREVLGAFPMNNVTRMLLGRQYFGAVSAGPSEAMEFMHITHELFWLLGVIYLGDYLPIWRWVDPYGCEKRMREVEKRVDDFHKRIIEEHRRARELKNKEYGKDDDYGEEMDFVDVLLSLPGEGGKPHLGGSGFLALIQDMIAAATDTSAVTN

SEQ ID NO: 66249 - protein, 258 aa, Gossypium hirsutum
  unsure (1)..(258): unsure at all Xaa locations
  Clone ID: GOSHI-09MAY01-C50380_1.pep
KNMGLRFADLLDRLSTEFPEMRFRYTSPHPKDFPDELLYLMHDRHNICKYIHLPAQTGSTTVLXRMRRGYSREAYLELVQKIRRIIPDVGISSDFICGFCGETEKEHADTLSLIRXVGYDMAYMFAYSMREKTHAHRNYIDDVPEEVKQRRLTELIEAFRESTGQRYDSQGGTIQLVLVEGPNRRAPDKELIGKSDKGHRVAFGNHPLLDREKQTDNKRNPVLGDRVEVHITKSSRASLFGETVAITKLSAFYDNVDE

SEQ ID NO: 66250 - protein, 149 aa, Gossypium hirsutum
  Clone ID: GOSHI-09MAY01-C50300_1.pep
MATAIGMIGGKGCSSWMQVKEKGKKKMANRVRVYCSSAPSVMDPYKTLRIQPGASESEVKKAFRQLALQYHPDVCRGSNCGVQFQTINEAYDILMSRLRGEPKAAEVYEEEIDEPMRGMDDSDWDLWEEWMGWEGAGIRDYSSHINPYI

SEQ ID NO: 66251 - protein, 149 aa, Gossypium hirsutum
  unsure (1)..(149): unsure at all Xaa locations
  Clone ID: GOSHI-09MAY01-C50270_1.pep
RGWRWKRVERYLESSATIDGDKLPLRFSRLIMHGLRVELIETNRVVFSFKXTPRLLNEGNYLHSGAVATFVDLVSSAAIYTAGGTFVGTSVEINISFMDAAHADEDIEIEAKALHVGKAVAVLSAEFKKKSTGKIIAQGRHTMYLPLPK

SEQ ID NO: 66252 - protein, 193 aa, Gossypium hirsutum
  Clone ID: GOSHI-09MAY01-C50220_1.pep
RRDPRERIGRALNYLHHVVGVCHRDIKPQNLLVNPHTHQLKICDFGSAKMLVPGEPNISYICSRYYRAPELIFGATVYNTAIDMWSVGCVMAELLLGHPLFPGESGVDQLVEIIKILGTPTREEIKCMNPNYTEFKFPQIKAHPWHKIFHKQFPPAAVDLVSRLLQYSPNIRCTSLEACAHPFFDNLRDPNVC

SEQ ID NO: 66253 - protein, 119 aa, Gossypium hirsutum
  Clone ID: LIB3146-036-P1-K1-G1.pep
MRTSPGPYSDLSISMAELGLKKEVREMLPVIIYKETFSIRDTQCAVCLGEYQAEDKLQQIPACGHTFHMDCIDHWLANHTTCPLCRLSVLTSDKLPVIQAANPQVSSNPVNSNGLAVQT

SEQ ID NO: 66254 - protein, 67 aa, Gossypium hirsutum
  unsure (1)..(67): unsure at all Xaa locations
  Clone ID: LIB3146-036-P1-K1-G2.pep
MIRVKTERLPSFIYMEAVCIRPAQSAVSLVEFHELDKLKQIPAXVHTFHMDCIDHWLANHTTCPLCR

SEQ ID NO: 66255 - protein, 88 aa, Gossypium hirsutum
  Clone ID: GOSHI-09MAY01-C51850_1.pep
KFLQETMEFIHPLQKFQYQYGESPGILFLVVNLKHKKVAMDAQCPRCRQYEEDSNHIFRQYPIMDVWIYLYLSKILNTDIHSMWEKLT

SEQ ID NO: 66256 - protein, 109 aa, Gossypium hirsutum
  Clone ID: GOSHI-09MAY01-C51570_1.pep
EIIKFKGFQVPPAELESLLISHPSIADAAVVPQKDEVAGEVPVAFVVRSNGFELTEEAVKEFIAKQVVYYKRLHKVHFVHAIPKSPSGKILRKDLRAKLAAAAPNTHIP

SEQ ID NO: 66257 - protein, 54 aa, Gossypium hirsutum
  Clone ID: LIB3146-028-Q1-K1-C2.pep
QGLEVYLDIPSVLPSSKHLTWNIERKQITDKIRGRKQNPPFYPSVKLSPMTWIS

SEQ ID NO: 66258 - protein, 71 aa, Gossypium hirsutum
  unsure (1)..(71): unsure at all Xaa locations
  Clone ID: LIB3272-060-P1-N1-E2.pep
HLYIFKIQKLDCNFFIVQGLEIYLDIPSVLPSSKHLTWNIXRKQITDKIRGKKQNPPFYPSENLSPMTWIS

SEQ ID NO: 66259 - protein, 194 aa, Gossypium hirsutum
  unsure (1)..(194): unsure at all Xaa locations
  Clone ID: GOSHI-09MAY01-C51740_1.pep
STRIMPEKISEDLFNNLVETIADSVSKQKSVSFFEEEKSNSVVSGFKRLLGRLRPAHHILGGGKPADVWLWRNKKTSACFLASATFIRALCAWLTYPCLPLLSFALVLGMLAQSVWSNASGLLNRSSSQVPHLVLPDELFVSIGRSVGAEVNRGLQYLQDVSCQGNLKQFLVIAVSLWVAAVIGSXCNFLTVLY

SEQ ID NO: 66260 - protein, 57 aa, Gossypium hirsutum
  Clone ID: LIB3146-033-Q1-K1-E2.pep
PQTYHQHLSLALSLLSCYMCLLRSQSKRNFFFFCVWGYKVKHQDSIFEFFFHKYCKI

SEQ ID NO: 66261 - protein, 94 aa, Gossypium hirsutum
  Clone ID: GOSHI-09MAY01-C51770_1.pep
YASDRIDVKRDECRQNNDEMIGPDWLEGSPPRLTCVGKCIFLGISSIGYHSFIFHNGRCCADLLFNLSLLYLLEFYIAQPIPEASSVITQTQLD

SEQ ID NO: 66262 - protein, 84 aa, Gossypium hirsutum
  unsure (1)..(84): unsure at all Xaa locations
  Clone ID: GOSHI-09MAY01-C51720_1.pep
ATVVYCDSQSVIHLTKDQMHHERTKHINIRYHFVXRWIFKGXVWILKIGIKHNLTDMLTKSLLVSNFEHYLNLVSIRPKNQLSP

SEQ ID NO: 66263 - protein, 99 aa, Gossypium hirsutum
  Clone ID: GOSHI-09MAY01-C51600_1.pep
VPSISLLPIIHASLSPSIFFFVTSIITFHSFEHKPKKIKSDFLPSSLRFCSLFSLRNLYTFSYETYGAREVQRVFYGEMEDEEEADCLQWRRQHRWSIS

SEQ ID NO: 66264 - protein, 150 aa, Gossypium hirsutum
  unsure (1)..(150): unsure at all Xaa locations
  Clone ID: GOSHI-09MAY01-C51620_2.pep
MPKKMGVNSKAEAARARKSAAESDRKEREAREKEENYWREAEGPKSRAAKKREEDAEKRAEAAARRAEARRXAEMEEKEIDKXMKKPDKKANRVAIPVPKVTEAQLQERKRGQRMAKKAEEXKQSRTAAEEEYERMVLVTNTNRDESLNE

SEQ ID NO: 66265 - protein, 185 aa, Gossypium hirsutum
  Clone ID: GOSHI-09MAY01-C51620_1.pep
MPKKMGVNSKAEAARARKSATEAERKDREAREKEEQYWREAEGPKSKATKKREEEAEKRAEAAARKAEARRQAEMEEKEIEKALKKPDKKANRVAIPVPKVTEAELQKRKEEEQAEMAKKAEEAKKRQSRTAAEEEYERMVLVTNMNRDDSLIEARSVEEAIAPMSVADTLPPDPHPERPLRAAF

SEQ ID NO: 66266 - protein, 184 aa, Gossypium hirsutum
  Clone ID: GOSHI-09MAY01-C51140_1.pep
VTSNIIEPALQLWDGNNQEKLVSQETFLEEFKKVAERVAQNLKEQPVIVAHSENTFDGSGIKRLLTNKFELDKLLNTALENVPKDRNGKVSKEYLRVVLDVVAPSASLPPIGAVEQIDQVVADAFDMINADDGKAVKEDEFKKLLTEILGSVMLQLEGNPVSISSNSVVHEPLASSSSLLQPSS

SEQ ID NO: 66267 - protein, 202 aa, Gossypium hirsutum
  unsure (1)..(202): unsure at all Xaa locations
  Clone ID: AI728930.1.pep
MRDCIIKALEKLTVDQGMPPSSDSWVTSNIIEPALQLWDGNNQEKPVSQETFLEEFKKVAERVAQNLKEQPVIVAHSENTFDGSGIKRLLSNKFELNKLLNTALENVPKDRNGKVSKEYLRVVLNVXAPSASLPPIGAVEQIDKVVADALDMINADDGKAVKENEFKKLLTEILGSVMLHLKGNPISISSNSVVHEPLASSS

SEQ ID NO: 66268 - protein, 273 aa, Gossypium hirsutum
  Clone ID: GOSHI-09MAY01-C51130_1.pep
NDLTKLVQHCRLLQRLWILDCIGDKGLGVVASTCKELQELRVFPSDPFDAGNAAVTEEGLVLISSGCPKLNSLLYFCHQMTNAALITVAKNCTNFIRFRLCILDPVKADPVTNQPLDEGFGAIVRSNKSLKRLSLSGLLTDQVFLYIGMYAEQLEMLSIAFAADSDKGMLYVLNGCKKLRKLEIRDCPFGDAALLEDVGKYETMRSLWMSSCEVTLGGCKSVAEKMPSLNVEIIDECEQMEFNLVDKQKVDKMYLYRTLVGHRKDAPEYVWIL

SEQ ID NO: 66269 - protein, 51 aa, Gossypium hirsutum
  Clone ID: LIB3829-004-Q6-N6-A7.pep
LAKIPSLNVEIIDESEQMEFNLDDKQKVDKMYLYRTLVGHRKDAPEYVWIL

SEQ ID NO: 66270 - protein, 112 aa, Gossypium hirsutum
  unsure (1)..(112): unsure at all Xaa locations
  Clone ID: GOSHI-09MAY01-C51370_1.pep
MVSLGSRASLCCEDRSDLLPDLIKTLKALRLKTLKAEITTLGGRVKNXVLFITGEEDSSSSAEQQQLLLQYCISSIQEALKAVMEKTSVDEASSGNVKRHRTNIGVLEHRSL

SEQ ID NO: 66271 - protein, 91 aa, Gossypium hirsutum
  Clone ID: GOSHI-09MAY01-C52470_1.pep
LGQILCNWVKFILRDFGFKLVFAQIFVIGHWTSDFGFFICVCVFFFWFLISILYSNWPGQNGPITTTTETGSSSLSNAHLFLTKTKMLDSS

SEQ ID NO: 66272 - protein, 113 aa, Gossypium hirsutum
  Clone ID: GOSHI-09MAY01-C52760_1.pep
KNLKERCDIIDLAVEMDRILRPGGYLLVQDTMENIKKLNPVLRSLHWSTTLYQGQFLVGEKGFWRPSENDNRKRNMSSYPGSSTPNLSSIKIGLQLCNIQILLYPKFNPIEEG

SEQ ID NO: 66273 - protein, 283 aa, Gossypium hirsutum
  Clone ID: GOSHI-09MAY01-C52710_1.pep
MAEQQQLEPWTDLSGKVVMVTGASSGLGRDFCLDLSKAGCRIVAAARRVDRLKSLCDEINHLTFPFSGPQPSGPRAFAVELDVCADGSTIQSSVKAAWDAFGRIDALINNAGVRGNVKDPLELTEEEWNQNIRTNLTGSWLVSKYVCMLMRDAKQGGSVINISSIAGLNRGQLPGGLAYASSKAGLNTMTKTMAMELGMHKIRVNSISPGLFKSEITEGLLKKAWLQEVATKINPLRTFGTADPALTSLVRYLIHDSSEYVTGNIFIVDAGSTLPGVPIFSSL

SEQ ID NO: 66274 - protein, 71 aa, Gossypium hirsutum
  Clone ID: uC-gsronu33B049c07b1.pep
MAEQQQLEPWTDLSGNVVMVTGASSGLGRDFCLDLSKAGCRIVAAARRVDRLKSICDEINHLSFPFSGTQP

SEQ ID NO: 66275 - protein, 135 aa, Gossypium hirsutum
  Clone ID: GOSHI-09MAY01-C52120_1.pep
LPGTQSVIHGCLTKEGINFKLGRALPLMIEDTIEEFCRKLMSKASLTDFNEMFWAVHPGGPAILNRLESTLKLNKGKLECSRKALKDFGNVSTNPIFYVMEYMREELKRGGAEEWGLALAFGPAPPPEGFFLRSL

SEQ ID NO: 66276 - protein, 82 aa, Gossypium hirsutum
  unsure (1)..(82): unsure at all Xaa locations
  Clone ID: LIB3146-039-Q1-K1-D9.pep
KLECSTKALKDCRNVSSNTIFYVMEYMREELKRGGGEEWGLAFQSGXGTTGEGLLRISLKLHDMHMGKLLLCFLIFIMPAAT

SEQ ID NO: 66277 - protein, 40 aa, Gossypium hirsutum
  unsure (1)..(40): unsure at all Xaa locations
  Clone ID: LIB3493-008-P1-M1-B3.pep
IFYVMEYIREELKRXGGEEWGLALAFGPGITFEGILLRSL

SEQ ID NO: 66278 - protein, 83 aa, Gossypium hirsutum
  unsure (1)..(83): unsure at all Xaa locations
  Clone ID: LIB3146-038-P1-K1-G2.pep
XXKXXPAXXMVTPIXXVLIGTXLDVXSLLAGGCYFTXMMXWSWDFLDEMIXDGLVLIFNGGSNQNLEXLREEGSISASMFTXV

SEQ ID NO: 66279 - protein, 79 aa, Gossypium hirsutum
  Clone ID: LIB3146-038-P1-K1-G6.pep
HNGLVETENLPLLERKEIIYTEGDQFCGDDLDEHESEEKRPAEMVTIAGFIEPLDVIPSAGGVTTDDDGLDFLDDDLTD

SEQ ID NO: 66280 - protein, 192 aa, Gossypium hirsutum
  unsure (1)..(192): unsure at all Xaa locations
  Clone ID: GOSHI-09MAY01-C52300_1.pep
MAGAAEPQKRQSGRPFPPSARGPPPPPRPRFEPVDREKTCPLLLRVFTKIGGHHSKEDFAVRGKEPKDEVQIYTWKDATLRELTDLVKEVAPAARRRDARLSFAFVYPDKNGRFVVREVGKTFSCGNVRRLDDSXTLGVLSFEIGDYLDVAIMSAELSSVRLVTWIGRCCNAFPSSLSYYVKEIIKFDASIV

SEQ ID NO: 66281 - protein, 79 aa, Gossypium hirsutum
  Clone ID: LIB3582-013-P1-K1-F6.pep
MASSKENLAWRGRDPKVEVQINPWKDATLREWTDLVKEVPPAPRRRDAGLPFAFVYPDKNGRFVVREVEKTFSYSNVRL

SEQ ID NO: 66282 - protein, 142 aa, Gossypium hirsutum
  Clone ID: GOSHI-09MAY01-C52250_1.pep
LASLRMLRVYLRTYALEQMVQAASSSAGLRTIKRVEQTLQDLGVNLKPKVPTKAVCAEHLELRKEILTLLNLQKQLQYKEAEGSSFRDGSYGDMPGTAKRSQRAADQDRPFVPATISFGVIPGDGVVKREQKRKGPGRTSET

SEQ ID NO: 66283 - protein, 65 aa, Gossypium hirsutum
  Clone ID: LIB3584-040-P1-K1-G8.pep
LLNLPNKIKVTIWRISWNYLPTRANMQHRQLVSNTNCPQYGERAKTIDHIFRECPGSLISFPRIR

SEQ ID NO: 66284 - protein, 62 aa, Gossypium hirsutum
  Clone ID: LIB3146-057-Q1-K1-F7.pep
IYQTKLRLQYGEFHGIICPAQLGWQQLIVIFSITFPCSSRYATKSTSILKPLKPITSTTLRL

SEQ ID NO: 66285 - protein, 117 aa, Gossypium hirsutum
  unsure (1)..(117): unsure at all Xaa locations
  Clone ID: uC-gsflnu33B073h03b1.pep
ACSTSLHLFFKTHFKSPKNLFFYPNSIHFQTKVSTFSSNNLTLFFKNSKTLYGTWKLKSXEEEETAVVVHEREETTVCEQESVFVPVSPSDTLRMYFQIPAQGLTMRRFKGYEIKHG

SEQ ID NO: 66286 - protein, 126 aa, Gossypium hirsutum
  Clone ID: LIB3146-057-Q1-K1-D10.pep
KGSKTLYGTWKLKSAEEEETAVVEQEREETTVAEQESVSVPVSPSDTLRMYFQADGMLNEAEIPKVTKALEGAEGVSDLKVQVLEGIGTVELTKQTTVQATGVASNLVELIQGAGFKLQTLNLKFD

SEQ ID NO: 66287 - protein, 249 aa, Gossypium hirsutum
  Clone ID: GOSHI-09MAY01-C53750_1.pep
MCGDVTNWDEEAYRESILREREIQTRTVFRTVWAPSFNPNPECVVVASSDGSIASYSISSCVSKHPIGFCSARAQRLLPAEPEGFLEGHDGPAYDVKFYGNGEDSLLLSCGDDGKIKGGRWKEFTESEVPITFQGNHMKPVLDLINPQDKGPWGALSPIPENNAIAVDPQGGSIFSAAGDSCAYCWDVEKSEIKMVFKGHTDYLHCILSHASSSQIITGSEDGTARIWDCKSGKCIKVIDPLKDKKLRG

SEQ ID NO: 66288 - protein, 76 aa, Gossypium hirsutum
  Clone ID: GOSHI-09MAY01-C53730_2.pep
QAQFLCQASKGRLKEDEARKYFQHLINAVDYCHSRDVYHRDLKNTETSSKPTGRPASKLNQRSNSILFILFICNLI

SEQ ID NO: 66289 - protein, 122 aa, Gossypium hirsutum
  Clone ID: GOSHI-09MAY01-C53730_1.pep
CQQHSISAYTFFYSCYVWCLVLQAELESFKMEYANARLECNTADERANILASEVIGLEEKALRLRSNELKLERQLENSQAEISSFNKPACRPTSKLNQISSSILFILFICNLIQLQCNLYLK

SEQ ID NO: 66290 - protein, 90 aa, Gossypium hirsutum
  unsure (1)..(90): unsure at all Xaa locations
  Clone ID: GOSHI-09MAY01-C53690_1.pep
IFSLVFVHYQVKACGSLVTEEHPLAMLVPIEFFLMGFGFQRQPHFASSSSNGSNPSSPSSHSCIAPELLXSPEGLGIKLKPIKTRADIEI

SEQ ID NO: 66291 - protein, 274 aa, Gossypium hirsutum
  Clone ID: GOSHI-09MAY01-C53670_1.pep
TLDSFMEYDSLLESPISMTQISRNMEYDQRSVTRKLWKYENGGVDVSLKDGLFSAVTQGRSICDSPSDLHELSNNGSEFTEEFSGFLYRSPRNVLPRSATPSPQRSRSRINVEALFTTPRKLIHSLQDPNELNSDYSEKQFRRFRSPCSEKFGGSPTTNRNSFRRGIINEVKRKARSYTDGEDHGVSESVSSTDDSPAELDVLRSTDAAPKNKKETLEYPNEKVGKNMAPKLFLGLFLIIIAVLTCLWWTEGEDESSLCCSNIGSLNSVVSNLS

SEQ ID NO: 66292 - protein, 189 aa, Gossypium hirsutum
  unsure (1)..(189): unsure at all Xaa locations
  Clone ID: GOSHI-09MAY01-C53600_1.pep
NMRELWGVTLNHSEELLXDGGIDSLFGTKDMAAADSNCQGAVAAEGSSVGLINAVQPACSNAASADSTMSSKTDSILCFTARQAHSSVSFSGLTGESSAGDYQDCGASSMLLMGEPSWCPPCAESSFQSATRSNAVMRYKEKKKTRKFDKQVRYASRKATADVRKRVKGRFVKAGDAYDYDPLNHTRSC

SEQ ID NO: 66293 - protein, 87 aa, Gossypium hirsutum
  Clone ID: AI727890.1.pep
MKKACSIQGPLKEEFTFSTTSAPFKSCHASTIVEVDKDHFLAAYFGGSYEGAPDVKIWLQKYKDGCWYPPLVIDEQPNVPMWNPVLF

SEQ ID NO: 66294 - protein, 125 aa, Gossypium hirsutum
  Clone ID: LIB3146-053-Q1-K1-F1.pep
PRVRPRVRPRVREGAPDVKMGVQKYKDGCWYPPLVIDEQPNVPMWNPVLFKLPSEELLLFYKVGQEVQKWSGCMKRSYDKGVTWTKREQLPTGILGPSKNKPILLENGVLLCGSSVESWNSWGSW

SEQ ID NO: 66295 - protein, 102 aa, Gossypium hirsutum
  Clone ID: GOSHI-09MAY01-C53380_1.pep
INSKFGSICILNIQAPFNVCFFLEKEKFSGIKETILHGETQCIVFTHFAVESPPTPYAISFVQRHHHHHPDNKLRSYENLVYSIRPGTTHQFCFLTVPMLEK

SEQ ID NO: 66296 - protein, 108 aa, Gossypium hirsutum
  unsure (1)..(108): unsure at all Xaa locations
  Clone ID: LIB3584-011-P1-K1-C1.pep
MPHASGGIPVYQNPPPPPSSPPFPFAQQPLDSSLPSSPSYLATTKIGNTSLNPFQSQGLVRSRFMSRFPAXRSMRAPRMRRTTTLHARFVHAAELSGGPERATPKSVP

SEQ ID NO: 66297 - protein, 47 aa, Gossypium hirsutum
  Clone ID: LIB3146-056-Q1-K1-C6.pep
TTIPLKLMSLQGRLGLVQSQPLVPNNCFILTVQDGKSCKNSLMRRKG

SEQ ID NO: 66298 - protein, 47 aa, Gossypium hirsutum
  Clone ID: GOSHI-09MAY01-C53230_1.pep
WMEEDPREAILKYADVAEKDPKFIAPAYAETQPEPVFAKSDFEDEEK

SEQ ID NO: 66299 - protein, 197 aa, Gossypium hirsutum
  Clone ID: GOSHI-09MAY01-C48830_1.pep
MEKSIQFKSQILHYTTNSFLNPFLESTISLQAFNCSWKSPIFTVSPLLSPKTQIQKPIICARRSKRRKGSDRSTKLALELLSILASNLRILPQPLDLIVQNLVAADEEGLGFLNGFNGVRFKGWKKPTMRRRNGKKILGFLVILGSCILCLLFGKEISSDMLFGILGLIFFVFALIKEWRRGFKAWVFGVCCVGVSV

SEQ ID NO: 66300 - protein, 129 aa, Gossypium hirsutum
  Clone ID: GOSHI-09MAY01-C48590_1.pep
IKHDILLQISLKLAHFFIFIFMFFSKMKLALAFFLHVFLKLRTIDGKLGSFGIPHVSHKILISVEFLLSGWTKVGLDFNTSFLNLVYKTQPSGIGPGESLTGIGPGESLMSFLSFWSPISCKISHTPKG

SEQ ID NO: 66301 - protein, 174 aa, Gossypium hirsutum
  unsure (1)..(174): unsure at all Xaa locations
  Clone ID: AI054762.1.pep
TFDDPLADELMVFYERMGDTLAHQYSGSAAHNKVFSERRGQWKAATQSQEXFRTLQRYYSNAYMDAQKQDAINLFLGNFQPQPGKPALWELDSNQHYGSFFPRSLSDGNILRQSESPMSARNDKQEKLTNSTLPNRSQGTSNGHSESSPEISTCGRKISFRYTSMAPKAVFGQC

SEQ ID NO: 66302 - protein, 65 aa, Gossypium hirsutum
  unsure (1)..(65): unsure at all Xaa locations
  Clone ID: AW186893.1.pep
YTACSMLYMDVNGRYSAFFKLISQVSQFLIAINYVTPSGVYARYEYVPDKNXFKILLVLLLFKGS

SEQ ID NO: 66303 - protein, 141 aa, Gossypium hirsutum
  Clone ID: LIB3135-047-Q1-K1-A8.pep
STLPNRSQGASNGHSESSPESSTCGRDISYSRYTPSMPQRQLFGQVQIDRSLGSDNICSEHGDGFSCSNFVDIDWLSSAGNSCDGEPFERSLVLTSSLVDGPSSENVVNGILGETTPSTCENGSSMKETQQKGTKLSFADM

SEQ ID NO: 66304 - protein, 58 aa, Gossypium hirsutum
  Clone ID: GOSHI-09MAY01-C48780_1.pep
ELVISYSGFLGLLSLSRSLSIIIDRPVNHLWPRIAILLNARGFIKFGRGPIDSFVVGD

SEQ ID NO: 66305 - protein, 79 aa, Gossypium hirsutum
  Clone ID: LIB3493-013-P1-M1-F3.pep
TIIGAKAPIRGPSRVNTRTLVPPPVRRRFVGCYTPSFNRFSSKTQQTFSLKKTMLSALFLMVSHNILLPPSSTQAMKSI

SEQ ID NO: 66306 - protein, 57 aa, Gossypium hirsutum
  Clone ID: LIB3135-048-Q1-K1-E5.pep
SLFLMVSHNILLPPSSTQAMKSIEPQNSFSNSDFNKAKEDSWQLYKVRFLLSLFFIF

SEQ ID NO: 66307 - protein, 74 aa, Gossypium hirsutum
  Clone ID: GOSHI-09MAY01-C48620_1.pep
CFEVCKIRCNCKCFCNINNPRICILRWVVETPTMRFDERDFLKLLCLVKHFSNYKIIKMGMREVGRAEILVLHC

SEQ ID NO: 66308 - protein, 77 aa, Gossypium hirsutum
  Clone ID: LIB3149-020-Q1-K1-G1.pep
MTEPNLNYNISLESPTAHIFKFNVPGYNKEDIKVQIQDGNIMHIKGEGIKEESHTKDTVWHVAERGTGKAEFSREIE

SEQ ID NO: 66309 - protein, 109 aa, Gossypium hirsutum
  Clone ID: LIB3135-047-Q1-K1-H7.pep
PRVRADGILGHPFRRLFWRPAIFREWAASPPLMDWLESPTAHIFKFNVPGYNKEDIKVQIQDGNIMHIKGEGIKEESHTKDTVWHVAERGTGKAEFSQKIELPENVKIE

SEQ ID NO: 66310 - protein, 192 aa, Gossypium hirsutum
  unsure (1)..(192): unsure at all Xaa locations
  Clone ID: GOSHI-09MAY01-C48050_1.pep
MIGVGKIKQYSNILEKPLSKGKQEVSLSAFTFLFSELVQYNQTRVDNIAELERRLEDAGYAVGARVLELLCHRDKGNRRETRLLGILSFVHSTVWKVLFGKVADSLEKGTEHEDEYMISEKDLLVNKFISIPRDMGTFNCGAFVAGIVRGVLDGAGFPPVVTAHFVPVKGQQKPXTTILIKFAEHVLPTEQG

SEQ ID NO: 66311 - protein, 143 aa, Gossypium hirsutum
  Clone ID: LIB3583-024-P1-K1-F5.pep
MIGTGKIKQYANVLDKPLGKGKQEVSLSAFAFLFSELVQYNQTQVDNISELETRLEDAGYAVGARVLELLCHRDKGNRRETRLLGILSFVHSTVWKVLFGKVADSLEKGTEHEDEYMISEKELLVNRFISIPNDMGTFHCGAF

SEQ ID NO: 66312 - protein, 56 aa, Gossypium hirsutum
  unsure (1)..(56): unsure at all Xaa locations
  Clone ID: LIB3135-040-Q1-K1-C9.pep
MIGVGKIKQYSNILEKPLSKGKQEVSLSAFAFLFSELIQXIKLGLTIAELERRLED

SEQ ID NO: 66313 - protein, 197 aa, Gossypium hirsutum
  Clone ID: GOSHI-09MAY01-C48370_1.pep
MDESGEYPKEYYTSNGNPRRLTSTSSSSSSTTSVHVTALDGLVNVNSLFTIAVFVGLSLATPGQHSLENRAPCDAGIDVAKKLLVFEVVSFSFFLFSSLVAQGLKLAINLLNSKDVDEAFRAHINLKVLRFGMMGSAVGSVMGCLFLMLSMVNVIEIRLGLLSCGSQSSIHATAALVILVSSALLIYISTAVYAFLH

SEQ ID NO: 66314 - protein, 180 aa, Gossypium hirsutum
  Clone ID: GOSHI-09MAY01-C49970_1.pep
PPKLKPLSFSFMASSREGHYRGVRKRPWGRYAAEIRDPWKKTRVWLGTFDTPEEAALAYDGAARSLRGAKAKTNFPTPSSSSSPPPALSLDLNLASHNPHRWALASPHHHHRFAAVGDFLQAGGIKDMNFGPDPSSSTRPNVLSVSTSPPVTANGNTASFLGIVRRGLPIDLNEPPPLWL

SEQ ID NO: 66315 - protein, 181 aa, Gossypium hirsutum
  Clone ID: GOSHI-09MAY01-C49910_1.pep
GSLPLSCLVKKKVITKLIDNSQQPQSSKNDTNVVGLALGPPQSSIIGFQNIGSSMQPSNLNPFNDWTKNHDKGVEDFLSEEEIRVRSNEMLENEEMQHLLRLFNMGGNASINMTEDSGYGFPNYIPSPMPNFVDEDRSRSGKAVVGWLKIKAAMRWGFFIRKKAAERRAQIVELEEEEEEL

SEQ ID NO: 66316 - protein, 94 aa, Gossypium hirsutum
  Clone ID: uC-gsflnu33B089g04b1.pep
PTCPQHLLRLFNMGGNASINMTEDSGYGFPNYIPSPMPNFVDEDRSRSGKAVVGWLIDMASLRWFYYFPYLTYQQPVFFSFFIFFFYILLNFLF

SEQ ID NO: 66317 - protein, 172 aa, Gossypium hirsutum
  Clone ID: GOSHI-09MAY01-C49840_1.pep
FLLFLQFQCDIRFVTFNIISGTSMSCPHVSGAAAYVKSFHPTWSPAAIQSALMTTAAPMSSGINMEAEFAFGSGHLNPLKAAYPGLVYDAYETDYINFLCGLGYATRLIQLLSKDNSTCPKDTNGTVSELNYPSLGLSTSPLKPFSRTFKRTVTHVGSPTAVYRAHLSFRQV

SEQ ID NO: 66318 - protein, 114 aa, Gossypium hirsutum
  Clone ID: GOSHI-09MAY01-C49860_4.pep
KKLLESDYSIDCLWIFFSFPMLTVPLSAPTLFHSFFLLPVHQMCFAPLLIYLFSLDHPPTLAHLCYNPSHGVKAPLFKLSLCSLMHFSLHSLHSFWYVNSFVFPFYFIFNQWIE

SEQ ID NO: 66319 - protein, 76 aa, Gossypium hirsutum
  Clone ID: GOSHI-09MAY01-C49860_3.pep
IYAKGILVILVFSIMLLHLYSIQPNTRLLLRLYSITFNQTVDLLLHLYSITPLIQYTSNPIQQTKRALNSPFLQIT

SEQ ID NO: 66320 - protein, 75 aa, Gossypium hirsutum
  Clone ID: GOSHI-09MAY01-C49860_1.pep
NFNACVTKIKNFFNVQHYLLYFFFKVRKLKNIATERIYKFTITPLFHSTSIPNTGLLLRLYSIRFNQTVDLLLHL

SEQ ID NO: 66321 - protein, 63 aa, Gossypium hirsutum
  Clone ID: LIB3828-003-Q1-K6-A1.pep
PLRSAICSCGSKSYSANPAFKYALAFGMPRHFLGLCMPPHKSREYILCPGVVQAYSSWIFHNE

SEQ ID NO: 66322 - protein, 117 aa, Gossypium hirsutum
  Clone ID: uC-gsronu33B050b01b1.pep
PKQISAKGILVILVFSLCYYTSITFNQTQDYYYASIPLHSTKQLICYYTAFPLHLYSITHLIQYTSNPIQRTKRAVRFFVDRLLIILLYKKKPSLVQSPSLDFAIRGSSKKHSTIHV

SEQ ID NO: 66323 - protein, 154 aa, Gossypium hirsutum
  unsure (1)..(154): unsure at all Xaa locations
  Clone ID: LIB3493-011-P1-M1-A11.pep
ESRPHCLSFLYAVLIISASILFTHSDARLMVHIWKKDQGSNLHEKLKTTDRIGFDGDPYTLDSPFYLPHSDSLSPLLSQPDHSPSFTPQSPFNPLPPSASYGLPTPXPPSNIINSPPTPXPPSNIIHSPPANPPEAASPEHGFNPPSIFLSPPQ

SEQ ID NO: 66324 - protein, 150 aa, Gossypium hirsutum
  Clone ID: LIB3135-058-Q1-K1-B12.pep
ILDDPFDDPPQLSELIPGASPEGKPKDEVDDDVRLEDDWVPMDEQLGASELEEVLRAKDAHSRAVVLESIGDIPDAEIKPPENVLFVCKLNPVTEVSAYFVFSVGNKCVYVYSLICFTYFDFDWRSLSERTDKDKLAENMRVLSFQHFTI

SEQ ID NO: 66325 - protein, 67 aa, Gossypium hirsutum
  unsure (1)..(67): unsure at all Xaa locations
  Clone ID: LIB3135-058-Q1-K1-D2.pep
AMCIVHIMPLLYLSYRKNKMINSHAENKPPENVLLVCKLNPVTGVSAYFVFXXGHKCVYAYSLICFT

SEQ ID NO: 66326 - protein, 174 aa, Gossypium hirsutum
  unsure (1)..(174): unsure at all Xaa locations
  Clone ID: GOSHI-09MAY01-C49780_1.pep
NTIDMATSVECGREVRFRRSLWSLVECMVPCCGLQPSMSGTVSSDTESSHGSITTSTSISTSTSTITGTFFGYRKGRVSFCLQXDSRSSPLLLLELGVPTAYLAREMQYGLLRIALEVRLTRAKSDAXLYNVPVWSMYCNWKKXVGFAIMRKMSDFDAVVLKLMQSVSVGAGVL

SEQ ID NO: 66327 - protein, 192 aa, Gossypium hirsutum
  unsure (1)..(192): unsure at all Xaa locations
  Clone ID: GOSHI-09MAY01-C49640_1.pep
GRPGRPTRTPTRPHGDLLTLLNVYHACKQNNXDRSWCYENFINHRALKAAVNVRQQLGRIMSRFNLKLCSTDFNSRDYYVNIRKAMLAGYFMQVAHLEXRTGHYLTVXDNQVVHLHPSNCLDHKPEWVIYNEYVLTSRNFIRTVTDIRGEWLVDIAPHYYDLENFPQCEAKRVLEKLYRKKEKDREESRNRR

SEQ ID NO: 66328 - protein, 110 aa, Gossypium hirsutum
  Clone ID: uC-gsflnu33B070c07b1.pep
MAKCFNVVQKQKRAQIAERKRLIHGDPATKKLKNKSQSLSVSGKRKRKLLKKWRREQKEVIEKGLVTMEDVEMVAAEGLEFSFPPFFKWLISCLFCTSKTAITAEGLEFY

SEQ ID NO: 66329 - protein, 133 aa, Gossypium hirsutum
  Clone ID: LIB3135-054-Q1-K1-D1.pep
MAKCFNVGQKQKRAQIAERKRLIHGDPATKKLKNKSQSLSVSGKRKRKLLKKWRREQKEVIEKGLVTMEDVEMVAAEGTTEDGGTCQDATIKVPTKFPMKKNLKLKRINRKGKKKGGSSKAGIEAASVDSMIE

SEQ ID NO: 66330 - protein, 79 aa, Gossypium hirsutum
  Clone ID: GOSHI-09MAY01-C49380_1.pep
MIKGCLGLECGKKSSIVKNTSVEIVVHEDAFDSIYGKNGCNLARLKEISGAKVEVHEPCGGESEGRVLISVTPHQTLIA

SEQ ID NO: 66331 - protein, 124 aa, Gossypium hirsutum
  Clone ID: GOSHI-09MAY01-C49350_1.pep
IFTLCVGNAWGEAALLLAAGATGNRSALPSSTIMIRQPIARFQGQATDVDLARKEVKNVKTELVKLYAKHMGKSTEQIEEDIRRPKYFSPSEAVEYGIIDNVLYNERSSEDSGVVSDLKKAQLI

SEQ ID NO: 66332 - protein, 45 aa, Gossypium hirsutum
  Clone ID: LIB3825-026-Q6-N6-D1.pep
TYYLLKKKGATKEKTAFPVKKIHSSELFLASLNSVYTGAEKISFN

SEQ ID NO: 66333 - protein, 234 aa, Gossypium hirsutum
  unsure (1)..(234): unsure at all Xaa locations
  Clone ID: GOSHI-09MAY01-C49320_1.pep
MINIDQEETSSVREIRPKSRRIMGGGGPDDEDDEDEDMKWPPWLRPLLQTSFFGQCKLHPDAHKSECNMYCLECMNGALCSLCLAYHKDHRTIQIRRSSYHDVIRVSEIQKLIDITGIQTYIINSARIVFLRPRPQPRLGKGVTNTCHVCHRGLLDSFTFCSLGCKVVGTSKKLIKKGKLSTEMEYSEGESLNISVSIGGXYQNIQQSFTPSTPPPTARRRKGVPHRAPMGGSL

SEQ ID NO: 66334 - protein, 157 aa, Gossypium hirsutum
  unsure (1)..(157): unsure at all Xaa locations
  Clone ID: GOSHI-09MAY01-C49260_1.pep
DGKQFXSSSDVSGSNISENSIIVWDISRQVPLSNEVYAEAYTCPCVRYHPFDPYFVAQSNGNYTXFSSKPPFKLDKYKRYESHGVFGFPIKCNFSLDGEKLASGSSHGSIYLYNSRSSVLVKKIKAYEEACVDIAFHPILSNVIASCSWNGDVSVFE

SEQ ID NO: 66335 - protein, 84 aa, Gossypium hirsutum
  unsure (1)..(84): unsure at all Xaa locations
  Clone ID: GOSHI-09MAY01-C44960_1.pep
GREIIKEGXFFATVIQAALELYFMVAWLIFYFVVKSREANTEGRRYGRRELEALIDGLGGKFNRKKWGKFSFAAITFDSDTEDA

SEQ ID NO: 66336 - protein, 90 aa, Gossypium hirsutum
  Clone ID: GOSHI-09MAY01-C44820_1.pep
MATTKTTLLLAVLCLFLVCEIGMLMVEAQVQRPECEGKCASRCSKSWKPKMCLKTCNACCNTCDGCVPPGPTANKEVCPCYAKYKNGKCP

SEQ ID NO: 66337 - protein, 59 aa, Gossypium hirsutum
  unsure (1)..(59): unsure at all Xaa locations
  Clone ID: LIB3148-031-Q1-K1-E6.pep
IRKKNMQRLLQQPEMGVCPLALLLTKEVCPCYCQDKEWQGPLNHFFLCSKTRIXVMGFI

SEQ ID NO: 66338 - protein, 279 aa, Gossypium hirsutum
  Clone ID: GOSHI-09MAY01-C44590_1.pep
SIHQPSYRILGLLDRLIFLSRGQTVYSGSPTNLPLYFSEFGYPIPENENKTDFALDLIRELEGSPGGTKSLVEFNETWQSMKHTRDSEPDELGLSLKEAISASISRGKLVPGATNDVNSSSMVPTFANPFWKEMVVLSNRSILNSRRMPELFGIRLAAVLVTGFILATVFWQLDNSPKGVQERLGFFAFAMSTTYYTCADALPVFLQERYIFMRETAYNAYRRLSYVISNALVTLPGLILLSFAFSMTTFWAVGLDRGLSGFLFYFLIMVASFWSGSSF

SEQ ID NO: 66339 - protein, 128 aa, Gossypium hirsutum
  Clone ID: GOSHI-09MAY01-C44530_1.pep
PTHASAFLYLRETTALINLFNINKLNQGNTTQEKQRKMARQVFVMALAFMAVVGAFAANSSPSASPSSSPAASPAGGPASDLAFSPGVESPNESEDPSEEPSEDPSEGPEADEPAADSLDADYSGGDA

SEQ ID NO: 66340 - protein, 241 aa, Gossypium hirsutum
  Clone ID: GOSHI-09MAY01-C44450_1.pep
LKSKNTRLINLLLALMVGGCGAGVPLMKKVPAAVLWGYFAFMAIESLPGNQFWERILLLFTAPSRRYNVLEEYHATFVETVPFKTIATFTLFQTIYLLVCFGITWIPLAGVLFPLVIMLLVPPRQYLLPMFFKAVHLQDLDAAEFEEAPPIPYMAFEDRELEGRTTTTVDGAEILDQVVTTSRGEIRRMQSPNTSSVFEKEYSPQIRQLSPSLTEKGLELSPTPSPAPSTLGHSSRDSSSS

SEQ ID NO: 66341 - protein, 92 aa, Gossypium hirsutum
  Clone ID: GOSHI-09MAY01-C44760_1.pep
GLFILMGNGPKNNCMSASHKLFKDKAKNRVDDLQGMFLDLQFARKESRGVDVAILEEQLHQMLREWKAELNEPSPASSLQQGGSLGSFSSDI

SEQ ID NO: 66342 - protein, 178 aa, Gossypium hirsutum
  unsure (1)..(178): unsure at all Xaa locations
  Clone ID: GOSHI-09MAY01-C44090_1.pep
MRFFGFDASENEDLFGDGPLPEWVGWGESSDLKLGGSSKNPFLDDDSSDVNQPSHIETTVTYVFPLSNGDPILPNVSLDSMDLSDGSVSSDTSQKSPPAVPSLFGEDVEFVGVELEGTEKAMEQALKEGIVGEAXGPLKRNIIPKVPQKENSDDDGAGMKEFNDANYWKVDQEVAVLE

SEQ ID NO: 66343 - protein, 43 aa, Gossypium hirsutum
  Clone ID: LIB3148-021-Q1-K1-E2.pep
GPLKRNIIPKVPHKENSDDDGAGMKEFNDANYWKVDQEVAVLE

SEQ ID NO: 66344 - protein, 202 aa, Gossypium hirsutum
  Clone ID: GOSHI-09MAY01-C44080_1.pep
MAFSGTTEKCRSCDKTVHFIEMVSVDGVPYHKTCFRCSHCKGLLVMGSHCQREGNLYCKPHFEQFFRGTGSYTSKDKPNGLQRAPSKVASLFSGTQDKCGVCKKTCYPLEKVTVEGEIYHKNCFRCAHGGCFLTTSSYAALDGFLYCKHHFAQLFKEKGSYSHLTKTSSMKRSPSGGKFDAESDSEPKSEYNRTGTEAQPDP

SEQ ID NO: 66345 - protein, 72 aa, Gossypium hirsutum
  Clone ID: GOSHI-09MAY01-C44060_1.pep
ETMDSFEYHMIQLLRPSISIPKFLAISFKVLVFVTKLHLFLLVLVVTILMLLVNCNGDRVLLRIIATTGRVG

SEQ ID NO: 66346 - protein, 165 aa, Gossypium hirsutum
  Clone ID: GOSHI-09MAY01-C44000_1.pep
HASAHASAHASAEELNALLYSDDDSYYTDDEVTPAVHSPCTMTAHPEQLEGGGTESVASSIGPTKKRKLLDDGNDYLPLLTDAASSVNPSRCSEYVDDADSSCANMESSSSNKRLRIEKIHETVSVLRSLIPSGEGKDAIMVLDEAIDYLKSLKLKAKTLGLNAL

SEQ ID NO: 66347 - protein, 82 aa, Gossypium hirsutum
  Clone ID: LIB3148-028-Q1-K1-D6.pep
SFHILIRSPFPTLHTIPSPINSRALQMLLQVNDSDINQLGTWAESDNHLHYHQRLGILQLIFWKHGMYRRLYVLWRKQIYSM

SEQ ID NO: 66348 - protein, 55 aa, Gossypium hirsutum
  Clone ID: LIB3148-023-Q1-K1-B7.pep
LQKGLCEGLGMVIELIYGTITGYYGNLARRTLCEQAVCPLCKADLENSEHSPAVL

SEQ ID NO: 66349 - protein, 266 aa, Gossypium hirsutum
  Clone ID: GOSHI-09MAY01-C45950_1.pep
SRVRDDFPMEVLRATQLTFLDIRFNRIKGVVPATGFKLDLDVLFINNNNFRQRLPENLGDTPALYITFANNKFTGRIPPSIGKAKNLLEVLFLNNELTGCLPYEIGYLQNATVFDVGMNKLTGPIPHSFGCLKKMEQLNLAGNEFYGEVPEIVCRLSNLQNLSLSSNYFTQVGPACRDLVMKKKLNVKNNCILDLPEQRSKADCAMFFSRKLICDRTESFKLIPCMAGKNGFHSNSTEESEKKESTGSGFSSPSATTYGVLKPHRL

SEQ ID NO: 66350 - protein, 150 aa, Gossypium hirsutum
  unsure (1)..(150): unsure at all Xaa locations
  Clone ID: GOSHI-09MAY01-C45890_1.pep
MATNTSFQLFSSSKDKPSLGLGFLESSEPQLPPPXPPSVEVLSSEVSSSVKYTVEPVYLDGLTLLKGRVSTKEVLGLPNSDLVPGIYEGGLKLWEGXSFDLVKALRSEIQNGCLSFEGKRVLELGCGHGLPGIFACLESAAEVHFQDFNA

SEQ ID NO: 66351 - protein, 173 aa, Gossypium hirsutum
  Clone ID: GOSHI-09MAY01-C45500_1.pep
LASVGLSMQDVLFLANDMNVAEYFDATLSSGADVKLAANWIMGDIAAYMKNEKLSINDIKLTPQELAELIASIKSGTISGKIGKEILSELLAKGGTVKGLIEEKDLIQIADPVEIGKMIDKVISENPKQLEQYRGGKTKLQGFFAGQVMKLSKGKANPGLLNKILLEKLNGQS

SEQ ID NO: 66352 - protein, 100 aa, Gossypium hirsutum
  Clone ID: GOSHI-09MAY01-C45480_1.pep
NLQICQKKNKTRGCELGLQIWSKRRINHENNNNKAAIRDEDGYKGVPIHSQVMKIKREFEKIKHPSLQQADMRRVLREITRQRSRSPLGLAERPIAVGHS

SEQ ID NO: 66353 - protein, 82 aa, Gossypium hirsutum
  Clone ID: GOSHI-09MAY01-C45470_2.pep
IHTYIHINTKYEKSHLFSLVFYYLLLVSVSSDVIHDSCDKAAKGDPNIKFDFCVSSFEGNPKAKTATGVADLVKVAIETAHG

SEQ ID NO: 66354 - protein, 108 aa, Gossypium hirsutum
  Clone ID: LIB3148-040-Q1-K1-A9.pep
MANATSIVSIISNLLDNKTLDTYARHCLEDCSELYSGAGSSIQSGGKAFEGKDYGTANAEISSAMDAPDTCEEQFKEKKGYVSPLTKENNNFFQLLAIILSFMNLVPK

SEQ ID NO: 66355 - protein, 56 aa, Gossypium hirsutum
  Clone ID: GOSHI-09MAY01-C45740_1.pep
HASGLLELQPRHCGLYVALSTMNADKERWDRAADLRKAMVEAGFRKVPAYSFIDPM

SEQ ID NO: 66356 - protein, 99 aa, Gossypium hirsutum
  Clone ID: GOSHI-09MAY01-C45000_1.pep
DPVAMALYAIGGSICAPVWEEIVFRGFLLPSLTRYMPVWSAILVSSVAFALAHFNVQRMLPLIFLGMVMGVVFARSTNLLPSMLLHSLWNGLVFLDLMR

SEQ ID NO: 66357 - protein, 96 aa, Gossypium hirsutum
  Clone ID: LIB3148-033-Q1-K1-G10.pep
LRGKWLFDVALGCLMFPFVNQLSQFNLTLLPLMPSTPVTLSSVEQSILARDPVAMALYAIVVSICAPVWEEIVFRGFLLPSLTRYMPVWSAILVSN

SEQ ID NO: 66358 - protein, 143 aa, Gossypium hirsutum
  Clone ID: GOSHI-09MAY01-C45330_1.pep
MAFSSKLGSLFRQNGQTPMISSMLNSLRCMSTSTKKLFIGGLSYGTDDQSLREAFSGFGDVTEARVIADRDTGRSRGFGFVNFADDESASNALSAMDGQELQGRNIRVSYANERPSGPRSFGNNGGFGGSRGFGGGSRDDSSF

SEQ ID NO: 66359 - protein, 112 aa, Gossypium hirsutum
  Clone ID: LIB3272-053-P1-K1-G3.pep
MAFSSKLGSLLRLNGQIPATSILSSIHCMSTSTKKLFIGGLSYGTDDQTLKEAFSGFGDVTEAKIIIDRDTGRSRGFGFVNFADDESASNALSAMDGQELNGRNIRVSYANE

SEQ ID NO: 66360 - protein, 123 aa, Gossypium hirsutum
  Clone ID: GOSHI-09MAY01-C45320_1.pep
TEGKSEGSQKELKKKQQQFEDWYNKYMQRRTPEELDPTRTDDNSNNDAVTERQLMVEAVKKRLGEEEEAYRILRIQVREKSLVSLNRPRVRLFRAMSTIAVACSKMYGELRAISRSRNPNHSS

SEQ ID NO: 66361 - protein, 202 aa, Gossypium hirsutum
  unsure (1)..(202): unsure at all Xaa locations
  Clone ID: GOSHI-09MAY01-C45230_1.pep
TCRHGGSDGLHAYVHSLDHAVTDMKIFLEKXLAENPGLPCFCFGHSTGGAIVLKAVLDPKIEAQVSGIILTSPAVGVQPSHPIFVVLAPVVSFLLPRYQVSITNKKNMPVCRDPEALVAKYSDPLVYTGPLRVRTGYEILRTTSYLQQNMNRLRVPLLVLHGTDDTVTDPQASQKLYEAAXASTDKTIKLFEGLLHDLLFEL

SEQ ID NO: 66362 - protein, 105 aa, Gossypium hirsutum
  Clone ID: GOSHI-09MAY01-C46940_1.pep
SLLAPSFFRPWKKELIMYNFSEDVTEMILGILLAERPHEDFQVWSAEASGEYTIRSAYKLSDGTEDDPRAYALQADYKDFYRKLWLLDLPSKIKITAWKISWNFL

SEQ ID NO: 66363 - protein, 193 aa, Gossypium hirsutum
  Clone ID: GOSHI-09MAY01-C46850_1.pep
HAFGINARKRLSRGELICECHENKLLDRMAISVECLKKKVKECFMDLGSFPEDKKIPLDVLVNMWVEIHNIDEEEAFTILLELSDKNLLTLVKDARAGEAYCSYHEICVTQHDVLRDLALHLSNQGEVNERKRLLMPRRDTELPRDWEKNADQPFNAQIVSVQTGEMGEMDWFHMEFPKTEVLILNFCSDKYF

SEQ ID NO: 66364 - protein, 192 aa, Gossypium hirsutum
  Clone ID: AI730139.1.pep
KKDNVGTKTTPCCSKVGLKRGPWTPEEDELLSNYINKEGEGRWRTLPKRAGLLRCGKSCRLRWMNYLRPSVKRGQIAPDEEDLILRLHRLLGNRWSLIAGRIPGRTDNEIKNYWNTHLSKKLISQGIDPRTHKPLNPQQLSPSPPSLKPSPSSSSSMAKPNNPPSPLPVHVVNANKQNYYDDGSNEDHPGMI

SEQ ID NO: 66365 - protein, 127 aa, Gossypium hirsutum
  unsure (1)..(127): unsure at all Xaa locations
  Clone ID: LIB3148-059-Q1-K1-A2.pep
SNYITKEGEGRWRTLPKRAGLLRCGKSCRLRWMNYLRPSVKRGQIAPDEEDLILRLHRLLGNRXFFLSFFLSKKLISQGIDPRTHKPLNPQQLSPSPPSLKPSPSSSSSMAKPNNPPSPLPGKKNLV

SEQ ID NO: 66366 - protein, 105 aa, Gossypium hirsutum
  Clone ID: GOSHI-09MAY01-C46590_1.pep
QVPGILFTPICPHSLSFRPLILPEHVTVRIMVPFNSRSPAWASFDGKDRKLLAAGDALLCSMAPWPVPTACQVDSTNDFLRSIHDGLHWNLRKTQSFDGPRDRDL

SEQ ID NO: 66367 - protein, 77 aa, Gossypium hirsutum
  Clone ID: LIB3148-055-Q1-K1-D9.pep
TEYGEFVRSFNAPSVDEKFELLGILANVFIVAPESLSSLFEGTPSIRKDAQRFIQLREDYKSAKLASRLNSLWSGSG

SEQ ID NO: 66368 - protein, 42 aa, Gossypium hirsutum
  Clone ID: uC-gsflnu33B093e02b1.pep
LSSGLFEGTPSIRKDAQRFIQLREDYKSAKLASRLSSLWSGV

SEQ ID NO: 66369 - protein, 88 aa, Gossypium hirsutum
  Clone ID: GOSHI-09MAY01-C46730_1.pep
PESVVSFRPSNMQGQAPLRAVAGVKYSLEKLFSKIKSSLPPGNVQEILMIYSTYRAGMMAKDAFIKKLRQVAGDEVLRSAIQDINASG

SEQ ID NO: 66370 - protein, 97 aa, Gossypium hirsutum
  Clone ID: LIB3148-057-Q1-K1-F3.pep
HLPSSVDSDTGSDDPKNPKWYVVWSNIANMNILPESVVSFRPSNMQGQAPLKAVAGVKYSLEKLFSKIKSSLPPGKVQEILMIYSTYRVSRCACQLD

SEQ ID NO: 66371 - protein, 50 aa, Gossypium hirsutum
  Clone ID: GOSHI-09MAY01-C46670_1.pep
YPLDFNNNERDAYAFVKIKTAVTKKGKENIQTNKKKWMHDKLNKMGGLVL

SEQ ID NO: 66372 - protein, 226 aa, Gossypium hirsutum
  Clone ID: GOSHI-09MAY01-C46620_1.pep
QSSASRNNYKNDFRDSGGLENQSVQELEKYAVYKSEETTKTVNNCVKIAEEMREGATNTLIALHQQGEQITRTHNTAAGIDHDLSRGEKLRGRPRGRFSRTWKPKKTRQIVGPVITRDDLPKSRGGHLEQKEKLGLNPVPRRHSKSQTPPPEPVDAYQKVEFEKAKQDDALSGLSDLLGELKGMAVDMGSEIERQNKSLNGLQDDVDELNFRVRGANQRARRLLGK

SEQ ID NO: 66373 - protein, 218 aa, Gossypium hirsutum
  Clone ID: GOSHI-09MAY01-C46130_1.pep
RIRRAQNLYDEFRIDHFRGFAGFWAVPSEAKVAMVGRWKVGPQKSLFVARARAVGKINIIAEDLGVITEDVVQLRKYIGAPGMAVLQFGFGSDSSNPHLPHNHEHNQVVYTGTHDNDTIQGWWSNLMEQERSNVFKYLRITEEDEISWALIQAAVSSIAQTTIITMQDVLGLDSSARMNIPATQHGNWSWRIPNSTSFDSLEKEALRLREMLSMYGRK

SEQ ID NO: 66374 - protein, 67 aa, Gossypium hirsutum
  Clone ID: LIB3148-049-Q1-K1-G6.pep
QAAVSSIAQTTIITMQDVLGLDSSARMNIPATQHGNWSWRIPNSTSFDSLEKEALRLTEMLSMYGRK

SEQ ID NO: 66375 - protein, 62 aa, Gossypium hirsutum
  Clone ID: GOSHI-09MAY01-C46050_1.pep
TQPDWIAIAFSNKNAASQSVEAPCLKRMQLSLLAHILLTLVIRWELKTVESVLLADKFVSTL

SEQ ID NO: 66376 - protein, 103 aa, Gossypium hirsutum
  Clone ID: GOSHI-09MAY01-C46370_1.pep
SLASSSPYGVKPDSRATVPLMVLPEQQWPPPRQANNHQAETVVMMEEEADKGNVGHNNNHIQEEEEEEEEEEEEEEEGDTEDEYEGNDFELVAKTAPIGSGGE

SEQ ID NO: 66377 - protein, 205 aa, Gossypium hirsutum
  Clone ID: GOSHI-09MAY01-C46310_1.pep
GYDALASTPRGEICLKGTTLFSGYFKREDLTKEVMIDGWFHTGDIGEWQPNGSMKVIDRKKNIFKLSQGEYVAVENLENVYGCVSDIESIWVYGNSFESYLVAVVNPNKQALERWAADNGVSGDFETICKDPKAKEYILGELTRTGKEKQLKGFEFIKAVHLDHVPFDMDRDLLTPTFKKKRPQLLKYYQSVIDDMYKSINKPNA

SEQ ID NO: 66378 - protein, 120 aa, Gossypium hirsutum
  Clone ID: GOSHI-09MAY01-C46200_1.pep
TLPPTRPNFSQELSDLAMESAQIDGRLARRPLKDSRREFKAHKMLSSHITQLMQKYDTPIKSLPLNSPSMSNTFTLRRQMAHDLLTGELRVLKSAPMWLNNYCAALKSTSTCRSQLENRI

SEQ ID NO: 66379 - protein, 131 aa, Gossypium hirsutum
  Clone ID: LIB3828-033-Q6-N6-E9.pep
KGKGLPQALRAFARLLCWNSSQELSDLALEAAQIYGRLARRPLKGSRKKFKAHKMLSSPITQLMQKYDTAIKFFPFNSPSMSNTFTFWRQMGHDFLTGELCVLKFASMWLNNYCAALKSTSNCWSQFKNRI

SEQ ID NO: 66380 - protein, 119 aa, Gossypium hirsutum
  Clone ID: LIB3135-037-Q1-K1-F1.pep
SWSSQGKSKTKKKTNVRHNHPKDAQQGIQQAYESISNGLGKSASALVQKPLKKYQRGASASSALATAVRAVPTAAIAPASGCASAIHCALLGLRNSLDPERKKESMEKYFGPTLPQDPN

SEQ ID NO: 66381 - protein, 68 aa, Gossypium hirsutum
  Clone ID: LIB3149-040-Q1-K1-B8.pep
KKYQRGASSCSALATAVRAGPTAAIAPASGCASAIHCALLGLRNSLDPERKKESMEKYFGPTLPQDPN

SEQ ID NO: 66382 - protein, 220 aa, Gossypium hirsutum
  unsure (1)..(220): unsure at all Xaa locations
  Clone ID: GOSHI-09MAY01-C47580_1.pep
VEENSGLEVNSGNKSDESDKKSSESDSFLDVPQQKKVRKTETKCLFELGNMPLWGFTSICGRRPEMEDDFVAIPQFLRVPSQILKAESVTNGMNRDLTAHFYGVYDGHGGCQVANYCRERMHLALAEEYRKXKSCIREGNIKHDWQELWKKAFSICFIKGDAEIGGVCNGVNDSDYKPIAPETVGSTAVVAVVSPTHIIVVNRVESRAVSTVETSMPYHK

SEQ ID NO: 66383 - protein, 266 aa, Gossypium hirsutum
  Clone ID: GOSHI-09MAY01-C47570_1.pep
TRRPEQSVLAKHYASAGQMEKAEDPRVPMEGDNILENRWVYRFLLPLYAGLGKADEVERIWKICDSKPRFEEYLAGIEAWGKLGKIEKSEEIFERLLKTSKKLPARYYTHLLKVYSNHKMLEKGKDLVKRMAGNGCQIGPFTWDALVKLHVEAGDVEKADSILQKACQQNEIKPMFTTFMVVMEQYARKGDIHNAEKMLHRMRQAGYVARVSQFQTLVRAYINAKAPAYGIRERMKADNIFPNKSLAALLPQVDAFRRTSVSDLLD

SEQ ID NO: 66384 - protein, 93 aa, Gossypium hirsutum
  Clone ID: GOSHI-09MAY01-C47410_1.pep
HASGKSKQKRSNFPIPFNRPDSAVPCPQPPIRHRSWQIASNEGRTRSYWRLYLSNPPFSFDYNEANEESEAFFQKDKALFFVYISIRENYMGG

SEQ ID NO: 66385 - protein, 175 aa, Gossypium hirsutum
  Clone ID: GOSHI-09MAY01-C47750_1.pep
MATRLARKLPSSLSAFSSSPITKLTSGISPPSMSHGGPGLRCASSSSSSSSSTATTGSNSSSSKREKKITDRLSAVIDAVNDRKVPPELRGQRNNVRSETDIINVVEQRIWHSMEEGQFENLAGKGKPLNLNTNPHADPAEDTLYRILSKNGCAPEWVELNKEIRNKVSEWRVAV

SEQ ID NO: 66386 - protein, 80 aa, Gossypium hirsutum
  Clone ID: GOSHI-09MAY01-C47710_1.pep
NPIPNSPQPRPEPNGKGKGWETLEAGSAASPCLQQGSSRRRTRRLASPRASFARTTPGFVAVHSISVKIGDWDDGGRGSA

SEQ ID NO: 66387 - protein, 162 aa, Gossypium hirsutum
  Clone ID: GOSHI-09MAY01-C47700_1.pep
HASVDIRKLVKDNLIIKKPNISRSGWRYRKGKDVGNPRRKGYGKRKGTKEATLPSKLSWMRRARVLRRLLRKYREMKKIDVRLYHEFYMKAKGSVFKHKRALLEALHNKAKSEKDQKVHFDQVIAIKAMGKLGSKETRVPRRKQCSSPPVEVIDVLNNAYLV

SEQ ID NO: 66388 - protein, 167 aa, Gossypium hirsutum
  Clone ID: GOSHI-09MAY01-C47680_1.pep
GYRFFKPATHAAAKISETVKGKLSLGARILQVGGLEKIFKQFFSFREGEKLLKACQCYLSTTAGPIAGLLFISSEKVAFCSERSIKVPCPNGEFLRVHYKVVVPVEKIKGVNQSENMKKPWQKYMEIVTVDGFDICFMGFLNYHKAFKCLQQAISQRLEDVDTFKVA

SEQ ID NO: 66389 - protein, 98 aa, Gossypium hirsutum
  Clone ID: LIB3165-055-P1-K1-E11.pep
MKNQMLKQVIGVPIKAATYRVERRTSRQYLPDAAGQYHVSSQGCTKSKGNFVLKRMNLLGKKADMFAHGVREHVRLGPKISETVKGKLSLGARILQVG

SEQ ID NO: 66390 - protein, 177 aa, Gossypium hirsutum
  unsure (1)..(177): unsure at all Xaa locations
  Clone ID: GOSHI-09MAY01-C47090_1.pep
HATLQRVQQQGDETPMVWEMLLYFYILYSPDWHYRSTMPTFLFFYGVGFAIAHALIRFEIGFKVHYIILCLLCIPRMYKYYIYTKDNYAKRLAKLYIATLVXGSICWLMDQVLCKEISHWYFTPQGHALWHVFMSFNSYFANTFLMFCRAEQRRWDPKIVHFFGVFPYVKIQKPKSQ

SEQ ID NO: 66391 - protein, 181 aa, Gossypium hirsutum
  Clone ID: GOSHI-09MAY01-C47070_1.pep
KIIPEDLHFVLRMRHTFESRGYQSGFYLSQLFSSNRNGPSLSTISSKQAAVPTRPPPLFNWNQRPLPPATNPMLASPNFQNPARLGFPQPKDETHMFLLPRSSETRMEDMMVEHENDIKWPNGLSFFSALTGRTEDAKLLFNSESLGNKPETNHHSLILEGKDSNHNADIGANPNEFLSLD

SEQ ID NO: 66392 - protein, 80 aa, Gossypium hirsutum
  Clone ID: GOSHI-09MAY01-C47030_1.pep
IYQLAQNGSLSRGAPKFCFSKILAMPFRRALCRRSFVDSYRGLLTFSGEPVSYFSWSSSSPTAISQKDLTVLSRIRSLCI

SEQ ID NO: 66393 - protein, 95 aa, Gossypium hirsutum
  Clone ID: GOSHI-09MAY01-C47240_1.pep
IQSSSHFLHSLLCFKIPNHPTQPNPIICLLEQSCTCRSAEYCDSCNISRFKNLVLLASLGLRLLQHMHTMDKSWRPTTVATLLQRIHSKTVFIYL

SEQ ID NO: 66394 - protein, 152 aa, Gossypium hirsutum
  unsure (1)..(152): unsure at all Xaa locations
  Clone ID: GOSHI-09MAY01-C40910_1.pep
DFIISSVKARCLPRESLDEHFVIHMEGVNVLAVNYGSPGSCPYPRNLKLPAKWSFSSHTVLKNSXEQAPRAPVFTEEILGGENAEGEVVQPAERSFWAKYWMYLIPLGLMVVAATARPMNMPEEQATGQVPAQGQPSAGAVQRGPSSAVRRR

SEQ ID NO: 66395 - protein, 52 aa, Gossypium hirsutum
  Clone ID: LIB3582-012-P1-K1-D9.pep
SLFQPAKWSFSSHTVLKNSEQAPRAPVFTEEILGGENAEGEVVQPAERSFWA

SEQ ID NO: 66396 - protein, 124 aa, Gossypium hirsutum
  Clone ID: GOSHI-09MAY01-C40900_1.pep
GKWCEIGLWKYSRHPNYFGDILLTWGYFVASLPIIEGAEWLVLIGPVFLTLLLLFVSGLTILEKSGDKKFGNVEAYRVYKKRTSPLIPLPRSIYGNLPYWFKAVFLFEFPIYNRYLNRNRTKQG

SEQ ID NO: 66397 - protein, 47 aa, Gossypium hirsutum
  Clone ID: LIB3148-040-Q1-K1-A2.pep
WSHCCYVLNFVFVTFSVQIRMHVQNLSLWSISCMYFRLWNVQLWWLC

SEQ ID NO: 66398 - protein, 61 aa, Gossypium hirsutum
  Clone ID: uC-gsflnu33B113a10b1.pep
QQWDHYHNCITFKILFASIRNAPAKFQNLVYELVNPKIRKHKLNFCFILALYGFCLNNGCR

SEQ ID NO: 66399 - protein, 70 aa, Gossypium hirsutum
  Clone ID: GOSHI-09MAY01-C40740_1.pep
MASNAAVPFWRAAGMTYITYSNICANLVRNCLKEPYKTEALSREKVHFSISKWTDGKPEKPTIRSDSPEE

SEQ ID NO: 66400 - protein, 79 aa, Gossypium hirsutum
  unsure (1)..(79): unsure at all Xaa locations
  Clone ID: GOSHI-09MAY01-C40730_1.pep
GRVGEGRNHVPKAMKMKRSGSHVGAAEKNSQYQYQXQYPWSIKLDRSSVSLIDSECGSTSTVLTNTNYCRSHFGYDVRV

SEQ ID NO: 66401 - protein, 93 aa, Gossypium hirsutum
  Clone ID: GOSHI-09MAY01-C40160_1.pep
ALQPRKERPNRISCIGCACIIFIIDKTQTPLFLQVSNGISPRVGGTWPLYSRVHNVSNGTHATPRVTTSHTELGSGHTRSSYTLPLLYKKFAN

SEQ ID NO: 66402 - protein, 48 aa, Gossypium hirsutum
  Clone ID: uC-gsronu33B141f03b1.pep
NQSKIHACSSTIAVSSTTLVNSMAIIKYFNRITRLNRTRGRTRGRTRG

SEQ ID NO: 66403 - protein, 110 aa, Gossypium hirsutum
  Clone ID: GOSHI-09MAY01-C40100_1.pep
MNAVSRRAITGIFTPARQGINLLSHDLSQVQQMRGIRVKVRNGNLEQALAVMQRVMQSSGIERLIKQEQTHHIKNSEKRILARKILERKIKSQDHARKLQTILIKKVRGL

SEQ ID NO: 66404 - protein, 97 aa, Gossypium hirsutum
  unsure (1)..(97): unsure at all Xaa locations
  Clone ID: LIB3147-022-Q1-K1-E12.pep
EWPARRTRPPTRPPTRPQHMRGIRVKVRKGNLERALAVMXRVMQSSGIERLIKQEQTHHIKNSEKRILARKILERKIKSQDHARKLQTILIKKVRGL

SEQ ID NO: 66405 - protein, 190 aa, Gossypium hirsutum
  unsure (1)..(190): unsure at all Xaa locations
  Clone ID: GOSHI-09MAY01-C40010_1.pep
KAIIMMLLISFFFLILPLASFLLLLPLLLRHRRHRHRRHHLHPSSGFSSKQLRKLPQFRFSHETESVGSDSDSCVICLDGFRQGQWCRSRXACGHLFHRKCLDXWLIKGAACPICRTRVRFENDDNCNSGPCCSRGAEFQGLFDVVVYCIFSPLFLYYKNGQLPVSNNPHEESCNMITVGWLLIVIGLFI

SEQ ID NO: 66406 - protein, 218 aa, Gossypium hirsutum
  unsure (1)..(218): unsure at all Xaa locations
  Clone ID: GOSHI-09MAY01-C40250_1.pep
DLESAVTVWHSSFCRLIKFQRDSICSLHGWFRLSLLPLSNDNVDGNADPSGVYAFCDEWKLALERVPDTVASEGIRGFINVVRVISAKQTEELKIKKQTENASKELEKKASSLRNIERKFYHSYSMVGMGPPDLGSDHGPVLDARDPLXSEKKSELAACQRRVEDEMMRHAKAVEVTRAMTLNNLQTGLPGVFRALTSFSGVFTEALDTVCSRSYHIK

SEQ ID NO: 66407 - protein, 219 aa, Gossypium hirsutum
  Clone ID: GOSHI-09MAY01-C40230_1.pep
MFQLLFLVIFSEMAVIMVLSFKTPLRKLTLMVLDRVKRGRGPLMVKTVAATIAVVMISSVYSMMMIQKRWIDDGSANPTEQILMVKHLLEATLMGGVLFLALMIDRLHHYIRELRIRRKSMEAIKKQGPEDGKSGGSDKVKALEGEVTILQAKLKQLESDLETKTKEMDAAEANAVALRKQSEGFLLEYDRLLEENQNLRNQLESLEQSPSRSGNKKNT

SEQ ID NO: 66408 - protein, 356 aa, Gossypium hirsutum
  unsure (1)..(356): unsure at all Xaa locations
  Clone ID: GOSHI-09MAY01-C40220_1.pep
HSSGETGTCEAEENNNDLIWVDPASCCYALFSKLDAKKMLLQQSPSAPAVPASDPVELDGLRNAHIRDGAAVVQYLVWLDKQMQEIYGASGYFLEGKGASKKRFRETMKLTEVTASDKLEGFRATKEHFRGLSFPTISSVGPNAAVIHYSPQPETCAELDPDSIYLFDSGAQYLDGTTDITRTVHFGKPSEHEKACYTSVLKGHIALGNARFPNGTNGHALDILARIPLWRYGLDYRHGTGHGIGSYLNVLEGPHLISFRPQARNVPLQASMTVTDEPGYYADGNFGIRLENVLVIKEADTEFNFGDKGYLSFEHITWAPYQIKXIDLSILTPEEIQWLNRYHSKCREILAPYLDK

SEQ ID NO: 66409 - protein, 164 aa, Gossypium hirsutum
  unsure (1)..(164): unsure at all Xaa locations
  Clone ID: LIB3584-021-P1-K1-A5.pep
EGIEVREYGAVSSDVALLASNQLDKDTGLSSGRNDVCETGTCEAQENNNDLIWVDPASCCYALFSKLDAXKMLLQQAPLALAKALKNPVELDGLRNAHIRDGAAVVQYLVWLDKQMQEIYGASGYFLEGKGASKKRFRETMKLTEATASDMLEGFRATKEHFRG

SEQ ID NO: 66410 - protein, 54 aa, Gossypium hirsutum
  Clone ID: LIB3196-023-P1-M1-D8.pep
VGPNAAVIHYSPQPETCAELDPDSIYLFDSGAQYLDGTTDITRTVHFGKPSEHE

SEQ ID NO: 66411 - protein, 71 aa, Gossypium hirsutum
  Clone ID: GOSHI-09MAY01-C41990_1.pep
IVHSDNVRLEHDVAFLKAVLDDTQKELHSTRGVLAGERARAFQLQVEVFHLKQRLQSMENRAPTPRKPFNV

SEQ ID NO: 66412 - protein, 177 aa, Gossypium hirsutum
  Clone ID: GOSHI-09MAY01-C41980_1.pep
FITHRAFCDALAEESARAITGPAQQVPGGSSVSHMNNLQSQLHNHDFHGLSVKREEHPFNARPTTEDSLNPPWPGPPPINLLDHPLSQNENPSQNTGSNTLLPPFQTQTASPHMSATALLQKAAQMGVTMSQPLQSSPVAAMASMQRPYMSGGTSGSTSFALSTAGSGLGLFPREEP

SEQ ID NO: 66413 - protein, 186 aa, Gossypium hirsutum
  Clone ID: LIB3584-032-P1-K1-B10.pep
PTRPVNICSEENSNPQFHPDSCKSICKIIELIEGINLPSTDYNIPETMSEKSRDSFSYKHSETASGYVVRVFQWKTLELGAVLEQFVQACYDLLNGKTDLNKFTEELTSVLDWIINHCFSLQDVSSMRDAIKSHFDWDESQSESDSEVGIVDKFHLTTPYNNEDKNFIQKKEPNASNSLLNQLEES

SEQ ID NO: 66414 - protein, 45 aa, Gossypium hirsutum
  Clone ID: LIB3147-049-Q1-K1-F4.pep
SVSKLSHPLLILHLIHPSNGLMHLHARTSEGKHDYDQSRIEVNLR

SEQ ID NO: 66415 - protein, 232 aa, Gossypium hirsutum
  Clone ID: GOSHI-09MAY01-C41940_2.pep
MVKIAFGSIGDSFSVGSLKAYLAEFIATLLFVFAGVGSAIAYGKLTSDAALDPPGLVAIAVAHALALFVGVAIAANISGGHLNPAVTFGLAIGGNITILTGLFYWVAQCLGSIVACLLLQFVTNGLSVPTHSVASGMNAVGGVVMEIVITFALVYTVYATAADPKKGSLGIIAPIAIGFIVGANILAAGPFSGGSMNPARSFGPAVVSGNFADNWIYWVGPLVGWWVSWVDF

SEQ ID NO: 66416 - protein, 258 aa, Gossypium hirsutum
  unsure (1)..(258): unsure at all Xaa locations
  Clone ID: GOSHI-09MAY01-C41940_1.pep
MVKLAFGSFGDSFSVGSLKAYLAEFIATLLFVFAGVGSAIAYGKLTADAALDPAGLVAVAVAHAFALFVGVSIAANISGGHLNPAVTFGLAVGGNITILTTIFYWIAQCFGSIVACLLLQFVTNGLSVPAHGVASGLTAVEGMVMEIVITFALVYTVYATAADPKKGSLGTIAPIAIGFIVGANILAAGPFSGGSMNPARSFGPAVVSGNLSXNWIYWVGPLIGGGLAGLIMLTSHWVYSSYPVLEICLKVFCVRVRF

SEQ ID NO: 66417 - protein, 281 aa, Gossypium hirsutum
  unsure (1)..(281): unsure at all Xaa locations
  Clone ID: GOSHI-09MAY01-C41830_1.pep
LFPFLAFAGLFFLFRRAQGGPGGPGGLGGPMDFGRSKSKFQEVPETGVTFSDVAGADQAKLELQEVVDFLKNPDKYTALGAKIPKGCLLVGPPGTGKTLLARAVAGEAGVPFFSCAASEFVELFVGVGASRVRDLFEKAKSKAPCIVFIDEIDAVGRQRGAGLGGGNDEREQTINQLLTEMDGFSGNSGVIVLAATNRPDVLDAALLRPGRFDRQVTVDRPDVAGRVKILQVHSRGKALAKDVDFEKISRRXTPGFTGADLQNLMNEAAILAARRDLKRSA

SEQ ID NO: 66418 - protein, 146 aa, Gossypium hirsutum
  unsure (1)..(146): unsure at all Xaa locations
  Clone ID: GOSHI-09MAY01-C41440_1.pep
LFKGYDMEIHNQXFYTTLCSCVLSLTGLIFQGHLLLAVDFVYRHNDCFLDIVLLSTVATASQFFISYTIRTFGALTFAAIMTTRQLVSIMLSCIWFGHPLSWEQRIGAIIVFGSLYSRTFWKKVSPAPTPPQQTENGSSSPLKGIP

SEQ ID NO: 66419 - protein, 129 aa, Gossypium hirsutum
  unsure (1)..(129): unsure at all Xaa locations
  Clone ID: GOSHI-09MAY01-C41620_1.pep
QQCRAKILALLALLALLVSASNASIIPQCSLAPSAIIPQFLPPVTSTGFEHPAVQAYTLQLALAASVLQQPIAQLQQQFLAXLNLQTIVTQHQQQFLSSLSHLTVVNPCPYLQQQLLSFNPLSLANVSS

SEQ ID NO: 66420 - protein, 221 aa, Gossypium hirsutum
  unsure (1)..(221): unsure at all Xaa locations
  Clone ID: GOSHI-09MAY01-C41160_1.pep
GFIYKTLXCLMIDEADRILEANFEEEMKQIIKYLPKENRQTALFSATQTKKVEDLARLSFQTTPIYIDVDDGRKKVTNEGLQQGYCVVHSSKRFILLYSFLKRNLSKKVMVFLSSCNSVKFHAELLRYIHVDCLDIHGKQKQQKRTTTFFDFCKAEKGILLCTDVAARGLDIPAVDWIVQYDPPDEPKEYIHRVGRTARGEGAKGNALLFLIPEELQFLRY

SEQ ID NO: 66421 - protein, 52 aa, Gossypium hirsutum
  Clone ID: GOSHI-09MAY01-C41010_1.pep
VVVECVEKCSFPWLFLVYIRSRHKIRWFESLICTFQDGNGSQYWTLYICILN

SEQ ID NO: 66422 - protein, 48 aa, Gossypium hirsutum
  Clone ID: GOSHI-09MAY01-C41000_1.pep
EHFKRLSWFILYFFLNNMVKGFLPYFRFLLKKKKKKKKKKKKKKKTPT

SEQ ID NO: 66423 - protein, 40 aa, Gossypium hirsutum
  Clone ID: GOSHI-09MAY01-C41020_1.pep
DAWADAWAGSKVNLLSIPNMLWELALMSVGYRTQMWKINS

SEQ ID NO: 66424 - protein, 173 aa, Gossypium hirsutum
  Clone ID: GOSHI-09MAY01-C41280_1.pep
HASAHASASARGGMTVALSGVVMLRDLLRPLHDLSDASAICKYLESFYTLRKPMSSTINTLANVLHKVFSASSDPAMENMQQTLFGYLKLGGFFSSGVSAMFSGLCPRPLSLAFHFFVMAIYGVGQLLLPFPSPKRLLDGAKLLWVASSVFLPIIHSEGIRQMFFPLTVPAYY

SEQ ID NO: 66425 - protein, 116 aa, Gossypium hirsutum
  unsure (1)..(116): unsure at all Xaa locations
  Clone ID: GOSHI-09MAY01-C41250_2.pep
VPTTRALGGQRPLLRVGTRATGACVAASPDSDLKADSHNPAPGSYAPLAFQPSAMTNCANQPVLSSXAESLLRLGHQXGQTNLCNDGLNQPHVSYCWENNPTLGEFCFTMIGRVDI

SEQ ID NO: 66426 - protein, 56 aa, Gossypium hirsutum
  unsure (1)..(56): unsure at all Xaa locations
  Clone ID: LIB3272-057-P1-N1-D6.pep
PTIFIFFQQPPTLPQDAAAAQPPCAPLAFQPSAMTNCANQRFLSYXVELLLRRGHQ

SEQ ID NO: 66427 - protein, 218 aa, Gossypium hirsutum
  Clone ID: GOSHI-09MAY01-C41270_1.pep
MASNNGGGEQQSLKTAELGKPLKEGERILAPTRRPDGTLRKPVRIRAGYVPQEEVAIYQSKGALWKKEMASQVGPPGYDPPADAKPKTKSAKRNERKKEKRVQAALEKGKNSEAVADNEIKGDGLTEEDLDHGSESNDRSCCFSNPVSTSPLSNSVDASDAVTPAQDLDKKIRALKKKIRLVEAQQQKTPQQDMKPEQLEKLAKLEGWREELKLLEDK

SEQ ID NO: 66428 - protein, 131 aa, Gossypium hirsutum
  Clone ID: LIB3149-028-Q1-K1-D4.pep
GVVIYQSRGAVWKEEMVSQVGPPGYDPPTDTNLKTRSAKGIDRRKEKRVQAALEKGKNSEAVAGDEIKGDGLTEEDLDHGSESIKSLTSQMTDLAVFQNLVSTSPLSNSVDASDAVTPAQDLDKKSGHLKR

SEQ ID NO: 66429 - protein, 143 aa, Gossypium hirsutum
  Clone ID: GOSHI-09MAY01-C42970_1.pep
YLTWYQSPSPGTCFHFRVMAPSTDSNSVDPMSPSFSSACLVQSLPHHDTLKLEEGNFVQWKQHIRLIIEGYELQGFLEGMLSAPPRFIVSPEGALIPNPNTSLLNLHVKFGTTVNHLFAASTGAEFSRIKHDLHFAASGSVVS

SEQ ID NO: 66430 - protein, 280 aa, Gossypium hirsutum
  Clone ID: GOSHI-09MAY01-C42900_1.pep
GRRGLKTLLHRIYGKFMVHRPFIRKAINNIFYRFIFETGKHNGIAELLEILGSIINGFALPLKEEHKLFLVRVLIPLHKPKCIPAYHQQLSYCITQFVEKDCKLADTVIRGLLKYWPVTNSSKEVMFLGELEEVLEATQSVELHRRMLPFFPLIGRCLSSSHFQVAERALFLWNNHHIETLIKQNRNVILPIIFPSLERNARSHWNPAVQSLTLNVQKIFSDNDPELFEECLHMFQEEEARENEAKSKREATWKRLEEIAAMKAASNQPVLISLKVTTRK

SEQ ID NO: 66431 - protein, 218 aa, Gossypium hirsutum
  Clone ID: GOSHI-09MAY01-C42560_1.pep
METDVSNSAMEPMETMEVQSVERTTQFFPFGDPTSWELPFLQGWLIGQTQAGQRNMRLATGGGHENSLPAGETGTSASVASSGMATSVSQTRVSGRPSSRHRSSRSRMISSSGTGESGYSNIIHESSDPQPAVGRIPSELATSLAAAAAAELPCTVKLRIWPHDMKDPCAFLDPEKCRLIIPHAVLCSEMGAHFSPCGRFLAACVACVPPHLEADPGV

SEQ ID NO: 66432 - protein, 73 aa, Gossypium hirsutum
  Clone ID: LIB3825-017-Q1-N6-H1.pep
KYCRCAHQHLWNVKKCHESKIPIGRLLESIYLLAIWTLDKPLTEKDGIIIDIKEKKESKRKSRLFSNPKTWEI

SEQ ID NO: 66433 - protein, 49 aa, Gossypium hirsutum
  Clone ID: LIB3148-001-P1-K1-C8.pep
TRPLFKQSNHTLFFIIKSNFTIYNSSKNHFLLVCFTWTVIILSNNQTQL

SEQ ID NO: 66434 - protein, 115 aa, Gossypium hirsutum
  unsure (1)..(115): unsure at all Xaa locations
  Clone ID: GOSHI-09MAY01-C42680_1.pep
KLQEKVKEQLXKVGEKIQIGAMHRNEWVENADRWVAGFLEMFEAGCHKMGTAIRDRIQERLRGQLLQNGKGDDDDDEEYYYDDDYYDDEDDDDEFYYDDNEYNDEKDQKNEKEQK

SEQ ID NO: 66435 - protein, 101 aa, Gossypium hirsutum
  Clone ID: GOSHI-09MAY01-C42160_1.pep
MGTVTVKLVVVIMITVGLMVEGSRAISLCDMNDEGLEACKPSVTQPDPVDPTPQCCEALKGANLTCLCSYKNSMLLPSLGIDPTLAMGLPAKCSLDMPSDC

SEQ ID NO: 66436 - protein, 33 aa, Gossypium hirsutum
  Clone ID: LIB3493-045-P1-M1-C2.pep
CNRRVIGESWYTLLTNQKAYRDCTLLVNPWRVL

SEQ ID NO: 66437 - protein, 39 aa, Gossypium hirsutum
  Clone ID: GOSHI-09MAY01-C42090_1.pep
VIFSICLYYLVFMPELELSEMKVKTLVVETNIIRALFAP

SEQ ID NO: 66438 - protein, 68 aa, Gossypium hirsutum
  Clone ID: GOSHI-09MAY01-C42040_1.pep
RTRGRTRGRTRRPLLSSETNTATKSSDVNKSERNVQSPPLSVKDQEEKAKRCEFVKGLLLSTILDDVL

SEQ ID NO: 66439 - protein, 60 aa, Gossypium hirsutum
  Clone ID: LIB3147-051-Q1-K1-A3.pep
KRRQKDVNLLKGCCYPQFLMMFYDTLKDGCCNRGLFTAKRPTIWVFAYCMGCCAVCSDYV

SEQ ID NO: 66440 - protein, 92 aa, Gossypium hirsutum
  unsure (1)..(92): unsure at all Xaa locations
  Clone ID: LIB3146-054-Q1-K1-D11.pep
SLFGGSSCIAPSSNSAPDPLLSSFILPIVDDSVSVQPQLSSETNTATKSSDVNKSERNVQSSPLSVKDQEEKAKRCEXLKGLLLSTILDDGL

SEQ ID NO: 66441 - protein, 60 aa, Gossypium hirsutum
  unsure (1)..(60): unsure at all Xaa locations
  Clone ID: AI054795.1.pep
ATXYVLVCCLKFTFLFCAYGLIVLSFDVYEHLNIYAYSKRLKGVGVGTTTTIKGCRRLNL

SEQ ID NO: 66442 - protein, 34 aa, Gossypium hirsutum
  Clone ID: LIB3147-050-Q1-K1-F11.pep
YYIFLIKLLNKNLIFFSCYMHICSGFVDIKRKYN

SEQ ID NO: 66443 - protein, 161 aa, Gossypium hirsutum
  Clone ID: GOSHI-09MAY01-C42020_1.pep
TITVPYSLTLWPPLRPSIEQCKDVFGPDIAVFSNSAGLLEYDYDGSKAKKLEGTIGIKVIRHKVKKPAGTAEEIEKHFGYKSSQLIMVGDRPFTDVVYGNRNGFLTILTEPLSVVEEPFIVRQVRKLELTLVNWWFRRGLKPVSHNLLSDATQCVKDPHPL

SEQ ID NO: 66444 - protein, 65 aa, Gossypium hirsutum
  Clone ID: GOSHI-09MAY01-C42380_2.pep
PLVRYGGRGDRHGGGGGRYGPDRNGDRFGGRSRDAGSRGGSGSDRYNRDRSGPYDRRGTGGPRSG

SEQ ID NO: 66445 - protein, 179 aa, Gossypium hirsutum
  Clone ID: uC-gsronu33B147e10b1.pep
HAIQTLSTLQASLECKLKLLKEIATEKGITLHLEEMAAEVRNLTESANDLPVGKDMDDSLSESMKARKTYKDVADAAQEAIVSAAYAAAAARAAVELSRIEPQDFDSPNNAMARSENLELNETEETRQSLSRERTVSSSSSDSDANLSGEESDEKAKEEPHTQPHELSYEITQVMKISD

SEQ ID NO: 66446 - protein, 98 aa, Gossypium hirsutum
  Clone ID: uC-gsronu33B078e04b1.pep
MDESLSESMKARKKYRDVADAAQEAFVSAAYAAAAARAAVELSRIEPQDFDSPNNAMARSEDLELNEIEETRQSLCRERTVSRSSSDSDADLSGEESD

SEQ ID NO: 66447 - protein, 182 aa, Gossypium hirsutum
  Clone ID: GOSHI-09MAY01-C42370_1.pep
KSKVDQPVVPGLDDEVTEVEHLLAEPKIEHVSVDGILCFGNENIEKHLKMEDFSPAFDYGWKISAGGLDSIRGRGGDDLKLEVLDGLLDEVDEVDDIDAAHDLSGACEDFLLDIEFPEKLSELDCGPREGSTLCNSSSESHSPGFSGRSNSVGGISESLTATVRESNSENGGLGKRVGAISS

SEQ ID NO: 66448 - protein, 38 aa, Gossypium hirsutum
  Clone ID: GOSHI-09MAY01-C42310_1.pep
CIIFQSLDLAWTLLRIFPRELLHRIPAKTLDQYYSRES

SEQ ID NO: 66449 - protein, 123 aa, Gossypium hirsutum
  unsure (1)..(123): unsure at all Xaa locations
  Clone ID: GOSHI-09MAY01-C42330_1.pep
MLILEHSAKNCSTKTQVKARPVVGSKLVAQGVLRKPGNGSALGPKAPVQPPPEIWTRGNGLDEVVDMADMLQMESQDWFLGFVEKFLDADVDTSVLSDNGQIXAGMLTQLKSVNDWLDEISSS

SEQ ID NO: 66450 - protein, 75 aa, Gossypium hirsutum
  Clone ID: GOSHI-09MAY01-C43950_1.pep
KWGKKKKQNLMGNPQIPIPPYPQTLGFLVSRILLGLDPYPPPGWKFHLIIVYCLRRQIKMLIEALMVILSNILRV

SEQ ID NO: 66451 - protein, 183 aa, Gossypium hirsutum
  Clone ID: GOSHI-09MAY01-C43940_1.pep
MKPIAKNVALALSCGISLSFFPIINTAGTNPLLTETCQKVTNKDLCTSSLGAEHATQDAKDVAALALIAINVASNHGVNASVYIKKQLLDGKILEPTTEQNFEDCSENFDDAMQELDDALAVTLSRDFKQVKIELESAIDDADTCISVLNQKAGKDKELYEKTNHFRQLVSNAYDIANILAPK

SEQ ID NO: 66452 - protein, 90 aa, Gossypium hirsutum
  unsure (1)..(90): unsure at all Xaa locations
  Clone ID: LIB3148-019-Q1-K1-D5.pep
KKDKKQKKIRKKKLITKKNIKRKRKEKCTKIKPEKILILNVNERVTPMDGSTXDSYQCEGELHLLRLGWHVRPQGLRCKDPCSLPFDRFQ

SEQ ID NO: 66453 - protein, 242 aa, Gossypium hirsutum
  Clone ID: GOSHI-09MAY01-C43810_1.pep
RPLFRAILGFFAVVLLVQVGNFVDGSPWNHHHSHRPHRGYHGPWINAHATFYGGGDASGTMGGACGYGNLYSQGYGVNTAALSTALFDNGMSCGACYELRCVNDPQWCLPGSIVVTATNFCPPGGWCDPPNHHFDLSQPIFQHIAQYKAGIVPVIYRRVRCRRSGGIRFTINGHSYFNLVLITNVGGAGDVHSVAVKGSRTRWQQMSRNWGQNWQSNAYLNGQSLSFLVTTSDGRSVLSYNV

SEQ ID NO: 66454 - protein, 135 aa, Gossypium hirsutum
  Clone ID: GOSHI-09MAY01-C43700_1.pep
PRVRKLCIKGCPISDIAIEALGSGCPNLVKIKVRKCRGVSSDAGEWLREQRGAMLINMDACDTDCGFEASVSDIGVHETGVEVGQVTAVGASTSSNGRLALLTSKLGHFAGRNLAAGTLRRRPNCDDNLNINLAK

SEQ ID NO: 66455 - protein, 98 aa, Gossypium hirsutum
  Clone ID: GOSHI-09MAY01-C43140_1.pep
VKAAKRKKIHAFKSKMRHEQLEVAQNKRQNAWQQFQTTKGKTKKVGFFSGRKRESIFKSPDDPQGKVGVTGSGKGLTDFQKREKHLHLKGGNVEISDD

SEQ ID NO: 66456 - protein, 90 aa, Gossypium hirsutum
  Clone ID: GOSHI-09MAY01-C43290_1.pep
DAWADAWADAWVSSCFYSREMFLSLVMSFLALIYILLAVLEFQWNNNGVRSSLFLQDCCFPMSHLVSKKMGNFVSDSKFLNVLENEAFFP

SEQ ID NO: 66457 - protein, 123 aa, Gossypium hirsutum
  Clone ID: GOSHI-09MAY01-C43260_1.pep
RQLSVPYDMGGMPLRDAGIGQPMPIPALATALANATPEQQRTMLGESLYPLVERLERDAAAKVTGMLLEMDQTEVLHLLESPEALKAKVAEAMEVLRSVAAQQQANNQADQLASLSLNDNLVS

SEQ ID NO: 66458 - protein, 152 aa, Gossypium hirsutum
  Clone ID: GOSHI-09MAY01-C43210_1.pep
EDAPTYIKTVDDGRHELFLEYVALPLPLTPTYAEEVNDFDVYIMETNSQQMKSELDQYLEESLLPRVQEFDVLGWWKLNKMKYPTLSKMARDILSIPVSAAATESIFDITDKQLDEYRSSLRPETVEALICAKDWLHYGSSDVSNALVKMEF

SEQ ID NO: 66459 - protein, 236 aa, Gossypium hirsutum
  unsure (1)..(236): unsure at all Xaa locations
  Clone ID: GOSHI-09MAY01-C43220_2.pep
MKKPNRRSKQKSGSADSSTSPLIVSGEKGNPANRIRDLELENETLKRAIEELRSKAVDVSPNSCVGVQKLDQGHSRNSETSPKIVELRKLGIQSQXSAKKPKSDEMSEQFQDEIQRLKVQKVQLQCKMKLESMQFRLCKASLEKEILQLKKEQRRNKYEKHVLSTLIQRQKHVLQQKTKEAFVAAKRLKQLTESRKATSGKIAGARIASTLELRVLRMTLSQTEACEYVQIQHRIE

SEQ ID NO: 66460 - protein, 298 aa, Gossypium hirsutum
  Clone ID: GOSHI-09MAY01-C43220_1.pep
KATSGKIAGARIGINIGTQGIENDFEAKLKLDEVCSKYEHRIEKMVDEIKKLKLELEMLREEKSSSSCRTGDNETSIADSELTDLREEVAKLSCMVSQMKMSKAQLVPADRSQADLVQTSVSIGSNIHASGTDASESECSQGNTSMIEKPSGVCCSCSKKSLCKTLKCRCRSAGSSCGASCGCALAKCTNNKKVPFKLDDMPQPKTPEDIVEELKGTIHDTILIQNKTVKNIPDTNEDCGPRKQPLREIGNTMVKPTAAKLDPRKKGQKTVIQPDTKDQPLPVMENTRGTRRTNKISG

SEQ ID NO: 66461 - protein, 251 aa, Gossypium hirsutum
  Clone ID: GOSHI-09MAY01-C78910_1.pep
MSLLNQLFNRGVFGAKCKTCLSLAISRIKLLQNKRDLQLKNMRKEIAQFLQAGQEPIARIRVEHVIREQNIWAAYEILELFCEFVLARVPILESQKDCPPELREAVASIIFAAPRCSDVPDLLQIKNLFATKYGKEFVIAATELRPDSGVNRAIIEKLSVSAASGEIRLKVLKEIAQEYSVEWDSSGTEAEFNKKYEDLLAGSKQVCAEAAVSQAPNKQASGKSSPSNGAKTILPTDARPASQHHQVPTHE

SEQ ID NO: 66462 - protein, 156 aa, Gossypium hirsutum
  unsure (1)..(156): unsure at all Xaa locations
  Clone ID: GOSHI-09MAY01-C78410_1.pep
MPGNKYNGHSNHIPTRVERLLRERVLSEQRKSIRASQSNEVSDNHKADEVSENGQCYREGDTLRXAFVKQYLEEAGAARPFRQRLLVVANRLPVSAVRRGEDSWSLDISAGGLVSALLGVKQFEARWIGWAGVNVPDEIGQKALTKALAEKRCIPV

SEQ ID NO: 66463 - protein, 160 aa, Gossypium hirsutum
  unsure (1)..(160): unsure at all Xaa locations
  Clone ID: LIB3582-006-P1-K1-E10.pep
ATHPVISPFNNGTHESLKKSNEPGLILMRHVESIWNEKNLFTGXVEVPLTKKGVEDAIVAGIRISNIPSDMMFTSALIHAQMTAMLAMTQQRRKNVPNIMHNENEQARVWSQIHSEDTIEQSIPGIAAWQSNERMYGELQGLNKQETADRCGKEKVHEWR

SEQ ID NO: 66464 - protein, 124 aa, Gossypium hirsutum
  unsure (1)..(124): unsure at all Xaa locations
  Clone ID: LIB3083-017-Q1-L1-F2.pep
LSVCLCLSLSLSRXMTAMLAMTQRRRKKVPIIMHNENEQAWVWSQIHSEDTIKQSIPVIAAWQLNERMYGELQGLNTQETAYRCGKEKVHEWPXKHDIPPPNGQSLEMWAERTGAYFKDEIEPQ

SEQ ID NO: 66465 - protein, 177 aa, Gossypium hirsutum
  unsure (1)..(177): unsure at all Xaa locations
  Clone ID: GOSHI-09MAY01-C78040_1.pep
MPSSSSTFPVTLVSKTMIFPDQKSNLGELKLSVSDLPMLSCHYIQKGCLFTRPSIPINSLISVLKQALSKTLSFFSPLAGRLYTDRNGYIYITCNDAGVEFHHAKGTTLFIRDVISPLDVPWFVKGFFCYDKTVSYQGHYMPFMAVQLTXELAAGVFIGCSVFHALTVGSSFWDFFN

SEQ ID NO: 66466 - protein, 188 aa, Gossypium hirsutum
  Clone ID: GOSHI-09MAY01-C78010_2.pep
NSTLSLFAFKRTCQMARSALDEMSDSGAFMRTASTFRNFISRDPGSQFPPESGRYHLYVSYACPWASRCLAYLKVKGLDKAIGFTSVKPIWERTKETDEHMGWVFPTSDTEEPGAAPNPFNGAKSIRELYELASTNYTGKYTVPVPVLWDMTFKTIVSNESAEIIPMLNTEFNDIAENPAVDLYPPHL

SEQ ID NO: 66467 - protein, 212 aa, Gossypium hirsutum
  Clone ID: LIB3543-055-Q1-K6-G11.pep
PRVRPACGRRAATRPGRYHLYVSYACPWASRCLAYLKIKGLDKAIGFTSVKPIWERTKETDEHMGWVFPTSDTEEPGAAPDPFNGAKSIRELYELASTNYTGKYTVPVLWDKKFNTIVSNESAEIIRMLNTEFNDIAENPAVDLYPPHLRAEIDKTNEWIYSGINNGVYKCGFARKQEPYDEAVKQLYDALDQCEEILSKQRYLCGNILTEA

SEQ ID NO: 66468 - protein, 157 aa, Gossypium hirsutum
  unsure (1)..(157): unsure at all Xaa locations
  Clone ID: LIB3543-038-Q1-K1-F4.pep
MPCILSSCSLIKSVIKLMIFCCSIVHQSVKPIWXKDKRGVXEHMGWVFPTSDTEEPGAAPDPFNGAXSIXELYELASPNYTGKSTVPVSSXVLWDMKFNTIVSNESAEIIRLLNTEFNDIAENPAVDLFPPHLRAEIVKTNEWIYSGINNGVYKCGF

SEQ ID NO: 66469 - protein, 124 aa, Gossypium hirsutum
  Clone ID: uC-gsronu33B021h12b1.pep
PRVRSRPACERRWRQVCLVSVTAPNRTLRIRTPLNRRSGHRLGRRRSTVFVTKKQRSFQAFIAERKENQNKKIQFPSFPFCCAVVFCFLLHVRSAWRRTEAVLATGVAGRTGRGLGRAWGAERR

SEQ ID NO: 66470 - protein, 84 aa, Gossypium hirsutum
  Clone ID: LIB3582-011-P1-K1-F3.pep
FSFLSAIKAWKLRCFLVTNTEIKKENTRRNNRKKNLKGVSFVHRFFPFLFISERGGSFLTHTCIEIKRKESKHKKSFWVICFVF

SEQ ID NO: 66471 - protein, 119 aa, Gossypium hirsutum
  unsure (1)..(119): unsure at all Xaa locations
  Clone ID: AI055149.1.pep
YRPNSKISTXNYGNYNFLKNSTLDLEDFLELHSYISQSTLQTFNHKREMSSMWFRVRKQSPRIFAVSWVFEKGTNEQCKVFCCALWAIWNSRNQLVHERKIVSGRDLVHRIKAYLAEIE

SEQ ID NO: 66472 - protein, 107 aa, Gossypium hirsutum
  unsure (1)..(107): unsure at all Xaa locations
  Clone ID: LIB3582-011-P1-K1-C4.pep
LATTDSEELLVWKGEPSGEFSVRSAYKLLQDANLDPNNLVQTEFKDFYRKSWQLQLPXKILLLIWRISWNYIPTLVNLRCKHLTTSVRCPRCGSGEENSLHVFLQCP

SEQ ID NO: 66473 - protein, 222 aa, Gossypium hirsutum
  unsure (1)..(222): unsure at all Xaa locations
  Clone ID: GOSHI-09MAY01-C79480_1.pep
DAWVQIECVSGPSANSAGEDPAVPASIRETLVGTLLPSLAVADILGFLTVIESQIWSTASDSPVHLVSLATLIRVVRSSPRTLVQCLDKVVNFILQTMDPGNSVMRKTCHPRSMTTLREVIRVFPMVAMNESSTKLAFGDAIGEINGASIRVYDMQSATKIKGLDASXTPGIPNLAXQAPKLFVNTVISPLSFSPNGEGXLVPSSEHGLIIRWWSLGXVWWD

SEQ ID NO: 66474 - protein, 140 aa, Gossypium hirsutum
  unsure (1)..(140): unsure at all Xaa locations
  Clone ID: GOSHI-09MAY01-C79400_1.pep
KIRLPQPXIEARSGMTIKEXVKDVFIGGGEYIVNDVKFTVNQAVEPVEKGITKFNEKLHKIKDRRKTKDDSCIATAEPRVIRGIDDPLLNXGSMSDSAVARGKKHCKKSGSTTSAESGDSSCYLNSGGYLIRGRRWVTKD

SEQ ID NO: 66475 - protein, 148 aa, Gossypium hirsutum
  unsure (1)..(148): unsure at all Xaa locations
  Clone ID: LIB3584-018-P1-K1-C11.pep
MRVWRVRLFYALDLNRHPLTEGLHLKSSVQDFIICIERXIGIASVVHLYDLSSKPYELMGDPISGSVSILGDYACVDCAPDPDEIRESERPTKLLLPQTDIDARSGMTIKESVKDVFIGGGEYIVNDVKYTVNQAVEPVEKGITKFNE

SEQ ID NO: 66476 - protein, 146 aa, Gossypium hirsutum
  unsure (1)..(146): unsure at all Xaa locations
  Clone ID: uC-gsronu33B153h06b2.pep
MEGFKVVHLIAILSTLSMVSVNGQISTACTASMISSFTPCLNFITGSSGNGSSSPTQGCCGSLKSLMSTSMDCACLIITASVPFQLPINRTLALSLPRACNMGXVYQLQCKAFGTPLPAPGPVPFLLPPTLAPAAASSLSPGASEA

SEQ ID NO: 66477 - protein, 130 aa, Gossypium hirsutum
  unsure (1)..(130): unsure at all Xaa locations
  Clone ID: LIB3584-017-P1-K1-F5.pep
MFQGSSPNWRLSTLSKDPPNGPITTACNASTISTFTPCSNHITESNKQFSXLPTQELPSSLKSLMSTSMDRACLIITASVPFQLPINRTLALSLPRACNMGGVPMQCKAFGTPLPAPGPVPFLLPPTLAP

SEQ ID NO: 66478 - protein, 164 aa, Gossypium hirsutum
  unsure (1)..(164): unsure at all Xaa locations
  Clone ID: GOSHI-09MAY01-C74840_1.pep
MAGGSGGRTLEETPTWAGAVGWFALGLISIIIEHILHMIGKGLKNKPKPALYEALEKIKSELMLLGFISLLLTVGQGXISDICISKEIAATWHPCNKKQEEKLNESDDQDKTDTEHRRRLLTVSTRVVVIRRSLAGPSVDNVQLRVSAVVSSEGIHQLHLFILC

SEQ ID NO: 66479 - protein, 163 aa, Gossypium hirsutum
  Clone ID: GOSHI-09MAY01-C74790_1.pep
RQRKEIIMGRGKIPIKRIENQTTRQVTFSKRRAGLLKKTHELSVLCDAQIGLIIFSTTGKMCQYCTEGYRMEQIIERYQKVTGTCIPEHDNREHLYNELAVLRKETRRLQLSMRRYTGEDMSSIPFEELDQLEHELERSVIKVRERKNELLQQQLDNLRRKER

SEQ ID NO: 66480 - protein, 159 aa, Gossypium hirsutum
  Clone ID: LIB3543-055-Q1-K6-C12.pep
RQRKEIIVGGGKIPIKRIENQTTRQVTFSKRRAGLLKKTHELSVLCDAQIGLIIFSTTGKMCQYCTEGYRMEQIIERYQKVTGTCIPEHDNREHLYNELAVLRKETRRLQLSMRRYTGEDMSSIPFEELDQLEHELERSVIKVRERKNELLQQQLDNLR

SEQ ID NO: 66481 - protein, 201 aa, Gossypium hirsutum
  unsure (1)..(201): unsure at all Xaa locations
  Clone ID: LIB3543-001-Q1-K1-C11.pep
MGRGKIAIKRIENQTTRQVTFSKRRAGLLKKTHELSVLCDAQIGLIIFSSTGKMCQYCTQPYRMEQIIERYQKVTGTRIPEHDXSVLRKETRRLQLSMRRYTGEDMSSIPYEELDQLEQELERSVNKVRERKNELLQQQLDNLRRKERMLEEENNNMYRWIQEHRAAIEYQQHGGLEAKPVEHHQQVLDEFPFYGEPSSVL

SEQ ID NO: 66482 - protein, 105 aa, Gossypium hirsutum
  Clone ID: LIB3584-020-P1-K1-G10.pep
RQRKEIIMGRGKIPIKRIENQTTRQVTFSKRRAGLLKKTHELSVLCDAQIGLIIFSTTGKMCQYCTEGYRMEQIIERYQKVTGTCIPEHDNREHLYNELAVLRKE

SEQ ID NO: 66483 - protein, 321 aa, Gossypium hirsutum
  Clone ID: GOSHI-09MAY01-C74640_1.pep
MSHFSRNLNGQSSDIVWSGSAWTCGKHPHPSPAFCRSGTTIAVQSFVFVMAKGENHYLAYLEDMYEDKRGQKKVKVRWFHHTKEVKGVIPVRNPHPKEVFITPYSQVISAECVDGLASVLTREHYEKCLAVFPDAFLARVHVCSRQFRSNKVKPFDLSKLRGYFDQPILSCLSSTLSSEPESMSHGLHEEEEEQSAGANVKLGNKRTRTNNRTSSNHLVTYETSCKKIKYALFGKRLPSFKHAESQYCYGSLFKVDEKIELLCQDSGIRGCWFRCTVLQVSRKQMKVQYDDVQDEDGYGNLEVCFRHFKNLYWFVVSHHIS

SEQ ID NO: 66484 - protein, 172 aa, Gossypium hirsutum
  Clone ID: GOSHI-09MAY01-C74600_1.pep
METLASSSLRTTLGGGAGGGLLNFCRGGSVSVLGFPLQHLKIQSLPDSKKKQGFGVIKASVAKTEVALVRIGTRGSPLALAQAHETRDKLMASHPELAEEGAIKIVVIKTTGDKILSQPLADIGGKGLFTKEIDEALINGDIDIAVHSMKDVPTYLPEKTILPCNLPREDVR

SEQ ID NO: 66485 - protein, 247 aa, Gossypium hirsutum
  Clone ID: GOSHI-09MAY01-C74190_1.pep
HASPTRPEQDNLQPVLETESEREEGELVPEVAADTEGGNDAHNVVGSSEFGDGQAELVSSPLASPSGVDDEALVTTAEGDNSPDAVNDEKNEEGYIGEETVAEGSEKSNDGNEQSVVETDPMPEAAAAAAAAAAGTNESGTTSGTPEGEVSKNVGSSSGAAAAEAEDVKQMSPISGTGSGSGGSATSTLVNLQERARERAMLRQAGVLGSTTSGRGRGRVAVRARGARGRSARGGRAGGGPQNSDQQ

SEQ ID NO: 66486 - protein, 250 aa, Gossypium hirsutum
  Clone ID: GOSHI-09MAY01-C74110_1.pep
RGVILGGKTKTCMGAILSPSIHCLEETLSTLDYAHRAKNIKNKPEINQKMMKSALIKDLYSEIDRLRQEVYAAREKNGIYIPRDRYLHDEAEKKAMAEKIERMELVSESKEKQITELQELYNSQQMVTADLSEKLGKTEKKLEETENALVDLEDKHRQANATIKEKEFLISNLLKSEKALVERAFELREELENAASDVSDLFAKIERKDKIEDGNKALIQKFQSQLTQQLEILHKTVAASVTQQEQQLKE

SEQ ID NO: 66487 - protein, 232 aa, Gossypium hirsutum
  unsure (1)..(232): unsure at all Xaa locations
  Clone ID: GOSHI-09MAY01-C74290_1.pep
MDIGEKDKYELGKRDEHNNINYQAPVLSAAWRLGGAGRARAGMSLVPTTNPLAIGSSCASASLVDSFGSSLWEHPSNSPNMGFCDGGXRGGASSSNAMEIGKGLPNSLRTSIDRPFDMGWNAASAMLKGGIFLPNTTGILAQTLSQLPADSAFIERAARFSSFNGGNFCDMVNSFGVPEPMGLYARGVGLMQGPDDIFAVNGMKSVSVMESQKSKLDATEATRMLVCELKIG

SEQ ID NO: 66488 - protein, 144 aa, Gossypium hirsutum
  Clone ID: GOSHI-09MAY01-C75900_1.pep
HASVLLTVFVAREGKMLSDSLLIFLASSVLWATQGVVIHAAGGSSEYYEPDPFTCNRHPDVPNATQSPVPPPQFPFFPLTNGSPPFAMLSTYSAEPTEIQSCESQLQSVEACFQDLVNVFLTNELNLGPACCQSITAIKTRLLG

SEQ ID NO: 66489 - protein, 191 aa, Gossypium hirsutum
  Clone ID: GOSHI-09MAY01-C75890_1.pep
MALEAVVYPPDRFTYGFKDIFPVAGGGGGAWGYDFCFQDEDKVLPVILETNLQQQGSHANWDSSSTSVMQQQHAKELWDPYSSSPETCTVDQSLPGPAAGFQAPMEPPPAYTATNGGGRRKRRRTRSSKNKEELENQRMTHIAAERNRRKQMNEYLAAIRSLMPASYVLWGDQASIIGGAINFVKELEQLL

SEQ ID NO: 66490 - protein, 78 aa, Gossypium hirsutum
  Clone ID: uC-gsflmaxxa039f01b1.pep
SIQGVFCCAAVRSPWFRRNQWPEARRTGFFNRLRSTTRRQSKPSPSYFLFVNLNTKSEKENNSKIFKKLINTLKRKRC

SEQ ID NO: 66491 - protein, 66 aa, Gossypium hirsutum
  Clone ID: LIB3493-007-P1-M1-E12.pep
SYFPFPIWCLNLQKGNRKVRAYFAFESAPKRVKKPSPASLRPLVAAKPRRTDGGARDWDKTLAESI

SEQ ID NO: 66492 - protein, 162 aa, Gossypium hirsutum
  unsure (1)..(162): unsure at all Xaa locations
  Clone ID: GOSHI-09MAY01-C75710_1.pep
GPNSLSLIKDIVEAVEGSCHKTFRPLPEFQVFLNDLPTNDFNSVFKTLPDFYRDLKKDKTERCPAIFIASYPGSFYGRLFPNNCLHFIYSSYSLHWLSKVPPSLYDEHGKSINXGNVYISESSPPSVSRAYWNQFQVDFSLFLKSRSEELVSCGRFVLTILV

SEQ ID NO: 66493 - protein, 277 aa, Gossypium hirsutum
  Clone ID: GOSHI-09MAY01-C75690_1.pep
ARCDYWNLSDAAMRHENETCLLYADQLKQRCVEQFIEGSLRIEQLADVDGLFDLVSKVIGAAEPARIYNVNLSIFTSIPDFWSIGQVFPIVPIHRLDEKPEVRGVLSDLTCDSDGKIDKFIGGETSLLLHELEGNDGGANGRYYLGMFLGGAYQEALGGVHNLFGGPNVVSVLQSDGPQSFAVTRVMPGPSCADVLRMMQHEPELMFETLKHRAEEFHVEDHDNDGTKYATLISSVARSFHNMPYLKALSPCSYEEVHNAAAEFGASEDEQWSYCYA

SEQ ID NO: 66494 - protein, 267 aa, Gossypium hirsutum
  Clone ID: GOSHI-09MAY01-C75630_1.pep
HASAQPVYKHEEALEEQWEEMLNLTTRLCWNLVKKEGYIAIWQKPLDNSCYLSREAGTSPPLCDQDDDPDNVWYVDLKACISRLPENGYGANVAPWPARLQIPPDRLQSIQIDSYIARKELFMAESKYWNEIVDSYVRALHWKKFQLRNVLDMRASFGGFAAAIIQNQLDAWVLNVVPISGPNTLPVIYDRGLIGVMHDWCEPFDTYPRTYDFLHAAGLFSIERKRCNMSTIMLEMDRILRPGGRVYIRDSLDVMDELEDIAKAMGW

SEQ ID NO: 66495 - protein, 221 aa, Gossypium hirsutum
  Clone ID: GOSHI-09MAY01-C75170_1.pep
RLTPAVSVTWGGAIIPSKISKTGQKHDLVPVSQTPSSKSSYSSRRVSLPLPSRTAAIVTPGGANVVSLPTSNSPDVSVNAPRIDKIAEFPLASSNDPVLPIRQTSSTSAKCSSSSSIDSADRSITKDKCTVQILEKAVATSNVSDQSLGVAQDGSEGGSEHNRAAVSIRSSSESRQRRFDTSSYQQRAEALEGLLEFSARLLKQQRYDELGVLLKPFGPEK

SEQ ID NO: 66496 - protein, 140 aa, Gossypium hirsutum
  Clone ID: LIB3825-019-Q1-K6-C2.pep
KGIGAIAISLPFACVIGLLSSMTSSTMATRRFVWIYASIQFVLVVIFAHIFYSQVKVQAILSILLATFSGFGVTMSGSSIIVEIQRCRRRWQRARLEQQQHSPQVITRAPVQSPRAVNSPRTDPNNVNRQNTETVRWELN

SEQ ID NO: 66497 - protein, 185 aa, Gossypium hirsutum
  Clone ID: LIB3584-035-P1-K1-E10.pep
LRIQSIRARNGALQADAQGYRVWQEVPVLVIVSMLAYFCFLEQLLVGKMGTGAIAISLPFSCVLGLLSSMTSSTMVQRRFVWVYASIQFALVVFFAHIFYSLVKVQSILSILLATFSGFGIAMSGSSIIVEILRWRRRWQAWWQQRHRSQTTTHPPIQSPRAVNSPQTHRSPNVSQQNAETFTGS

SEQ ID NO: 66498 - protein, 327 aa, Gossypium hirsutum
  unsure (1)..(327): unsure at all Xaa locations
  Clone ID: GOSHI-09MAY01-C75380_1.pep
SLLPYVNAEGLDNGFHDIYNETASLGFHGFGHSPQMQQRAYAPVSSYLPPVGDPIGLSNARHFITIDSSYHHPSVPRNIPHVTSKAQFSHLECPVNIEQQVVGKRFGLRTNYLPQLGSFDGGRNFFGSSSSLCSSYQGSDGFAVGGFCSDWSKPFSGKSSLFHLSYAPASPERVGSLEFSSNGPAMVSFQKGPFNGFGCTSSSSRGYSGSKSDQRSCHGSVSTNSLGISGHNWPTLAEARQGGSCNDFSCSCTVTLDTLSERNRGPRAFKPXKHILLRMVLFVDCNMNGTINVITNGSYNRQNFLTDYEGAKFFVIKSYSDDIVHMF

SEQ ID NO: 66499 - protein, 160 aa, Gossypium hirsutum
  unsure (1)..(160): unsure at all Xaa locations
  Clone ID: GOSHI-09MAY01-C75350_1.pep
MFGRAPKKSDNTRYYEILGVSKNASHDDLKKAYKKAAIKNHPDKGXGDPEKFKELAQAYEVLRDPEKREIYDQYGEDALKEGMGGGAAAHDPFDIFSSFFGGSPFGGASSRGRRQRRGEDVVHPLKVSLEDLYLGTSKKLSLSRNVICSKCSGKGSKSGA

SEQ ID NO: 66500 - protein, 173 aa, Gossypium hirsutum
  unsure (1)..(173): unsure at all Xaa locations
  Clone ID: GOSHI-09MAY01-C75310_1.pep
KRMAIWNLLWLYILILYVSNGRMEASHKVYPQFQSLSAVNIRQLHHTAFHFQPPKNWINDPNGPMYYNGIYHIFYQYNPKGAVWGNIVWGHSISKGLINWKELEPAICPSKHFDIEGAWSGSTTILPSNKPIILYTXVDSNGIQTQNYAVPANLSDPYLRKWIKPGNNPLIDP

SEQ ID NO: 66501 - protein, 50 aa, Gossypium hirsutum
  Clone ID: GOSHI-09MAY01-C76840_1.pep
MSFEREDFGLLGPLHLNSIDWENSNHRRSIAARLVQGTYFLERDRQEKPQ

SEQ ID NO: 66502 - protein, 71 aa, Gossypium hirsutum
  unsure (1)..(71): unsure at all Xaa locations
  Clone ID: LIB3582-055-P1-K1-B10.pep
YXKXSTQICYFNSTPKRKGKKFPPIFHLFFLFSFLGLFLMKFFVIFDCFSHLALMGLPLSFDGFTLFNCQG

SEQ ID NO: 66503 - protein, 199 aa, Gossypium hirsutum
  Clone ID: GOSHI-09MAY01-C76810_1.pep
FNAIESIPCVSKKAKWAIDWIQSSTSFAERLVAFACIEGIFFWGGGGAFFWLKKRGLMPGLTFSNELISRDEGLHCDFACLLYGLLQKQLKWHKVHHIVHEAVEIETEFVCEALPCALIGMNSTLMSQYIKFVADRLLVSLGCQRKYSVENPFDWMEFISLQGKANFFERRVGDYQKASVMSSLQNGGKNYVFKLDEDF

SEQ ID NO: 66504 - protein, 178 aa, Gossypium hirsutum
  Clone ID: GOSHI-09MAY01-C76720_1.pep
SSFSAFLFVLLAILITLGEQGVAAGRWWYPSSPPPPPQNGWVWTWPWPVYSYPPPPTAVKPPSHHGQKSPPLPPPPPPSPQPPMVNGKCLGTTLASKLTCLQDVISSILMFRPYVSPECCAAVQATHEDCLNTIFDEFNNPFLAPLVQQQCFQTPNPNPNPNPKPKPHHGGHHHHGHP

SEQ ID NO: 66505 - protein, 205 aa, Gossypium hirsutum
  Clone ID: GOSHI-09MAY01-C76340_1.pep
MPKPFHLLVFFLVALCLCTSSNASSTTNEFLETECLKVPATEFIGSLKTTIDAIRKATSVVSQFGGFFHDFRLSNAISDCLDLLDSSADELSWTMSASQNPNAKDNSTGDLSSDLRTWLSAAMVNQQTCIDGFEGTNSMVKTVVSGSLNQITSLVRNLLIMVHPGPNSIQNRFPVWFKREDRRLLQINGVTANVVVAANGSGIHT

SEQ ID NO: 66506 - protein, 297 aa, Gossypium hirsutum
  unsure (1)..(297): unsure at all Xaa locations
  Clone ID: GOSHI-09MAY01-C76370_1.pep
RVRLKFRLHARRGMLPNYVVVEQRYFDVKEFPANDDHPSHDVARGQRFVKEVYEILRSSPQWKEMALLITYDEHGGFYDHVPTPVSGVPNPDGIIGPDPFYFKFNRLGVRVPTLLVSRWIDKATVIHEPTGPTPSSQFEHSSIPATVKKLFNLNSNFLTKRDAWAATFENYFKLRTTPRTDCPETLPEVTTSLRPWGPQEDASLSEFQVELGQLASQLNGDYVLNTYPSIGKSMRVGEANRYVEDAVRSFLQPDRXAIKSGANESAIVTMKPSLTIESKIGVTCGNPIVLPYDHLPP

SEQ ID NO: 66507 - protein, 195 aa, Gossypium hirsutum
  Clone ID: GOSHI-09MAY01-C76360_1.pep
GIPVQVLDRMIASIRAFHELPTDVKARFYRRDAETGVSFISNVDLFHSKAASWRDTLQIRLGPTLPELEHIPEVCRDEVVQWNLHSTTLGEQLMGLLSEGLGLDKDTIKNTTCLDARVMVGHYYPCCPQPDLPGGIVSHTDPGVLTLLLQDHTGGLQIKHEGEWVDVKPVHGALVINIADILQIMSNDEYKTVEH

SEQ ID NO: 66508 - protein, 214 aa, Gossypium hirsutum
  Clone ID: GOSHI-09MAY01-C76330_1.pep
MVRIRKIPLDLTLTEFPALVSSWWDEVNESTHWQDGIFYTLCAAYALVSSIALIQLIRIELRVPEYGWTTQKVFHLMNVIVNGVRAVVFGFHKQVFLLHPKGLIFVLLDLPSLLFFSTYPLLALFWAEIFHQARSLPTDKLLISYAAIHGVIYIPTVRLLVFPWNKQHHLVEFHRRIFFCPGPLLFLHKDSFFFGRMIFFSCLNLSPHSIQKGV

SEQ ID NO: 66509 - protein, 158 aa, Gossypium hirsutum
  Clone ID: GOSHI-09MAY01-C76280_1.pep
DRRFKRSPVRPSSTHLSSISDFSIDSAQKSHKEQDYFRERLLAMEEETKMLKEALAIRNSELLASRNLCAKTSSKLQTLEAQLAISNQQRSPSKTIVQIPTEVYSSQIASNPPSMTSVSEDGNDDDRSCAESWATALISELSHFKKENSTGKSSKSEN

SEQ ID NO: 66510 - protein, 251 aa, Gossypium hirsutum
  unsure (1)..(251): unsure at all Xaa locations
  Clone ID: GOSHI-09MAY01-C77890_1.pep
DIIKLFDSIEKYDDGALYFDDKLVDGHEYQGPVSTTSSVLRGLTAFAAVTAENLNLPGDKILGLAKFFLGIGVPGDAKDFFNQIDSLACLESNRVSIPLILSFPSTVLSLTRKDSLKVGVSTVLGSEVPSLTVKLVGAFSSGSKDASLVESQELNFDKTSGLHILNDLPKSIDVGSYTFVFEIVLHEPKHEEVYFXEAQTKVPISVTGLIKIENSEIAVLDSDLGSIESQKKLDLAGKKCYIIISKTIFRC

SEQ ID NO: 66511 - protein, 66 aa, Gossypium hirsutum
  Clone ID: GOSHI-09MAY01-C77880_1.pep
FAMVILFAHICYTVLAVSPILSVLLSSFTGFGIAISTNSVLVEYLRWRIRRQTQPRQQQINGTLQQ

SEQ ID NO: 66512 - protein, 182 aa, Gossypium hirsutum
  Clone ID: GOSHI-09MAY01-C77840_1.pep
MEVDLEPKVLDTSSMTEKGYEEFGCSHYRRRCKIRAPCCDEIFDCRHCHNDAKNSIEIDPFDRHEVPRHDIKRVICSLCDREQDVQQHCINCGVCMGKYFCSKCNFFDDDVSKKQYHCDGCGICRIGGAENFFHCDKCGCCYSMMMKNSHKCVEKAMHHNCAVCFEFLFDTTKEITVLPCGH

SEQ ID NO: 66513 - protein, 140 aa, Gossypium hirsutum
  Clone ID: LIB3825-027-Q6-K6-F11.pep
TQVLDTSSMTEKGYEEFGCSHYRRRCKIRAPCCDEIFDCRQCHNDAKNSIEIDPFDRHEVPRHDIKRVICSLCDREQDVQQHCINCGVCMGKYFCSKCNFFDDDVSGLLHITIQNHAIQQNWLPYNGKTFSFLELQGLEK

SEQ ID NO: 66514 - protein, 87 aa, Gossypium hirsutum
  Clone ID: AI054733.1.pep
MEVDLEPKVLDTSSMTEKGYGEFGCSHYRRRCKIRAPCCDEIFDCRHCHNDAKNSIEIDPFDRHEVPRHDIKRVICSLCDREQDVSI

SEQ ID NO: 66515 - protein, 137 aa, Gossypium hirsutum
  Clone ID: GOSHI-09MAY01-C77520_1.pep
DFPVILPKGKLFKRPLDEPITLPSWLSEEEANYYVTVFQKTGYTGALNFYRNFNRNWELLKPWVGSKIKTPAKFIVGDKDLVYHMPGMKDYIHNGGFQEDVPSLQQVVVMEGVAHFINMEKPDEINIYISDFFTQFV

SEQ ID NO: 66516 - protein, 208 aa, Gossypium hirsutum
  unsure (1)..(208): unsure at all Xaa locations
  Clone ID: GOSHI-09MAY01-C77170_1.pep
MQVSKGRKKFKSEFNVLRTGEHENLVMLVGSGSEGNHRLLVYEYVCNGSLDLHLSSKDSFKTTLWFFTPFLCNEISNRCMHVCISFLAKLIAEHSRRPLSWQKRVKIALGTAKGLKYLHDNXIIHRDMRPNNIRVTHEFEPLLGVFRLARTQHEDSDKSSETMTRVVGTLGYLAPEYAECGKVSTKTDVYSFGVVLVQLITGMKTTDQ

SEQ ID NO: 66517 - protein, 179 aa, Gossypium hirsutum
  Clone ID: GOSHI-09MAY01-C77280_1.pep
FDDPAEDNQSEDETDSQSGNKETESASDSENFASSMDYNAVDKGNKMVVSDSAIEKNTESREDGDIDMDAVDAVDNVEETLSGDRLAESSVGESDERNSQSDTTSMGVNQVDNVAVSDELGVRVSVKENTLAGSESGETLAMSASPEKALFSGTRTNCDAIEMETKSNVGSSQRSFWLL

SEQ ID NO: 66518 - protein, 151 aa, Gossypium hirsutum
  Clone ID: GOSHI-09MAY01-C77260_1.pep
EVLGFIRGYVHNICLNFMSPCSPPRPLIKEIWRPPDPGVIKLNFDASFLKEEKLAVTAILARNFTGEIVGVETYLFNDVADAFVAEARACERALIFAGRMCFRRLVVKGDLLAVTRLINEAAHTLALEGWRRKIYGDWLTGVPESVRLAAL

SEQ ID NO: 66519 - protein, 98 aa, Gossypium hirsutum
  Clone ID: GOSHI-09MAY01-C70860_1.pep
GSRRNQPKGCASSTPVVSAALHQRHDSASMISARIHTSTVTVGFLDDTCKKRKQTEDTRKKAKQKWQENHNISIKYTEDIEWKEILDFFPRICKGPRL

SEQ ID NO: 66520 - protein, 105 aa, Gossypium hirsutum
  unsure (1)..(105): unsure at all Xaa locations
  Clone ID: GOSHI-09MAY01-C70180_2.pep
MKERQRWRAEEDALLCAYVKQYGPREWNLVSHRMNTPLNRDAKSCLERWNNYLKPGIKKGSLTEEEQRLVIRLQAKHGNKWKKIAAEVPGRTAXRLGKWWEVFKE

SEQ ID NO: 66521 - protein, 86 aa, Gossypium hirsutum
  Clone ID: LIB3543-036-Q1-K1-F12.pep
GSQSNGKWCFPLEMKERQRWRAEEDALLCAYVKQYGPREWNLVSHRMNTPLNRDAKSCLERWNNYLKPGIKKGSLTEEEQRLVIRL

SEQ ID NO: 66522 - protein, 177 aa, Gossypium hirsutum
  Clone ID: GOSHI-09MAY01-C70120_1.pep
MVCNSCLKSVIVQTGQIGTILTRKRVHLRRAGRTLYAGGAGLTFLWNREFRTSAKMMVDSGAAASQGPIVHKFPEKDDAGYVSGGWKSEDGRLSCGYSSFRGKRATMEDCYDIKTSKINGQTVCLFGIFDGHGGSRAAEYLKQHLFEKLMKHPQFMTDTKLAISETYQQTDADFLDS

SEQ ID NO: 66523 - protein, 165 aa, Gossypium hirsutum
  Clone ID: LIB3828-027-Q6-K6-D6.pep
SCEFWVGARMMVDSGATTNQGPVVDMISEKDGDGGYVTGGWKSEDGKLSYGYSSFRGKRATMEDFYDIKTSKINGQMVCMFGIFDGHGGSHAAEYLKQHLFENLMKHPKFITDTKLAISETYPQTDVDFLDSERNTYRDDGSTASTAVLVGNHLYVANVGDSRTI

SEQ ID NO: 66524 - protein, 81 aa, Gossypium hirsutum
  Clone ID: LIB3543-012-Q1-K6-E6.pep
SKPHHFRSNLNERNKKGISLENFRFKKKRMDQIGSRLEHVEDLNLKWRRLLGIDRVAKRFSLSLSISQIEKRKKKENARRI

SEQ ID NO: 66525 - protein, 162 aa, Gossypium hirsutum
  Clone ID: GOSHI-09MAY01-C70080_2.pep
MPETTPTVTPNRSAGERKTAKKPKTFPKKQKLEKSVEEERLEKKSDESPESGRVRLGPKEFGSSSEMLDYFCYLLYHWGTQLNFNKYEHMVLLDLLKKGHLEPERKIGGGVKAFQIRNHPQWKSKCFFVIRDDETMDDFSFRKCIDHILPLPEDLKGKSNSN

SEQ ID NO: 66526 - protein, 144 aa, Gossypium hirsutum
  Clone ID: GOSHI-09MAY01-C70080_1.pep
MPESGRVRLGPKEFGSSSVMLDYFCYLLYHWGTQLNFNKYEHMVLLDLLKKGHLEPERKIGGGVKAFQIRNHPQWKSKCFFVIRDDETMDDFSFRKCIDHILPLPEDLKGKSNSNRASGGGGSWRGRGGKGGGRGRGKGGKSRN

SEQ ID NO: 66527 - protein, 239 aa, Gossypium hirsutum
  Clone ID: GOSHI-09MAY01-C70050_1.pep
MYPGGYTAEITSLSPKATEKDLCDFFAYCGAIVHIEIIRCGEYACTAYVTFKDAYSLETAVLLSGATIGDQSVCISKWGSYGDDSYPWDSSTWKTEEDTSSSVTHMHQFVSSPGEAVTVVKTMLAKGYVLGKDALIKAKDLDESYRVSATAAAKVAELSNRIGLTDKINTSMETVKSVDEKYHVSDITKSVASVTGTAVVTAASFTGRTAVAATNAVVNSSYFAKGALWVSGMLNRAAQ

SEQ ID NO: 66528 - protein, 250 aa, Gossypium hirsutum
  Clone ID: GOSHI-09MAY01-C70370_1.pep
PRVRPRVRPRVRRFMLLVTASILVLVFFSISIAQPLLSQISLRKREPLELKTMGQVLGIPESGLLLQREQAVDIDPNEPLDKLLLNKRFRQSFMAFADSCLAGESVHFFDEVHELGKIPIDDPVRRIYMARHIINKYIIAGAAMEVNISHRSRQAILATTDLTHPDLFTNALHELLQLMKMNLAKDFWSSMYFLKLKDETSVRSNGYEMEQMSGAYSFSPRLSCVNAIDDPFHQDHFSSGSSQDVHHPYQ

SEQ ID NO: 66529 - protein, 164 aa, Gossypium hirsutum
  Clone ID: GOSHI-09MAY01-C71970_1.pep
VIKPDITAPGVDILAAWPVETSPSRLECDKRRVLFNIISGTSMSCPHVSGIAALIKSKHKDWSPAAIKSALMTTAYTLDNKGKPIADLAFYTSAAPFAIGSGHVDPIKATDPGLIYNITAEDYISYLCSLHYSDSQVSMFEEGYQCTPTERRMQPGDLNYPSFA

SEQ ID NO: 66530 - protein, 84 aa, Gossypium hirsutum
  Clone ID: GOSHI-09MAY01-C71570_1.pep
SETKKLIVFFLLHFCFSSFLGFKLEKPRRGKWKKELENFPFFFNKGSPFQIYEIKKGGKRKGKEAGRNKRMDSPNSLRTEDLVR

SEQ ID NO: 66531 - protein, 67 aa, Gossypium hirsutum
  Clone ID: LIB3582-050-P1-K1-F6.pep
LSVPGCTRLSIEGILNSLKALKSVGRQGVKHLRIAGVYGVTQKHFEELKFVLGMDNQIQQIVHKPHF

SEQ ID NO: 66532 - protein, 179 aa, Gossypium hirsutum
  Clone ID: LIB3826-002-Q1-K6-E4.pep
QDCEVCSEEHEGAPHEALNFAFGYLGLRDLFAVESVCMSLRSVVQNDPLLWRNIHIDQPLSEKITDDVLLQITRRAQGSLQCLSLVDCQRITDEGLQCVVEENPKLVKLSVPGCTRLSIEGILNSLKALKSVGRQGVKHLRIAGVYGVTQKHFEELKLFLGMDNQIQQIMHKPHFYNRR

SEQ ID NO: 66533 - protein, 128 aa, Gossypium hirsutum
  Clone ID: GOSHI-09MAY01-C71460_1.pep
NNNNHHLNQQLQLQVPFPPPSTSFTMDTNNYLPPLIDNMETMVPIEVQSCTSLDEEGGGEMTLESLRRQQQELNEWVESQQCSSFLLWDNIIEGQIGGSVEGTTIPLPPSSSSSSNMGTTLSSFPSSL

SEQ ID NO: 66534 - protein, 399 aa, Gossypium hirsutum
  unsure (1)..(399): unsure at all Xaa locations
  Clone ID: GOSHI-09MAY01-C71730_1.pep
HASDGLSDDMEEPISLKAKAVVAAHDKDINSLAVAPNDSLVCSGSQDRTACFWRLPELVLVVKFTGHKRGIWCVEFSPVDQCVITASGDKTVKIWAIADGSCLKTFEGHTSSVLRASFLTRGTQFVSCGADGLVKLWTIKTNECIATYDQHEDKVWALAGGNWTVLLAPGGRDAVSNLWHPSTPAEKEEAFRKEEEXVLRGQELENALLDAEYTKAIQIALELRRPRKLFELFSELCRKREAGDHIDKALHALGKGEFLLLFEYIREWNTKPKLCHVAQSVLFRAFNILPPTEIIEIKGISELLEGLIPYSQRHFSRIDRLIRSTFLLDYTLLRMSVIEPATQDDLKTKSLLHSEKNEEDALLTDNAEEDQKQVSEEQKPKASGKKRKSPKSGEPFTLT

SEQ ID NO: 66535 - protein, 80 aa, Gossypium hirsutum
  Clone ID: LIB3825-002-Q1-N6-D6.pep
EVYSTVLFQKEMYLPTPLKNDFEASLKSKQFRGLQKNAVCLLFNLRLVYRYVYISNPFFTIEYMIFSPNSFSCSVDSYPK

SEQ ID NO: 66536 - protein, 129 aa, Gossypium hirsutum
  unsure (1)..(129): unsure at all Xaa locations
  Clone ID: LIB3583-035-P1-K1-G4.pep
MIPVTFISFLCMHVSNYFQNYWFLLFPLLSILVVSDPDEAKGKEKRQKGFLAPLQLSDALVKFLGTGENELTRAVVIKRMWDYIKENNLQDPADKRKVICDEKLKELFEVETFHGFTVTKLLAAHXLKE

SEQ ID NO: 66537 - protein, 177 aa, Gossypium hirsutum
  unsure (1)..(177): unsure at all Xaa locations
  Clone ID: LIB3582-052-P1-K1-C4.pep
HASGFNKVSRLSPQLRELLGVPEMARTEVVKQMWVYIREKNLQDPVNKKNIICDEPLHALFGVESIDMFQMNKALSKHILPLDSDEVKSMEREKPRKHEREEVKSTEKEKPRKHEREEDPDEAKGKEKRQKGFLAPLQLSDALVKFLGTGENELTRAVGIKRMWDYIKENNXQDPAD

SEQ ID NO: 66538 - protein, 155 aa, Gossypium hirsutum
  Clone ID: GOSHI-09MAY01-C71600_1.pep
MVGNSLAGLQDHLKLAREYALEGLYDTSIIFFDGAIAQINKHLTTLDDPLIRAKWMNVKKALSEETEVVKQLDAERRSFKEAPNGRRPSSPPIHAKSSFVFQPLDEYPTSSGAPVDDPDVWRPPSRDTSTRRPARGGQAGMRKSPQDGISGRGNT

SEQ ID NO: 66539 - protein, 88 aa, Gossypium hirsutum
  Clone ID: GOSHI-09MAY01-C71390_1.pep
NNKIIRIEPDKDDIVIIMVVIFMQEGYLLWVFGYILLFVSIETSLFSCFFFFFSFLYFTFFFFFFFFFPFCSFSLSNMDCFTVSSFET

SEQ ID NO: 66540 - protein, 154 aa, Gossypium hirsutum
  unsure (1)..(154): unsure at all Xaa locations
  Clone ID: GOSHI-09MAY01-C71370_1.pep
TGVHGLACWFDVLFNGGTVQRWLTTAPGAPTXTHWYQIRCVLSQPIYVMAGQEITGQLHMIAHNAQSYTIYLTLSAKMWGPGAEQGGIIQTSSCKLDLKEPYYRMSQPQPYTMAQDQQPHQLLQAEDIPPIHTEDLDLEELELLQQPSEPLGAQ

SEQ ID NO: 66541 - protein, 84 aa, Gossypium hirsutum
  Clone ID: GOSHI-09MAY01-C71280_1.pep
MSYLNRVWMATSMAMVQGHGENQGQNWKSGIKFLQRGQRRPFDGESSNLRPISGSDLTGVVGNRDGQADESIRPVMYLNCWGQG

SEQ ID NO: 66542 - protein, 57 aa, Gossypium hirsutum
  Clone ID: LIB3585-062-P1-K2-H12.pep
PQQLRYMTRRIDSSAWPSRFPTTPVRSEPEIGRRFEDSPSKGLLWPLYRLLMPHFQF

SEQ ID NO: 66543 - protein, 187 aa, Gossypium hirsutum
  Clone ID: GOSHI-09MAY01-C72890_1.pep
MAIFSHPMFLGPQFSSSLHSQVDGFSQQQVKVEADPCIEDKTTKYLNRKDVQKALHAKLVGITSWNLCNKIVQYMDDLETPTIYTVGKIVKSGIPVMVYSGDQDSVIPFTGTRNLVYKLAKALGLKTTVPYRPWFEGKQVGGWTQVYGDILSFATIRGASHTAPASQPERSMALFKAALSGKPLPEA

SEQ ID NO: 66544 - protein, 227 aa, Gossypium hirsutum
  unsure (1)..(227): unsure at all Xaa locations
  Clone ID: GOSHI-09MAY01-C72830_1.pep
GKAVPQQGXLGLGRGPLSLLSQTQHFYKSTFSGCLPSFRSPNFSGSLRLGPKGQPIRIKYTQLLKNPRRPSLYFVNLIGIRVGRRVVDIPPKALAFNPSTGAGTIFDSGTVFTRLVEPAYVAVRNAFRRRVKVANVTSLGGFDTCYTVPIVAPTITFMFTGMNATLPQENLLIHSTAGSITCLAMXASAPDNVNSVLNVIANMQQQNHRVLFDVPKSRLGVARERCT

SEQ ID NO: 66545 - protein, 129 aa, Gossypium hirsutum
  Clone ID: GOSHI-09MAY01-C72460_1.pep
EKARLQAEAQSPGKRQGEKLKLKLLVKPKRKRELEREAARQALLKMEKTVDINENSQFMEDLEMLTTTNDETLPDFMEETSPSHSQNELGSFKLRGVSNPLEQLGLYMKPDDDDEDEPPQSAPEPVNDV

SEQ ID NO: 66546 - protein, 181 aa, Gossypium hirsutum
  unsure (1)..(181): unsure at all Xaa locations
  Clone ID: GOSHI-09MAY01-C72740_1.pep
MKLSFKLQEDKNPVLKARIPISIFSQPFVSSLTTTPPTTTDSSGGGSGSGGXNPLKIPSFSLSTNFPSGPCFKLSYAPSASSAITIPFSLSLKSGLGLFGSPKDSPLIFSAHFSLSSVNPGTIIPTFALHFKPQFGNFSLYKATSSKPTLSRILGLTMFQDNLLHLPIPSLGTLIRPRFGK

SEQ ID NO: 66547 - protein, 207 aa, Gossypium hirsutum
  Clone ID: GOSHI-09MAY01-C72610_1.pep
LTHKSGTAFIINSLVLLTISSTLLVFQNDSSGSTQGPRAKYVIGFVCTVAASAGYGLMLSLTQLCFQKILKKHTFKAVLDMTIYQSSAATLMISVGLFPSGEWKSLGQEMEGFKLGKSAYVNVLVWIAVGWQVFSIGAVGLIFEASSLFSNVISTLGLPIVPVFAMVFFHDPMTGVKVISMLLAIWGFVSYVYQHYLDDRNSDTGKL

SEQ ID NO: 66548 - protein, 101 aa, Gossypium hirsutum
  Clone ID: GOSHI-09MAY01-C72320_1.pep
MGNSLICRTKKDAKDNGSKSKRMGKSQRKMLAEEEFLHKQALSMALHQHQLSQRFDGSMSRRIGSTSSRRHADPLANEKKLLESLEKIKFKKIVPLHGESL

SEQ ID NO: 66549 - protein, 98 aa, Gossypium hirsutum
  Clone ID: GOSHI-09MAY01-C72250_1.pep
HNLKYMGTSSMLLSLKLLRRIEVKECNTMEQVIREDEEEATAHEFTFPELYSVEIKACFNLTNFFLGSRALEFPKLSHIAIVGCPKNDGIVFFNFKRE

SEQ ID NO: 66550 - protein, 119 aa, Gossypium hirsutum
  Clone ID: GOSHI-09MAY01-C72260_1.pep
MDRSISNLSSSSSSSSSSSLWFNYTCTIFSFIFFTFTFSFSLFSLSIFILRLKLWRKCSTCQSFLTSSWSKDFNNLCDWYTHLLSKSPTGTIHIHILGDIITADPKNVEHILKTKVENY

SEQ ID NO: 66551 - protein, 121 aa, Gossypium hirsutum
  Clone ID: LIB3583-010-P1-K1-E12.pep
MDASQNLKRFGDTSSGDAVFDASQYAFFGKDVLEEVELGGLDDDEDVPAVGLEDEEEFLFDRDEGEVLRSLSDVDDLTNTFSKLNTAISGPRGSRIIGDGGSGQSEFIHLSTVFYQSIADD

SEQ ID NO: 66552 - protein, 78 aa, Gossypium hirsutum
  Clone ID: uC-gsflnu33B137f12b1.pep
FSCLHLSHLYVVSSFLVEVCMFSKLDFFYDAGDAVFDASQYAFFGKDVLEEVELGGLDDEEEDLPAVGLEDEEEFLVG

SEQ ID NO: 66553 - protein, 209 aa, Gossypium hirsutum
  unsure (1)..(209): unsure at all Xaa locations
  Clone ID: GOSHI-09MAY01-C73980_1.pep
MCFLLVNGYQYDVYGNLFGLLAAHPVTPLVSLHHLDVVEPIYPNVTRVQALNHLMLPAKLDSAGIMQQSICYDKTRSWTISVSWGFAIQVFRGIFSPREIEMPSRTFLNWYKRADYTAYSFNTRPVSRNPCQKPFVFYMSSVGMHSKLNTTVSKYDRHRVPHPPCRWKMADPNNLXMVIVYKKPDPNLWNRSPRRNCCRVMKTKEPGTM

SEQ ID NO: 66554 - protein, 78 aa, Gossypium hirsutum
  unsure (1)..(78): unsure at all Xaa locations
  Clone ID: AF056951.1.pep
MRFLLVNGYQYDVYGNLFGLLAAHPVXPLVSLXHXDVVEPIYPNVTKCSHKVQASLNLVSLNLVSLNLVSLNHSGQKK

SEQ ID NO: 66555 - protein, 169 aa, Gossypium hirsutum
  Clone ID: GOSHI-09MAY01-C73400_1.pep
MAGQVLVAALVFMAVVVAFAGDSAPSPSPKSSSPSKGGASPPSKSPSPSPPSSKNSSASSPSPSSGGGSSKNNSSSSSSSSPPSPPSPTKSSDAPKSSSGGSSSSSKSPPAPAPSSSSKSHGSSAPTSSDEEESPSESPNASKSPPIPEAEVPNKDSSLSDAPASDFAP

SEQ ID NO: 66556 - protein, 151 aa, Gossypium hirsutum
  Clone ID: LIB3583-008-P1-K1-B5.pep
GGCKRRDLGVSYAPKEPKDSKSSSLSDLRIEKSIFIKPKTFHLTVLMLKLWNKERVNLATEVLKSISPKVMDALDNRPLFVRLKGLDCMRGSLDKACVVYAPVEEIGSENRLSHACQVIIDAFVEAGLVLERDIRHELKLHATVMNVKHRK

SEQ ID NO: 66557 - protein, 117 aa, Gossypium hirsutum
  Clone ID: uC-gsronu33B150e06b1.pep
YILDLTDLRIEKSIFIKPKTFHLTVLMLKLWNKERVNLATEVLKSISPKVMDALDNRPLFVRLKGLDCMRGSLDKARVVYAPGEEIGSENRLSCACQVIIDALVEAGLVLERDIRHE

SEQ ID NO: 66558 - protein, 146 aa, Gossypium hirsutum
  Clone ID: GOSHI-09MAY01-C73300_1.pep
MAGLEVEEISTSTASLERLPGKSTSSSPAVAADGSTHESFSYSKLPEETLNLSIRKLDGSSFVIEVLKSATVADLKLGVQNVFCHMPDEGPDKISWGPVWGHFRLPYRHVKLITDADLIEKYGIKDDDQLHFTRHISTKVQKVKQT

SEQ ID NO: 66559 - protein, 152 aa, Gossypium hirsutum
  unsure (1)..(152): unsure at all Xaa locations
  Clone ID: GOSHI-09MAY01-C68420_1.pep
ISTISLVIAAVVEMRRLKIAEEHGLIDKPIVVVPMSVSWLVPQYALXGLADVFTMVGLQEFFYDQMPNELRSVGLALYLSIFGVGSFLSSFLISAIENLTSGDGRDSWFANNLNRAHLDYFYLLLAALSAVGLTLYVCCTKYYIYARWGRTF

SEQ ID NO: 66560 - protein, 73 aa, Gossypium hirsutum
  Clone ID: GOSHI-09MAY01-C68780_1.pep
TPRLSYAHHGLNNNKSNRRDSPFNFITYLRQMPLPKRLPRHQKSTKPTAGITVKLANAEAKIQRIIRAFLLPF

SEQ ID NO: 66561 - protein, 63 aa, Gossypium hirsutum
  Clone ID: GOSHI-09MAY01-C68380_1.pep
AFKLHLERPSRRLNLQQPKSEEKGSSLSLCRTRLQRRRNHSDGEIERDSGERFFSSFLVSFFV

SEQ ID NO: 66562 - protein, 136 aa, Gossypium hirsutum
  Clone ID: uC-gsflmaxxa042g09b1.pep
TMDVEDDTREGLASSIILQSLESTRQGDKLSDEDLAWVNSCLVTDTEILERNWSSFKDVLLEIIGDQPEPLDSSATGSNGFLSGTEISIAPSIKEAEAANYSRRTDEDLLVIPVDGENGMNTNNISIIKRTGTQQQ

SEQ ID NO: 66563 - protein, 100 aa, Gossypium hirsutum
  Clone ID: LIB3272-054-P1-K1-H2.pep
WKELSDFSSLKKTIASSCRRVKWLRLVTNDLQQNIFERRPISFQNFSICNQTRINPSQILIRKLISLPSGFQRLKDNGGSQALSCVIFYIHCNSKISAKF

SEQ ID NO: 66564 - protein, 222 aa, Gossypium hirsutum
  Clone ID: GOSHI-09MAY01-C69910_2.pep
MSLSAAEDDSRSEIHIPADIDWHMLDKSKFFFLGAALFPRVRAALYPVVVLKTRQQVSSTQVSCFKMSFSIMRYEGLRGFYRGFGTSLMGTIPARALYMGALEVTKSSVGTATVSLGFSDTTATALANAAAGLSSAMAAQLVWTPIDVVSQRLMVQGYNDSNSSKNVNPNVNLCRYRNGLDAFRKILYADGPKGLYRGSGISILTYAPSNAVWWASYSVAHK

SEQ ID NO: 66565 - protein, 77 aa, Gossypium hirsutum
  unsure (1)..(77): unsure at all Xaa locations
  Clone ID: AI055050.1.pep
LKMLQRFGLFLVRIKNKIWGSCMVSGMFDLFLLIHVRSQIWLRKRKKRKPTKPHSFFIIIPNHTNERNLXXFPFLSA

SEQ ID NO: 66566 - protein, 90 aa, Gossypium hirsutum
  Clone ID: GOSHI-09MAY01-C69920_1.pep
KFLFKKKKKKKKKKKKKKKKKKKKKKKKKKKKKKKKKKKKKKKKKKKKKKKKKKKRGGGFKKNKILRPGVGKEYFFFRAQKIKKPAPVLK

SEQ ID NO: 66567 - protein, 200 aa, Gossypium hirsutum
  unsure (1)..(200): unsure at all Xaa locations
  Clone ID: GOSHI-09MAY01-C69570_1.pep
KLNLSYESLEKATNYFSDTNKLGQGGSGSVYKGTLPNGKVVAIKRLFFNTRQWVDQFFNEVNLISGINHKNLVKLLGCSFTGPESLLVYEFVSNQSLHDYLFVRKDVEPLRWEERYKIVLGTAEGLAYLHEESKLRIIHRDIKPGNILLDEDLTPKIADFALVRLXFPEDKTHISTAFAGTLGYMAPEYAVRGMLTQKAD

SEQ ID NO: 66568 - protein, 142 aa, Gossypium hirsutum
  Clone ID: LIB3585-058-P1-K1-H2.pep
RKSKLNLSYESLEKATNYFSDTNKLGQGGSGSVYKGTLPNGKVVAIKRLFFNTRQWVDQFFNEVNLTSGINHKNLVKLLGCSITGPESLLVYEFVSNQSLHDYLFVRKDVEPLKWEERYKILLGTGSGLAYFDQEFKVGVIP

SEQ ID NO: 66569 - protein, 193 aa, Gossypium hirsutum
  Clone ID: GOSHI-09MAY01-C69460_1.pep
HASAHASAAPPEIKEDEDEEDEEQEGGLSKSGKELKKLLGKASGLNDSDADEDDDDEDVDDDMNFNPTPAPKQKDAPKEEPADNSPMKPAPSASARGTPAASKSSKGMSKGDDTKSIKWYPSVRRLNSEPGFKNLLGTKENSAAALGSAPSKGTSSSAKAGSTSAASASSSKAGSASTAGPVTEEEIRLCYYK

SEQ ID NO: 66570 - protein, 155 aa, Gossypium hirsutum
  Clone ID: LIB3583-044-Q6-K1-H11.pep
ATESGEQEIEIDIDDLSDDTLFTLKRLLDDYLQEKQKIQARGEPCEIELINESAPSNSSMQQGKGNDQVDEDVDIGGNEPPVSSYPPVEIEKDTDHRTTKSVSSSSSRDSDSGCSDSESDDAKPSSSMDAMKVQEAVDSGAQLDEKTSVDDLHKN

SEQ ID NO: 66571 - protein, 88 aa, Gossypium hirsutum
  unsure (1)..(88): unsure at all Xaa locations
  Clone ID: LIB3083-058-Q1-L1-F11.pep
FNRLXKYYXQERQISQARGEPCEIDLINESAPSNSSMQQGKGNDQVDEDVDIGGNEPPVSSYPPVEIEKDTDHRTTKSVSSSSSRDSD

SEQ ID NO: 66572 - protein, 137 aa, Gossypium hirsutum
  unsure (1)..(137): unsure at all Xaa locations
  Clone ID: GOSHI-09MAY01-C69740_1.pep
MSLDGFPPFISAQLHYLINHFPDKIKVEQVLSGGKTYTGGLDRFTLLIPYCLDYIKWDIIYNAEFPLAPPDIIFGPEDEDFHPLHMTGRVGEGDSKFWNILPDWNYKDPTRLLALIXGMRDRYMAYQEETCWKKWMM

SEQ ID NO: 66573 - protein, 150 aa, Gossypium hirsutum
  Clone ID: LIB3828-002-Q1-K6-C2.pep
MGEVNFMQEEDIRLETTRARFANVVKRHAQLTERLSRDSDKMIFERLQREFEAARASQSQEINLDGEQWNDGLLATVREQVHMEADRKTTSGDANDMPTSHFQEKVTYRVGNKVICCLEGTRIGILYETSFAGEPCELYHCVLESKSFLE

SEQ ID NO: 66574 - protein, 70 aa, Gossypium hirsutum
  Clone ID: LIB3584-056-P1-K2-E4.pep
MGEVNFMQEEDIRLETTRARFANVVKRHAQLTERLSRDSDKMIFERLQKEFEAARASQSQEINLDGEQWN

SEQ ID NO: 66575 - protein, 258 aa, Gossypium hirsutum
  Clone ID: GOSHI-09MAY01-C69650_1.pep
LILLLCLKARPVFCSPYPLSFRCFYHLIKSFTLSTSTCRSSTVMCIIEHVALFKVTGDTEQEKVNAMLNHLNGLVSLDPVLHLTAGPVHRIKSPILNFTHMLHSRYKSKEDLNTYSAHPEHRPVAKENVIPICDDIMAVDWVADNDPTPLSPPPGSAFKVTFLKLKESVSNEVQGGILGEIKGVKEGISGIQQMTCGENFSPARAKGFSLASVAAFGGVGEMEAAVGIEEYVNLQKQKVRDNVDGVIVVDYVVPASSP

SEQ ID NO: 66576 - protein, 187 aa, Gossypium hirsutum
  Clone ID: GOSHI-09MAY01-C69380_1.pep
SSAWILYLHCVFILPSSFLSDPFHFPSLLPSRLHSHGVLICRTLYKCVMDSDTVSSAGGLEVAHQNGVYPSGDAYDSGVTDNANGTIAESFETCLYNEMDDNGATEQAREGPNECVESSGLIDSKEGGVKDNPKQSEPDKFQGKTKNEKPSVPKKVSPALVKKHEDGKITRPHCQLPMVVLLLQIHV

SEQ ID NO: 66577 - protein, 186 aa, Gossypium hirsutum
  unsure (1)..(186): unsure at all Xaa locations
  Clone ID: GOSHI-09MAY01-C69250_1.pep
CNSFRNYLKSSSFDFVSTQSLFRIIYKIMDESIERKKGDVPHRVACLLRKIVEEIEWRVSTRARNLKNQNKLFRAQEEKYQSRIRALETLAXGTMEENMVVLKNLQHIKFEKSKLEEKGKVEEQDVLQLKKEKVQKDLEISRLKEELESSKKMHEIQCLQLEAQAEDNKVLLEKKLKEVECLLSDS

SEQ ID NO: 66578 - protein, 135 aa, Gossypium hirsutum
  Clone ID: GOSHI-09MAY01-C64920_1.pep
FPKWMSFDMALLVPNLLEIAIWNCIKCIHLPLFSRLPKLKVLRLEVITAVEYIEDSSAESSSFSFKGNPMNRGREGKEFFPCLEELVFFDLRNLKGWWGEAPLCYQLLSWRSSITTEAIAEEGINAPIPSSFKIK

SEQ ID NO: 66579 - protein, 197 aa, Gossypium hirsutum
  unsure (1)..(197): unsure at all Xaa locations
  Clone ID: GOSHI-09MAY01-C64890_1.pep
GLGLSFFLLFNVYATSFYSGSRLVESGDATFSDVFQVFFALTMATVGISQSSTLAPDSSKARAAAASIFAIIDRESKIDPSDQSGTTLENVKGDIELSHVSFKYPLRPDIQIFQDLSLSIPAGKTVALVGESGSGKSTVISLLQRFYDPNSGRITIDGVEIQTLQLKWLRQQMGLLXQEPIFVNETIRANIAYGKGG

SEQ ID NO: 66580 - protein, 50 aa, Gossypium hirsutum
  Clone ID: GOSHI-09MAY01-C64450_1.pep
FDSLFSANFFPAVIFYLIAYRCLILPVDYSSSLVNVAGFFFSFSELGFQF

SEQ ID NO: 66581 - protein, 73 aa, Gossypium hirsutum
  Clone ID: GOSHI-09MAY01-C64730_1.pep
VTCAAATFSSLQHRCCLRASPTCAIIQLAPFIPATGLVVETRLLRRNQSRDGVSKLKTESSRFSMAPLHHCSN

SEQ ID NO: 66582 - protein, 142 aa, Gossypium hirsutum
  unsure (1)..(142): unsure at all Xaa locations
  Clone ID: LIB3585-035-P1-K1-H6.pep
MKGIFKYKPRTPVDIVRQTRDLLSCAARSSESRESKREEKMAELFKNLRELKSILYGNSESEPVSEACAQLTQEFFRENTLRLLITCLPKLNLEARKDATQVVANLQRQQVNTRLIASDYSEANLDLXEYLIASYEYTDMAL

SEQ ID NO: 66583 - protein, 99 aa, Gossypium hirsutum
  Clone ID: LIB3272-001-P1-K1-H9.pep
MKGLFKSKPRTPVDIVRQTRDLLMYVGRSSDSREAKREEKMAELFKNIRELKCILYGNSESEPVSEACAQLTHEFFRENTLRLLITCLPKLNLEARKDA

SEQ ID NO: 66584 - protein, 140 aa, Gossypium hirsutum
  Clone ID: GOSHI-09MAY01-C64090_1.pep
LIRILGSLPSCPDQGIIREVLKFSLSPEVRSQDAMYALAVSKEGREVAWTWFKENWDLILKTYGSGFLITRFVSAVVSPFASFEKVKEVEEFFANRSMPSIARTLKQSLERVNINANWVKSIQAEQNLGEAIQELAYRKY

SEQ ID NO: 66585 - protein, 269 aa, Gossypium hirsutum
  unsure (1)..(269): unsure at all Xaa locations
  Clone ID: GOSHI-09MAY01-C64270_1.pep
LVINPGLIQVPLLDCGGCGATVRILDFLTVPRPARVAPNNIDIPDTSKKRGLTRGGGAARGISGWVAADDPEKEPTEDRDEVGTTDERNLVPKTDVDLNLTMAGGLSXSSQLGRAASSRNMNDADMGRDLVIGQPSGSEVGDRAASYESRGPSPRKRSLEIGASSDDRPQLCTQQADSVEETVIDRDGDKFNDCRQYSAGPSKRARDSDFFDTYCSPYPRDSSEAGPSHSVGFETHGDGGNRVALFRQGSNQVIEIPSVRDSMRASSVI

SEQ ID NO: 66586 - protein, 205 aa, Gossypium hirsutum
  Clone ID: GOSHI-09MAY01-C65990_1.pep
MEGLVSMKTASGISFHSIPSPNQRPNFFLRRSSMDLQHRRFHFPSIRAQQSGTIFPGKEGEEDSLKVREWEVGMLQNEVAASQGIRIRRRPPSGPPLHYVGPFEFRLQNEGNTPRNILEEIVWHKDVEVSQMKEKKPLLSLKKVIENAPPTRDFVGSLKAAHLRTGLPGLIAEVKKASPSRGILRENFDPVEIARAYEKGGAACL

SEQ ID NO: 66587 - protein, 211 aa, Gossypium hirsutum
  unsure (1)..(211): unsure at all Xaa locations
  Clone ID: GOSHI-09MAY01-C65950_2.pep
PRRPGGYFACFFFGYAIIRRAMLGSGGVSDGYEVGSKRQRMMESTPYFAVNSGMGGYQPYGYGGGYQPPSFPVVRLRGXLPFNCTDIDIFKFFAGLDIVDVLLVNKNGRFSGEAFVLFAGSMQVEFALQRDRQNMGRRYVEVFRCKRQDYYHAVAAEVNYEGIYDNDFHGSPPPSRAKRFNDKDQMEYTEILKLRGLPFSVKKPEIVEFFA

SEQ ID NO: 66588 - protein, 254 aa, Gossypium hirsutum
  Clone ID: GOSHI-09MAY01-C65950_1.pep
EIFWGVACDNRRSKTPYTTPCTDPEVNSGMGGYQPYGYGGGYQPPSFPVVRLRGLPFNCTDIDIFKFFAGLDIVDVLLVNKNGRFSGEAFVLFAGSMQVEFAFAKGSTNMGRRYVEIFRCKRQDYYHAVAAEVNYEGIYDNDFHGSPPPSRAKRFNDKDQMEYTEILKLRGLPFSVKKPEIVEFFADFKIVEDRIHIACRPDGKATGEAYVEFASVEEAKRAMCKDKMMIGSRYVELFPSTPDEARRAESRSRQ

SEQ ID NO: 66589 - protein, 100 aa, Gossypium hirsutum
  unsure (1)..(100): unsure at all Xaa locations
  Clone ID: LIB3272-024-P1-K1-H8.pep
NFLQFSSYNRRSKTTYTAPCTDPEDFKIVEDRIHIACRPDGKATGEAYVEFTSVEEAKRAMCRDRMMIGVSVXEWFLSTPDEARRAESRSRQGRGPVIWV

SEQ ID NO: 66590 - protein, 126 aa, Gossypium hirsutum
  Clone ID: GOSHI-09MAY01-C65490_1.pep
SQSARFACVAGVRIPSFKDEFTFDQRLEESRDIIAKYPNRVPVIVERYSKADLPEMEKKKYLVPRDMSVGQFIHILSLRLRLSPGKALFVFVKNTLPQTATLMDSLYESFKEDDGFLYMCYSSEKT

SEQ ID NO: 66591 - protein, 142 aa, Gossypium hirsutum
  Clone ID: GOSHI-09MAY01-C65440_1.pep
MGIYLSTPKTEKFSEDGENDRVRYGLSSMQGWRATMEDAHAAYPDLDASTSFFGVYDGHGGKVVAKFCAKYLPQQVLKHEAYATGDIGASVHRAFFRLLNLITRVLCLFFAIFHCCGSQQLKSDAGMIWRISCLIPASNNVY

SEQ ID NO: 66592 - protein, 52 aa, Gossypium hirsutum
  Clone ID: LIB3585-009-P1-K1-G3.pep
MGIYLSTPKTEKFSEDGENDRVRYGLSSMQGWRAAMEDAHAAYPDLDESTSV

SEQ ID NO: 66593 - protein, 152 aa, Gossypium hirsutum
  Clone ID: GOSHI-09MAY01-C65380_1.pep
MLTSKTLIQPPSIHLQNPNLKPSPSIPKRPTFSSLPFHRSFLLSFSHNLTPRNLSRHCISPGQELSYENEDLVEEQNEEEEVEFSRKFQEKGFSNLNIWNQMKEIVMLTGPVTGLWLCGPLMSLIDTAVIDQGNSIELAALSPGTVVCDYTG

SEQ ID NO: 66594 - protein, 204 aa, Gossypium hirsutum
  unsure (1)..(204): unsure at all Xaa locations
  Clone ID: GOSHI-09MAY01-C65300_1.pep
MACTHDHSCEXHDCSSNGSLYKHIDLAKVTALNEANPGSVKSVFKAWEERLNSSGERLESNEGDPELLVYIPFTSDVKIKSISVVGGADGTSPSKLRVFINREGIDFSDAQSMQPVQEWELVENLQGVLEYQTRYSKFQSVANITLHFPESFGGDTTQIHYIGFKGEATQLKRDVVATIVYEITPNPSDHKTRAETGGGLSHVE

SEQ ID NO: 66595 - protein, 121 aa, Gossypium hirsutum
  Clone ID: GOSHI-09MAY01-C65330_1.pep
TFFCSGRKKREKIMETKSLAMVVVITVSVMWGVEMATAELSAAQCKQERNLAITACKPVVYGKLPSPECCQRVRVTHLECVCPIITPKIAALIDVNRAIRLIQGCGRSVPRHYKCGSITTP

SEQ ID NO: 66596 - protein, 176 aa, Gossypium hirsutum
  Clone ID: GOSHI-09MAY01-C65220_1.pep
GMEGEEFAVGCFLSIKTTLGDEFEGQIISFDRLSNILVLQEGLESGPRRNIRLLKANHIKEFSLLRQDEDPLDVKKCFLDLTSLQAREDSAIRQAEADSERFGVGVTSEAQTLFDALSKTLPVRWDKTVIVVMNEVRVSSPYLPESVSGGTPAANERVRKVLEFERKRMQTRGTSQ

SEQ ID NO: 66597 - protein, 133 aa, Gossypium hirsutum
  Clone ID: GOSHI-09MAY01-C66970_1.pep
GRVGTNTTILCGNLDLNVTEEVLKQFFLPLGEIVCVKIPATKGCGYVLFANRNSAEEAIRRMQGQMIGQQVVQITWGRIPTANQDLPGSWGAQIDPNQWNAYYGYGQGYDAYSYGATQDPSLYAYGAYAGYAQ

SEQ ID NO: 66598 - protein, 124 aa, Gossypium hirsutum
  Clone ID: GOSHI-09MAY01-C66860_1.pep
QQEEGLEGTGLDLPPNKHGNLKSASSDENLKHILLRVKTSKTPTVINYGASWCGVCSQILPAFCKLSNQFPNLSFVYADIDECPETTQHIRYTPTFHFYRDGERVDEMFGAGEERLHDRLWLHS

SEQ ID NO: 66599 - protein, 127 aa, Gossypium hirsutum
  unsure (1)..(127): unsure at all Xaa locations
  Clone ID: LIB3272-037-P1-K1-F8.pep
MEDSGDSIRGKGLEGTGLDLPPNKHGNLKSASSDENLKHILLRVKTSKTPVRXVCSQILPAFCKLSNQFPNLSFVYADIDECPETTQHIRDTSTFHFYRDGERVDEMFGAGEERLHDRLWYIPEQPH

SEQ ID NO: 66600 - protein, 115 aa, Gossypium hirsutum
  Clone ID: LIB3493-037-P1-M1-A11.pep
EFLSPKFWRKPEGRFSTSRLSSSGRMLSLNAAHNIPDKDSRAETYIPAVSQRHQHQGCGGFIFPVADGCNGITDNSGSSNRLSKNTIQNAERVQLGNGSDPDGTTLVRCTAPMKP

SEQ ID NO: 66601 - protein, 97 aa, Gossypium hirsutum
  Clone ID: LIB3272-032-P1-K1-H12.pep
SCNRPNPFASLQLDSLCFIIRDICLLALRLVLEIALELKRSASKVSLVQYNELKSSHQDRYHFQAEPSQHFEWYSLTIYLRTLNYQLYRCNHQPLEI

SEQ ID NO: 66602 - protein, 71 aa, Gossypium hirsutum
  Clone ID: uC-gsflmaxxa027f12b1.pep
RINSKKIKGMKWRVALTGNKNQSTYLVFFTHTFEFKETDPRLRLITIFYYFVFPFIFFIFLKKIHLKKSGT

SEQ ID NO: 66603 - protein, 114 aa, Gossypium hirsutum
  Clone ID: LIB3272-031-P1-K1-H5.pep
GFETLVAAIVTAPPQAVVGTLRAWLSSPCLKRPQRPSLLSPKGAKERISPLPIRSDPDDEGEPSDDENHRRLRCQRGARRWQLAREEARRHAWWPMVGQKFGSSILGGLAAACF

SEQ ID NO: 66604 - protein, 104 aa, Gossypium hirsutum
  unsure (1)..(104): unsure at all Xaa locations
  Clone ID: GOSHI-09MAY01-C66070_1.pep
MSRGWSYGGGQSSLGYLFGADERPSAPTVTPPIQPPYGIDITPENPPPQYKPSSEQQTEKNTTNNYQRAKGQNAGNFITDRPSTKVKSXVPGGDSSPGYLFGDK

SEQ ID NO: 66605 - protein, 85 aa, Gossypium hirsutum
  Clone ID: GOSHI-09MAY01-C66000_1.pep
SGEVQFQGIISKQAMLLPQLLRERVDPNQLITIDSQAGLSQAPYRRFNITICNYDARSSSLGEMRWRVWEIISIRVGIISALYDP

SEQ ID NO: 66606 - protein, 114 aa, Gossypium hirsutum
  Clone ID: GOSHI-09MAY01-C66370_1.pep
QRFLGKKTVDRRHGKRPLPSETSEEKSKGPDEFAAAATSWTESADMTAMVTALTQVMGSDEQLSFQQSPKPSSVQCVKDGIVNIFQPVVLLLSVVFRDINLFLCRAVMYLSFSS

SEQ ID NO: 66607 - protein, 138 aa, Gossypium hirsutum
  Clone ID: GOSHI-09MAY01-C67950_1.pep
TGHSPSTMTAHDEQFEGGSGEVDSSTRLIKKRKLLDGSYGCLPLLMDTANLGNFNRYSEYEDDAYSSCAKGQNPGSGDTDSSSSNKRMRKDKIRETVTVLRSIIPGGEGKDAVAVLDEAINYLKSLKLKAKTLGLNTL

SEQ ID NO: 66608 - protein, 112 aa, Gossypium hirsutum
  Clone ID: GOSHI-09MAY01-C67910_1.pep
MEEGCEILQLYEIPYSDLLLLSSSSASCSHYQERMIMENLGPTGPGLFAITNVPDASLLRRKLLPLARKLALLSPDDRKRILRDHNLGSDVPLKDPDRNVFSVAMQLKYAQG

SEQ ID NO: 66609 - protein, 113 aa, Gossypium hirsutum
  Clone ID: GOSHI-09MAY01-C67810_1.pep
MAHTCISTSASSLRLTSLPFSSKSSTNLYSHNLSLPFHPLPPRKLKKLFSNQKNARGSQPKAVYTGEFWAPEKSSRHGIWSIRDDLQIPSSPYFPAYAQGQGPPPMVQERFQS

SEQ ID NO: 66610 - protein, 181 aa, Gossypium hirsutum
  Clone ID: GOSHI-09MAY01-C67580_1.pep
MAFLKWVLLIFTLHSFMPTPISSNLSLTKEALAQIPLNFLEFSKKPEIMDWMVNIRRKIHENRELGYEEFETSKLIRAELDLMGIPYKYPIAVTGVVGYIGTGKPPFVALRADMDALAMEELVEWEHKSKVPGKMHACGHDAHVAMLLGAAKMLQHNQNDLQGTVVLIFQPAEEGGGGAKI

SEQ ID NO: 66611 - protein, 125 aa, Gossypium hirsutum
  unsure (1)..(125): unsure at all Xaa locations
  Clone ID: GOSHI-09MAY01-C67410_1.pep
MALFGSPGKLSGLLLRIGQCFSAAASIGFMVSAHGFFXSTAFCYLIASMGIQVLWSFGLACLDFHALRSKTNLHNPVLVSLFVIGDWVTATLSLAAACSSAGVTVLYSRDLGYCRSPQIPCSHFK

SEQ ID NO: 66612 - protein, 95 aa, Gossypium hirsutum
  Clone ID: LIB3272-049-P1-K1-G4.pep
KCLISASNGRNEVHMEIHYPKAFKGYSITTTRRRSRTSVSDARFNPWFYFHACNDRFKLPKFEVHRGSCHIACQFKSICFYTVRIKGDNTVLLIG

SEQ ID NO: 66613 - protein, 57 aa, Gossypium hirsutum
  Clone ID: LIB3272-049-P1-K1-F6.pep
QDSKHGSFSRLAMIDLSYPSSRFTEDLSTWLASSNLYVFTLAELKAITQCFSSANFL

SEQ ID NO: 66614 - protein, 309 aa, Gossypium hirsutum
  Clone ID: GOSHI-09MAY01-C67160_1.pep
VFKRCSKLGKKTPSRFELLSVVRKHSNLLGKTTVDEEDATDVEMDGKFWHDVFDLYFVRGKESRGRQDDDLIFFVRKWKGHGFNESEESVAPYFVRRWAPELDKLVGDSLSVVDWRRSFYLNMIAHTSYSVTVASCSHNVLRNHQVGQDTPLSAIYKVVKTVYASPSRVNFHLDSKKEVETTPAYPDICFAIDDFDSTFDAVVLTETEHCYCVLLNALDGAAFPSEKDTNDSRSSNKVPLRVDTNSMKTKNSKLTLFSGFVSYQMVRDAYDAGSSGFGSLLSMGHSSGKKDRLYMKGPEGRGEIEVAVL

SEQ ID NO: 66615 - protein, 123 aa, Gossypium hirsutum
  unsure (1)..(123): unsure at all Xaa locations
  Clone ID: AI054660.1.pep
GQDTPLSAIYKVVKTVYASPSRVNFHLDSKKASLSTSRKSWXIEIFFNSLACSLAWIQEVETTPAYPDICFAIDDFDFTFDAVVLTEQIIAIVFFLMRLMGQLFLVKRYKCSSSRTKYHESRY

SEQ ID NO: 66616 - protein, 110 aa, Gossypium hirsutum
  unsure (1)..(110): unsure at all Xaa locations
  Clone ID: uC-gsflnu33B131d11b1.pep
MVHYRSALEPRCRFQVLTETDHCYCVLVNALDGEAFPSEKDTNDSSSSNKVPLRVDTNSMKTKNSKLTLFSGFVSYQMVRDAYDVXSSGLGXSLLSMGHSSGKKDRLCMK

SEQ ID NO: 66617 - protein, 243 aa, Gossypium hirsutum
  unsure (1)..(243): unsure at all Xaa locations
  Clone ID: GOSHI-09MAY01-C67060_1.pep
SSSKASFFSGENSSEKVGVMETGALIENTAKTGGPGLVLGGKLMDQIEWLPVSIGKLKDVSELDLSENRIMALPPSIGGLQALTKLDLHSNQLINLPDSIGELMNLTELDLRANRLKSLPATFGNLINLMNLDLSSNEFTHLPETIGNLTSLRRLIVETNELEELPYTIGNCSLFLELRLDFNQIKALPEAVGKLERLEVLTAHYNRLKGLXTTMGNLSYLKELLVRFSWFVVYFWRTSFFFS

SEQ ID NO: 66618 - protein, 303 aa, Gossypium hirsutum
  unsure (1)..(303): unsure at all Xaa locations
  Clone ID: GOSHI-09MAY01-C67280_1.pep
GAWAAAWADAWVQPLADAAKLFLAAKYKDVTKFQDEVLNLPLAGIEAVFSSDDLQVASEDAVYDFLLKWARTHYPKLEERRGVFATRLGRLIRPPLRTCRKLKKVLTCNDFDAEICXKMVLEALFFKAETPQNQRALASEEANAPFRHFLERAYKYRPVKVLEFEKPKQQCVVYLDLKREECAHLFPGGKVYSQAFHLGGQGFFLXSAHCHMDQQSSFHCFGLFLGMQEKGAVTFAVDYEFAARSKPTEDYVSKYKGNYTFTGXKAIGYRNLFGIPWTTFMADDSNFFINGVLHLRAELTVRQ

SEQ ID NO: 66619 - protein, 122 aa, Gossypium hirsutum
  unsure (1)..(122): unsure at all Xaa locations
  Clone ID: GOSHI-09MAY01-C60810_1.pep
PETPIDWPTRMRIAKGVTRGLMYLHTQENIIHGNLTSSNVLLDEDTSAKISDFGLSRLMTAAANANVIATAGALGYRAPEXSKLKKANTKTDAYSPGVIILELLTGKSPGEAMNGVDLPQWV

SEQ ID NO: 66620 - protein, 137 aa, Gossypium hirsutum
  Clone ID: GOSHI-09MAY01-C60540_1.pep
MAVEKVEKPDTKEKKPEAKKADAGGKVKKGNLKAKKPKKGKPHCSRNPVLVRGIGRYSRSAMYSRKAMYKRKYSAAKSKVEKKKKEKVLATLTKPVGGDKNGGTRVVKLRKMPRYYPTEDVPRKLLSHGKKPFNQHV

SEQ ID NO: 66621 - protein, 94 aa, Gossypium hirsutum
  Clone ID: GOSHI-09MAY01-C60570_1.pep
KFRGNSFLNFCYFSLLSSRILLLLPLCSVFLVLCCVVYSCLLQVRPGGEEARTRGGVARPGGGPDCCGAGCCVATLGFLILFGVGPMIGGLGVI

SEQ ID NO: 66622 - protein, 115 aa, Gossypium hirsutum
  Clone ID: GOSHI-09MAY01-C60430_4.pep
RVILVCNHACRTVQSSQVVAPRAEPDDNTMDMLLVHGSGRLRLMRFFVLLQMGKHLSLPYVEYVKVKSVKIKAGKCTHNGCGIDGEYFPLNGEVVSSLLPEQCRLIGHFRGHHDV

SEQ ID NO: 66623 - protein, 251 aa, Gossypium hirsutum
  Clone ID: GOSHI-09MAY01-C60430_2.pep
IVRGLDPKAKRLSFGRNNVTAEPEVIHPQLPPSSTPNWPRTRSKSRTDKGWSGSTAAHDPSRCSWGNAATNDREGISSTLSDPGPIWDAEPKWDTEANWDVENPIELPGPSDDVDSGINKEVVPRLEDKWVLTKGPFLGIIVCNHACRTVQSSQVVAPRAEHDDNTMDMLLVHGSGRLKLMRFFLLLQMGKHLSLPYVEYVKVKSVKIKAGKHTHNGCGIDGEFFPLNGQVASSLLPEQCRLIGRFPDRHV

SEQ ID NO: 66624 - protein, 224 aa, Gossypium hirsutum
  Clone ID: GOSHI-09MAY01-C60430_1.pep
VAWADAWAGLIHFGMTVSYYGFVSDVLKLSEKYQKRFGPLRYFVAGFFKFLCLPTYNYEVEYLPAEKEDREGKTSADREVVDMSDLYTDVIRRSYIDGIPRASSLSSIDSIMTPSRMSGGEMDTSSNMHASTEPSEYVRGLDPKTKRLSSSRSNVTAEPEVIHPQLPLSSTLNWPRTRSKSRTDKGWSGLTAAHDPSRCPWGNAATNDREDISPTLSHPGQLGC

SEQ ID NO: 66625 - protein, 189 aa, Gossypium hirsutum
  Clone ID: LIB3829-006-Q6-K6-F12.pep
RRGSKSGRGRSSKVFHGIVEPIFKLAGFKLEVVKTTSAGHAKKLASTVDISTCPDGIICVGGDGIINEVLNGLLSRDNQKEGISIPIGIIPAGSDNSLVWTVLGVRDPVSAAISIVKGGLTATDVFAVEWIQTGIIHFGMTVSYYGFVSDVLKLSEKYQKRFGPLRYFVAGFFKFLCLPTYNYEVEYLP

SEQ ID NO: 66626 - protein, 227 aa, Gossypium hirsutum
  Clone ID: GOSHI-09MAY01-C60790_1.pep
EEPKSPESDVTSMSFEETKLTLGLPGEGRSSAGAVKCSAKRGFVETVVDLKVGSSGNCMPGGRDDTTTVIDSGAGKPPPAKEQVVGWPPVRSSRKKAINERFRYVKVAMDGAPFLRKVNLQCYSSYNQLLKDFDNLFDCSNKEESKLMDVVKRMEYVPTYEDKDDDWMLVGDVPWKMFVESCKRIRLMKCSDPTVFTLASKGCSSSSSQNVESQAEFIVSVVIYIYV

SEQ ID NO: 66627 - protein, 123 aa, Gossypium hirsutum
  unsure (1)..(123): unsure at all Xaa locations
  Clone ID: GOSHI-09MAY01-C60630_1.pep
MPRGRPPIMDLKTAYDAELSGSRIQHELWPLDEIAPGKAKFPCWLVWTPLPVVSWLAPXIGHVGICREAGPILDCSGSYFANVADFAFGAAARYVQLDREKCCFPPNLAGHKCKHGYQHEEFG

SEQ ID NO: 66628 - protein, 157 aa, Gossypium hirsutum
  Clone ID: GOSHI-09MAY01-C60150_1.pep
IMTVLIKRNTTIPTKQTQTFTTYSDNQPGVLIQVYEGERAMTKDNNLLGKFELTGIPPAPRGVPQIEVTFDIDANGILNVSAVDKSTGKENKITITNDKGRLSKEDIERMVQEAEKYKAEDEKQRDKVSSKNSLESYAFNMKATVEDEKLQSKINDE

SEQ ID NO: 66629 - protein, 271 aa, Gossypium hirsutum
  Clone ID: GOSHI-09MAY01-C61470_1.pep
MLDQTSECSSYGLSRRETADLDNQMLELWETTDQDVNIALKVGRAQKVVIAPTGNQRIGAAKARKGKSLSTESLVKELGVDRESSKRFTEPYQEGSKRKIIERLDSDAQKLANLQITVQDLKRKVDITEAGKMVIGIEYGTVKQQLEEAEEAIMQLFDVNRKLTTHVEDRSRSLDGKPALESDESGSFRRRRVSEQVRRGSEKIVRLQLEVQKIQFMLLILDKKESKGQTRIMERKTRVVLRDYLYGGIRKNHKRKKATFCACAKPPTKGD

SEQ ID NO: 66630 - protein, 66 aa, Gossypium hirsutum
  Clone ID: LIB3196-031-P1-M1-E8.pep
CQMVNNISSPPQCYPTQPITTTAAAIGTAATFTPTNNIPLLDTSAAFLFYQRVTSADFFQFQVHSI

SEQ ID NO: 66631 - protein, 84 aa, Gossypium hirsutum
  Clone ID: LIB3196-031-P1-M1-E9.pep
FDNMFNYLSLKYLIMFQMVNNISSPPQCYPTQPITTTAAAIGTAATFTPTNNIPLLDTSAAFLFHQGVTSAVFSQFQVHSILGF

SEQ ID NO: 66632 - protein, 82 aa, Gossypium hirsutum
  Clone ID: AI055296.1.pep
HISAKIASVVGTFGRVLECWDRQNREYVAIKVVRSIRKYRDAAMIEVDVLEHLAKNDKGTSHFVQIRNWFDYRNHICIVSIQ

SEQ ID NO: 66633 - protein, 193 aa, Gossypium hirsutum
  unsure (1)..(193): unsure at all Xaa locations
  Clone ID: LIB3825-005-Q1-K6-H11.pep
LVVAHFSQIASVVGTFGRVLECWDGQNREYVAIKVVRSIRXDAAMIEVDVLEHLAKNDKGTSHFVQIRNWFDYCNHICIVFERLGPSLFDFLKRNKYCPFPVDLVAYMHDLRLIHTDLKPENILLVSSEYVKLPGCKRSSSDETHFRCLPKSSAIKLIDFGSTAFDNQNHSSIVSTRHYRAPEIILGLGWSYP

SEQ ID NO: 66634 - protein, 79 aa, Gossypium hirsutum
  Clone ID: LIB3584-027-P1-K1-H12.pep
MLEMVQSSSDETHLWCLPKSSAIKLIDFGSTAFDNQNHSSIVSTRHYRAPEIILGNEYSVSLCLFGVLFYFPGIILVSS

SEQ ID NO: 66635 - protein, 82 aa, Gossypium hirsutum
  Clone ID: LIB3196-022-P1-M1-F7.pep
MKSTRAKYNQGIITDSTISSKLSISISSPKKIHGKPRRRQTPFSLKEQANSTLQPLLSYQNVKLIFLLEIKSSQYYNFQMHD

SEQ ID NO: 66636 - protein, 92 aa, Gossypium hirsutum
  Clone ID: GOSHI-09MAY01-C61390_1.pep
MSILKVHAREIFDSRGNPTVEVDLFTSKGLFRAAVPSGASTGIYEALELRDNDKTRYMGKGVSKAVEHINKTIAPALVSKKLNVTEQEKIDK

SEQ ID NO: 66637 - protein, 53 aa, Gossypium hirsutum
  Clone ID: GOSHI-09MAY01-C61330_1.pep
TLLSSISTLMAHFASLGSLYRFGSHLRRTPSSTTTCCSPCRVCGTDRGYRGGA

SEQ ID NO: 66638 - protein, 230 aa, Gossypium hirsutum
  unsure (1)..(230): unsure at all Xaa locations
  Clone ID: GOSHI-09MAY01-C62850_1.pep
PRPINCPLLTSLDASFCSQLKDDCLSATTASCPLIESLILMSCPSIGSDGLFSLRWLPNLTTLDLSYTFLTNLQPVFESCLQLKVLKLQACKYLADSSLEPLYKEGALRELRDLDLSYGTLCQSAIEELLAYCTHLTHVSLNGCINMHDLNWGSTGGGFESLNGSSMFPFENMNDSIEQPNRLLQNLNCVGCPXNIREVLIPPAARCFHLSSLNLSLSVNLKEVDLACYS

SEQ ID NO: 66639 - protein, 148 aa, Gossypium hirsutum
  Clone ID: GOSHI-09MAY01-C62450_1.pep
AEKGAYSLRIKRYRPARVPSTSRFLNPYVVCFIVVAGVVILAVTIALLVYFLAFDQKSYFYRSSCQLLNVVYISQLNSPATHEYTTLSGRIESLITRTFKESNLRNQFMRAHVVKLSQDGSGVRADVVMKFRFTRNNNGASMKSRIES

SEQ ID NO: 66640 - protein, 128 aa, Gossypium hirsutum
  Clone ID: GOSHI-09MAY01-C62780_1.pep
MDNIVDSLNKAYQEFVAAAANVLETKGSSAAQKTESTDTALESFKQKWETFGLACDQAEEFVESIKQRIGSECLVDEATGNSSERLTGLPPISAVRLEQMSKAVRWLVIELQNGSGTAARPPIDTFRW

SEQ ID NO: 66641 - protein, 175 aa, Gossypium hirsutum
  Clone ID: GOSHI-09MAY01-C62710_1.pep
MGIVGEEPVLSRLDRVDNMVRQLEEMRGSHGNGNYNRSPSPRSSSASTPSSGTLGSTCTEGHPSSIDFSPTAKSLEKYCRPIDHVMVETQLKGTLLQRLDQVEDRLLKLCVQLEEELEEEKKREAVHVEKKGPKKGIKQFVKQCVKGKHSKQPKGTEWNGKAKSSLSLSLGSNIK

SEQ ID NO: 66642 - protein, 115 aa, Gossypium hirsutum
  Clone ID: LIB3196-037-P1-M1-A11.pep
MSSALEMSLDDLIKRNRKPRSGKSRGRGRGSGPGPARRFPNRGANRSAPYAPAKVLETTRQQDMFSDKGAALQGLAGRNSGIETGTKLYISNLDYGVSNDDIKELVSEVGDLKRF

SEQ ID NO: 66643 - protein, 98 aa, Gossypium hirsutum
  Clone ID: LIB3272-047-P1-K1-G8.pep
GCIFLCSNSKKKMSSALEMSLDDLIKRNRESRSASSRGQGLGFATAPDRRFHGGRASPPALSACCTAPVTTWSALAPSVPRLASRFPPFLLFFLREKS

SEQ ID NO: 66644 - protein, 151 aa, Gossypium hirsutum
  Clone ID: GOSHI-09MAY01-C62390_1.pep
ISPDPPVTSYAPSDVPSGIALLLTIPFAFFLPELIFGFLVWTLVAATHVVFPLLQGWVMYVSITSFLISLMFLLSYLFGFYKIFESWRVLDSLYHGTTGILYMSAAVLQAHATIVSEIMDPRIYYINTAASFFAFITTLLYILHAFSIYYH

SEQ ID NO: 66645 - protein, 131 aa, Gossypium hirsutum
  Clone ID: GOSHI-09MAY01-C62360_1.pep
EDIKMFVGILEIREFVVLVERACKAEELRKEKQKVDVGTGEFRKRSSGKSLQQASKKFRDDVGRSRGTSGLFRRDRDRPPVGTRGTSVASVGKERRDRTECRHCGRWHSGSCRFHDRSCYKCRSVDHFIKD

SEQ ID NO: 66646 - protein, 127 aa, Gossypium hirsutum
  Clone ID: GOSHI-09MAY01-C63910_1.pep
MPGVLLRCAPGSGALPGGAGAARRGRRPAGSSIPPSPVDLAAESGSRAPGTCSGQAAARRSLWTPFLPFSSSWRTRKLVGVFGGTGAQGGSVARTLLEDGTFKVRVVTRNPGKKAAKELRLQGAEVV

SEQ ID NO: 66647 - protein, 44 aa, Gossypium hirsutum
  Clone ID: GOSHI-09MAY01-C63510_1.pep
LEFKHKSRIKQSHFRLTSHIQTAWFSLLYDTISMHIRLPVIRID

SEQ ID NO: 66648 - protein, 44 aa, Gossypium hirsutum
  Clone ID: GOSHI-09MAY01-C63530_1.pep
MAYSFSLFYAHAPYFIFFLHTSHGPHEPNMFPPIAWPATSSNFG

SEQ ID NO: 66649 - protein, 194 aa, Gossypium hirsutum
  unsure (1)..(194): unsure at all Xaa locations
  Clone ID: LIB3829-029-Q6-K6-F6.pep
AEGYNIAGGEXQFQTEVETISLAVHRNLLRLSGFCTTENERLLVYPYMPNGSVASRLRDNIHGRPALDWTRRKRIALGTARGLVYLHEQCDPKIIHRDVKAANILLDEDFEAVVGDFGLAKLLDHRDSHVTTAVRGTVGHIAPEYLSTGQSSEKTDVFGFGILLLELITGQKALDFGRAVNQKGVMLDWVKKLH

SEQ ID NO: 66650 - protein, 102 aa, Gossypium hirsutum
  Clone ID: LIB3196-055-P1-M1-A12.pep
ISELLFEVINFFFFSYSVSQSDNIHGRPALDWTRRKRIALGTARGLVYLHEQCDPKIIHRDVKAANILLDEDFEAVVGDFGLAKLLDHRDSHVTTAVRGTVG

SEQ ID NO: 66651 - protein, 81 aa, Gossypium hirsutum
  Clone ID: GOSHI-09MAY01-C63400_1.pep
VECRWFSTSCLRLVLPPLICFFSDALTLKVFVLFVQSQRLPSYFLRNMIFISSLKEDRLDQTPFVFYFFPIRNVLGLYMFV

SEQ ID NO: 66652 - protein, 262 aa, Gossypium hirsutum
  Clone ID: GOSHI-09MAY01-C63700_1.pep
KIRKPYTITKSRESWTEPEHDKFLEALQLFDRDWKKIEAFVGSKTVIQIRSHAQKYFLKVQKNGTNEHLPPPRPKRKAAHPYPLKASKNVHVQPQASGSLQSSNALVDTGCVLRSDPSLMLMNPVTAASSWTHNEQTISFSQAKKGSGMANKSRGSSMSTPQRRQIGEMTNQGNHGHALRVLPDFVQVYSFIGSVFDPNTTGHLQKLKKMDPIDIETVLLLMRNLSINLTSPDFEDHRKLLSSYEIDTETNYHGGACKAVGT

SEQ ID NO: 66653 - protein, 114 aa, Gossypium hirsutum
  Clone ID: LIB3828-029-Q6-N6-C8.pep
IHKTLYCTKYPLQKKNQKDKHCTLSLPFFFLSFCCTQFSHSVYTRSQNGGNYSENLQPVILTNNKYTNGTSYSICRFLILELLGMKIESILIMYEIKDGMIKDEIKSKCHHLPY

SEQ ID NO: 66654 - protein, 229 aa, Gossypium hirsutum
  Clone ID: GOSHI-09MAY01-C63660_1.pep
QRTSIYRGVTRHRWTGRYEAHLWDNSCRREGQARKGRQVYLGGYDKEEKAARAYDLAALKYWGPTATTNFPISDYSKELEEMKHATKQEFIASLRRKSSGFSRGASIYRGVTRHHQQGRWQARIGRVAGNKDLYLGTFATEEEAAEAYDIAAIKFRGVNAVTNFEMSRYDVKAIAQSSLPIGGAAKRLKLSLESEPKPIVNQKQQPPPPRCSSNSNLISFAPMKQPVST

SEQ ID NO: 66655 - protein, 49 aa, Gossypium hirsutum
  Clone ID: AI054834.1.pep
IVSTGQTYDRSSITRWIEEGHCTCPKTGQMLDHTRLVSNRALRNLIVQW

SEQ ID NO: 66656 - protein, 131 aa, Gossypium hirsutum
  unsure (1)..(131): unsure at all Xaa locations
  Clone ID: LIB3196-053-P1-M1-C4.pep
LELMRDPVIVSTGQTYDRSSITRWIEEGHCTCPKTGQMLDHTRLVPNRALRNLIVQWCTAHGVPYDPPETRDASAESFATACPIKAXVEANRATATLLIKQLADGSQGAQTIASREIRLLTKTGKENRAFI

SEQ ID NO: 66657 - protein, 207 aa, Gossypium hirsutum
  unsure (1)..(207): unsure at all Xaa locations
  Clone ID: GOSHI-09MAY01-C18910_1.pep
SLNWPPPISCRFTGEFVYGFTSQDHKVPEPVKKDFYSDNGSYMYQQAYGYMPYGAYSMPGSPLPLMGHDGQLHALQEYYYPSTYYQPXSKRSQTDASQVVVSTVNADDQASLSTETNTGNLSTVESGAGLSGNTGSGSQKSTFKVSSLNPNASYKRESFPTGNLSEGHQNSRFSYEGVQPTIPCLDMSVSSNGQSKHTANNGFSSYA

SEQ ID NO: 66658 - protein, 329 aa, Gossypium hirsutum
  Clone ID: GOSHI-09MAY01-C18900_2.pep
MGVDYYKILQVDKNAKDDDLKKAYRKLAMKWHPDKNPNNKKEAEAKFKQISEAYEVLSDPQKRAIYDQYGEEGLKGQVPPQDAGGPGGATFFQTGDGPNVFRFNPRNANDIFAEFFGYSSPFGGMGGSGMRGSSRSFGGMFGDDIFSSFGEGRPMSQNPRKPPPIENTLPCSLDDLYKGTTKKMKMSREIADASGKTLPVQEILTIDIKPGWKKGTKITFPEKGNEQPNTIPADLVFIIDEKPHSTFTRDGNDLVVTQKISLAEALTGYTVHLTTLDGRSLNIPINSVIHPNYEEVVPKEGMPIPKDPSKKGNLRIKFNIKFPTRLTAE

SEQ ID NO: 66659 - protein, 191 aa, Gossypium hirsutum
  Clone ID: GOSHI-09MAY01-C18900_1.pep
MFLNNIPIRDKIVTCLIMPTIFMAADGSLANKVVLKICLCCRKTLPVQEILTIDIKPGWKKGTKITFPEKGNEQPNTIPADLVFIVVVKPHSTFTRDGNDLVVTQKISLAEALTGYTVHLTTLDGRSLNIPINSVIHPNYEEVVPKEGMPIPKDPSKRGNLRIKFNIKFPTRLTAEQKSGIKKLLGPSGGL

SEQ ID NO: 66660 - protein, 56 aa, Gossypium hirsutum
  Clone ID: LIB3083-011-Q1-L1-D1.pep
RKLAMKWHPDKNPNDKMEAEAKFKQISEAYEVLSDPQKRAIYDQYGEEGLKCQVLL

SEQ ID NO: 66661 - protein, 146 aa, Gossypium hirsutum
  unsure (1)..(146): unsure at all Xaa locations
  Clone ID: GOSHI-09MAY01-C118568_1.pep
LASGALGSKGVRVIAIDLPGNGFSEKSRLEIEEGTNGSPARFKEVYSLIQDKGLFWAFDQMVETGELPYEEIKSRVLVKKNVKVIEIGSEEMGMVLGQVIGTXLGLAPVHLVLHDSAFLMAANWIAENSGFIXSITFIDAGLKPAL

SEQ ID NO: 66662 - protein, 96 aa, Gossypium hirsutum
  unsure (1)..(96): unsure at all Xaa locations
  Clone ID: uC-gsflmaxxa010d12b1.pep
MLETGELPYEEIKSKVTVKKSVEVIAIGTDKNVNDTKLGGYDMHVESEILANAWRLANNPSHWKNPEEVRPXERLFEEGSRVETCGNDFRYHPFGD

SEQ ID NO: 66663 - protein, 137 aa, Gossypium hirsutum
  Clone ID: GOSHI-09MAY01-C18570_1.pep
MVLDSELIARLWEFLGESDLNTTTTAIVRRRLEEDFGIDLTDRKKFIREQVDLYLQNQFENAEEQQQQEQNEDDQTDKIKSEETDGSDSDDEEEEPERAKNKKATSKKRLKGVNSEGKRRGSGFNKVSRLSPHLREL

SEQ ID NO: 66664 - protein, 109 aa, Gossypium hirsutum
  Clone ID: GOSHI-09MAY01-C18520_1.pep
FTQSIELPLHIRPNKVRTRELSLIYHYQGTNRSISRQTVASDIVVSLVSSLEASLSSTCPSLVGNGWSFLALIDKNGFLASTFSLSFAATSPIHPPTTADIFLTLFGIC

SEQ ID NO: 66665 - protein, 48 aa, Gossypium hirsutum
  Clone ID: GOSHI-09MAY01-C18490_1.pep
MIGKMVEGPKFTGLMGGTDNNDNNYYDFTQGFYQKLGEGTNMSIDSLQ

SEQ ID NO: 66666 - protein, 318 aa, Gossypium hirsutum
  Clone ID: GOSHI-09MAY01-C18480_1.pep
AKFSNVLSAFPQNLIQSSSSPAQSPQWKNSVRTTSSQVPSQSLPSTSSLKNISQQQGRPQQSPTQISFAANPKSPQGQQPLSSTPTPSPMMVGSPTTSLSRSAGGSPRTTGSSSTSNKAGQASGLASQQAKNSPTVPSQKSSPVGGSNVPSVLGNPHISSSSNMGAKPQVALQHQQHQKHALHQGQLFFPNAYMQAQAQHSPSSTTPATTASAYYVQRQQHTLPLGSSATSSTSMLSLRSPVTLANSGTTDPAKAVAAAVASNMKGGLASQGLINPAQFASPQSTGKSHQLVPGFPCVHAVPSAVQVKPAEQKQPAGE

SEQ ID NO: 66667 - protein, 132 aa, Gossypium hirsutum
  Clone ID: GOSHI-09MAY01-C18790_1.pep
LGKPFVRKNSEPFMNSFQKTSSMNENLSNGHPTDIDPNTMGGAGSLSMLVRTILIDKKPEEVPLLVESLLGKVVEEFEHRLASQYEVMKTTSTDITASNFNKPLSEPISGDKKMEEKNIKMMKKDDCSHRSI

SEQ ID NO: 66668 - protein, 216 aa, Gossypium hirsutum
  Clone ID: GOSHI-09MAY01-C18780_1.pep
MWGDKNVLSKVVNMFMLWLLFSSWVFSLVSATVSYDSKAIIINGRRRILLSGSIHYPRSTPQMWPDLIAKAKEGGLDVIQTYVFWNGHEPSPGNDYFEDRYDLVRFIKLVQQAGLYVHLRIGPYICAEWNFGGFPVWLKYVPGIAFRTDNEPFKAAMQKFTEKIVSMMKAEKLFETQGSPIIMSQIENEFGPVEWEIGDPGKAYTKWAAQMAVGLD

SEQ ID NO: 66669 - protein, 161 aa, Gossypium hirsutum
  Clone ID: GOSHI-09MAY01-C18770_1.pep
MSWLARSIANSLKLDDDDDDDRTNAALDPKPESDPNPNQASPSHSHSSSDPNTPRGVKEDLSELTKTLSRQFWGVASFFAPPPPESSEQQPDHAAEKEENSLRPPPSSDDTDESSDEALIAGIRSDLSEIGGRFKTGISKLSKYMNVSEFTKIASNFLSVW

SEQ ID NO: 66670 - protein, 76 aa, Gossypium hirsutum
  Clone ID: GOSHI-09MAY01-C18700_1.pep
ELCGSPGLHDFEPICYICLIYTFAVMSIYTRIFETHNVVINALNGGRTIAKHYEKNYHNTHVLHENSFGKKLWTDE

SEQ ID NO: 66671 - protein, 330 aa, Gossypium hirsutum
  unsure (1)..(330): unsure at all Xaa locations
  Clone ID: GOSHI-09MAY01-C18690_1.pep
SGISFSLFTELPQLRSLTSEELGCDARGYSRAGRDTLTWYCAILAGRLGPELDSMRETMRRVQETLSKSSELKAASEDEHSITAAVALKSKRLTLSWLDGETQKNYCFFYLNIESSYETCGPRRVPTDVPRLFIIRYERNATEDTFKVDKKAKSIWEFHQQEVDXPAAQLSVTYNGSAEVSRIIQWMSNIIEDGDSRKLPFYRVKTPELVPEDAEPFWSRGPQGLLSKSMGTKQKIQRTIIRIYDYLGDPRIGPALLLGALMSFGSIWLMRTQQNRSVQSSQPSQADNDVXKLKPRERRRERNASKRNLPPSITDFEPKDSYQTPLSDSD

SEQ ID NO: 66672 - protein, 83 aa, Gossypium hirsutum
  Clone ID: LIB3831-002-Q1-N6-A9.pep
LILSQRIHTRCHCRTRTKSLNKKNANPKVESMQCKWLPGDINTYMTRICVPLNEQAVKWTHLEAPLTLNRNAHAINFLPLHFA

SEQ ID NO: 66673 - protein, 79 aa, Gossypium hirsutum
  Clone ID: LIB3145-019-Q1-K1-C8.pep
ELIGRPTHAWTQTKSLNKKNANSKVQSMQGEWLPGDINTYMTRICVPLNEQAVKWTHLEAPLTLHRNAHAINFLPLHYA

SEQ ID NO: 66674 - protein, 145 aa, Gossypium hirsutum
  Clone ID: GOSHI-09MAY01-C18180_1.pep
DEEEACFFNMSSYEGETENRLALWEDFELRGFLPLAPAHSILDFSRKCSFVSDGNKERKARVKRILAAGKALANVIRVDQKTVCFDSKAKKFLIGVEPFADVTVSAGTPVVTNSEVHETPSENITNIGNVQPIPQPRTVVKKMTM

SEQ ID NO: 66675 - protein, 62 aa, Gossypium hirsutum
  Clone ID: LIB3197-053-Q1-M1-G8.pep
SLYSILTNIYGEMLEVHIPSISNISYIFRGGFMHHTIRYHRGSGAHCDICKWLNTNKKFLSF

SEQ ID NO: 66676 - protein, 209 aa, Gossypium hirsutum
  Clone ID: GOSHI-09MAY01-C18090_1.pep
NLYAHDLSLFDFTNFSDNPIIDHPSSFASFITTPPSDSDDVDAGNKPTSTATPRSPPKHRHDRTSPLPLGMDWSLPPRRWDGRDTVWPHNPQTGWSYCVTIPSWIILPTSGGSDIVVFYRVQVGIQSPEGVTTTREILRRFSDFLKLLSELKKIFPKKNLPPAPPKRILRVKNRTLLEERRCSLEDWMEKLLSDIDISRSVSVATFLEL

SEQ ID NO: 66677 - protein, 235 aa, Gossypium hirsutum
  Clone ID: GOSHI-09MAY01-C18040_1.pep
MLVEQLAEVDPSQMSCNEKLAFWINLYHALIMHACLAYGVPRNVNKLFSLMQKASYTVGGQSVSAVDIECTVLKMNPATYHPQIAAAVALQKFNSSNEQKKYTIDHAEPLLYFALSCGLHSSPAVRIFSPQNVNELLKRSMKDYIQATVGISNKGKLLVPKLLHCFAKGVIEDSLLPEWICRILTPQQASMVRECLSRNKWKLLGARSFCVLPFDSRFRFLFLLEDDGNSLSSTS

SEQ ID NO: 66678 - protein, 260 aa, Gossypium hirsutum
  Clone ID: GOSHI-09MAY01-C18070_1.pep
MAMVSEFLKQAWFIENEEQEYVQTVKSSKGGPGSAVSPYPTFNPSSDVAALHKAIMVKGVDEATIIDILTKRNNAQRQQIKAAYLQETGKPLDETLKKALMGHLEEVVLALLKTPAQFDADELRAAMKGLGTDEDTLIEILASRTNKEIRDINRVYREELKRDLAKDITSDTSGDFRNALLSLAKGDRSEDFGVNEDLADSDARALYEAGERRKGTDVNVFNTILTTRSYPHLRRVFQKYTKYSKHDMNKVLGPGSESDI

SEQ ID NO: 66679 - protein, 88 aa, Gossypium hirsutum
  Clone ID: LIB3196-056-P1-M1-F2.pep
MAMVSEFLMRAWFIENEEQEYVQTVKSSKGGPGSAVCPYPTFNPSSDVVDLHKAIMVKGVDEATIIDILTKRNNAQCKQIKAAYLQET

SEQ ID NO: 66680 - protein, 182 aa, Gossypium hirsutum
  unsure (1)..(182): unsure at all Xaa locations
  Clone ID: GOSHI-09MAY01-C118378_1.pep
HCVRNFFPKLSGSHLSRLFATLSKLPNNFTKIPSKYRPQAIRDAQQALTDYLHCSRYIPFVYAEHIAKNSFFSLSXIISGINFSTTSFNRNVLRFLRYHPIXNEYEFFFESIGIDYEEVGGLLPSKKFFFSEDETVLEAACALSGFGFPWNKLGKLYXEEILILKASSRELKARLFKIKEGV

SEQ ID NO: 66681 - protein, 183 aa, Gossypium hirsutum
  Clone ID: GOSHI-09MAY01-C18370_1.pep
KVRVSKISTRKKTVNTVMASEREVFGLSGPLHLTNIDWNNAHHRRSVAASLVEGVYILERDRQEKREGSQALAPPWWEFFHFKLVRKLIDDVDFCIFGAIYEYKPPSSHCNDSIVSIDGNPRYVIAFRGTITKPDSFTRDFELDIHIMRNGLHQTSRFEIGMQAVRNMVATVSASNVWLAGHS

SEQ ID NO: 66682 - protein, 131 aa, Gossypium hirsutum
  unsure (1)..(131): unsure at all Xaa locations
  Clone ID: GOSHI-09MAY01-C118328_1.pep
FLDQQHATADGLPVKVLGDGFDDEDMEDGEIESDPSSYRALSRKTLADVVDALLGAYYVERREHAPTHLRXCIGIQVESDPVDMDSIVNPSNVPESILRSVNFEALEGALNIEFKNRALLGEAITHASRPS

SEQ ID NO: 66683 - protein, 256 aa, Gossypium hirsutum
  Clone ID: GOSHI-09MAY01-C18330_1.pep
HGPPGTGKTTTVGEIVLQEVKRGSKILACAASNIAVDNIVERLATHRVKMVRLGHPARLLPQVLDSALDAKVLRGDNSSLANDIRKEMKALNGKLLKTKDRNTRREIQKELRTLSKEERKRQQLAVTDVIKDADVILTTWTGAFSRKLDNTTFDLIIIDEAAQALEIACWMALLKGSRCILAGDHLQLPPTIQSVEAERKGLGRTLFERLADLYGDEVMSMLTVQYRMHELIMNWSSKELYSSKIKAHSSVATHML

SEQ ID NO: 66684 - protein, 89 aa, Gossypium hirsutum
  Clone ID: GOSHI-09MAY01-C18290_1.pep
ENMPNSLQTTQGRYNPAKEKKAIKKKDDKFEHSFIIKANKCKQEDHEEKIKTPPIFHNNMKWVNPRIAKSINESRLKEKKKQKTYIRKY

SEQ ID NO: 66685 - protein, 163 aa, Gossypium hirsutum
  unsure (1)..(163): unsure at all Xaa locations
  Clone ID: GOSHI-09MAY01-C118248_1.pep
YVYGINGVFTDDFPAKPAIPFNYTGTPPPGLQTMNGTKVYRLAYNSTVQLVIQGNTIIAPESHPTHLHGSNFFVVGRGAGNFDPEKDPLKFNLVDPGERNTXSVPTAGWTALRFRADNPGVCFFHCPLEXVHTTWGLKMAFLVEKRKSPDESNRPASSDLQSV

SEQ ID NO: 66686 - protein, 157 aa, Gossypium hirsutum
  Clone ID: GOSHI-09MAY01-C18220_1.pep
MANLYVKAVPPADLNRNTEWFMYPGVWTTYILILFFSWLLVLSIFGCSPGMAWTVVNLAHFLVTYHFFHWKKGTPFAEDQGIYNGLTWWEQIDNGKQLTRNRKFLTVVPVVLYLIASHTTDYQHPMLFFNTLAVLVLVIAKFPNMHKVRIFGINADK

SEQ ID NO: 66687 - protein, 156 aa, Gossypium hirsutum
  Clone ID: AI731442.1.pep
MANLYVKAVPPADLNRNTEWFMYPGVWTTYILFLFFSWLLVLSIFGCSPGMAWTIVNLAHFLVTYHFFHWKKGTPFADDQGIYNGLTWWEQIDNGKQLTRNRKFLTVVPVVLYLIASHTTDYQHPMLFLNTLAVIILVVAKFPNMHKVRIFGINAE

SEQ ID NO: 66688 - protein, 76 aa, Gossypium hirsutum
  Clone ID: uC-gsflmaxxa094h08b1.pep
CVGDLLNQRRQVSLSPRSEQLISPARKAIHTAPSPLLKMGISLCIEHSEGLMSFFRFRGEFSDCTLRSSPLIMMKE

SEQ ID NO: 66689 - protein, 247 aa, Gossypium hirsutum
  Clone ID: GOSHI-09MAY01-C19930_1.pep
MADAQSRYVKLTKDQAPLEDIQPGELNQPIDVPQLHVRKCNECGQPLPENFEPPAVEPWTTGIFGCAEDTESCWTGLFCPCVLFGRNIESLRDDTPWTTPCICHAICVEGGVALAVATAFVHGIEPKTTFLIYEGLLFAWWMCGIYTGLSRQSLQKKYHLKNSPCDPCMVHCCMHWCALCQEHREMKGRLSDDFVMPMTVVNPPPVQEMTANNENQDSTPPPSGTSTNLEMQAPYAPASFVKNGAYC

SEQ ID NO: 66690 - protein, 67 aa, Gossypium hirsutum
  Clone ID: GOSHI-09MAY01-C119588_1.pep
FHASAFSVLVDFYYGMLVLDFNARTFIVNFFVIYVSTLESYTLCLAEKKKNKKKKKKKKKTNKNKTG

SEQ ID NO: 66691 - protein, 81 aa, Gossypium hirsutum
  Clone ID: GOSHI-09MAY01-C119578_1.pep
SRIVLVRSEGVVHDLARTRLSNSLIGAAVLMLQTYRQGAATSLIDYGASDKAVPSEPLSWEEPEELADPHVVYAQSNPVSE

SEQ ID NO: 66692 - protein, 65 aa, Gossypium hirsutum
  Clone ID: GOSHI-09MAY01-C19510_1.pep
FVLACRVLHRTEPRLACNLKLFLWLFYFFFICFFLFIFIFFCFFFIEVKESSNDTLKKKTLRLLA

SEQ ID NO: 66693 - protein, 71 aa, Gossypium hirsutum
  Clone ID: GOSHI-09MAY01-C119498_1.pep
MEPSSSSPGSMKVSPLDLMSAIIKAKMDPSNASADSAAEMATMLLENKEFVMILTTFIAVLVGCVVRLVWR

SEQ ID NO: 66694 - protein, 363 aa, Gossypium hirsutum
  Clone ID: GOSHI-09MAY01-C19460_1.pep
MVEVVSLMDIDEDDNHQKQNNSQKLNKGKGLVTAADTKPTPWVEKYRPQSLADVAAHRDILDTIDRLTSENRLPHLLLYGPPGTGKTSTILAVARKLYGSQYRNMILELNASDDRGIDVVRQQIQDFASTQPRSFGANSSVKLILLDEADAMTKDAQFALRRVIEKYTKNTRFALICNHVNKIIPALQSRCTRFRFAPLDPIHVTERLKHVIQAERLDVPDCGLAALVRLSNGDMRKALNILQSTHMASQKITEEAVYLCTGNPLPKDIEQISYWLLNESFAESFKRVSETKTRKGLALIDIVREVTMFVFKIKMPSDVRVQLINDLADIEYRLSFGCNDKLQLGSLIAIFTKARSSLVAAVK

SEQ ID NO: 66695 - protein, 101 aa, Gossypium hirsutum
  Clone ID: GOSHI-09MAY01-C119428_1.pep
LFRMRSVCLKKIQWHCSWLYSRNRVRKIKIKIQIFLYLLPCGFCICSQVRGVRWRTGLCWRTEAWAWLLKCWKVRRMVALLRREGEKPQASGVLVFPACWA

SEQ ID NO: 66696 - protein, 57 aa, Gossypium hirsutum
  Clone ID: GOSHI-09MAY01-C119738_1.pep
LSRPKQQTMEAGRRELELWQRQKATSEQVAINAKQRQGSGGVWGWLAGRTPQNADDA

SEQ ID NO: 66697 - protein, 112 aa, Gossypium hirsutum
  unsure (1)..(112): unsure at all Xaa locations
  Clone ID: GOSHI-09MAY01-C119708_1.pep
MARGSSHSQNTASSTTTRPGVMAPRGSAAATAGMRRRRVTGGAAATSALTTVGSGTSNMLRFYTDYAPGLKISPTVVXLVMSFCFIAFRRCSSTLLARSFPPKLEPELDRES

SEQ ID NO: 66698 - protein, 208 aa, Gossypium hirsutum
  Clone ID: GOSHI-09MAY01-C19690_1.pep
MATFQGTQQKCNACNKTVYLVDKLTADNRVFHKACFRCHHCKGTLKLSNYNSFEGVLYCRPHYDQLFKRTGSLDKSFEGTPKVVKPERQIDSESALKVMNSFGGTREKCAACSKTAYPIERVTVNGTIYHKSCFKCTHGGCTISPSNYIAHEGKLYCKHHHIQLFKEKGNYSQLETEREKQAATAANKVPAPAATSTTTTTTEIAAES

SEQ ID NO: 66699 - protein, 52 aa, Gossypium hirsutum
  unsure (1)..(52): unsure at all Xaa locations
  Clone ID: uC-gsflnu33B089d11b1.pep
MATFQGTQQKCNACNKTVYLVDKLTADNRVXHKACFRCHHCKGTLSLATPLI

SEQ ID NO: 66700 - protein, 154 aa, Gossypium hirsutum
  Clone ID: AW187256.1.pep
MLDPASDMLPPPSSPTISSVSSSDLDTESTGSFFHDRSTTLGTLMGVSFPAIAFRAPSRHNHRETQPANSGSSTAKPKKRRALTAAFGSERSGKRRRKWWQICRDGDSKPASLGEFLEVERRFGDGAFYGATPELEGVMGTGHDENHEARNGRS

SEQ ID NO: 66701 - protein, 137 aa, Gossypium hirsutum
  Clone ID: uC-gsflnu33B081b05b1.pep
MLDPASDMLPPPSSPTISSVSSSDLDTESTGSFFHDRSTTLGTLMGVSFPAITFRAPSRHNHRETQPASPGSSTAKPKKRRALTAAFGSERSGRRRRKWWQICRDGDSKPASLGEFLEGERRFSDGAFYGATAELEE

SEQ ID NO: 66702 - protein, 161 aa, Gossypium hirsutum
  Clone ID: GOSHI-09MAY01-C19610_1.pep
MLQSLVPQSPISSNTTSSNPSSSMKSKRVERDVSAATGEDSTADDPSNKRPNYSSGDKAAAADEHDETVIEGESTGLRLLGLLLQCAECVAMDNLEDATDLLPEISQLSSPFGSSPERVGAYFAHALQGRVVSSSLRNYSPLDNKSLTLTQSQKIFNALQS

SEQ ID NO: 66703 - protein, 143 aa, Gossypium hirsutum
  unsure (1)..(143): unsure at all Xaa locations
  Clone ID: GOSHI-09MAY01-C19630_3.pep
MAEPSSSLSSSKDELFQLIKRLGTYLALKMSNLFSISLQKLDPRSVGAIAGLAVAIIFTYRLMRSPAVPPRRQPKRQAPTTSSSSISTQSNATLMPSGACSPSEDLRAQXVDEFFQPVKPTLGQIVRQKLSEGRKVTCRLLGV

SEQ ID NO: 66704 - protein, 108 aa, Gossypium hirsutum
  unsure (1)..(108): unsure at all Xaa locations
  Clone ID: GOSHI-09MAY01-C19630_2.pep
PRPQFCDLYLMERVIDDESEXNVLLALENAGXFTSGGLVKDKVLFCSTENGRTSFVRQLEPDWHIDTNPEIVSQLARFIKYQLHVSPVKTEWTTGKVLSSPSLEKFFG

SEQ ID NO: 66705 - protein, 289 aa, Gossypium hirsutum
  unsure (1)..(289): unsure at all Xaa locations
  Clone ID: GOSHI-09MAY01-C19630_1.pep
MAEPSSPRPPSVRRRVRLIKRLGTYLALKMSNLFSISLQKLDPRSVGAIAGLAVAIIFTYRLMRSPAAPPRRQPKRQAPTTSGSSISAQSNATLMPSGACSPSEDFRAQNVVDEFFQPVKPTLGQIVRQKLSEGRKVTCRLLGVILEESSPEELQKQATVKSSVLDVLLEITKYCDLYLMERVIDDESEKIVLLALENAGIFTSGGXLVKDKVLFCSTENGRTSFVRQLEPDWHIDTNPVIVSQLARFIKYQLHVSPTRPXEGTAPNVFSCPSLDHFLGCVCRVIRVHI

SEQ ID NO: 66706 - protein, 44 aa, Gossypium hirsutum
  Clone ID: LIB3585-030-P1-K1-F1.pep
SIKIILYDCIAYPSTIKITNINCCMEFLRFKKSSNVNPTQISNK

SEQ ID NO: 66707 - protein, 156 aa, Gossypium hirsutum
  Clone ID: GOSHI-09MAY01-C19190_1.pep
MAMIPSFYGSRRSNVFDPFSLDVWDPFKDFPLSSSLTSQTPETSAFVNTRIDWKETPEAHVFKADVPGLKKEEVKVEVEDDRVLQISGERNMEKEDKNDTWHRVERSSGKFMRRFRLPENAKMDQIKASMENGVLTVTVPKLEVKKPDVKAIDISG

SEQ ID NO: 66708 - protein, 119 aa, Gossypium hirsutum
  Clone ID: GOSHI-09MAY01-C119198_1.pep
LTRPDRVGYDQPSQAVEWLIKAAADAIAELPSLNTAFPDTPRQLSDDGTEQGFDSAEVELDGDPNNYQQNQSQQHLSLSKSACSSTSEISKNSGLSLSRSENRVKARERARGRVAKEKG

SEQ ID NO: 66709 - protein, 90 aa, Gossypium hirsutum
  Clone ID: GOSHI-09MAY01-C19100_1.pep
MAMRKVYSEIKGMKVKEVPNYVKPMLSMDYVKKAFQKGLDNYNSKYIQTDSIQPLYHVCFGGMVFSYLVALPNERRHLEHQQHAKEHGHH

SEQ ID NO: 66710 - protein, 240 aa, Gossypium hirsutum
  Clone ID: GOSHI-09MAY01-C19050_1.pep
MWRSIITFILFAFLFFPISATKITLYNKCSHPVWPGIQPSAGKPILARGGFKLPPNKAYSMNLPPLWSGRFWGRHGCSFDASGHGRCATGDCGGSLFCNGLGGTPPATLAEITLGQQQDFYDVSLVDGYNIAMSITPFKGAGKCSYAGCVSDLNLMCPVALQVRDNKQVVACKSACFAFNSPRYCCTGSFGSPQSCKPTAYSKIFKTACPKAYSYAYDDPTSIATCSRGNYLVTFCPHRR

SEQ ID NO: 66711 - protein, 86 aa, Gossypium hirsutum
  Clone ID: LIB3083-078-Q1-L1-D11.pep
TATTITLYNKCSHPVWPGIQPSAGKPILARGGFKLPPNKAYSMNLPPLWSGRFWGRHGCSFDASGHGRCATGDCGGSLFCNGLGGT

SEQ ID NO: 66712 - protein, 75 aa, Gossypium hirsutum
  unsure (1)..(75): unsure at all Xaa locations
  Clone ID: LIB3585-003-P1-K1-C1.pep
MWRSIIILTLLAFLCLPISATTITLYNKCXHPVGAGIQPSAGEPILARGGFKLPPNKAYSMNLPAXWYGRIWGRH

SEQ ID NO: 66713 - protein, 87 aa, Gossypium hirsutum
  Clone ID: GOSHI-09MAY01-C19070_1.pep
KAPTHALLNEEGIDLPRWVQSIVREDWTSEVFDLELLRYQNVEDDMVQLLQLAINCTAQYPDKRPSMAEVMNQIEDLCRSNSEKETH

SEQ ID NO: 66714 - protein, 94 aa, Gossypium hirsutum
  unsure (1)..(94): unsure at all Xaa locations
  Clone ID: GOSHI-09MAY01-C19030_2.pep
GGSAVVGGGASAGYGGGGGSGXSGGVGNGGAGGHGGGSGSGGGGGSAGGASGYGSGVGEGGGAGSGAGYGGAGGHGELPLRNRVHHPPSQVEQR

SEQ ID NO: 66715 - protein, 182 aa, Gossypium hirsutum
  Clone ID: GOSHI-09MAY01-C19030_1.pep
MSISCALKVVPIVLLLVLFALANAKKSADVTELQIGVKYKPPSCEFQAHKGDRVKVHYRGKLTDGKVFDSSFERGDPIEFELGSGQVIKGWDQGLLGMCVGEKRKLKIPAKLGYGEQGSPPTIPGGATLIFDTELVSVNGKPSSGEDTSEDERIVALFISVNFFFYIFYYACFPVKNAIMMA

SEQ ID NO: 66716 - protein, 117 aa, Gossypium hirsutum
  Clone ID: uC-gsflnu33B036c05b1.pep
MSGICTMKVAPIAPQWALCALANAKKSADVTELQIGVKYKPTSCEFQAHKGDRVKVHYRGKLTDGKVFDSSFERGDPIEFELGSGQVIKGWDQGLLGMCVGEKRKLKIPAKLGYGEQ

SEQ ID NO: 66717 - protein, 249 aa, Gossypium hirsutum
  Clone ID: GOSHI-09MAY01-C19360_1.pep
MDWYSWLSKTALEPSLIYDYGLAFSRNELQKEDLAYFNHEFLQSMGISVAKHRLEILKLARKEVGETPNSLSKIILAINKTRKSFNKYVNKLVHHENNSIKLLPEPGRYRDQWRGGLTRKCNSEKEVNIEQPVRRTRKIAKSGPLDYRVQEKLLAPPRSLKLSGPLDRKMQEKLVFNYKSPVTSGPIDIAIAQERLILTTNRSPKLSAPLTYVRPPSPKIHGDYYKEKTGGDYGDQTLWAAMFQDMKPT

SEQ ID NO: 66718 - protein, 267 aa, Gossypium hirsutum
  unsure (1)..(267): unsure at all Xaa locations
  Clone ID: GOSHI-09MAY01-C19300_1.pep
LPGSNLQLIRLRSALNARDIPAEDFNLLPDFGVQQQQRVNELSSLSQPSMSSNSMNRSGRLKTLTPSNLEDLFSTESSSPQYSDQALAAVVFSPSHKSAVLNQFQQQSSMLSPINTNFSPKSKEHPLLQVSLSGRMSPRNVEPISPMSSRVSMLAQLEKQQFRCLSSRELGSDSPASISSPVNSWSKWGSSNGKPDWAVNADELGKHHASFELSNGDEPDLSWVQSLVXESPTEMKEKMKASVLDVPSNASKMRVLIQTRKLIRWIT

SEQ ID NO: 66719 - protein, 245 aa, Gossypium hirsutum
  Clone ID: GOSHI-09MAY01-C19320_1.pep
RKASQSVVKSTILIAVAIGISIGCLFAFLYPHGFLSFYSPAFHSQVLSSKCESSHRLNELKAEYAAELEKNEELRQQVKELTEKVRLAEQKKDHAQKQVEALGKWRKAGPSGTVKGLRTNPTVIPDEPVNPRLAEILEAVAVGRELIVALANWNVKESLEIWFTNIKRVGITNYLVVALDDKITEFCKSNNVPVYKRDANDGIASIGRTVNNHAVSGLKFHILREFLQLGYSVLLSDIDNGYLQN

SEQ ID NO: 66720 - protein, 119 aa, Gossypium hirsutum
  unsure (1)..(119): unsure at all Xaa locations
  Clone ID: GOSHI-09MAY01-C19240_1.pep
NIKGGCPYLRLKFSHGIPAPTQFTFLKNSSFTDEVSNQTLVFHLEGALLKAYSLFPYFMLVAFEAGGLFRALILLLLYPLVWLLGHELGLKVMVFVSFVGIXKKEKFRAWTAILPKFFP

SEQ ID NO: 66721 - protein, 141 aa, Gossypium hirsutum
  Clone ID: GOSHI-09MAY01-C14950_1.pep
RPSSRAKKKKKQNQTGFCFGSLFQWLPPLSSEPSFTSKALNKSLNTHFVPSFKLPGLVSFKPRTVSQLSVRAGLIEPDGGKLVDLHVAEPERGLKKREAALLPRVKLTRIDLQWVHVLSEGWASPLTGFMREYEFLQTLHF

SEQ ID NO: 66722 - protein, 242 aa, Gossypium hirsutum
  Clone ID: GOSHI-09MAY01-C14960_2.pep
MDIEQKQAELIDHFVKKASAQVGSAIGAVIVEATSHASLFAFSEILAVPTVAELEGTENSVYLELLPWFAHGTWSDYKSISGSLPQLLPDQVLKLKQLTVLTLAETNKVLPYDPLMLELDVTNVRELEDFIINECIYAGIVRGKLDQLRRCFEVQFAAGRDLRPGQLGSMIQTLSNWLGTLNNLLISIQEKIKWADTMSELDKKHRKEVEDKVEEVKKSVAVKADLDFRGIEEIYSGPGGVM

SEQ ID NO: 66723 - protein, 59 aa, Gossypium hirsutum
  unsure (1)..(59): unsure at all Xaa locations
  Clone ID: AI054985.1.pep
VNLWHAMDYICIFQELKGLAFLAXHPHHIYSIFKGTMLFNSPTLIYSXTPNRKTRFXRT

SEQ ID NO: 66724 - protein, 145 aa, Gossypium hirsutum
  unsure (1)..(145): unsure at all Xaa locations
  Clone ID: LIB3543-059-Q6-K6-A11.pep
MDVEQKQAQLIYHFVKKASAHSSFNXLGGGGGEATQHASLFAFSXILTWPTLAELKGTXNSLYLEVLLLFAHGTWSDYKSNRGRLPQLLPDQVLKLKQLTVLTLAKTNKDLPYEQLMLELNVTNVHELQDFIINECIYSGYNQEE

SEQ ID NO: 66725 - protein, 54 aa, Gossypium hirsutum
  Clone ID: LIB3189-048-P1-K1-F7.pep
KSLKGHKFCRVFILFELYNLISPYWIHHSQYQTLGFFFSFLCNFFQEDSSIILF

SEQ ID NO: 66726 - protein, 284 aa, Gossypium hirsutum
  unsure (1)..(284): unsure at all Xaa locations
  Clone ID: GOSHI-09MAY01-C14910_1.pep
SLNRYVIYIKKGLYKENVEIKKKKWNLMMIGDGMDVTVISGNRSFIDGWTTFRSATFAVSGRGFIXRDITFENTAGPQKHQAVALRSDSDLSVFFRCAIKGYQDSLYTHTMRQFYRECKITGTVDFIFGDGAVLFQNCQILAKQGLPNQKNTITAQGRKDPNQPTGFSIQFCNISADTDLLPSVNSTPTYLGRPWKLYSRTIIMQSYISDAIRPQGWLEWNQDFALDTLYYAEYMNNGPGASLRERVKWPGYHVLNNSAQAVNXTVAQFIERDLWLPSTGVKYT

SEQ ID NO: 66727 - protein, 275 aa, Gossypium hirsutum
  unsure (1)..(275): unsure at all Xaa locations
  Clone ID: GOSHI-09MAY01-C14900_1.pep
LSSGESRQNSSYRTSSASWDSHTGNPQYGQESPSYISQYSSASPQYYPPPQNRGSDKRTLDRRYSRIADNYNSLDQVTEALANAGLESSNLIVGIDFTKSNEWTGKRSFNRKSLHHIGNSLNPYEQAISIIGKTLAAFDEDNLIPCFGFGDASTHDXQDVFSFYPDDRFCNGFEEVLSRYREIVPHLRLAGPTSFAPIIEMAMTIVEQSSGQYHVLVIIADGQVTRSVDTQHGQLSPQEQKTVDAIVQASKLPLSIILVGGGDGPWDMMKEFDDY

SEQ ID NO: 66728 - protein, 543 aa, Gossypium hirsutum
  unsure (1)..(543): unsure at all Xaa locations
  Clone ID: GOSHI-09MAY01-C14820_1.pep
MAEVDQSFVEHEEEQVQEPQNLEQNPNLEHNLNLGNYVDLEPNVNLEHNISLVHNVNLEQNLHEEEDQEEDLEEQNLQQESEHQPKVEHEDEAVVGGGEKKWPGWPGESVFRMLVPAQKVGSIIGRKGEFIKKIVEETRARIKILDGPPGTTERAVMVSAKEEPDSSLPPAMDGLLRVHKRIVDGLEGDPSHTPTAVGTKVSTRLLVPASQAGSLIGKQGATVKSIQESSNCIVRVLGADSAEDLPVFALQDDRVVEVVAEAAGVHKAVELIATHLRKFLVDRSIIPLFEMHMQRSNHQMDHMPPHQSWGPPQGVPPNASGGSGYGHNPLYMPPSRQMDNYYPPADMPPHMEKQPHQGISAYGREVPMGAHGSSNPQNAPSMITQVTQQMQIPLSYADAVIGTAGASISYIRRASGATVTIQETRGVPGEMTVEISGTASQVQTAQQLIQNFMAEAAAAPAQAQAGGAADQAYNPYAAHGSXYASPPSNPGHAGGYGSGHASGSGHWVRIVLIFDVVLEIENSGGKLTEICFKVWTIDCCRKL

SEQ ID NO: 66729 - protein, 78 aa, Gossypium hirsutum
  Clone ID: LIB3135-054-Q1-K1-F1.pep
GEKKWPGWPGESVFRMLVPAQKVGGIIGRKGEFIKKIVEETRARIKILDGPPGTTERAVMVSAKAGNEVRDGEERRCR

SEQ ID NO: 66730 - protein, 57 aa, Gossypium hirsutum
  Clone ID: LIB3197-044-Q1-M1-C2.pep
IQNFMAEAVPAPAQAQAGGVADQAYNPYAAHSSVYDSPPSNPGHAGGYGSVYGSNYG

SEQ ID NO: 66731 - protein, 141 aa, Gossypium hirsutum
  Clone ID: GOSHI-09MAY01-C14570_2.pep
MAAIYSLYIINKSGGLIFYKDYGSKGRMDTNDSLRVASLWHSMHAISQQLSPTTGCSGIELLEADTFDLHCFQSLTGTKFFVVCEPGTQHMEALLKVVYELYTDYVLKNPFYEMVMPIRCELFDINLTQAVQKDRVALLGR

SEQ ID NO: 66732 - protein, 60 aa, Gossypium hirsutum
  unsure (1)..(60): unsure at all Xaa locations
  Clone ID: GOSHI-09MAY01-C14570_1.pep
FSGTKFFVVCEPGTKXVYELYTDYVLKNPFYEMEMPIRFELFDINLTQAVQKDRVALLGR

SEQ ID NO: 66733 - protein, 65 aa, Gossypium hirsutum
  Clone ID: LIB3189-041-P1-K1-C4.pep
SKNGTKFFVVCEPGTQHMEALLKVVYELYTDYVLKNPFYEMEIPIQFELFDINLPQAIQKDVLRL

SEQ ID NO: 66734 - protein, 52 aa, Gossypium hirsutum
  Clone ID: GOSHI-09MAY01-C14520_1.pep
DPRVRVIDQLVNKLQIAKITEDGVTISQPYSLKTYWEFSAFENPAQGAIGSW

SEQ ID NO: 66735 - protein, 206 aa, Gossypium hirsutum
  unsure (1)..(206): unsure at all Xaa locations
  Clone ID: GOSHI-09MAY01-C14450_1.pep
RPRVGTRGGKLAPNGKVVEARSNLNSSDIEGRLQTPCSLLYDSNCPSEEHIKGDLRYMLDSLLDPETMSAYRPHATRERVMDLATKLLDCKQFLKDYKPSAHNPCAICVWCHLELSNPTKDDPVPPPELIILPLSATVGDLKTVATKGFVDVFAMFKRLQXEDLPDYGSVEDSITLKMLIGTNWSVRVRGKCTSRHGLKSFRMERG

SEQ ID NO: 66736 - protein, 58 aa, Gossypium hirsutum
  Clone ID: GOSHI-09MAY01-C14470_4.pep
KIERPIPYVRWQMLKGASLFYNSWRSHTTIIYDYYVGCGMVRAIFSFNGSYSALGFDI

SEQ ID NO: 66737 - protein, 141 aa, Gossypium hirsutum
  Clone ID: GOSHI-09MAY01-C14470_1.pep
MASVEVQSAATTLPENETTPEVTKVVETPKEEPAAAPVEAEPETTSDAPAAEETEVSIAEAPAEVDTKEVVEEEAKAAEESEKAKEEVKDETPEVQTETVTEEAKVETEEPAVEAAVEEKPAEEEKGDEKAEEIPVEKVEE

SEQ ID NO: 66738 - protein, 156 aa, Gossypium hirsutum
  unsure (1)..(156): unsure at all Xaa locations
  Clone ID: AI055587.1.pep
LAXYAXSYRXRAPLSXCTLRMYGRSFFXFPTGILQLFNLPFXXXXFLLHAASTRGPRFLLWLLCNCFVCTPGSHPLPPPCFLRFLSSLRFFFYHFLVSTSAGASAMETSVSSAAGASDVVSGSASTGAAAGSSFGVSTTLVTSGVVSFSGNVVAAD

SEQ ID NO: 66739 - protein, 105 aa, Gossypium hirsutum
  Clone ID: AI729305.1.pep
LKKLSRRKHQDVPAAEETEVSIAEVPVELDTKELVEEEAKAAEESEKPKEEVKDETPEVQTETVTEEAKVETEEPAVEAAVEEKPAEEEKGDEKAEEIPVEKVEE

SEQ ID NO: 66740 - protein, 54 aa, Gossypium hirsutum
  Clone ID: LIB3189-046-P1-K1-A6.pep
LNKNKFLFCQFEDHITLHPDQTYYIDFLCNENHTGVHACSHSYIHPYQFKMENL

SEQ ID NO: 66741 - protein, 82 aa, Gossypium hirsutum
  Clone ID: LIB3189-046-P1-K1-A12.pep
IFIMQIWRSHLITPVLNSSYRLCWDRKPYVRACMHTCIHTSIPLQNGKPIVSFISMLTPGPKRKFNTKYQTPKQKNNHLRKR

SEQ ID NO: 66742 - protein, 92 aa, Gossypium hirsutum
  Clone ID: uC-gsronu33B162g09b2.pep
RKGFYYNFLNAFEFFIFFSFFIFNFFFFFFFFFFFFFFPINKNKADSNITQSPKFNNNNLNNTSHFTTSLQLQNFAEMYKWHGCIKKIKIYH

SEQ ID NO: 66743 - protein, 54 aa, Gossypium hirsutum
  Clone ID: AI726116.1.pep
VDVGYGAVKYADLKNNRLTNYTLNFDQMLNDKKAICKEPQESKIPPSLLFSDKF

SEQ ID NO: 66744 - protein, 312 aa, Gossypium hirsutum
  Clone ID: GOSHI-09MAY01-C114748_1.pep
KKTMEDLAVDKIVNIGIGLVPPEMADQLYEGIHSHLENVGIDGVKVDVIHLLEMLCENYGGRVDLAKAYYKALTDSVKKHFKGNGVIASMEHCNDFMFLGTEAICLGRVGDDFWCTDPSGDPNGTFWLQGCHMVHCAYNSLWMGNFIHPDWDMFQSSHPCAEFHAASRAISGGPIYISDTVGNHNFALLKRLVLPDGSILRCQYYALPTRDCLFEDPLHDGKTMLKIWNLNKYTGVIGAFNCQGGGWCRETRRNQCFSEFSHTVKAEMNPKSIEWNSGKNPISIEDVQVFAMYFSQSKILVLSKPAGNMEIS

SEQ ID NO: 66745 - protein, 257 aa, Gossypium hirsutum
  Clone ID: GOSHI-09MAY01-C14710_1.pep
MAAYRRWVSVLCCLSLLGSFASASTISLPSDSRKVSLTLYYESLCPYSANFIVNYLPKLFNEDLISIVDLRLVPWGNAKLKGNDTFDCQHGPTECLLNTVEACAIDAWPKLNDHFPFIYCVENLELERKPLEWESCFKKLGLESKPVNDCYKSGLGQKLDLQYAAETSALEPPHTYVPWVVVDGQPLYEDYENYISYVCKAYKGANMPKACSGLTFNQIYNRKTIHPVCYKEIPPLTLSSRTISTVMSWIRKIVTSM

SEQ ID NO: 66746 - protein, 78 aa, Gossypium hirsutum
  Clone ID: LIB3829-027-Q6-K6-D12.pep
SFPACLIEWLNKELLSLCSLIYNMQPKQVPLNHLIHMYLGLLWMGNHFTRFVSLTIKLIDYPNYLFITQMCDFDEHRY

SEQ ID NO: 66747 - protein, 149 aa, Gossypium hirsutum
  Clone ID: GOSHI-09MAY01-C14700_1.pep
MASADVEYQCFVGGLAWTINDRALEEAFSAYGEIVDSKIINDRETGRSRGFGFVTFRDEKSMKDAIEGMNGRSLDGRNITVNEAQSRRSGGGGGGGGFGGNGGYNRGGGGYGGRREGGYGGGGYGGGRRDGGGYGDGGSRYSGGGGSWA

SEQ ID NO: 66748 - protein, 98 aa, Gossypium hirsutum
  Clone ID: uC-gsflmaxxa029f12b1.pep
SVILCYYSIISCYYSKLFSKVSLIINDRETGRSRGFGFVTFRDEKSMRDAIEGMNGRSLDGRNITVNEAQSRPSRGGSGGGGFGGKGGYNRGGSRGYG

SEQ ID NO: 66749 - protein, 43 aa, Gossypium hirsutum
  Clone ID: LIB3145-058-Q1-K1-A10.pep
MASADVEYQCFVGGLAWTINDRALEEAFSAYGEIVDSKVRLSQ

SEQ ID NO: 66750 - protein, 73 aa, Gossypium hirsutum
  Clone ID: uC-gsflmaxxa029f06b1.pep
GLIAFLTWLMGVSNTSALSEVLHGPSTTVLSKKPSVLTARSSILMSVCRSERSPNLTRIQPHLGLHVYDSSIL

SEQ ID NO: 66751 - protein, 238 aa, Gossypium hirsutum
  Clone ID: GOSHI-09MAY01-C14650_1.pep
MESPFKADILKGKVGLITGGGSGIGFEISTQLGKHGASIAIMGRRKHVLQAAVSALQSLGIHAVGFEGDVRKQEDAKRVIESTFKHFGHIDILVNAAAGNFLVPAEDLSTNGFRTVMDIDSVGTFTMCREALEYLKKGGRGRNSPSGGSILNISATLHYTASWYQIHVSAAKAAVDSITRNLALEWGTDYDIRVNGIAPGPIADTPGLSKLAPDEITIKAREHLPSYKIGDKWDIAMS

SEQ ID NO: 66752 - protein, 476 aa, Gossypium hirsutum
  Clone ID: GOSHI-09MAY01-C14640_1.pep
MEVTPGRKQFYSNYMLLNPKKASFFDLIALLFSKNLKKRKFIETSIETEDSFWYRLVIFLSTLLQKFLLSIKTPMALAGQTFEDMLNLFTNNGGLFGLIKKVMTGKVVIPSREAATYVSAVGYTDLRMDLDKQIIYGNSMYYPALAIMTCKAVYNNAAYNKSIIENNWGMEVIGFYNYWNDYLRQPDTQVVMFRNKTSEHDTMVVSFRGTQPFSADDWCSDADLSWYEFPNIGKIHSGFLKALGMQKLVGWPKFVIPDLTRKAPLAYYDIRDRLKDLLKNSPEAKVIVTGHSLGGALAALFPAILFYHDEQLVLERMEGVYTFGQPRVGDEAFAGYMEKNLNKNGIQFYRYVYCNDIVPRVPFDGMFKHFGTCVYYNSKYQAKIVEEVPYLNYFSLFGFFPMHMNAIYEVIRSFTMKAKYGADYTDGWLMFGVRLFRLLLPRVPYHCPQDYVNSTRLGKPDDVLFLPLHTKKALGF

SEQ ID NO: 66753 - protein, 100 aa, Gossypium hirsutum
  Clone ID: LIB3149-005-Q1-K2-C1.pep
MGCLCTHMFTVVDIVPRTHFDGMFKHLGTCVLYNKKYQAEIVEEVPYLNYFSLFGFLPMHMNPMCAVIRSSTMKVKYGADYTDGWVMFGMRLSGMLIPGI

SEQ ID NO: 66754 - protein, 366 aa, Gossypium hirsutum
  unsure (1)..(366): unsure at all Xaa locations
  Clone ID: GOSHI-09MAY01-C14600_1.pep
HSLRETLCVIGXGVVVHLPGLFKEIDGLEANGVSCKGRILVSDRAHLLFDFHQVVDGLREAELNKSFIGTTRRGIGPAYSSKMNRNGIRVSDLRHMDTFPQKLHNLLSDVTSRFPDFNYTPEVLKEEVENYKRYAERLEPFIADTVHVMNESIAQKKRILVEGGQATMLDIDFGTYPFVTSSSPSAGGICTGLGIAPRVVGDLIGVVKAYTTRVGSGPFPTEILGQGGDILRFAGQEFGTTTGRPRRCGWLDVVALKFCCEINGFSSLNLTKLDVLSDLPEIKLGVAYKHVDGTPVESFPGDLQLLEQLKVEYEVLPGWQSDISSIRNYSDLPKAARQYVERIEELVGVPIHYIGVGPGRDALIYK

SEQ ID NO: 66755 - protein, 157 aa, Gossypium hirsutum
  Clone ID: GOSHI-09MAY01-C14630_1.pep
MAETESTTTAQDSATAETEPHQTQAQSQIDETAAKLNNLTLRIWPPTQRTRDAVINRLVETLSSQSVLSKRYGTIPEDEAASLAKSIEEEAFSAAGAAFSPDDDGIEILQMYSKEISKRMLDTVKSRAATAAAADAPSATEAANGEEVSSSSVKAEA

SEQ ID NO: 66756 - protein, 81 aa, Gossypium hirsutum
  Clone ID: LIB3189-043-P1-K1-A6.pep
PPTQRTLDAVINRLVQTLSYQSVLSKRYGTIPDDEASSLAKSIEAEAFSFACSAFSPDDDGIQILHMYSKEISKRILNTVK

SEQ ID NO: 66757 - protein, 324 aa, Gossypium hirsutum
  Clone ID: GOSHI-09MAY01-C14100_1.pep
PTRPRTRGVKVSTSTRTRQWKCVGSRADSKRLYYGRFILSPLMKGQADTIGIAMRRALLGELEGTCITRAKFEKIPHEYSTIVGIQESVHEILMNLKEIVLRGNLYGTRNAFICAKGPGYVTAQDIILPPSVEIVDNTQHVASLTEPIDLCIGLQIERNRGYGIKTPKNFHDGSYPIDAVFMPVRNANHSIHCYGNDNEKQEILFLEIWTNGSLTPKEALHEASRNLIDLFIPFLHTEEENLHLENNQHDVTLPFFPFHDRLVKLTKKKKEIALKYIFIDQLELPPRIYNCLKKSNIHTLLDLLNNSREDLMKIEHFRIEDVKQ

SEQ ID NO: 66758 - protein, 102 aa, Gossypium hirsutum
  unsure (1)..(102): unsure at all Xaa locations
  Clone ID: LIB3189-021-P1-K1-E3.pep
PRVRPRVRPRVCYXILPPSVEIVDNTQHVASLTEPIDLCIGLQIERNRGYGIKTPKNFHDGSYPIDAVFMPVRNANHSIHCYGNDYEXQEILFLELWTNGNV

SEQ ID NO: 66759 - protein, 650 aa, Gossypium hirsutum
  Clone ID: GOSHI-09MAY01-C14080_1.pep
LWSPNVYFLLLARLLDGFGVGLAVTLVPVYISETAPPEIRGLLNTLPQFTGSIGMFLSYCMVFGMSLSELPNWRLMLGVLSIPSLIYFILTIFFRPESPRWLVSKGRMIEAKKVLQRLRGREDVAGEMALLVEGLGVGGETSIEEYIIGPANEDIEDQDISDDKDQIKLYGPEEGLSWVARPVTGQSTLGIVSRHGSMASQSALGLVDPLVTLFGSVHEKVPETGSMRSALFPHFGSMFSVGGNQARNEEWDDDIVPREGGDYPSDGGGGDADDNLHSPLISRQTTSLDKDIVPTNHGSLTSLRHGSLMQSTTGEQVGSMGVGGGWQLAWQWSEKVAPDGKKEGGFKRIYLHQETVPESRRGSVVSLPGGDVPADTEYVQAAALVSHSALYSSELVKQHPVGPAMVHPAETAKGPSWTDIFEPGVKHALFVGIGIQILQQFSGINGVLYYTPQILEQAGVGVLLSNLGLSSSSASLLISGITTLLMLPSIAVAMRLMDIAGRRSLLLNTLPVLIISLVVLVVASVVKMGSVVHASISTVRVGLYFWCCVMGFGPIPNILCAEIFPTRVRGICIAICALTFWICDIIVTYSLPLLLKSVGLAGVFGMYAVVCVISWVFVFLKVPETKGMPLEVITEFFAVGAKQIAATKDN

SEQ ID NO: 66760 - protein, 80 aa, Gossypium hirsutum
  Clone ID: LIB3585-062-P1-K2-F10.pep
PTRPPTRPPTRPPTRPVTYSLAGLLKSVGLAGVFGMYAVVCVISWVFVFLKVPETKGMPLEVITEFFAVGAKQIAATKDN

SEQ ID NO: 66761 - protein, 169 aa, Gossypium hirsutum
  Clone ID: GOSHI-09MAY01-C14000_1.pep
MSLVTEEIKGSASEIYHGDEICQEKSKFLLEEMGMPSGLLPLKDIEECGYVKDTGFVWLKQKKSITHKFDKIGKLVSYATEVTAVVEKNKIKKLTGVKTKELLVWITLSDIYVDDPPTGNITFKTPAGLFRTFPVSAFEVEGEVKGAVKDKKEEKDNVKPAAVEAVKEV

SEQ ID NO: 66762 - protein, 80 aa, Gossypium hirsutum
  Clone ID: LIB3147-058-Q1-K1-C7.pep
KIKKLTGVKTKELLVWITLSDIYVDDPPTGNITFKTPAGLFRTFPVSAFEVEGEVKGAVKDKKEEKDNVKPAAVEAVKEV

SEQ ID NO: 66763 - protein, 324 aa, Gossypium hirsutum
  Clone ID: GOSHI-09MAY01-C14360_1.pep
RTQGEPKPNQMHHVVRNTMAMQGGAKLPQKPSNNHVRSNSQGNVIAKQAHQLSYQYHQNGLITGASTKGRESEDPATKSSMKAMAARALWHLAKENSLICKSITESRALLCFAVLLEKGTEEVRFNSAMALMEITAVAEQDPDLRRSAFKPNSHACKLIVDQLLKITEQADSELLIPCIKAIGNLARTFRATETRMIAPLVKLLDEREAEVSKEAAIALAKFACTDNYLHLDHSKAIINAGGAKHLIQLVYFGEHIVQLPALLLLCYISHHVPDSEELAEAKVLTVLEWASRQSNMTQNATGKLLQEAKSRLELYQSRGSTGFH

SEQ ID NO: 66764 - protein, 399 aa, Gossypium hirsutum
  Clone ID: GOSHI-09MAY01-C14310_1.pep
SRVRYSNVSAFTYDSNSTSCVQATSFLSSQIWVSETSFFALSSSSLWTYLVWTLVITSVLSVPICLLLLLLLKHYTKQIVYVLLPFFPTRPVFFDVYWFVACTLSSSCSDAFPLVYRILVLVFILLIVGVIVWIIVANWHRIELTVRIIGVASDALSRNLGLFLVIPLLTVGLLAYYASIVVFLVFSRFNGKIVAKESNGEYTCVWKQDSWVPAYFTLAILTMLWSLTSMVEAQVYVTSGTIAQWYFSKDDTKPHRSIRRSLRNAFGPSSGTICLSGLLVFVVRVVRAAVDSAREEDVPGIVNLVLRCCVNALMSAIDFLNKFTINFAAITGEAYCTSARMTYELLRRNLLSAVFVETVSTRLLAGVIFVLSSVYAIAVCAILKGVSDLGVNMYTVAAL

SEQ ID NO: 66765 - protein, 65 aa, Gossypium hirsutum
  Clone ID: GOSHI-09MAY01-C14300_1.pep
MDSQIKFAVVVKIMGRTGSRGQVTQVRVKFLDDQNRFIMRNVKGPVREGDILTLLESEREARRLR

SEQ ID NO: 66766 - protein, 65 aa, Gossypium hirsutum; identical to SEQ ID NO: 66765
  Clone ID: uC-gsronu33B178c07b1.pep

SEQ ID NO: 66767 - protein, 112 aa, Gossypium hirsutum
  Clone ID: GOSHI-09MAY01-C14330_1.pep
MATGELACTYAALILHDDGISITAEKIATLVKAANLSVESYWPSLFAKLLEKVNVDDLITSVGSGGGAAPVAVAAASGAAGGGAAAAAPAVEEKKEEEKEESDDDMGFSLFD

SEQ ID NO: 66768 - protein, 112 aa, Gossypium hirsutum
  Clone ID: uC-gsronu33B018f06b1.pep
MATGELACTYAALILHDDGISITAEKIATLVKAANLSVESYWPSLFAKLLEKVNVDDLITSVGSGGGADPVAAAGASGAVGGGAGECDPACEETLDAEKEESAHNMTARLVG

SEQ ID NO: 66769 - protein, 92 aa, Gossypium hirsutum
  Clone ID: GOSHI-09MAY01-C114228_1.pep
ESKSAMERTLFHLFLVLLGFSHIISLNAVSVTRIESLVHGPQVHHVPENPHPVIAEKSSKEGRVFMELNDYPGSGANYRHTPRPQFGRCADC

SEQ ID NO: 66770 - protein, 53 aa, Gossypium hirsutum
  Clone ID: uC-gsronu33B158e01b2.pep
KQTRNKETNLRSNKMRDYGPKALFLKDYTMRKHTSTLNNRHICQIVALECDDY

SEQ ID NO: 66771 - protein, 262 aa, Gossypium hirsutum
  unsure (1)..(262): unsure at all Xaa locations
  Clone ID: GOSHI-09MAY01-C15910_1.pep
ISWSNLGQVKVIEAVKNVNTAXRVVPSEFGHDIDRAKPVEPGLTMYEQKSKIRGQIEECGIPYRYICWNSIAAWPYHDNTHPADGLPPAASAQIYGDGAVKAYFVAGSDIGKGTVMSTDDDRTLNKTVHFQPPSNLLNMNEMASLWETKIGRVLPRVTITEQDLLQRAQEMRIPQSVVAAITHDIFINGCQINFSLDKTTDVEVCSLYPNTSFRTIAECFDDFAKKISDNEKAVSKPVTASNTDIFVPTAKPEALAITAICT

SEQ ID NO: 66772 - protein, 80 aa, Gossypium hirsutum
  Clone ID: LIB3197-015-P1-M1-G12.pep
EAIELLFRISNRVRCFSCANRCDSQCFWFSSGHKDVSVACSHVACSLLFHHRKSFWQNCQSNPQWSEMKCSDRESRFRYE

SEQ ID NO: 66773 - protein, 194 aa, Gossypium hirsutum
  Clone ID: GOSHI-09MAY01-C15850_1.pep
MADQPQIYELNNGTVVVKITNYGCTITSLSVPDKNGKLADVVLGFDTVEPYVKGASPYFGCIVGRVANRIKNGKFTLNGTGYSLPINKPPNSLHGGFKGFDKRIWEVAEYKKGDKPSITFKYRSSDGEEGYPGDVSVTATYTLTSTMTMKLDMEAVPETKATPINLAQHTYWNLAGHNSGNILDHTIQIWASEM

SEQ ID NO: 66774 - protein, 93 aa, Gossypium hirsutum
  Clone ID: GOSHI-09MAY01-C115598_1.pep
WSECGCWFLTSAIYRETAEAGCHLTGAEPNIGLLRLDTLQICVRVDYLVTINIFFSFYIIQCIYSSKNFYSYTLISPLLILYIFSCFLSFLYF

SEQ ID NO: 66775 - protein, 103 aa, Gossypium hirsutum
  Clone ID: uC-gsflmaxxa038h06b1.pep
CLVLQQSNVNQLQQFPHKSQNLETNILTPTINLALIPYAADRRLPSLRQTIGQKKKSEVAVKMMMMTQNSKTTNKQFQKKQTNRFRNLRGFFFLFSRIFGDSR

SEQ ID NO: 66776 - protein, 57 aa, Gossypium hirsutum
  Clone ID: GOSHI-09MAY01-C15530_2.pep
MTRGNQREKDRERAQSRSGNKGKAGSKDDGLTPEQRRERDAKALQEKASKKAAHAAA

SEQ ID NO: 66777 - protein, 72 aa, Gossypium hirsutum
  Clone ID: GOSHI-09MAY01-C15530_1.pep
MTRGNQREKDRERAQSRSGNKGKAGSKDDGLTPEQRRERDAKALQEKAAKKAAQAAAGGNTAGGAGGSKNKK

SEQ ID NO: 66778 - protein, 147 aa, Gossypium hirsutum
  Clone ID: GOSHI-09MAY01-C15480_1.pep
MAGRAQIPTSNSALIAMIADEDTVTGFLMAGVGNVDLRRKTNYLIVDSKTTVKAIEDTFKDYTTREDIAIILISQYVANMIRFLVDSYNKPVPAILEIPSKDHPYDPAHDSVLSRVKYLFSAESVASGKALMMMFPPVSLLKSPLLL

SEQ ID NO: 66779 - protein, 71 aa, Gossypium hirsutum
  Clone ID: uC-gsronu33B154e03b2.pep
MAGRAQIPTSNSALIAMIADEDTATGFLMAGVGNVDLRRKTNYLIVDSSMNFGLKFFFLTILLNFLNCFFL

SEQ ID NO: 66780 - protein, 72 aa, Gossypium hirsutum
  Clone ID: LIB3272-018-P1-K1-E12.pep
MAGRAQIPTSNSALIAMIADEDTGTGFLVAGGGNVDLKRKTNYLIVDSKTTVKAIEDSFKDYTTRGDIAIIL

SEQ ID NO: 66781 - protein, 383 aa, Gossypium hirsutum
  unsure (1)..(383): unsure at all Xaa locations
  Clone ID: GOSHI-09MAY01-C15450_1.pep
MDRAELSTEQVLKRDIPWETYMTTKLISGTGLQLLRRYDNRAESVRAQLLDDDGPAYVQVFVNILRDIFKEETVEYVLALIDEMLTANPKRARLFHDKSLANEDTYEPFLRLLWKGNWFIQEKSCKILALIVSARPKTQDGVVANGENSKKKGTTINDVLKELVEWLCTQLKKPSHPTCGIPTAINCLASLLKEPVVRSSFVQADGVKLLIPLITPASTQQSIQLLYETCLCVWLLSYYEPAIEYLATSRALPRLVDVVRSSTKEKVVRVVVLTFRNLLSKGTFGAQMVDLGLPQIVQSLKAQAWSDEDLLEALNHLEDGFLDNIKKLSSFDECEQEVLLGHLGWSPMRKDPLFWRHHVPCSVEXDFQGLRVLIAILGYVQRP

SEQ ID NO: 66782 - protein, 101 aa, Gossypium hirsutum
  Clone ID: LIB3146-027-Q1-K1-F9.pep
MERAELTTEQVLKRDIPWETYMTTKLISGTGLQLLRRFDNRAESVRAQLLDDDGPAYVQVFVSILRDIFKEETVEYVLALIDEMLTANPKRARLFHDRSLC

SEQ ID NO: 66783 - protein, 93 aa, Gossypium hirsutum
  Clone ID: uC-gsflnu33B100a12b1.pep
QSVPPSLVTSRPVSNVPALWHSESHFRLDPRPFSRVGKHDGALASRRLAHVPRLVAAYVSHWRALFRSCPGDSTARSIYAQESTSNPHELKSL

SEQ ID NO: 66784 - protein, 216 aa, Gossypium hirsutum
  Clone ID: GOSHI-09MAY01-C15470_1.pep
MSCNGCRILRKGCSENCMLRQSLQCIENPQAQAHATVFVAKFFGRAGLMSFLSSVASPQRPALFQSLLFEAVGRAINPVSGAVGLLWTGNWNVCQSAVQTVLQGGTLQPLPEFSGGVSGSDFEDVGETVGVGGGGGAGGPCIQSGGFVDVVECKASDLNLCLMIGDDDRAVKRRRESTSSEESETTTLGSRFSGDGNSSNDSCGADGERKLLRLFI

SEQ ID NO: 66785 - protein, 343 aa, Gossypium hirsutum
  unsure (1)..(343): unsure at all Xaa locations
  Clone ID: GOSHI-09MAY01-C15460_1.pep
MAKYGEGDKRWIVEERPDGANVHNWHWAETDCLPWSKMFFTKSLSDLTILDGQGNLRIKTKKVEKVDGEAYVNIRKGKVIPGYEISLSVSWEGEAKDGEGKTLLKSXGNLEIPYISDENADEDPEVKVTVKDEGPIGKALKEAMLAKGKPLVLEKVRDFVQAMAKGGPVKDELEAKKSAPKTNTTTGNSNSAAVSKEEVGMEKEAKKEVKKEGKKGFKTITMTEKFNCRAKDIYEILMDENRWKGFTQSNARISKEVGGQFSIFDGSVTGINLELQEGKFIAQRWRFGSWPDGIDSTVRLVFNEPEPGVTIIKLTHSDVPEEDRYGNATVVENTERGWKDLIF

SEQ ID NO: 66786 - protein, 182 aa, Gossypium hirsutum
  unsure (1)..(182): unsure at all Xaa locations
  Clone ID: GOSHI-09MAY01-C15740_1.pep
MSNELVNFNMSGLGDALNAEARAGLVNALKNKLQSLAGDHSDVLESLSPIVRKRVEVLREIQSQHDELEARFFEERAALEAKYQKLYQPLYAKRYDIVNGLADAEGTANEAAKDQGEEKDAEEKGVPDFWLTAMKNNEVLSDEITERDEXALKYLKDINWYRVKKPRFKLESYFDTNPYFKN

SEQ ID NO: 66787 - protein, 84 aa, Gossypium hirsutum
  Clone ID: LIB3048-031-Q1-L1-E7.pep
MSNEGVNFNMSGLGDALNAEARAGLVNALKNKLQSLAGDHSDVLESLSPIVRKRVEVLREIQACSFSLSFFDTLLSFILISLMV

SEQ ID NO: 66788 - protein, 98 aa, Gossypium hirsutum
  unsure (1)..(98): unsure at all Xaa locations
  Clone ID: uC-gsflmaxxa090f01b1.pep
MSNELVNFNMCGLGDALNAEARAGLVNALKNKLQSLAGDHSDVLESLSPIGRKRVEVLREIQRPHDELEARFFEERAALEAXYQKLYXPLYAKRYDIV

SEQ ID NO: 66789 - protein, 125 aa, Gossypium hirsutum
  Clone ID: GOSHI-09MAY01-C15760_1.pep
MRGAALVAIAATIGNFLQGWDNATIAGAIVYIKNDLDLGTSVEGLVVAMSLIGATAITTCSGAISDWLGRRPMLIMSSMLYFVSGLVMLWSPNVYILCLARLLDGFGIGLAVTLVPVYISETAPS

SEQ ID NO: 66790 - protein, 97 aa, Gossypium hirsutum
  Clone ID: GOSHI-09MAY01-C15710_1.pep
YKNKNHPFQKPGNPTKWNLQICKAISKPKTTAAAATITTTILQNPTISLSSSTICNTKNSRLLPSLWSLLMAPDLQVLLPATLLIWAPFLNSIPTTL

SEQ ID NO: 66791 - protein, 394 aa, Gossypium hirsutum
  Clone ID: GOSHI-09MAY01-C15690_2.pep
MSRFRVTDIFDPYSPSLCVKETSILAHKPLAFPSFFEAEHELSSALDLLSPFPCLSPFDIYDNVTDLVQIERTPSFRSYKRVQRRVEPEFSIQTLCDRVTALESKFDRLVNGRNSGGDRKYTWTAEIKGPVERKYKWVAEIKDGKKTEEVKEKKYKWTAEIEGKGIDGPISRKYVFSASTGGDASECSKSEKKEKNEKKHQKKDKKGENVPRVVEIEEPSDHGAVVLRQAFAKRAGVIRNSRGKKKELSPQDAALVIQVTFRSYLIRRSQALRALRELAIARAKLKELRSYFNTFSYRRRVAQDAVERQRFCEKIIVLLLTVDAIEGADLMVRAAKKSMVDELEAMLDVVDPQPQGRSLSMRRTFDMPDSVIQKEIAEGVAEVVRMFESDADTV

SEQ ID NO: 66792 - protein, 516 aa, Gossypium hirsutum
  Clone ID: GOSHI-09MAY01-C15690_1.pep
PSFTQPKMCRIIRNHPSALQIYRNKLLESGQVTDDDIGNISQKVSTILNEEFLASKDYVPKRRDWLSAYWTGFKSPEQISRVRNTGVKPEILKNVGKAITTLPDNFKPHRAVKKVYEQRAQMIETGEGLDWAMGEALAFATLLVEGNHVRLSGQDVERGTFSHRHSAIHDQETGEQYCPLDHVIINQNEEMFTVSNSSLSEFGVLGFELGYSMENPNSLVMWEAQFGDFANGAQVIFDQFISSGEAKWLRQTGLVVLLPHGYDGQGPEHSSARLERYLQMSDDNPFVIPEMDTTLRKQIQECNWQVVNVTTPANYFHVLRRQIHREFRKPLIVMSPKNLLRHKDCKSNLSEFDDVQGHPGFDKQGTRFKRLIKDQNMHSDLEEGIRRLVLCSGKVYYELDDERKKNNATDVAICRVEQLCPFPYDLIQRELKRYPNAEIVWCQEEPMNMGAYNYIAPRLATAMTALGRGTFDDIRYIGRAPSASTATGFYSVHAKEHTELVLTASQPEPIKTNTTI

SEQ ID NO: 66793 - protein, 66 aa, Gossypium hirsutum
  Clone ID: uC-gsronu33B157h05b1.pep
NQRESELGFGFGSMWSNFSDSFDPLCLQQSTQKFICLKASPRPSLLHVLIHSLVVIHKPSSLLSRP

SEQ ID NO: 66794 - protein, 118 aa, Gossypium hirsutum
  unsure (1)..(118): unsure at all Xaa locations
  Clone ID: LIB3048-008-Q1-L1-B3.pep
AYWTGFKSPEPIGPFPNTGGKPRILENGGQTITTLSNKFKPXKPGKKVINXSAPMIETGEGLGWAMGEALAFATLLVESNHVRLSGQDVERGTFSHRHSVIHDQETGEQYCPLDHVII

SEQ ID NO: 66795 - protein, 155 aa, Gossypium hirsutum
  Clone ID: GOSHI-09MAY01-C115688_1.pep
MVITITIRDLLFPVSFLLLLPCEAVAATLGICYGRVANNLPPTSEVINILKTNGISNVRIFDPDPFTLQSFSGTGINLMTGVPNEALPSLASGPPASALQWLQTDIFAHIVPSQIRYIAVGNEVLLKDSFYSPYLVPAVVNLYQALKMLNLDGTI

SEQ ID NO: 66796 - protein, 233 aa, Gossypium hirsutum
  unsure (1)..(233): unsure at all Xaa locations
  Clone ID: GOSHI-09MAY01-C15650_1.pep
MASLSSQPQFRYTQPPSKVLHLRNLPWECTEEELIELGKPFGKVVNTKCNVGANRNQAFIEFADLNQAIAMISYYASSSEPAQVRGKTVYLQYSNRQEIGNNKTTAVFAGNVLLGTSEGQDRAACFHWMVCILVFSAFGFVHXIPTFERTAGFQALVXFSDAETATSAKNALDGRIIPRYLLSESYLWYPVYISVIQIGGIRPRTGLTIPIRAPSYKETPQFGDEEQLQSCSL

SEQ ID NO: 66797 - protein, 100 aa, Gossypium hirsutum
  unsure (1)..(100): unsure at all Xaa locations
  Clone ID: LIB3197-057-Q1-M1-F10.pep
SKTQNTCPPTIFPVSPIKVPIHLHRSKSLSEDRGKMVYLQYSNRQEIVNNKTSGDIAGNVHLVTIKGQDAWLDSIDDMNLVFSAXGFVHNITTFEKTAGF

SEQ ID NO: 66798 - protein, 317 aa, Gossypium hirsutum
  unsure (1)..(317): unsure at all Xaa locations
  Clone ID: GOSHI-09MAY01-C115658_1.pep
EDQTESETDHNDDIVIVEEQPPNVAASATNLIEEKVEEIVEEYEKELCQEEQLKPMKDHIDLDSQTKNASGRDLKEIAGSFWSAASVFSKKLQKWRQKQKLKKRGNGCGSARLPVEKPIGRQYRETQSEIADYGFGRRSCDTDPRFSLDAGRTSSAAPAWAFDAARMSCDDPRYSFDEPRASCDGYLMGRNVPKXPTMGSVAEXAPVHHGMRSDTQIPVEGPTALISVTEEDESLPGGSAQTRDYYSDSRRRKSLDRSSSSRKTAAAIVAEMEEMRSVSSTKVSPATVDYTHGPKPVIPDRDSRDSNSLRDDYSDTF

SEQ ID NO: 66799 - protein, 197 aa, Gossypium hirsutum
  Clone ID: GOSHI-09MAY01-C15610_1.pep
MEAAVASKPVIKVAAICGSLRKASNNRGLIRTALELTKESIAGIQMEYIDISPLPMLDTDLEVDGKFPPAVEAFRQKILESDSILFASPEYNFSLTAPLKNALDWASRPPNVWADKAAAIVSAGGGFGGARSHYHLRQVGVFLDLHFINKPEFYLNAFQPPAKFDSDGNLIDEDSKERMKQVLLSLQAFTLRLQPKN

SEQ ID NO: 66800 - protein, 136 aa, Gossypium hirsutum
  Clone ID: GOSHI-09MAY01-C15620_1.pep
MMAGAEKFVEADNAEAIITRIEHKSRKIESLLKQNKPVEALKTALEGSSHMIRDERCKSANWIVVHRALMAIKDVEGMFSSLDPEYYDILMKYLYRGLSTGDRPTCDQCLRIHEKLTERAGLGCILRSLADTVNAV

SEQ ID NO: 66801 - protein, 88 aa, Gossypium hirsutum
  unsure (1)..(88): unsure at all Xaa locations
  Clone ID: uC-gsronu33B032f12b1.pep
SGWLVTRRCKIANXLVVHRALMAIKDVERMFSSLDPEYYDILMKYLYRGLSTGDRPTCDQCLRIHEKLTERAGLGCILRSLADTVNAI

SEQ ID NO: 66802 - protein, 114 aa, Gossypium hirsutum
  Clone ID: uC-gsflmaxxa009d03b1.pep
DWLHGSTDFGHFIFFLAGGRYGLSLAGSWVTFSGERLLSQKPRGVEAAVSLPRFTLTVGIMIQRQCIVFISSTSSIEKFKPAYLLPDGRLERAGRVKKNSPLDGTRSPAVNNGL

SEQ ID NO: 66803 - protein, 112 aa, Gossypium hirsutum
  Clone ID: uC-gsflmaxxa009d08b1.pep
PRVRRAIFLGVRIGDPTAVGQEQFSPSSPGWPPFMRVNPILDWSYRDVWAFLLTCKVQYCSLYDQGYTSIGSIYDTVPNALLSISSTSSKEKFKPAYLLADGRLERAGGVKK

SEQ ID NO: 66804 - protein, 135 aa, Gossypium hirsutum
  unsure (1)..(135): unsure at all Xaa locations
  Clone ID: GOSHI-09MAY01-C15170_1.pep
SYGLVVLSAEDPGSATRPEVMDLTEDDLIEKFASGXVSMVTALSLAISYPTFAAVPHMFINGYKNVLAVAVATEYSFRQADKVKEYLADPSKFAVATAPVAAAGGAAPAAAVPAEEKKPEPEEESDDDMGFSLFD

SEQ ID NO: 66805 - protein, 111 aa, Gossypium hirsutum
  Clone ID: LIB3148-012-Q1-K1-H11.pep
PRVRPRVRPRVRPRVRPRVRPRVRPRVRAAVPHMFINGYKNVLAVAVATEYSFRQADKVKEYLADPSKFAVATAPVAAAGGAAPAAAVPAEEKKPEPEEESDDDMGFSLFD

SEQ ID NO: 66806 - protein, 85 aa, Gossypium hirsutum
  unsure (1)..(85): unsure at all Xaa locations
  Clone ID: LIB3149-060-Q1-K1-D5.pep
FLAISYPTXAAVPHMFINGYKNVLADAVATDYSFRQADKHKEYMTDPNKFSDSTVPDADFYGTATAAAVPAKDKKPQPKKESDDY

SEQ ID NO: 66807 - protein, 110 aa, Gossypium hirsutum
  Clone ID: AI726525.1.pep
MEGGGSDDHQLHHHHQHRPTFPFQLLEKKQDDIQPCSSSSSPPFPSLLPPSSSSSPSADQPNTSRSISSLQISPEPCKKPPPKRTSTKDRHTKVDGRGRRIRMPALCAAR

SEQ ID NO: 66808 - protein, 156 aa, Gossypium hirsutum
  unsure (1)..(156): unsure at all Xaa locations
  Clone ID: LIB3197-001-P1-M1-E6.pep
SGSDDHQLHHXHHHHHHRQEQQHRPTFPFQLLEKKEDDNQPCSSSSSPPFPSLVPPSSSSSSSADQPNTSRSISSLQISPEPFKKPPPKRTSTKDRHTKVDGRGRRIRMPALCAARVFQLTRELGHKSDGETIEWLLQQAEPAVIAATGTGTIPAN

SEQ ID NO: 66809 - protein, 76 aa, Gossypium hirsutum
  Clone ID: GOSHI-09MAY01-C15080_1.pep
RYEISSMVKVVFPGKQQLLTMNFFLCFIRIISQSFHFAYAEFSYFPSHLQSSCSGTLSSKSSANGRNTRSIFSSST

SEQ ID NO: 66810 - protein, 62 aa, Gossypium hirsutum
  Clone ID: GOSHI-09MAY01-C115048_1.pep
YAFESPEIDYESTPVSSLISQSFATTNRKSVANHFLSTKFFQFLLLSTSRPLSFTRMLHALA

SEQ ID NO: 66811 - protein, 378 aa, Gossypium hirsutum
  Clone ID: GOSHI-09MAY01-C15030_1.pep
MGKKRVMVPAKELDLSTVKYEKETIQAPHLTGSILKLFVRIIEIPIIGSLIISFMKKENNMVEMLQNTEIPEKPMFKPEFPPQEAEPSVVIVDEEGKPTDRVESALKCLPHYDPASCWSGDTLPSFRYWKIRDFAYAYRSKLVTPSKIAEQIITLVEGCKYHKAPTPLLISFDAEDIRKQAAASTQRFKEGNPLSILDGIFPGVRAGVGCYPHPTKGASTWMHEVRSVEKDAVSVSRLRSCGVIFIGKANMHEFGMGTTGNNPNYGTTRNPYAHERYTGGSSSGPAAIVASGLCSAALGTDGGGSIRIPSSLCGVVGLKTTYGRTNMGGSLCGSGTVEIAGPIASTVEDVILVYAAILGSSPEDRISLKTAPPWLPIL

SEQ ID NO: 66812 - protein, 67 aa, Gossypium hirsutum
  Clone ID: LIB3189-051-P1-K1-A1.pep
CNARASSNHPECSNFTRLISDKQKDKQMSGTMKIDNGFPSLNLCVEAVACFLISSASNEINNGVGAL

SEQ ID NO: 66813 - protein, 218 aa, Gossypium hirsutum
  unsure (1)..(218): unsure at all Xaa locations
  Clone ID: GOSHI-09MAY01-C15360_1.pep
MYSAIRSLPLNGSVGDYQGSFDGTNLPSDACLVLTTDPKPRLRWTAELHERFVDAVTQLGGPDKATPKTIMRTMGVKGLTLYHLKSHLQKYRLGKQSCKESTDNSKDASCVAESLDTGSSTTSSSKLVAQDLNDGYQVTEALRVQMEVQRRLHEQLEVQRHLQLRIEAQSKYLQTILEKAXCKALSDHVAASAGLEAAREELSKLGIKISNDCQGMVP

SEQ ID NO: 66814 - protein, 428 aa, Gossypium hirsutum
  Clone ID: GOSHI-09MAY01-C15300_1.pep
MTGSEGQTFDLEQGWEFMEKGITKLKNILEGLPEPQFSSEDYMMLYTTIYNMCTQKPPHDYSQQLYDKYRESFEEYITSTVLPSLREKHDEFMLRELVKRWSNHKVMVRWLSRFFHYLDRYFIARRSLPPLNEVGLTCFRELVYQELNAKVRDAVISLIDQEREGEQIDRALLKNVLYIFVEIGMGQMDYYENDFEATMLKDTAAYYSRKAANWIVDDSCPDYMLKSEECLKCEKDRVSHYLHSSSEPKLLEKVQHELLSVWETRLLDKEHSGCHALLRDDKVEDLSRMFRLFSKIPRGLDPVSSTFKQHVTAEGTALVKLAEDAASTKKAEKRDVVGLQEQVFVRKVIELHDKYLAYVNDCFQNHTLFHKALKEAFEAFCNKGVAGSSSAELLATFCDNILKKGGSEKLSDEAIEETLEKVVKLLAY

SEQ ID NO: 66815 - protein, 95 aa, Gossypium hirsutum
  Clone ID: GOSHI-09MAY01-C15250_1.pep
QFLCNSTKKKKSFLQMRPSCLEAVCFLVLFIFLYSVEGIRLEGSFRSSGHDLKLHEEALMKISNGVMGDVIFCKQGQCRGNSRKLLTATTTATTT

SEQ ID NO: 66816 - protein, 56 aa, Gossypium hirsutum
  Clone ID: GOSHI-09MAY01-C15270_1.pep
PLISLQQIIVFMQVAASFSLGLIYYVVFHNWRLHSLGLVCVFNGIFGHVLVTATAP

SEQ ID NO: 66817 - protein, 141 aa, Gossypium hirsutum
  Clone ID: GOSHI-09MAY01-C15200_1.pep
AILNWLSCIPPRIGGPLAILNPSDPPERLVEYLPENSCDPRAAISGALDSSGNWKGGIFDRDSFVETLEGWARTVVTGRAKLGGIPVGIVAVETQTVMQVIPADPGQLDSHERVVPQAGQVWFPDSATKTAQAIMDFNREE

SEQ ID NO: 66818 - protein, 253 aa, Gossypium hirsutum
  unsure (1)..(253): unsure at all Xaa locations
  Clone ID: GOSHI-09MAY01-C15220_1.pep
MVLMEPHYADEQQEQKATNATLTPSETTPASAASSNVNGEDAASDGFETASERDVDDDEEEHHVNNQQPSEQKASDSYQDALNDEQLKEKALAQANDAKMEGNKLFGNGQFEEALLQYEIALQITAEMPTAVELRSVCHSNRAACFLKQGKYEDTIKECTKALDLNPSYXKALVRRGEAHEKLQNFEEAIADMKKILEFDPSNNQAVKTIRRLEPLAAEKREXLKEEMMAKLKELGNSVLGTFGMSVDNFKAV

SEQ ID NO: 66819 - protein, 210 aa, Gossypium hirsutum
  unsure (1)..(210): unsure at all Xaa locations
  Clone ID: LIB3831-002-Q1-K6-D6.pep
RCCLRGFETASERDVSDNEEDDRAGDKQPPQQRGPDSYQDALNDEQLKEKALAQANDAKTEGNKLFGNGQYQEALLQYEIALQVTAEMPSATEIRSICHSNRAVCLLKLGNYEETIKECNKALELNASYMKALVRRGEAHEKLEHFEEAIADMKKILELDPANDQARKAIRRLEPLAAEKREKMKEEMIGKLKELGNSVLGRXGMSIDNF

SEQ ID NO: 66820 - protein, 71 aa, Gossypium hirsutum
  Clone ID: AW186958.1.pep
EKALGPANDAKMEGNKLFGNRQFQEALLQYEIALPITAEMPTAVELRSVCLSNPAAWFLKQGKYEDTLKEC

SEQ ID NO: 66821 - protein, 57 aa, Gossypium hirsutum
  Clone ID: LIB3493-043-P1-M1-H6.pep
ERRKWVSFQMGQRHFINALDFRPFPFNLEHPHLAIKSTILVNTNYIIINAWVGVRWK

SEQ ID NO: 66822 - protein, 153 aa, Gossypium hirsutum
  Clone ID: GOSHI-09MAY01-C16890_1.pep
MCSLVDGVSASDMEKFLCDRLLDPTQPISERFRALFSLRNLKGPAPRNALIQATRDSSNLLAHEAAFALGQMQDAEAIPALEVVLNDLSLHPIVRHEAAEALGAIGLESNIPLLKNSLVLDPAPEVRETCELALQRIEELKSDGSDDKSSMTE

SEQ ID NO: 66823 - protein, 118 aa, Gossypium hirsutum
  unsure (1)..(118): unsure at all Xaa locations
  Clone ID: GOSHI-09MAY01-C16880_1.pep
MEIKSGHGPFYFELNTGAKMPCIGLGTWKAPPGVVGEAVVAAVEAGYRHIDCAHVYDNEEEIGLALKGLFSSGQVKRSELFITSKLWCCDHAPXDVPKALARTLGDLQLDYIDLYLIH

SEQ ID NO: 66824 - protein, 67 aa, Gossypium hirsutum
  Clone ID: GOSHI-09MAY01-C16870_1.pep
MPPPGWGPPPGGPPGPPGLCGCFDFICGGICRLLSSCFYVLCCCCIFESCCGPMFGGPPGPPGPRPF

SEQ ID NO: 66825 - protein, 286 aa, Gossypium hirsutum
  unsure (1)..(286): unsure at all Xaa locations
  Clone ID: GOSHI-09MAY01-C16860_1.pep
MASTSSLTLSQALLARTIFSDGSTQFSDCSVSLPTTTFSGLKLTTPRSRRVLPTRFNRSLRVRSAAVETIGTPAETSLLEKSVNTIRFLAIDAVEKANSGHPGLPMGCAPMGHILYDEIMRYNPKNPYWFNRDRFVLSAGHGCMLQYALLHLAGYDSVQEDDLKNFRQWQSRTPGHPENFETPGVEXVTTGPLGQGIANAVGLALAEKHLRARFNKPDNEMVVHYTYAILGDGCQMEGVANEACSLAGHWGLGKLIAFYDDNHISIDGDTEIAFTENCQEPFKGLG

SEQ ID NO: 66826 - protein, 137 aa, Gossypium hirsutum
  Clone ID: LIB3197-031-Q1-M1-E6.pep
MASTSTLTLAEALLARAIFSDGSIQSSDYCVSLSYLEKSVNPIRFLAIDAVEKANSGHPWLPMGCAPMGHILYDEIMRYNPKNPYWFNRDRFVLSAGHGCMLQYALLHLAGYDSVQEDDLKNFRQWQSRTPGHSENL

SEQ ID NO: 66827 - protein, 183 aa, Gossypium hirsutum
  Clone ID: GOSHI-09MAY01-C16590_1.pep
DNLLVTKSSENADFGLAREVSSMPPHTELVSTRWYRSPEVLLQSSSYTPAIDMWAVGAILAELFTSSPIFPGESEIDQLYKICCVLGAPDWTSFPEATNISRLINISYSEILPTNLSDIIPNAGPEAVDLIMQLCSWDPLRRPTADQALQHPFFNVDARIPHPRLHDPLELRLNNMESKPNLE

SEQ ID NO: 66828 - protein, 138 aa, Gossypium hirsutum
  Clone ID: GOSHI-09MAY01-C16580_2.pep
MNALAGTSRNFRLASRLLGLDSKLEKSLLIPFREIKVECTIPKDDGTLVSYVGFRIQHDNARGPMKGGIRYHPEVDPDEVNALAQLMTWKTAVADIPYGGAKGGIGCSPRDLSKSELERLTRVFTQKIHDLIGIHTDV

SEQ ID NO: 66829 - protein, 151 aa, Gossypium hirsutum
  Clone ID: GOSHI-09MAY01-C16580_1.pep
MNALAATNRNFRLASRLLGLDSKLEKSLLIPFREIKVECTIPKDDGTLATYVGFRIQHDNARGPMKGGIRYHPEVEPDEVNALAQLMTWKTAVAAIPYGGAKGGIGCNPRDLSKSELERLTRVFTQKIHDLIGIHTDVPAPDVATNAPHDL

SEQ ID NO: 66830 - protein, 194 aa, Gossypium hirsutum
  Clone ID: GOSHI-09MAY01-C16570_1.pep
LRVRFYTSNMPIILQSALVSNLYFISQLLYRKYSGNFFVNLLGKWKESEYSGGQFIPVGGLAYYVTAPAGLADMAANPFHALFYLVFMLSACALFSKTWIEVSGSSAKDVAKQLKEQQMVMPGHRDSNLQKELNRYIPTAAAFGGMCIGALTVLADFMGAIGSGTGILLAVTIIYQYFETFEKEKASELGFFGL

SEQ ID NO: 66831 - protein, 173 aa, Gossypium hirsutum
  Clone ID: GOSHI-09MAY01-C16480_1.pep
YATGPNRDKYPLGETVSVKKKVDSATEKVEKTTDLKEPKVQNDKQSVSEVMKELQVLFEKASESGNQLLKMLDTQKFRYHHKKSVYQGSTQILHIITSNSSETETLLSKDKVSSTENDEIDNAQNLSSILRKLCMWETKLYDEVKAEEKLRIIHAKTCRQMKSLNQKGGNARR

SEQ ID NO: 66832 - protein, 131 aa, Gossypium hirsutum
  unsure (1)..(131): unsure at all Xaa locations
  Clone ID: GOSHI-09MAY01-C16450_1.pep
VGGGIYTKAADVGADLVGKVERNIPEDDPRNPAVIADNVGDNVGDIAGMGSDLFGSYAESSCAALFVASISSFGISHEFTAMSYPLLISSMGIVVCLITTLFATDLFLIKKSTXILPSFKPQLLIFTQLMN

SEQ ID NO: 66833 - protein, 105 aa, Gossypium hirsutum
  Clone ID: GOSHI-09MAY01-C16470_1.pep
MASNAYIIANKRAVSSHPHPHRQPRLPLLLLLLFSLLFIGKFDLVSALNYTKYTRKVSNLRLQRIQKHLEKINKPAVITIESPDGDIIDCVHKRKQPALDHPFLK

SEQ ID NO: 66834 - protein, 275 aa, Gossypium hirsutum
  Clone ID: GOSHI-09MAY01-C16460_1.pep
EKVKFGTFDIISVHEVREGLKKFSKWPTFPQLYCKGELLGGCDIAIAMHESGELKEVFRDHGVDIIGTEQGTGGILEPTGLTANLNSRLQSLINSSPVMLFMKGKPGEPKCGFSHKVVEILKQEKVDFESFDILSDDEVRQGLKVYSNWSSYPQLYIKGELIGGSDIALEMQKSGELKRILTERGIVKEETLEDHLKSLISSSPVMLFMKGTPDNPRCGFSSKVVNALKEEGIDFGSFDILPYDEVRQGLKVFSYWPTFPQLFYNGDLIGGCENS

SEQ ID NO: 66835 - protein, 111 aa, Gossypium hirsutum
  unsure (1)..(111): unsure at all Xaa locations
  Clone ID: LIB3543-020-Q1-K1-H10.pep
RVRERGIMKEETLEDHLKSLISSSPVMLXMKGTPDNPRCGFSSKVVNALKEEGIDFGSFDILTNDEVRQGLKVFSNWPTFPQLYYKGELIGGCDIILELRNNGELKATLSE

SEQ ID NO: 66836 - protein, 163 aa, Gossypium hirsutum
  Clone ID: GOSHI-09MAY01-C16410_1.pep
MKQMKLEPDIVVDKPKQATLPPPPPLPRFWARKTSADSVTNREIAKFWRQKHAEEEDHLLAAIKAAARKRACNLSEEDYKCFMESLSDEDYETKQNITAPTNHSNGNEIRVGIKDWWTKSKYAYLNQPAIESTDKPRRRASTYIPNFLNYKPAPLYPTSLGVF

SEQ ID NO: 66837 - protein, 265 aa, Gossypium hirsutum
  unsure (1)..(265): unsure at all Xaa locations
  Clone ID: GOSHI-09MAY01-C16430_1.pep
MAYPHYRSPFGDTTFTKVFVGGLXWETPTEEMRRYFQQFGEILEAVIITDKNTGKSKGYGFVTFRDPESXRRACVDPNPVIGGRRANCNIASLGRPKPSPPRGRNQGTSFSXVAQQGTPSYSGVAQQXPPPPPPPRPPGIYPPYGFPTYSPEYGYHQALYNPQIQQAQYYHQLYGSSSTSMGSPYYFGYSLQAPRGTFSAPQAQRIPGPSYLYYPAQMEGSFSTYPPPPFHPTRHPIPSPADSQTPQPTSTESESGAITSESPKT

SEQ ID NO: 66838 - protein, 91 aa, Gossypium hirsutum
  Clone ID: LIB3543-027-Q6-K6-D1.pep
MLYKFQVSCKRIDKPRFFLLLFVCLDAMAYPHYRSPFGDTTFTKVFVGGLPWETPTEEMRRYFEQFGEILEAVIITDKVTGKSKGYGFVTF

SEQ ID NO: 66839 - protein, 109 aa, Gossypium hirsutum
  unsure (1)..(109): unsure at all Xaa locations
  Clone ID: AI054528.1.pep
MEDKYAIKKDVTELIGNTPMVYLNNIVDGCGARIAAKLELMEPCSSVKDRIAYSMIKDAXDXXLITXXEECLIDTTSGNTGIALAFMXQGLLRYCTAAYLSIGRSVFSF

SEQ ID NO: 66840 - protein, 126 aa, Gossypium hirsutum
  Clone ID: uC-gsflmaxxa076c11b1.pep
MEGKCAIKKDVTELIGNTPMVYLNHIVDGCGARIAAKLELMEPCSSVKDRIAYSMIKDAEDKGLITPGKSVLIEPTSGNTGIGLAFIGAARGYKVIVTMPASVSIERRIVLRAFGAEVCLKTQPGL

SEQ ID NO: 66841 - protein, 68 aa, Gossypium hirsutum
  Clone ID: GOSHI-09MAY01-C16710_1.pep
PSNLQGKVSVSQFDHLFQSCWHIMKCAKTTKISMVFLKREIHLAYTAVLYAYIKILKYHQIIFCLLQK

SEQ ID NO: 66842 - protein, 90 aa, Gossypium hirsutum
  Clone ID: LIB3146-039-Q1-K1-A4.pep
ILMILANCLPEGYGIRLGKFRRPINSLVPREAVEPAPSPRRTRGSAWAFWPGTWRRCWLNHIMVYANMIEMGDQIVIHSLTLVGLMVRGC

SEQ ID NO: 66843 - protein, 38 aa, Gossypium hirsutum
  Clone ID: GOSHI-09MAY01-C16720_1.pep
TDSSFNLRLKTCRQLAALLHKQLQKINEHKALIFTDYL

SEQ ID NO: 66844 - protein, 494 aa, Gossypium hirsutum
  Clone ID: GOSHI-09MAY01-C16690_1.pep
EKFPAEQQNSEDSGRLKEYFGMNSPTKDQFFIERTARPATRPAKGEKTSKLKGSELCMEYETIDFSMKRVSNIYIEAKKHLSDLLTNEDQNEDLLSTQVPKTLGRILSLPEYNTSPVSSPGQNLEHSFTTAHMRFAGSDKLQMVSENDRFVSLLSMRAEKTDGQLCISENKSDNEVESDNAISNNLDTSVNNDKEDPIFCSIKDELSSKESVSIVKATEMMVHEESKSLDISSETSGSSIITDDKNVDIYEVCDEKQNPWYLKQDSSEVDQQPFSPLSSPSDSSVMKKVECLESVTDIPERSSPVSVLEPIFADDLISPASIRSYSGETSIQPLRIRFEEHDSLATNQSNRIKTCMNDKESIFEHIKAVLQASSFSWDEVYIRSLSSDLLIDPLLVDEVEYLPNQLCQDQKLLFDCINEVVREVCEYYFGSPSVSFVKPNIRPIPNMQNTIQEVWEGVFWHLLPTPLPCTLDLVVRKDRAKTGTWMDLQLDTCY

SEQ ID NO: 66845 - protein, 100 aa, Gossypium hirsutum
  Clone ID: LIB3083-005-Q1-L1-G10.pep
FSSQNPWYWKQDSSEVDQQPFSPLSSPSDSSVMKKVECLESVTDIPERSSPVSVLEPIFADDLISPASIRSYSGRNMREVFCLFHIWLLLLSLLSHSDSS

SEQ ID NO: 66846 - protein, 127 aa, Gossypium hirsutum
  Clone ID: GOSHI-09MAY01-C16640_1.pep
MALDPQNAPMEGFPATPNIREVRPESGFENFGFCTDPCRVPGGEPNSGIRRVSLRAEIDTSPPFGSVKEAVTRFGGNGHCVPLNKFGEYHGIEEFDLKKVEEQAAELEKDLIVKELETLDVLEELGT

SEQ ID NO: 66847 - protein, 210 aa, Gossypium hirsutum
  unsure (1)..(210): unsure at all Xaa locations
  Clone ID: GOSHI-09MAY01-C16100_1.pep
MAFSGTTDKCTICDKTVHFIDLLTADGIPYHKTCFKCTHCNGLLVMSNYCSMEGVLYCKPHFEQLFKETGTYTKNFQSKKSDRPNGQTKTPNRLAAFFSGTQDKCGVCNKTAYPLEKVTXEGENYHKSCLPXSHRGGLLTPSTYAAMDGILYWQHHFGSLFMENGMLSPLCQPACIKKNLARFSSVSQPQESLEFGKEANPEALIPNPIP

SEQ ID NO: 66848 - protein, 156 aa, Gossypium hirsutum
  unsure (1)..(156): unsure at all Xaa locations
  Clone ID: GOSHI-09MAY01-C16080_3.pep
RSLPSPLFSLSYLQIRFLHSLLISVLAHRLRWFLPESDPYRVSDRVDTSTASQIAPSPEMAQMAQMVCGSCRQLLSYPEGTRQAKCSCCETANFXLEAHRVGLVRCDTGALLLMYPYGSPSVKCSSCLSVTEIGEHNRRPPWSVQQGQPTPPNSVH

SEQ ID NO: 66849 - protein, 59 aa, Gossypium hirsutum
  Clone ID: uC-gsronu33B124g08b1.pep
RSLPSPLLSLVFTNQVSSFSSHLSSRPPPLLVFVGSDPYTVSVITVPPFGRLLITNSGI

SEQ ID NO: 66850 - protein, 132 aa, Gossypium hirsutum
  Clone ID: LIB3584-042-P1-K1-F3.pep
HRYCTPNCRVRVTKLTIAPLLFLVSTNQVSSFSSHLSSRPPPPLVFSGSDPYPVSDRVDTSTASQIAPSPGNEAYNYAYNYVSHSVVLIHWLSYFVCFLIFWMQRWLKWLKWFVALVVNCFHILKELGKLNV

SEQ ID NO: 66851 - protein, 124 aa, Gossypium hirsutum
  Clone ID: LIB3493-054-P1-M1-C2.pep
SSFDLWRGGDPQVKVPFSLLLRKFAPKFTPLLCLVLVNQFFSSHLSSRPPPSLLIFFGSDLYSVSDRVGIGTAPQIAESSSRPPAPLVFARSDPDTVSDRVDTSTAFQIAPSPVWMQRWFKWLK

SEQ ID NO: 66852 - protein, 188 aa, Gossypium hirsutum
  Clone ID: GOSHI-09MAY01-C16000_1.pep
INNGSKPLINNIISSIFPGKQEGIAVGRTFAALKNYKVDGNKEMMAIGLMNMVGSSTSCYITTGAFSRSAVNHNAGAKSAVSNIVMSITVMVTLLFLMPLFQYTPNVVLGAIIVSAVVGLIDIPAACQIWKIDKFDFIVMLCAFFGVIFISVQDGLAMAVGMSIFKILLQITRPKTVMLGNIPGTDFF

SEQ ID NO: 66853 - protein, 55 aa, Gossypium hirsutum
  Clone ID: GOSHI-09MAY01-C16390_3.pep
GRIRNKHIMIDLGIDNNKINWALKDKQEFRDIIGTVYREAWKGRGLKDYSKKYCY

SEQ ID NO: 66854 - protein, 66 aa, Gossypium hirsutum
  Clone ID: GOSHI-09MAY01-C16390_2.pep
SLDSRFNQTLKNVQGNKHIMIDLGIDNNKINWALKDKQEFRDIIGTVYREAWKGRGLKDYSKKCCY

SEQ ID NO: 66855 - protein, 142 aa, Gossypium hirsutum
  Clone ID: GOSHI-09MAY01-C16390_1.pep
MSYLLPHLHSGWAVDQAILAEEERLVVIRFGHDWDETCMQMDEVLASVAETIKNFAVIYLVDITEVPDFNTMYELYDPSTVMFFFRNKHIMIDLGTGNNNKINWALKDKQEFIDIIETVYRGARKGRGLVIAPKDYSTKYRY

SEQ ID NO: 66856 - protein, 56 aa, Gossypium hirsutum
  Clone ID: LIB3148-016-Q1-K1-D9.pep
TFFFRNKHIMIDLGIDNNKINWALKDKQEFRDIIGTVYREAWKGRGLKDYSKKCCY

SEQ ID NO: 66857 - protein, 95 aa, Gossypium hirsutum
  Clone ID: LIB3120-009-Q1-K1-H12.pep
MSYLLPHLHSRWTAYQAILSEEERLVVIRFCHYWDETCMHMDDMLASVAVSITNFAAIYLVYITDVPAFNTMYERYDLSTATYFFRNTHILIDLG

SEQ ID NO: 66858 - protein, 410 aa, Gossypium hirsutum
  Clone ID: GOSHI-09MAY01-C16340_1.pep
MKKRKKSNMEDFKDSESKSVSETVNGSHQFTIKGYSLAKGMGAGKCIQSDIFTVGGYDWAIYFYPDGKNPEDSAMYVSVFIALASEGTDVRALFELTLVDQSGKGKHKVHSHFDRALESGPYTLKYRGSMWGYKRFFRRTTLESSDYIKDDCLIMNCTVGVVRTRLEGPKLSSIPVPPSDMGQNLRALLESEVGCDIMFQVGDETFKAHKLILAARSPVFKAQFFGLVGDPNLDKIVVKDFEPSIFKAMLLFIYTDKLPDVQEIVDSTSMCTSANMVQHLLAAADLYNLDRLKVLCEAKLCEELNADTVATTLALAEQHHCAQLKAICLKFAATPSNLGAVMQSEGFKHLEECCPSLLSEMLKAFASSEESSSLLSSRKRSVSSVYGMDLAAEGPAAEPMNPNGRRVRRR

SEQ ID NO: 66859 - protein, 54 aa, Gossypium hirsutum
  Clone ID: LIB3048-045-Q1-L1-B5.pep
LIMNCTVGVVRAGVDVPKLSSIPVPTLDMGQNLRALLESQTRCDIMHQVGDETF

SEQ ID NO: 66860 - protein, 183 aa, Gossypium hirsutum
  Clone ID: GOSHI-09MAY01-C16360_1.pep
MGAFISKFWFMLFPAKEYKIVVVGLDNAGKTTTLYKLHLGEVVTTHPTVGSNVEELVYKNIRFEVWDLGGQDRLRTSWATYYRGTHAVIVVIDSVDRARITIMKEELFRLLAHEDLQHSVILVFANKQDLKDAMTPAEITDALSLHSIKNHDWHIQACSALTGDGLYDGLGWIAQHVTGKAPS

SEQ ID NO: 66861 - protein, 238 aa, Gossypium hirsutum
  Clone ID: GOSHI-09MAY01-C16280_1.pep
APTRPKRDAYLLMHMRRHGGEGKTPAALAKPNKESTSEPALIKRYSCPFAGCKRNKDHKKFQPLKTILCVKNHYKTSHCDKSYICSRCHTKKFSVIADLKTHEKHCGKDKWLCSCGTTFSRKDKLFGHIALFQGHTPAIPLDETKGPTAPSDPGDGSEATNVVGSMNFFNFGSENGVDVKGSLDDPAAYFSPLNFETCNFGGFHEFPRPASDDSETSLAFLLSGACGYNNNNNDVERS

SEQ ID NO: 66862 - protein, 144 aa, Gossypium hirsutum
  Clone ID: LIB3829-024-Q6-N6-A2.pep
SVIADLKTHEKHCGKDKWLCSCGTTFSRKDKLFGHIALFQGHTPAIPLDETKGPIAPSDPGDGSEATNVVGSMNFFNFGSENGVDVKCSLDDPAAYFSPLNFETCNFGGFHEFPRPASDDSETSLAFLLSGTCSYNNNNDVERS

SEQ ID NO: 66863 - protein, 230 aa, Gossypium hirsutum
  unsure (1)..(230): unsure at all Xaa locations
  Clone ID: GOSHI-09MAY01-C16250_1.pep
LDLALHSKFELSHTWKNGSVYFTGYYVDTPQGSGSESEEELLAHASDPVKPHATASDPTTSKQVKIVEPKKAEDSSDDEDEDDTSTEDEMSSEDQEPGMLVNGENESNNDTDSDEDDSEEESSDEDPETPETEKAGPSKKRSAESATKTPAPEKKAKLVTPQKTDGKKVGGHTATPHPSKQARKASATTRSSESERXPGGSSFPCKSCGRSFGSEMALQSHSKAKHGTAV

SEQ ID NO: 66864 - protein, 136 aa, Gossypium hirsutum
  Clone ID: GOSHI-09MAY01-C17870_1.pep
VEQVRVGQALYKAASLFNHSCLPNIHAYFISRTLLLQQQDLCGGGGALVLSYGPPVGQWDCKDRLRFLEEEYFFRCWCRGCSEVNESDLVISGFCCVNPNCAGVVLDNLVANCEKQKPNVPETICNESHLQGLELK

SEQ ID NO: 66865 - protein, 220 aa, Gossypium hirsutum
  Clone ID: GOSHI-09MAY01-C17810_1.pep
EGLIPHWIRPLPPRFPVDEELVWLNPDNNHELQWDPASGADTRRGAAVRDLIAKALRGPLAPNQQEQVLVELANDPKLVYHCGLTPRKLPELVESNPLIAVDVLIKLINSPEIAEYFSVLVNMDMSLHSMEVVNRLTTAVELPKEFVRTYITNCISSCENIKDKYMQNRLVRLVCVFLQSLIRNRIIDVKDLFIEVQAFCIEFSRIREAAGLFRLLKTLE

SEQ ID NO: 66866 - protein, 73 aa, Gossypium hirsutum
  Clone ID: LIB3825-025-Q6-N6-B12.pep
NKVLCLTYYNHCKIQDKYMQNRLVRLVCVFLQSLIRNRIIDVRDLFIEVQAFCIEFSRIREAAGLFRLLKTLE

SEQ ID NO: 66867 - protein, 195 aa, Gossypium hirsutum
  Clone ID: GOSHI-09MAY01-C17820_1.pep
MAPASFHHEKVCVMDASGRLGSTLVERLLERGYTVHAAVQGHVDDLKLNGVATEREKKLKIFRADPFDYQSITDALKGCSGLFYAFEPPQDHPAYDEYMVEVEVRAAHNMVEACARTETIDKVVFTSSATAVLWRDNNSQSLASDLDERHWSDVNFCRKFKLWHALSKTVAEKTAWALAMDRDINMVSINGGLLM

SEQ ID NO: 66868 - protein, 267 aa, Gossypium hirsutum
  Clone ID: GOSHI-09MAY01-C17590_1.pep
MEEAVKEQQSAAQISGSAGKSKLRYPLRSSMKPKEQKPPAPDLSNSSSSRRGRATPSVSKSVGVLDLSKEKSGSGKPPRRLSIPTKSTVTASPKFVGTTTPIFEGRAAKKPSNGQGKSDTPLSDSSRSSTRRRFNVLSSASYWLSQIKLSESASKHSVSLGFFKLALEAGCEPLQKMSDELKSYIRRHNLGENGEAINELLESYNVPDNPEQPQVPETCSQVPDEGTRSSDDEVHRVSPVAAAARRLKPKSLNTDAARVSSVAKSAK

SEQ ID NO: 66869 - protein, 81 aa, Gossypium hirsutum
  Clone ID: GOSHI-09MAY01-C17560_1.pep
MPPLALSDLKEKKEEKMMKKKIALETPESEKKTKKIKEPKVREEEDDSAVKKSKKKRKASELQMEEEERSETSSELVEPVD

SEQ ID NO: 66870 - protein, 362 aa, Gossypium hirsutum
  unsure (1)..(362): unsure at all Xaa locations
  Clone ID: GOSHI-09MAY01-C17420_1.pep
FLCYWQAHTVLEMNYTEQQLISAVSSGGLRPVLAGIESGVPESMLSLIQKCWDANPQNRPSFNDIVLELDDMLQQRKKMEKEDLSLHQPPISHFHQVMDDVNKLHTYQEENNWVXQGECVSKRASFGEYSGFTMWLDGFDDPFAYHLLLPSRAFATCGRRESMEDMHFLMPFLCNEKDVHAFGIFDGHRGAAAAVFSVQALPEFLGAFGSMCSPADALVEAFVRTDVAFRDELDSHRKSRRVIQKDWHPGCTAAVALIVKNKLFVANAGDCRTILCRRGCPVALSRDHVASCPEERNRVVSAGGEVKWQVDTWRGGRAGLQVTRSXGDDDXKPAVTAEPEITETVLSVEVSXLGMASDGLWD

SEQ ID NO: 66871 - protein, 214 aa, Gossypium hirsutum
  unsure (1)..(214): unsure at all Xaa locations
  Clone ID: GOSHI-09MAY01-C17640_1.pep
MASLSFLHLSSATRFTPRATPLNHRARTQKSFSIRSQSAPVLSQDELKKLAADKAVESVKSGMVLGLGTGSTAAFVVDKLGQLLSTGQLSNIVGIPTSKRTQEQAASLNIPLSTLDLHPHIDLAIDGADEVDPNLDLVKGRGGALLREKMVEAASSSFIVVADDSKLVSGLGGSGLAMPVEVVQFCWKYNLVRLKDXKRVGCEAKVRLAGDGSE

SEQ ID NO: 66872 - protein, 139 aa, Gossypium hirsutum
  Clone ID: GOSHI-09MAY01-C17660_1.pep
QLKMFDDLAKNFADLTSKPSLFETDGNLDEDVLRQFEKEVKDRVKFARLMVAESKENYDNQLKIQKLKDTIFSVSESLGKAKKNGALASSIAAKSIPKSLHCLAMRLVEERISHPEKYKEESPTAEFEDPSLYHYAVFS

SEQ ID NO: 66873 - protein, 175 aa, Gossypium hirsutum
  unsure (1)..(175): unsure at all Xaa locations
  Clone ID: GOSHI-09MAY01-C17600_2.pep
ISSKNGPRAEATLKILNQVEYYFGDVNLATTDHLMRFINKDPDGYVPISAVASFKKIKALVTTHSQLATVLRNSAKLVVSEDGKKVRRQHPLTESDMEELQSRIIVAENLAEDHCHQNLMKIFSAVGSVKTIRTCQPQPSGGGMSSASRSAKSDGXAFSNKLHAFVEYETVELAE

SEQ ID NO: 66874 - protein, 237 aa, Gossypium hirsutum
  unsure (1)..(237): unsure at all Xaa locations
  Clone ID: GOSHI-09MAY01-C17600_1.pep
FKKIKALVTTHSQLATVLRNSAKLVVSEDGKKVRRQHPLTESDMEELQLHAFVEYETVELAEKAVAELNEEGNXPRVRRSGLRVRLMLRHVSKRAHARVKKGHDGEGQCEEDDVCISELPSNEKQQEDPSQLSDIHSHXNPASSNPILIGEEHSNEKECGQKKGRNRGRGKGRGRTQYHNNHHSSHGNHVGTPPSASSNWVSNEQATGAKQPPGPRMPDGTRGFAMGRGKPVAVNTA

SEQ ID NO: 66875 - protein, 131 aa, Gossypium hirsutum
  Clone ID: GOSHI-09MAY01-C17630_1.pep
MMRLRTYAGLSLVTTLAVIYHAFNSRGQFYPAMVYLSTSKISLVLLLNMGLVVMCILWQLTKRLFLGSLREAEVERLNEQSWREVMEILFAITIFRQEFSVPFLAMVTALLLIKALHWLAQKRVEYIETTP

SEQ ID NO: 66876 - protein, 342 aa, Gossypium hirsutum
  unsure (1)..(342): unsure at all Xaa locations
  Clone ID: GOSHI-09MAY01-C17140_2.pep
TYNILISANASLKQELPGPSTSSIIDPIIRMPVERSRKYGSNAQKRLFHTAVTASDSVYNTWQCRVMYYWFKKHKNGPNSDMGGFTRILHSGKPDNYMNEIPTFIAQPLPAGMDQGYIVLNRPWAFVQWLQKADIKEDYILMAEPDHIIVKPIPNLSKDGLGAAFPFFYIEPKKYESVLRKYFPEEKGPITNIDPIGNSPVIVGKDSLKKIAPTWMNVSLAMKKDPERDKAFGWVLEMYAYAVSSALHGVGNILYKDFMIQPPWDTEIGNKFIIHYTYGCDYDLKGRLTYGKIGEWRFDXRSFDTEAPPRNLPLPPSGVPESVVTLVKMVNEATSNIPNWGS

SEQ ID NO: 66877 - protein, 172 aa, Gossypium hirsutum
  unsure (1)..(172): unsure at all Xaa locations
  Clone ID: GOSHI-09MAY01-C17140_1.pep
MGCGNVFFTLIITLSVALITYNILISANASLKQELPGPSTSSIIDPIIQMPVEKSRKYGSNAEKRLFHTAVTASDSVYNTWQCRVMYYWFKKHKNGPNLDMGGFTRILHSGKPDNYMNEIPTFIAQPLPPGMDQGYIIPNRPWAFVXWVPKTDFKKNXLLIGKPKHLMLNLT

SEQ ID NO: 66878 - protein, 53 aa, Gossypium hirsutum
  Clone ID: LIB3083-027-Q1-L1-F8.pep
WGRKKGRVWLYVGVYSMLVVKIGNKIHPEPEENRDKKNKVIYTGGPCEPICLF

SEQ ID NO: 66879 - protein, 172 aa, Gossypium hirsutum
  Clone ID: GOSHI-09MAY01-C17130_3.pep
MEFPNLDPESSSQKKMGRGKIEIKRIENTTNRQVTFCKRRNGLLKKAYELSVLCDAEVALIVFSSRGRLYEYANNSVRATIERYKKACSDATTPGSVAEANIQFYQQEATKLRRQIRDVQNMNRHILGEALSSLTFKELKNLEGRLEKGICRIRSKSFCLVYIKIFHSFLPS

SEQ ID NO: 66880 - protein, 135 aa, Gossypium hirsutum
  unsure (1)..(135): unsure at all Xaa locations
  Clone ID: GOSHI-09MAY01-C17130_2.pep
KLPQFYQQEATKLRRQIRDVQNMNRHILGEALSSLTFKELKNLEGRLEKGICRIRSKXNELLFAEIGFMQKREVELQNDNMYLRAKIAENERAQQQSNQLIQAASSYNRNFLPVNLLEPSNNDYSNQDQTPLQLV

SEQ ID NO: 66881 - protein, 235 aa, Gossypium hirsutum
  Clone ID: GOSHI-09MAY01-C17130_1.pep
TMEFPNLDPESSSQKKMGRGKIEIKRIENTTNRQVTFCKRRNGLLKKAYELSVLCDAEVALIVFSSRGRLYEYANNSVRATIERYKKACSDATTPGSVAEANIQFYQQEATKLRRQIRDVQNMNRHILGEALSSLTFKELKNLEGRLEKGICRIRSKKNELLFAEIGFMQKREVELQNDNMYLRAKIAENERAQQQSNQLMQAASSYNRNFLPVNLLEPSNNDYSNQDQTPLQLV

SEQ ID NO: 66882 - protein, 452 aa, Gossypium hirsutum
  unsure (1)..(452): unsure at all Xaa locations
  Clone ID: GOSHI-09MAY01-C17050_1.pep
MQNNSSKNKCSSASHQQMVDNAKNRLDFLQEQFTDLQAARKEGRAGDVAVLEEQVYQNLREWKAELCTPSPASSLLGSLGSFSDDINRLLQLYEEEDDATSPLKEPAVLKPEIDDQSLNPSTLPVIPEDYFVTHEPQEQSFQGFDLCKVSTSANADINYQLDYHPFDLQQDFDHEHLLDANGTEDYVKDANSNMLPNISPPPSAFMGPKCALWDCTRPAQGSDWFQDYCSSFHATLALNEDPPGTTPILRPGGISLKDNLLLDAVRAKAQGKNVGIPQCEGAATMKSPWDATELFDLSLLEGEIIREWLFFDKPRRAFESGNRKQRSLPDYSGRGWHESRKQVMKEFAGQKRSYYMDPQPSGKYEWHLFEYEXIYGCDAFALYRLELKLANQKKSPKAKVPKDSLADLQKKMGRLTAEVPGDDKPPGKGKTKANKKAATAAAAAANVNSAQD

SEQ ID NO: 66883 - protein, 161 aa, Gossypium hirsutum
  Clone ID: LIB3584-056-P1-K2-F2.pep
GRVGGRVGGRVGGRVGGRVGFDKPRRAFESGNRKQRSLPDYSGRGWHESRKQVMKEFAGQKRSYYMDPQPSGKYEWHLFEYEIYGCDAFALYRLELKLANQKKSPKAKVPKDSLADLQKKMGRLTAEVPGDDKPPGKGKTKANKKAATAAAAAANVNSAQD

SEQ ID NO: 66884 - protein, 204 aa, Gossypium hirsutum
  Clone ID: GOSHI-09MAY01-C17030_1.pep
MEPLTTSLTHSISTLPPIRFFASAHRLPPPQLSVSTVRHLRSRVLRFSNLLPKATTSEEASSTGPNRYFGEDRDRVVTVEEVPAVGNNNVFNEKLPLGEPKVESAADEDSQMFEFLEKLNIKLDSGDGYSVILYGTGALFALWLASSLVGAIDSIPLFPKLMEVVGLGYTVWFSSRYLLFKKSKEELGAKIKKLNHQVLGSKDG

SEQ ID NO: 66885 - protein, 231 aa, Gossypium hirsutum
  Clone ID: GOSHI-09MAY01-C17350_1.pep
SVSNKGLIAIAENCPNLTSLSIESCPKIGNEGLQAIGKLCPKLQAVCVKDCLLVGDHGVSSLLSSTSSLLSKVKFQGLNITDFSLAEIGHYGKSVTNLMLSGLENVSEKGFWVMGNAQGLQKLVSLTITSCRGVTDVSLEAMGKGCANLRQMCLRWCCFISDDGLVAFAKSAGSLESLQLEECNRITQSGTIGVLSNCSLKSLTVVKCMGIKDISSEVPLSCCNSLKSLSV

SEQ ID NO: 66886 - protein, 100 aa, Gossypium hirsutum
  Clone ID: GOSHI-09MAY01-C17370_1.pep
MARIKPQALLQQSKRKKGPARISLTTIIMLTLIVVLILFFVYATYRHWTQRSRIHIENRESVIEGDNSFMDSKKSDLPGYAFLDYCEMAFFQWSFLRTFF

SEQ ID NO: 66887 - protein, 87 aa, Gossypium hirsutum
  Clone ID: LIB3583-023-P1-K1-D5.pep
LGNSLASKEPTAYPGRSDFFESMKELSPFESSDCRVAYTKNRIKTTIKANTIIVVRLIQAGPFFLLLCCSRACGLILAITLKLQFQQ

SEQ ID NO: 66888 - protein, 292 aa, Gossypium hirsutum
  Clone ID: GOSHI-09MAY01-C17280_1.pep
VGVGPKGILGFNKNHGEEISLRLRTDDLKGFRKYESIKKTLLHELAHMVFSEHDSNFHALDKQLNEEAASLDWTKSRGHALSGIGHSENHEEYYVEDGRNSQKVGGNMSTLLENARASSVAAAFRRLINTPANVDASETHDEPEPDDSELVMHDGDENLDIQCQIRAQGKHAYESDSDGLADNQNKCEPDPDDLLHAETLQLKHHSVSTENSSQSQMTLGKSTAMSSNEEPDPDDSGASSSSGNVVEPVVMPALDTKIQTSETIDEPDPNDVEAQSSISGCVNRAIMILVIT

SEQ ID NO: 66889 - protein, 84 aa, Gossypium hirsutum
  unsure (1)..(84): unsure at all Xaa locations
  Clone ID: uC-gsflmaxxa026c08b1.pep
SGRVGIMTEMAPVXGYVGVSPKCILGFNMNHGEEISLRLRTDDLKGFRKYESIKKTLLHELAHMVFSEHDSNFYALATTDCTRQ

SEQ ID NO: 66890 - protein, 202 aa, Gossypium hirsutum
  Clone ID: GOSHI-09MAY01-C17260_1.pep
MMIASLVPNFMMGVIIGAGYIGLLMMTAGYFRLLPDLPKIFWRYPLSCIDSGAWALQGAYKNDMVGLEFDGFIPGGPKLKGDVVLTSMLGIHLDHSKWWDLPPVIMILIAYRLLFFIILKFKERVSPLFRTLYTWRTLHHMKKPPSFRITSAFPSKRHPVLLSLSSQEGLNSPFHLKHPIMSTIVLLLLEFDYRNYWKEIIL

SEQ ID NO: 66891 - protein, 187 aa, Gossypium hirsutum
  Clone ID: GOSHI-09MAY01-C17210_2.pep
LVYGNFDELYFSGYSLAITITILLLHHLNIKELHVIDGVPQLIFVRSSYTIETVEAERISVDHVAHLKPSGGSAATQLAAQLTGIHSAIKMLNSRIRVLHQYLVGMQKGDIPCESSLLRQVSSLLRRLPAIESEKFQDDFLMEYNDTLLITYLAMFTNCSSTMNELVDKFNTTYDRHSRRGGRTAFI

SEQ ID NO: 66892 - protein, 315 aa, Gossypium hirsutum
  Clone ID: GOSHI-09MAY01-C17210_1.pep
MASSSSSGLTFKLHPLVILDISDHYTRVRAQWNPPSLTFTSATVNGVQNQQQAPRVYGCVIGVQRGRTVEIFNSFELLYDPSTHSLDRPFLKKKQELYKKVFPHFYILGWYSTGSDAQESDMHIHRALMDINESPLYVLLNPAINPTQKDLPVTIYESELHVIDGIPQLIFVRSSYTIETVEAERISVDHVAHLKPSDGGSAATQLAAHLTGIHSAIKMLNSRIRVLHHYLVGMQKGDIPCENSLLRQVSSLLRRLPAIESEKFQDDFLMEYNDTLLITYLAMFTNCSSTMNELVDKFNTAYDRHSRRGGRTAFI

SEQ ID NO: 66893 - protein, 142 aa, Gossypium hirsutum
  Clone ID: LIB3197-039-Q1-M1-E6.pep
PTRPSPLYVLLNPAINPAQKDLPVTIYESELHVIDGVPQLIFVRSSYTIETVEAERISVDHVAHLKPSGGSAATQWNLAAQLTGIHSAIKMLNSRIRVLHQYLVGMQKGDIPCESSLLRQVSSLLRRLPAIESEKFQDDFLM

SEQ ID NO: 66894 - protein, 260 aa, Gossypium hirsutum
  Clone ID: GOSHI-09MAY01-C17230_1.pep
MAIVDRHQRSSERKMFSLCPFWHTSTTMNNSSSSFSTKNLNHNGSRHSETVAAKRSKSVSSIARSLLPPRRRLRLDPSNKLYFPYEPGTQARSAIRLKNTSKSHVAFKFQTTAPKSCFMRPPGGILAPGESIIATVFKFVERPENNEVQVDLKSKVKFKIMSLKVTAGVDYLPELFDEQRDQVTVERILRVVFLDIGRPIPALDKLKRQLAEADAAFEACKKPAPDTGPRVVGEGLVIDEWKERREKYLARQQVEAVDST

SEQ ID NO: 66895 - protein, 92 aa, Gossypium hirsutum
  Clone ID: LIB3583-011-P1-K1-B6.pep
MPSLLQFDEQRDQVTIERILRVVYLDMGRPSPALDKLKRQLAEAEAALEARKIPAPDTGPRVVGEGLVIDEWVIDCYVLNHANLSSYFLCYS

SEQ ID NO: 66896 - protein, 77 aa, Gossypium hirsutum
  Clone ID: LIB3148-017-Q1-K1-A8.pep
LLERILRVVFLDMGRPSPALDKLKRQLAEAEAAFEARKKPAPDTGPRVVGEGLVIDEWKERREKYLARQQVEAVDST

SEQ ID NO: 66897 - protein, 61 aa, Gossypium hirsutum
  Clone ID: LIB3148-017-Q1-K1-A3.pep
NWVLGHGLVIGFGLMGLCSWACCLGFGSKPVNGLWLFYYLFIYFIFIYRFGVFKKKKTCNQ

SEQ ID NO: 66898 - protein, 102 aa, Gossypium hirsutum
  Clone ID: GOSHI-09MAY01-C10990_1.pep
MAFFLGQSSLANHFRSYQKAEASMAVPTRAFHVELGDREKALLAKDPSLSRFKSYKKSVSTLKRIGDVLTVVVVAGCCYEIYVKAVMREEARNKAKAGGGSK

SEQ ID NO: 66899 - protein, 144 aa, Gossypium hirsutum
  unsure (1)..(144): unsure at all Xaa locations
  Clone ID: GOSHI-09MAY01-C10880_1.pep
MRMSCNGCRVLRKRCTDSCTIRPCLQWRPSAQSQANATLFLAKFYGRAGLINLICAGPQNLRPGVFKSLLYEACGRIVDPVHGSVGLMCSGNWHLCEAAVDAVLNGAPINXVPSELSATKCPPLKSSFDIRHVSKDRNPMMGFA

SEQ ID NO: 66900 - protein, 199 aa, Gossypium hirsutum
  Clone ID: GOSHI-09MAY01-C10840_1.pep
RKQWAPVFSELPLGPQRKQQSTSSLQFSFMGPKLFVNTTPVDVGKRPVTGLRLYLEGKRSNRLAIHLQHLSSLPKIFQLVDDPNENFSQMSRDRKYYEKVYWKNYSHVCTAPVEAEEDLSIVTGAQLQVENHGFKNILFLRLRFSTVLGAMSLKQPEWDGSPGLAPISGLISALISHLFPPVQGPSPRSSDVTLIFVFF

SEQ ID NO: 66901 - protein, 264 aa, Gossypium hirsutum
  Clone ID: GOSHI-09MAY01-C110598_1.pep
YVVARSSEYPEGQLITDKLLETLEEFVRDRAKKPTSPERKELPPPPKEEELEPNMNEIKALPAPENYAPPPPPSEPEPVKPAEPQEDLVNLRDDVVTADDQGNKFALALFSGPAANNGNGSWEAFPSNGQPEVTSAWQTPAAEPGKADWELALVESASNLSRQKAALGGGLDPLLLNGMYDQGMVRQHVSSGQLSGGSASSVALPGPGKTPVLALPAPDGTVQNVNQDPFAASLSIPPPLYVQMADMEKKQHLLVQEQQVWQQY

SEQ ID NO: 66902 - protein, 164 aa, Gossypium hirsutum
  Clone ID: GOSHI-09MAY01-C10490_1.pep
PRVRSFKIYSEDSNIVVDSFHRYSRDSTGHQGPGASCASEGIVVDQNFHSYAASAPGGSGYFNIYFRGGNNPNLRFSSFGDDSGGRGQTFTLFTENANAGNGQSFSSSGVNGSGVPNEVCSCGKGAIVIGSGFSGSGEAAYGAIDSFSSFGFVSSASRNTFKSY

SEQ ID NO: 66903 - protein, 327 aa, Gossypium hirsutum
  Clone ID: GOSHI-09MAY01-C10480_1.pep
SKKSSLSPTGSLNSHLLTPLSPLAAVATDSTSLLRVPRKDFCSLESSSANGSYNAYNSTSLVGFSPNGSPTSQQDSQSYPSDLHHSPDNNGGSPISGSCVTDDVSDLRDKLKELETVMLGPDSDVIDSKTSPEMGTWRLVTDAISRGDLKQVLVFCAKAMSDNDLLMAQWLMDELRRMVSVSGEPIQRLGAYMLEGLVARLASSGSSIYEALRGKEPNSADLLSYMHILYEVCPYLKLGYLSANGAIAKAMKDEDRVHIIDYQIAQGSQWITLIQAFAARPGGPPHIQITGIDDSTSAYARGGSLNIVGKRLSKLARYFKVPFEFHA

SEQ ID NO: 66904 - protein, 133 aa, Gossypium hirsutum
  unsure (1)..(133): unsure at all Xaa locations
  Clone ID: LIB3166-026-P1-K1-E10.pep
KGRGDPRGRPHVRLGSFXLEGLEARGGSLGSSIYKALRCKEPKSADLLSYMHILYEVCPYLKFGYMSANGAIAEAMKDEDRAHIIDFQIAQGSQWITLIQAFAARPGGPPHIRITWIDDSTSAYALGGGLNIV

SEQ ID NO: 66905 - protein, 104 aa, Gossypium hirsutum
  Clone ID: GOSHI-09MAY01-C10460_1.pep
TIKSGYRVLSSEHIQNTLDTSPNGEEYNEFYKSLWALHIPAKVKIHIWRMFNNFLPHFCNLARRTLSVETVSPLCKKDPEDADHLMWSCDFLQCVWASLSFDKL

SEQ ID NO: 66906 - protein, 195 aa, Gossypium hirsutum
  Clone ID: GOSHI-09MAY01-C10410_1.pep
MEDENGLELSLGLSYSTLSAKSKGKISSSSDTRTEEGYKGVEIVDDFKNFLQTRTQKQDPGVSSHRSDPVKPLENFFICIFPRLLVMREASVNLNGKRKILFDEINNPKKLEREAHHVDLSEKPKTSHISMTTEDGSTAENEDVAESEVEGSPLRLVSRHDDGSKRFIGVSDSSEVPKEVKLGNLNYGNPCPVQS

SEQ ID NO: 66907 - protein, 112 aa, Gossypium hirsutum
  Clone ID: GOSHI-09MAY01-C10400_2.pep
LGGYDRDGPQLYMVEPSGISYRYFGAAIGKGKQAAKTEIEKLNLSEMTCREGVIEVAKIIYKVHDEAKDKAFELEMSWVCDESKQQHQKVPDDLLEEAKVAARTALEEMDAD

SEQ ID NO: 66908 - protein, 249 aa, Gossypium hirsutum
  Clone ID: GOSHI-09MAY01-C10400_1.pep
MSSIGTGYDLSVTTFSPDGRVFQIEYAAKAVDNSGTVIGIKCKDGIVMGVEKLIASKMMLPGSNRRIHSVHRHSGMAVAGLAADGRQIVARAKSEATNYQSVYGEPIPVKELAERVASYVHLCTLYWWLRPFGCGIILGGYDRDGPQLYMVEPSGISYRYFGAAIGKGKQAAKTEIEKLKLSEMTCREGVIEVAKIIYKVHDEAKDKAFELEMSWVCDESKQQHQKVPDDLLEEAKVAARTALEEMDAD

SEQ ID NO: 66909 - protein, 69 aa, Gossypium hirsutum
  unsure (1)..(69): unsure at all Xaa locations
  Clone ID: GOSHI-09MAY01-C10420_1.pep
DFPSFAISFATAPAALANCPPLPSVISMLCMAVPKGISVEVDSSFXSINQNPFPNCTSFFQSIRLSGCR

SEQ ID NO: 66910 - protein, 144 aa, Gossypium hirsutum
  Clone ID: GOSHI-09MAY01-C10750_1.pep
MDEQFILRVPPSVAERINRLLSENASSSEDKSLDLEFSEDGRTGTFVIGNDRFPASVLDLPCVVESYKTYDDSALVKTADVGQMILVRESGEASPDVVEYRHGLTPPLRDARKRRFRREPDLNPELVQRVEKDLVNIMSGGTVE

SEQ ID NO: 66911 - protein, 172 aa, Gossypium hirsutum
  Clone ID: GOSHI-09MAY01-C110728_1.pep
MASYQILAFAALFLILLPVAVNGDLGDLSPALSPFYDRLCDDVDCGKGTCKADISYPLNYICECDAGWKRTQDDSDDDDDHKFLPCVIPNCTLDYSCQPAPPPVPQREVPRNSSLFDPCYWAYCGEGTCNKTATYKYVCECRSGFSNLLNRTYFPCYSQCTLGSDCSRLGIT

SEQ ID NO: 66912 - protein, 253 aa, Gossypium hirsutum
  Clone ID: GOSHI-09MAY01-C10730_1.pep
MPSSPSFTLVSRCTVSPDQISDIKTLKLSVSDIPMLSCQYIQKGVLLTSPPYSFDDLVCFLKQSLSTTLSYFPPLAGRLTTDPDGHVHINCNDAGIDFLVVKSPNISIHNVLVPGDVPDCVKQFFTFDKTLSYSGHFKPLAAVQVTELADGVFIGCIVNHAVTDGTSFWHFFNTFAEITKGALKISKSPDFGRNTVFNSQAVLKFPPGGPTVTFAGDEPLRERILHFSREAILKLKYRANYGCLLTKQTNSRV

SEQ ID NO: 66913 - protein, 129 aa, Gossypium hirsutum
  Clone ID: GOSHI-09MAY01-C10600_2.pep
MGSCSFLLLLFYITAGCSIRCVLGSPICSHEADVFIENLRFQCSPSLSPIPPLEVDGNFLDRALTSKQRNGHVSVLLYASWCPFSRRLRPNFDIIGPMFPQLEHLAVEESSPSPRCVATFLLPNVLQTL

SEQ ID NO: 66914 - protein, 166 aa, Gossypium hirsutum
  unsure (1)..(166): unsure at all Xaa locations
  Clone ID: GOSHI-09MAY01-C10600_1.pep
MKFKMGFSSSSSSSSSSLLLFFCITVFCSIRCVLGSSICSHEADVFIKNIHFQCSPSISPIPPLKVNGDFLDRQLTSKQQNGYTSVLFYASWCPVFTXGLRPKFDILSSMFPQLEHLAVEQSSASPSIFSRFGIHSLPSILIVNQTSRVQYRGPKDLPSIEQFYEK

SEQ ID NO: 66915 - protein, 188 aa, Gossypium hirsutum
  Clone ID: GOSHI-09MAY01-C10620_1.pep
PSRPVIPLCKAVLEAYRDLGYRGNRQKTRMMWLIDELGIEVFRSEVAKRMPQKELERASDEGLVQKQWERRDYLGVHPQKQEGFSYIGIHIPVGRVQADDMDELARLADMYGSGELRLTVEQNIIIPNVENSKLEALPNEPLLKDRFSPQPSILMKGLVACTGNQFCGQAIIETKARALKVTEEAERL

SEQ ID NO: 66916 - protein, 364 aa, Gossypium hirsutum
  Clone ID: GOSHI-09MAY01-C10180_1.pep
MCYKVRKRPLNKKEISRKEDDIVTVRENALTVHEPKLKVDLTAYVEKHEFCFDAVLDEHVTNDEVYRETVEPIIPIIFQRTKATCFAYGQTGSGKTFTMQPLPLRAAQDLIRFLHQPVYHSQRFKLWLSYFEIYGGKLFDLLSDRKKLCMREDGRQQVCIVGLQEFEVSDVQIVKEYIERGNAARSTGSTGANEESSRSHAILQLVIKKHPEIKESKWKNDGDESKPGKVVGKISFIDLAGSERGADTTDNDRQTRIEGAEINKSLLALKECIRALDNDQIHIPFRGSKLTEVLRDSFVGNSRTVMISCISPNAGSCEHTLNTLRYADRVKSLSKSGNPKKEQAVNSFQPSNKDASSASSLLPT

SEQ ID NO: 66917 - protein, 163 aa, Gossypium hirsutum
  Clone ID: GOSHI-09MAY01-C10170_1.pep
SIREEAGKVLTANLKGRPAFEADDQSALIYLLLSQKEMWMDKVFLENQYYLHGYWAGLVDRYEEMMEKYHPGLGDERWPFVTHFVGCKPCGSYGDYPVERCLRSMQRAFNFADNQVLKLYGFRHRGLLGPNIKRIRNETVTPLEIVDELDIRRSTHEKAETRS

SEQ ID NO: 66918 - protein, 223 aa, Gossypium hirsutum
  unsure (1)..(223): unsure at all Xaa locations
  Clone ID: GOSHI-09MAY01-C10160_1.pep
GDDKYLIATAEQPLCAYHVDDWIQPSELPIRYAGFSSCFRKEAGSHGRDTLGIFRVHQFEKVEQFCITSPNGNDSWDMHEEMLKNSEEFYQEIKLPYQIVAIVSGALNDAAAKKYDLEAWFPASQTYRELVSCSDWAEYQSRRLXEIRYGQKKNNEQXKTQYVHLLNSTLTATERTMCCILETYQKEDGVEIPEGLQPYMGGKSFLPFKTKPAPEAKGKKSKA

SEQ ID NO: 66919 - protein, 56 aa, Gossypium hirsutum
  Clone ID: GOSHI-09MAY01-C10110_1.pep
EMAPFSLELKVVANAQPHKNTQAITLVPAHSHAALGTFTLKRIIYTNKPIPNKNLQ

SEQ ID NO: 66920 - protein, 128 aa, Gossypium hirsutum
  unsure (1)..(128): unsure at all Xaa locations
  Clone ID: LIB3166-022-P1-K1-B7.pep
ARLPTSEELDAYAHEQWECFLLQLISSRQAQKSTSFSSSMMRIFQRGLLRQRDKEAPRLTESGFQFLLMDTNAQLWYIIREYISNSEEQGVDQAHLISXFLLELNFHTPGEAYSLDTLTDDQTTMIKD

SEQ ID NO: 66921 - protein, 76 aa, Gossypium hirsutum
  unsure (1)..(76): unsure at all Xaa locations
  Clone ID: LIB3147-022-Q1-K1-F5.pep
MIYNVLECFLLQLISSGQTEKSTSFSSSMMRIFQRGLLXSERLTESGFQFLLMDTNAQLWYIIREYISNSEVYLMR

SEQ ID NO: 66922 - protein, 155 aa, Gossypium hirsutum
  Clone ID: GOSHI-09MAY01-C10080_2.pep
PGPVFRAGRPSRPTGLAPFMGFLQERLALKEAGAELGPSVLFFGCRNRKMDFIYEDELNNFVNSGALSELVVAFSREGPTKEYVQHKMMEKALDIWDMISQGGYLYVCGDAKGMARDVHRALLTIFQEQGSLDSSKAESMVKNLHTTGRYLRDVW

SEQ ID NO: 66923 - protein, 277 aa, Gossypium hirsutum
  unsure (1)..(277): unsure at all Xaa locations
  Clone ID: GOSHI-09MAY01-C10080_1.pep
SRSTKNLASPAGXDEYAQWIVANQCCLLEVMAEFPSAKPPLGVFFAAVAPRLQPRYYSISSSPRLAPSRIHVTCALVYEKTPTGRIHKGVCSTWMKNAVSSGKSDDCSWAPIFVRQSNFKLPSDTKVPIIMIGPGTGLAPFRGFLQERLALKEAGAELGPSVLFFGCRNRKMDFIYEDELNNFVNSGALSELVVAFSREGPTKEYVQHKMMEKAKDIWDMISQGGYLYVCGDAKGMARDVHRALHTIFQEQGSLDSSKAESMVKNLQMSGRYLRDVW

SEQ ID NO: 66924 - protein, 136 aa, Gossypium hirsutum
  Clone ID: uC-gsronu33B077d05b1.pep
YSPTIMIGPGTGLAFYRGFRQERLALKEAGAESRPPVLLFGCRNRKMDFIYEDELNNFVNSGALSELVAAFSREGPTKEYVQHKMMEKAKDIWDMLSQGGYLYVRGDAKGMARDAQRALDTMEDAQKARISSKAMS

SEQ ID NO: 66925 - protein, 86 aa, Gossypium hirsutum
  Clone ID: GOSHI-09MAY01-C110078_1.pep
NFMARCILSNPKAQALTPEELQKTLLKSLGGVTHARIALGIWHAGKLVYALSTWGLALVGLYRARSVVKVAAMGIHTTSKVVMRAL

SEQ ID NO: 66926 - protein, 110 aa, Gossypium hirsutum
  Clone ID: GOSHI-09MAY01-C10010_1.pep
MAGIGKTAPDFEDLLPAMAEKLGGDGLMRELCNGFKLLMDEEKGVITAASLKRNAAVLGLQDLRDDELASMVREGDLDGDGALSEMEFCVLMFRLSPGLMEESRLLLEEM

SEQ ID NO: 66927 - protein, 228 aa, Gossypium hirsutum
  Clone ID: GOSHI-09MAY01-C10340_1.pep
MAPREKTAAVKGTGNNNEVHFRGVRKRPWGRYAAEIRDPGKKSRVWLGTFDTAEEAARAYDAAAREFRGAKAKTNFPVPCENLSKGNNCKSNGNNNHHSPSQSSTVESSSREPALMVDSSPLDLNLVQGEAVTGYVPTAVRFPFQQASPVPYIAGRKVFYFEPFVRPGAVKGHPFERFGFDHHDLHATFNGVQSDSDSSSVVDLNHHEVKSRPLLNIDLNQPAVPEIA

SEQ ID NO: 66928 - protein, 198 aa, Gossypium hirsutum
  unsure (1)..(198): unsure at all Xaa locations
  Clone ID: GOSHI-09MAY01-C10360_1.pep
MADDLCFFTKDSFILKSPKKSPLVLRTVVLLFVMVCGVYICTICLKQISTGSTTEFLNFRVVQKPCPEPNIEPWEIPYVHYPNPKTYSRAECACNPVRYFAIMSMQRSGSGWFETLLNNHTNISSNGEIFSVKVRRSNVSTIFETLDKIYNLDWMSSASKNECTAAVGLKWMLNQGLMQHHKEIVEYLXTRSVSTIFL

SEQ ID NO: 66929 - protein, 85 aa, Gossypium hirsutum
  Clone ID: GOSHI-09MAY01-C10330_1.pep
NLNLPSKIAIAIWRISWNFIPTLTNLRLRRVAANISCPRCRNAKEDSNHIFRQFPGFSPWVTANNVGYFVVVFGQFHMVVEKRRE

SEQ ID NO: 66930 - protein, 141 aa, Gossypium hirsutum
  Clone ID: GOSHI-09MAY01-C10280_2.pep
TAHPLSRSPFRHRHCEFIKINFDSAYNESQNRSASGIMARDAEGKVLLSCSEIHNDITSAFAGEAIACWKAVQIGVENGWQSIIFEGDSWKWRSLTMPKSKKGTIGYVNQIRKALGDEEWKRESFPPQKENEMFQKESFEK

SEQ ID NO: 66931 - protein, 156 aa, Gossypium hirsutum
  Clone ID: GOSHI-09MAY01-C10280_1.pep
LNNTFTEEDAGRILRIPLARTRHEDFFIWGENRRVNSRSEVPINYYRVLMQILELTLYKPSTGNLTKKLWSLNLPTKIKITIWRLSWNYLPTKVNMQYRKLATNKSCPQRRERAETMDHLFRECPVIVEAWTTLSLQNIIMIQNIDFVQWLTWVFE

SEQ ID NO: 66932 - protein, 78 aa, Gossypium hirsutum
  Clone ID: LIB3166-024-P1-K1-B6.pep
RLSWNYLPTKVNMQYRKLATNKSCPQRRERAETMDHLFRECPVIVEAWTALSLQNILMIQNIDFVQWLAWVFEQVTPC

SEQ ID NO: 66933 - protein, 122 aa, Gossypium hirsutum
  unsure (1)..(122): unsure at all Xaa locations
  Clone ID: uC-gsronu33B012c05b1.pep
MNEVMMAADASSMRGGGATSFAWSASSNLLANNLPLLTALLAFALAQFLKLFTNWFKERRWDSKRMIDSGGMPSSHSATVTAFAVAIGLQDGMGGPAFALQLFXXCVVMYDASXVRLHAGVS

SEQ ID NO: 66934 - protein, 134 aa, Gossypium hirsutum
  unsure (1)..(134): unsure at all Xaa locations
  Clone ID: AI731243.1.pep
MNEVMMAADSSSLRGDGATSFASSPSSNLLPNNLPLLTAFLAFALAQFLKLFTNWFKERRWDSKKMIDSGGMPSSHSATVTALAVAISLXDGMGRTAFGIAXVLACFVNFDASGVPIHXAGRQLXLLNQMFCDS

SEQ ID NO: 66935 - protein, 378 aa, Gossypium hirsutum
  Clone ID: GOSHI-09MAY01-C10250_1.pep
MEMWTIQRRNQVLDTILLLGIVLVLIPTRPVESRKYSASLTDFGGVGDGVTSNTKAFQAAIFNLSQYASDGGSLLFVPPGKWLTGSFNLTSHFTLHIHKNATLLASQDESEWAVIDPLPSYGRGRDADGGRYISLIFGTNLTDVVITGDNGTIDGQGVTWWNKFHKGELKYTRPYLIEIMYSSEVQISNLTLMNSPSWNVHPVYSSNVVVQGLTILAPVTSPNTDGINPDSCTNTRIEDCYIVSGDDCVAVKSGWDEYGIKFGMPTKQLVIRRLTCISPFSAVIALGSEMSGGIEDVRAEDITGINSESAVRIKTAVGRGNYVKDIYVRRMTMKTMKMVFWMAGNYGSHPDNDYDPNAIPVIQNINFRDVVAENVTMA

SEQ ID NO: 66936 - protein, 118 aa, Gossypium hirsutum
  unsure (1)..(118): unsure at all Xaa locations
  Clone ID: LIB3145-024-Q1-K1-D10.pep
QISNLTLMNSSSWNVHPVYRGNVVVQGXTILAPVTSPNTDGINPGEKPDIESGYTHLKLLHWCXKGSCFSSDSCTNTRIEDCYIVSGDDCVAVKSGWDEYGIKFGMPTKQLVIRRLTC

SEQ ID NO: 66937 - protein, 157 aa, Gossypium hirsutum
  Clone ID: GOSHI-09MAY01-C11900_1.pep
VKSEEKPMYSSQSAMPITNGQSSFFHMHDSGKQHLSGTLSSATEAFDAPSAAPTVKELSGVSRSDCALSLLSAQSLDLSSHVTGIQMTRPLINQAGLAHRSTEKSAVMSYSEKGSSFYSCGMNPTGVSQEGSVVVPDAGHTANFEGKVQDLDLLSAR

SEQ ID NO: 66938 - protein, 83 aa, Gossypium hirsutum
  Clone ID: GOSHI-09MAY01-C11930_2.pep
KILLFFCCNCFWMKIDQIPPSSPPNGFPLCWFPKCSFPSAGEIGALYPISFPHFRLSKLYFLFFVPLPQQRMRTTRLLVEYLY

SEQ ID NO: 66939 - protein, 112 aa, Gossypium hirsutum
  Clone ID: LIB3135-026-Q1-K1-E7.pep
NCFWMKGGQINLSSPPNVFPLCWFPKCSFPSAGEIGALYPISFPHFRLSKLYFLFFVPLPQQILWNTKILTGHMRILLIQKMCIVQKVMMMTTTTMVIITINQTISVVLKWN

SEQ ID NO: 66940 - protein, 78 aa, Gossypium hirsutum
  Clone ID: LIB3166-045-P1-K1-G9.pep
TEEEEKKLAPAEEEQRIGNSFESRKWGKNLGIKLQFHQQREKNVWGTSRGEKTFGGEDRLIWSIIIQKQFKLKKRRNF

SEQ ID NO: 66941 - protein, 181 aa, Gossypium hirsutum
  unsure (1)..(181): unsure at all Xaa locations
  Clone ID: GOSHI-09MAY01-C11850_1.pep
GNQFNGPIPLAIGEVSALEVVGGSKNPFNXQFPWPLGQWPSLGKLVVSQIQLKGQIPWPLGESSPLKWLDVSKNQLNGQIPWSIGQLSSLKLVDVSENQLNGTFPLSLGRLESLETLDCGYNLLEGVVSETHFSNLTRLTTLAASHNRLRFEPNSSWIPPFQCERIELGNWHLGPQFPQWL

SEQ ID NO: 66942 - protein, 163 aa, Gossypium hirsutum
  unsure (1)..(163): unsure at all Xaa locations
  Clone ID: GOSHI-09MAY01-C11870_1.pep
SLKRCFYHSGQYDSEENCAQLDKKLKKHEGGRVSNRLFYLSIPPNIFIEAVKCASSSASSGNGWTRVIVEKPFGRDSESSAVLTKSPKQYLTEDQIFRIDHYXLGKELVENLSVLRFANLIFEPLWSRRYIRNVQIIFSEDFGTEGRGGYFDNYGIIRDIMQN

SEQ ID NO: 66943 - protein, 134 aa, Gossypium hirsutum
  Clone ID: GOSHI-09MAY01-C11810_2.pep
RWLTLETSFCSINHPRHPNISSQSGAICLDILKDQWSPALTLKTALLSVQALLSAPEPDDPQDAVVAQQYLREYQTFVGTARYWTESFAKASSLGVEEKVQRLVEMGFPDGLVRSTLEAVGGDENLALEKLLSS

SEQ ID NO: 66944 - protein, 194 aa, Gossypium hirsutum
  Clone ID: GOSHI-09MAY01-C11810_1.pep
MIDFARVQKELQECSREKDSSGISVSPKSDNLARLTGIIPGPLGTPYEGGSFEIDITLPDGYPFEPPKMKFVTKVWHPNISSQSGAICLDILKDQWSPALTLKTALLSVQALLSAPEPDDPQDAVVAQQYLREYQTFVGTARYWTESFAKASSLGVEEKVQRLVEMGFPDGLVRSTLEAVGGDENLALEKLLSS

SEQ ID NO: 66945 - protein, 120 aa, Gossypium hirsutum
  unsure (1)..(120): unsure at all Xaa locations
  Clone ID: LIB3493-025-P1-M1-C1.pep
IDSVCVQTELHECCSENGASCIMDCSKSYYLAXSTDIIPGPLGTSYDSGYFEIHITXPDGYPSQPPKMKFVTRGWHPNISSQSGSICLDILKDHLSPALTLKTAFLSVQALLSTXEPYDP

SEQ ID NO: 66946 - protein, 101 aa, Gossypium hirsutum
  Clone ID: GOSHI-09MAY01-C11580_1.pep
DCKMRPSENAFIKVSFDGAFQAHSLKSKGVVLGSTTIINNHIQTRFAAEAIACLQVIQLGIDLGFQDVVIEGDSLMVIKKQQANKNDDSYISAYILFEKEI

SEQ ID NO: 66947 - protein, 175 aa, Gossypium hirsutum
  Clone ID: GOSHI-09MAY01-C11550_1.pep
MERSKAMMMAVAAVGLALVLMVPQADATRYIVGGGGIGWTTNVNYTVWARGKHFYNGDWLYFVYDRNQMNVLEVNKTDYESCNADHPLHNWTTGAGRDVVPLNVTRHYYFISGKGFCYGGMKLAVRVENPPPPPKAAPLNEKSGSSPSSIVYRGQLVLPAAFAIAALWDAFVRIW

SEQ ID NO: 66948 - protein, 456 aa, Gossypium hirsutum
  unsure (1)..(456): unsure at all Xaa locations
  Clone ID: GOSHI-09MAY01-C11540_1.pep
TAKIMISQFFVLSQRGDNIVFRDYRGEVAKGXSAEIFFRKVKFWKEDGQEEAPPVFNVDGVNYFHVKVVGLLFVATTRVNVSPSLVLELLQRIARVIKDYLGVLSEDSLRKNFVLVYELLDEVIDFGYVQTTSTEVLKSYVFNEPIVVDAARLQPLGPAAIFMQGTKRMPGTAVTKSVVANEPGGRKREEVFVDIIEKISVTFSSSGYILTSRVGGTIQMKSYLSGNPEIRLALNEDLSIGRGGTVYDYRSSSGSGAVILDDXCNFHESARLDSFDMDRTLSLVPPDGEFPVMNYRMTQEFKPPFRINCLIEEAGQLKAEVIIKVRAEFPSNITANTIAVQMPLPKYTTRASFELEPGAVGQRTDFKEANKKLEWGLKKIVGGSEHTLRAKLTFSQESHANLTKEAGPVSMTFTIPMYNVSRLQVKYLQIAKKSSSYNPYRWVRYVTQANSFGARI

SEQ ID NO: 66949 - protein, 202 aa, Gossypium hirsutum
  unsure (1)..(202): unsure at all Xaa locations
  Clone ID: LIB3543-027-Q6-K6-D4.pep
VPKGTCTVYCCRKGKFWKXDGQEEAPPVFNVDGVSYFHVKVVGLLFVATTRVNVSPSLVLELLQRIARVIKDYLGVLSEDSLRKNFVLVYELLDEVIDFGYMQTTSTEVLKSYIFNEPIVVDAARLQPLGPAAIFMQGTKRMPGTAITKSVVANEPGGRKREEIFVDIIEKISVTFSSSGYILTSEIDGTIQMKSYLTGNPE

SEQ ID NO: 66950 - protein, 94 aa, Gossypium hirsutum
  unsure (1)..(94): unsure at all Xaa locations
  Clone ID: LIB3189-004-P1-K1-G9.pep
PRVRGRVGESVRLDSFDMDRRVSLVPPDGEFPVMNYRMTQEFXPPFRINRLIEEAGQLKAVLIIKVXAEFPLNITVNTIAVQIPLAKFSTYTCF

SEQ ID NO: 66951 - protein, 105 aa, Gossypium hirsutum
  Clone ID: GOSHI-09MAY01-C11570_3.pep
FQPHLSFIHPHFSNINHVPPCVLNVTKFLEEHPGGEEVLLESAGKDATKEFNDIGHSKAAQNLLLKYQIGVLQGHTSKNNEQVGSTEEPQKKEMSAFPIKDDLTP

SEQ ID NO: 66952 - protein, 115 aa, Gossypium hirsutum
  Clone ID: GOSHI-09MAY01-C11570_2.pep
FFQVLNVTKFMEEHPGGEEVLLESAGKDATKEFNDIGHSKSAQNLLLKYQIGVLQGHTSKNNEQVGSTEEPKKKEMSAFVIKDDLTPKYAAVVEFAAPLLVAGSYFCYRYLTLSS

SEQ ID NO: 66953 - protein, 140 aa, Gossypium hirsutum
  Clone ID: GOSHI-09MAY01-C11570_1.pep
MAGHTVYTLSEVSRHKSKNDCWLVIDGRVLNVTKFLEEHPGGEEVLLESAGKDATKEFNDIGHSKSAQNLLLKYQIGVLQGHTLKNNEQVGSTEEPKKKEMSAFVIKDDLTPKYAAVVEFAAPLLVAGSYFCYRYLTPSS

SEQ ID NO: 66954 - protein, 114 aa, Gossypium hirsutum
  unsure (1)..(114): unsure at all Xaa locations
  Clone ID: LIB3146-003-P1-K1-A4.pep
MAGHTVYTLSEVSRYKSKNDCWLVIDGRVLNVTKFLEEHPGGEEVLLESAGKDATNEFNDIXHSKSAQNLLLKYQIGVLQGHTLXNNEQVGSTYESNKKEMSAFVIKDDLTPKY

SEQ ID NO: 66955 - protein, 125 aa, Gossypium hirsutum
  Clone ID: LIB3166-040-P1-K1-E5.pep
KHKPFHFLSFFFFSLQRAVAGHTVYTLSEVSRHKSKNDCWLVIDGRVLNVTKFMEEHPGGEEVLLESAGKDATKEFNDIGHSNVAQNLLLKYQIGVLQGHTSKNNEQVGSTEVPKKKEMSAFLIN

SEQ ID NO: 66956 - protein, 161 aa, Gossypium hirsutum
  Clone ID: GOSHI-09MAY01-C11560_1.pep
MLFPPLLVFASIFSACCLATSTLGATLAKDEVEALESIGETLGKTNWKFSVDPCSSGDESWAKFAEKGAYYVNNVTCDCSSSPCHIVRIVLKGQNLSGTLPPQVTRLPYLQEIDLSRNYLSGSIPRQWGSMQQLVQISLLGNRLTGSIPEELANISNLTSL

SEQ ID NO: 66957 - protein, 65 aa, Gossypium hirsutum
  Clone ID: LIB3583-020-P1-K1-G10.pep
FSFWVVMCSVMTVTLWAIWYNRNKYYHEGKKERVQEVVDFIKAYVLEVDQLKSITESNIKSKEDC

SEQ ID NO: 66958 - protein, 124 aa, Gossypium hirsutum
  unsure (1)..(124): unsure at all Xaa locations
  Clone ID: LIB3166-039-P1-K1-G9.pep
TTRSWSARNPLLALLANRGWRLITNPSSLFVCVMRLKYYPRXIFECRFRSXPSFTWRSIWGSCCLLKKSMGWRIGNGESTNIWNDALLRTPTRKHWRSDNCGSESLPSSHHFWGRNEFSRSCGG

SEQ ID NO: 66959 - protein, 197 aa, Gossypium hirsutum
  unsure (1)..(197): unsure at all Xaa locations
  Clone ID: GOSHI-09MAY01-C11520_1.pep
MDFSVLNEALXSKSFNKIADICDNLMLQVAAEGVPFRDEWPFAIHLLGHIYIDDINSARFLWKSIPPAIKESQPEVVAAWKIGQKLWTRDYAGVYEAIRGFDWTQQTQVLVAAFSELYTKRMFELLQSAYSTISIQDAAQFLGMSEEDASNYVLGQGWTVDPTSRMITVTKQAIVKEQKLDPGKLQRLTEYVFHLEH

SEQ ID NO: 66960 - protein, 304 aa, Gossypium hirsutum
  Clone ID: GOSHI-09MAY01-C11460_1.pep
MGKKLDALLGRGFKPYKLKSLISVALSRLSVFKNRRQIRSNQARSDVVELLQLGHHDRALLRAEQVVKEQNMLDVFVILEGYCNLLIERLHLIEEDRECPDELKEAICGLLFASSRCGDFPELQEIRAIFTSRYGKEFVARAIELRNNCGVNTKIIQKLSTKQPDLQSRWNVLNEIAAEHSIARRLRETSENLDGSKNHSQPKLGTIGKASNHAVLGDDNEFSDSTKARKKYKDVADAAQAAFESAANAATAARAAVELSRSDFHDPDDDDHDDDQNSPNSQRKRVLEREEPNSEDKETQQGNQ

SEQ ID NO: 66961 - protein, 205 aa, Gossypium hirsutum
  unsure (1)..(205): unsure at all Xaa locations
  Clone ID: GOSHI-09MAY01-C11400_1.pep
MAAAAPPPPPSAAPEPSMAPPETTPIGHPVFTRIRLATPSDVPFIHKLIHQMAVFERLTHLFSATESSLSSNLFLSPPFHSFTIFLLELSSSPIPPLLSPSPSFTPIEKTFNFDIPLNDPESDAFSIYYGNQQVIIGGFVLFFPNYSTFLGKPGFYVEDLFVRECYRKKRFGKMLLXAVAKQAVXMGYGRVEWVVLDWNVMPLRL

SEQ ID NO: 66962 - protein, 179 aa, Gossypium hirsutum
  Clone ID: GOSHI-09MAY01-C11790_1.pep
FDSSRDRGTPFKFALGQGRGIKGWDEGIKTMKKGENAIFTIPPELAYGESGSPPTIPPNATLQFDVELLSWTSVKDICKDGGLFKKILTGGEKWENPKDPDEVLVNYEAKLEDGTVVAKADGKEFTVMEGHFCPALAKAVKTMKKGEKVLLTVKPQYGFGEKGKPAAGAGGAVPPNATL

SEQ ID NO: 66963 - protein, 465 aa, Gossypium hirsutum
  unsure (1)..(465): unsure at all Xaa locations
  Clone ID: GOSHI-09MAY01-C11750_1.pep
GQSMSPNMAACIAVEAISILXEKLHLKGFVHGDVKPENFLLGLPGSADEKKLYLIDLGLASRWKDAQSGQHVDYDQRPDVFRGTIRYASVHAHLGRTGSRRDDLESLAYTLIFLPRGRLPWQGYQGDNKSFLVCKKKMATSPELMCCFCPAPFKQFLEAVTNMKFDEEPNYAKLISFFESLIEPCTPLRPIRIDGALKVGQKRGRLVINLEEDEQPKKKIRLGSPATQWISVYNARCPMKQRYHYNVADSRLRQHVEKGNEDGLFISCVASAANLWALIMDAGTGFSSQVYELSTVFLHKDWIMEQWEKNYYISSIAGATNGSSLGVMSKGTPYTQQSYKLSESFPFKWINKKWKEGFHVTSMTTAGSCWGVVMSRNSGFSDQVVELDFLYPSEGIHRRWESGYRITSMAATADQAAFILSIPKRKMMDETQETLRTSAFPSTHVKEKWAKNLYLASICYGRTVC

SEQ ID NO: 66964 - protein, 125 aa, Gossypium hirsutum
  Clone ID: LIB3166-043-P1-K1-F10.pep
HASAHAFVHASEKKVRRGSPATQWISAYNARRPMKQRYHYNVADSRLRQHVDKGNEDGLFISCVASSANLWALIMDAGTSFSSQVYELSTIFLHKDWIMEQWEKNYYISSIAGANNGSSLVVMSK

SEQ ID NO: 66965 - protein, 220 aa, Gossypium hirsutum
  Clone ID: GOSHI-09MAY01-C11730_1.pep
MAILYALVARGSVMLAEFTAASTNASAIARQILDKIPGDNDINVSYSQDRYIFHVKRTDGLTVLCMADESAGRRIPFAFLEDIHQRFVRTYGRAIFSALPYGMNDEFSRVLSQQMEYYSSDPNADRINRLKGEMSQVRNVMIENIDKVLERGDRLELLVDKTANMQGNTFRFRKQTRRFRNTVWWRNVKLTVALIILLLIIIYVVLAFVCRGITLPSCLK

SEQ ID NO: 66966 - protein, 155 aa, Gossypium hirsutum
  Clone ID: LIB3584-011-P1-K1-A8.pep
MAILYALVARGSVMLAEFTAASTNASARGGGVLDKIPGDNDINVSYSQDRYIFHVKRTDGLTVLCMADESAGRRIPFAFLEDIHQRFVRTYGRAIFSALPYGMNDEFSRVLNQQMEYYSSDPNADRINRLKGEMGQVRNVMIENIDKVLERGDRL

SEQ ID NO: 66967 - protein, 136 aa, Gossypium hirsutum
  Clone ID: LIB3585-040-P1-K1-A1.pep
MAILYALVARGSVMLAEFTAASTNASAIARQILDKIPGDNDINVSYSQDRYIFHVKRTDGLTVLCMADESAGRRIPFAFLEDIHQRFVRTYGRAIFSALPYGMNDEFSRVLSQQMEYYSSDPNADRINRLKVKWVR

SEQ ID NO: 66968 - protein, 168 aa, Gossypium hirsutum
  Clone ID: GOSHI-09MAY01-C11680_3.pep
MATMEKGLEFENKNLGLKHLNFVRVATIHALVCISNLYNYSKQNSGPLRSTVDAVERAVTTAVGPVYGKFKDVPDHFPRAPDNKVDEVSHKFDEHAPAPAKQVVNQAHDLVQKAQKLLEEARTNGARGALHYAAAEYKNLVLVSSTKLWVKLNRNSTFNSVTEKVVPK

SEQ ID NO: 66969 - protein, 180 aa, Gossypium hirsutum
  Clone ID: GOSHI-09MAY01-C11680_2.pep
MATMEKGLEFENKNLGLKHLNFVRVATIHALVCISNLYNYSKQNSGPLRSTVDAVERAVTTAVGPVYGKFKDVPDHFLGFLDNKVAVVSHLFDEHAPAPAKHVVNQAHDLVQMAQKLVEEARTNGARGALHYAAAEYKILVLVSSTKLWVILDRNSTFNSVTEKVVPKAANLCEKYNSWL

SEQ ID NO: 66970 - protein, 231 aa, Gossypium hirsutum
  Clone ID: GOSHI-09MAY01-C11680_1.pep
MATMEKGLEFENKNLGLKHLNFVRVATIHALVCVSNLYDYSKQNSGPLRSTVDAVEHAVTTAVGPAYGKFKDVPDHFLGFLDNKVDEVSHKFDEHAPAPAKQVVNLAHDLVQKATQKAQKLVEEARTNGARGALHYAAAEYKNLVLVSSTKLWVKLNSNLTFNSVTEKVVPKAANLCEKYNSWLKEKSGKGYPVVGYLPSIPVDAFGKAVKEAEGKEKANADDHKSESDSD

SEQ ID NO: 66971 - protein, 97 aa, Gossypium hirsutum
  Clone ID: LIB3272-044-P1-K1-E11.pep
MGGLEFENKNLGLKHLNFVRVATIHALVCVSNLYDYSKQISGPLRSTVDTVEHAVTTAVGPAYGKFKDVPDHFLGLLDNKVDEVSHKFDEHAPAPAK

SEQ ID NO: 66972 - protein, 111 aa, Gossypium hirsutum
  Clone ID: GOSHI-09MAY01-C111648_1.pep
QLEKITAQLGKYGKIEGKFVFYWFQNHKARERQKMKRISLGLTNCPRNSPPITTITLETRMEIMERSDEDSPYKRKCKSWSFEYLDEQSISPCKEQENRTLELFPLHPEGR

SEQ ID NO: 66973 - protein, 125 aa, Gossypium hirsutum
  Clone ID: GOSHI-09MAY01-C11670_1.pep
TGSRSTRAKPLHWTSCLKIAEDVAEGLAYIHQASRLFHGNLKSSNVLLGSDFEACLADYSLVLLADSSCFTEDPDSLAYKAPEIRKSSRRLTPKSDVYAFGVFLLELLTGKLPSRHPVLVPRDML

SEQ ID NO: 66974 - protein, 123 aa, Gossypium hirsutum
  unsure (1)..(123): unsure at all Xaa locations
  Clone ID: LIB3166-040-P1-K1-H8.pep
PTRPAQAPSTWLEAIATIXETLRFTYSETLGKWPIGDLAFDINYLMRRQGNFEVASVYAGDNCVELKGEEIKKELNNLLRLLTLCRLFSKKPFPVFLDSAGYSEEDALLHKPKSRLMKPAFTI

SEQ ID NO: 66975 - protein, 93 aa, Gossypium hirsutum
  Clone ID: LIB3166-040-P1-K1-H2.pep
EVAFPSRWETLRFTYSETLGKWPIGDLAFDINYLMRRQGNFEVASVYAGDNCVELKGEEIKKELHNLARLFTLCRLFLNKPFSAVLDSAGFSE

SEQ ID NO: 66976 - protein, 164 aa, Gossypium hirsutum
  unsure (1)..(164): unsure at all Xaa locations
  Clone ID: GOSHI-09MAY01-C11630_1.pep
NILNGNSGTAPWDALPGFKDVPSSEKQNLFLRKLSLCCVVFDFSDPMKNLKEKDIKRQTLLELVDYVSSANGKFSESVMQEAVKMVSANLFRPLTPQPRENKVLEAFDLEEEEPLVDHAWPHLQIVYEFFLRFVASPETDXKLAKRYIDHSFVLKLLDLFDSED

SEQ ID NO: 66977 - protein, 88 aa, Gossypium hirsutum
  Clone ID: GOSHI-09MAY01-C11180_2.pep
MSQGFSIELYFDPALENQVLKAWNVLARRQISTQLIEIESRPHITLFSSPFLDPAKLESVVKSFASKQGPLPLSFTSIGSFPNDKNVL

SEQ ID NO: 66978 - protein, 158 aa, Gossypium hirsutum
  unsure (1)..(158): unsure at all Xaa locations
  Clone ID: GOSHI-09MAY01-C11180_1.pep
MSQGFSIELYFDPALENQVLKAWNVLARRQISTQLIEIESRPHITLFSSPFLDPARLESVVKSFVSKQEPLPLSFSSFGTFPNEKNHLFLAPAPTMALLQFQAQLCEAIKKEGIDIGEEFKPDAWIPYCAVAQQVPKTKMADAFCVVRQLXLPVSGYA

SEQ ID NO: 66979 - protein, 180 aa, Gossypium hirsutum
  unsure (1)..(180): unsure at all Xaa locations
  Clone ID: GOSHI-09MAY01-C111158_1.pep
LVTPKNLSYLNPFLALHSPNVKPLVFPFPSHPSLPHGVEQMQDLPISFLPHIVNALGKLYHPLVQWFRAPTXPSVAILSDIVLSSWTVNLASHLNIPNICFVPFNVAAVYFWISTPSFLLPFYREAFTMSMQSQGLVFNSFKELEGTKLGLIKEKFAKHYRVWGVGPLPPVKVCDEGLNE

SEQ ID NO: 66980 - protein, 74 aa, Gossypium hirsutum
  Clone ID: uC-gsronu33B047g06b1.pep
PPATLKGSHQIFGILRCKARVSRAKRMHYITYITSVWSFCGWDPLNLTVCRTFPMPEPCWYSFYKELYLSGLPL

SEQ ID NO: 66981 - protein, 76 aa, Gossypium hirsutum
  Clone ID: uC-gsronu33B047f05b1.pep
RVSHGFTPDLSIMLATLPASDRSQMQDLLISFLPHIDNALGKLYHPLVQWFRAQQLPSVAIFIDIVHTFLDCYTSP

SEQ ID NO: 66982 - protein, 134 aa, Gossypium hirsutum
  Clone ID: GOSHI-09MAY01-C11040_1.pep
MSGKGAKGLITAGKSAKDKDKDKKKPISRSSRAGLQFPVGRVHRLLKTRVNAHGRVGATAAVYTAAILEYLTAEVLELAGNASKDLKVKRITPRHLQLAIRGDEELDTLIKGTIAGGGVIPHIHKSLINKSSKE

SEQ ID NO: 66983 - protein, 196 aa, Gossypium hirsutum
  Clone ID: GOSHI-09MAY01-C11070_1.pep
MANLRSLTKHFICACQLLLLLQAKVFCSQYKVGDLDAWGIPTSANPQVYAKWSKNHSFKLGDSLLFLYPPSQDSVIQVTEQSYNSCNLKDPILYMNNGNSLFNITKPGEYFFTSGEPGHCEKKQKLYIAVLSGNGSAALAPSYGPSALPDTASSPSYTTVFGNIPQPPSSSPSLGFPLFVTAVVASATWGIINAMI

SEQ ID NO: 66984 - protein, 237 aa, Gossypium hirsutum
  unsure (1)..(237): unsure at all Xaa locations
  Clone ID: GOSHI-09MAY01-C11060_1.pep
LNTTKNLNATLFEELKAGMQNSSEYASNSLAIAAKFLGLLTNFRIPIHRRLLGFQKAAPSEFPAWVSPTERRLLQESKPTPNVIVAKDGSGHFRTINEAVQLVGKKNQSRFVIYVKEGKYVENVNLDKHRWNVMIYGDGKTKTIIXAGRNFGDGTATFDSATFTGAGRGFIAKDLKVGNPAGAAKHQAVAMRSGSDRSVFYSCAFDAYQDTLYAHXNRQFYRECDILGTIDFIFGKC

SEQ ID NO: 66985 - protein, 189 aa, Gossypium hirsutum
  unsure (1)..(189): unsure at all Xaa locations
  Clone ID: GOSHI-09MAY01-C11000_1.pep
GRLDSPVSQVRSQLKDSGNGEKASVAKLFEQVGLQKILSLLEAEDADVRIHAVKVVANLAAEETNQQKIVEAGGLKSLLMLLGSSEDETIHRVAAGAIANLAMNEKNRELIMSQGGISLLSTTASHAKDPHTLRMVAGAIANXLCGNDKLLTNLRGDGGIKALLXIAKCGHXDVLAXGARGIVNFANCE

SEQ ID NO: 66986 - protein, 363 aa, Gossypium hirsutum
  unsure (1)..(363): unsure at all Xaa locations
  Clone ID: GOSHI-09MAY01-C11390_1.pep
MASALETKAKEAYFDDHFELALDLYSQAIGINPKKAELYADRAQANIKLNNLPDAVADANKAIELDPSMSKSYLRKATACMKLEEYQTAKAALETGAALAPEDSRFSKLIKECEERIAEENGELPKETLEVVPTNVVPAKDVSSVQDVPDPMTVAAPPKSTYRHEFYQKPEEVVVTIFAKGIPPECVKVDYGEQILSVAVNAPGKDAYHLQPRLFGKIIPDKCRYDVLSTKXIEIRLAKAEPIQWTSLEFSMEVAVPQRINVSSVAANQRPSYPSSKPKRVDWDKIEAQVKKEEKDEKLDGDAALNKFFRDIYQDADEDARRAMQKSFVESNGTVLSTNWKEVGVKKVEGSPPDGMELKKWEY

SEQ ID NO: 66987 - protein, 142 aa, Gossypium hirsutum
  unsure (1)..(142): unsure at all Xaa locations
  Clone ID: AI727474.1.pep
DKCRYDVLSTKXEIRLAKAEPIQWTSLEFSMEVAVPQRINVSSVAANQRPSYPSSKPKRVDWDKIEAQVKKEEKDEKLDGDAALNKFFRDIYQDADEDARRAMQKSFVESNGTVLSTNWKEVGVKKVEXSPPDGMELKKWEY

SEQ ID NO: 66988 - protein, 192 aa, Gossypium hirsutum
  Clone ID: GOSHI-09MAY01-C111308_1.pep
MADPALHHQIQPIKEIAIDYTPEACTHCPVSNSITLTFDHRGGARWRSTTRFLYGTFTSLIQCPKGNTSGLNFNIYLSSLEGDKSQDEIDFEFLGKDKTIVQTNYYTTGTGNREQIHDLGFDCSDGFHEYTIKWNPDSIEWVIDGKVVRKAEKKEGEAFPEKPMFLYASVWDASYIPECRSAPPSGEFLCCL

SEQ ID NO: 66989 - protein, 118 aa, Gossypium hirsutum
  Clone ID: uC-gsronu33B146c03b1.pep
AGAPAGAAPAFLGGTYSSGFFCYQTLAQADAGLYHQLRPVTKIATDHTPQARCHCPVGNHITLTFDHRVGAWCGATTRLLYGTFTCLIQCPRGNTSGVHFNIYLSSLEGDISQDEIGF

SEQ ID NO: 66990 - protein, 50 aa, Gossypium hirsutum
  Clone ID: GOSHI-09MAY01-C11270_1.pep
LGSSIGKEYPESRWPTQTPSFLQLVVYKKRKFIILFLETGEHKKLKKACQ

SEQ ID NO: 66991 - protein, 138 aa, Gossypium hirsutum
  Clone ID: GOSHI-09MAY01-C12990_1.pep
MGAAMLSELATEIVVPVCAVIGIAFSLVQWVMVSRVKLTSERHASSANSSKNGYGDYLIEEEEGINDHSVVTKCADIQNAISEGATSFLFTEYQYVGIFMIAFAILIFLFLGSVEGFSTKSQPCTYDKEKMCKPAFAT

SEQ ID NO: 66992 - protein, 131 aa, Gossypium hirsutum
  Clone ID: GOSHI-09MAY01-C12980_1.pep
AEDQIKRLAKDPQVVPALGQHLRTGKTPNVRQLAAVLLRKKITGHWAKLAPQVKQLVKQSLIESITMEHSPPVRRASANVVSIVAKYAVPAGEWPDLLPFLFQCSQSPQEDHREVALILFSSLTETIGSTF

SEQ ID NO: 66993 - protein, 130 aa, Gossypium hirsutum
  Clone ID: GOSHI-09MAY01-C12950_1.pep
NLDDLRQLWLHLQYNLVRVIICSARVVFGLTVYIMTRPRPVYLVDYSCYRPPDHLKAPYGRFLEHSRLTGDFDESSLEFQRKILERSGLGEETYVPKAMHSISPTPSMAAAREEAEEGMFGALDTLFRNT

SEQ ID NO: 66994 - protein, 124 aa, Gossypium hirsutum
  Clone ID: GOSHI-09MAY01-C12880_1.pep
MATAAAATKTISQISCFSSINRRFQLYHRSTFRPVTRSKSFVVTSVDGHGAETTGNQPKTTPSYIAGESKAFIEDMPRTYPNAEEHVPENTTDLQEEHGIIQQKRAARIHDFWSGIPYGGLVLS

SEQ ID NO: 66995 - protein, 172 aa, Gossypium hirsutum
  unsure (1)..(172): unsure at all Xaa locations
  Clone ID: GOSHI-09MAY01-C12850_1.pep
PGRPRRRPRVREEKPLLGFLNEVCGEEIIFSMCLFLDWNPAATSISVGLSDGSVSITTLAESKIEKLQEWKAHDFELWTTCFDIHQPQLVYTGSDDCKFSCWDMRDNPSGMVFQNSKVHKLGXVCCIAKSPTDPNTILTGSYDEYLRVWDLRCISRPVNETSVCLGGGVWRI

SEQ ID NO: 66996 - protein, 83 aa, Gossypium hirsutum
  Clone ID: GOSHI-09MAY01-C12860_1.pep
HSSIKGCVKLSYDALRRPGITDSPFGIKDFGYSICTITHSKRTGIDLLYPFQEPRTKTKDMATVFLFKSAPRTPSVLCYFLRS

SEQ ID NO: 66997 - protein, 433 aa, Gossypium hirsutum
  unsure (1)..(433): unsure at all Xaa locations
  Clone ID: GOSHI-09MAY01-C12830_1.pep
VSDLHEXVKRMVAAGFVEECSHVYSTCRREFLEESISRLGLQKLSIDEVQKMPWHELEDEIERWIKAANVALRILFPSERRLCDRVFFGFSSAADLSFMEVCRGSTIQLLNFADAVAIGSRSPERLFKVLDVFETLRDLMPEFDSVFSDQYCLVLRNEAVTIWKRLGDATRGIXFMELENLIRRDPAKAAVPGGGLHPITRYVMNYLRAACRSRQTLEQVFDESNAVVPSNKLDDRRASSSSMSVQMAWIMELLESNLEMKSKIYRDSALCSVFMMNNGRYIVQKVKDSELESLLGDDWIRKHNAKVRQYCTNYQRSSWNKIIGTLKLDNXSIASNAIAKSMNQKIKSFNTQFEDVCKTQSSWIVFDEQLREEMRISVSRLLLPAYRNFIGRLQCMPEIGRNTDRLIRYNPEDIEARINELLEGNNGSSGVRK

SEQ ID NO: 66998 - protein, 93 aa, Gossypium hirsutum
  Clone ID: GOSHI-09MAY01-C12550_1.pep
MSRYDSRSGDPTSYRDRRSDSGFGGASAYDGSVRSSSSRRDYDGAEPPRKLDLDGLTPSEKNFYFESPSVAAMSDAEAEDYRRRREITVEGRD

SEQ ID NO: 66999 - protein, 184 aa, Gossypium hirsutum
  Clone ID: GOSHI-09MAY01-C12560_1.pep
MVAISLYRGNLHRAPEVSWRGLMPTPKISLKDFKSLLHRRDRALSRLRSSSSSNPNPNSVLKHQIQSPVSCEPPIEPKLKAKLEPEPSEGLKTGPPLQEVKVDIVGGSDGGDCLVKSEDEQTEKDINLQVDEKLPEEAKTNVEVSDKINDFNGKEKRKRDVEEKLQVLNAKKHILVQVLKQILN

SEQ ID NO: 67000 - protein, 122 aa, Gossypium hirsutum
  Clone ID: GOSHI-09MAY01-C112518_1.pep
QAGYYCSVCVCVVKDSANYLDHINGKKHQRALGMSMRVERASLKQVQERFEQLKKRKPPGSFTEQDLDERIIKQQEEEEERKRQRRERKKEKKKEKAAEEEPEIDPDVAAMMGFGGFGSSKK

SEQ ID NO: 67001 - protein, 253 aa, Gossypium hirsutum
  Clone ID: GOSHI-09MAY01-C12450_1.pep
MAEDSESKQSAVESVMEKISEKIHGNDSSSSSDSDHEKPASPSSVKAKIYRLFGRERPVHHVLGGGKPADVFLWRNKKISAGVLGGATAIWVLFELIEYHLLALICHISILCLALLFLWSNAHTFIHKSPPRIPEIHLPEEPFLQVASALAIELNQGLKLLRDIASGRNLKEFLMVIAAFWVLSIVGSWCNFLTLFYICFVLLHTVPVLYEKYEDKVDPFAEKAAIEVKKQYAVFDAKVLSKIPMGPLKAKKV

SEQ ID NO: 67002 - protein, 196 aa, Gossypium hirsutum
  unsure (1)..(196): unsure at all Xaa locations
  Clone ID: GOSHI-09MAY01-C12440_1.pep
MMQQPPAGGVAPPPSMAADPSQTQQYQKQQQSQPWMMMSQQQQAGQPVPPPAGWNPQPVPPPSQMQQYSAGSATVGSGEIRSLWIGDLQPWMDENYLISIFAQTGEVVSAKVIRNKQTALPEGYGFIEFVSRAAAERVLQLYNGVPMPNSEQNFRLNWAALGYGEKRPEEGPXYTIFVGDLAADVSDYMLXETFKA

SEQ ID NO: 67003 - protein, 236 aa, Gossypium hirsutum
  unsure (1)..(236): unsure at all Xaa locations
  Clone ID: GOSHI-09MAY01-C12420_1.pep
AHASAHASVQLSLSSVSAVSFVCLTRFVKKHGLRRFLFLDKLCDESETVRKQYTVQLNRSLKIVSFFVLPCFIAETAYKVWWYASGASQIPFLGIVWLSDTVACVMELCSWLYRTTVFFLVCVLFRLICNLQVLRLHDFAKVFNVDSDVGSVLREHLRIRRQLRIIXHRYRAFIVWCLILVTFSQFTSLLITTKSNSRLNIYKAGELALCSITLLTGLCILLRSATKITHKAQSVT

SEQ ID NO: 67004 - protein, 233 aa, Gossypium hirsutum
  unsure (1)..(233): unsure at all Xaa locations
  Clone ID: GOSHI-09MAY01-C12710_1.pep
MSTGRNTHWCYRCRRPVILQGHDSVCCYCGGGFVQELDEMVPISPMDFFGVPGDEDRGQRFGLMDAFSAFMRQRLADRSFNHNIRGRTDSILEHNPPFGPLLVFGGQIPFRLSGNGGFEALFNGAPGIGFTRGNAGNYFIGPGLEELFEQLSANDRRGPPPATRSXIDAMPTVKITRRHLHSDSHCPVCKDKFELVSEPRQMPCNHLYHSDCIIPWLLQHNSCPVCRQELPPH

SEQ ID NO: 67005 - protein, 229 aa, Gossypium hirsutum
  Clone ID: GOSHI-09MAY01-C12680_1.pep
MAATLLFSLLILAITAGHSSGATGKWCVCKDGVGDGNLQKTLDYACGNGADCNPIRSNGPCYNPNTVKAHCNYAVNSYFQKKGQGQGSCEFAGTAAITTTDPSSGGCSYPSSASGGGTTLTPTTPGTTTTPSSSTTTTPSIMTPGTNTPTSTTPYSSTTPTGVLGGVGTGLGPSGTTSTNTDYSHGGFRLQPISFFTTLLFSGVMLIGVEYYKPAMSLYVIFRCLSKDM

SEQ ID NO: 67006 - protein, 212 aa, Gossypium hirsutum
  unsure (1)..(212): unsure at all Xaa locations
  Clone ID: GOSHI-09MAY01-C12650_1.pep
MNIFSKKPNPKEXLRESKREMAHASRGIEKEIGTLQLEEKKLVAEIKKTAKTGNEAATKTLARQLVRLRQQIAKLQSSRAQMRGIATHTQAMHAQSSVAVGMKGATKAMSAMNKQMAPEKQAKVIREFQKQSAQMDMTTEMMSDAIDDALDDDEAEDETEDLTNQVLDEIGVDVASQLSSAPKGRIAGKNTEGVGSSGVDELEKRLAALRNP

SEQ ID NO: 67007 - protein, 137 aa, Gossypium hirsutum
  Clone ID: LIB3166-055-P1-K1-A6.pep
GGPRVPPRLRPRFRNIFRKKPNPKGALRESKREMAHATRGIEKEIGTLQLEEKKLVAEIKKTAKTGNEAATKTLARQLVRLRQQIAKLQSSRAQMRGIATHTQAMHAQSSVAVGMKGATKAMSAMNNQMAPEKQAKV

SEQ ID NO: 67008 - protein, 91 aa, Gossypium hirsutum
  Clone ID: GOSHI-09MAY01-C12660_1.pep
FFTASSQSALENRLSSVNVLGVTRLQYQSIRKLNFWKYFVFPSFALSYSFLLFSFESVFVPIQIVKRIVISYVKIWSNSAISPCPLSELWI

SEQ ID NO: 67009 - protein, 228 aa, Gossypium hirsutum
  Clone ID: GOSHI-09MAY01-C12630_2.pep
MALPTKRASFFPFLLLLLLVTISIFLVTPSNSATDTFVPRGRSQLKFISGSPYEYNVNSILTSLVNSAMFTSYNNFTISASQDTVYGLFQCRGDLENGDCGRCVAKAVSQLGTLCLDSTGGGLQLEGCFVKYDNATFLGVEDKSVVVKRCGPLISTDSDALARRDTVLDFLGASDGTYKPFRVAESGDLRGVAQCVGDLSPTECQDCLSEAIGRLKTDCGAFKWGDMY

SEQ ID NO: 67010 - protein, 285 aa, Gossypium hirsutum
  unsure (1)..(285): unsure at all Xaa locations
  Clone ID: GOSHI-09MAY01-C12630_1.pep
LPKTAALFLLLLAVWCFFITPSDSATDSFVFGGCSQLKYTSGSPYESNVNSILTSLVNSAMYTSYSNFTLPGASNQDTVYGLFQCRGNLNSGDCGRCVAKAVSQLGTLCLDSTRGVLQLEGCFVKYDNTTFLGVEDKTVVVKKCGPSISSYSDALGRRDAVLGYLGASDGTYKPFRVSGSGDVQGVAQCVGDLSPSECQDCLSDAIGRLKTDCGAAKWGDMYLAKCYARYSEGGDHSHGQKDTNNNDEEIDKTLAILIGLIAAVALIILFXSFLSKLCDNGKGAK

SEQ ID NO: 67011 - protein, 208 aa, Gossypium hirsutum
  unsure (1)..(208): unsure at all Xaa locations
  Clone ID: GOSHI-09MAY01-C12130_1.pep
RCCLVPXSPFYLEGXGGLYEYIEKRLKQNGHMVIVIAEGAGQDLLSESLQSVDQQDASGNKLLQDVGLWISHGIKEHFAKKKMPINLKYIDPTYMIRAIPSIASDNVYCTLLAHGAVHGAMAGYTGFTVGPVNGRHAYIPFNRIIEKQNKVVITDRMWARLLSSTNQPSFLKPRDIAEAKKEKYPANGILDGKXCKDNVNELTKDMPL

SEQ ID NO: 67012 - protein, 130 aa, Gossypium hirsutum
  Clone ID: GOSHI-09MAY01-C12120_1.pep
FVCGFISDLVGDIWGRSSSVIQLASASEATVSSTYEVSVWRSLWNDLFSQVFRAVRSILNGFVAFFAACNRHRLSIYNHVQDVIQRRFGGVPRSQTSDPRRSKSTCGNQCQSEVRRRVHSKNCSPATLSF

SEQ ID NO: 67013 - protein, 75 aa, Gossypium hirsutum
  Clone ID: uC-gsronu33B090e02b1.pep
MAVISFRVLMRVVTIFALIFAIVSPKVEAQSAAPAPSPTSDGTSIDQGIAYVLMLVALVLTYLIHPLDASSYTFF

SEQ ID NO: 67014 - protein, 75 aa, Gossypium hirsutum
  Clone ID: uC-gsronu33B090e08b1.pep
MAGISFRVLMRVVTIFALIFAIVSPKVEAQSAAPAPSPTSDGTSIDQGIAYVLMLVALVLTYLIHPLDASSYTLF

SEQ ID NO: 67015 - protein, 332 aa, Gossypium hirsutum
  Clone ID: GOSHI-09MAY01-C12340_1.pep
GRVGCYKRGVDRIFVDHPVFLEKVWGKTGSKIYGPRAGLDYKDNQLRFSLLCLAALEAPRVLNLNSSKYFSGPYGENVVFVANDWHTALLPCYLKSVYQSRGIYMSAKVAFCIHNIAYQGRFAFEDYSLLNLPDQFKSSFDFMDGYDKPVKGRKINWMKAGILESHRVLTVSPYYAQELVSGEDKGVELDHIIRKTGITGIVNGMDVQEWNPTTDKYISVKYDATTVTYAKRLLKVALQAELGLPCDENVPLIGFIRRLEEQNGSDILTAAIPKFIGQNCQIVVLGTGETAMEKQIQQLETLYPAKAIGVAKFIAPLAHMIFAGAHYLLVPT

SEQ ID NO: 67016 - protein, 123 aa, Gossypium hirsutum
  Clone ID: GOSHI-09MAY01-C12370_1.pep
KKRKKEKTAKEKRDPEITFWCFCIPIAKKIQVVAYSQSFIVSILQNIMTKSKINHPVLPLFIFSLCSFLCAVGVCCVAGLCVSCRYGVQGLGCGMYGWAWPRAYGGPCKWCYVRRKWLGEGGG

SEQ ID NO: 67017 - protein, 88 aa, Gossypium hirsutum
  Clone ID: LIB3166-051-P1-K1-B4.pep
TYFQRVQWVFGQLNPCRSRLFCCALWAIWGVRNKRIHEEKVSNGKDTMHSLAIEAVACWRAVRIKAPGDGNQSLLEEIHLPQLKNAGR

SEQ ID NO: 67018 - protein, 95 aa, Gossypium hirsutum
  Clone ID: LIB3146-050-Q1-K1-H6.pep
GSLWHERLMKISSSTKVNMQHRKLLNITTCPRCEARAETLTIFSESALGFWTTQSLPKSFILLCIHSPLKQWLVGEQSESEWLGDGNQSLLEEIH

SEQ ID NO: 67019 - protein, 203 aa, Gossypium hirsutum
  Clone ID: GOSHI-09MAY01-C12320_1.pep
DAWGQNQNMKILCLHGFRTSGKFLQKQISKWDPSLFLHHFQMDFPDGLFSAGGKSDIEGIFPPPYFEWFQFNKEFTEYTNLEECISHLCQYITHNGPFHGLLGFSQGATLGALLLGYKAQGKVLKEHPPFKMFVSISGSKFREPSICEVAYKDKIDVKSVHFIGAKDWLKLPSEDLATAFHDPLIIRHPQGHTVPRLDEVSIE

SEQ ID NO: 67020 - protein, 65 aa, Gossypium hirsutum
  Clone ID: LIB3135-011-Q1-K1-A10.pep
HSSPSSKVRWLGTRENQTTNRLGKGLSGPLLVQRVRRRYAEIVQYNNIKFQVWDLGGQTSIRKRS

SEQ ID NO: 67021 - protein, 104 aa, Gossypium hirsutum
  Clone ID: LIB3166-050-P1-K1-B8.pep
VGVLRWLGTRENQTTNRLGKGLSGPLLVQRVRRRYAEIVQYNNIKFQVWDLGGQTSIRKRSCEEQQFLFFLFLQVSRLVEGSIMKGKNITQGCAKVTTPFQCLC

SEQ ID NO: 67022 - protein, 180 aa, Gossypium hirsutum
  unsure (1)..(180): unsure at all Xaa locations
  Clone ID: GOSHI-09MAY01-C12270_2.pep
MAAKPLTSEAIALTEKKMDMTLDDIIKMSKNTSHKSKKQRRIPNKIQRPVSNAAKDKALKVRQYMDSRASVRQGVLAQRRSNFQGNRFPFAAEAARRAAVAPIRNRAFNTSRVANLNKPRVGAPPVQRRATNGGFTAKPQAXSNQQLQAGPQEDNSTKQRPKTLDSLFANMKEERLRVLS

SEQ ID NO: 67023 - protein, 92 aa, Gossypium hirsutum
  Clone ID: GOSHI-09MAY01-C12270_1.pep
MVFASRCRVGAPPVQRRATNGGFTAKPQRQQQQLQQDQQENIVTKQRPKTLDSLFANMKEERLRVLSHQNNGVQPNGRGRQRMPWGRGRFGN

SEQ ID NO: 67024 - protein, 109 aa, Gossypium hirsutum
  Clone ID: LIB3166-050-P1-K1-D9.pep
CDQILGVPHNMQLEISKPGTHSRGHQYCRRSIIYLGLFKLATLLLLNALLRNGATAALRAASATKGNRFLSNKSPRVHVLSYLQGLIFSSITHRSMDFIRYPCPLLRFI

SEQ ID NO: 67025 - protein, 108 aa, Gossypium hirsutum
  unsure (1)..(108): unsure at all Xaa locations
  Clone ID: uC-gsronu33B100a06b1.pep
TDGPSAIAALNPDEGGYHVLLANIYATASMWGEVAKVRTTMXKKGLQKTPGCSVDEMRNASYTFYFLIINPPQLTKNYCXLEELGNKILAVGYVPDTSSIHDVEDYIL

SEQ ID NO: 67026 - protein, 68 aa, Gossypium hirsutum
  Clone ID: uC-gsronu33B100a12b1.pep
VALNPDEGGYHVLLANIYATASMWGEVAKVRTTMKRKGFRKRPGCSVVALRNEVHSFYSVTTNHPQPT

SEQ ID NO: 67027 - protein, 115 aa, Gossypium hirsutum
  Clone ID: GOSHI-09MAY01-C13980_1.pep
RKRRMKTSNLCMPRFKGNNKNKRLSPMTLFERFREAIFRLIMLSALTKTSSDQHFNPLAVPQRCYHQPDDARRSEDMADCIEFIKRKAFIEENRESSDRNSTANDVGGDVAMQVL

SEQ ID NO: 67028 - protein, 116 aa, Gossypium hirsutum
  Clone ID: GOSHI-09MAY01-C13900_1.pep
MAVDSAISSPLGPPACEKDAKALRFIEEMTRNADPVQERVLSDILTQNSQTEYLRRFKLNGASDRDSFKSKLPVITYEDLQPEIQRIANGDRSAILSAHPISEFLTSSRTLAGERK

SEQ ID NO: 67029 - protein, 144 aa, Gossypium hirsutum
  Clone ID: GOSHI-09MAY01-C13880_1.pep
MFPTMESFGFCFLMLTIAILASPALSDLVLSKVDRRIYLTSHIVRISSTMKVENAGSEKESKVLLAFPEQQAKNMAYLIATPHEGKGKGKNPVVVLPVEAANPKDMPAALTFYSVSLPKGLAEGDSFTFDVLAVFTHALRPIPE

SEQ ID NO: 67030 - protein, 111 aa, Gossypium hirsutum
  Clone ID: GOSHI-09MAY01-C13870_2.pep
IDSKFHLSTSFFHMASFPAAAFFIVLGVAFGVSNSEACTHDSECQLNCDHLGLCDLKTNKCSCLPVTEPLPFDGVPMANAKCSTDDDCKDACPPNCTPKCFHCFCLCYCNA

SEQ ID NO: 67031 - protein, 115 aa, Gossypium hirsutum
  Clone ID: LIB3543-037-Q1-K1-D10.pep
IHSQIFQTMASFGVACFFIVLIVAFGVSNSEACTHDSECQLNCDHLGLCDLKTKGGGCLPVSEPLPFDSVPMANAKCSTDDDCGIHKVGAPCWIGSCVACLVRFEPLPFIWHLRI

SEQ ID NO: 67032 - protein, 57 aa, Gossypium hirsutum
  Clone ID: LIB3189-018-P1-K1-D6.pep
RTRGRTRGFHNIIYSKFNLSTSFKQWLLLVLLLFSSFWSWHLVYQTWKHVLMTHSVN

SEQ ID NO: 67033 - protein, 128 aa, Gossypium hirsutum
  Clone ID: GOSHI-09MAY01-C13800_1.pep
MAVGGFGGVDGPVSSFNGKITASVVITCIVAASSGLIFGYDIGISGGVTTMQPFLQKFFPSVLRKAAEAKTNIYCVYDSQVLTSFTSSLYIAGLAASLVASRLSAAIGRRNTMVLGGLTFLAGAAING

SEQ ID NO: 67034 - protein, 182 aa, Gossypium hirsutum
  Clone ID: GOSHI-09MAY01-C13570_1.pep
MAFKSFPKLSILAGVFTLLLSHHLYEVSAATGGRMGGSSFSSESPPSHRNDDDYHHYNHHDLHHRHHHHYHHSQPGFPRSADQESGPTSAAVSYLILTIFMGVASVIVYSSTVQNRTSILQVQVGLSAKARSLQKELTEIASTTDTSTAKGWNIILEETVSSLLHHPHCYLHGYSSVTHHWT

SEQ ID NO: 67035 - protein, 230 aa, Gossypium hirsutum
  unsure (1)..(230): unsure at all Xaa locations
  Clone ID: GOSHI-09MAY01-C13460_1.pep
MNGVKKSTSAKIKLRGLLNQSDNRTCADCGAPDPKWASANIGVFLCLKCCGVHRSLGTHISKVLSVALDEWSDEEIDAMIEVGGNSSANSIYEAYIPEGYTKPGPNASNDERRKFIKSKYELQEFLRPSLRITSGKDSSSSSTQSNISGKILDTILSNASRYGGMLAFIRFLXGKVVKGTNLAVRDMMTSDPYVVLTLGKQTVQSTVISSNLNPVWNEELMLSVPSNYGP

SEQ ID NO: 67036 - protein, 48 aa, Gossypium hirsutum
  Clone ID: LIB3197-046-Q1-M1-B3.pep
MSGVKKSTSAKITLRGLLNQPDNRTCADCGAPNPKWASANIGIFLCLK

SEQ ID NO: 67037 - protein, 203 aa, Gossypium hirsutum
  unsure (1)..(203): unsure at all Xaa locations
  Clone ID: GOSHI-09MAY01-C13780_1.pep
RFVQRLRKKAASLHNVSLEQGTVTSLLEENGIVKGVHYKDKSGQLLTAYAPLTIVCDGCFSNLRRSLCHSKVDIPSYFVGFILTNCKLPKEKYGVFILADPSPILFYPISSTEIRCLVDVPRQNLPSXSNGEMAHYLETLVAPKVLPELYNSFISAIEKKDNIRIMPNKIMAGAPHLTPGAFLIGDAFNMRHAITGGGMTVAL

SEQ ID NO: 67038 - protein, 88 aa, Gossypium hirsutum
  Clone ID: GOSHI-09MAY01-C13690_1.pep
MATIPVNPKPFLNNLTGKTVIVKLKWGMEYKGFLASVDSYMNLQLGNAEEYVDGQFTGNLGEILIRCNNVLYLRGVPEDEDIEDADKD

SEQ ID NO: 67039 - protein, 152 aa, Gossypium hirsutum
  Clone ID: GOSHI-09MAY01-C13670_2.pep
LAEAAFLIGLEKNSDVVHMASYAPLFGRAGDRRWNPDAFVFNSFQAYGTPSYWVQRFFTESSGAILLNATLQKDSSNSLVASAITWKNSEAGQTYIRIKVVNFGSNSVNLQISVDGLDPNSVKLSGSTKTTLTSANLIDENSFKEPKKVSPI

SEQ ID NO: 67040 - protein, 121 aa, Gossypium hirsutum
  Clone ID: GOSHI-09MAY01-C13670_1.pep
IPLVAILPITWKNSEDGQTYIRIKVVNFGSNSVNLQISVDGLDPNSVKLSGSTKTTLTSANLMDENSFKEPKKVAPNQTLLEDAQEMSALLRPHSFTSFDLLKESVNLRITEDDSSLVSSI

SEQ ID NO: 67041 - protein, 67 aa, Gossypium hirsutum
  unsure (1)..(67): unsure at all Xaa locations
  Clone ID: LIB3135-011-Q1-K1-G11.pep
FTSGLVDIKSLHSISYVYKVSSAENNKEEVPRYAGKQMAYIYKAAVNXDGSHYRCLWGKVTRPHGNS

SEQ ID NO: 67042 - protein, 152 aa, Gossypium hirsutum
  Clone ID: GOSHI-09MAY01-C13190_1.pep
TINPKVIECEYAVRGEIVTLAQKLQEEIQTKPDAHPFEEILYCNIGNPQSLGQQPITFFREVLALCDHPAILDKSETQGLFSADSIERAWQILDQIPGRATGAYSHSQGIKGLRDTIAAGIEGRDGFPAEPIDIFLTDGASPALHIMMHLLI

SEQ ID NO: 67043 - protein, 116 aa, Gossypium hirsutum
  unsure (1)..(116): unsure at all Xaa locations
  Clone ID: GOSHI-09MAY01-C13130_1.pep
LRPNKSQTRESSSSTTTNPTTTEDCYNRWIYIRNLPSRFNLDLLTNCXEYPIVDDFCPYLANHGLGQXTHTKSRSWYRTDPLLLELIFHRRIXNYPLSTNDPNXSNAMFFSYYFAI

SEQ ID NO: 67044 - protein, 150 aa, Gossypium hirsutum
  unsure (1)..(150): unsure at all Xaa locations
  Clone ID: GOSHI-09MAY01-C13070_1.pep
MITIPYLTALTTYFSYGLLFAFGQFRDFFRNIFDWWHASNLEGYAPICLGLEDFYIRRLYLRIQDCFGRPIASAPDAWFDVVERYSNDNNKTLKRTDKISRCLNLGSYNYLGFAAXEYCTPRVIDSLCRFSASTCSTRVEGGTTTLHKEL

SEQ ID NO: 67045 - protein, 171 aa, Gossypium hirsutum
  Clone ID: GOSHI-09MAY01-C113398_1.pep
FIQAARVFDDLAVGLVSGLDNDVGYNLSSVELPAPWFIYSFMGIGITICRLALIGCIAAESINGCCLCFYTLLKIILVLIEAALVAFIAIDRSWEKDLPLDPTGEIDSFRSFVEDNIDICKWVGISVVIIQALAMLVAIILRTMVSARRRDIDDEDEYDYESITGTTWEPC

SEQ ID NO: 67046 - protein, 306 aa, Gossypium hirsutum
  Clone ID: GOSHI-09MAY01-C13370_1.pep
MVKNWKKALILVLFTVCILGFKPRCVNGETDQADASALGVMYTSLNSPQQLTGWTASNGDPCGQSWKGVTCSNKRVTEIKLSNLGLSGSVGYSFQSLTSLKELDLSHNNFAGDIPYFTLPNLQRLNLEYNQFTGSVPFAISQMPSLQYLNLAHNQLQNALNDMFGPLSSLSTLDLSFNSLNGGLPESFKNLTSISSMYLQNNQFSGTIDVLANLPLDTLDVSNNRFTGWVPDQLKSINLKKDGNSWSSGPAPSPPPGTPPATRNRKHKSGSDGSASDSGSGGGSSSSGIGGGAIAGIVISILISGL

SEQ ID NO: 67047 - protein, 218 aa, Gossypium hirsutum
  unsure (1)..(218): unsure at all Xaa locations
  Clone ID: GOSHI-09MAY01-C13310_1.pep
MATTSATTFSIGSTVSFGSRGNPLPQSKPFVARFTSPNSLASFSGLKAATYVNCESESSFFSKESSAALRGSFVPKAQKANQKSQNGLQPVASYKVAILGAAGGIGQPLALLIKMSPLVAALNLYDIANVKGVAADLSHCNTPSQVQDFTGASEXNCLXGVNVVGIPAGVPRKPCMTRDDFFTFMPHREDLVSVLILSDASSYIAFQYSQSNVASLNK

SEQ ID NO: 67048 - protein, 92 aa, Gossypium hirsutum
  Clone ID: GOSHI-09MAY01-C13320_2.pep
MAAEEALDLSTLQSQLSETHEMWNQEMEKHQCQVDFLQDKIMEVKACLQGPEEESKEVDVLWRMVKTTATLLAYLKSKARVMAVPDLAHKSC

SEQ ID NO: 67049 - protein, 142 aa, Gossypium hirsutum
  Clone ID: GOSHI-09MAY01-C13320_1.pep
MAAEEALDLSTLQSQLSETHEMWNQEMEKHQCQVDFLQDKIMEVKACLQGPEEESKEVDVLWRRVKTTATLLAYLKSKARVMAVPDLAHKSCGIKILEGVGLVDKEGTPLSGWSRSADLASFDCVDEETWTGISRQQDSLDE

SEQ ID NO: 67050 - protein, 338 aa, Gossypium hirsutum
  Clone ID: GOSHI-09MAY01-C13230_1.pep
MQNQTEPPPETNSDKDDQAIEFDLSSTTALDLTSFQLHDLDSVELPSSLTELDLTANRLSKLDPRIANLINLRKLSFQQNLIDDAAIESISSWDSLSGLEELVLRDNKLMKVPDVSLFKKLLVFDVSFNEITSLHGMSKVSSTLKELYVSKNEVTKMEEIDHLHELQILELGSNRLRVMENLQNFTKLEELWLGRNRIKAINLCGLKYIKKISLQSNRLTSMIGLEECVALEELYLSHNGISKMEGLSTLVNLRVLDVSSNKLTSVNDVQNLTRLEDLWLNDNQIESLESVAEAVSGSREKLTTVYLENNPCAKSPNYQATLRQIFPNIEQIDSSIFA

SEQ ID NO: 67051 - protein, 96 aa, Gossypium hirsutum
  Clone ID: GOSHI-09MAY01-C13220_4.pep
MAAVPGQLIWEVVKKNNCFLVRQFGRGTASLQFSKEPNNLYNLHSYKHSGLANKKTVTIQSGGKDQSVLLATTKAKKQNKPSALLHKSLMKKVFPR

SEQ ID NO: 67052 - protein, 150 aa, Gossypium hirsutum
  Clone ID: GOSHI-09MAY01-C13220_3.pep
MATVPGQLIWEVVKKNNCFLVKHFGRGTAALQFSKEPNNLYNLNSYKYSGVANKKTVPIQSGGTDQSVLLPPPRTRNQNNPPTLLPKSALKKEFPRMAQAVQNQVTDHYYRPDLTQAALARLSAVHRSPKVAKSGVKKRNRQALKIHGRK

SEQ ID NO: 67053 - protein, 150 aa, Gossypium hirsutum
  Clone ID: GOSHI-09MAY01-C13220_2.pep
MAAVPGQLIWEVVKKNNCFLVRQFGRGTASLQFSKEPNNLYNLHSYKHSGLANKKTVTIQSGGKDQSVLLATTKTKKQNKPSALLHESFMKKEFPRMAKAVKNQVTDNYYRPDLTKAALARLSAVHRSLKVAKSGVKKRNRQALKVRGWK

SEQ ID NO: 67054 - protein, 150 aa, Gossypium hirsutum
  Clone ID: GOSHI-09MAY01-C13220_1.pep
MATVPGQLIWEVVKKNNCFLVKQFGRGTAGVRFSKEPNNLYNVNSYKHSGLANKKTVTIQPAGKDQSVLLATTKSKKQNKPSSLLHKSVMKKEFPRMAKAVKNQVTDNYYRPDLTKAALARLSAVNRSLKVAKSGVKKRNRQASRIHGRK

SEQ ID NO: 67055 - protein, 44 aa, Gossypium hirsutum
  Clone ID: LIB3149-034-Q1-K1-C7.pep
DNYYRPDLTKAALARLSAVNRSLKVAKSGVKKRNRQASRIHGRK

SEQ ID NO: 67056 - protein, 80 aa, Gossypium hirsutum
  unsure (1)..(80): unsure at all Xaa locations
  Clone ID: LIB3189-011-P1-K1-C10.pep
ISSDSFFPFKKSYYERMLSCSKGVVIKVWNTLVLTPCLSKGNCCYXIXXKSTVRALPPSLFSLHLSATRTLSKIKILQTG

SEQ ID NO: 67057 - protein, 259 aa, Gossypium hirsutum
  Clone ID: GOSHI-09MAY01-C8993_1.pep
PRVRPRVRPLFRELISSRARGFAVSFGSLIGFLPYRNLAAKWKFLAFEAWLRQRGLDPSAYKQNLGVIGSSDVMSKNSSLDSTSDSENKQQFEGKFSPDMKLEDLLRIYDQEKLKFLTSFVGQRVKVNVLMADRKFRKLIVSLRPKEKEELIEKKRNVMAKLRVGDVVKCCIKKITYFGIFVEVEGVPALIHQTEVSWDATLDPLSHFKIGQIVEAKVHQLDFTLDRIFLSLKEITPDPLVEALESVVGDHDNLDGRLQ

SEQ ID NO: 67058 - protein, 56 aa, Gossypium hirsutum
  Clone ID: GOSHI-09MAY01-C8973_1.pep
LIFETIISKGVQDFKRVSSNIYMHACIYYCLFGPLLQAVTPRNCSSNLYIAKNICN

SEQ ID NO: 67059 - protein, 132 aa, Gossypium hirsutum
  unsure (1)..(132): unsure at all Xaa locations
  Clone ID: GOSHI-09MAY01-C8903_1.pep
YHMTCXCGHEFCYSCGAEYRDSQQTCQCAFWDEDGSEGLATHSVQESEQWAWETFNSLPMLMDAYSDQERSQLALIQRFLAGGFSLSEHHPYQSPPRCTDSYVDAMKDLRQLPWLERFVSVISDNYYEDYIQ

SEQ ID NO: 67060 - protein, 57 aa, Gossypium hirsutum
  Clone ID: GOSHI-09MAY01-C8933_2.pep
EACTFFNQQPRDKKSQTEHEKHVMDLHGEVMACAYEDVQVMWSILDKSKSMACNIKP

SEQ ID NO: 67061 - protein, 500 aa, Gossypium hirsutum
  unsure (1)..(500): unsure at all Xaa locations
  Clone ID: GOSHI-09MAY01-C8933_1.pep
QGEAIAHNLRXMFGLKVPIVSIVIGEGGSGGALAIGCANKLLMLENAVFYVASPEACAAILWKTAKASPKAAEKLRITAPELCRLQICPASGPEPLGGAHADPAWTSQQIKAAINETMDELTAMDTEKLLKHRMHKFRKLGGFEENAQVDPKKKVNMKKEEDQIVCTTPNEELEGEVEKLKQQILKAKESSSKPPEMALKDMIEKLKKEVDHEYSEAIKATGLKDRLDMLREEVSKVNSRDQLMNPAIRDKIEKLKDEFNQKLSAAPNHPTLQYKLDMLKEFSKAKSLSDAATLKQEVNKKFNEIMSRPEINEKLEALKAEVQNSGSSSFADLDQGLKDKVLNTRKEVELEMISALKSIGLVVEGVKSNEKVLSEKDSPSVFKNKVDHLNEEINKKIENVVSSSELKNMIELLKLEIARAGNKPDTESKSKIEAIQKQIKQRLSEAIISSELIEKYEDLKEKNSEVERSSAGADESLQKETKYEEPRLEINLGANSSFAQ

SEQ ID NO: 67062 - protein, 180 aa, Gossypium hirsutum
  Clone ID: GOSHI-09MAY01-C8923_3.pep
MIIPEKNRREISKYLFQEGVCYAKKDYNLAKHPEIDVPNLQVIKLMQSFKSKEYVRETFAWMHYYWYLTNDGIEFLRTYLNLPSEIVPATLKKQAKPAGRPMGPPGDRPRGPPRFGDGERRFGDRDGYRGGPRGGGDFGDKGGAPADYQPSFRGPGTRPAFGRGGGGYGGAGPAGGAGLP

SEQ ID NO: 67063 - protein, 177 aa, Gossypium hirsutum
  Clone ID: GOSHI-09MAY01-C8923_2.pep
MIIPEKNRREISKYLFQEGVCYAKKDYNLAKHPEIDVPNLQVIKLMQSFKSKEYVRETFAWMHYYWYLTNDGIEFLRTYLNLPSEIVPATLKKQAKPAGRPMGPPGDRPRGPPRFGDGERRFGDRDGYRGGPRGGGDFGDKGGAPADYQPSFRGPGTRPAFGRGGGGYGGAGPAGLP

SEQ ID NO: 67064 - protein, 181 aa, Gossypium hirsutum
  Clone ID: GOSHI-09MAY01-C8923_1.pep
MIIPEKNRREISKYLFQEGVCYAKKDYNLAKHPEIDVPNLQVIKLMQSFKSKEYVRETFAWMHYYWYLTNDGIEFLRTYLNLPSEIVPATLKKQTRPGGGRPMGPSDSRPRGPPRFGDGERRFGDRDGYRGGPRGGGDFGDKGGAPADYQPSFRGPGSRPAFGRGGGGYGGAGSASGAGLP

SEQ ID NO: 67065 - protein, 139 aa, Gossypium hirsutum
  Clone ID: AI055707.1.pep
MIIPEKNRREISKYLFQEGVCYAKKDYNLAKHPEIDVPNLQVIKLMQSFKSKEYVRETFAWMHYYWYLTNDGIEFLRTYLNLPSEIVPATLKKQTMPGGGRPMGSSDSRPRGPARFGDREMPICDRDGFRGGHEEAVIP

SEQ ID NO: 67066 - protein, 155 aa, Gossypium hirsutum
  unsure (1)..(155): unsure at all Xaa locations
  Clone ID: uC-gsflnu33B062b07b1.pep
MCNNMTWSLSHTILVVISEGLFQEGVCYAKKDYNLAKHPEIDVPNLQVIKLMQSFKSKEYVRETFAWMHYYWYLTNDGIEFLRTYLNLASEIDPATLKKQTMPGGGSSMGPCDSQPRGPPRFGDGERRFGDRDGYRGGSRGGGDFRXKGGAPADY

SEQ ID NO: 67067 - protein, 135 aa, Gossypium hirsutum
  unsure (1)..(135): unsure at all Xaa locations
  Clone ID: GOSHI-09MAY01-C8853_1.pep
IFAFPLSGKKCRRSAGVKAPLLPGSTKSAPAKPPSVSGAVFNVSTSIIGAGIMSIPATLKVLGVRPAFVMIGVIACLAGISGEFLMRYTHAGDTTTYAGVMRESFGRVGSILVQICVMITNXGCLIIFLIIIGDV

SEQ ID NO: 67068 - protein, 154 aa, Gossypium hirsutum
  Clone ID: GOSHI-09MAY01-C8843_2.pep
GVPLHHFIFAFLTLAFCATSAVAAAAASKEQTLNTQDAEFFNPKLPPRTLASSKRFEGSSNLVDLRYHMGPVLSSSPINIYLIWYGRWSLSQKLLIKDFITSISPSATPSPSPCVSEWWKTVSVYTDQTGANVSRTLVVAKEHSYTRYSHGYHL

SEQ ID NO: 67069 - protein, 350 aa, Gossypium hirsutum
  Clone ID: GOSHI-09MAY01-C8843_1.pep
MSLHHLLFPILILAFSTASSLAATAKDQTLNTHQAEFFNPKLPPRILSSSKKFEGSSDIVDLRYHMGPVLSSSPINIYLIWYGRWSVSQKLLIKDFINSISPSATPSFPPSPSVSDWWKTVSLYTDQTGANVSRTVVIAKEHSDTGYSHGSHLTRLSVQQVIATAVEAAPFPVDHRNGIYLILTSHDVTVEDFCRAVCGFHYFTFPSMVGHTLPYAWIGNSGKQCPEVCAYPFAVPGYMGGGGPGSLAPPNGDVGLDGMISVIAHELAELSTNPLVNAWYAGEDPTAPTEIGDLCEGLYGTGGGGGYIGQVMRDQKGKTYNMNGNKGRKFMVQWIWSPVLKACAGPNALD

SEQ ID NO: 67070 - protein, 144 aa, Gossypium hirsutum
  Clone ID: uC-gsflmaxxa027d03b1.pep
MSLHHLLFPILILAFSAASSLAATAKDQTLNTHQAEFFNPKLPPRILSSSNKFEGSSDIVDLRYHMGPVLSSSPINIYLIWYGSWSVSQKLLIKDFINSISPSATPSPSVSDWWKTVSLYTDQTGANVSRTVVIAKEHSDTGYP

SEQ ID NO: 67071 - protein, 379 aa, Gossypium hirsutum
  Clone ID: GOSHI-09MAY01-C8833_1.pep
PTRPWESAARMIADVSKSNKIVVEKSTVPVKTAEAIERILTHNSKGIKYQILSNPEFLAEGTAIQDLFKPDRVLIGGRETPDGLKAIQALKDVYAHWVPEDRIITTNLWSAELSKLAANAFLAQRISSVNAMSALCEATGADVSQVSHAVGKDSRIGPKFLNASVGFGGSCFQKDILNLVYICECNGLAEVANYWKQVIKVNDYQKNRFVNRVVSSMFNTVSGKKIGIMGFAFKKDTGDTRETPAIDVCKGLLGDKARLSIYDPQVTADQIQRDLTMNKFGWDHPIHRQPMSPTGVKQVSIAWDAYEASKDAHALCILTEWDEFKTLDYRRIFDNMQKPAFVFDGRNVVNVEMLRDIGFIVYSIGKPLDPWLKNMPAVA

SEQ ID NO: 67072 - protein, 114 aa, Gossypium hirsutum
  Clone ID: LIB3166-006-P1-K1-G3.pep
AHASAHASAHASAKFLNASVGFGRSCFQKDILNLIYICECNGLAEVANYWKQVIKVNDYQKNRFVNRVVSSMFNTVSGKKIGIMGFAFKKDTGDTRETPPIDVLKRLVWGIRLW

SEQ ID NO: 67073 - protein, 214 aa, Gossypium hirsutum
  unsure (1)..(214): unsure at all Xaa locations
  Clone ID: GOSHI-09MAY01-C8593_1.pep
CSPPAPPRLTGRAHPGRSTGILVLICCFVDRKQFSLDISTKLGSSFSLVPFIIVVALCTILAMVATLPLAQLFFFHILLIKKGISTYDYIIALREQEQELQGVGGQQSPQMSPASSLTGLSSASSFSTFHRGAWCTPPRLFLEDQFDVVPPDTGSVSSFGKKMVREEPVKKKNPGAVKISPWTLARLNAEHVSKAAAEARXKSIFLHPVVRRDA

SEQ ID NO: 67074 - protein, 237 aa, Gossypium hirsutum
  Clone ID: GOSHI-09MAY01-C8543_1.pep
DLLRAVIIGAVGTPYHDGLLFFDVFFPASYPKGPPQVYYHSGGLRLNPNLYSCGKVCLSLLNTWSGNKNEKWIPGMSTMLQVLVSIQALILNQDPYFNEPGWAHHKGTPQGELLSRQYNEDTFILSLKTMIYSMRRPPKHFEDFVVGHFYRRAQDILVACKAYMDGAQVGCLVKGGVQDVDEGDKSCSQKFKNSVSGCVNMLVKEFTVLGVKDCEKFLIVPKCQNNRVDSIPKVPLS

SEQ ID NO: 67075 - protein, 556 aa, Gossypium hirsutum
  Clone ID: GOSHI-09MAY01-C8783_1.pep
PRVRPRVRPRVRDIIRTPACPSRALPRILRGGDFYEEPEEDDARESKEVAKEITRHMRENLMGHRRDETLLSSVFSNGYTGDDRSCNRSENEYPVENLSDSEVMSPTSRHSWDYINRFASPYSSTPFSRVSCSPESSVCREAKKRLSERWAMMTSNGSSQEQRHGRRSSSTLGEMLALSDTKKLVRSEEEGSSKEQECRGSTSCVASNLYEEESTSDSPKNILRSKSVPGSSTMYGVRLNNEIPDPESSKEQVMKTKSMKSSLKGKVSILFFSKNKKTNKEKYSGSQSTDESPSVTPGTPGSPIIHPRKISNDASQCVNDSYIQQCLSPVVGGSASKTPLPDLIGIGQKLGMITTEGGLSVAKPSMPVHISENQEQPAPSSVLEPPFEEDENMISESSGGTKPVHRGVGVPPRSNLIEKSPPIESIAPTLSWDDSCSETATLLYPSKLSSVSPGAKEEEQDWFLFVQLLLSAAGLNGEVQLDSFFARWHSAESPLDPCLREKYANLNDKEPLHEAKRRQWRSNRKLIFDCVNAALLKISGYGSDRCMKAMSFGRPK

SEQ ID NO: 67076 - protein, 190 aa, Gossypium hirsutum
  Clone ID: LIB3543-012-Q1-K6-D2.pep
TSRNSWDYINRFGSPYSCSSFSHASCSPESSVCREAKKRLSERWAMTMMASNGNSQEQRHVRRSSSTLGEMLALSDTKKLVRSEEEGSTKDQEPRGSTSCTASNPNKEENTSDSPKDLLRSKSVPVSSTVYSARHSVELSDPESSKEQISKELTKAKSMKSSLKGKVSSFFFSKNKKTNIEKCTWISIYR

SEQ ID NO: 67077 - protein, 305 aa, Gossypium hirsutum
  Clone ID: GOSHI-09MAY01-C8743_1.pep
MGEKKNGNKQGGADGKKKEMSSSTSVFKFECLCDGCASKILKCINHFEGVETVKPEMSSNKVTVIGTADPTAIKEKLDKKTKKKVELISSQPKKDDNKEEKKEKKPDQQKNQDSDNKSDKKPKEAPVTTADLKVQLKCQCDGCFDRIRKIVSETKGVQELKVDRQKEMVTVKGTMDVKALAEALKDKLKKHVEIVAPKKEKDGNKEGGDGGKKKNKGGGEDGGNEANGGKMEGNRMEFMLPPQFGHMPSYIPGYPGYGHPAYAYGNPYPHPHGHGYPGYVPGYPVYVNPPHQMFNDENTNACAIM

SEQ ID NO: 67078 - protein, 149 aa, Gossypium hirsutum
  Clone ID: GOSHI-09MAY01-C8773_2.pep
LHLLCSSFQKKKFRLGVLHSFLLVSSSLSTIFAPNMKILFTKVLTNTDVEKRLAVPNNSLKHFELENGNCSKSFEVKDENGSTWTFRCYVRNDGAYKKPVLSSGWRQFVLNKGVHQGDLITLYKDVVAEASYKNRSSENNQVIRHGVLV

SEQ ID NO: 67079 - protein, 210 aa, Gossypium hirsutum
  Clone ID: GOSHI-09MAY01-C8773_1.pep
DAWALNFARLLASSSLFDLPKKKKKRKEKFRLGVLHSFVLVNSFSSTIFAPNMKILFSKVLTNTDIQKRLAVPNNSLKHFELENGNCSKSFEVKDENGFTWPFRCYVRNDGAYKKPVLSSGWRQFVLNKGVHQGDLITLYKDVEAEASYKIEVQRKIKLLGKECWYNLEPDQPTGATAQDKRKILLFGKECGYFLEPDPPTDATGEVIQD

SEQ ID NO: 67080 - protein, 88 aa, Gossypium hirsutum
  Clone ID: LIB3272-007-P1-K1-E4.pep
VLPFSSLTPKILEQLPFSSSKCFSELLGTANLFSTSVFVRTFVNKIFILGAGRRFSSWETKKTSFQRLCCPPLFPFTLLREEIQKGGF

SEQ ID NO: 67081 - protein, 55 aa, Gossypium hirsutum
  Clone ID: GOSHI-09MAY01-C8723_1.pep
MSSSSDLVGFGESVLGVSVEGSVTDSMIVVATTSLAGILGLLVFFWKKSGSEPSR

SEQ ID NO: 67082 - protein, 144 aa, Gossypium hirsutum
  unsure (1)..(144): unsure at all Xaa locations
  Clone ID: GOSHI-09MAY01-C8693_1.pep
RVLTHAFVLLLRASWFKAFEWVEECEVYDDLEELXYHYYPYPCEDDDDEEEDEVYYRSSPSLRIGNRRWGDNGYVRSGRREARPVQRSSSSSQNSDASSSSEPKKKEVSKSIMGRRAKRALKREAADKAAAAEHQEHLMRLGRK

SEQ ID NO: 67083 - protein, 220 aa, Gossypium hirsutum
  Clone ID: GOSHI-09MAY01-C8653_1.pep
VTAIFFLLVGTVVWILEHRMNDEFRGPPRRQVVTILWFSFSTWFFAHRENTVSVLGRIILIIWLFVVLIINSSYTASLTSILTVQQLSSPIKGIETLVSSKDPIGYQQGSFARNYLIDDLKIDASRLVALNSPEECAKALKDGPHKGGVAAMVDDRAYIELFLSTRCEFSIVGQEFTINGWGFAFPRDSPLAVDMSTAILTLAVGGDLQRIHDKWLLRRA

SEQ ID NO: 67084 - protein, 93 aa, Gossypium hirsutum
  Clone ID: GOSHI-09MAY01-C8673_1.pep
LVRFPVYIIPALAHALTYKSASPRKNAGEKLPCFLPSWTAIYAVNTATVIWVFVVGFRLGGWASMTNFIKQVDTFGLFAKCYQCPPSPSSKHH

SEQ ID NO: 67085 - protein, 120 aa, Gossypium hirsutum
  unsure (1)..(120): unsure at all Xaa locations
  Clone ID: GOSHI-09MAY01-C8603_7.pep
MFLPATTMFAAKKTKKTHEGINSRMAPXMKSGKYTLGYKTXVLKSLRSCKGKMMIIDNNCPPLRKSENECYAMLCTVGVHHYIGNNVDLGTACGKYFRVCCLSIIDPGDSDVGKSMPRDH

SEQ ID NO: 67086 - protein, 164 aa, Gossypium hirsutum
  Clone ID: GOSHI-09MAY01-C8603_6.pep
AVYEAPRSNFLKVKIRKIWVFLAVFKKMDIISQLQEQVNSIAALTFNTFGTLQRDAPPVRLSPNYPEPPPNPTEDSANFADQPKLMSAALVKAAKQFDALVAALPPSEGGEEAQLRRIAELQAENDAVGQELQKQLEAAEKELKQVQELFSQAADNCLNLKKPD

SEQ ID NO: 67087 - protein, 112 aa, Gossypium hirsutum
  Clone ID: GOSHI-09MAY01-C8603_5.pep
MVAAKKTKKTHESINNRLALVMKSGKYTLGYKTVLKSLRNSKGKLIIIANNCPPLRKSEIEYYAMLCKVGVHHYNGDNVDLGTACGKYFRVCCLSIIDPGDSDIIKSMPGDH

SEQ ID NO: 67088 - protein, 77 aa, Gossypium hirsutum
  Clone ID: GOSHI-09MAY01-C8603_4.pep
MVAAKKTKKTHESINNRLALVMESGKYTLGYKTVVKSLRSSKGKLIIIANNCPPLRKSEIEYYAMLCKVGVHHYNGS

SEQ ID NO: 67089 - protein, 174 aa, Gossypium hirsutum
  unsure (1)..(174): unsure at all Xaa locations
  Clone ID: GOSHI-09MAY01-C8603_3.pep
RQRSSMYNNDAVIAKSTWLSRCKIIYYTVFSMLFGMVGSRAHLVMVNSSWAQSHVEKLCGSPKRIKRRYPPCDTSGLQALPLERSVETPKIISVAQFRPEKAHSLQLEAFSVAIKKLDEHSRRPKLQFVGSFRNKSDEERLQXLKDKAVQLNIHDNVEFHKNVMYRDLVSLLGG

SEQ ID NO: 67090 - protein, 135 aa, Gossypium hirsutum
  Clone ID: GOSHI-09MAY01-C8603_2.pep
MMLLARNFRNNWRLLSHIEKLWGSPKCIKRGYPPCDTSGLQALPLERSVETPKIISVAQFRPEKAHSLQLEAFSVAIKKLDEHSRRPKLQFVGSCRNKSDEERLQNLKDKAVQLNIQDMWEFHKNVMYRGLGKFF

SEQ ID NO: 67091 - protein, 112 aa, Gossypium hirsutum
  Clone ID: GOSHI-09MAY01-C8603_1.pep
MVAAKKTKKTHESINNRLALVMKSGKYTLGYKTVLKSLRSSKGKLIIIANNCPPLRKSEIEYYAMLCKVGVHHYNGNNVDLGTACGKYFRVCCLSIIDPGDSDIIKSMPGDH

SEQ ID NO: 67092 - protein, 62 aa, Gossypium hirsutum
  Clone ID: LIB3135-022-Q1-K1-B6.pep
HASAVAVPFSPKISCPPTTVVAAKKTKKTHESINNILALVMKSGKYTLGYKIVFKSLRSSKG

SEQ ID NO: 67093 - protein, 51 aa, Gossypium hirsutum
  Clone ID: LIB3145-030-Q1-K1-G7.pep
MVAAKKTKKTHESINNRLALVMKSGKYTLGYKTVLKSLRNSKGKLIIIANN

SEQ ID NO: 67094 - protein, 133 aa, Gossypium hirsutum
  Clone ID: GOSHI-09MAY01-C8143_2.pep
SHQEAHHSLSRKTWSGPQGGVADRISNSNFLANGPVPSTPTRSKVRRHTISVFVGDESGMINRIAGVFARRGYNIESLAVGLNKDKALFTIVVSGTDRVLQQVVEQLQKLVNVWKGEDLSNEPQGERELMLIK

SEQ ID NO: 67095 - protein, 320 aa, Gossypium hirsutum
  unsure (1)..(320): unsure at all Xaa locations
  Clone ID: GOSHI-09MAY01-C8143_1.pep
GGIRFRCLLGMKVXMINRIAGVFARRGYNIESLAVGLNKDKALFTIVVSGTDRVLQQVVEQLQKLVNVWKANDILXTFVEEVDLLSTHLIEVLKSPKIVHYDILKGVHDIFIYVNLLNXLTLISVDRLNISKXDPHVERELMLIKVNADPKFRAEIMWVVDIFRAKIVDISEHSLTIEVTGDPGKMVAVQRNLSKFGIKEIARTGKIALRREKMGASAPFWRFSAASYPDLEETVPDNALAGARKQSVFSEADVSGWGDVYPVESPDGFTINQVLDAHWGVLTDEDTSGHQSHTLSMLVNDSPRSPNXVTGCFARRGLYL

SEQ ID NO: 67096 - protein, 118 aa, Gossypium hirsutum
  unsure (1)..(118): unsure at all Xaa locations
  Clone ID: LIB3048-035-Q1-L1-B2.pep
DIFLAKIVDISGHALTIEVTGDPGKMAAVHRNLSKFGIKEIARTGKIALRRXKMGAYATFWRCSSASYPDLQYAVPDYAVAWTHMHYWFPTEIQGLWGDFYPVEPPDGYTSNQVLDAH

SEQ ID NO: 67097 - protein, 90 aa, Gossypium hirsutum
  Clone ID: GOSHI-09MAY01-C8123_1.pep
MDQAQHPTVMQKVAGQLTRFSNSQDFQGYDGSFRRPALYQRNVAYQNCSNAALQYPIVRACGVTSDMPMVPSTASAICIQAPAEKGFTGF

SEQ ID NO: 67098 - protein, 156 aa, Gossypium hirsutum
  unsure (1)..(156): unsure at all Xaa locations
  Clone ID: uC-gsflmaxxa061e06b1.pep
SSSKWCCSGIITKDWSLAVYQDGSAAVGRSGGNLSLDALAKAKKALQMQKDLAEKLKKIPLLNKGTGSSSVATSVTVQGPVSSVTTAIASGPSSSSVLSCTSASAASMKPPAGGVAADPGLASISNLEXCERAQELAAKMGYRLDPQFAPLINWFP

SEQ ID NO: 67099 - protein, 209 aa, Gossypium hirsutum
  Clone ID: LIB3543-056-Q1-K6-D9.pep
PASAPRPTGHPLPTKYLRFLLENKAYSVTGSHEVTGSSTDGSSSTGKSGANLSLDALAKAKKALQMQKELAEKLKKIPSLNKGPSSSSVVTTGTVQRPVSTVATSVATGPSSSSVPPASAAVASVKPPTTGMPAVPGLESIPNLEAVKRAQELAAKMGFRQDPQFAPLINLFPGQVQVDVPVAQKPTKAPLLRVDALGREIDEHGNIIN

SEQ ID NO: 67100 - protein, 130 aa, Gossypium hirsutum
  Clone ID: LIB3165-024-P1-K1-C1.pep
HASAHASGTGHSPSTKVSSVSTAENKAYSITGSHEVPGSLDALAKAKKALQMQKDLAEKLKKIPLLNKGTGSSSVGTSVTVQGPVSSVTTAIASGPSSSSVLPSTSAAAASMKPPAGGVAAVPGLASISN

SEQ ID NO: 67101 - protein, 135 aa, Gossypium hirsutum
  Clone ID: GOSHI-09MAY01-C8393_1.pep
LNGITWPDRTPHPTLHEVKYVYQPIKVYLRESTVKIKNTNFYETTEGLVFEWAVLGDGCELGCGILSLPVIEPQSSYDIEWKSGPWYPLGASSDAEEIFLTITTKLLHSKRWVEAGHVVSSTQVQLPSKRDIVPH

SEQ ID NO: 67102 - protein, 126 aa, Gossypium hirsutum
  Clone ID: GOSHI-09MAY01-C8383_1.pep
STPYLAVLRPKAESVVNLAPRAAGFSVFLGSGGSGSDVYQKEEDESSTRADYESESDDSSLNNYSVLSGNGSDQGVSRKMVELELELHEMKHKLRMLEEEYTDGSVRGAECNNSELLARIREYEEK

SEQ ID NO: 67103 - protein, 171 aa, Gossypium hirsutum
  Clone ID: GOSHI-09MAY01-C8353_1.pep
PTRPSTRSHEYLAPEIIKGEGHGSAVDWWTFGIFLHELLYGKTPFKGSGNRATLFNVVGQQLKFPDSPATSYASRDLIRGLLVKEPQHRLGVKRGATEIKQHPFFEGVNWALIRCSTPPEVPRPMESEMPRMPGKLGPVEPVGVGSNSKRMVGQVGTDVKSGGKYLDFEFF

SEQ ID NO: 67104 - protein, 358 aa, Gossypium hirsutum
  Clone ID: GOSHI-09MAY01-C8343_1.pep
MEVNGGAVSDPGTIRSQFLQLLRTRRNAQVPMTVEPAKPVVKPLFQEVTPPTFSEAMESCPKANIGNLKELLKEENLYLHTEAGDQGKLPVLILSTKGNNQEKRPAVVFLHSTHKCKEWLRPLLEAYASRGYVAIGVDSRYHGERASSLTTYRDALVSSWRNGDTMPFIFDTVWDLIKLADYLTGRDDIDPTKIGITGESLGGMHAWFAAFADTRYAVAAPIIGVQGFRWAIDNDKWQARVDSIKAVFEEARTDLGKNEIDKEVVEKVWDRIAPGLASQFDAPNTVPAIAPRPLLIVNGAEDPRCPLEGLEIPKTRAYEAYGEAHSDNFKLVAEPGIGHQMTPLMVKEASDWFDQFLK

SEQ ID NO: 67105 - protein, 127 aa, Gossypium hirsutum
  Clone ID: uC-gsronu33B090a12b1.pep
MEVRGGADSDPETIRSQFLQLLRTRRNAQLPLTVEPAKPVVKPLFQDVTPPTFSEAMESCPKANIGNLKELLKEENLYLHTEAGDQGKLPVLILSTKGNNQEKRPAVVFLHSTHKCKEWLRPLLEVI

SEQ ID NO: 67106 - protein, 195 aa, Gossypium hirsutum
  unsure (1)..(195): unsure at all Xaa locations
  Clone ID: GOSHI-09MAY01-C8263_1.pep
ISSRLLNTSSAAAATALLKSKSRVHNRHTSIPLLPLKHPFSPLTLKQMSNNSQSTLSCSSLPQNNPSSPSTASGRIGEVKRVTKETNVWVKINLDGTGVANSSTSIPFLDHMLDQLASHGLFDVHVKATGDIHIDDHHTNEDVALALGTALLXSLGDRKGINRLGDFSAPLDETLDHVSLDISGRPHLXYDLNIP

SEQ ID NO: 67107 - protein, 199 aa, Gossypium hirsutum
  Clone ID: GOSHI-09MAY01-C9933_1.pep
MAQETLNSESPPAAPAQELSVVVEKPQVTEKEPQPSAPAPLPEPEVPEKPAVVAVEEEAVEVEKPKVEEKEETKITQSVSFKEETNIAGELPEPQKKALDELKQLIQEALNNHEFTAKPEAEEKPVAEPEPKKEDEENMEEKKEEKEEETPAAAISEEPMIVTDAPAAVEVKVEDNTPPPPPPAEAPPAEVGCGGNRGR

SEQ ID NO: 67108 - protein, 221 aa, Gossypium hirsutum
  Clone ID: GOSHI-09MAY01-C9883_1.pep
MPATDYQGTSSPLTNIGRSLLPVRRDQVHAMESPIGGSASNEAEIESFQRQVADRFHDLASVPSDELLSLPWVRKLLDVFLCCQEEFRVMLFNNIALVKKPPMDRLIADFYERTVKALDVCNAIRDGIEQIRQWQKLLEIVLCALGDSNVGYQRSLGEGQFRRARKALIDLAIGMLDEKDSGQALAHRNRSFGRHNTSGSHSKDHHHRSLGHFRSLSWSVS

SEQ ID NO: 67109 - protein, 84 aa, Gossypium hirsutum
  Clone ID: LIB3166-040-P1-K1-A7.pep
RSVDCLMHYSYYLFDVIMPATDYQGTASPLTNIGRSFLPVRRDLVHAMVSTIGGSAFSWRPSVFFKRPAYIALRNAFRLGSSNL

SEQ ID NO: 67110 - protein, 127 aa, Gossypium hirsutum
  unsure (1)..(127): unsure at all Xaa locations
  Clone ID: LIB3543-020-Q1-K1-B10.pep
MLKLQLPLYNHHSYPLFDVIMPRTIKELTHRVTNIGRPLLPVRRDQVHAMESPIARSAFNEALIESLQRRITDIYHDQSFAPSDELLSLTYIRKQLDAXLCCKRNRTHTFNNITLVKNSTMDRMINH

SEQ ID NO: 67111 - protein, 94 aa, Gossypium hirsutum
  Clone ID: uC-gsronu33B012c09b1.pep
SNIILIAVDADRRSFNTGAYYLFDVIMPATDYQGTLSPLTNIGRSLLPVRRDQVHAMESPIGGSASNEAVIESFQRQVADRFHDLASVPVILRG

SEQ ID NO: 67112 - protein, 174 aa, Gossypium hirsutum
  unsure (1)..(174): unsure at all Xaa locations
  Clone ID: GOSHI-09MAY01-C109858_1.pep
EYKSASCAAKKCIAPTPIMPSLPAYNDTNTVTAFSQSFRSREKAEVPTDIDESLFFTIGLGLNNCPPNFRKRRCQGPNGTRFTASMNNVSFVLPRNFSLLQAHQQGIPGVFTTDFPANPPLKFDYTGNLSRSLFQPVPGTKLYKLKYGSRVQIVXQDTSIVTPENHPIHLHGYD

SEQ ID NO: 67113 - protein, 207 aa, Gossypium hirsutum
  Clone ID: GOSHI-09MAY01-C109808_1.pep
DHDAQRLDDGFHFFKTNIFDKNRECFKKLAEDQHPKFLVISCSDSRVSPSVVLNFKPGEAFAGRNIANMVPQFDQLRHTEIGSVIEYAVKELQVDNILIMGHSRCGGIKRLMSLPDQTQTYDFIDEWVKIGLPAKKKVLEEAGDLCPEQQRTLCEKESVKNSMGNLLTYPPARRAVVNGTLTLRGGYYDFVNGDFEQWKMCTKPCHP

SEQ ID NO: 67114 - protein, 107 aa, Gossypium hirsutum
  unsure (1)..(107): unsure at all Xaa locations
  Clone ID: GOSHI-09MAY01-C9553_1.pep
MAEAEVGSGEGKPQEMSLKDKGNEFFKAGNYLKAAALYTQAIKQDPSNPTLYSNRAAAFLHLVKLNKALADAETTITLKPQWEKGVLRYCCXFFRKGCILEAMERYD

SEQ ID NO: 67115 - protein, 71 aa, Gossypium hirsutum
  Clone ID: GOSHI-09MAY01-C9533_3.pep
RILGPESGWQPIPLTEVITSAAVKKAYRKATLCVHPDKLQQRGASIHQKYICEKVFDLLKEAWNRFNSEER

SEQ ID NO: 67116 - protein, 278 aa, Gossypium hirsutum
  Clone ID: GOSHI-09MAY01-C9533_1.pep
GGSLKRERELELVRLSKIEEEIEREREREKDRMAVDSTVLEARERGYAEARERAEKAALERATTEARQRAMADARERLEKACAEAREKSSMEARLRAERAAVERATAEARERAVEKIMAERAASEARERVERSMSDKFSTSSRNSGMRSSYSSSDLKDQHFQSTNSFGGLRYPYASAYNGVEGESAQRCKARLERYQRTAERAAKALEETIMRDLIAQREQAERNRLAESLDADVKRWSSGKEGNLRALLSTLQYVCTIIQILSNQAFIIISFVYWVV

SEQ ID NO: 67117 - protein, 129 aa, Gossypium hirsutum
  Clone ID: LIB3166-015-P1-K1-E1.pep
RVGEARERAEKAALERATTEARQRAMADARERLEKACAEAREKSSMEARLRAERAAVERATAEARERAVEKIMAERAASEARERVERSMSDKFSTSSRNSVMRSSYSSSDLKDQHFQSTNSFGGLRYPY

SEQ ID NO: 67118 - protein, 116 aa, Gossypium hirsutum
  Clone ID: LIB3166-034-P1-K1-H1.pep
PTRPHQFFWWFKISLCLRCNGVEGESAQRCKARLERYQRTAERAAKALEEKNMRDLLAQREQAERNRLAESLDADVKRWSSGKEGNLRALLSTLQYILGPESGWQPIPLTESITSA

SEQ ID NO: 67119 - protein, 162 aa, Gossypium hirsutum
  Clone ID: GOSHI-09MAY01-C9453_1.pep
MATINGETAMEKALGSIGSFSNNNNNKEVFLRADKIDFKSWDLQLDKHLSRAWSRDSDGSTLTKKEEWEIDLAKLDIRYVIAHGTYGTVYRGVYDTQDVAVKVLDWGEDGIATVAEAAALRASFRQEVAVWHKLDHPNVTKFIGASMGTSNLKIPTKDGTSE

SEQ ID NO: 67120 - protein, 162 aa, Gossypium hirsutum
  unsure (1)..(162): unsure at all Xaa locations
  Clone ID: uC-gsflnu33B108h04b1.pep
MATNKGEGAKAVDKTETNPIEEKALGCSIGNLSDNKDVFTRADKIDFKSWDLQLDKHLSKAWSRDKDVSLVTKKDEWEIDLAKLDIRHVIAHGTYGIVYRGVYDNQDVAVKVLDWGEDGXATAAEAAALRASFRQEVAVWHKLDHPNVTKVIGASMGTSNLK

SEQ ID NO: 67121 - protein, 167 aa, Gossypium hirsutum
  Clone ID: GOSHI-09MAY01-C9723_1.pep
MDVAFGMEYLHGKNIVHFDLKSDNLLVNLRDPHRPICKVGDLGLSKVKCQTPRSRGVRGTLPWMAPELLNGSSSLVSEKVDVFSFGIVMWELLTGEEPYADLHYGAIIGGIVSNTLRPPVPEGCDPEWRSLMERCWSYELPERPSFTEIANELRSMAAKIQPKGQIP

SEQ ID NO: 67122 - protein, 289 aa, Gossypium hirsutum
  unsure (1)..(289): unsure at all Xaa locations
  Clone ID: GOSHI-09MAY01-C109688_1.pep
KDITIDNFSVSARGKELLKNASVKISHGKRYGLVGPNGMGKSTLLKLLAWRKIPVPKNIDVLLVEQEVVGDDRTALQAVVSANEELFRLREEVAALQNSSASNGEDENDLNGDDAGERLAELYEKLQILGSDAAEAQASKILAGLGFTKAMQGRPTRSFIGGWRMRISLARXLFVQPTLLLLDEPTNHLDLRXVLWLEEYLYPLKKTLVXVFSHDQNFLNTVCTEIIHLHDMKLKFYRGDFDDFESRYXQRRKEMNKKCEIYEKPVKAAKKSGIDFSRKVKITILRRKR

SEQ ID NO: 67123 - protein, 332 aa, Gossypium hirsutum
  unsure (1)..(332): unsure at all Xaa locations
  Clone ID: GOSHI-09MAY01-C9653_1.pep
NVSDVSCWWFKVGVDAIEQDEVVMISVAFLVILFSVQKFGTSKVGLAVGPALFIWFCSLAGIGIYNLLKYDTSVLKAFNPVHIYLYFKRNSVKAWYALGGCLLCATGSEAMFADLCYFSVQSIQLTFVFLVLPCLMLGYXWNYGSKLKYETEVKQKLSMDLMRELGCNLGTIRAPGIGLVYNELAKGVPAIFGHFLATLPAIHSMIIFVCIKYVPVPMVPQSERFLFKRVLPKKYHIFRCIGKYCYKDVRKENHQTFEPLVIEKFEKFNRRETYGKPLESDSDXNTDYEEDTSLSKVLIAPHGXVYSLAGALLAEFWSCSNNTISEQAPHKR

SEQ ID NO: 67124 - protein, 132 aa, Gossypium hirsutum
  Clone ID: GOSHI-09MAY01-C9673_1.pep
MPATAGRVRMPANNRVHSSAALQTHGIWQSAIGYDPYAPNKDDSKNSSSQMTAAAEPDGENPYASFQGLLALARITGSNANEARGACKKCGRVGHLTFQCKNFVSLKESKEKDPEAIQAAVLNGLDKLKGGN

SEQ ID NO: 67125 - protein, 100 aa, Gossypium hirsutum
  Clone ID: LIB3146-037-P1-K1-D12.pep
MPATAGRVLMPANNRVHSSAALQTHGIWQSAIGYDPYAPNKDDSKNSSSQMTAAAEPDGENAYASFQGLLALARITGSNADEARGACKKCGRVGHLTFQC

SEQ ID NO: 67126 - protein, 118 aa, Gossypium hirsutum
  Clone ID: GOSHI-09MAY01-C9623_1.pep
MAIPIPLLFSSPSFLSSPKSLPLFFKPKINTSKSFNLHFHANVASSSTLTAMEVGEDLPLDYGDWLPKPDPDQRRRAGILLHPTSFKGAYGIGDFGEEAFRFIDWLHLAGCSVWQVLP

SEQ ID NO: 67127 - protein, 198 aa, Gossypium hirsutum
  Clone ID: GOSHI-09MAY01-C9113_1.pep
KREPDERKEKLAEELEENAVQNSALHLAALEQKRADENVMKLAEDQKRQKEELHNRIIQLEKKLDQKQALELEIEQLRGSLNVIRHMGDEDDIEVLEKVDASLKELREKEAELEDLEALNQTLIVRERKSNDELQDARKELINGLKEISTRSQIGVKRMGELDSKPFLEAMKRRYNEELAEERASEVCSLWEEYLKDP

SEQ ID NO: 67128 - protein, 110 aa, Gossypium hirsutum
  Clone ID: LIB3825-019-Q1-K6-A6.pep
YWYRVFGFATILVKHQNAVQNSALHLAALEQKRADENVMKLAEDQKRQKEELHNRIIQLEKKLDQKQALELEIEQLRGSLNVIRHMGDEDDIEVLEKVDASLKELREKEQ

SEQ ID NO: 67129 - protein, 133 aa, Gossypium hirsutum
  Clone ID: GOSHI-09MAY01-C9133_2.pep
RADLVRLEGNAMCSPGFSCDSALQVTYIVKGSGRLQVVGVDGKWVLEPIVKAGNLLIVPRFFVVSKIADPGGLSWFSIIPTPNPMFTPLAGSIGAWKAISPEVLQAAFKVPAETEKLFRSKRTNDAIFFPPPN

SEQ ID NO: 67130 - protein, 356 aa, Gossypium hirsutum
  Clone ID: GOSHI-09MAY01-C9133_1.pep
MDLDLSPKLAKKVYGDDAGSYYAWCPDELPMLRQGNIGAAKLALEKNGFALPLYSDSSKVAYVLQGAGVAGIILPESEEKVIAIKKGDAIALPFGVITWWSNKEDTELVVLFMGDTSKGHKPGQFTDFFLTGANGIFTGFTTDFVKRAWDVDDDTATALIGNQKGKGIVKLDANFKMPEPKPDHRKGMALNCEEAPLDTDIKNAGNVVLLNTKNLPLVGQVGMGADLVRLEGNAMCSPGFSCDSALQVTYIVNGSGRLQVVGVDGKRVLETIVKAGNLLIVPRFFVVSKIADPDGLSWFSIITTPNPMFTHLAGSIGAWKAISPEVLQAAFKVPAETEKLFRSKRTNDAIFFPPPK

SEQ ID NO: 67131 - protein, 46 aa, Gossypium hirsutum
  Clone ID: LIB3145-028-Q1-K1-D2.pep
MDLDLSPKLAKKVYGDDGGSYYAWCPNELPMLRQGNIGAASCCTGC

SEQ ID NO: 67132 - protein, 118 aa, Gossypium hirsutum
  Clone ID: GOSHI-09MAY01-C9083_1.pep
MGKKMLNFEEQCKIVNLLKSSSEQKSIEETLTEFFTNPKLRHFNVCYSLSLLLQDKMMLSSTERLVAFAILHRSYSSQKSAANPFISFLVNAACDEGAENYERAFILHLLGFGNSKSN

SEQ ID NO: 67133 - protein, 182 aa, Gossypium hirsutum
  Clone ID: GOSHI-09MAY01-C9053_1.pep
MTSASVVLIGNNVTLSFDDIEANFAPAIKGSGECGVLYLANPLDACSDLSIKVDELSNGSSPFALVIRGGCSFEEKVRRVQKAGFEAAIVYDNDDDGVLVAMAGNAAGIKIHAVFVSKASGEILKKFAGSTDMELWLIPSFENSAWSIMAISFISLLAMSAVLATCFFVRRHRIRRRTPQSS

SEQ ID NO: 67134 - protein, 201 aa, Gossypium hirsutum
  unsure (1)..(201): unsure at all Xaa locations
  Clone ID: GOSHI-09MAY01-C9073_1.pep
MDGDGHGSHTAAIAAGNNGIPVRLHGHEFGKASGMAPCARIAVYKAIYRLFGGFVADVVAAIDQAVHDGVDILSLSVGPNSPPTNTKTTFLNPFDATLLAAVKAGVFVAQAAGNGGPFPKTLVSYSPWIASVAAAIDDRRYKNHLNLGNGKALAGLGLSPSTHSNQTYTMVAAXDVLLDSLATKFSPSDCQRPEVLNKKFG

SEQ ID NO: 67135 - protein, 118 aa, Gossypium hirsutum
  Clone ID: GOSHI-09MAY01-C9003_1.pep
MEVAVELEDDLFFADWSKQISLLIMDDEDPVPTCPSVSGQTFSAANYLITQSPYLQEQICRRESKGTGVFIPKASHPRRKHRQGRYSSFNRKSNRHHDNTTKMASQPSYDNSFYPRKG

SEQ ID NO: 67136 - protein, 105 aa, Gossypium hirsutum
  unsure (1)..(105): unsure at all Xaa locations
  Clone ID: LIB3166-008-P1-K1-H3.pep
GQTWRWLFELEDDLFFADXSKQIFLLIMDDEYSVSTCSSVSFQTFSAANYPITQSPYFQEQICIFESIGSVVFIPNASQFYIEALCKAYIFLLIRTFYMLNVYSS

SEQ ID NO: 67137 - protein, 229 aa, Gossypium hirsutum
  unsure (1)..(229): unsure at all Xaa locations
  Clone ID: GOSHI-09MAY01-C9033_2.pep
VGLRDPPRKEVRQAIEDCKGAGIRVMVITGDNKNTAEAICREIGVFXIVDLAPEDFSSRSLTGKEFMRXPDQRNHLRQNGGRGFSRAEPRHKQEIVRLLKQDGEVVAMSGDGVGDAPALKLADIGVAMGITGTEVAKEASDMVLADDNFSTIVAAVGEGRSIYDNMKAFIRYMISSNIGEVASIFLTAALGIPEGMIPVQLLWVNLVTDGPPATALGFNPQDTDIMKKP

SEQ ID NO: 67138 - protein, 323 aa, Gossypium hirsutum
  Clone ID: GOSHI-09MAY01-C9033_1.pep
FSYYILYLYPLLDSFQVAKEASDMVLADDNFSTIVAAVGEGRSIYNNMKAFIRYMISSNIGEVASIFFSPARGIPEGMIPVQLLWVNLVTDGPPATALGFNPPDKDIMMKPPRRSDDSLITAWILFRYLVIGLYVGIATVGVFIIWYTHHSFLGIDLSGDGHSLVTYSRLANWAKCDSWEGFSVSPFTAGSQVFKFDSDPCDYFQSGKIKASTLSLSVLVAIEMFNSLNALSEDGSLLTMPPWVNPWLLLAMSVSFGLHFLILYVPFLARVFGIVPLSTNEWLLVIAVAFPVILIDEVLKFIGRRTTRLRYPAVPKSSKQKAE

SEQ ID NO: 67139 - protein, 245 aa, Gossypium hirsutum
  unsure (1)..(245): unsure at all Xaa locations
  Clone ID: GOSHI-09MAY01-C9393_1.pep
TSARGTVKILASILTPPLCPSPLSLKFRVSVLLHGLPGCGKRTVVRYVSKRLGLHVVEYSCHDLTASSEKKTSAALTQAFNSSQRYSPTILLLRHFDVFRNFASHEGLPSDQFGLSSEFASGIRKFTEPAASDEDGNAEDMSNGEFAVKDSGNVGRHQVLLVAAADSSEGLPPAIXRRCFSHEVSMGPLTEEQRAEMLSQSLQGVSELLSDTRLEDFVKDIVGQTSGFMPRDLCALVADTGAKLI

SEQ ID NO: 67140 - protein, 203 aa, Gossypium hirsutum
  unsure (1)..(203): unsure at all Xaa locations
  Clone ID: GOSHI-09MAY01-C9383_2.pep
FAGVFPEHKYEIVRKLQERKHICGMTGDGVNDAPALKKADIGIAVADATDAARSASDIVLTEPGLSVIISAVLTSRAIFQTMKNYTIYAASITLRIVLGVMLIALIWKCDFSPCMVLIIAILNDGTIMTISKDRVKPSTLPDSWKLKEIFATGIELGGYLALMTADFFWIMHDKDFFSEKFGVXSVMKMDDQMMGALYLQMSI

SEQ ID NO: 67141 - protein, 311 aa, Gossypium hirsutum
  unsure (1)..(311): unsure at all Xaa locations
  Clone ID: GOSHI-09MAY01-C9383_1.pep
HASAHASEERKHICGMTGDGVNDAPALKKADIGIAVADATDAARSASDIVLTEPGLSVIISALASAHASXLTSRAIFQRMKNYTIYAVSITIRIVFGFLFIALIWKFDFSPFMVLIIAILNDGTIMTISKDRVKPSPLPDSWKLKEIFATGIVLGGYLALMTVIFFWAMHDTDFFSDKFGVRSLREREHEMMGALYLQVSIVSQALIFVTRSRSWSYAERPGLLLVTAFIIAQLVATLIAVYANWGFARIKGIGWGWAXGGIWLYSIVFYXVPLDIMKVAIRYILSGKAWLNLLENKTAFPTKKDYWQRKR

SEQ ID NO: 67142 - protein, 111 aa, Gossypium hirsutum
  Clone ID: GOSHI-09MAY01-C9353_1.pep
MTDPNNKPRTVICVGDIHGYLTKLLNLWSNLRSQIDPDSFNTSTVIFLGDYCDRGPDTRKVMDFLITLPKRYPNQKHVFLSGNHDFAFGGFVGALAGEFEAKETWQEYADN

SEQ ID NO: 67143 - protein, 80 aa, Gossypium hirsutum
  Clone ID: GOSHI-09MAY01-C9343_2.pep
NCDPFPFYLFVEYFQLVEELTKDHNKIAGSTHLFLYQRPRWTLLKNMKCVLFFWRNLGHWASTTTLLSLRLTRDGMSSKI

SEQ ID NO: 67144 - protein, 180 aa, Gossypium hirsutum
  Clone ID: GOSHI-09MAY01-C9343_1.pep
SENTQQIRRRGRITVYFDAAFNRLSSRSTTGLLVRNEEGEILAPKAVMHSEIATPFTAEVYAILQAIKLGISMGLNKIEVVGDSKTIIKKCQSIDTDKSVIGAIIRDIQSKKDRFQEIDFHFIPKAKNVYAHVIANEALKRRESFYLIGGIPDSVHQAVESFWPKAPDCVKEEMKSCEVK

SEQ ID NO: 67145 - protein, 71 aa, Gossypium hirsutum
  Clone ID: GOSHI-09MAY01-C9243_1.pep
SKISDLFFSEASPTTCFDVVPTDSRVASSDLLVLETFEAIRNEVQISQIHSPKIITDSTISPSEVQHSCFL

SEQ ID NO: 67146 - protein, 92 aa, Gossypium hirsutum
  Clone ID: GOSHI-09MAY01-C4983_1.pep
LICCKKKDPYYIVDSGFYSLYNTVYLLLNFMHFIFVALLLFLLSFFVVFAGLRRVNEGKPCYFGARKQPSGRWYADGGTWGAGRPRLRRWSG

SEQ ID NO: 67147 - protein, 91 aa, Gossypium hirsutum
  Clone ID: LIB3189-014-P1-K1-B10.pep
DLCRTQILPGPKIFTIQLQDSIPNLYHQPKLRPKTQLKISSPTLQGPIGPKYKKFSKNPRVSIHSSTVASVAPHPTCLRQCTLRPMAVSLH

SEQ ID NO: 67148 - protein, 65 aa, Gossypium hirsutum
  unsure (1)..(65): unsure at all Xaa locations
  Clone ID: LIB3493-007-P1-M1-F10.pep
TPIRGFDTFHHEESKRKFPPLLGSILMEKNSDDTPTIQGSGLRRVNEGKPCYXGARKQPSGRWYA

SEQ ID NO: 67149 - protein, 249 aa, Gossypium hirsutum
  Clone ID: GOSHI-09MAY01-C4943_4.pep
KPAATHASAHASCEGISFATGAAFTSGGNMEVLKRTNCDHVTLAFFGDGTCNNGQFFECLNMAALWKLPIVFVVENNLWAIGMSHLRATSDPQIYKKGPAFGMPGVHVNGMDVLKVREVAKEAIGRARRGEGPTLVECETYRFSPRARADPDELRDPAEKAHYAARDPITALKKYLIENSLASEADLKAIDKKIDEVVEEAVEFADESPVPPRSQLLENVFADPKGFGIGPDGQYRCEDPKFTEGTAQV

SEQ ID NO: 67150 - protein, 155 aa, Gossypium hirsutum
  Clone ID: GOSHI-09MAY01-C4943_3.pep
SFTRPAIGRARRGEGPTLVECETYRLRGHSLADPDELRDPAEKAHYAARDPITALKKYLIENSLASEADLKAIDKKIDEVVEDAAEFADESPVPSRSQLLENVFADPKGFGIGPDGRYRCEDPKFTEGTAHVLAFKGQVTKPFMHTFWPFLISYI

SEQ ID NO: 67151 - protein, 208 aa, Gossypium hirsutum
  Clone ID: GOSHI-09MAY01-C4943_2.pep
MNSASCAAKISTQPFSLNPTSPTSHDNPLVFPKPTSFFLGSTRKLRLSSSSKLNLHRRSGTVVAVSDVVKQKKSKSTPSLLITKEEGLELYEDMILGRAFEDMCAQMYYRGKMFGFVHLYNGQEAVSTGFIKLLKQQDSVVSTYRDHVHALSKGVPARAVMSELFGKTTGCCRGQGGSMHMFSREHNLLGGFAFIGEGIPVATGAAFT

SEQ ID NO: 67152 - protein, 363 aa, Gossypium hirsutum
  Clone ID: GOSHI-09MAY01-C4943_1.pep
MATAFSPSKFAAQPFPLNTTSQNNPLTIPTIASPFLGSTRKLIRLCSSSNLNLRRRSGTVVAVSDVVKENKSKSTPNLLITKEEGLELYEDMVLGRAFEDMCAQMYYRGKMFGFVHLYNGQEAVSTGFIKLLKQQDSVVSTYRDHVHALSKGVSARAVMSELFGKTTGCCRGQGGSMHMFSREHNVLGGFAFIGEGIPVATGAAFTSKYKREVLKEADCDHVTLAFFGDGTCNNGQFFECLNMAALWKLPIVFVVENNLWAIGMSHLRATSDPQLYNKGPAFGMPRIHVDGMNVLKVREVAKEAIGRARMLMNWLVEVVIRPVDPQLVCFPVVIGAVTRRSYKYYSPDVQAKISSLNPEIISP

SEQ ID NO: 67153 - protein, 118 aa, Gossypium hirsutum
  Clone ID: LIB3166-057-P1-K1-H10.pep
KQPSYNPYFRLTLPRFHARTHPPQFFFQFESPPSIWDRRQESKSKSTPNLLITKKEGLELYEDMVLGRAFEDKCAKMYYDRKMLGFVHLYNGQEAVSTGFIRLLKQQDSIVCTYRDHV

SEQ ID NO: 67154 - protein, 288 aa, Gossypium hirsutum
  Clone ID: GOSHI-09MAY01-C4973_1.pep
MACTRKDVDRIKGPWSPQEDEALKRLVQTYGSRNWSLVSKSIPGRSGKSCRLRWCNQLSPEVEHRPFTPEEDDTIVRAHTRFGNKWATIARLLNGRTDNAIKNHWNSTLKRKCSSMTDDLNDDSPQPLKRSASLNTGNGGSGLYLNPSSPSGSDLSDSSLPVASPITITGSLVPSTQTASSATDPPTLLTLSLPGSDTSETTDLGPVSPPGSNSFPSSTLVAEPATVPALKLQMEKQFLNAELLAVMQEMIRKEVRKYMSGSESNGLCFRTEAIRNAVVKRIGISKIE

SEQ ID NO: 67155 - protein, 353 aa, Gossypium hirsutum
  Clone ID: GOSHI-09MAY01-C4963_1.pep
MCEGSVQSYRAFMHHRTSCIPNVFKYHYLLSKTLLLEQVRGTWRWMLGVSAVPAVIQFFLMLCLPESPRWLFMKNEIDKAIAVLSRMDDIARLEDEVDHLSAALEEEQQRKNTVRYLDVFRTKEIRLAFLAGAGLQAFQQFTGINTVMYYSPTIVQMAGFNSNQLALLLSLIVAAMNAGGTVVGIYLIDHFGRKKLALSSLSGVIVSLVILAGAFFAETPGSSNGIYGWLAVIGLALYIAFFAPGMGPVPWTVNSEIYPEQYRGICGGMSATVNWISNLIVAQTFLTIAEAVGTGVTFLILAGIALLAVVFVIVYVPETKGLTFVEVERIWKERAWGSSYNTESLLEHGNESA

SEQ ID NO: 67156 - protein, 246 aa, Gossypium hirsutum
  Clone ID: GOSHI-09MAY01-C4913_1.pep
MQLAPSSSHFSYLHSFKSKRRNNRTLVFSSEMDPTPTSDNRPEICFFDLETTVPQRRGQGYSVLEFGAILVCPKRLLELHSYSSLVRPDDLSLISPASVRCNGITLEAVISAPSFSEIADEVHDLLHGRVWAGHNIVRFDCVRIREAFEKIGRAAPEPKGIFDSLALLTQRFGRRAGNMKMATLANYFGIGVQSHRSLDDVRMNLEVVKYCATVLFLESSLPDILTWNPRVPRYHLVVMMGSIPSS

SEQ ID NO: 67157 - protein, 239 aa, Gossypium hirsutum
  Clone ID: GOSHI-09MAY01-C4933_1.pep
MDTILHTEPLSLTRLRATSNSTASIHHMPCQLIFRPFHRLSFPLSTVNAGSSSRRSSTFVVAACGTLTANSVSPRGGVYTVGDFMTRKEDLHVVKPTTTVDEALEALVEHRITGFPVIDDDWKLVGLVSDYDLLALDSISGRRTENDLFPEVDSTWKTFNEVQKLLNKTNGQVVGDLMTPAPLVVRETTNLEDAARLLLETKYRWLPVVDVEGKLVGIITRGNVVRAALRIKREIEGKA

SEQ ID NO: 67158 - protein, 115 aa, Gossypium hirsutum
  Clone ID: LIB3831-001-Q1-N6-F8.pep
DYDLLALDSISGRRTENDLFPEVDSTWKSSILQTFNEVQKLLNKTNGQVVGDLMTPAPLVVRETTNLEDAARLLLETKYRRLPVVDVEGKLVGIITRGNVVRAALRIKREIEGKA

SEQ ID NO: 67159 - protein, 44 aa, Gossypium hirsutum
  Clone ID: LIB3165-046-Q1-K1-H3.pep
IKKWTQFAIPNLDLSLAYAPLLIPARFIHHMPCQLIFRPIHRLS

SEQ ID NO: 67160 - protein, 426 aa, Gossypium hirsutum
  Clone ID: GOSHI-09MAY01-C4873_1.pep
MAAVLKMAEQSKTTNTNNANTTNTPTHLQHQQVKPAAMFHDFLGMKPSNSSVVLAPKATDARFSEASPSPSASVAASSGGGGAGRGPISSTSDLGSERQVGNHLEGIPYYGPRSEISGPDINNSLAGSKRSFSDSAFMGHESLESLHLMKMLRNGAGGERPRRSNEDEVFLGMKSMRPSSTSLILQPPAGSRLEGNASKWERSVPSAVQYASRGGHFVPFVHQVSSNRFKDTTVGPSVISQAAADEGSRTGIKGPGILSSINASGVPTEKGSSAIVPSGGRPKTGAHNSHPEPLVPPSRQGLTSASRQMTIFYGGQAHVFDDVHPNKADVIMALAGSNGGSWSTTYSPKSAVRTGENYAPGGEPEAVGSIAFSRELRGKMAVSGNASQATGSGERIPIQTGVPQGTIVMARDGRNLEAGTEDKREV

SEQ ID NO: 67161 - protein, 107 aa, Gossypium hirsutum
  unsure (1)..(107): unsure at all Xaa locations
  Clone ID: GOSHI-09MAY01-C4593_1.pep
MCLVFDMKVFCRCFGCMLIEGYGMTETSCIITLMDVGDVLAGHVGSPHAACEVKLVDVPEMNYTSEDEPYPRGEICVRGPIVFHGYYKDEXQTREVFDDDGWFHTGD

SEQ ID NO: 67162 - protein, 98 aa, Gossypium hirsutum
  Clone ID: GOSHI-09MAY01-C4583_1.pep
MAAVQRPASSSDSDERKRKRMLSNRESARRSRIMKQNQLEDLVNEVSALQKDNSQLSEKINVTTQRYAVMECANNVLRAHAMESTERLLAQNSVSINR

SEQ ID NO: 67163 - protein, 120 aa, Gossypium hirsutum
  Clone ID: GOSHI-09MAY01-C4553_2.pep
YPHLLSKTAAGTPEWMAPEVLCNENSNEKSDVYSFGVVLWELMTLQQPWKHLNPPQVVAAVGFKGERLEIPSHVNRVVASLIEQCWAREASERPPFSHVIQCLQQVIQNTASQELNGLSL

SEQ ID NO: 67164 - protein, 376 aa, Gossypium hirsutum
  Clone ID: GOSHI-09MAY01-C4553_1.pep
MADEDIQPLVVDNGTGMVKAGFAGDDAPRAVFPSIVGRPRHTGVMVGMGQKDAYVGDEAQSKRGILTLKYPIEHGIVSNWDDMEKIWHHTFYNELRVAPEEHPVLLTEAPLNPKANREKMTQIMFETFNVPAMYVAIQAVLSLYASGRTTGIVLDSGDGVSHTVPIYEGYALPHAILRLDLAGRDLTDALMKILTERGYSFTTTAEREIVRDIKEKLAYVALDFEQELETAKSSSSIEKSYELPDGQVITIGAERFRCPEVLFQPSLIGMEAPGIHETTYNSIMKCDVDIRKDLYGNIVLSGGSTMFPGIADRMSKEITALAPSSMKIKVVAPPERKYSVWIGGSILASLSTFQQMWISKAEYDESGPAIVHRKCF

SEQ ID NO: 67165 - protein, 90 aa, Gossypium hirsutum
  Clone ID: LIB3828-027-Q6-K6-E5.pep
FIGSASRNVLVFFCYPPCCPGYLLDTNRAREITALAPSSMKIKVVAPPERKYSVWIGGSILASLSTFQQMWISKAEYDESGPAIVHRKCF

SEQ ID NO: 67166 - protein, 189 aa, Gossypium hirsutum
  Clone ID: GOSHI-09MAY01-C4543_7.pep
MERYKLLREVGDGTFGCVWRAINKLSGEVVAIKKMKKKYCSWEECVNLREVKSLTRMNHPNIVKLKEVIRENNVLYFVFEYMECNLYQLMKDREKHFSEVEIRNWCFQVFQGLAFMHQCGYFHRDLNPENLLVSRDIIKIADFGLAREISSHPPYTEYVSTRWYRAPEILLQSYLYTSKVDMWAMGAIM

SEQ ID NO: 67167 - protein, 224 aa, Gossypium hirsutum
  unsure (1)..(224): unsure at all Xaa locations
  Clone ID: GOSHI-09MAY01-C4543_6.pep
PRVRPRVRPRVRREVKSLQRMNHPNIVKLKEVIREHDILYFVFEYMECNLYQLMKDREKLFSEVEIRNWCFQVFQGLAYMHQRGYFHRDLKPENLLVTKDIIKIADFGLAREINSNPPYTEYVSTRWYRAPEVLLQSYLYTSIVDMWAMGAIMAELFSLRPLFPGTSGADEIYQICGVISASTXEIRAERLNIARALNYTNPTQSRWCACVCIDTMSAQLCTHS

SEQ ID NO: 67168 - protein, 196 aa, Gossypium hirsutum
  unsure (1)..(196): unsure at all Xaa locations
  Clone ID: GOSHI-09MAY01-C4543_3.pep
PASGSWDPXQRPTAAEALQHPFFQGCFYVPPSLRPRIAVSRTPPSAGVRGTLEQQSVRRYSGAQPNGKFTGSFSSLKTNASFSTGAQRKPELLNQDLRKNDKPLKNYSKQTRYWPPGRRTTTISMNKDRNGRGAGASEVVEKLGNVTIGSRRQYGGQIGAPPMKAGVQWTAESNDMFLRPTQQIPSGRTFTRKVAG

SEQ ID NO: 67169 - protein, 200 aa, Gossypium hirsutum
  Clone ID: GOSHI-09MAY01-C4543_2.pep
SKLRIPRLRNSHELHLLFWDPCKRPTAAEALQHPFVRGCLYVPPSLRPRAAVSRTPPPVGVRQKLEQQSARRFSGVLPNAGLTGNLSLKSNASMGTITGVQRKLEMVNQSDHKSLKNTVKQTRYRPPGRKSPMSIGKHRTTVGASDVVEKLANVTIVNRRQRPAAMKAGVQWTAQSKNDMFIRPTQQMQSGRSFTRKVVG

SEQ ID NO: 67170 - protein, 432 aa, Gossypium hirsutum
  Clone ID: GOSHI-09MAY01-C4543_1.pep
MERYKLIKEVGDGTFGTVWRAINRLSGEVVAIKKMKKKYYSWEECVNLREVKSLRRMNHPNIVKLKEVIRENDILYFVFEYMECNLYQLMKDREKLFSEVDIRNWCFQVFQGLAYMHQRGYFHRDLKPENLLVTKDIIKIADFGLAREISSRPPYTEYVSTRWYRAPEVLLQSYLYTSKVDMWAMGAIMAELFTLRPLFPGTSEADEIYKICSVLGTPTKYSWPDGLNLARSINYQFPQFAGVHLSVLIPSASDDAINLITSLCSWDPCKRPSAAEALRHPFFQSCYYVPPSLRPKAAVSGTPPSVGVKGTWEQQSPRRFSGFLPNAKLTGNHSTLKANASLGTGVQRKLEMVNQDLNKNDKSLKSFAKQPRYRPPGRKSPFATSINKDRNAIGASDVAEKLANVTIGNRRLNVGQIRHSEYKGWGSVDCGF

SEQ ID NO: 67171 - protein, 88 aa, Gossypium hirsutum
  Clone ID: LIB3543-028-Q1-K6-C5.pep
SLCSLDPCRRPTAAEALQHPFFQSCLYVPPSVRPRAPVSRTLPPVGVRQKLEQQSARRFSGVLPNAGLTGNLSLKSNASMGTITRDRL

SEQ ID NO: 67172 - protein, 111 aa, Gossypium hirsutum
  Clone ID: LIB3828-025-Q6-N6-F3.pep
GFLPNAKFSGNRCTLKANAALGPGVQRKLQMVNQDLNKNDTSLRSFAQLPRFLPPGRKNPFAPSLDKDRIAIGPSDVPEKLANVTIGNRRLNVGQIRLSAYKGWGSVASGF

SEQ ID NO: 67173 - protein, 52 aa, Gossypium hirsutum
  unsure (1)..(52): unsure at all Xaa locations
  Clone ID: LIB3148-034-Q1-K1-F2.pep
LRIVRYSEADEVAYHRRGVISSLSVXXFSLEQSESKMKNLHKFCKCNRVPSN

SEQ ID NO: 67174 - protein, 125 aa, Gossypium hirsutum
  unsure (1)..(125): unsure at all Xaa locations
  Clone ID: LIB3584-027-P1-K1-B5.pep
HASAHASAHASAHASANIVKLKGVIREHDILYFVFEYMECNLYQLMKDREKLFSXXGIRNWCFQVFQGLAYMHQRGYFHRDLEPENLLVTKDIIKIAEGWSCTXINSSPPYTEYVLTRWYCAPGV

SEQ ID NO: 67175 - protein, 92 aa, Gossypium hirsutum
  Clone ID: LIB3583-048-P1-K1-A7.pep
QVFQGLAYMHQRGYFHRDLKPENLLVTKDIIKIADFGLAREINSSPPYTEYVSTRWYRAPEVLLQSYLYTSIVDMWAMGAIMAELFTLRPLF

SEQ ID NO: 67176 - protein, 86 aa, Gossypium hirsutum
  Clone ID: GOSHI-09MAY01-C4573_1.pep
NIGDGLTSCKDEYPIFDKEGVNGENAGPIYKFLKASIGGALGGLLGDDIKWNFAKFLVDKDGHVVDRYAPTTSPISIEKDIKKLLG

SEQ ID NO: 67177 - protein, 299 aa, Gossypium hirsutum
  unsure (1)..(299): unsure at all Xaa locations
  Clone ID: GOSHI-09MAY01-C4483_1.pep
EKESVLPAIREACREWGAFHVFNHGVPTKLLDGLRRACLSFFNDFQMEDKLKYACNPNFAASEGYGSRLLVSSENETVLDWRDYFDHHTLPLSCRNPSAWPHFPPEYRELMANYSDEMRVLAQRLLALMSESLGLKASCIEDAVGEFYQNITASYYPPCPQPDLTLGLQSHSDIGVITLLIQDDVGGLQVLKDGEWLLGDPLPNATLVLVAGQTEFITNGKYKTCGPRAITNASKARLSIAPFHDPAKTVRISPVSVSCESIFPPFVFWVFXKDNLFSWDSNAPKGKRNFDKLLLDPSK

SEQ ID NO: 67178 - protein, 421 aa, Gossypium hirsutum
  unsure (1)..(421): unsure at all Xaa locations
  Clone ID: GOSHI-09MAY01-C4453_1.pep
MALKCFIHVHPDSHFPIQNLPYGAFKTHSTTLPRLGVAIGDYVLDLSEIAKSGLFNSPLLAGSDCFLQPTLNKFLAMGRPAWKEARDTLQKLLSSTEPASRDNMEVRQKALVPMSEVEMVLPMEIGDYTDFFSSMHHAXNCGXIFRGPQNPIPQNWFHLPIAYHGRASSIVISGTDIIRPRGQGHPTGHSPPYFGPSLKLDFELEMAAVVGPGNELGKAIDVNEAADHIFGLVLMNDWSARDIQAWEYVPLGPFLGKSFGTTISPWIVTLDALEPFACDAPKQDPHPLPYLAEKISKNYDIELEVQIKPSGQTDSCVVTRSNFKNLYWTVTQQVAHHTINGCNLRPGDLLGTGTISGPAFESFGCLLELTWNGQKPLPLNGTTRKFLEDGDEVTFSGCCKGDGYNVXGFGTCAGKIVPPRD

SEQ ID NO: 67179 - protein, 157 aa, Gossypium hirsutum
  unsure (1)..(157): unsure at all Xaa locations
  Clone ID: uC-gsflnu33B112a09b1.pep
APIRDSIPVSYFLFQFLPSSTSSSQTFPFHIASLTSRYITLLAARTLPLFILQVQIKPSGQTDSCMVTRSNLKNLYWIVTQQVAHHTINGCNLRPGDLLRTGTIRWEFESCGCLLELTWNGQKQFPLNGTTQXFLEDGDEVIFSSCCXGDGYIVVLD

SEQ ID NO: 67180 - protein, 264 aa, Gossypium hirsutum
  Clone ID: GOSHI-09MAY01-C4463_4.pep
PRVRPRVRPRVREWWPHLGLPKDQGPPPYKKPHDLKKAWKVGVLTAVIKHMSPDIAKIRKLVRQSKCLQDKMTAKESATWLAIINQEETLARELYPESCPPLSSGGGSGSLVINDCSEYDVEGADNEPNFDVQELKPGNLNSSDLSVDRMRAIQQPPYSIKGEVVNNLDFMRKRKPSNDSNIMEHKIYKCEFVQCPYSEHRLGFHDRIARDNHQLTCPYRNSSALFSGSSFNVNEVKPVILPQAFAQSKPTATAVTSVSTPFDL

SEQ ID NO: 67181 - protein, 256 aa, Gossypium hirsutum
  unsure (1)..(256): unsure at all Xaa locations
  Clone ID: GOSHI-09MAY01-C4463_3.pep
HASERLKDQSKGKDGVDTSKQRQSQEQARRKKMSRAQDGILKYMLKMMEVCKAQGFVYRIIPVKGKPVTGASDNLREWWKDKVRFDRNGPAAIAKYQADNAIPGNYDGCHXIGPIPHTLQELQDTTLGSLLSALMQHCDPPHRRIPLENGCHPPWWPTGNEEWWPHLGLPKDQCPSXYKKPHDLKNACKVGVLTXLINPMVSDIANIPKLVMQSNSLQDKMTAMXSATWLAXINHEETLLQTLTQCCHFVYVDECI

SEQ ID NO: 67182 - protein, 123 aa, Gossypium hirsutum
  unsure (1)..(123): unsure at all Xaa locations
  Clone ID: GOSHI-09MAY01-C4463_2.pep
YNIQGNKNMNPSNNLVTKGQNVXQPKIQHQQDEFFRGQGVMMEGNFFEDSSMLHNHQMFSQGEAQFERFKGLNSPLDSNHNNNNSFQLMFGSPFDLASFDYEEDLHAVGMDSMPKQDVSIWFQ

SEQ ID NO: 67183 - protein, 614 aa, Gossypium hirsutum
  Clone ID: GOSHI-09MAY01-C4463_1.pep
MMMFDDMGICGDMDFFSAPFGEKDAATATLAALRTEPEATVEDDYSDEEIDVDELERRMWRDKMRLKRLKEQHKGKEGVDIAKQRQSQEQARRKKMSRAQDGILKYMLKMMEVCKAQGFVYGIIPEKGKPVTGASDNLREWWKDKVRFDRNGPAAIAKYQADNSIPGKNDGCNLIGPTPHTLQELQDTTLGSLLSALMQHCDPPQRRFPLEKGVPPPWWPTGNEEWWPQLGLPEDQGPPPYKKPHDLKKAWKVGVLTAVIKHISPDIAKIRKLVRQSKCLQDKMTAKESSTWLAIINQEEALARELYPDSCPPLSSGGGNVSLVINDCSEYDVEGVEDEPNFDVQERKPRTISSNLVMERMRAIQQPPYSIKGEVVSNLDFTRKRKPSNDLNMVEQKIYTCEFLQCPYSELRLGFHDRAARDSHQLTCPYRNSSALFGGSSFSVNDVKPVILPQAFAQSKPTAPAVTSVSTPFDLSGLGVPEDGQKMISELMSVYDNNIQGSKNMNPSNNPIAEGQNILHPKIQQPQDEYFRGQGNFFEDSSMPNNHQMFPQGEGQFDRFKGLNSLFETEHNNNNSFPLMFGFPFDLSTFDYKEDLQTVGMDTIPRQDVSIWFQ

SEQ ID NO: 67184 - protein, 61 aa, Gossypium hirsutum
  Clone ID: uC-gsflnu33B050f04b1.pep
LGWIPCQSRMFQSGSSNKSLPHLSANEHQQKSPFVFYLVCFSHVCRCRSLVSFNRFSSGLQ

SEQ ID NO: 67185 - protein, 68 aa, Gossypium hirsutum
  unsure (1)..(68): unsure at all Xaa locations
  Clone ID: LIB3048-030-Q1-L1-B9.pep
LIGPTPHTLQELEDTTLGSLLSALMQHWDPTXKPVPLKKGGPSAWWANGTQEWWAELGVSKEPRPSFL

SEQ ID NO: 67186 - protein, 174 aa, Gossypium hirsutum
  unsure (1)..(174): unsure at all Xaa locations
  Clone ID: GOSHI-09MAY01-C4773_2.pep
MDSCCVAFKPNSPLLNTRNGYGYGYGNGDIKNTFLGERTRGSVWFNQLSNTLRGDDKKENKIKSGVSAVLTSDTPREAVTLKPRRFERPRVDPKNVASIILGGGAGTRLFPLTKRAATPAVPVGGCYKLIDIPMSNCINSGINKXIFVLTQFNSAFLNLSPCSVHIYGQWESIF

SEQ ID NO: 67187 - protein, 555 aa, Gossypium hirsutum
  Clone ID: GOSHI-09MAY01-C4773_1.pep
MDSCCVAFKPNSPLLNTRNGYGYGNGDIKNTFLGERTRGSVWFNQLSNTLRGDDKKENKIKSGVFAVLTSNTPREAVTLKPRRFERPRVDPKNVASIILGGGAGTHLFPLTKRAATPAAPRPPRVRLIDIPMSNCINSGINKIFVLTQFNSASLNRHLARTYYGNGINFGDGFVEVLAATQTSGEAGKKWFQGTADAVRQFIWLFEDAKNRDIENILILCGDHLYRMDYMEFLQSHVDNNADITISCVPVDNSRASDYGLVKMDGRGRIVQFAEKPKGADLKAMQTDTTLLGLAPQEAWDPPYIASMGVYVFRTDVLLTLLRWRYPTSNDFGSEIIPAAVMEHDVQAYIFKDYWEDIGTIRSFYEANLALTEEFPRFEFYDPKTPFYTSPRYLPPTKIDKCRIKDAIISHGCFLRECSVQHSIVGERSPSRPGVELQDTVMLGADYYRTEPEIASLLAEGKVPIGIGRNSKIRNCIIDKNAKIGKDVVIVNKDGVEEADRPEEGFYITSGLTIIMEKATIADGTVIYPRGPLKMTSMGAALKIGIRVAKKATDED

SEQ ID NO: 67188 - protein, 246 aa, Gossypium hirsutum
  unsure (1)..(246): unsure at all Xaa locations
  Clone ID: GOSHI-09MAY01-C4733_1.pep
MEVKLWNDKREREMYENFAELYAIIKATEKLEKAYVRDIISSSEYETECQKLIAHFKTLASTLKDTVPSIERFADTYKMDCPAAINRLVTSGVPATVEHRAAAAASATTSAAIVAECVQNFITAMDSLKLNMVAVDQVYPLLSDLSASLNKLGILPPDFEGKIKMREWISRLAKMGAADELTXQHARQLHSDLESSYNSFMAALPIAGTWKLNPILPYFCLVLQSGENGCFKLVKQCIHFESSWIV

SEQ ID NO: 67189 - protein, 65 aa, Gossypium hirsutum
  Clone ID: LIB3120-019-Q1-K1-E1.pep
MEVKLWNDKREREMYENFAELYAIIKATEKLEKAYVRDIISSSEYETECQKLIAHFKTLASTLKD

SEQ ID NO: 67190 - protein, 225 aa, Gossypium hirsutum
  unsure (1)..(225): unsure at all Xaa locations
  Clone ID: GOSHI-09MAY01-C4723_1.pep
DNTTTTAIVQYKGKYSNPTSSSSSSSLPSLPFYNDTNAAFSFLGGLKSLADKKHPSDVPLHIXNRIFTTISVNSFPCRDNNTCXGPNGTRXAASMNNISFVNPSTALLQAYYQHTNGVYGDNFPDMPPFLFNFTDIFLPLNLETPKRGTEVMVLDYNTTVEIVLQGTALMGGIDHPIHLHGNNFYIVGFGLGNFDIYKDPLKYNLKDPPLRNTVSVPINGWVTVR

SEQ ID NO: 67191 - protein, 337 aa, Gossypium hirsutum
  unsure (1)..(337): unsure at all Xaa locations
  Clone ID: GOSHI-09MAY01-C4643_1.pep
MSGMGDGYVGTAQDAVRIRRLEKQRETERRKIQELKTKSASAKGQPGLLQFGSSTSEILETAFKKETVGLVTREQYVEKRVNIRNKIEEEEKEKLQKLQQEEEELQLQKRKKRKVKGNSRLSFADDFDNGSEEEDDENKTSESKRFSRGKFGKDPSVETSFLPDSERXAEEQAERERLRKQWILEQEQIKNEPXEITYSYWDGAGHRRVIQXVRKGDTIGEFLRAVQQQLAPEFREIRTTSVENLLYVKEDLIIPHQHSFYELIINKARGKSGPLFHFDVHEDVRTIADATIEKDESHAGKVVERHWYEKNKHIFPASRWEIYDPTKKWERYTIHGD

SEQ ID NO: 67192 - protein, 273 aa, Gossypium hirsutum
  Clone ID: GOSHI-09MAY01-C4663_1.pep
PTLTPTRPPTRPTRHSQWQRSDDGGESSETDSPSDSLRDIHDISLNLKFSMDGDRSGASGNDNSLDSEGNDRNSKLENAVLSWSKGVLKDQRKAGSGDRIDHGSSTGKFPALRRRKHIFVIAVDSDSNEDLLDAIRKVFEAVEKERIEGSIGFILSTYMTISEIQSFLVSGGLNANDFDAFICNSGSDLFYSTINPEDGPFVIDFYYHSHIEHRWGGEGLRKTLVRWAGSVTDKMEGNEEHIVTVAEHLSTNYCYTFEVKNAVRVSLVKELLK

SEQ ID NO: 67193 - protein, 141 aa, Gossypium hirsutum
  unsure (1)..(141): unsure at all Xaa locations
  Clone ID: uC-gsronu33B018d12b1.pep
RLSHGDLYRFPFGLDYMGSVWGDKHDHSGLNQLELKXWLNPNEVYQSGVTDGQFKLCNAWSICLLDCRTPLEDSLSXXVCDYSEGDMHLLMDDWIDXKYDYYEIFTSEMKNAFFQLQGPCYPXVFFPSVNVYCSCQIFGGF

SEQ ID NO: 67194 - protein, 170 aa, Gossypium hirsutum
  unsure (1)..(170): unsure at all Xaa locations
  Clone ID: AW187145.1.pep
ILLTYGLDYKGNVCGDKHAHPGLHQLELKYWLNPNQVYQSGVKDSQFKLSNARSICLLDCPTPLEDSLSWVCDYPEGDIHLSMDDWIDXNYDYYEILTPGMKNASLQLQGPCYPVIFPTVNVYWSCQYIARASNASLRHWKQMGGVDIKEDIVXNKSIHSFINSRSSVLK

SEQ ID NO: 67195 - protein, 157 aa, Gossypium hirsutum
  unsure (1)..(157): unsure at all Xaa locations
  Clone ID: uC-gsronu33B018d06b1.pep
PFCPVLERYPITTEDGGIIRHNRKCRDVAFLVIFIAFWVAMIVNSSFGFNQGNPLRLTYGLDYKGNVCGDKHAHPGLHQLELKYWLNPNQVYQSGVTDSQFKLSNARSICLLDCPTPLEDSLSXXCDYPEGDMHLLMDDWIDRNYDYYGNLTSEMKN

SEQ ID NO: 67196 - protein, 255 aa, Gossypium hirsutum
  unsure (1)..(255): unsure at all Xaa locations
  Clone ID: GOSHI-09MAY01-C4053_1.pep
LLHNVLHFNPQTSAFSPPQRTHLRFTFKPHTSKPIVSSPSKLSYLPIVSSLSHNSEHLSVTQAKPRWENMLSTAASFYPLYVTVGGIVACFKPSAFAWFVERGPSSYSFSLGLIMLAMGLTLELKDLLNLFTQRPLSILFGCVAQYTIMPTFAMVISKTLGLSPSLSVGLILLGCCPGGAASTVVTFIARGDVSLSTVMTVCTTLGAVILTPLLTVILAGTYVPVDAIGLSISTLQXVVAPVLLGSYLQSTFSLV

SEQ ID NO: 67197 - protein, 122 aa, Gossypium hirsutum
  Clone ID: GOSHI-09MAY01-C4373_1.pep
ENDTWQEMKDGMKEGWTGVSVVVGDRLFVISEYGDCPMKVYVPDRDAWQYVGGDKFPREAMQRPFAVSGVEGRIYVVSSGLNVAIGTPIEGQNGEFIAKWEVVAAPMAFHDFSPLSCQVLYA

SEQ ID NO: 67198 - protein, 191 aa, Gossypium hirsutum
  Clone ID: GOSHI-09MAY01-C4243_1.pep
TYEEDHLLQGLNSYRTSANLPAFGENKNAECVAKRIADDVSDDDNNQHCTNPSNSPGNNATGLSAYPKAISKCDIDANTTSDVMVLPVCVPNLVPTLVLTNFTRTHYSKYINDSTFTGIGLSAEDDWMVVVLSSNKPTGSLANGAYSLLNRKLGFSYYMVLLLLGSLRLFVLICSEKCLDFFVYLSLEFVI

SEQ ID NO: 67199 - protein, 81 aa, Gossypium hirsutum
  Clone ID: GOSHI-09MAY01-C4213_1.pep
PRVRPRVRFGLAVPSTTVDEEEKRKARLARFSPYSKPDTIEGEKKKSKGNQVFGSPVNFFSTGGSCCWKGCWRTLNKNYHS

SEQ ID NO: 67200 - protein, 77 aa, Gossypium hirsutum
  Clone ID: LIB3583-006-P1-K1-C11.pep
PRVRGRLELRGLGLAVPSTTVDEEEKRKARLAQFAPYSKPDTIEGEKRKARAIRFSDPLSTSLAQEAPVAGKAVGGL

SEQ ID NO: 67201 - protein, 113 aa, Gossypium hirsutum
  Clone ID: GOSHI-09MAY01-C5913_2.pep
KKMQGGRGGRDPFFEFGGDPFGGFGGHKSLLSNFFNGRDPFDDPFFTRPFDSMFESSFFGPGHNPFPDMHPSGFIGQQAPEPKRPSGPIIQELDSDDEKEMKENPRKHGRSKD

SEQ ID NO: 67202 - protein, 316 aa, Gossypium hirsutum
  Clone ID: GOSHI-09MAY01-C5913_1.pep
FLRVREEAYTWSEGRAIFASGSPFDPFEYDGKVFVPGQANNAYIFPDMHPSGFIEQQAPEPKRPSGPIIQELDSDDEKEMKENPRKHGRSKDEPHVEVPDDETEQSERRNGHLQYMNGYNGSYQRQQQPPQTRSFTFQSSTVTYGGANGAYYTSSKTRRSGSDGITFEESKEANTATGQASHRVSRGLHDKGHSVTRKLNSDGRVETMQALHNLNEDELSGFEEAWNGNARKHLPGWSGSSNVHDTTGTSWGQNGQASHGGWALPFTERSQQSGKAMMDAKDSAGPSRGQNSTKAKGLGALKDKISQTLGKKKNQV

SEQ ID NO: 67203 - protein, 68 aa, Gossypium hirsutum
  Clone ID: uC-gsflnu33B022d01b1.pep
YKTFLVLWWLMQRGIDNFCKWHPFRLWILQHYNMDFLMHKTLPFHGFFLFAFVLNMNMIPVLQLTNTN

SEQ ID NO: 67204 - protein, 126 aa, Gossypium hirsutum
  unsure (1)..(126): unsure at all Xaa locations
  Clone ID: LIB3146-038-P1-K1-B8.pep
RPRVRAMASINEKPLIMVLSNPTSQAECTADEAYTWSEGRAIFASGSPFDPFEYDGKVFVPAQANNAYILPGFGLGVITSGAIRVHDDMLLTVSVALAXQVTVEHFKKGLIYPPFCDIRKISANIA

SEQ ID NO: 67205 - protein, 104 aa, Gossypium hirsutum
  Clone ID: GOSHI-09MAY01-C5893_1.pep
MAGSNEVNLNECKMVVPLNTWVLISSFKLAYNLLRRPDGTFNRHLAEFLDRKVPANLNPVDGVFSFDVLIDRATGLLCRIYRPATAEEPEPNIVELEKPVVWDV

SEQ ID NO: 67206 - protein, 100 aa, Gossypium hirsutum
  Clone ID: GOSHI-09MAY01-C5843_1.pep
IIGVSFQLYGVYEMPELRKGVCRGRAKLAQPQQPQETRKQTRNQGRKRAAAAVIEVGRPRTRLAAKRLKEEEEHPPVVVISERESDILKELVKDNKEKKL

SEQ ID NO: 67207 - protein, 107 aa, Gossypium hirsutum
  Clone ID: LIB3583-030-Q6-K1-C11.pep
GCAPWPASQNPYPAQAFHKPHQLKRNPNNSIIVWFLLNGGHGNFSNLKKKEWGKFFNKLNLSKIEGAFSVIRERIGTKRGIFKEFPVRVRVLAKKINNNNNYKATVG

SEQ ID NO: 67208 - protein, 289 aa, Gossypium hirsutum
  unsure (1)..(289): unsure at all Xaa locations
  Clone ID: GOSHI-09MAY01-C5873_1.pep
MRLFVSLVAVLCIVCSNVLADQIFPSHVASTLGRSSREPKYKIEFHSEDSPYHPDDDQESVFMPNKDGKNFLCFLPKVEKTKTLKPVTQQNVSTMIVESEKQVKLKTPDELLEVLKDRCFIRQEGWWSYEFCYQNRLRQIHVEEDKVVQEFVLGVYDEEATAAFNQNLSDISALKDPRSKDASQRYHAHQYTNGPQCDLTNQPRETEVRFVCSEXRAMISSITELSTCKYALTIQSPMLCKHPLFQEERPVWHTINCNVLAKDTKVEEDPHITMIMDSEDQSSNFDSSQ

SEQ ID NO: 67209 - protein, 154 aa, Gossypium hirsutum
  Clone ID: GOSHI-09MAY01-C5833_1.pep
MQIEEVKAKLNGKDNVSVKEEVNVTKTANRTLEQSEAPVEVKYESLKNNLFLDLKDGSSDSDSSAVLNEDNNNGSNYVGVSSSGVLQSQHVWMSPTTAPSLNFNSSSSSSMKCLQPQQFVKMEEQNFFSADEACKFFSDEEAPSLHWYCPEHWN

SEQ ID NO: 67210 - protein, 119 aa, Gossypium hirsutum
  Clone ID: LIB3196-059-P1-M1-G2.pep
VNVTKTANRALEQSGAPVEVKYESLKNNSKGSNGAILFLDLKDGSSDSDSSAVLNEDNNNGSNYVGVSSSGVLQSQHVWMSPTTASSLNFNSSSSSMKCLQPQQFVKMEEQNFFSADEA

SEQ ID NO: 67211 - protein, 48 aa, Gossypium hirsutum
  Clone ID: LIB3148-045-Q1-K1-B4.pep
VLSSLKWSEPKIKNQNYHHHHHHSYYQLSFSWASFVVSLCRKKLISYS

SEQ ID NO: 67212 - protein, 134 aa, Gossypium hirsutum
  Clone ID: GOSHI-09MAY01-C105818_1.pep
MEKTYNITVDNIECAYFDQIEKLHNFGSSNKETVAQLVWGFFNYWAYGHDYANSVISVRTGSIISKQEKDWTRRIGNDRHLICIEDPFETSHDLGRVVDKFSIRVLREEFERAADIMQFDPNPCVKLFEPYVHS

SEQ ID NO: 67213 - protein, 409 aa, Gossypium hirsutum
  Clone ID: GOSHI-09MAY01-C5823_1.pep
MEAATVVGSSMSLHRTSCSAARSALLAANGPLFPRFAANPRSSFSIKLYSSVSYSKSRNRRMGLGGRRGMVVKASSSPDSAEPNAQIASLRMESPIGQFLSQILISHPHLVPAAVEQQLEQLQTDRDTDEKKEEPSASGTDLVLDRRIAEVKANERKRALEEILYALVVQKFMDANISLVPAITSSADPSGRVDTWPSQEDKLEQIHSAEAHEMIQNHVALILGNRLGESTSVAQISKLRVGQVYAASVMYGYFLRRVDQRFQLERTMKVLPSASDDDKSSIEQTVGDDTRPSGLGDSYQAASSHPEVSSWSGGISPGGFGSGIKPSRLRTYVMSFDGETLQRYASIRSKEAVGIIEKHTEALFGRPEIAITPQGTVDSSNDELIKISFGGLKRLVLEAVTFGSFLWDV

SEQ ID NO: 67214 - protein, 174 aa, Gossypium hirsutum
  Clone ID: LIB3583-030-Q6-K1-A4.pep
MEAATVVGSSMSLHRTSCSAARSALLAANGPLFPRFAANPRSSFSIKLYSSVSYSKSRNRRMGLGGRRGMVVKASSSPDSAEPNAQIASLPMESPIGQILSQILISHPHLVPAAVEQQLEQLQTDRDTDEKKEEPSASSTDLVLYTRIAEVKANERITALEEILYALVVPKVMD

SEQ ID NO: 67215 - protein, 136 aa, Gossypium hirsutum
  Clone ID: GOSHI-09MAY01-C5543_1.pep
VPGGYVYQKARLEFFCSKEKLDALVNKCKPLSSITYIAVNKKGNLISNIGTTDVNAVTWGVFPAKEIVQPTVVDPASFMVWKDEAFEIWSRAWAALYPEGDPSKKLLEEVQSSYYLVSLVDNDYIGSDVFAVFGDL

SEQ ID NO: 67216 - protein, 163 aa, Gossypium hirsutum
  Clone ID: GOSHI-09MAY01-C5503_2.pep
MERSTPVRKPHTSTADLLTWTEGSQSASSNSAASSASAQRSSGRYNQPSDRISKVLFGGQVTDAEAQSLLNKKPCSGYKMKEMTGSGIFAADGANGASETTAMNSTNKTGLRMYQQAMNGISQISFTADASVSPKKPTSIPEVAKQRELSGSLQRESDGKNKK

SEQ ID NO: 67217 - protein, 290 aa, Gossypium hirsutum
  unsure (1)..(290): unsure at all Xaa locations
  Clone ID: GOSHI-09MAY01-C5503_1.pep
RGLPFHKLRLLSWAVAKPPPWXSSGRYNQPSDRISKVLFGGQVTDAEAQSLLNKKPCSGYKMKEMTGSGIFAAAGANXASETTAMNSTNKTGLRMYQQAMNGISQISSPAAASVSPRKPTSIPEVAKQRELSGSLQRESDAKNKKQISNAKYKEISGHDIFAPPENKPRSLAAVTSESRGSKDMGEPAPRNVRTSVKVSNPAGGQTSILFTDEPVVKVTKKIHNQKFQELTGNGIFKGDVPPGSVEKPLSRAKLREMSGNDIFSDGKAESRDSLGGVRKPPGGESSIALV

SEQ ID NO: 67218 - protein, 137 aa, Gossypium hirsutum
  Clone ID: AI054759.1.pep
VAIIRQILSGIVHYCSFRKPCSGYKMKEMTGSGIYAAAGANGASETTAMNSTNKTGLRMYQQAMNGISQISFTADASVSPKKPTSIPEVAKQRELSGSLQRESDAKNKKQISNAKYKEISGHDIFAPPENKPRSLAR

SEQ ID NO: 67219 - protein, 323 aa, Gossypium hirsutum
  Clone ID: GOSHI-09MAY01-C5533_1.pep
LHGSLLEDKPISELSEAYPFESTWRVIQAVRQVLSAYWPTLADKLPTKLTDQKAPPHILLSSSESDDEDDEASKIISKDLVQAIEDVVEPISKLKIEDNHDEVNSALWRSKLSKTDIWYASFGSNMWKSRFLCYIEGGQVIGMKKLCSGSVDRNPPKETRWKAFPHRLFFGRDFTQTWGPGGVAFLDPRSNSEDKAYVCLYKITLEQFNDVLLQENVPDHDMNSPLFDLNALDSILNEGSIPVEAVKRGWYHNVVYLGKKDDIPILTMTCPLSVIESFKSGEIPLCAPSKDYADTLVRGLVEGKQLSEGDATTYIQVAPPNPL

SEQ ID NO: 67220 - protein, 111 aa, Gossypium hirsutum
  unsure (1)..(111): unsure at all Xaa locations
  Clone ID: GOSHI-09MAY01-C5483_3.pep
PWFTAVSSCNXAELYTSNPDYKCALQVPYRSLDEDFGIADPIVKVPALLIMGCKDYVLVISWDAKVHIVWIXKELVPNLDIIYLPEGTHFVQEQSPELVSELILDFSRSHM

SEQ ID NO: 67221 - protein, 90 aa, Gossypium hirsutum
  Clone ID: GOSHI-09MAY01-C5483_2.pep
SCVECNAYKSFDEDFGITDPIVKVPALLIMGCKDYVLKFPGMEEYIKFGKAKELVPDLDIIYLPEGTHFVQEQSPELVNELILDFLRSHM

SEQ ID NO: 67222 - protein, 296 aa, Gossypium hirsutum
  unsure (1)..(296): unsure at all Xaa locations
  Clone ID: GOSHI-09MAY01-C5483_1.pep
MDQIQHNFITVRGLKFHVAELGEGSNVVLFLHGFPEIWYSWRHQMVALANAGFRTLAPDYRGYGLSDIPPEPEKTTFADLVADLVAILDHLGINKVFVVAKDFGVRPAYLLTLLHPHRVSCVVTLGVPHVPLEPRKYRESLTEGFYISRWNEPGRAEADFGRFDAKTVVRNIYILFSRSEIPIADEXKEVMDMVDASVPLPPWFTEEDLATYGALYEKSGFKTALQVPYRSFDEDFGITDPIVKVPALLIMGCKDYVLKFPGMEEYIKFGKAKELVPDLDIIYSAEGTHFVQEQSP

SEQ ID NO: 67223 - protein, 138 aa, Gossypium hirsutum
  Clone ID: GOSHI-09MAY01-C5453_2.pep
MANRTDPAAKSIRGTNPQNLVEKIVRSKIYQNTYWKEQCFGLTAETLVDKAMELDHIGGTYGGNRKPTPFMCLVMKMLQIQPEKDIVVEFIKNDDYKYVRVLGAFYLRLTGIDSDIYRYLELLYNDYRKVRRNHLMEI

SEQ ID NO: 67224 - protein, 177 aa, Gossypium hirsutum
  Clone ID: LIB3585-045-Q6-K1-F4.pep
PTRPPTRPPFFFFFSFFPFFFDSGGALPSTPFMCLVMKMLQIQPEKDIVVEFIKNDDYKYVRVLGAFYLRLTGIDSDIYRYLEPLYNDYRKVRRKSPDGNFMLTHVDEVIDELLTRDYSCDIALPRIKKRWTLESLGVLDARKSVLEDDSEEEEEKDEMEQDGLEEEVAHEKDYYRA

SEQ ID NO: 67225 - protein, 195 aa, Gossypium hirsutum
  Clone ID: LIB3585-045-Q6-K1-E6.pep
RTRGALVNRGNTYKENGRVNEAMHEYIRAINIRPAMAEAHANLASAYKDSGHVEAAIKSYRQALVLRPDFPEATCNLLHTLQCVCDWEDRENKFLEVEGILRRQIKTSVIPSVQPFHAIAYPIDPMLALEISCKYAAHSSVVASRYSLPPFNYPAPFPGENGNRRLRVGYVSSDFGNHPLSHLMGSVFGMHNREN

SEQ ID NO: 67226 - protein, 133 aa, Gossypium hirsutum
  Clone ID: LIB3197-005-P1-M1-H10.pep
HTLQCVCDWEDRENKFLEVEGILRRQIKVHAQSATSVIPSVQPFHAIAYPIDPMLALEISRKYAAHSSVVASRYSLPPFNYPAPFPGENGNRRLRVGYVSSDFGNHPLSHLMGSVFGMHNRENVEVFCYALSP

SEQ ID NO: 67227 - protein, 202 aa, Gossypium hirsutum
  Clone ID: GOSHI-09MAY01-C5463_1.pep
MVETLPVGRFQLQQQRLELKRWIPAFLSSHKTLFVLLWIAAFGSVFFWQWNIGGSGFSIFAKVGPGRPMPKMRPFAFNLTDFGGVGDGVADETAAFERAILAISKFGKRGGAQLNVPPGKWLTAPFNLTSHMTLFLAEDAEILGIQDEKRWALMPPLPSYGYGREHNGSRYGSLIHGQNLRDLVITGHNGTINGQGQSWWKK

SEQ ID NO: 67228 - protein, 201 aa, Gossypium hirsutum
  unsure (1)..(201): unsure at all Xaa locations
  Clone ID: GOSHI-09MAY01-C5413_1.pep
GTGFMAECTRTAYVSSGTELYIKRKKDRLPVGQVVDVPPRESSIRLRVGDLLIISRDSTCGEDNSYGHASGAYRITCSSGYLFDAVKPGERITFDDGKIWGVIKGTTISEIVVSITHAGLRGTKLGSQKSINIPDSNIRFKGVTSKDLVDLEFVKSHADMVGVSFIRDTRDIIVLRQELEERKLXNLGIVLKIETKSGFEK

SEQ ID NO: 67229 - protein, 253 aa, Gossypium hirsutum
  Clone ID: GOSHI-09MAY01-C5433_1.pep
EDDSTIEVDHNTGASSHKVSPSSSLAPTPKASARVLVPGRAKEPDTGGVTEKSSSSSPGNVLGLANYASDDEDDEIQSARPPDSRSNDAVLQSSIRKLSQGIDVTENGSSQVVLDEHRRVEKNFGSDMKSESRRDTTDDSAERNYENSFSSKLISGNEININSGKLQYGNNGSKMDDILGARVIKKSDSELLDEGVVKKSTKSESQSRETRLKSDKNDRHESRKSSLSKDPDSGRELEVIKRRGEQKGDENHM

SEQ ID NO: 67230 - protein, 173 aa, Gossypium hirsutum
  Clone ID: GOSHI-09MAY01-C5793_1.pep
MDGEDDAPKSLMEEMYANGIEGVDDAPSSSTSTTIRKNRPIISGEQLDIEAYAALYSGRTKIVRLIFLADHCDNSGMQLEALRMAYDELKKGENTQLFREVVQKIDGRLGPNYSTDATWCAMVDRKADQRKDKLESELNAYRTNLIKESIRMGYNDFGDFYYAHGALGDAFKS

SEQ ID NO: 67231 - protein, 92 aa, Gossypium hirsutum
  Clone ID: GOSHI-09MAY01-C5733_1.pep
EHPLPLAPFPPPPQKKKRKKRRELINVNIRHCLHIKNPHKKGPPSKHLYKAKVKIKQSFQFLQGHGSYTQESRVSSHGGVQTNHHDQPTGLY

SEQ ID NO: 67232 - protein, 225 aa, Gossypium hirsutum
  Clone ID: GOSHI-09MAY01-C5723_1.pep
MAPSFVTNGGVAAVKTTPFAGRLASVYSEVQTSRIDHALPVPSVLRSPFKIVDGPASSAAGNPDEIAKLFPNMFGQPSSMLVPNGVDNIGSDQKLKIGVVLSGGQAPGGHNVICGIFDYLQERAPGSTLYGFKGGPAGIMKGKYVELTADYIYPYRNQGGFDMICSGRDKIETPEQFKQAEETAAKLDPDGLVGIGGDDSNTRAWPPGENFKRKNLKTRVIGCPK

SEQ ID NO: 67233 - protein, 153 aa, Gossypium hirsutum
  Clone ID: GOSHI-09MAY01-C5643_1.pep
MAHSHSTQNPVIEQQRMIIPNKHGEKLVGLLHETESKEIVILCHGFRSRKDYNTMTNLAAALEIEGISVFRFDFAGNGESEGSFQYGNYYREADDLHAVIQHFSGESHVVSAILGHSKGGNVVLLYASKYQDIRIVVNISGRYDLKRGIAERL

SEQ ID NO: 67234 - protein, 66 aa, Gossypium hirsutum
  Clone ID: LIB3120-022-Q1-K1-A3.pep
CKECFFDRINVKNFENKKKDPFFFYILVIEQQRMIIPNKHGEKLVGLLHETESKEIVILCHGFKST

SEQ ID NO: 67235 - protein, 182 aa, Gossypium hirsutum
  unsure (1)..(182): unsure at all Xaa locations
  Clone ID: GOSHI-09MAY01-C5163_2.pep
VNAFRERRALALTLNDTKTAVNRLHRMVDVLVGIIIVVIWLLILEIASSKVLVFISSQLLLGAFVXGNTCKTVFEAIIFLFGMPPFDVGDRCEIDGVQKEFILKIDDRSHDGSISTPSGGATAGDGGKIWGEPSYDFCKDGEKININWKKENANSSSCYPTTSSIGFSSSHSPSYLSSTNTI

SEQ ID NO: 67236 - protein, 305 aa, Gossypium hirsutum
  Clone ID: GOSHI-09MAY01-C5163_1.pep
IYLEDIERFLQEDEALKTMSFFEEASESKRISKKALKNWVVNAFRERRALALTLNDTKTAVNKLHRMVNVLVGIIILVISPSVRLLILEIASSKVLVFISSQLLLVAFVFGNTCKTVFEAIIFLFVMHPFDVGDRCEIDGVQMVVEEMNILTTVFLRYDNQKVIIPNSVLATKAIHNYHRSPDMGDAVEFCIHVKTPAEKIGLMKQRIMSYIEHKSDHWYPDPMIIFKELEELNRVRIAIWLTHRMNHQDMGERFTRRALLIEEMVKIFNDLDIEYRLYPININVCIVPPMASDRLPPKWTGPAS

SEQ ID NO: 67237 - protein, 95 aa, Gossypium hirsutum
  unsure (1)..(95): unsure at all Xaa locations
  Clone ID: LIB3584-031-P1-K1-G6.pep
PKKIHIFGGTLTNKTITLEVDSSDTIDNLNTKIQDKEGIPPYQQLLIFAGKHHQDCRTLADYNIQKESTLHLVLHLRGCMQIXFMKTLSVKTINF

SEQ ID NO: 67238 - protein, 59 aa, Gossypium hirsutum
  Clone ID: uC-gsflmaxxa090e05b1.pep
VKTLIGKTITLEDESSDTIDNVKTKIQDKEGIPSNQQRLIFAGKQLEDGRTLADLQHSK

SEQ ID NO: 67239 - protein, 219 aa, Gossypium hirsutum
  Clone ID: GOSHI-09MAY01-C5073_1.pep
MGNSLAKKPNITELDRAILSLKTQTRKLGQYQQQLEAVIEAEKQAARDLIREKRKDRALLALKKKKAQEELLKQVDTWLINVEQQLADIELASKQKAVFDSLKAGNNAIKAIQSEINIDDVQKLMDDTEEAKAYQDEINAILGEKLSAEDEEEILAEFENLETQMAVQDMPEVPSKAGSEEQKLDLPDVPTKKPVASNAATDDAEISTKRRVTEEPLPA

SEQ ID NO: 67240 - protein, 72 aa, Gossypium hirsutum
  unsure (1)..(72): unsure at all Xaa locations
  Clone ID: LIB3585-044-P1-K1-C12.pep
PTRPKTHRRKLGQYQQQHGAVIXAEKQAARDLIREKRKDRALLALKNKKAQEELLKQVDTWLINVEQHVIET

SEQ ID NO: 67241 - protein, 121 aa, Gossypium hirsutum
  Clone ID: LIB3584-030-P1-K1-A7.pep
SFYYSITELSLLLLLQLFLLFGRRSYICFKPVVNRGGRAGGYKELDEEEIEETRRRLREAEEDNGEVYDEFGNLKKKFRAKTQQAEAARVLPGSCCAGWEVDELGIGFIMLTTTSFGIALF

SEQ ID NO: 67242 - protein, 106 aa, Gossypium hirsutum
  Clone ID: LIB3145-053-Q1-K1-A12.pep
DWPFPMCGNINWAKRMKCNICNTNKPGHNEGGVRGGRAGGYKELDEEEIEETRRRRREAEEDNGEVYDEFGNLKKKFRAKTQQAEAARVLPGSCRAGWEVDELRVI

SEQ ID NO: 67243 - protein, 125 aa, Gossypium hirsutum
  Clone ID: GOSHI-09MAY01-C5033_1.pep
KSRISLAAKRDGTLVLRKVLVVNSFPVRFQTTTLDPDLKFLLIESCVELNHDPAIGGLLTMASVCIHEPQTTYSLHQNVRHCFGVLLLKSQCRKTWELSSSPRPYLRHTVKSATHLYFKLTRVGI

SEQ ID NO: 67244 - protein, 138 aa, Gossypium hirsutum
  Clone ID: uC-gsflmaxxa003d07b1.pep
FLAGPTLFGHVINIASVVACDSLSTGAKKYFVLLIITDGVITDLQETKDALVKASGLPLSILIVGVGGADFKEMEILDADKGERLESTTGCIASRDIVQFVPFRDVQSGEISMVGALLAELPTQFLTYMRRRDIKPST

SEQ ID NO: 67245 - protein, 85 aa, Gossypium hirsutum
  Clone ID: LIB3584-039-P1-K1-H6.pep
TRHASRSILIVGVGGADFKEMDILDADKGERLESSTGRVASRDIVQFVPFRDVQGGEVSIVQALLAELPTQFLTYMRSRDIKPRI

SEQ ID NO: 67246 - protein, 104 aa, Gossypium hirsutum
  Clone ID: GOSHI-09MAY01-C5353_2.pep
MTGKAKPKMHTAKEIAAKIDAATTNRGGGKAGLADRSGVEKGGHAKFECPHCKTTAPDLKTMQIHHDAKHPKLPFEESKLVNLHSTHGADSSKPRPGVRGSLKK

SEQ ID NO: 67247 - protein, 104 aa, Gossypium hirsutum
  Clone ID: GOSHI-09MAY01-C5353_1.pep
MTGKAKPKKHTAKEIAAKIDAATTNRGGGKAGFADRSGVEKGGHAKYECPHCKITAPDLKSMQIHHDAKHPKVPFEESKLVNLHAVHVVETSKPRPGVRGSLKK

SEQ ID NO: 67248 - protein, 90 aa, Gossypium hirsutum
  unsure (1)..(90): unsure at all Xaa locations
  Clone ID: uC-gsflnu33B070f02b1.pep
MTGKAKPKKHTAKEIAAKIDAATTNRGGGKAGLADRSGVEKGGHAKFECPXHCKTTASDLKTMHIHYDAKHPMLPFEELNACESLFYSWC

SEQ ID NO: 67249 - protein, 104 aa, Gossypium hirsutum
  Clone ID: uC-gsflmaxxa098a01b1.pep
MTGKAKPKKHTAKEIASKIDAATTNIGGGKAGLADRSRVEKGGHAKYECPHCKITAPDLKSMQIHHDAKHPKVPFEESKLVNLHAVHVVEPSKPRPGVRGSLKK

SEQ ID NO: 67250 - protein, 56 aa, Gossypium hirsutum
  Clone ID: LIB3149-001-P1-K1-G5.pep
GKAKPKKHTVKEIAAKIDAGTTNRGGGKAGFADRSGVEKGGHAKYECPHCKILNIF

SEQ ID NO: 67251 - protein, 238 aa, Gossypium hirsutum
  Clone ID: GOSHI-09MAY01-C5373_1.pep
MNGFQPPRPDLADEANHGDGFIRTYKAWKGSNVFVLGGRFIFGPDVRSLFFTIFLIVAPVAVFCVFVARKLMDDFPHHLGISIMAVVVALTLSDITLLLLASGRDPGIIPRNLHPPEPEGYEGMTEVRPGQTPPLRLPRTKDVIVNGISVKIKYCDTCMLYRPPRCSHCSICNNCVDRFDHHCPWVGQCIGLRNYRFFFMFVFSTTLLCLYVHGFCWVYIRKIMNGEEATIWKAMTKT

SEQ ID NO: 67252 - protein, 245 aa, Gossypium hirsutum
  unsure (1)..(245): unsure at all Xaa locations
  Clone ID: GOSHI-09MAY01-C5363_1.pep
RTRGKVQQTVNERFGKCLLELSGNNAIIVMDDADIKLAVRSVLFAAVGTAGQRCTTCRRLLLHESIYRTVVDQLLDVYKQVKIGDPLEKGTLLGPLHTSSSRKNFEKGIEIIKSQGGKILTGGGIIESEGNFVQPTIVEISPDANVVKEELFAPXVLYVMKFKTLKEAFEIKQLLFPRGVRASPILSNKPLYSYTEGWPPKGKPLFLIGKPHHQGRKNGVLLENTLGGAGIVSIFEINSGKVTCT

SEQ ID NO: 67253 - protein, 157 aa, Gossypium hirsutum
  Clone ID: GOSHI-09MAY01-C5333_1.pep
MALVSFVGRVLFASVFILSAWQEFNEFGVDGGPAAKALKPKFNVFSKTVTAHTGVEVPEFDIKVLVAAAVAFKGVGGILFIFGSTIGAYLLALQQVIVTTILYDFYNYDTEKKEFGLLFSKFSQNLALLGALLFFIGMKNSIPSRQLKKKAPKTKTV

SEQ ID NO: 67254 - protein, 104 aa, Gossypium hirsutum
  Clone ID: LIB3135-049-Q1-K1-B10.pep
RTRGPEFNIKVLVAAAVAFKGVGGILFIFGSTIGAYLLALQQVIITPILYDFYNYDTEKKEFGLLFSKFSQNLALLGALLFFIGMKNSIPRRQLKIKAPKTKTV

SEQ ID NO: 67255 - protein, 183 aa, Gossypium hirsutum
  Clone ID: GOSHI-09MAY01-C5253_1.pep
MEGGERGSSAIPESVMNSVKTTLVNVENLRTHLLEFLSLSDPDVLAQMPPLQRAQAFFTLAKATTTLFALKLRCSGVHPDEHPIKSELERLSLYQEKLERFIDLSKAPLRPSTTLNSQAATRFIEHSLPDLTPVQRQSMRQISKGEGPTIKCSGSNVKKKRKYQSSEKQSVEDAAKEFLGRSS

SEQ ID NO: 67256 - protein, 82 aa, Gossypium hirsutum
  Clone ID: LIB3585-034-P1-K1-B9.pep
IGGSRSHMEGGERGSSAIPESVMNSVKTTLVNLENLMTHLLEYLYVSYTDDLTQMPHVQHAHPCLVKPSNHLSLSSLWQRPI

SEQ ID NO: 67257 - protein, 106 aa, Gossypium hirsutum
  Clone ID: GOSHI-09MAY01-C5243_3.pep
MLQCLDGLKHLFASVLHCCDIDLCKQSRGLEDPELLARETVFSVSEIEALYELFKKISSAVIDDGLINKEEFQLALFKTNKKESLFADRVFDLFDTKHNGILGFEK

SEQ ID NO: 67258 - protein, 222 aa, Gossypium hirsutum
  unsure (1)..(222): unsure at all Xaa locations
  Clone ID: GOSHI-09MAY01-C5243_2.pep
MLQCVAGVKHLFASVLQCCDIDLYKQSRGLGDPELLARETVFSVSEIEALYELFKKISSAVIDDGLINKEEFQLALFKTNKKESLFADRVFDLFDTKHNGILGFEEFARALSVFHPNAPIDDKIEFSFQLYDLKQQGFIERQEVKQMVVATLAESGMNLSDDVIXKTFEEADTKHDGRIDKEEWRSLVLRHPSLLKNMTLQYLKDITTTFPSFVFHSQVDDT

SEQ ID NO: 67259 - protein, 227 aa, Gossypium hirsutum
  unsure (1)..(227): unsure at all Xaa locations
  Clone ID: GOSHI-09MAY01-C5243_1.pep
MLQCVAGVKRLFASVLQCCDIDLYKQSRGLDDPELLARETVFSVSEIEALYELFKKISSAVIDDGLINKEEFQLALFKTNKKESLFADRVFDLFDTKHNGILGFEEFARALSVFHPNAPIDDKIEFSFQLYDLKQQGFIERQEVXKQMVVATLAESGMNLSDDVIESIIDKTFEEADTKHDGRIDKEEWRSLVLRHPSLLKNMTLQYLKDITTTFPSFVFHSQVDDT

SEQ ID NO: 67260 - protein, 65 aa, Gossypium hirsutum
  unsure (1)..(65): unsure at all Xaa locations
  Clone ID: LIB3828-001-Q1-K6-A8.pep
MLSFGAFQQTFEEADTKHDGRIDKEEWRSLVLRHPSLLKNMTLQYLXDITTTFPSFVFHSQVDDT

SEQ ID NO: 67261 - protein, 55 aa, Gossypium hirsutum
  Clone ID: LIB3135-053-Q1-K1-D9.pep
DIDLYKQSRGLVDPELLAGETVFSVSEIEALYELFKKISSAVIDDGLINKDFVFS

SEQ ID NO: 67262 - protein, 54 aa, Gossypium hirsutum
  unsure (1)..(54): unsure at all Xaa locations
  Clone ID: LIB3135-053-Q1-K1-D3.pep
DIDLYKQSRGVGDPELLAXETVFSVSEIEALYELLKKITQGGLDDGLIDTAWDV

SEQ ID NO: 67263 - protein, 470 aa, Gossypium hirsutum
  unsure (1)..(470): unsure at all Xaa locations
  Clone ID: GOSHI-09MAY01-C5213_1.pep
MLSSMEKSIAELRETFKNGGTKSISWRKSQLKALLQLINQNEDSIFKALDQDLGKSPVESYRDEVGVLKKSVTYTLSCLEKWVAPKKAEVPLLFFPAKAEVMPQPLGVVLIFSSWNFPFTLALDPLIGAISAGNTVLLKPSDLAPACMSFLVETIPKYLDNKAIKVVAGGADIGERLLQLKWDKIFFTGSPRVGRLVMAAAAKHLTPVTLELGGKCPAIVDTLSTTPSKAKVTAKRIVGGKWGPCHRQACIAIDYLLVEEKLASALIELLKKTIKKLYGENIKSLKSISRIVNEHQFQRLVNLLKDPNVADSIVYGGSVDEEKLVIEPTIXLDPPLDSEIMSEEIFGPLLPIITLKNIEESINFINSKSNPLVIYAFTEDETFKKRILSETSSGTVTFNDSMVQFLCDSLPFGGVGQSGFGRYHGKYSFDTFSHEKSILHRGFYPEIEPRYPPWTDFKLLFIKLAYEFDY

SEQ ID NO: 67264 - protein, 121 aa, Gossypium hirsutum
  Clone ID: LIB3120-034-Q1-K1-E10.pep
IQAEGPLLFFPAKAEVMPQPLGVVLIFSSWNFPFTLALDPLIGAISAGNTVLLKPSDLAPACMSFLVETIPKYLDNKAVKVLAGGADIGERLLQLKWDKIFFTGSPRVGRLVMAAAAKHLT

SEQ ID NO: 67265 - protein, 168 aa, Gossypium hirsutum
  Clone ID: GOSHI-09MAY01-C5233_1.pep
MGNYVSCTLATPLIKSGKAARVILPGGEIRQFREPVKAAELMLECPNFFLTNSQSLHIGKRFSALTADEELELGNVFLMFPMKRLNSVITAADMAILFMAANSSAKRISSGKVGGLPETGNVEEEKEKSMGGSRLSLEGVEEFKHRLSVCRSRKPSLETIKEEPVCSR

SEQ ID NO: 67266 - protein, 63 aa, Gossypium hirsutum
  Clone ID: LIB3584-036-P1-K1-A12.pep
TSPTNSLSPSPFHCLSEYSAFYMLNYQKQSSSILPQFTQKSRGTNGLHSLTNLYINFSKIMHQ

SEQ ID NO: 67267 - protein, 61 aa, Gossypium hirsutum
  unsure (1)..(61): unsure at all Xaa locations
  Clone ID: AW186785.1.pep
LSHLLFSFKQAXEGVGAXGIGWRCLQYKMFQSLQSAIILLYRDSKVKKKKKKKKKKKKKKK

SEQ ID NO: 67268 - protein, 152 aa, Gossypium hirsutum
  Clone ID: GOSHI-09MAY01-C6983_1.pep
MAKTLLNKPLITFFFFFFFSFFIQTKQDNPCPYPCFPPPTGTGGGGGGGTVTQTPPASYSPPSQTGAYPPPTGNLPYYYPPPPYGGGNSLYGQPPPDPILPYFPYYYRKPPHQTDDQSAAATVGPGRSLLITTATTNLGVFIILVISSLGNF

SEQ ID NO: 67269 - protein, 84 aa, Gossypium hirsutum
  Clone ID: uC-gsronu33B163a02b2.pep
TRYPMCGHTGPTTNRNRVAPVKIHLHKHLQIVTYHPSKQEYILHLQGTYHITIHHHLMGEVILLWASPLPTLILPNSHTPLETL

SEQ ID NO: 67270 - protein, 112 aa, Gossypium hirsutum
  Clone ID: GOSHI-09MAY01-C6883_1.pep
MDLIEVWDFLDYSFIDENTSPDILLPNYSSGREIVVHEEKEFVDRDCSRKRGRSGSCSRPGTKACREKLRREKLNERFLDLSSTLEPGRPARTDKSAILDDAIRVLTQLRTD

SEQ ID NO: 67271 - protein, 198 aa, Gossypium hirsutum
  unsure (1)..(198): unsure at all Xaa locations
  Clone ID: GOSHI-09MAY01-C106858_1.pep
MEVDSQEQLQRKQSTYLSLDENFEIQKEVYRGQQYSQIYFARLHMMRTLLYSLVPNWKSHLPVCTVLELKEGKECIIFGTLYKHMKLKPCILDEYSKERSVAPLIKPHNFMHQDDYLVLEDESGRVKLGGTKLSTSVYVTGVAVALHGKETSAGAFFXVEDVLEAGLPPQIKRPLKSREDKYVGFVSGLSIGRSSSNP

SEQ ID NO: 67272 - protein, 46 aa, Gossypium hirsutum
  Clone ID: GOSHI-09MAY01-C106808_1.pep
HPLPVSDVGTRYKVLLDLSTCNHLKPRHKHTSHQNITNIVKTIYIK

SEQ ID NO: 67273 - protein, 44 aa, Gossypium hirsutum
  Clone ID: uC-gsflmaxxa060h02b1.pep
FHFNLKLFQTHSRCPLKRAYKPISCFNSTTHIGKHAHSKIASFN

SEQ ID NO: 67274 - protein, 150 aa, Gossypium hirsutum
  Clone ID: GOSHI-09MAY01-C6513_1.pep
MAQLGSSLSAETETLSNVLSLVEAFRAFDSDNDGAINAAELGGILSSLGYNASEQDVRAMMREGDTNKDGLLSMEEFLEMNTKDMELGELANFLRTAFQAFEVEGDDALTAADLYEVMGNLGIDQLSLEDCQSVIASMDADGDGAVSLED

SEQ ID NO: 67275 - protein, 178 aa, Gossypium hirsutum
  Clone ID: GOSHI-09MAY01-C6413_1.pep
MATHASLAPSRIPATTRLPSKTTHSFPSQIQCSSTRLQVTEFSGLRSSSCVTFAKNVRDASFFDVLAAQLTPKSAGVPSPSVRGETVAKLKVAINGFGRIGRNFLRCWHGRKDSPLEVVVVNDSGGVKNASHLLKYDSMLGTFKADVKIVDNETIRVDGKPIKVASNRDHLKLAWAEL

SEQ ID NO: 67276 - protein, 140 aa, Gossypium hirsutum
  Clone ID: GOSHI-09MAY01-C6433_1.pep
HASAHASDEFQKGHSHMGVVVRKCNKTDQPPSSNSSRSPLPEVKVDIDGEKYPQENAVRRKRSLKKWKSFPTSNDSFKSGSRSRKWSKGTDSDILHLNGNPLPQLPEEEEAVGIITMEDVIEELLQEEIFDETDHHYDDS

SEQ ID NO: 67277 - protein, 126 aa, Gossypium hirsutum
  Clone ID: GOSHI-09MAY01-C6423_1.pep
MTGKEAQQPEELPVVFVHRPPSFILPFGDHLRSQFHVLDPYESPEPYDSFLARHAPSIRALMTMGPTLVSAEFLDRLPVLELIVATSAGLDHIDLPACRSRGIVVTNASSAFAEDAADCACWVLID

SEQ ID NO: 67278 - protein, 229 aa, Gossypium hirsutum
  Clone ID: GOSHI-09MAY01-C6613_1.pep
MNLINRLSPKRLFRSNKKDRSIVSKFDPSSYSSGSAVSSSSSSESVSSTLKEHQYPSTATAGFVTPTSVLPQTSGDWSDFPANFYLELCQAFKMLDKDNDGVISRSELEALLGKVARQPPSRDEVSLMLSEVDGDGDGYINLETLMNQVVGPACDEPACEPELRETFDIFDTDHDGKITAEELMAFFKDKIGDERCTLEDCRRMIASVDKNEDGFVCFEDFSRMMELQR

SEQ ID NO: 67279 - protein, 55 aa, Gossypium hirsutum
  Clone ID: uC-gsronu33B039g09b1.pep
WSCSDDHMIMGFYSFVLHKHRVKRCTRFCVNLKFFIFYFFFFFFFCISILYFSFF

SEQ ID NO: 67280 - protein, 296 aa, Gossypium hirsutum
  unsure (1)..(296): unsure at all Xaa locations
  Clone ID: GOSHI-09MAY01-C6603_1.pep
MEAARKFLSLPPSFSTRTQLKNSVSSSPSSSVSMFHEQAAAAAATSIPINSVARHFPTSVLSQEQRDDCRPLPILQYFKEDKAYSGPTDKQQVENGTTLHEXEGLNNFEQQMLQGPDLRQLLSVLELGENPSSSLYMQSVAADTEEIMNVEPSTILALAKNALSASKQALALAEDLKLDLDDSISNSLGSANSFTLPVEEDEAPTVRSTRRLERQSKRRRIPSKFMISETYSSRKTNVRKKASGSYDPNDPLRLFLRGPETTQLLTAKEESELIVQVQDLMRLEKLKSKLQSQFGC

SEQ ID NO: 67281 - protein, 116 aa, Gossypium hirsutum
  Clone ID: GOSHI-09MAY01-C6623_1.pep
MAGLKLICGLVLLCMLVLEPMATTALTCGQVASQTGSCIRYLQRGGNPPAACCNGVRNLNRQARTTRDRQTACRCLQTAARTISGINTKLAAGLPAKCGVKIPYKISPSTNCNRVR

SEQ ID NO: 67282 - protein, 223 aa, Gossypium hirsutum
  Clone ID: GOSHI-09MAY01-C6193_1.pep
MAETASNSAPSTSTTAEAPAPQETKKTTEAPVRWADLEDEASEEPSTSSEDKGAPELGVENLKIDESKKINKFLDEPEDSNIKAVTAGETPYTSAFTFEELNLSPELLKGLYVEMKFEKPSKIQAISLPMILTPPHLDLIAQAHNGSGKTTCFTLGMLSRVDPNLKAPQALCICPTRELAIQNLEVLRKRGKHTVITSECAIQWIVPIIFQLINGHPLSLKLL

SEQ ID NO: 67283 - protein, 47 aa, Gossypium hirsutum
  Clone ID: uC-gsflmaxxa002b07b1.pep
KLLKHFAFVLLENWLFRIWKCLGRWCSILFYHQYVLFYFLSFNFFSS

SEQ ID NO: 67284 - protein, 183 aa, Gossypium hirsutum
  Clone ID: GOSHI-09MAY01-C6133_1.pep
MATVTTQASAAVFRPCASKTRFLTGSSGKLNRDVSFKPVASTSTSSFKVEAKKGEWLPGLPSPAYLNGSLPGDNGFDPLGLAEDPENLRWYVQAELVNGRWAMLGVAGMLLPEVFTKIGIINAPQWYDAGKAEYFASSSTLFVIEFILFHYVEIRRWQDIKNPGCVNQDPIFKQYSLPPHECG

SEQ ID NO: 67285 - protein, 129 aa, Gossypium hirsutum
  Clone ID: LIB3120-009-Q1-K1-E10.pep
AHACGHAFAHASGLPSPAYLNGSLPGDNGFDPLGLAEDPANLRWYVQAELVNGRWAMLGVAGMLMPEVFTKIGIINAPQWYDAGKAEYFASYSTLFAIEFILVHYVEIRTWQDIKNPGCVNQDPIFKQY

SEQ ID NO: 67286 - protein, 64 aa, Gossypium hirsutum
  Clone ID: GOSHI-09MAY01-C6353_2.pep
TLYVYFPPEELIKNANYIATPGKGILAADESTGTIGKRLSSINVENIESNRQALRELLFTSSNA

SEQ ID NO: 67287 - protein, 258 aa, Gossypium hirsutum
  Clone ID: GOSHI-09MAY01-C6353_1.pep
MSAFVGKYAEELIKNAKYIATPGKGILAADESTGTIGKRLSSINVENIESNRQALRELLFTSPNALSCLSGVILFEETLYQKTSDGKPFVEILEENNVIPGIKVDKGTVEIAGTNGETTTQGFDSLGARCQQYYKAGARFAKWRAVLKIGPNEPSELAIQQNAQGLARYAIICQENGLVPIVEPEVLTDGPHDIKKCAAVTETVLAAVYKALNDHHVLLEGTLLKPNMVTPGSDSLKEAPEVIAQYTVTALRRTVPPA

SEQ ID NO: 67288 - protein, 112 aa, Gossypium hirsutum
  Clone ID: GOSHI-09MAY01-C6363_1.pep
MEGKMSWTVADAVDYKGFPADRSKTGGWVPAALVLGIEICERLSTMGIAVNLVTYLVGVLHLPSSTSANVVTDFMGTSFLLCLLGGFLADSFLGRYKTIAIFAAIQTLGTGH

SEQ ID NO: 67289 - protein, 146 aa, Gossypium hirsutum
  Clone ID: GOSHI-09MAY01-C6303_1.pep
MSFRGFSRPNATSGMGVADQTKDTFLELKRKKVYRYVIYRIDEKKREVVVEKTGAPAETYDDFAASLPETDCRYAVYDFDFVTSENCQKSKIFFIAWCPSSSRIRAKMLYATSKDRLRRELDGIHYEIQATDPTEMDLEVVRDRAH

SEQ ID NO: 67290 - protein, 145 aa, Gossypium hirsutum
  Clone ID: GOSHI-09MAY01-C6293_1.pep
MAKDGPNWDGLLKWSIANSDGTRPTRNLSEEDKRWFMEAMQSQTVDVIKRMKEITMVMQTPEQVLEAQGVTAADIEDMLDELQEHVESIDMANDLHSIGGLVPLLGYLKNSHANIRAKAAEVVSTIVQNNPRSQQLERRGLSLCS

SEQ ID NO: 67291 - protein, 139 aa, Gossypium hirsutum
  Clone ID: GOSHI-09MAY01-C6283_1.pep
MAASVMASSVTLKPSFNVEKSGVRGVPSLARSPSSFKVEASGGKKIKTDKPYGINGGMNLRDGLDASGRKGKGKGVYQYVDKYGANVDGYSPIYNTNDWSPSGDVYVGGTTGLAIWAVTLAGILAGGALLVYNTSALAQ

SEQ ID NO: 67292 - protein, 92 aa, Gossypium hirsutum
  unsure (1)..(92): unsure at all Xaa locations
  Clone ID: LIB3165-008-P1-K1-A7.pep
MLKTLVRGGSLLARSPSSFKDEASGGKKIKTDKPYXINGGMSLRDGVDASRRKGKGKGVYQYVDKYGANVDGYSPIYNTNDWSPSGDVYVGG

SEQ ID NO: 67293 - protein, 170 aa, Gossypium hirsutum
  unsure (1)..(170): unsure at all Xaa locations
  Clone ID: GOSHI-09MAY01-C6243_1.pep
MATATMSFNLVGAFRGLSLASSSTSSFMKGEVGSIHKTAVVSFPRKSPFPLTIESAHKKGAGSTKNGRDSKGQRLGVKIYGDQVAKPGAIIVRQHGTKFHPGKNVGLGKDHTIFSLIDGLVKFEKFGPHRKKISVYPRVLQPENPNSYRXRQREYFRMRRDQTKAKKEGI

SEQ ID NO: 67294 - protein, 228 aa, Gossypium hirsutum
  Clone ID: GOSHI-09MAY01-C6273_1.pep
VTLLVDQVKTFKPQLVAVRNESLVNELKEALADMEQKPEVIPGESGVIEVARHPDAVSVVTGIVGCAGLKPTVAAIEAGKDIALANKETLIAGGPFVLPLAHKHKVKILPADSEHSAIFQCIQGLPEGALRRIILTASGGAFRDWPVDKLKEVKVADALKHPNWNMGKKITVDSATLFNKGLEVIEAHYLFGAEYDDIEIVIHPQSIIHSMVETQDSSVLAQLGWPDM

SEQ ID NO: 67295 - protein, 156 aa, Gossypium hirsutum
  Clone ID: GOSHI-09MAY01-C6263_1.pep
MEMIQYNRFTAHLLLLSLILVVPLAVATDVQYCDKQGEYDVKVQGVEISPNPIARGQPATFSIAATTGAAIDGGKLVIEVAYFGWHIHSETHDLCDETSCPVSTGDFVVSHSQVLPGYTPPGPYSLKMKMFDANKRELTCIGFDFSIGFASSVADS

SEQ ID NO: 67296 - protein, 54 aa, Gossypium hirsutum
  Clone ID: LIB3189-023-P1-K1-E8.pep
TSVATAKGTTRINERSKRCAVNRLYWIISIWFRFYRKLKFRYVYKSQFAEILRI

SEQ ID NO: 67297 - protein, 149 aa, Gossypium hirsutum
  Clone ID: GOSHI-09MAY01-C6223_1.pep
MVALGLQATHLIAPQKLPIRKQRTFSNIIIRCSIAEPSGEPASLGQKTKYNDGLFAKAFMGLFARKMEKFAAAPKAGTEPKKGVFDYDYESFVEVSKRVMQGRSRLQQQQVVRQVLLSMLPPGAPVYVYELFAPTKWAAEFNCFTYWTF

SEQ ID NO: 67298 - protein, 92 aa, Gossypium hirsutum
  Clone ID: GOSHI-09MAY01-C7973_1.pep
MAAVSSLSFPAIGQTSGDRKLNVPSARYLASNFEGFRFRTSLLYQSVGLRASTTASPSVFYCMSTATDTPTVSETKSSFLKAYKRSIPSVYN

SEQ ID NO: 67299 - protein, 77 aa, Gossypium hirsutum
  Clone ID: uC-gsflmaxxa046e09b1.pep
FYRSLSIKQRKRNPEGNKDMRDQRWAGEISRRRTRLKSMKELSISQVMIVTVNDNVSDKCFYRKVGNSSPPSLSSVC

SEQ ID NO: 67300 - protein, 62 aa, Gossypium hirsutum
  Clone ID: LIB3165-021-P1-K1-E4.pep
PFEIEMVSCTIPSWTLIGLVRSFLDLTLAYFLLCGSTLGFFAWKFFHVFGFHLPCPLLWVFG

SEQ ID NO: 67301 - protein, 90 aa, Gossypium hirsutum
  Clone ID: GOSHI-09MAY01-C7443_1.pep
MRSPQGFRNGETPSPHNRIPTPHFHNTVTLRKLKRFNSLILVFRVTAFTFSLASSVFMVTNSRGSGSPHWFDYDAFRFVFAANAIVALYS

SEQ ID NO: 67302 - protein, 237 aa, Gossypium hirsutum
  Clone ID: GOSHI-09MAY01-C107748_1.pep
AEAEETLKVLDASLSHIKWRLKSSSKRRLQIDVLAVCTRMRPVVMIDYGGKMPELQENLCAFLEHCRKDSTIFEPLRVMVIEDMIYLIHVKEMAEYVSSSLSLEVEWLFVDLEQDPAKMRTLDDKSLLGMQLISIQKLFSLYFPLEGMRNDLLPPGRAEPMADSKSLSKQIGSQSSVLMDLSSCMHDTEVTVPTVNGWLLGYPIVYLFSKDHIEDAIYNLSTKFLRIYKILVSRTSA

SEQ ID NO: 67303 - protein, 122 aa, Gossypium hirsutum
  Clone ID: GOSHI-09MAY01-C7713_1.pep
MAIHRTARNSGGGVGGAGATIGGFGFTVRLLASAITVAICFFFALSFFFTYHSLSPHLQTNLGFSTDSYGIGSTRRSVLALKSDPLKPRLDQIRKQAGDHRSLVLAYASYARKLKLENSKLV

SEQ ID NO: 67304 - protein, 172 aa, Gossypium hirsutum
  Clone ID: GOSHI-09MAY01-C7723_1.pep
MKILGTSRPLPLPLYNNSPPFSHPHLSPSIFPSTHYSHKFSQSMAACIDISRTTDSSQLSQRPNISQPDEVLYEYGSFCRSTFPNNVSSVPLNKNHTKTIPTRKSVDFSLEEKEEVGALWLKMKEEATLDAEQEPILSNYYYSSIFSHNSFESALAIICYQNRASKSLTVLI

SEQ ID NO: 67305 - protein, 176 aa, Gossypium hirsutum
  unsure (1)..(176): unsure at all Xaa locations
  Clone ID: LIB3828-031-Q6-K6-A5.pep
ISITTDSSQVSQRPNISQPDEVLYKYGSFCRSTFPNNVSSVPLNKNHTKTIPTRKSVDFSXEEKEEVGALWLKMKEEARLDAEQEPILSNYYYSSIFSHNSFESALANHLSIKLGNPSLPSSTLFDIIMAVLVEDQGIMIAIKEDLKAAKERDPACISYVHCFLNFKGFLACQSHR

SEQ ID NO: 67306 - protein, 283 aa, Gossypium hirsutum
  unsure (1)..(283): unsure at all Xaa locations
  Clone ID: GOSHI-09MAY01-C107698_1.pep
GMRPQNFIRELELTNVVEDYPKLRELIQKKDEIVAKSASPPMYMKCDLREFELSPDFFGTKFDVILIDPPWEEYVHRAPGVADHIEYWTFEEIMNLKIEAIADTPSFIFLWVGDGVGLEQGRQCLKKWGFRRCEDICWVKTNKTNATPGLRHDSHSIFQHSKEHCLMGIKGTVRRSTDGHIIHANIDTDVIIAEEPSYGSTQKPEDMYRIIEHFALGRRRLELFGEDHNIRSGWLTVGKGLSSSNFNAKAYVXNFADKDGKLWQGGGXTNPPPHAPHLVKTTS

SEQ ID NO: 67307 - protein, 194 aa, Gossypium hirsutum
  unsure (1)..(194): unsure at all Xaa locations
  Clone ID: GOSHI-09MAY01-C7673_1.pep
STLKKPADKQEINVSTNQGSKSFKQKREEERKASEAGGDTKAWNSLFMRPDTVVENIARKYGVSKSELLDREADDLAVRIALGEAQVMSETKKALTNAGVNISSLEEIAAGKMDGKKRSNHVLVVKNLPYRSSEGELPXMFGKFGSLDKIILPPTKTWALVVFLXPPEARAPFKGVAYKRFKDAXLYLEWASDN

SEQ ID NO: 67308 - protein, 136 aa, Gossypium hirsutum
  Clone ID: LIB3583-044-Q6-K1-A7.pep
PRVRLLHVMPEELTEPADKQEINVSTNQGSKSFKQNREDERKAYAAGVDTKAWNSIFMHPDTVVENIARKYGVSQSELLDREADDLAVRIALGETQVISETKKALTNSGVNISSLEEITAGKMDGKKRSYHVLVIK

SEQ ID NO: 67309 - protein, 86 aa, Gossypium hirsutum
  Clone ID: GOSHI-09MAY01-C7663_1.pep
QRRRLSIRSSGDVSSVTPTTETESEKSIDEAPKGPPSLISALNVERALRGIAITDAHHYGRLGLQRGCAYEQVTVAYRNLVDELLN

SEQ ID NO: 67310 - protein, 112 aa, Gossypium hirsutum
  Clone ID: GOSHI-09MAY01-C7613_1.pep
MDQGLLDDIINRLLEVRGRPGKQVQLSESEIRQLCLVSKEIFLQQPNLLELEAPIKICGDIHGQYSDLLALVAYGGLPPDANYLFLGDYVDRGKQSLETICLLLAYKINTLK

SEQ ID NO: 67311 - protein, 167 aa, Gossypium hirsutum
  Clone ID: GOSHI-09MAY01-C7153_1.pep
MNHRLGDLPRLPYPNFYYALEDLLESYAPSLTYSVHRSSIIIGASSRSVYNALLTSAVYALICRYEGLPFRYPGSRYTWEHFCDMSDARVLAKQHIWAAVTPSAKNQAFNCTNGDMFTWKSLWKKLCDIFDLEFIPSEELENFDFVELMKEKSKVWDEIMEMHGLFK

SEQ ID NO: 67312 - protein, 145 aa, Gossypium hirsutum
  Clone ID: GOSHI-09MAY01-C107178_1.pep
MGGCFPCFGSSNKEANNNNNNGGTTVKELSKKDSTKDSSVPQSQHVNRDKSKSRNGSDSKRELPVVPKDGPMANIAAQTFTFRELAAATKNFRPECLLGEGGFGRVYKGRLESTGQVVAVKQLDRNGLQGNREFLVEVLMLSLLH

SEQ ID NO: 67313 - protein, 239 aa, Gossypium hirsutum
  Clone ID: GOSHI-09MAY01-C7123_1.pep
PRVRQEYIKGISAWNFNLEDLKSQAALIQDDDDAPNAEDQDGSRKQRDRHDVVGLSAERISPEMPSNSIAASSQEDGLSDLHELESSLASFPIKPLQALKGCFDIGEAEGTNGPNWKGVTQLESEQLITKSSRAMDQDAGRNEGENSGQSSSSTRQVVPEHKKFLSGSLIPDSAFSPNKFTGDGDRDFPQPKFPSERNYSGPLLYRQRRETNNPSSEDSSEGAVVQRGRFKVTSADLSP

SEQ ID NO: 67314 - protein, 238 aa, Gossypium hirsutum
  Clone ID: GOSHI-09MAY01-C7003_1.pep
MALPTHQLQRFLAIEFNFISNPKIAYRNQLTATTAVRSSPRSPCRCSAIAINAPSSLTDVSGIRWGSTSVQGRREEMEDDLVIRSDGLDGFSFAAVFDGHGGVASVKYLRDELYKECVTALQGGILLNEGDFNAIKKGLAEAFQNADKKLLNWLEKIGDGDDESGSTATVMLIGNEVLFISHVGDSCVVLSCAGKVQVLTDSHRPYGSNKASLQEIRRIREASGWISNGRICGETHSC

SEQ ID NO: 67315 - protein, 215 aa, Gossypium hirsutum
  unsure (1)..(215): unsure at all Xaa locations
  Clone ID: GOSHI-09MAY01-C7393_1.pep
MSKVYDWFEERLEIQAIADDITSKYVPPHVNIFYCLGGITLTCFLVQVATGFAMTFYYRPTVTEAFASVQYIMTEANFGWLIRSVHRWSASMMVLMMILHVFRVYLTGGFKKPRELTWVTGVVLGVLTASFGVTGYSLPWDQIGYWAVKIVTGVPEAIPVIRSPLVDILRGIAXVGQFTLTRFYSLHTFVLPLLTAVFMLMHFLMIRKQGISGPL

SEQ ID NO: 67316 - protein, 170 aa, Gossypium hirsutum
  Clone ID: GOSHI-09MAY01-C7383_1.pep
GNNCRTDPCGFLRTMAGYGYAYRGGYTTYNGGVAPRGGTEGWNKTSYSSDHTCQPVFIDAEGRRKPITSYTGPHGSTEYYVTKTEIVEVPYMAEFKQRAPVRVEVVRDHGEGKLMTRPLSPGEWRESSSPVRYHTEEKWNKPSSPVQYDVEEKWNKPSSLCSVPARGEME

SEQ ID NO: 67317 - protein, 170 aa, Gossypium hirsutum
  Clone ID: GOSHI-09MAY01-C7353_1.pep
MAAGLSAAVPLKPFLSFHPSPKQRLVFNPLLRLPQLTHGARKETRLSICFVLEEQNDVEPQTLVNLVEEGSGSEDFGNKQILIPPHVAEKLARKKSERFTYLVAAVMSSFGITSMAIMAGYYRSSWRPEGGDVPPAETLGTFALSVGAAVSMEFWARWAHRALWHASLWH

SEQ ID NO: 67318 - protein, 233 aa, Gossypium hirsutum
  Clone ID: GOSHI-09MAY01-C7333_1.pep
MSCFLQAPVAHTILSSASSCRTVRRTKALKLRCGALGAKNAAKIPMPPINPKDPFLSKLASVASSSPEALHNGSANPDTPPFLDLFESPKLMATPAQVERSVSYNEHRPRSPPPDLPSLLLNGRIVYIGMPLVPAVTELVVAELMYLQWMDPKQPIYLYINSTGTTRDDGETVGMETEGFAIYDALMQLQNEIHTVAVGAAIGQACLLLSAGNKGKRFMMPHAKAMIQQPPVP

SEQ ID NO: 67319 - protein, 254 aa, Gossypium hirsutum
  unsure (1)..(254): unsure at all Xaa locations
  Clone ID: GOSHI-09MAY01-C7293_1.pep
MADSATASSPLKVIAGADSFGAELKDAMVSHLRSLNIEVEDLGITSYYNIGAEVGRRVSSATTSPSLETRGLLACGTGVGVGIFANKFPGVFATTCLTPDEARNNRSINNCNVLALSGMSTSADTAKEIVDTWLNTPFKALCPASKPQPWPEEISNFFDESMNEMPKIGASENTQAETCAVCCLVKNRELNPIDIIPGGSMKILRESPTSAIIKFKAGSVXTAHHHTFGHCLLVMKGKKSVWNLSKNERYDLGD

SEQ ID NO: 67320 - protein, 110 aa, Gossypium hirsutum
  Clone ID: GOSHI-09MAY01-C7253_1.pep
SGFYMGANINMANFSTSAVLTAVNHSPGCPDQSHPATRPISASWSQIVLGESEPLAGVPLSPSSSSSSSTAVIEPPVPTAVEGEGVDNVSAGPNSNAGKRLAWNKPSDGA

SEQ ID NO: 67321 - protein, 96 aa, Gossypium hirsutum
  Clone ID: GOSHI-09MAY01-C7213_1.pep
EDRFYKANRAHTYLGDPSNESEIFPNMLKFAEACGIPAARVTKKEDLKAAIQKMLDTPGPYLLDVIVPHQEHVLPMIPSGGAFKDVITEGDGRTQY

SEQ ID NO: 67322 - protein, 93 aa, Gossypium hirsutum
  unsure (1)..(93): unsure at all Xaa locations
  Clone ID: GOSHI-09MAY01-C7233_1.pep
MASVGMVPASGLRESSTAGVEKLPEEMNDMXIRDGKEMGGTSRGXGTGPEPGHLIGATYGGXNGQPNQPISSMADRGVGHGSLEVVFQAKGLE

SEQ ID NO: 67323 - protein, 81 aa, Gossypium hirsutum
  Clone ID: GOSHI-09MAY01-C100368_1.pep
TIRKQQTLGYPFAPQSPFVPRRHAKHDPRPAHREPHVHAPFHVFTTCDLSKRIARTCLYLAIKPSSFDCKGGPFFFCLRRE

SEQ ID NO: 67324 - protein, 130 aa, Gossypium hirsutum
  Clone ID: GOSHI-09MAY01-C100278_1.pep
MGENQRSNNDNGGQEVGRSGKNKMSKESKKSSVQEQSSIVSTPRPDGNNEERESNKGGRDPKEVATSQNLFLKRKQQREAVDAILFSGLIPSKKSEQSSKKLHQERSIVPPSVASGSFKPPKKRKGPPNS

SEQ ID NO: 67325 - protein, 90 aa, Gossypium hirsutum
  unsure (1)..(90): unsure at all Xaa locations
  Clone ID: GOSHI-09MAY01-C101928_1.pep
SGSFQELSASDLLALFYTSIFGSAISYGVFFYSATXGSLTKLSSLTFLTPMFASIFGFLYFGETFSPLQLVGAIVPIVAIYMVNFRGKPS

SEQ ID NO: 67326 - protein, 204 aa, Gossypium hirsutum
  Clone ID: LIB3582-062-P1-K1-C9.pep
PTRPPTRPPTRPRELIMFLHCGVNTWGDSERGTGKENPSIFNPAGLDTKQWVTVAAEAGISLMILTAKHHDGFCLWPSKYTDHSVISSPWRNGHGDVVQEFIDAVKTHGGGGIDAGLYLSPWDRHDKRYGHDLQYNEYYLAQLQELLTKYGSVKEIWFDGFKGNKARNMSYYFSDWFAMVRELQSSINIFSDAGPDVRWVGNEK

SEQ ID NO: 67327 - protein, 129 aa, Gossypium hirsutum
  Clone ID: uC-gsflnu33B060a08b1.pep
MITFLELTKLSIYRPEQAPTPPLPVLPLPTFSQLKWQRRELIVVLHFGDNTFTDSERGTGEENPSIFNPGGLDTKQWVTVSAEAGISLMILTAKHHDGFCLWPSKYTHHSVISSSWRNGHGDGVQEFID

SEQ ID NO: 67328 - protein, 238 aa, Gossypium hirsutum
  Clone ID: GOSHI-09MAY01-C1593_1.pep
IFVSNVSADLDPEKLLEFFKQYGEVEEGPLGLDKQTGKPKGFALFVYRSVESARKALEEPHKNFEGHVLHCQRAIDGPKSTKGGYGGGTSGGHHQQYQQHQHQQGHQIQSHFHHAKKGKYSSGGSETGHLMAPSGPTAVGFNPGVAAGGFNPAAAAPALNPALGQALTALLAGQGGLGLGNLLGGLSGAPVNQGTPAAGYGNQVAGGYGVQGGYQNPQMGQGGAGRNQPGSGAPYMGH

SEQ ID NO: 67329 - protein, 131 aa, Gossypium hirsutum
  Clone ID: LIB3828-024-Q6-K6-A7.pep
MCQTEQEDRGSAKEFADKYSITCSTADATSIPDWMADSINGGALQQVDLNNGTNGWSSPPGDLFYLRSQSYLTKRQKCPAGDYLLSPIGMDWLKSDSKLDNVLARPDNRVSNALRKAQSDGQSMKSFIFRR

SEQ ID NO: 67330 - protein, 132 aa, Gossypium hirsutum
  unsure (1)..(132): unsure at all Xaa locations
  Clone ID: LIB3828-030-Q6-K6-D7.pep
MCQTEQKDRGSAKEFADKYSITCSTADATSIPDWMVDSINGGALQQVDLNNGTNGWSSPPGDLFYLRSQSYLTKRQKCPAGDYLLSPIGMDWLKSDSKLDNVLARPDNRVSNALRKAQSDGQSMKSXIFAVN

SEQ ID NO: 67331 - protein, 304 aa, Gossypium hirsutum
  Clone ID: GOSHI-09MAY01-C1543_2.pep
MSATSASSLILPSLKPKVLSLSDSTPNSLSLFSLSPTPHAKPLFCSALPSFQLLTKKSSFSSGFLTNVAVSSEYDQEEDLFGSDDEERSPTFSPDLKLFVGNLPFTVDSAQLAGLFENAGPRVRVEVIYDKVTRRSRGFGFVTMSTIEEVEAATQQFNGYELEGRALRVNSGPPPPRREEFSPRGARGGPSMGARGGPPMGARGGPPMGARGGPPMGASNRVYVGNRAWGVDDMALETLFSEQGRVVEAKVVYDRESGRSRGFGFVTYRSADEVNSAIKSLNGCDLDGRPIRVTVAESRPRRQF

SEQ ID NO: 67332 - protein, 273 aa, Gossypium hirsutum
  unsure (1)..(273): unsure at all Xaa locations
  Clone ID: GOSHI-09MAY01-C1543_1.pep
SLILPSLKPKTISLPNPTPISLSPFSLSHRLHAKPLFSSALQSFTLLTKKSSSFPSNFVRNVSVSSEYGQEEGLFGSDDEEATSFSPDLKLFVGNLPFSVDSAQLAGLFGSAGNVQMVEVIYDKVTGRSRGFGFVTMSTTEEVEAAAQQFNGYEXLEGRALRVNSGPPPPRREEFSPRARGGSTMGASNRVYVGNLSWGVDDLALETLFSEQGKVVEAKVVYDRESGRSRGFGFVTYNSSEEVDGAVKTFNGVELDGRPIRVSVAESRPRRQF

SEQ ID NO: 67333 - protein, 43 aa, Gossypium hirsutum
  Clone ID: LIB3149-019-Q1-K1-D8.pep
GFGFVTYNSSEEVDSAVKTFNGVELDGRPIRVSVAESRPRRQF

SEQ ID NO: 67334 - protein, 124 aa, Gossypium hirsutum
  Clone ID: LIB3493-015-P1-M1-E10.pep
DAWVGFVTMCTIEEVEAATQQFNGYELEGRALRVNSGPPPPRREEFSPRGARGGPSMGARGGPPMGASNRVYVGNLSWGVDDTALETLFSEQGRVVEAKVDYDRESGGSRGLGFATYSCADEVN

SEQ ID NO: 67335 - protein, 68 aa, Gossypium hirsutum
  Clone ID: LIB3135-036-Q1-K1-D9.pep
ASEIFGHLIGLSYFYISSMAYRIIDVQFSKLNFYSGMCCLYVFYWIAFLSDTLRTALYVPRNLQTCKL

SEQ ID NO: 67336 - protein, 92 aa, Gossypium hirsutum
  Clone ID: GOSHI-09MAY01-C101528_1.pep
YPCLFYTVFWVKKKPPFTMLSFGFYSLIQYFLQISISFLAMFVSFLLLFFLLLQVFVRMMASTLTLIRAPISARFRTRVMALMGATGMARFE

SEQ ID NO: 67337 - protein, 411 aa, Gossypium hirsutum
  Clone ID: GOSHI-09MAY01-C1503_1.pep
MARTMAMAIPSLPLLFLFTFLLLLPLLISSSPVQDPELVVQDVHRAINASRRNLGYLSCGTGNPIDDCWRCDPNWETNRQKLADCAIGFGKNAIGGRDGKIYVVTDSGDDDPVNPKPGTLRHAVIQDEPLWIIFARDMTIQLKEELIMNSFKTIDGRGASVHIAGGPCITVQYVTNIIIHGLNIHDCKQGGNAMVRDSPRHYGWRTISDGDGVSIFGGSHVWVDHNSLSNCKDGLIDAIHGSTAITISNNYMTHHDKVMLLGHSDSYTQDKNMQVTIAFNHFGEGLVQRMPRCRHGYFHVVNNDYTHWEMYAIGGSANPTINSQGNRFTAPNNRFSKEVTKHEDAPESEWKSWNWRSEGDLMVNGAFFIASGAGASSSYAKASSLGARPSSLVATITTNAGALNCKKGSRC

SEQ ID NO: 67338 - protein, 132 aa, Gossypium hirsutum
  unsure (1)..(132): unsure at all Xaa locations
  Clone ID: LIB3189-017-P1-K1-E8.pep
VDACARDMTIFFKEELIMYSFKTIDGRGASVHIAGGPCITVQYETNFIIHGLNIHDCXQGGYAMVRASPRHFGWWFISYGVGAAFSVDFLCYDGLYLIFFFNIFFFTPFFFLSTFFLHTFLLPRSCFLNNFF

SEQ ID NO: 67339 - protein, 86 aa, Gossypium hirsutum
  unsure (1)..(86): unsure at all Xaa locations
  Clone ID: AI730910.1.pep
LGSSPFFVCVCASCRKHEDAPESEWKSWNWRSEVDXMXNGAFFXSSGAAPSSSYAKASSLGXRPFSLVATITTNAGALNCKKGSRC

SEQ ID NO: 67340 - protein, 150 aa, Gossypium hirsutum
  unsure (1)..(150): unsure at all Xaa locations
  Clone ID: AI054616.1.pep
WTLRPLNPSGCRLIMHSFKTIDGRGASVHIAGGPCITVQYVTNIIIHGLNIHDCKQGGNAMVRDSPRHYGWRTISDGDGVSIFGGSHVWVDHNFLSFCIYXSIDAIHGCTDITIFFNYLTNHXKLCXLGHIDSYTYYNNLHFSIAFNSLW

SEQ ID NO: 67341 - protein, 103 aa, Gossypium hirsutum
  Clone ID: LIB3197-049-Q1-M1-E1.pep
MAWTMAMAIPSLPLLFLFTFLLLLPLLISSSPVQDPELVVQDVHSAINASRRNLLFLSCCTGNPIDDCWRCDPYCETYLPKLSFCSIFFPSLLLVNFLFKFIF

SEQ ID NO: 67342 - protein, 142 aa, Gossypium hirsutum
  unsure (1)..(142): unsure at all Xaa locations
  Clone ID: LIB3585-024-P1-K1-G4.pep
RTRGRTRGIQYVTNIIIHGLNIHDCKQGGNAMVRDSPRHYGWRTISDGDGVSIFGGSHVWVDHNSSSNCNDGLADAIHGSTAITISNNYMTHHDKVMLLLHSDSYTQDXNMQVTIAYNHLGEGLVQRLPRCRHGYFHVVNND

SEQ ID NO: 67343 - protein, 75 aa, Gossypium hirsutum
  Clone ID: LIB3272-022-P1-K1-D6.pep
MQVTKHEDAPESDWKSWNWRSEGDLMVNGAFFTASGAGASSSYSKASSLGARPSSLVATITTNAGSLNCKKGSRC

SEQ ID NO: 67344 - protein, 119 aa, Gossypium hirsutum
  Clone ID: LIB3120-026-Q1-K1-A6.pep
QRLAHCAIGFGKNAIGGRNGRGYVGTDSSDNDAVNPTPGTLRHAVIQDEPLWIIFARDMTIRVKEELIMNSLKTINGRGASVHIARGACITMHYVTNIIIHGLNIHDCQRGGNAMVRDF

SEQ ID NO: 67345 - protein, 247 aa, Gossypium hirsutum
  unsure (1)..(247): unsure at all Xaa locations
  Clone ID: GOSHI-09MAY01-C1533_2.pep
FSHNRGIAVTSTGLGERKNYYPAPDPHAGTPPSGSHGTPPSSGGGSPPSHGTPSHGGGYHPSPTPSTPSGGNCGTPPHDPSTPSTPSHTPPHGTPPSSGGGSPPSYGGGSPPSYGGGSPPSYGGGSPPSYGGGSPPSYGGGSPPTTPIDPGTPSIPSPPFFPAPTPPIGGTCQFWKNPPPXNWVLLVCWAPLGNPFGLNQPLEFGPTINLPQALSNXTLSDELGALYREEYPPFPTPWVNSRFPFPD

SEQ ID NO: 67346 - protein, 302 aa, Gossypium hirsutum
  Clone ID: GOSHI-09MAY01-C1533_1.pep
MERQRSKQVCLLMWVLVAAFFSHNRVIAVTSTGLGEQKNYYPAPDPHAGTPPSGSHGTPPSSGGGSPPSHGTPSHGGGYHPSPTPSTPSGGNCGTPPHDPSTPSTPSHTPPHGTPPSSGGGSPPSYGGGSPPSYGGGSPPSYGGGSPPSYGGGSPPSYGGGSPPTTPIDPGTPSIPSPPFFPAPTPPIGGTCDFWRSHPTLIWGLLGWWGTVGNAFGVTNAPGLGTSMSLPQALSNTRTDGLGALYREGTASFLNSMVNNRFPFSTKQVRETFVAALGSNSAAAAQARLFKLANEGHLKPRT

SEQ ID NO: 67347 - protein, 135 aa, Gossypium hirsutum
  unsure (1)..(135): unsure at all Xaa locations
  Clone ID: AI726085.1.pep
SNIYSIHRWRGKASKHVCLLMWVLVAAFFSHNTVIALTSTGLGEHKNYYPAPDPHAGTPPSGSHGTPPSPRGGSPPSHGTPSHGGGYHPSPTPSTPSGGNCGIPPYDPSTPXHHPYTPPHGTPPPSGRGIPPPYG

SEQ ID NO: 67348 - protein, 150 aa, Gossypium hirsutum
  Clone ID: LIB3493-006-P1-M1-C2.pep
APDPHAGTPPSGSHGTPPSSGGGSPPSHGTPSHGGGYHPSPTPSTPSGGNCGTPPHDPSTPSTPSHTPSHGTPPSSGGGSPPSYGGGSPPSYGGGSPPSYGGGSPPSYGGGSPPTTPIDPGTPSIPSPPFFPAPTPPIGGTCDFWRSHPT

SEQ ID NO: 67349 - protein, 219 aa, Gossypium hirsutum
  Clone ID: GOSHI-09MAY01-C1493_1.pep
MAVTFSNLHTESGLKALNDFLSGKSYISGNKLTKDDIKVYAAVLKNPGDSFPNVSQWYNSVSSQLAASFPGKAVGVGFGGKAAPAESAKAEAADDEDDLDLFGDETEEDKKAAEEREAAKKSAKKKESGKSSVLMDVKPWDDETDMKKLEEAVRSVEMPGLLWGASKLVAVGYGIKKLQIMLTIVDDLVSVDTLIEECLTTEPRNEYIQSCDIVAFNKI

SEQ ID NO: 67350 - protein, 108 aa, Gossypium hirsutum
  Clone ID: uC-gsronu33B114g12b1.pep
SVMQVRPQQRDQVMFKIALGSQDHSSKANIREEHKKESKMDQAQSPSSDSGIDAGLNRGITAEEISSESSYQDVPYREGSSPESDKQLLWYDTDMDEHDKIKMLFLDS

SEQ ID NO: 67351 - protein, 145 aa, Gossypium hirsutum
  Clone ID: LIB3582-054-P1-K1-C8.pep
MDEHDKIKEDMKAKTNAVLPVLEARSAEEIYLAFKQLHEGVDIEEVTVLSMIEKPPDHGGNKSKLPVFEARSLEDIHKAVRSVEMPGLLWGASKLVAVGYGIKKLQIMLTIVDDLVSVDTLIEECLTTEPRNEYIQSCDIVAFNK

SEQ ID NO: 67352 - protein, 74 aa, Gossypium hirsutum
  Clone ID: uC-gsflnu33B083h02b1.pep
NILKYLKILFIYAHYRAEALESPVKQNIYIEGKQGAKGDNMANGTLDCCTKKLSPLIVGEATRVGWVGNSGPVR

SEQ ID NO: 67353 - protein, 61 aa, Gossypium hirsutum
  Clone ID: GOSHI-09MAY01-C101478_1.pep
TLIVLTCHLQFIVKENKKRSILELILVGRIYRALCSSHHLLMKYWDLMTIHLFSLVFLNKH

SEQ ID NO: 67354 - protein, 83 aa, Gossypium hirsutum
  Clone ID: GOSHI-09MAY01-C1443_4.pep
MKGNGSISGKDLIFRGDQIDLKSLDMQLEKHLSRVWSRNIEKQRPAEEWQIDLAKSHLRNVIAHGTYGTVYRATYDNQNVAGT

SEQ ID NO: 67355 - protein, 117 aa, Gossypium hirsutum
  Clone ID: GOSHI-09MAY01-C1443_3.pep
DQLNVGKNFADLRALPRSIGNLEMLEELDISDNQIRVLPDSFRLLSKLRVFRADETPLEVPPREVIKLGAQAVVEFMADLVAKRDTKAAPPKKEKGFWFRICSICWPFRTANTDDNM

SEQ ID NO: 67356 - protein, 84 aa, Gossypium hirsutum
  unsure (1)..(84): unsure at all Xaa locations
  Clone ID: GOSHI-09MAY01-C1443_2.pep
MKGNGSISGKNMIFRADQFDLKSLDMQLEKHLSXVWSRNIEKQRPAEEWEIDLAKLDLRNVIAHGTYGTVYRATYDNQDVAGCC

SEQ ID NO: 67357 - protein, 73 aa, Gossypium hirsutum
  Clone ID: LIB3543-020-Q1-K1-B2.pep
KHTHTHLVVRICGRDGLTNRANLEPKTFLLLWWCCLGIPLGNEISHELNNSLCYSDLGVSVGYRYVSDLVKPF

SEQ ID NO: 67358 - protein, 73 aa, Gossypium hirsutum
  unsure (1)..(73): unsure at all Xaa locations
  Clone ID: LIB3585-024-P1-K1-B12.pep
DQLNVGKNFADLRALPRSIRNLEMLEELNISDNXIRVLPNCFRLLLKLRVFXADETPLGSSPREVIKMGAXAX

SEQ ID NO: 67359 - protein, 93 aa, Gossypium hirsutum
  Clone ID: GOSHI-09MAY01-C101458_1.pep
AGYRRVYRRSLSEEDYEGVDLGSRISFDIPDHVPNMCNECKKPNGNCGVGLKCICHANDCKDKVLSAATSLDTGISFLFPLFSIIVQMNFRMI

SEQ ID NO: 67360 - protein, 270 aa, Gossypium hirsutum
  Clone ID: GOSHI-09MAY01-C1413_2.pep
KSLRVLGSVGEPINPSAWRWFFNVVGGSRCPRAGAPWRTETGGFMITPLPGAWPQKPGSATFPFFGVQPVIVDEKGTEIDGECSGYLCVKGSWPGAFRTLYGDHERYETTYFRPFPGYYFTGDGCSRDKDGYHWLTGRVDDVINVSGHRIGTAHVESALVSHPQCAEAAVVGVEHQVKGQGIYAFVTPVEGFSYSEELRKSLILTVRTQIGAFAAPDKIHWAPALPKTRSGKIMRRILRKIAARQLDELGDTSTLADPGVVDQLIKLADT

SEQ ID NO: 67361 - protein, 55 aa, Gossypium hirsutum
  Clone ID: LIB3543-008-Q1-K6-F1.pep
ICPYAATHRNNSNLSSHGEYKALSEFFTVRNAFHWSYKGVYALPFNLSGRWADAG

SEQ ID NO: 67362 - protein, 135 aa, Gossypium hirsutum
  Clone ID: LIB3585-023-P1-K1-G11.pep
MIFQLLICFSHLNWQITPLPGAWPQKPGSATFPFFGVQPVIVDEKGVELDGECSGYLCVKSSWPGAFRTLYGDHERYETTYFKPFPGYYFTGDGCSRDKDGYHWLTGRVDDVINVSGHRIGTAEVESALVSHPQC

SEQ ID NO: 67363 - protein, 404 aa, Gossypium hirsutum
  Clone ID: GOSHI-09MAY01-C1433_2.pep
MEYRSRSIHKSTSIMISAILFLSLIHTSHCFYLPGVAPEDFQKGDPLKVKVNKLTSIKTQLPYSYYSLPFCPPKKIVDSAENLGEVLRGDRIENSPYVFKMREPQMCSVLCRITLDAKAAKQFQEKIDDEYRVNMILDNLPLVVPIRRLDQGSPTVYQLGYHVGLKGQYTGSKEERFFIHNHLAFTVKYHRDPQTDSARIVGFEVKPYSIKHEYEGKWSENTRLTTCDPHTKHTVVNSNTPQEVEANKEIIFTYDVEYQESDVKWASRWDAYLLMSDDQIHWFSIVNSLMIVLFLSGMVAMIMLRTLYRDISKYNELETQEEAQEETGWKLVHGDVFRPPSNSDLLCVYVGTGVQFLGMVLVTMIFAVFGFLSPSNRGGLMTAMLLLWVFMGIFAGYASSRLYK

SEQ ID NO: 67364 - protein, 370 aa, Gossypium hirsutum
  Clone ID: GOSHI-09MAY01-C1433_1.pep
HASDQIHWFSIVNSLMIVLFLSGMVAMIMLRTLYRDISRYNELETQEEAQEETGWKLVHGDVFRPPSNSDLLCVYVGTGVQFLGMVLVTMIFAVFGFLSPSNRGGLMTAMLLLWVFMGIFAGYASARLYKMFKGAEWKKLAFRTACMFPGIVFAIFFVLNAIIWGQKSSGAVPFGTMFALVLMWFGISVPLVFVGGYIGFKKPAIEDPVKTNKIPRQIPEQAWYMNPTFSILIGGILPFGAVFIELFFILTSIWLNQFYYIFGFLFLVFIILLITCAEITIVLCYFQLCSEDYLWWWRSYLTSGSSALYLFLYATFYFFTKLEITKLVSGLLYFGYMLIASYAFFVLTGTIGFYACFWFTRLIYSSVKID

SEQ ID NO: 67365 - protein, 74 aa, Gossypium hirsutum
  unsure (1)..(74): unsure at all Xaa locations
  Clone ID: LIB3585-051-P1-K1-F1.pep
WRSYLTSGSSALYLFLYATWXVFTKLEITKLVSGLLYFGYMLIASYAFFVLTGTIGFYACFWFTRLIYSSVKID

SEQ ID NO: 67366 - protein, 45 aa, Gossypium hirsutum
  Clone ID: LIB3165-051-Q1-K1-A5.pep
KLVSGLLYFGYMLIASYAFFVLTGTIGFYACFWFTRLIYSSVKID

SEQ ID NO: 67367 - protein, 78 aa, Gossypium hirsutum
  unsure (1)..(78): unsure at all Xaa locations
  Clone ID: LIB3083-013-Q1-L1-H1.pep
VNSLIIVLFLSGMVAFIILRTLYRDISRYNXLETHEESQEETLIEASSCLFLHIFIKFLSIFFFFLHFYFNFYSYFIL

SEQ ID NO: 67368 - protein, 527 aa, Gossypium hirsutum
  Clone ID: GOSHI-09MAY01-C1423_1.pep
MPRFFNPFLLSLFFCVLGLGFGVDFGQAFKVPFRVSDVLPVLPRQVSWPVLNTLHSAVDLLPAFVGSVTPNNGSIDWKGACFHGNEARLEFTNSDRDDSGLGGGVLHLTTSEAHSWTCMDLYVFATPYRITWDYYFSAREHTLKFDSWEEAAELEYVKEHGISVFLMPSGMLGTLLSLVDVLPLFSNTVWGQKANLAFLKTHMGASFEKRPKPWRTVVNPEDVHSGDFLAVSKIRGRWGGFETLEKWVTGAFAGHTAVCLKDDMGNLWVAESGHENEKGEEIIVVIPWDEWWELSLKDNSNPQIALLSLHPDIRAKLNSTAAWEYARSMSGKPYGYHNMIFSWIDTVADNYPPPLDAHLVISVMSMWTRVQPAYAANMWNEALNKRLGTEDLDLYGILEETERRGITFDQLLTIPEQDEWVYSDGKSTTCVAFILEMYKEAGVFGPLSNSIQVTEFTIRDAYMLKIFENNQTNLPSWCNNGDGRLPFCQILGEYWMELPFYNSLEPYANMNENCPSLPPIYDRPTRC

SEQ ID NO: 67369 - protein, 169 aa, Gossypium hirsutum
  unsure (1)..(169): unsure at all Xaa locations
  Clone ID: LIB3582-048-P1-K1-D6.pep
GNTHAYAELLQSLFLFYLHYGVVKSGISLPIVQAKVRNYQFATPDHDDQSKKQKRITVIWNKLELAGIPQRCVILNAKEAKDEYICAVHSKNHVNLIRNISSKEYSKRNRIASKLNSIYXNEGSSESAYLAAGSVIEVAEKVAKGELNSAFAIVRPPGHHAEYDEAMGF

SEQ ID NO: 67370 - protein, 160 aa, Gossypium hirsutum
  Clone ID: LIB3582-048-P1-K1-D11.pep
MNDAKNERRVGLIYDQRMCKHRTPYGDDHPEKPDRITVIWNKLELAGIPQRCVILNAKEAKDEYICAVHSKNHVNLIRNISSKEYSKRNRIASKLNSIYLNEGSSESAYLAAGSVIEVAEKVAKGELNSAFAIVRPPGHHAEYDEAMGFCLFNNIAIAAS

SEQ ID NO: 67371 - protein, 472 aa, Gossypium hirsutum
  unsure (1)..(472): unsure at all Xaa locations
  Clone ID: GOSHI-09MAY01-C1743_1.pep
RPLLISVEMSRKGLMEQDLSKLDVTKLHPLSPEVISRQATINIGTIGHVAHGKSTVVKAISGVQTVXFKNELERNITIKLGYANAKIYKCEDERCPRPMRFKAYGSGKEDSPLCDVPGFENCRMKLLRHVSFVDCPGHDILMATMLNGAAIMDGALLLIAANESCPQPQTSEHLAAVEIMRLQHIIILQNKGDRIQENVAINQHEAIQKFIQGTVADGAPVVPISAQLKYNIDVVCEYIVKKIPIPERNFVSPPNMIVIRSFDVNKPGFEVDEIKGGVAGGSILRGVLKVNQFIEVRPGIVVKDESGNIKCTPIYSRIVSLYAEQNELQYAVPGGLIGVGTTMDPTLTRADRLVGQVLGEVGSLPEVYVELEVNFFLLXRLLGVRTKGSERQGKVSKLAKGEILMLNIGSMSTGARVIAVKNDLAKLQLTSPVCTSKGEKIALSRRVEKHWRLIGWGQIQAGTTIEVPPCPV

SEQ ID NO: 67372 - protein, 119 aa, Gossypium hirsutum
  Clone ID: LIB3083-065-Q1-L1-B3.pep
MSKKGLMEQDLSKLDVTKLHPLSPEVISRQATINIGTIGHVAHGKSTVVKAISGVQTVRFKNELERNITIKLGYANAKIYKCEDERCPRPMCYKAYGSGKEDSPLCDVPGFENCMMKLL

SEQ ID NO: 67373 - protein, 268 aa, Gossypium hirsutum
  Clone ID: GOSHI-09MAY01-C1703_1.pep
VCYYQWPLPGIDQFGVFGICDGHRGVEAAKSASKILPEMLATILSDPVIRERVLSQHDASDVLKDAFLRAEANMNNYYEGCTATVLLVWADADENFYAQCANVGDSACLMNVGGKQIKMTEDHKISSYSERLRMEGMGEPLRDGETRLCGLNLARMLGDKFVKQQDSRFSSEPFISESVHINQTSGAFALLASDGFWDVVTAKKAIQLVAQEREKELMAESEKENLAEKIANVLLNEARTQRTKDNTSIIFLDFDSTSRRISCKVDDP

SEQ ID NO: 67374 - protein, 142 aa, Gossypium hirsutum
  Clone ID: LIB3582-044-P1-K1-C5.pep
PQNECMVPFGVGMISDPMSLRRGGEKLPMEDVCYYQWPLPGIDQFGVFGICDGHGGVEAAKSASKILPEMLATILSDPVIRERVLSQHDASDVLKDAFLRAEANMNNYYEGCTATVLLVWADADENFYAQCANVGDSACLMK

SEQ ID NO: 67375 - protein, 87 aa, Gossypium hirsutum
  Clone ID: GOSHI-09MAY01-C1693_3.pep
MPTYFYARYTSNTKSNQYQKVIFRSKSPGFLSLRLFSCFFYFTLKANKVKRKGSTCAYEPLETISSSLRSKHKRGFRAKNLTFWGGV

SEQ ID NO: 67376 - protein, 83 aa, Gossypium hirsutum
  Clone ID: GOSHI-09MAY01-C1693_2.pep
NNSTPPYKSTIFASFHTQGRAINIKVTTKDMANISIIALLCFIICVSSLLNYAYGAAEENMQYMVVGHVYCDTCRGEFYTILS

SEQ ID NO: 67377 - protein, 96 aa, Gossypium hirsutum
  Clone ID: GOSHI-09MAY01-C1693_1.pep
YDYEQITQKKEESNTKKLNILQRLFPVFIFTPLFSFYFEIYLKNKKRKQKRGLPCELAVVSPSFRRNRGLEGIPRLKWSSFEARGCSSLLIDVDRR

SEQ ID NO: 67378 - protein, 127 aa, Gossypium hirsutum
  unsure (1)..(127): unsure at all Xaa locations
  Clone ID: LIB3582-048-P1-K1-G8.pep
YPSPISPISNSPKSPKTSTLSGTXGHPFLAPQQPLASVPSCTAPYTSRQSPTHASGHHTCERKQKQQRIETKNVCIFLIYFSFFSAIKSQAFDPCKKKRKRTNAYTFLGKIYQQYKKQTISEGDFPI

SEQ ID NO: 67379 - protein, 122 aa, Gossypium hirsutum
  Clone ID: GOSHI-09MAY01-C1643_2.pep
LTEKITELKGLLKELKTDLDRAKKGKPPLKDADGKQKRNLTPEAIEKKIAQTNVKIEKMERDMQTKEDLKTVALGTSKINYLDPRITVAWCKRHEVPIEKIFNKSLLAKFAWAMDVDPDFRF

SEQ ID NO: 67380 - protein, 237 aa, Gossypium hirsutum
  unsure (1)..(237): unsure at all Xaa locations
  Clone ID: GOSHI-09MAY01-C1643_1.pep
DAWAIQYVXTVEVELPVYKAIGQFQTGKSKSDDLFDELDTSKLNAHLKELMPGLTAKVFRTYNASITLDDMLNKETKDGDVAEKVVIYQRANKEGAIICNHQRSISKSHSAQMSRLTEKITELKGLLKELKTDLDRAKKGKPPLKDADGKQKRNLTPEALEKKIAQTNAKIEKMERDMQTKEDLKTVALGTSKINYLDPRITVAWCKRHEVPIEKIFNKSLLAKFAWAMDVDPDFRF

SEQ ID NO: 67381 - protein, 186 aa, Gossypium hirsutum
  unsure (1)..(186): unsure at all Xaa locations
  Clone ID: GOSHI-09MAY01-C1673_4.pep
LSFYLFFLFFLLVLFFWGVTIELQSGLKNYDPQKDKRFSGSVKLPHIPRPKMKICMLGDAQHVEEAEKIGLDYMDVEALKKLNKNKKLVKKLAKKYHXAFLASESVIKQIPRLLGPGLNKACKFPTLKVLLHLGVAVGNVAMEEKQXIFQNVQMSVSCLGSLLLKNWQNVRCLYLKSTMGPSNRIF

SEQ ID NO: 67382 - protein, 148 aa, Gossypium hirsutum
  unsure (1)..(148): unsure at all Xaa locations
  Clone ID: GOSHI-09MAY01-C1673_3.pep
HSFSHAYFHAFGLDYMDGEXVNKLNKNNKLVNKLAKKYHAFLASESVIKQIPPLLGPGLNKAGKFPTLVTHQESLESKVNETKAMVXFQLKKVLCMGVAVGNVAMEEKHVFQNVQMSVNFLVSLLKKNWQNVRCLYLKSTMGPSNRIF

SEQ ID NO: 67383 - protein, 216 aa, Gossypium hirsutum
  Clone ID: GOSHI-09MAY01-C1673_2.pep
MSKLQSDALREAISTIVAQSKEKQRKFTETIELQIGLKNYDPQKDKRFSGSVKLPHIPRPKMKICMLGDAQHVEEAEKIGLDYMDVEALKKLNKNKKLVKKLAKKYHAFLASESVIKQIPRLLGPGLNKAGKFPTLVTHQESLESKVNETKAMVKFQLKKVLCMGVAVGNVAMEEKQIFQNVQMSVNFLVSLLKKNWQNVRCLYLKSTMGPSNRIF

SEQ ID NO: 67384 - protein, 216 aa, Gossypium hirsutum
  Clone ID: GOSHI-09MAY01-C1673_1.pep
MSKLQSDALREAISTIVANSKEKNRKFTETIELQIGLKNYDPQKDKRFSGSVKLPHIPRPKMKICMLGDAQHVEEAEKIGLDYMDVEALKKLNKNKKLVKKLAKKYHAFLASESVIKQIPRLLGPGLNKAGKFPTLVTHQESLESKVNETKAMVKFQLKKVLCMGVAVGNVAMEEKQIFQNVQMSVNFLVSLLKKNWQNVRCLYLKSTMGPSNRIF

SEQ ID NO: 67385 - protein, 86 aa, Gossypium hirsutum
  Clone ID: LIB3272-054-P1-K1-G10.pep
MSKLQSDALREAISTIVAQSKEKQRKFTETIELQIGLKNYDPQKDKRFSGSVKLPHIPRPKMKICMLGDAQHVEEAEKIGLDYMDV

SEQ ID NO: 67386 - protein, 128 aa, Gossypium hirsutum
  Clone ID: LIB3149-024-Q1-K1-G3.pep
SGLVRGKNKNPILINLKRDALKEPFSTMVAKSKGKHRRLIETIELQMGWKNYDPQKDKRFRGSGKLPHIPRPKMKICMLGDAQHVEKAEKIGLDYMDVEALKKLNKNKKLVKKLAKKYHAFLASESVI

SEQ ID NO: 67387 - protein, 98 aa, Gossypium hirsutum
  Clone ID: LIB3585-017-P1-K1-G5.pep
MSKLYSDALREAISTIVAQSKEKQRRCIETIELQIALKNYDPQKDKRHSGCLKLAHIHRPRMKICMLGDAQHVEEAEKIGLDYMDVEALNKLNKNKKL

SEQ ID NO: 67388 - protein, 178 aa, Gossypium hirsutum
  Clone ID: GOSHI-09MAY01-C1613_1.pep
TLWRREFEDVIERGDNDFLDDNHDQDEHSESSQSHQAVHESDSSEDEVAPRNTIGDVPLDWCTDEKHIGYDIAGRKITKKERQDKLDSFLASADDSKNWRKIYDEYNDEEVELTKEEIKHIRRLLKGKAPHAEFDPYAPYVDWFKWDDAKHPLSNAPEPKRRFIPSKWESKKLLSMLG

SEQ ID NO: 67389 - protein, 143 aa, Gossypium hirsutum
  Clone ID: LIB3582-025-P1-K1-B4.pep
MSHQESQKLDNVNPLETRVEDVIERGDNDFLDDNHDQDEHSESSQSHQAVDESDSSEDEVAPRNTIGDVPLEWYKDEKHIGYDIAGRKITKKERRDKLDSFLASADDSKNWRKIYDEYNDEEVELTKEEIKHIRRLLKGKAPH

SEQ ID NO: 67390 - protein, 89 aa, Gossypium hirsutum
  Clone ID: GOSHI-09MAY01-C1603_1.pep
PRVRYHIADVCSLCGSILTTAIIQPQKRVVREVGGLPPARAPKKVMCHACQTSKGMETVAMPYVFRYLAAELAAMNIKMTIQLSSEAGA

SEQ ID NO: 67391 - protein, 317 aa, Gossypium hirsutum
  Clone ID: GOSHI-09MAY01-C1183_2.pep
MENNQQSFWHFSDQLRIQNSNLANLSLNDSIWSNSYVSKRPDERRNFDIRVGGEVNSVNNLKPKVSDFNSFNNDGWKIGATTNNIGFGPIAPKNTGINGGFNKGVYSKPANNNNFNVSLKGNKNRGEDDHGSKSGKKNSNKKKNNNSDNNNNETKDGGSAADKRFKTLPPSEALPRNETVGGYIFVCNNDTMQENLKRQLFGLPPRYRDSVRAITPGLPLFLYNYSTHQLHGIFEAASFGGTNIDPTAWEDKKCPGESRFPAQVRVITRKICEPLEEDSFRPILHHYDGPKFRLELNIPEALSLLDIFADQQDSCIS

SEQ ID NO: 67392 - protein, 322 aa, Gossypium hirsutum
  Clone ID: GOSHI-09MAY01-C1183_1.pep
MENNQQSFWQFSDQLRVQNSNLANLSLNDSIWSSGYVSKRPDERRNFDIRVGGELNSVNSLKPKVTDFNSFSNDGWKIGATSNANIGFGPIGPIGSQNNVGVNGGFNKGIYSKPGNNNNNFNVNLKGSKNKGEDNHGTKSGKKNSNKKNNNNNDNNNENKDGKSAADKRFKTLPPSESLPRNETVGGYIFVCNNDTMEENLRRQLFGLPPRYRDSVRAITPGLPLFLYNYSTHQLHGVFEAASFGGTNIDPTAWEDKKCPGESRFPAQVRVITRKICEPLEEDSFRPILHHYDGPKFRLELNIPEALSLLDIFADQQDTCIS

SEQ ID NO: 67393 - protein, 72 aa, Gossypium hirsutum
  unsure (1)..(72): unsure at all Xaa locations
  Clone ID: uC-gsflnu33B081a12b1.pep
SSTAYPGSAYVRIAFNTLATNACETVSFHSNKGTFANIIXIFLYLFFKLFSSLSLCVSVFVSICLVFYERVG

SEQ ID NO: 67394 - protein, 63 aa, Gossypium hirsutum
  Clone ID: AI054594.1.pep
MENNQQSFWQFSDQLRVQNSNLANLSLNDSIWSSGYVSKRPDERRNLDIIVCGELNSVNSLKP

SEQ ID NO: 67395 - protein, 173 aa, Gossypium hirsutum
  unsure (1)..(173): unsure at all Xaa locations
  Clone ID: uC-gsflmaxxa002g09b1.pep
HASAHASANLSLNDSIWSNSYVSKRPDERRNFDIRVGEVNSVNNLKPKVSDFNSFNNDGWKIGATTNNIGFGPIAPKNTGINGGFNKGVYSKPANNNNFNVNLKGNKNRGXDDHGSKSGKKNSNKKKNNNSDNNNNETKDGGSAADKRFKTLPPXEALSRNETVGGYIFCCNN

SEQ ID NO: 67396 - protein, 89 aa, Gossypium hirsutum
  Clone ID: uC-gsflnu33B081a06b1.pep
FQVLFMYKPNSKKERKEKKNNHSKACEKNSFTSNKGTFTNIISIFLYLFFKLFSSLSLCVSVFVSICLVFYERVRVRLARNSNPVPATR

SEQ ID NO: 67397 - protein, 377 aa, Gossypium hirsutum
  unsure (1)..(377): unsure at all Xaa locations
  Clone ID: GOSHI-09MAY01-C1153_1.pep
MEQVMASIPDFEIAEPGISKDNSAEAEQFKFRVDEIFQKVDELEQKVNEVEQFYLSSSKKQQSSSKGSSMGKERDKGRQVPSIKKQQQDASRREAAAAKRMQELMRQFGTIVRQITQHKWAWPFMQPVDVKGLGLHDYYEIIEKPMDFSTIKNQMEAKDGTGYKNVRDICADVRLVFNNAMKYNDEGSDVHLMAKTLLEKFEEKWQLLLPKVTEEERRRDEEEAEAQLDMQLVREXAHAKVVRDLCNELYEVDTHLEHLRETVVQKCRKMSTEEKRNLGTAIARLSMEDLNKALEIIAQSNPAFQAMAEEVEIDIDAQSESTLWRLKFFVKDALELQSKSAMSTGGNNNNNYNNKRKKEICDAIAKTAKKKSKRTSS

SEQ ID NO: 67398 - protein, 153 aa, Gossypium hirsutum
  unsure (1)..(153): unsure at all Xaa locations
  Clone ID: LIB3828-024-Q6-N6-D10.pep
AKDGNGYKNVRAICADVRLVFDNAMKYNEEGSDVHLMAKTLLEKFEEKWQLLLPKVTEEEKRREEEEAEAQLNIQLVREASHAKRXRQYLMRKMSTKDKRNLGTAIARLSTEDLNKALEIIAQSNPGLQAMAEEVEIDIDAQSESTLWRLNFL

SEQ ID NO: 67399 - protein, 69 aa, Gossypium hirsutum
  unsure (1)..(69): unsure at all Xaa locations
  Clone ID: LIB3585-042-P1-K1-F6.pep
NQVELFHFIHLLIKLVNLLKDFINPEFEMLRFRTKPSPIPGSAISKSGIDAITSGSVGGRVGGRVGRXR

SEQ ID NO: 67400 - protein, 134 aa, Gossypium hirsutum
  unsure (1)..(134): unsure at all Xaa locations
  Clone ID: GOSHI-09MAY01-C1143_1.pep
MNYLVGAFKPPCNIFISFTDGRSRKQVPLKKENGKTVMVALFQSQESIVGEVVIEPVHGKKGEHNGVKIELLGQIELYFDRGHFYDFTSLVRELDVPGXELYERKTYPFEFSTVEMPYDSYYGVNCRXRYILKV

SEQ ID NO: 67401 - protein, 175 aa, Gossypium hirsutum
  unsure (1)..(175): unsure at all Xaa locations
  Clone ID: AI730429.1.pep
MNYLVGAFKLPCNIFISFADGRIRKQVPLKKENGKTVMVALFQSQESIVGEVVIXPVHRKKVEHNGVKIVLLGQIELYFDRGNFYDFTSLVRELDIPGELYERKTYPFEFSTVEMLYESYNGVNVRLRYILKVTISRDYVINIVEYQEFVVRNYTPPPSINNSIKMEVXIEDCLL

SEQ ID NO: 67402 - protein, 240 aa, Gossypium hirsutum
  unsure (1)..(240): unsure at all Xaa locations
  Clone ID: GOSHI-09MAY01-C1163_1.pep
MENGYINPAPSPLRKIITVASIAAGIQFGWALQLSLLTPYVQTLGVPHAWAAFIWLCGPISGLLVQPIVGYNSDRCTSRFGRRRPFIVIGALSVSIAVFLIGFAKDIGHHAGDSLERSTKPRAVAIFVVGFWILDVANNMLQGPCRALLADLSANDHXKMRTANGWFSFFMAVGNVLGYAAGSYSHLYKIFPFTKTTACDIYCANLKSCFTIDIMILLLVTVTAVTTVKEDPFTKQIQDD

SEQ ID NO: 67403 - protein, 361 aa, Gossypium hirsutum
  Clone ID: GOSHI-09MAY01-C1113_1.pep
MDLTSTTTTTTITAVSGAVNDKELAVDPFLVEALQNPRHRLTILRMELDIQRFVQNSEQQQFEFQHFPTSYLRLAAHRVAQHYGLVTMVYDNGLDGLGNRIVAKKAGEIKWPGVCLSEIPAKNSENDKPEQVKIAIKPRPNNGSLNEANQIGIKRSPVRSVEERKEEYDRARARIFSSPSTPDSDDSSPQNSVDGKNESLIREEFENYRSSMVDPEKNMTVRDGTSRVAIFRDREKDRTDPDYDRNYQRYVRSIPCNQSVGVAPYNMQKIQLPFMQYDSAFPQLGQIANTQAPLGYGVPSRPAVSPFCELGLNPTSRDGAYMQWPSANMMFSHSYDQFMHAVFQAPFVHQPPLSYDYSMNG

SEQ ID NO: 67404 - protein, 74 aa, Gossypium hirsutum
  Clone ID: LIB3146-025-Q1-K1-B10.pep
RSLRASYNGLKRQCVMYPLQSIKLSVCALGVVVEFLKRRKSIYLSFQKTSKFSNIIVTVSLPSYMIHQKLETKE

SEQ ID NO: 67405 - protein, 221 aa, Gossypium hirsutum
  unsure (1)..(221): unsure at all Xaa locations
  Clone ID: GOSHI-09MAY01-C1133_1.pep
MATSSSCSSLKQHFLVFLIVIIRSIINSPVNGCFTSIFSFGDSLTDTGNLLEISISEPTKTPHSAFLPYGRTFFHHPTGRFCDGRLVIDFLAETLGFSFLPPFYGSKSGKWEKFQKGANFAVASATALNSSFLAEQGIHSVSTNISLGVEVNSFKHLLPSLCSSSSYCKELLRNSLIVMGEIGGNDLXHAFMLGKHVEIIRRLVPLVGDIISSSINELIEL

SEQ ID NO: 67406 - protein, 172 aa, Gossypium hirsutum
  Clone ID: GOSHI-09MAY01-C1093_1.pep
MVKLTADLIWKCPHFFNALKERELDLRGNKIAVIENLGATEDQFDTIDLSDNEIVKLDNFPYLKRLGTLLINNNRVTRINPNIGEFLPNLHTLVLTNNRLVNLVEIDPLSSLPKLQFLSLLDNNITKKPNYRLYVIHKLKSLRVLDFKKVKAKERLEAENLFASKEAEEENK

SEQ ID NO: 67407 - protein, 80 aa, Gossypium hirsutum
  Clone ID: LIB3196-052-P1-M1-A12.pep
FRLQQFCYLKGEKGKKGNFENIIMMRVRVAAKEGRTSTSKIQFSLLEGIEEVRTLPNQVGGELHHAYLLPPFYVFDMLKP

SEQ ID NO: 67408 - protein, 376 aa, Gossypium hirsutum
  Clone ID: GOSHI-09MAY01-C1053_1.pep
MASRPDILLVFIFLPFANSIHFKFPSIFNFGDSNSDTGELISAGIESLEPPHGQSYFQTPSGRYCDGRLIIDFLMDAMDLPFLNAYLDSIGLPSFHKGCNFAAAGSTIQPATAQSVSPFSFGVQVAQFVRFKARVLELLAKGKRLDKYLPAQDYFQKALYMFDIGQNDLAGAFYSKTLDQVLASIPTILIEFETGIKALYDQGARNFWIHNTGPLGCLAQNVAKFGTDASSLEEQGCVRKHNQAAKIFNLQLHALTKKLQGLYTDSNFTYVDIYTIKSNLIANYSKLGFEQPIMACCGFGGPPLNYDSRISCGKTKVINGATVTAKACNDSSEYVNWDGIHYSEAANQYVSSQILTGKYSDPPFSDKMPFLLSLKF

SEQ ID NO: 67409 - protein, 191 aa, Gossypium hirsutum
  unsure (1)..(191): unsure at all Xaa locations
  Clone ID: LIB3584-007-P1-K1-H12.pep
GSTYFKGGGGGFCDGRLTIDFLMDAMDLPFLNAYLDSIGLPSFHKGCIFAAAGSTRHAGAALSVSPFSFGVQVAQFVRFKARVLELLAKGKRLGKYLPAQDYFQKALYMFDIGQNDLAGAFYSKTLDXXLASFSTFLFESVTGLKALFVQGARNFWFPSTGPXLGCFAPNVPLFGSVASSLAALCFVRQHN

SEQ ID NO: 67410 - protein, 246 aa, Gossypium hirsutum
  unsure (1)..(246): unsure at all Xaa locations
  Clone ID: GOSHI-09MAY01-C1043_2.pep
MARKKIREYDSKRLLKQHFKRFSAYDLPIKSAQVTESTDFNELVEKEPWLLSQKLVVKPDMLFGKRGKSGLVGLNLDFAQVTAFVKERLGKEXEMSGCKGPVTTFIVEPFIPHNEEYYLNIVSERLGCSISFSECGGIEIEENWDKVKTIFIPTDSSFASETIAPLVATLPLEVKGEIEQFIKVIFTLFQDLDFTFLEMNPFTLVEGKPYPLDMRGELDDTASFKNFKKWGNIEFPLPFGRVMSAT

SEQ ID NO: 67411 - protein, 423 aa, Gossypium hirsutum
  Clone ID: GOSHI-09MAY01-C1043_1.pep
MARKKIREYDSKRLLKQHFKRFSAYDLPIKSAQVTESTDFNELVEKEPWLLSQKLVVKPDMLFGKRGKSGLVGLNLDFAQVTAFVKERLGKEVEMSGCKGPVTTFIVEPFIPHNEEFYLNIVSERLGCSISFSECGGIEIEENWDKVKTIFVPTGSLLTSETCAPLVATLPLEIKGEIEEFIKVIFNLFQDLDFTFLEMNPFTLVDGKPYPLDMRGELDDTAAFKNFKKWGNIEFPMPFGRVMSATESYIHGLDEKTSASLKFTVLNPKGRIWTMVAGGGASVIYADTVGDLGFASELGNYAEYSGAPNEEEVLQYARVVIDCATADPDGRKRALVIGGGIANFTDVGATFNGIIRALKEKESKLKAANMHIYVRRGGPNYQKGLAKMRALGEEIGIPIEVYGPEATMTGICQEAIQYITAAA

SEQ ID NO: 67412 - protein, 170 aa, Gossypium hirsutum
  Clone ID: LIB3585-012-P1-K1-E6.pep
WDKVKTIFIQPDSSFASETMAPLVATLPWEVKGEIEQFIKVIFTLLQDLDFTFLEMNPFTLVEGKPYPLDMRGELDDTASFKNFKKWGHIEFPLPFARVMSATESYIHGLDERTSASLKYTVLNPKGRIRTMVAGGGASVIYADTVGDLGFASELGNYAEYSGAPNEEES

SEQ ID NO: 67413 - protein, 96 aa, Gossypium hirsutum
  Clone ID: uC-gsflmaxxa074h08b1.pep
MARKKIREYDSKRLLKEHFKRLSGRDLPIKSAHITASTDFNQLVQKEPWLWSQKLVVKPDLLLGKRGKSGLVGLNLDFAQAIGFGKEPLGKQVEMS

SEQ ID NO: 67414 - protein, 61 aa, Gossypium hirsutum
  Clone ID: uC-gsronu33B160e01b1.pep
SKLKAARMVLFLRRGGPNYQRGLAKMRALGEEIGIPIEVYGPEATMTGICQQAIQYISAAA

SEQ ID NO: 67415 - protein, 92 aa, Gossypium hirsutum
  Clone ID: LIB3149-020-Q1-K1-D10.pep
VIGGGIANFTDVGATFNGIMRALKEKESKLKAARMMLYVRRGGPNYQRGLAKMRALGEEIGIPIEVYGPEATVRVHVRSLFFFSPFQVGHFH

SEQ ID NO: 67416 - protein, 316 aa, Gossypium hirsutum
  Clone ID: GOSHI-09MAY01-C1063_1.pep
MEEVEEEGVTVNIRCSNGSKFTVRTNLESTVGSFKALLAQSCDIPADQQRLIYKGRILKDDQTLQSYGLQADHTVHMVRSFAPSSSAPPPVATTNVGTPNTTPGVTRGVGSNEGAGLGASSFPGLNPLGGNGRWGRLGAARLPEFEHVQQQLTQNPNMMREIMNTPAIQSLVNNPELMRTLIMSNPQMREIIDRNPELGHILNDPSILRQTLEAARNPELMREMMRNTDRAMSNIESSPEGFNMLRRMYENVQEPFLNATTMAGNNGNSPGSNPFAALLGNQGGSQARDSPSNISVTGSESIQGQTSSNTNPLPNP

SEQ ID NO: 67417 - protein, 77 aa, Gossypium hirsutum
  Clone ID: LIB3585-004-P1-K1-C8.pep
MGAGGDSSESRLGGNGGGEEGVTVNIRCSNGTKFTVRTNLESTVGSFKALLAQNCDIPADQQRLIYKGRILKDDQTL

SEQ ID NO: 67418 - protein, 134 aa, Gossypium hirsutum
  Clone ID: LIB3165-026-P1-K1-B12.pep
PRVRNEGAGLGASIFPGLNLLGGNGGSFGLFGSGLPEFEQVQQQLTQNPNMMREIMNTPAIQSLVNNPELMRTLIMSNPQMREIIDRNPELGHILNDPSILRQTLEAARNPELMREMMRNTDRAMSNIESSPEG

SEQ ID NO: 67419 - protein, 280 aa, Gossypium hirsutum
  Clone ID: GOSHI-09MAY01-C1033_1.pep
MDLEFLQSMDVQILVGVGVAVLAILVAAAYLFSSRKPKGCLDPENFREFKLVKRQQLSHNVAKFTFELPTPTSVLGLPIGQHISCRGKDSQGEEVIKPYTPTTLDSDVGHFELVIKMYPQGRMSHHFRELRVGDYLAVKGPKGRFRYQPGQVRAFGMIAGGSGITPMFQVARAILENPKDMTNVHLIYANVTYEDILLKEELDSLVAKYPGRFKVYYVLNQPPEVWNGGAGFVSKEMIQTHCPAPAPDIKILRCGPPPMNKAMAGHLDALGYSPEIQFQF

SEQ ID NO: 67420 - protein, 90 aa, Gossypium hirsutum
  unsure (1)..(90): unsure at all Xaa locations
  Clone ID: AI729559.1.pep
MDLEFLQSMDIQILVGVAVAALAIVVGAVYLFASTKSKGCLNPENFKEFKLVKRQQLSHNVAKFTFELPTPTSALGLXIGQHISCRGKDH

SEQ ID NO: 67421 - protein, 153 aa, Gossypium hirsutum
  unsure (1)..(153): unsure at all Xaa locations
  Clone ID: GOSHI-09MAY01-C1383_1.pep
MEAAMGLMRRMPPRHSETALSALLSLLPHNSSDLLSQVDLPLQVLSDDDSGKRFILCEYNRDADSYRSPWSNKYHPRLEDAPYPSSKLRQLEIEANDIFTVYCDQYYEGGISSVYMWEDDNEGFVACFLVKKXDGSKTGQGRRGYLEEGTWDA

SEQ ID NO: 67422 - protein, 62 aa, Gossypium hirsutum
  Clone ID: GOSHI-09MAY01-C1373_2.pep
ITWLSKRTDFFAFFFQLERQKEIQRSWELKKKKGGIKEKKPNDWTLQQNLKSLSLSLSFFVA

SEQ ID NO: 67423 - protein, 333 aa, Gossypium hirsutum
  Clone ID: GOSHI-09MAY01-C1373_1.pep
MAAVIDMYNSSRNSAFYAPASAHSFEALDPFMKSASSSSAPLQPNLYPEYCSPLNSSTHLFSNHGFSNYNKNMLGFEQTGSSLGLNQLTRSQILQIQSQILHQQQQQQVASMAAVATPPTTTFENPRVGFLSPKPVPMKHVSSTPPKAAKLYRGVRQRHWGKWVAEIRLPKNRTRLWLGTFDTAEEAALAYDKAAYKLRGEFARLNFPHLKHQGAHVFGEFGDYKPLHASVDAKLQAICQSLQAQGNPVKTKTLPKAAEFHYPIKTEEFDHKQDNSSSSSSSSVDESSLAGSLSSPESDITFFDFSDSKWEDNEIENFSLDKFPSLEIDWEAI

SEQ ID NO: 67424 - protein, 218 aa, Gossypium hirsutum
  unsure (1)..(218): unsure at all Xaa locations
  Clone ID: GOSHI-09MAY01-C1313_1.pep
MRLVVPLQGVAQGRGGLLLGSLIPCALFYFLQLYLKRRRSPSDPSPPSSSSSNQPGMTRHSSLSNLLSRGPLRISSLATSIAKPDDSPYYMGLDRASGDPYHRIANPDGVIQLGLSENRLCFDLIEKWTSENLRDWVMGREGGDLSISGIATYQPSDGTMKLKMAMAGFMSRVMGRDVSYEPSQMVLTXAGVTPAMETLCFCLADHGNAFLVPTPYYP

SEQ ID NO: 67425 - protein, 366 aa, Gossypium hirsutum
  Clone ID: GOSHI-09MAY01-C1303_1.pep
LIGGIPIAMPTVLSVTMAIGAHRLSQQGAITKRMTAIEEMAGMDVLCSDKTGTLTLNKLTVDRNLIEVFTKGVEKEHVILYAARASRTENQDAIDAAIVGMLAHPKEARAGVREIHFLPFNPVDKRTALTYIDSDGNWHRASKGAPEQIIDLCKCKDDVRKKVHSVIDKFAERGLRSLAVARQEIPEKTKESPGSPWQFIGLLPLFDPPRHDSAETIRRALNLGVNVKMITGDQLAIAKETGRRLGMGTNMYPSSSLLGQDKDASIAALPIDELIEKADGFAGVFPEHKYEIVKRLQERKHICGMTGDGVNDAPALKKADIGIAVADATDAARSASDIVLTEPGLSVIISAVLTSRAIFQRMKNYT

SEQ ID NO: 67426 - protein, 164 aa, Gossypium hirsutum
  Clone ID: GOSHI-09MAY01-C1333_2.pep
MTMGAADKREEVIQAWYMDDSDEDQRLPHHREPKEYVSLDKLAELGVLSWRLDADNYENDEELKKIREERGYSYMDFCEVCPEKLPNYEEKIKNFFEEHIHTDEEIRYCVAGSGYFDVRDHNDKWIRVWVKKGGMIVLPAGIYHRFTLDTDNYIKAMRLFVGDP

SEQ ID NO: 67427 - protein, 159 aa, Gossypium hirsutum
  Clone ID: GOSHI-09MAY01-C1333_1.pep
LSELGVLSPPRPPARPENDEELKKIREERGYSYMDFCEVCPEKLPNYEEKIKNFFEEHIHTDEEIRYCVAGSGYFDVRDHNDKWIRVWVKKGGMIVLPAGIYHRFTLDTDNYIKAMRLFVGDPIWTPYNRPHDHLPARKEYIKNFLREEGGGQAVDAAA

SEQ ID NO: 67428 - protein, 97 aa, Gossypium hirsutum
  Clone ID: LIB3166-018-P1-K1-E10.pep
SFIGFLYGDFSSFWLREEVIQAWYMDDSDEDQRLPHHREPKEYVSLDKLSELGVLSWRLDADNYENDEELKKIREERGYSYMDFCEVCPEKLPNYEE

SEQ ID NO: 67429 - protein, 74 aa, Gossypium hirsutum
  Clone ID: LIB3145-044-Q1-K1-H4.pep
MTMGAADKREEVIQAWYMDDSDEDQRLPHHREPKEYVSLDKLSELGVLSWRLDADNYENDEELKKIREERGYSY

SEQ ID NO: 67430 - protein, 303 aa, Gossypium hirsutum
  Clone ID: GOSHI-09MAY01-C1323_3.pep
MFSSPKLISYFFLLALFSVEIHGRDFFSKIPSVNTNEKEVTNKEEQTTLGKKEQEPRFIPETQSYGLYGHESGQLPPSTTSTKETYEPYVTPVKYHPDEPYNSIPASKTNNKDSYSHASANAYGNAEQQSEAKFNGKGWATKETNNYNVNYYNGNNEALFTEKGWSAKENQRGNNYYNGNNEALFTEKGWSTKENQNRNNYYNGNNEAMFTEKGWSSKENQNNNNYYNGNNEYNNVEKQGMSDTRFLENGKYYHDVSSENNYYPNRFENSRGVGSRNEFNENRYNNMGKYNQNQEEFEEEFEP

SEQ ID NO: 67431 - protein, 230 aa, Gossypium hirsutum
  unsure (1)..(230): unsure at all Xaa locations
  Clone ID: GOSHI-09MAY01-C1323_2.pep
KNKEQEPRLGPETQNGYGLYGHXSWHLPTSTGRTKETYEPYVTPVKYHPDEPYNSIPASKTNNKDSYFYTKANAYGSTEQQSEARFNEKGWTTKETNNYNGNYYNGNNEALFTEKGWSTKENQNSNNYYNGNNEAMFTEKGWSTKENQNNNNYYNGNNEYNNVEKQGMSDTRYLENGKYYYRVGSENNYYPNRFENSRGVGSRNEFNENRYNNMGKYNQNQEEFEEEFEP

SEQ ID NO: 67432 - protein, 213 aa, Gossypium hirsutum
  Clone ID: GOSHI-09MAY01-C1323_1.pep
MASSPKFISYFFLLALFSVEIHGRDFFSKIPSVNTNEKEVTNKEEQTTLGKKEQEPRFVPETQNGYGLYGHESGQLPPSTASTKETYEPYVTPVKYHPDEPYNSIPASKTNNKDSYFYSKTNAYGNTEQQSEARFNEKGWTTKETNNYNGNYYNGNNEALFTEKGWSTKENQNSNNYYNGNNEAMSLRKDESKETQNNTLYYIGTMVPHVKTG

SEQ ID NO: 67433 - protein, 270 aa, Gossypium hirsutum
  Clone ID: GOSHI-09MAY01-C1243_1.pep
WVFTEQALPVDLIKRGMAVPDSSCPYGLKLMINDYPYAIDGLEIWAAIETWVTEYCSFYYPSDETVKNDTEIQSWWSEVKNEGHGDLRKEPWWPEMNTLADLTQACTIIIWIASAFHAAVNFGQYPYAGYLPNRPTVSPRFMPEPGTKEYDELENDPDLAFLKTITAQFQTLLGVSLIEVLSRHSTDEIYLGQRDTAEWTTDDEPLAAFERFGKKLVEIESRIMERNNDSKLKNRVGPVKVPYTLLCPSTSDYCREGGLTGKGIPNSISI

SEQ ID NO: 67434 - protein, 250 aa, Gossypium hirsutum
  unsure (1)..(250): unsure at all Xaa locations
  Clone ID: GOSHI-09MAY01-C101228_1.pep
SEAGNENWDDTVLTKEXRSRMQRKVEAVIKRERAMAYAYSNQLWRAAPGSGIRSGGFPWWWNWFDHPLPPVNAPGSQGTKSFQLTPPRPNSQLKPSSRPQSSGSRQRQFTYDNIMETPTPKSTRSTILHAKRRMRTPPSSSRPRARGAASPFDLHVKDDDSLMSCPPFSVPNYMNPTVSTKAKTRANSNPKERHVGTPQSESNRRLSYPLTQGIGSYRSNKGSVGNMSVDSTPSTPATITGGRKPFNRFV

SEQ ID NO: 67435 - protein, 105 aa, Gossypium hirsutum
  Clone ID: GOSHI-09MAY01-C1213_4.pep
MEGREEIKGSKPSFPLSFWEVTMAFTVVMGFVLGLGGVYLTMPASDYSFLKLPRSLEDLHILRDHLEIYTSDYTLQVLVGYCAVYIFMQTFMIPGTVFMSLLAGA

SEQ ID NO: 67436 - protein, 140 aa, Gossypium hirsutum
  Clone ID: GOSHI-09MAY01-C1213_3.pep
MEGREEIKGSKPSFPLTFWELALASTMVFGIVLGLVGVYLTMPASDYSFLKLPRNLEDLQILRDNLESYTSDYTVQVLVGYCAVYIFMQTFMIPGTVFMSLLAGALFGVFKGVALVVFTATAGASSCYFLSKMIGQPLVF

SEQ ID NO: 67437 - protein, 104 aa, Gossypium hirsutum
  Clone ID: AI055392.1.pep
SEHDSSFHCIPSLTKCIFSPTISLKQISKPSHIIESNLALTNKYCPTLFYGILSSILCTIDPYELKYIAVQSKIHSFVAQIHYKKKTKLKRLQLLENQMDPITC

SEQ ID NO: 67438 - protein, 188 aa, Gossypium hirsutum
  unsure (1)..(188): unsure at all Xaa locations
  Clone ID: LIB3543-062-Q6-K6-H10.pep
MEGREEIKGSKPSFPLSFWEVTMAFTVGRGFVLGLGGVYLTMPASDYSFLKLPRSLEDLHILRDHLEIYTSDYTLQVLVGYCAVYIFMQTFMIPGTVFMSLLAGALFGVLKGVALVVITATAGASSCYFLSKLVGRPLVISLWPDKLSFFQAQVAQRREXLLNYMLFLRLTPTLPDTFINVASPIVDV

SEQ ID NO: 67439 - protein, 156 aa, Gossypium hirsutum
  Clone ID: GOSHI-09MAY01-C1203_1.pep
MAAANSLQKVTSQLRVARSTLGSFSRAFSSDALVEVKPGEVGMVSGIPEEHLRRRVVIYSPARTATQQGSGKVGKWKINFVSTQKWENPLMGWTSTGDPYANVGDSALGFDSEEAAKSFAERHGWDYVVKKRQTPVLKPKSYADNFKWKGPAVSEK

SEQ ID NO: 67440 - protein, 202 aa, Gossypium hirsutum
  unsure (1)..(202): unsure at all Xaa locations
  Clone ID: GOSHI-09MAY01-C2943_1.pep
LEKNGHHHLRETRGLCLXEEQTVTTVLRRPRIGAGYRFIDMITEPHRLIRRCEVTAILILYGLPRLLTGSILAHEMMHAWLRLKGYPNLSPVVEEGICQVLAHMWLDSEIYAAAGSDAASSSSSSSASSSSSSSPSSSSSTSSKKGKRSDFEKKLGGFFKHQIESDSSTAYGEGFRQGNQAVNKYGLKRTLDHIRMTGSFPF

SEQ ID NO: 67441 - protein, 164 aa, Gossypium hirsutum
  Clone ID: GOSHI-09MAY01-C2973_3.pep
RARASPKPGLSPPGVSAERTERPSVGQEIRPTRPPARPPSPPRNVSGHGLHGDQSRHRSSDDVPSSKDAQPDSERTRSSSRNDSASKRPVVVSGNSQPGSSGEPSENRSSRLFSSSGRMSTTQRVQPGFESKSSSFTRTAVTRAGRDDTLRSFDLLTIGSGKRK

SEQ ID NO: 67442 - protein, 210 aa, Gossypium hirsutum
  unsure (1)..(210): unsure at all Xaa locations
  Clone ID: GOSHI-09MAY01-C2973_1.pep
KSYPSEFTSXRGFHYCRSLRFEDKPDYAYLKRLFRDLFIREGYQFDYVFDWTMLRYPQAASSSRVRPSPKPGLNPQGVSAERTGRPSVGQEIRERFSGAVEAFARRNGSGHGDQSRHRSPDNVLSSKDTQPGSDRAQSSSRNGSTSKRPVVSGSRPNSSGEPSDNRSSRLVSSSGRLLTTQRVQPGFESKSSTFTRTTATRSSRNHALRA

SEQ ID NO: 67443 - protein, 154 aa, Gossypium hirsutum
  unsure (1)..(154): unsure at all Xaa locations
  Clone ID: AI729639.1.pep
AGTKKQKYDKISEKKMLTPIEVLCKSYPSEFTSYFHYCRSLRFEDKPDYSYLKRLFRDLFIREGYQFDYVFDWTILRYPQVGSXSRARASPKPGLSPPGVSAEXNKRPSVGQDIXERFSGAVEAFAKRNVSGHGLHGDQSRHRSSDDVPSSKDA

SEQ ID NO: 67444 - protein, 74 aa, Gossypium hirsutum
  Clone ID: LIB3083-106-Q1-L1-A7.pep
KNQKGHVGQEIRERFSGAVEAFARRNVSGHGLHGDQSRHRSSDDVPSSKDAQPDSERTRSSSRNDSASKRPVVV

SEQ ID NO: 67445 - protein, 318 aa, Gossypium hirsutum
  unsure (1)..(318): unsure at all Xaa locations
  Clone ID: GOSHI-09MAY01-C2963_1.pep
KEMEELLEREKQEVQKMKDQHDEFIKELQMVKDQKAILESQIVESQRAVEGLEEKMFSAVGLLISFKKKRDDLRIEHENAIRVLKNLRKLVNGGDSSFPGSQILEFSFIEINNATRDFDPSWKIGEGKYGSVYKGLLRHMNVAIKMLPSYGSQSLFEFENEVEILSRIRHPNLVTIIGTCPESRSLVFEYLRNRSLEEPLACKNKSPPLPWXTRIRIASEICSALIFLHSNKPCIPHGNLKPSKVLLDSNFVSKLIDSGIYRLIPQGKSTDTSALSSGYMDPVYLENGEGTRESDVYSFGMILLRLLTGRSALGILND

SEQ ID NO: 67446 - protein, 139 aa, Gossypium hirsutum
  Clone ID: GOSHI-09MAY01-C2913_1.pep
MNSVNLSHQYPRTSSFTCLNSCLTEHWGDLPLKVDDSEDMIIYNSLHEALNFGWSPTTTGSTAATTIKPEPKDESAEIMENAKPMELTQKVVKGRHYRGVRQRPWGKFAAEIRDSARNGARVWLGTYETAEEAAWLMIE

SEQ ID NO: 67447 - protein, 72 aa, Gossypium hirsutum
  Clone ID: LIB3146-061-Q1-K1-D8.pep
MNDISLCEYSFSHQYPRSPSFTCLNSCLTERWGDLPLKVDDSEDMLIYNSLHEALNFGWSPFDSTLPTAIKD

SEQ ID NO: 67448 - protein, 214 aa, Gossypium hirsutum
  Clone ID: GOSHI-09MAY01-C2903_2.pep
LQSVTQENEELQAKEAASLKKIEQLVKLLEEATIEKQNEENGELSDSEKDYDLLPKVVEFSEENGHGSEEKPKLELSSEQPDELKKESPDLNDDSKDEPLQAEGAKEENLNGKANNNETKGKEDESVEFEFKMWESCKIEKKEFSPEREAEQESLDEEVESKVEGSESVDINGSTENIDDGGNSPSKQQQQKKKKPLLRKFGSLLKKKGSSNQK

SEQ ID NO: 67449 - protein, 61 aa, Gossypium hirsutum
  unsure (1)..(61): unsure at all Xaa locations
  Clone ID: LIB3584-013-P1-K1-F2.pep
FFEEEVESKVEGSESVDINGXTENIDVGGNSPSKQQQQKKKKPLLRKFGSLLKKKGSSNQK

SEQ ID NO: 67450 - protein, 83 aa, Gossypium hirsutum
  Clone ID: GOSHI-09MAY01-C102908_1.pep
SVLCVPDSVELLPTQPDLSRPRIRIVVHEGRNHEVRELVKNAGLEIHSLKRVRIGGFRLPADLGIGKHIELKQSDLRTMGWKS

SEQ ID NO: 67451 - protein, 94 aa, Gossypium hirsutum
  Clone ID: GOSHI-09MAY01-C102858_1.pep
ISKLPFHIFKTIKRALKSNQVWANKANLGMDTSNPTHQCTVKTKQNQKLITLQFKTVQVFLCRFSTSPYLRRSLSPNITTDAPNNLCRINGKTS

SEQ ID NO: 67452 - protein, 58 aa, Gossypium hirsutum
  unsure (1)..(58): unsure at all Xaa locations
  Clone ID: AW187708.2.pep
LAVPSXCDLCNYLYFQHHLYRLGVVHNYLFRFDDVXVGMVRAAWESSKILRIASLFNL

SEQ ID NO: 67453 - protein, 256 aa, Gossypium hirsutum
  Clone ID: GOSHI-09MAY01-C2863_1.pep
PRVRDYKDAKFFIIKSYSEDNVHKSIKYGVWASTPNGNKRLDAAYREAMENQDNCPVFLFFSVNASAQFCGVAEMVGPVDFDKSVDYWQQDKWSGQFPVKWHIIKDVPNSQLRHIILENNDNKPVTNSRDTQEVRLEQGIEMLNIFKSFETDTSILDDFDFYEDRQKAMQERKARQQASLMSVGVVGETEHRNTVSLSNDFMKQMSKSFAQVVCLDDGNKDGTAIERTSSASDGSKVARVKLEDAMTAAVSSGQAS

SEQ ID NO: 67454 - protein, 70 aa, Gossypium hirsutum
  Clone ID: GOSHI-09MAY01-C102818_1.pep
FCHLHPFHRKLRYVTNKMSFCTIQFPINGTMLHLNPQKPQLLIANISIFYIILYIYISNSRSPKNKKEPK

SEQ ID NO: 67455 - protein, 168 aa, Gossypium hirsutum
  Clone ID: GOSHI-09MAY01-C2823_1.pep
MGWWDNSYHEAKKLLISPAMKQPFHLLATLLLSLWLPLAFLLVARLSYVNYTLNATVLDPSSTPSPPSFLFSFYLYTNPALLYFLVAAISIVALVHGLTGKVSFVTESPSSFHRPHLHIAWIILCIVQVCVGLGIEGSVAVGINGAGFGVRRSVLSRLIFFLGLHEVM

SEQ ID NO: 67456 - protein, 192 aa, Gossypium hirsutum
  Clone ID: GOSHI-09MAY01-C2583_3.pep
MDAQEGTQQSQQLILAHKVFLLKHRDVPDIEKVRLKDEVLNTVKSNDMTPYYENLVADKVLDLDHSALDSMRAKNEEEIKKLDEKIADAEENLGESEVREAHLAKFLYFIQIGEKEKALEQLKVSENKTVAVGQKMDLVFCSLQIGFFYMDFDLISNSIDKAKILFEKGGDWKRKNRLKVYEGLYCMSTRKF

SEQ ID NO: 67457 - protein, 193 aa, Gossypium hirsutum
  unsure (1)..(193): unsure at all Xaa locations
  Clone ID: GOSHI-09MAY01-C2583_2.pep
PRVRPRVRTFIFYTVLTSIISLDRVSLKQKVVDAPEILTVIGKIPHLSEFLNSLYNCQYKSFFLAFAGLTEQIKLDRYLHLHFRFYMREVRTVVYSQFLESYKSVTIEAMAKAFGVTVEFIDQXLITSDXHLSLYRELSRFIAAGKLHCKIDKVAGVLETNRPDAKNALYQATIKQGDFLLNRIQKLSRVIDL

SEQ ID NO: 67458 - protein, 387 aa, Gossypium hirsutum
  Clone ID: GOSHI-09MAY01-C2583_1.pep
MDAQDGNQQSQQLILGHNVFLLKHPDVPDIEKVRLKDEVLNSVKSNEMAPYYETLVADKVVELDQNVLDSMRAKNEEEIKKLDEKIADAEENLGESEVREAHLAKSLYYIRIGDKEKALEQLKLTETKTVAVGQKMDLVFYTLQIGFFYVDFDLISKSIDKAKNLFEEGGDWERKNRLKVYEGLYCMSTRNFKKAANLFLDSISTFTTYELFPYDTFIFYTVLTSIISLDRVSLKQKVVDAPEILTVIGKIPHLSEFLNSLYDCQYKSFFLAFAGLTEQIKLDRYLHPHFRFYMREVRTVVYSQFLESYKSVTIEAMAKAFGVTVEFIDLELSRFIAAGKLHCKIDKVAGVLETNRPDAKNALYQATIKQGDFLLNRIQKLSRVIDL

SEQ ID NO: 67459 - protein, 171 aa, Gossypium hirsutum
  unsure (1)..(171): unsure at all Xaa locations
  Clone ID: LIB3543-064-Q6-K6-E3.pep
MDTHDGTQQSQQLILAHNVFLLKHPHVSDIEKVRLRDEDLNSVQSNDMTSYYETLVTDEVLELDQSLLESMRAKNEEEIKKLDEKIADAEENLCESEVREAHLAKSLYYIRIGEKEKALEQLKLAESKTVAVGQKMDLVFYTLQIGLNYMDFDLISKSIGKAXNLFEGGGD

SEQ ID NO: 67460 - protein, 87 aa, Gossypium hirsutum
  Clone ID: GOSHI-09MAY01-C102568_1.pep
SPSTNHERQRLDDHLQVLVPLSMKSSSSYSSFLSAEKQEERRNGDRKDIGGVVNKKSFDFMGPEGRVHGGGLMSLLGGNLKNPFEGI

SEQ ID NO: 67461 - protein, 94 aa, Gossypium hirsutum
  unsure (1)..(94): unsure at all Xaa locations
  Clone ID: GOSHI-09MAY01-C2553_4.pep
LGFLLVRVPLQAAVYFNKIQFFCFEEXCLLPGEQIDMPVSLFIVEKAKRGGDRQLTCTFLQVFFYIDPEFETDARMDGINNLILSYTFFKVSEE

SEQ ID NO: 67462 - protein, 232 aa, Gossypium hirsutum
  Clone ID: GOSHI-09MAY01-C2553_2.pep
MPRCEFSTKPLTRSFDFHPYGSRCLVRLSSFSSQRHYASHASHASTERKSKKTLLYLTALVFAMVGSSYAAVPLYRRFCQGTGYGGTVQRRESVEEKIARHEKDGTVATRLWMEIVVQFNADVADGMPWKFVPTQREVRVKPGESALAFYTAENRSSKPITGVSTYNVTPMKAAVYFNKIQCFCFEEQRLLPGEQIDMPVFFYIDPEFETDARMDGINNLILSYTFFKVSEE

SEQ ID NO: 67463 - protein, 110 aa, Gossypium hirsutum
  unsure (1)..(110): unsure at all Xaa locations
  Clone ID: LIB3584-004-P1-K1-F2.pep
NREEDATNTNLGFHRQFWLIPFPREIVVQFNVDVADGMPWXFVPTQREVRVLPGESALAFYTAENRSSXITGVSTYNVTPMKVFFYMDPXXETDARMVGLNNLRXSFPFF

SEQ ID NO: 67464 - protein, 133 aa, Gossypium hirsutum
  unsure (1)..(133): unsure at all Xaa locations
  Clone ID: uC-gsflnu33B144d06b1.pep
MPRCEFSTKPLTRSFDFLPYGSRCLVRLSSFSSQRQCASHVSHASTERKSKKTLLYLTALVFAMVGSSYAAVPLYQRFCQATGYGGTVQRRESVEEKIARHEKDGTVATWEIVVQFNADVADGMPXNFVPTQR

SEQ ID NO: 67465 - protein, 163 aa, Gossypium hirsutum
  unsure (1)..(163): unsure at all Xaa locations
  Clone ID: GOSHI-09MAY01-C2543_1.pep
LSPGGIGLVGEISFSDNSSWTRCRRFRLGARVVDGSGGTRVREAKTESFIVRDHRGELYKKHHPPSLSDEVWRLEKIGKDGAFHKRLSRENINSVKDFLTMLCIDPPRLRHILGTGLSAKMWEITVEHARTCVLDKRRHVYCPPGSQQTSGVVXNVLGQLTGL

SEQ ID NO: 67466 - protein, 89 aa, Gossypium hirsutum
  Clone ID: AI054450.1.pep
NLFSSEVVKETRFELWFLVAVYKKHHPPSLSDEVWRLEKIGKDGAFHKRLSRENINTVKDFLTMLCINPPRLQHVRFFCFISLFVKLGV

SEQ ID NO: 67467 - protein, 147 aa, Gossypium hirsutum
  Clone ID: GOSHI-09MAY01-C2563_1.pep
MKASLKGRYANEKNTAGATLVVNAGDVKLRASMSDATFVDGPSLNGLTLAVEKPGFFIVDYDVPKKDFRFQFMNTVRVAEMPLKLTYSHSRGDNRTAVEGAFMFDSANTVSANYVLGTRNRKLKYSYVHGGDTTFEQCYDWGKMAWD

SEQ ID NO: 67468 - protein, 138 aa, Gossypium hirsutum
  Clone ID: GOSHI-09MAY01-C102528_1.pep
RDLEPEIYHGTTLCKQKTQDLLDHFHLPKGLMPLSHINEFGYNKITGFIWLNQEKTVKYLFKELGLSSYGAEITAFIGDRQLKKLTGVKSKEMMIWITVSDISVDDTKVPSKICFANSMGLSKSYPVIAVEDEPKEMK

SEQ ID NO: 67469 - protein, 186 aa, Gossypium hirsutum
  unsure (1)..(186): unsure at all Xaa locations
  Clone ID: GOSHI-09MAY01-C2513_2.pep
EYLLWFNSEKVEITFLPAEKSKFAFVSAIEVISAPKGVRLETAQSVNGDKVENLNKQAFEVMYRVTIGGPKVTPFNDSLWRTWLPDDDYFKSKEGSNRVYFSGRIKYQEGGASREVGPDNVYNSARLIESKNASIPNVNLSWEFPVIEGYQYLVRLHFCDIASXPLGLWFFNGYGNGHLAYKDLDP

SEQ ID NO: 67470 - protein, 234 aa, Gossypium hirsutum
  Clone ID: GOSHI-09MAY01-C2513_1.pep
RSVETWLPDDDYFRSKEGSNRVYFSGRIKYQDGGASREVGPDNVYNSARLIESKNASIPNVIEGYQYLVRLHFCDIASISLGLLFFNVYDGHLAYKDLDPSAVTNYLLASPFYVALVVDAEHSGIVNVTVGPSNKSMAYAVDAILNGVEIMKMSNWMGSFDGTLPAESVLKCLPRKRRVGFLLPLIALVCLLLSLSAIIRRRNEKVESVLWSKLPMEVHEISPKQGKQQLSSKV

SEQ ID NO: 67471 - protein, 57 aa, Gossypium hirsutum
  Clone ID: LIB3166-010-P1-K1-H1.pep
LLISSAINTQEQSKGSRNSFFSLSNTSKLTLQAEYPSKLPIQLLNIHDLRTRGRTRG

SEQ ID NO: 67472 - protein, 76 aa, Gossypium hirsutum
  Clone ID: GOSHI-09MAY01-C2503_1.pep
PFFRSLPVHIFFFFSSLIQKPKSGFLFFEFKIHYPIIKNPFFSQFKKAACLVCLILPQPTILKVFFLYKFPSFCFS

SEQ ID NO: 67473 - protein, 71 aa, Gossypium hirsutum
  Clone ID: uC-gsflnu33B110c11b1.pep
MASSSGTSSGSSTMVTNSGSDEDLQALMNERKRKRMISNRESARRSRMRKQKHLDDLVAQVSQLQNENHQI

SEQ ID NO: 67474 - protein, 100 aa, Gossypium hirsutum
  Clone ID: GOSHI-09MAY01-C2533_2.pep
MVIGMCRSFRDRALDRCYHCFPCLSDPARRSSLVLKVTLVMLHLVYVGILFLFDSDLIDKTKKEPWYTALYLLLFFATLVQYFITSGSSPGYVLAALRVC

SEQ ID NO: 67475 - protein, 93 aa, Gossypium hirsutum
  Clone ID: LIB3543-036-Q1-K1-G11.pep
MVIGMCRSFRDRALDRCYHCFPCLSDPARRSSLVLKVTLVMLHLVYVGILFLFDSDLIDKTKKEPWYVWYSIRCYYFILDEKLELDTFIPPLH

SEQ ID NO: 67476 - protein, 235 aa, Gossypium hirsutum
  Clone ID: GOSHI-09MAY01-C2493_1.pep
MSFSFFKPSRPKTPPEVAKAIKDSLNALDTKTVAEVKALEKAMEEVEKNFVTMRCMLSGDGEVEPNVEQVSQLALEISKEDVISLVVHKLPILGWEARKDLVHCWSILLKQQVDSKYCCVEYIEKHLELLDFLVVCYDNKEIALIWGNMLRECIKFPSLAQYILNSASFVLFFKFVELPNFDVASDAFSTFKDILTKHASLVAEYLTGHYDEFFDLYEKLLTSSNYVTRRQSLKL

SEQ ID NO: 67477 - protein, 253 aa, Gossypium hirsutum
  Clone ID: GOSHI-09MAY01-C2453_2.pep
APSAIFWTDYVATRWYRAPELCGSFFSKYTPAIDIWSIGCIFAEILTGKPLFPGKNVVHQLDLMTDTLGTPPPESISRIRNEKARRYLSSMRKKQPIPFSQKFPNVDHLALRLLERLLAFDPKDRPTAEEALADPYFYGLANVDREPSTQPISKLEFEFERRKLTKDDVRELIYREILEYHPPMLQEYLRGGEQTSFLYPSGVDRFKRQFAHLEEHYGKGERSTPLQRQHASLPRERVPAPKEEKVAENNDTG

SEQ ID NO: 67478 - protein, 167 aa, Gossypium hirsutum
  Clone ID: GOSHI-09MAY01-C2453_1.pep
ANVFHRDLKPKNILANADCKLKICDFGLARVSFNDAPSAIFWTDYVATRWYRAPELCGSFFSKYTPAIDIWSIGCIFAEMLTGKPLFPGKNVVHQLDLMTDTLGTPPPESISRIRNEKARRYLSSMRRKQPVPFSQKFPNVDPLALRLLERLLAFDPKDRPTAEEHC

SEQ ID NO: 67479 - protein, 351 aa, Gossypium hirsutum
  Clone ID: GOSHI-09MAY01-C2443_1.pep
MVGYMKKEVVEDVVIVAGLIGVQFFFAGNSVLLGYLMSLGLKPFTIVIFFSFSTFLVVSPFAVHFERSKWPKQLTLKLIIQLVSISFSGVSLFQFLFLKGINLSSPAMATAMPNLAPALIFIIAWTCRLEKVALSCLYSKVKIAGTILCVLGALTMSLMQSTVSSKDATAMPPLTDVDTDMIFDKDKISGCLYLVAAVFVLSSNIVLQGITLGDLPAPMSLCALTSFIGMIITAIVQLVEDHALQWASPFVSFKDLIIFSLMAGAMGGASVSFNGWAMKKRGPVFVSMFSPIGTVIAVVFSFITLGETISLGSFAGMLLMFTGLYVVLWAKRKELYCDIEEGVDAEKPLLN

SEQ ID NO: 67480 - protein, 213 aa, Gossypium hirsutum
  Clone ID: GOSHI-09MAY01-C2463_1.pep
MRYVMSYSTRFIKLCQKTFYMVDGVPPRGRATPTIIGAKEMLAYLGAKANAGVAGQKVVVTDLREEAVVYIHGTPFVLRELNKPVETLKHVGITGPVVENMEARLKEDILSEVRQSGGRMLLHREEYCPSSNQSSVVGYWENIFPDDVKTPAEVYAALKDEGYNIAYRRIPLTREREALASDVDEIQNCRDESSACYLYVSHTGFGGVAYTMA

SEQ ID NO: 67481 - protein, 197 aa, Gossypium hirsutum
  Clone ID: GOSHI-09MAY01-C2793_1.pep
MSWQAVVSSAQQPSRLFPANHSLELRSAPVVHNANSENPNVISHVPSLLQNGGSGPRTGSSSNSNPFADRDVPRARHKSRSMARNILHHPMFVPAPELRTLVRNPILSSGNISSPGNVASTSHARSNNGANVMSASTWVPHPNPSSQYPRRLSELVRQSLMSSLGTESGGQSNHSSLASGPTTSSEAMLLYSHVASQ

SEQ ID NO: 67482 - protein, 306 aa, Gossypium hirsutum
  unsure (1)..(306): unsure at all Xaa locations
  Clone ID: GOSHI-09MAY01-C2783_1.pep
VVYKGELHDGTKDCVWEGNGIWGYLGGKGSTLNLCPEIAVFDQRSDHRHFWLXLLGYCLDGNEKLLVLWGACAQGTXLSRHIFNWEEEGLKPLEWTKRLTIALDVARGVEYLHGLAHQSFIHRDLKPSNILLGDDMRAKVADFGLVRLAPEGKASIETRIAGTFGYLAPEYAVSGRVTTKVDVFSFGVILMELITGRKALGESQPEESIHLVTWFKRMHINKDSFRKAIDPTIDLNEEXTLASISTVAXELPGNCLPREXYERPDLGQAENVLSXLGELWETTINGLKHIGIDLKCHCPSLKKCSL

SEQ ID NO: 67483 - protein, 142 aa, Gossypium hirsutum
  Clone ID: LIB3146-017-Q1-K1-C10.pep
PTRSEESIHLVTWFKRMHINEESFRKAIDPTIDLNEETLASISTVAELAGHCCAREPYQRPDMGHAVNVLSSLVELWKPTDQCSENIYGIDLEMSLPQALKKWQAYEGQSNLESSSSSLLPSLDNTQTSIPTRPYGFCESFT

SEQ ID NO: 67484 - protein, 448 aa, Gossypium hirsutum
  Clone ID: GOSHI-09MAY01-C2743_1.pep
MMAGPNPPKQPSSSSNNHRKSRWESSSSSANKNPSSTTADHKSSTKPSPSTRTGPPPSSAAHNKSQSDPNQAHPPFPFPDPAALGPPPPPAYGFHMLERRTIVLYDGSVRSYFALPPDYQDFPTRPILGPRDFGSPSMGFRDNRDYWNSPSDGPGPLKRKYGDEGKDLREEKIEKIYPLGPGGSDRLTDEVIQSALRKAFLHFVRQFACAPRPKRILRRVGEQGRLQCLACGKSYAHFRSSKDFSDMHGLIMHTYYSDNADLRVAHLGLRGALCVLMGWNYSEAPDNSKAYRFLPADEAVSNQEDLIMWPPVVIVHNTITGKGKDGRMEGLGNKAMDSKLRDLGFGSGKCKSMYGREGHLGITVVKFASDQSGLIDAVRLAEYFEKENRGRKAWSHLQPLTLGKDDDDKNPNLVKVDERNGQKKRIFYGYLGTVADLDKVDFDTRTRL

SEQ ID NO: 67485 - protein, 222 aa, Gossypium hirsutum
  unsure (1)..(222): unsure at all Xaa locations
  Clone ID: GOSHI-09MAY01-C2773_3.pep
MAIETDQKSSYDGKVWGFFKLPFRQTGNTSSTTSSSSAQTQPHLEGSDHHASANSVSSVAKSLLPTRRRLKLDPANKLGGPYEPGKQVRSAVRIKNTSKSYTAFKFQTTAPKSWFMRPPGAILAPGESIIATVXFLQFDEQMDQVAIEQILRVVFLDPERPCPALEKLKCQLDEADAALEARKKPPEDSGPRIIGEGLVIDEWKERRERYLARQQVEGVDSA

SEQ ID NO: 67486 - protein, 164 aa, Gossypium hirsutum
  Clone ID: GOSHI-09MAY01-C2773_2.pep
MAIDTEQKSPSDGKVWGIFKLPFRQTGNNTRTTPSSSSASNLYVQTQPHVEGSNHHGSAISVSSVAKSLLPTRRRLKLDPANKLYFPYEPGKQVRSAVRIKNTSKSYTAFKFQTTAPKSCFMRPPGAILAPGESIIATVFKFVEPPENNEKQMDQKSRVKFKNM

SEQ ID NO: 67487 - protein, 263 aa, Gossypium hirsutum
  Clone ID: GOSHI-09MAY01-C2773_1.pep
MAIGAEHKPQSDVRVWGFSKLPCRQTGNATGTTSSSSLSSNLYADALPPLEGSDRHASANSVSPVAKSLLPTRRRLKLDPANKLYFPYEPGKQVRSAVRIKNTSKSYTAFKFQTTAPKSCFMRPPGAILAPGESIIATVFKFVEPPENNEKPMDQKSKVKFKIMSLKVKGPMDYVPELFDEQKDQVAIEQILRVVFLDPKRPCPALEKLKRQLADADAAVEARKKPPEDAGPRIIGEGLVIDEWKERRERYLARQQIEGVDSA

SEQ ID NO: 67488 - protein, 126 aa, Gossypium hirsutum
  Clone ID: GOSHI-09MAY01-C2763_2.pep
SSGRSFRVGDKIWFAYAAAQESIAEVNSPEEYESCDVSTPASVYTDGIDGIPLDGEGIRYFVSGKEESCKNGLKLHVEVMPFGNPEPEKPRVAVAAAAPTTPSGSARLYGSSVLLLVGLWLCHMAI

SEQ ID NO: 67489 - protein, 171 aa, Gossypium hirsutum
  Clone ID: GOSHI-09MAY01-C2763_1.pep
MAIVKMVMAVVIMAASLGGKLGAAQVHHVVGGDRGWDVSSDVASWSSGRSFRVGDKIWFAYAAAQESIAEVNSPEEYESCDVSNPIRMYTDGIDGIPLDGEGIRYFVSGKEESCKNGLKLHVEVMPFGNPEPERPRVAVAAAAPTTPSGSARLYGSSVLLLAGLWLCYMAI

SEQ ID NO: 67490 - protein, 83 aa, Gossypium hirsutum
  Clone ID: LIB3584-007-P1-K1-F6.pep
GAQLAPPPQFRCSVTMAIVNMVMAVVIMAATLGGKLGAAQVHHVVGGDRGWDLSCGGASWSSGRSFRVGDKICKLLLYSFFIN

SEQ ID NO: 67491 - protein, 126 aa, Gossypium hirsutum
  unsure (1)..(126): unsure at all Xaa locations
  Clone ID: GOSHI-09MAY01-C2723_7.pep
MIEKLKTKIINSFVWLLCWGPRRSHRKMVKAVAVLSSSEGVSGTVFFTQEGDGPTTATGNISGLKPGLHGFHVHALGDTTNGCMSTGPHFNPAGKDHGAPEDVNRHAVDLGXNVTVDACGFASFFI

SEQ ID NO: 67492 - protein, 152 aa, Gossypium hirsutum
  Clone ID: GOSHI-09MAY01-C2723_1.pep
MVKAVAVLSSSEGVSGTVFFTQEGDGPTTVTGNISGLKPGLHGFHVHALGDTTNGCMSTGPHFNPAGKEHGAPEDVNRHAGDLGNVTVGADGSASFSIVDKQIPLSGPHSIIGRAVVVHADPDDLGKGGHELSKSTGNAGGRVACGIIGLQG

SEQ ID NO: 67493 - protein, 138 aa, Gossypium hirsutum
  Clone ID: uC-gsronu33B168h09b1.pep
MEYRKIKDEDNDGGTVSNDIENLRGIGFSGVASVSNVPPREQAKWKRKTVVTVALTFLTSSQAILIVWSKRARKFVNKSKRTLVLCWFSDSKECGLLTDALAIYSKLSFAECLILVLYFLVRGLMIHECFKPFSWLIV

SEQ ID NO: 67494 - protein, 123 aa, Gossypium hirsutum
  unsure (1)..(123): unsure at all Xaa locations
  Clone ID: uC-gsflnu33B011a02b1.pep
ASVSNVPPREQAKWKRKTVVTVALTFLTSSQAILIVWSKRAGKYEYSVTTANFLVETLKCALSLAALARIWKSEGVTEDNRLSTTLDEVIVYPIPALLYLVKNLLQNFIFAYVDAPXYQILMN

SEQ ID NO: 67495 - protein, 73 aa, Gossypium hirsutum
  unsure (1)..(73): unsure at all Xaa locations
  Clone ID: LIB3828-028-Q6-K6-A12.pep
MGKAEADLISSEGVSGTVFFTQEGDGPTTATGNISGLKPGLHGFHVHALGDTTNGCMSTGPHFNPXGKEHGAP

SEQ ID NO: 67496 - protein, 148 aa, Gossypium hirsutum
  unsure (1)..(148): unsure at all Xaa locations
  Clone ID: LIB3584-007-P1-K1-A12.pep
DKNHKQIHVEGDLVPKEGGGGGFFVLSSSEGVSGTVFFTQEGDGPTTATGNISGLKPGLHGFHVHALGVTTNGCVSTGPHFNPAGKEPGAPVDVNRHAGDLGNVTVGAVGSCGFSFAGXLFPLSGPLSFFACVCFVSAAPFVLGGGGH

SEQ ID NO: 67497 - protein, 62 aa, Gossypium hirsutum
  Clone ID: uC-gsronu33B160f01b1.pep
MAKASVKRPHSFESENQHKTRVLLLLFTNFLVHIQSLLVGHCISTQCIIPAHQDCSFTLADR

SEQ ID NO: 67498 - protein, 116 aa, Gossypium hirsutum
  Clone ID: LIB3166-006-P1-K1-E4.pep
VELGVFTQDGDGPTTATGNISGLKPGLHGFHVHALGDTTNGCMSTGPHFNPAGKEHGAPEDVNRHAGDLGNVTSGADGSASFSIVDKQIPLSGPHSIIGRAVVVHADPDYLGKGGH

SEQ ID NO: 67499 - protein, 97 aa, Gossypium hirsutum
  Clone ID: LIB3189-047-P1-K1-D3.pep
MEYRKIKDEDNDGGTGSNDIENLRGIGFSGVASVSNVPPREQAKWKRKTVVTVALTFLTSSQAILIVWSKRAGKYEYSVTTANFLVETLKCALSLAT

SEQ ID NO: 67500 - protein, 81 aa, Gossypium hirsutum
  Clone ID: GOSHI-09MAY01-C2693_2.pep
QFENQPSPPPIHLGRSTSGPPRLHPIPESEVRAVLLHLLPLNVNGMLTFIPFLTLYFFLLTLIHHSFPYTVFLPPLISQSL

SEQ ID NO: 67501 - protein, 202 aa, Gossypium hirsutum
  Clone ID: GOSHI-09MAY01-C2693_1.pep
MELSLDLSSVFVPKTITEFLKEALKTGPAFPGPPAFGDYVKRLEEEMKKIDGFKRELPLCMLLLKDGIERLKVEEVQCKETNDGLPLKENDDSDKTGWVSSVQLWNSDFNIVDHNKKPNTVSELKPRSGREEEEDMSENPIKVCNSKSRGGAFVPFKDISGIPLMNPSFELVSCNGILRNNGGCSIGSGSSLTAVKTHIKFQ

SEQ ID NO: 67502 - protein, 184 aa, Gossypium hirsutum
  unsure (1)..(184): unsure at all Xaa locations
  Clone ID: LIB3829-004-Q6-K6-H1.pep
MELNLALSLVYVPKTISEFLKEVSKTKXFQRLSKITDYLQRLEDEMKKIDAFKRELPLCMLLLKDGIERLKEEEIQCKEMNDGSVTEENGRETMDNDGGDKKNWMSSVQLWNSNFNNVDPHNKPNTVPELKLTSEEGEDGSESENPIEICNKQRKGGXXVPFKEQADKKVSGLSLMTPSSELAS

SEQ ID NO: 67503 - protein, 98 aa, Gossypium hirsutum
  Clone ID: LIB3272-012-P1-K1-A9.pep
MELNMDVDLVYVPETVSEFLKQASKIKNGFQRLCKISDYVRRLEDEMKKIDAFKRELPLCMLLLKDGILFVYFFSILSGIKFDIFNGILAIKRKKRER

SEQ ID NO: 67504 - protein, 342 aa, Gossypium hirsutum
  unsure (1)..(342): unsure at all Xaa locations
  Clone ID: GOSHI-09MAY01-C2683_2.pep
SPLGGDESVQAGPSLQVPESEFEDGKLDIQNTGVPLVDHCHGEFDISTLQIIKNVDLEELRELGSGTFGTVYHGKWRGTDVAIKRIKKICFTGRSSEQERLTVEFWREADILSKLHHPNVVAFYGVVQDGPGGTLATVTEFMVNGSLRHVLLSKDRQLDRRKRLIIAMDAAFGMEYLHSKNIVHFDLKCDNLLVNLKDPVRPICKVGDFGLSKIKRNTLVTGGVRGTLPWMAPELLNGSSSKVSEKVDVFSFGIVLWEILTGEEPYANMHYGAIIGGIVSNTLRPPVPSYCDPEXKLLMEQCWAPDPVVRPSFTEIARRLRIMSSACQTKPQGHQMQNQASK

SEQ ID NO: 67505 - protein, 207 aa, Gossypium hirsutum
  unsure (1)..(207): unsure at all Xaa locations
  Clone ID: GOSHI-09MAY01-C2683_1.pep
GTFYLDAGFLQPQIVNGPGGYVLEDVPHLSDYIPDLPVYSNPLQDNPAYSVVKQYFVHVDDTVPQKIVVHKNSPRGVHFRRAGPRQKIYFDSDDVHACIVTCGGLCPGLNTVIREIVCGLFHMYGVKKVSGIDGGYRGFYAKNTVHLDPKVVNDIHKRGGTILGTSRGGHDTSKIVDSIQDRGINQVYIIGGDGTXRGASVIFEEIR

SEQ ID NO: 67506 - protein, 206 aa, Gossypium hirsutum
  Clone ID: GOSHI-09MAY01-C2643_1.pep
IIHIHYYHLIAGKKLHKYLPDEDYFQNGLYMFDIGQNDLAGSFYSKTFDQILALIPLILTEFETGIKTLYDQGAKNFWVHNTGPLGCLAQNVAKFGTDPSSLDELGCVSKHNQAAKVFNLQLHTLCKKLQGRYADSNFTYVDIYTIKWNLIANYSKFGFDQPIMVCCGYGGPPLNYDSRIGCGKTEVLNGTTMTAKACSDSSEYVN

SEQ ID NO: 67507 - protein, 243 aa, Gossypium hirsutum
  Clone ID: GOSHI-09MAY01-C2673_2.pep
MAQAVEEWYKQMPIITRSYLTAAVVTTIGCSLEIISPYHLYLNPKLVVKQYQFWRLITNFLYFRKMDLDFMFHMFFLARYCKLLEENSFRGRTADFFYMLLFGASVLTGIVLVGGMIPYLAASFAKIIFLSNSLTFMMVYVWSKQNPFIHMSFLGLFTFTAAYLPWVLLGFSVLVGASAWVDLLGMIAGHAYYFLEDVYPRMTGRRPLKTPSFIKAMFADEAVVVARPANVRFAPPADELHGD

SEQ ID NO: 67508 - protein, 244 aa, Gossypium hirsutum
  Clone ID: GOSHI-09MAY01-C2673_1.pep
MAQAIEEWYKQMPVITRSYLTAAVAITIGCSLEIISPYHLYLNPKLVVKHYQFWRLITNFLYFRKMDLDFMFHMFFLARYCKLLEENTFRGRTADFFYMLLFGASVLTGIVLIGGMIPYLSASFARIIFLSNSLTFMMVYVWSKQNPFIHMSFLGLFTFTAAYLPWVLLGFSVLVGASAWGDLLGMIAGHAYYFLEDVYPRMTGRRPLKTPSLIKARFADEDVVVAQPQNVRFAPPPAEELHRD

SEQ ID NO: 67509 - protein, 110 aa, Gossypium hirsutum
  Clone ID: GOSHI-09MAY01-C2603_5.pep
LPNLTAEPPRVLTRLSHITHLLSCLFALLTLPRSFTYQKLIPKSSDCKSHMDRRKIKTFSWFPRCRRWWWRWCSTWRRWRSPPHRRWGRCRCPTHRRGGRCRCSTHRRWG

SEQ ID NO: 67510 - protein, 222 aa, Gossypium hirsutum
  Clone ID: GOSHI-09MAY01-C2603_4.pep
LYVDHVILKCVGYFLFHEHVNFGYNTGGLIQLNHGRPQPLQYVVNAAFLAALYSDYLDAADTPGWYCGPNFYSAAVLREFAKTHIDYILGKNPRKMSYVVGFGNHYPKHVHHRGASIPKNKIKYNCKGGWKWRDTCQELNQSGPSYCTHFNHQQSPYSVHTPRKNKIISFPLHNLVFGVFFGVFQTHVIPTRWPAQWATCLPSTREWNTTATAVFSILIPVV

SEQ ID NO: 67511 - protein, 146 aa, Gossypium hirsutum
  unsure (1)..(146): unsure at all Xaa locations
  Clone ID: GOSHI-09MAY01-C2603_3.pep
YTTDVLREFAMAEIDYILGKNPQKKIFVVYKDNHSPTHVHHICASIPKNNIRYNCXGGWKWMDSKKPNPNTLVGAMVAGPDKHDGFHDVRTNYNYTEPTLAGNAGLVAALVALSGDKSTGIDKNTIFSAVPPMFPTPPPPPAPWKP

SEQ ID NO: 67512 - protein, 311 aa, Gossypium hirsutum
  unsure (1)..(311): unsure at all Xaa locations
  Clone ID: GOSHI-09MAY01-C2603_2.pep
MYGRDPWGGPLEINATDSATDDDRSRNLQDLDRAALSRPLDETQQSWLLGPGEQKKKKKYVDLGCIIVSRKIFVWTVGTLLVSALLAGLITLIVKTVPRHHHRHSPPDNYTLALHKALMFFNAQRSGKLPKHNNVSWRGNSGLQDGKSDPSVLMKDLVGGYYDAGDAIKFNFPASFSMTMLSWSVIEYSAKYEAAGELNHVKEIIKWGTDYLLKTFNNTADTIDRIAAQVGIGDTSGGVSAPNDHYCWMRPEDIDYPRPVYECHSCSDLAAEMAAALASASIGFKDNKAYSQRLVHGAPTLXKFARDQKSR

SEQ ID NO: 67513 - protein, 420 aa, Gossypium hirsutum
  Clone ID: GOSHI-09MAY01-C2603_1.pep
PASAQRPGGTGCLLKTFNNSADTIDRIAAQVGVGDTSGGSSAPNDHYCWMRPEDIDYPRPVYECHSCSDLAAEMAAALASASIVFKDNKAYSQKLVHGARTLFKFARDQRGRYSAGGSDPALFYNSSSYWDEFVWGGAWLYYATGNSSYLQLATHPKLAKHAGAFWGGPDYGVLSWDNKLAGAQVLLSRLRLFLSPGYPYEEILSTFHNQTSIIMCSFLPVFTSFNRTKGGLIQLNHGRPQPLQYVVNAAFLAALYSDYLDAADTPGWYCGPNFYSTDVLREFAKTQIDYILGKNPRKMSYVVGFGNHYPKHVHHRGASIPKNKIKYNCKGGWKWRDTSKPNPNTLVGAMVAGPDKHDGFRDVRTNYNYTEPTLAGNAGLVAALVALSGDKATGIDKNTIFSAVPPMFPTPPPPPAPWKP

SEQ ID NO: 67514 - protein, 78 aa, Gossypium hirsutum
  Clone ID: LIB3146-030-Q1-K1-E3.pep
VLLSRLRLFLSPGYPYEEILSTFHNQTSIIMCSFLPVFTSFNRTKGGLIQLNHGRPQPLQYVVNAAFLAALYSDYLDA

SEQ ID NO: 67515 - protein, 114 aa, Gossypium hirsutum
  Clone ID: GOSHI-09MAY01-C2633_1.pep
MATRMSVRYVSRRFSSGSGKILSEEEKAAENIYIQKTEREKLEKLARKGPKPEEKPDAGSGGAATDGSTTSTSGTSAEKVSTDKYRNYGVLAGVATLGAAVGWYLNSKDKKQEA

SEQ ID NO: 67516 - protein, 93 aa, Gossypium hirsutum
  Clone ID: LIB3189-012-P1-K1-H5.pep
MATRMSVRYVSRRFSSGSGKILSEEEKAAENIYIQKTEREKLEKLARKGPKPEEKPCAGSGGAATDGSTSFTFGTSAEKVSTDNYRNYGVSCW

SEQ ID NO: 67517 - protein, 44 aa, Gossypium hirsutum
  Clone ID: LIB3147-036-Q1-K1-H2.pep
SVTFTFITFFSFFFDGMKSRTPLFGKEKNISWHQRFFKSQCRKP

SEQ ID NO: 67518 - protein, 91 aa, Gossypium hirsutum
  unsure (1)..(91): unsure at all Xaa locations
  Clone ID: GOSHI-09MAY01-C2623_1.pep
PSVRRIESCRAASTDYSKKGKAFLEMLNYCIDQIRAPTCENRVFIRCDVNFDTSTYGKNLNTXIGRAAHIEFLESDIFARFIMWSFPELFK

SEQ ID NO: 67519 - protein, 207 aa, Gossypium hirsutum
  Clone ID: GOSHI-09MAY01-C2193_2.pep
MGKKRKSIATSLDEVDRTMYASFCSAANSLSQLYTQAMNQQKLSFQAGKGHSLEKLYQWIWRQQEGGSRVTTMDILNYLQNEIDYCGEEPSMSPRAPSQQHQSQPTMQFMNTSFMVSSGSSGQTAVQGTRPDYSDQQPKNSIFSNALSSPILQSLQHYHIAQEGYSTNGLPHESNFLHPPTRDSNPFSSNDSSMDMHADSPSHESTY

SEQ ID NO: 67520 - protein, 214 aa, Gossypium hirsutum
  Clone ID: GOSHI-09MAY01-C2193_1.pep
MGKKRKSIATSLDEVDRTMYASFCSAANSLSHLYTQTMNQQKLSFQAGKRHGLEKIYQWIWRQQEGGSRVTTMDILSYLQNELDYGEEPSTSPRAPSEQQHSQPAMQFMNTGFMVSTGSSGQTAVQGTRPDHCDQQSKNLVFSNALSSPVRRSLQHYHIAQEGYCPNGGLPSGNGARNNEPSFLPNQTRDSNPLSSNDSSMDMHADSPSHESTY

SEQ ID NO: 67521 - protein, 81 aa, Gossypium hirsutum
  Clone ID: LIB3048-024-Q1-L1-B8.pep
HLYTQAMNQQKLSVQAGKRHGLEKIYQWIWRQQEGGSRVTTMDTPLSLLLIFLTLNDEVLPLFLCQLCFFTVFIMQNSLVC

SEQ ID NO: 67522 - protein, 144 aa, Gossypium hirsutum
  Clone ID: LIB3584-048-P1-K2-F8.pep
MGKKRKSIATSLDEVDRTMYASFCSAANSLSHLYTQAMNQQKLSFQAGKRHGLEKIYQWIWRQQEGGSRVTTMDILSYLQYICFEDSKGWFSLLKCGDLLVILLARVTLNELDYGEEPSMSPRAPSQQQHSQPAMQFMNTGFMV

SEQ ID NO: 67523 - protein, 94 aa, Gossypium hirsutum
  Clone ID: LIB3147-010-Q1-K1-D7.pep
MGKKRKSIATSLDEVDRTMYASFCSAANSLSQLYTQAMNQQKLSFQAGKGHSLNEIDYCGEEPSMSPRAPSQQHQSQPTMQFMNTSFMVSSGSS

SEQ ID NO: 67524 - protein, 88 aa, Gossypium hirsutum
  Clone ID: LIB3083-120-Q1-L1-H5.pep
LFGSTDTKSRGCKSFITAWFFGLSSITSMLRRATALMAAFLEETEPGTMNLAFYQTRLGSQILLALMTPQRTCMPIGHLMNLPTENAR

SEQ ID NO: 67525 - protein, 223 aa, Gossypium hirsutum
  unsure (1)..(223): unsure at all Xaa locations
  Clone ID: GOSHI-09MAY01-C2153_1.pep
MESNSWSFRFSNSSSSSSSSSRRRQSRSDLFLGGGYEEIDGDEDFKAQFLCPFCAEDFDIVGLCCHIDEEHPVEAKNGVCPVCAKRVGMDIVSHITMQHGNFLKVQRKRRLRKGGSNLTFSMLRKELREGNLQALLGGSSFLPSPNVEXDPVLSSFMFSPPTVDKPLSLQPLSIAEASVVKESGNKEFLGRKPQQSQLSDKDHEEKARRCEFIQGLVMSTFLD

SEQ ID NO: 67526 - protein, 64 aa, Gossypium hirsutum
  Clone ID: LIB3585-001-P2-N1-H6.pep
LFGSKKKKLLCFLEKMESNPWSCRSSNATYTASPSKRRRQSRSDLVLGGGYEEIAGDEDFKAQF

SEQ ID NO: 67527 - protein, 87 aa, Gossypium hirsutum
  Clone ID: GOSHI-09MAY01-C102128_1.pep
PYTCFTLSPKYTGPKWPNSLTGDRKAEGFRNPRRHKHPNRRVRRLAVTHHQCRDSMFRITPGLTPESTPVCRCQFPFTTRPSLISAK

SEQ ID NO: 67528 - protein, 154 aa, Gossypium hirsutum
  unsure (1)..(154): unsure at all Xaa locations
  Clone ID: GOSHI-09MAY01-C2133_1.pep
SCLPILLHLRVLFLCFLSVNVADLDSDKQALLRFSARVPHGRKLNWSSATPVCTSWVGINCTKDQSRVMALHLPGVGLHGPIPANTLGKLDALMILSLRLNSLSGNLPTDVLSLPSLRYIYXLQHSNLFRAHPFISSLPIWISLDLSFNSLTGT

SEQ ID NO: 67529 - protein, 156 aa, Gossypium hirsutum
  Clone ID: GOSHI-09MAY01-C2093_1.pep
MHRANESAWASASASASADKFDEEVARVMEQARELHESGASLLWKISNEEQSLRQKAISLESSIRRVRSSINSLVSKKLLDPKFASKLEEDLQSASSILTDGEAAAFLPAKAQGRFLRMFLGPINVRASRKEVHMKVKEEYNGYSDRTALPGLLFP

SEQ ID NO: 67530 - protein, 152 aa, Gossypium hirsutum
  Clone ID: GOSHI-09MAY01-C2043_1.pep
MLSTKSESDITSLAPSSPSRSPKRPVYYVQSPSRDSHDGDKSSTMQPSPMESPSHPSSVGRHSRNSSASRFSGIFRSSSGRKGGRKRNDKGWPECGVIMEEGPYDEFEDKAFTRRCQALIALFTFVVLFTVFCLIIWGASRPYKAEILVKVC

SEQ ID NO: 67531 - protein, 165 aa, Gossypium hirsutum
  Clone ID: GOSHI-09MAY01-C2353_1.pep
MDSSSGEESDLSESEINEYKEKPYEEIRSGKYKVKALNGSLRCPFCAGKKKQDYKYKDLLQHASGVGKGSANRSAKQRANHLALAKYLEIDLASEADETSRPTVPQAVDETPEQTELYVWPWMGIIMNIVAESKNIDTLHDKGYWLKRFAKYKPINVQCFWNEVI

SEQ ID NO: 67532 - protein, 128 aa, Gossypium hirsutum
  unsure (1)..(128): unsure at all Xaa locations
  Clone ID: LIB3583-061-P1-K1-B2.pep
MDSSSGEESDLSESEINEYKEKPYEEIRSGKYKVKALNGSLRCPFCAGKKKXDYKYKDLLQHASGVGKGSANRSAKQRANHLALAKYLEIDLASEADETSRPTVPQAVDETPEQTELYVWPWMGNNMN

SEQ ID NO: 67533 - protein, 261 aa, Gossypium hirsutum
  unsure (1)..(261): unsure at all Xaa locations
  Clone ID: GOSHI-09MAY01-C2343_1.pep
SLLLQRGLPSTAHASAGLGHSLISLPTQLTSHFSSAGFAPIFALCLAPKGVMFFGDSPYYMLANVDITRPLSYTPLIISPQGEYYMEVKSIKINXRMLPLDTXLLSINKQGVGGTKLSTINPYTILHHSIFKAVTQFFSKELSAIPQVKPVAPFGVCFKSKSIKNSRVGLEVPNIDLVLHDKHVMWRIYGANSIVEAAPGVSCLAFPRGGMDNNGASIIIGAYQMENNLVQFDKARSRLGFSSSLLFYKTSCNNFNFTAIP

SEQ ID NO: 67534 - protein, 116 aa, Gossypium hirsutum
  Clone ID: GOSHI-09MAY01-C2373_1.pep
TIRVMTLCSAAPADSCDIMGCSRLHHLHLQEKAAQLHFLFQEKLWCPMMESTSTQEVIQTSLTNQQGIQGSIPYISSATTAWVAVPLVNLIRLQSAGIYISSLCSFLIQVSIFHAN

SEQ ID NO: 67535 - protein, 61 aa, Gossypium hirsutum
  Clone ID: GOSHI-09MAY01-C102268_1.pep
SARPILTDRWVAPTGPRVKINFGASVFTAEALAGFWAIHLGLFLQLREVEIEGDSRSVIHR

SEQ ID NO: 67536 - protein, 557 aa, Gossypium hirsutum
  Clone ID: GOSHI-09MAY01-C2243_1.pep
MHAPVLVLKDSLKRESGTKVHHANIQASKAVADIIRTTLGPRSMLKMLLDASGGIVVTNDGNAILRELDLAHPAAKSMIELSRTQDEEVGDGTTSVIVLAGEMLHVAEAFIEKNYHPTVICRAYNKALEDAIAVLDKIAMSIDVKDRATMLGLVKSCIGTKFTSQFGDLIADLAIDATQTVGVDLGQGLREVDIKKYIKVEKVPGGQLEDSKVLKGVMINKDVVAPGKMKRKIVNPRIILLDCPLEYKKGENQTNAELVKEEDWEVLLKMEEEYIESLCLQILKFKPDLVVTEKGLSDLACHYLSKAGVSAIRRVRKTDNNRIAKASGAVIVNRPDELQESDVGTGAGLFEVKKIGDEFFAFIVDCKDPKACTVLLRGASKDLLNEVERNLQDAMSVARNIIKNPKLVPGGGATELTVSATLKQKSSSVEGIEKWPYEAAALAFEAIPRTLAQNCGVNVIRTMTALQGKHANGENAWIGIDGNTGAIADMKERKIWDAYNVKAQTFKTAIEAACMLLRIDDIVSGIKKKQAPGAGQGPSKPKVETEADADGEQILPD

SEQ ID NO: 67537 - protein, 50 aa, Gossypium hirsutum
  Clone ID: LIB3147-036-Q1-K1-H1.pep
TILCQSTWYGFKSKSSSLIRATYVGFEQINSSASIAADLVTLEAEKYMLS

SEQ ID NO: 67538 - protein, 67 aa, Gossypium hirsutum
  Clone ID: GOSHI-09MAY01-C2233_2.pep
PKIGLISPMSQPINPSSFLLAPHAAPATSRRCTTPPATTPSPRTSAWLPYTRQHSAVPERHAPCTCR

SEQ ID NO: 67539 - protein, 78 aa, Gossypium hirsutum
  unsure (1)..(78): unsure at all Xaa locations
  Clone ID: LIB3135-043-P1-K1-F7.pep
ANILSSIVFVIILVFFFFILFILFLFLFNFFYTIYYYLIFILIILFFIFLXISIYICIFMLYYFFFYYIFSVFNFIFK

SEQ ID NO: 67540 - protein, 239 aa, Gossypium hirsutum
  Clone ID: GOSHI-09MAY01-C3983_1.pep
KRKDVYKPEDFALGDLVWAKCGKRYSTWPAIVIDPILQAPESVLSCCVPGAICVMFFGYSKNGTQRDYAWVKQGMIFPFAEFMDRYQGQTQLFKWKQSDFQMALEEAVLAENGFLDSEHKTQQMGYTDTQPSCSSQDLDCLYTHNQDARPCDSCGSVVPLKTMKKMKKSAELLCKHCYKLRKSKQYCGICKKIWHHSDGGNWVCCDGCNVWVHAECDNISSKVFKDMENIDYYCPECKA

SEQ ID NO: 67541 - protein, 318 aa, Gossypium hirsutum
  unsure (1)..(318): unsure at all Xaa locations
  Clone ID: GOSHI-09MAY01-C3953_1.pep
VNAQGELELDPDNDNISPSKIEPTKAEAEAIARGLQTIKNDDLEEIRQLGSGTYGAVYHGKWKGSVVAIKTIQASCFAGRPAERERLIADFWXKEALILSSLHHPNVVSFYGIVRDGPDGSLATVAEVMVNGSLKQFLQKKDRTIDRRKRLIIAMDAAFGMEYLHGKXNIVHFDLKCENLLVNMRDPQRPVCKIGDLGLSKGGQHTLVSGGVRGTLPWMAPELLSGKSDMVSEKIDVYSFGIVMWELLTGEEPYADMHCASIIGGIVNNTLRPKIPSWCDPEWKALMEKCWASDAAERPPFSEISQKLRSMAAAINVK

SEQ ID NO: 67542 - protein, 128 aa, Gossypium hirsutum
  unsure (1)..(128): unsure at all Xaa locations
  Clone ID: LIB3166-008-P1-K1-F3.pep
MNPHGELEWDSDNDSGTLAKIEPTKAEEEAFARGLQIADFWKEALILSSLHHPNVVSFYGIVRDSPDGFLATVAEFMVNGSLKQFLQKKDRTIDRRKRLIIAMDVAXGMEYLHGKNIVHXDLKCENLL

SEQ ID NO: 67543 - protein, 239 aa, Gossypium hirsutum
  Clone ID: GOSHI-09MAY01-C3973_1.pep
MAASLIAKTAMFQLSKAFPRTVSLRSSANVSRVCFTTTASKRSEGRDTKAGFAYREKDISSDEDTTAEEAMERAKEYAHNAKEKTKGAFDTAADRAKDATNRAAETAQSANEKTKQKAREYAQGTKETAQSAKDKTKEGADKASQTAYELKEKSKERAQGVMEKSEEIAGSVADKASETIQNVGEKAKQTAQGAWDAAKGTTHKIKETVVGKSEEEKRMDDDVVELRRRARRESDESKY

SEQ ID NO: 67544 - protein, 55 aa, Gossypium hirsutum
  Clone ID: GOSHI-09MAY01-C3933_3.pep
LFWLTGRKLIGGSDVGGMKETQEMLDFCAKHNITADIELIRIEEINTAMERLAKS

SEQ ID NO: 67545 - protein, 359 aa, Gossypium hirsutum
  Clone ID: GOSHI-09MAY01-C3933_1.pep
MAKSAEEENQQKAFGWAATDNSGILSPFNFSRRENGDDDVTLKILYCGVCHSDLHTLRNDWGFSFYPVVPGHEISGVVTKVGKNVTKFNIGDRVGVGVLVGSCKTCECCEQDLENYCPRIIFTYNSYNPDGTKNYGGYSDMIVVDQRYVLRFPDNLPLDAGAPLLCAGITVYSPMKYYGMTEAGKHLGVSGLGGLGHVAVKIGKAFGLKVTAISSSPQKESEAINRLGADSFLVSNDPEKMKSAIGTMDYIIDTVSAVHPLLPLLSLLKVNGKLVTVGLPNKPLELPVFPLVMGRKLIGGSDVGGMKETQEMLDFCAKHNITADIELIRIEEINTAMERLAKSDVRYRFVIDVANSLSQ

SEQ ID NO: 67546 - protein, 70 aa, Gossypium hirsutum
  unsure (1)..(70): unsure at all Xaa locations
  Clone ID: LIB3146-019-Q1-K1-B12.pep
RVVPXQLITQCTMGDKINISGWCTSRYLIVGMIQACICAYMAFLDIHCPLVMPGSTHLLLCMGINMCTMP

SEQ ID NO: 67547 - protein, 89 aa, Gossypium hirsutum
  Clone ID: LIB3135-011-Q1-K1-G5.pep
NVYVNIGTVELPNMPLELPVLSLVMGRKLIGGRDVGGMKETHEMLDICDKHNITADIELIQIDEINTAMGGLAEIDVKYRCGTDVSNNM

SEQ ID NO: 67548 - protein, 537 aa, Gossypium hirsutum
  unsure (1)..(537): unsure at all Xaa locations
  Clone ID: GOSHI-09MAY01-C3883_1.pep
DVGKFYSGDCYIVLYTYHSGERKEDYFLCCWIGKDSIEEDQMMAARLANTMCNSLKGRPIQGRVFEGKEPPQFIALFQPMVVLKGGLSTGYKKSIADKGLTDETYTAESVALIQISGTAVHNNKTLQVDAVATSLNSTDCFLLQSGSSIFTWHGNQSTYEQQQLAAKVAEFLKPGVVLKYAKEGTESNAFWSALGGKQSYTSKKASTETVRDPHLFTFSFNKGKFEVEEVYNFSQDDLLTEDILILDTHADVFVWVGQCVEPXKEKKNAFEIGQKFIDMAASLEGLSPHVPLYKVTEGNEPCFFTTFFSWDSTQATVQGNSFQKKVALLFGASHAVEGQDRSNGNQGGPTQRASALAALSSAFNPSSASKASTPKPSSTSQGSQRAAAVAALSSVLTAEKKKQSPDASPIKSTSSTPAVTSPPPEAKSEVDPSELADSQEVPEAKETGVVSETSGEDSEPKQEREQDENGNGSTQSTFSYEQLKAKSENPVTGIDFKRREAYLSDEEFQAVFGMEKEAFYKLPKWIQDMLKKKVDLF

SEQ ID NO: 67549 - protein, 80 aa, Gossypium hirsutum
  unsure (1)..(80): unsure at all Xaa locations
  Clone ID: AI054904.1.pep
KASTPKPSSTSQGSQRAAAVAALSSVLTAEKKKQSPDASPIKSTSSTPAVTSPPPEAXSEVDPSELADSGRFLKPRTCSI

SEQ ID NO: 67550 - protein, 129 aa, Gossypium hirsutum
  unsure (1)..(129): unsure at all Xaa locations
  Clone ID: uC-gsronu33B114h12b1.pep
FSSRTPTRTKKGGFDIGQKFVDMAASLEGVATHVPLYKVTEGNEPCFLTTFLXWDSTQATVQGNSFQKKVALLFGASHAVEGQDRSNGNQGGPTQXASALAALSSAFNPSSALHLSLLLWLEPTHMSRT

SEQ ID NO: 67551 - protein, 202 aa, Gossypium hirsutum
  Clone ID: GOSHI-09MAY01-C3863_1.pep
MEFTEAYKQTGPCCFSPNARYIAGAVDYRLMIRDTLSFKGVQLFSCLDKISYIEWALDSEYILCGLYKRPMIQAWSLTQPEWTCKIDEGPAGIAYARWSPDSRHILTTPKFQLRLTGWSLVNTACVHVQWPKHGSKGVSFTKDGKFAAICTRRDCKDYINLLSCHSWEIMGVFAVDTLDMTDIQWSPDDSAIVIGDSPLEYK

SEQ ID NO: 67552 - protein, 300 aa, Gossypium hirsutum
  Clone ID: GOSHI-09MAY01-C3803_4.pep
MAVQAQYPSNVLFLNRGGQEEHEFSLQQQAGGVFLNQPHMLFNNGTNNKINPRKRAREVTAGAAITTPMNSYSLQMQPPQLIELSQLHQPNVVSTGLRLSFGGDQQQYQNQNLQNQQHQHQQRQQNLVPSSTLFLSVVSDELATQIKRQREELDQFLQAQGKELRRTLAEKRNRHYHALLAAAEESVARRLTQKEAEVEKATRRNAVLEARAAQLTVEVQVWQAKARAQEATATSLQAQLQQAMIGCGAAAVTPDCRIGEGPPARGPPPAPSPLARFLSSRSSLLCLLSPPFSPVLPPPF

SEQ ID NO: 67553 - protein, 393 aa, Gossypium hirsutum
  unsure (1)..(393): unsure at all Xaa locations
  Clone ID: GOSHI-09MAY01-C3803_3.pep
SALYHAILVIAIIQFISFCSYLSSTLDCYSTSQVTLACQWRVQASVSLPMILLLNRSGQEGHEFSLQQHGGGVYVDQSHMFFNSSNNNNNPRKRGREMAAVATTAPVNSFSLQTQPPQFIELSQLQRPNVVSTGLCLSFGDQQHLHQNQNQSYEHQHQNLVSSSTAFLSIISDELATQIKRQREELDQFLHAQGEALRRTLAEKRHRHFRALLGAAEESVARRLRDKEAEVEKAKRRNAELPPRLAPLSAPWIPMWQNRFPXCQARVAQLNVEAQVWQAKARAQEATAASLQAQLQQAIMSGGAAASMHDSRRGEEGVKCGEGQAVDAESAYVDPDRVVASWGPACKACRKRLASVVLLPCRHLCLCTECDRVTQACPLCLTARNSSVEAFLS

SEQ ID NO: 67554 - protein, 112 aa, Gossypium hirsutum
  Clone ID: GOSHI-09MAY01-C3803_2.pep
FPRPSKMDLYSSDGQIDANRLVNRLNDIPHRRLDVSRFQLVLAGRHRRGIGGEFFDDVVGVVLGDGFHGFLIRVDDVLEVLDASPEDLAVFGGGGWIFHDNISFVQGFFHLL

SEQ ID NO: 67555 - protein, 199 aa, Gossypium hirsutum
  Clone ID: GOSHI-09MAY01-C3803_1.pep
MNQYVFLLLSLSCLFSFSVSAAPGPEPSFITLDTHMAKPVSIMPGNFHSGLQKVCSATDEPVDCIQLLSPLMTDRTAVDPISILRVGIEATNQKVKEALDKANIIMKDPSTTPEYGEILWTCVKNFEDIIDSDQKAMEAITEHNANHIIEELSADSASVSPCEDELEAANIESPVRDIVKSIHKTIRINLAIAAVQVHF

SEQ ID NO: 67556 - protein, 129 aa, Gossypium hirsutum
  Clone ID: LIB3828-019-Q1-N6-G1.pep
KKTCIYVNINTFLRLLNPPPQKESYFTTKRVRLNNDPGKPKKKKSPKPKKRDPNSSDGQTEANRRANRLNDIPHRRHDVSRFQLDLAGKHRRGIGGELFNNVVGVGHRDGYQGFSDQDDDEPEILDARP

SEQ ID NO: 67557 - protein, 76 aa, Gossypium hirsutum
  unsure (1)..(76): unsure at all Xaa locations
  Clone ID: LIB3145-049-Q1-K1-C11.pep
LEARVAHLNVEAQVWHAKARALEATAAPLQAQLQQAIMSGGADVFMHDSKRGEEGVMCGEWQAVDAXFVYVDPDRV

SEQ ID NO: 67558 - protein, 165 aa, Gossypium hirsutum
  unsure (1)..(165): unsure at all Xaa locations
  Clone ID: GOSHI-09MAY01-C3583_2.pep
WSRWEATKGKKASFVNGGSSPSFPSQRLLALAQQLRHYKPPPCSLDEESVTPVVQNPEKFRPKRAAVLICLFEGDAGDLRVILTKRSLTMSTXSGEVSLPGGKAEEGDKDDGDTATREAKEEIGLDPSLVNVVTFLEPFLSKHLLRVVPVIGILNDRKAFQPKPE

SEQ ID NO: 67559 - protein, 216 aa, Gossypium hirsutum
  Clone ID: GOSHI-09MAY01-C3583_1.pep
KKKSRESLFPFLLVIRIWLYHAKPGFMSFSILKRLPLFSPPFVNVMASSSFYCGVQSKRFLVLAQQLRHYKPPPCSWDDNEERIIEEAAGKFVSQVGFQESVTRVAQNPEKFRSKRAAVLICLFEGDAGDLRVILTKRSSRLSTHSGEVSLPGGKADEGDKDDGDTATREAKEEIGLDPSLVNVITVLEPFLSKHLLRVVPVIGVLNDRKAFKPTP

SEQ ID NO: 67560 - protein, 221 aa, Gossypium hirsutum
  Clone ID: GOSHI-09MAY01-C3573_1.pep
MAVASNSLVSFIHGSLSQPGRTSHFLPSPSLSFPGSRSLSLKLTRRSNSPLLCSLDATNATDKDTPIETRFPAYPTVMDINQIREILPHRFPFLLVDRVIEYNPGVSAVGIKNVTINDNFFPGHFPERPIMPGVLMVEAMAQVGGLVMLQPEVGGSRENFFFAGVDKVRFRKPVIAGDTLVMRMTLIKLQKRFGIAKMEGKAYVGTDLVCEGEFLMATGST

SEQ ID NO: 67561 - protein, 329 aa, Gossypium hirsutum
  Clone ID: GOSHI-09MAY01-C3563_1.pep
GASGGGPLVCNTSNQEPCRGDIYDVVGAASASASVSSAAAAVVLKSLHHHSFSADPPFPHHFSGEMAAAPVNARVPFTAAQWQELERQTMIYKYMMASVPVPAELLIPLTKNPSNVAIKGSLELGFSSNSSDPEPWRCRRTDGKKWRSPAAPAPPQKYCERHSHKCRPRSRKPVELPNHSNININNNDHKSQTLHNMASDGTTNQPHQNPHFTNHHDPHFFTSSFDQSRCLEWFMKGETTVPFASNPEWQRTNYGVSLQAQHHLNEQFTPSLASLEGSLNLNQTHSQETRAFIDAWSIAEREVVEMEGIGAANALFLQTRSYHCHHLHY

SEQ ID NO: 67562 - protein, 402 aa, Gossypium hirsutum
  unsure (1)..(402): unsure at all Xaa locations
  Clone ID: GOSHI-09MAY01-C3533_1.pep
MKKGSVSLSHLGTFPSPGDSDYRDNGAVVSQKGWSSKRVPRSANSNGSSRRHISASSLTPFYSGRTLPSKWEDAEMWICSPVLGYGVSKNVNYHLQRRPKSKSGPIVPPGIAFYSNCSPSMNLLDGGGSGTXNLMAGSPFSTGVLMADGVSVHYLGCRAAPPAGDVDRDRSCLDLVSESSLPSSQDEKLDEIKDAEMMLCRVASRRDMATQMSPDNSSSHSSTRERSSFGHSPPPILPLPAVDNNDHPSKLDIREVQIDKRATVTNRSKRHGSRRIKKGEPDFEGFYRNSAPTSALSLDIAEAATSISKLQREEAKISAWENLQRAKAEAAIRKLEMKLEKKRSASMDKILRKLRTAQVKAQEMRSSISGKEDEQIPKTSPKFTFFHIRMSFLSSCFTCHGF

SEQ ID NO: 67563 - protein, 257 aa, Gossypium hirsutum
  Clone ID: GOSHI-09MAY01-C3443_1.pep
MSSPDIASIMDNSRELDRLRKDQEEVLVEINKLHKKLQATPEVVEKPGDSSLSRLKSLYIQAKDLSEREVVISNSLVSKLDTFLPSGAPGQQRRKMDGSDQKRRRMKSDSDISRLSPSMRSHIEACLSLKDEQVAARVTSDAEKDEWFVVKVINFDEKTKEFEVLDEEPGDDEEGGVQKKYKLPASCIIPFPKRNDPSGTQEFPAGRNFLAVYPGTTALYKATVISTPRKRKSDEYLLEFDDDEEDGALPQRTVPFH

SEQ ID NO: 67564 - protein, 78 aa, Gossypium hirsutum
  Clone ID: GOSHI-09MAY01-C3403_1.pep
SDVLSEEMGGGAHISHKLPLPRTCIVPTYPTGFSLSLFLIPTHHPPPKKKSYKFSIKHWSRTQRKKKTRSFVLESKGF

SEQ ID NO: 67565 - protein, 83 aa, Gossypium hirsutum
  Clone ID: GOSHI-09MAY01-C3793_1.pep
HNQFCPWVFGTVAAAGCSGSSADVVALCGWQLTLDALDALRSQGHMPVQTVQSESAASLYKDDHQTPGKKLHRRRPMSKNHGQ

SEQ ID NO: 67566 - protein, 129 aa, Gossypium hirsutum
  Clone ID: GOSHI-09MAY01-C3783_1.pep
IIRIKQRIEFLSVLVHFTLHISPFVIRHICRYQSRVKIPCCFSHGNIPVKVTSSRRFWTPRRQALGMSPKSRTENQGSLITRLIKNKESLLSSPGPCLGGTTFLKILISVSQVLLFSTKRFEAGAKDHV

SEQ ID NO: 67567 - protein, 311 aa, Gossypium hirsutum
  Clone ID: GOSHI-09MAY01-C3753_1.pep
HKLKLVEVEGTHTLQTTYSSIDLHLGQSMSVLFTADQPAQDYYIVVSSRFTNPVLTSTATLRYSNSAGPVSGPPPGGPTIQVDWSLNQARSIRTNLTASGPRPNPQGSYHYGLINTTRTIRLANSAGQVNGKQRYAVNSVSFVPADTPLKLADFFKIDGVYRIGSISDNPTGGGIYLDTSVMNSDYRSFIEIVFQNDEDIVQSWHLDGYSFFVVGMDGGQWTAASRNGYNLRDAVSRCTTQVYPKSWTAIYVALDNVGMWNLRSEYWARQYLGQQFYLRVFTTSTSLRDEYPIPKNALLCGRASGRRTRPL

SEQ ID NO: 67568 - protein, 163 aa, Gossypium hirsutum
  Clone ID: GOSHI-09MAY01-C3773_2.pep
RAPGLRCGGAFLSQLSDSNNKNGRLVIGGVGWGREPFLGRLRCSSNNNNSNCDAKKGVPDSNYVVPLEKSFSPSNSSCITRPLIEILRDLNKRIPHNIIKSPPNSSTFLPWYHANRMLSFYAPGWCGEVRDVIFANNGTITVVYRLTIRSSDGEAHRESTGTV

SEQ ID NO: 67569 - protein, 209 aa, Gossypium hirsutum
  Clone ID: GOSHI-09MAY01-C3773_1.pep
MAIQLRIGGGVFLSRWSPQLVLDSNNRNGRRLVIGGESWERSRFIGLVHCNSRSSNNGSSDAKKGVPNSNYVVPLNKSFSASNSSYITRPLVEILRDLNKRIPDNIVKPPSDSSSTFLPWYHANRMLSFYAPGWCGEVRDVIFSENGTITVVYRLTIRGSDGEAHRESTGTVSLSDIDIEDPVGAAEEIAFCRACARFGLGLYLYHEKQ

SEQ ID NO: 67570 - protein, 172 aa, Gossypium hirsutum
  unsure (1)..(172): unsure at all Xaa locations
  Clone ID: GOSHI-09MAY01-C3703_2.pep
MSKEVSEEGQGREDYVDPPPAPLIDMAELKSWSFYRALIAEFIATLLFLYVTVATVIGHKKQQDACDXVGLLGIAWPFRGMIFILVYCTAGISGGHIPPAATFGFXLARRVSYRAGLHGSSVGCIWSCLGKLHEHHTLLAGCNTGSGSTQLFGLNIEFDCSCLPRPKMLDPV

SEQ ID NO: 67571 - protein, 278 aa, Gossypium hirsutum
  Clone ID: GOSHI-09MAY01-C3703_1.pep
MSKEVSEEGQGRKDYVDPPPAPLIDMAELKSWSFYRALIAEFIATLLFLYVTVATVIGHKKQQDACDGVGLLGIAWAFGGMIFILVYCTAGISGGHINPAVTFGLFLARKVSFIRAVAYMVSQCLGAICGVGLVKAFMKHPYNSLGGGANTVASGYNNGTALGAEIIGTFVLVYTVFSATDPKRSARDSHVPVLAPLPIGFAVFMVHLATIPITGTGINPARSFGAAVIYNNDKAWDDHWIFWVGPFVGALAAAIYHQYILRAAAIKALGSFRSNPTN

SEQ ID NO: 67572 - protein, 141 aa, Gossypium hirsutum
  unsure (1)..(141): unsure at all Xaa locations
  Clone ID: LIB3543-039-Q1-K1-G3.pep
VLXTLQGXXSVGLLXNXXNNXTKXLXXXTLXXFLXXGPFLLXSTCXAAILXNQYIPVGASEAIKXXLXXSFXAATXPPXLKXKSXXKXSFXSPLFTXFFYXXLHXXFVWCXXEKELLXXMXXMMXXTLXSFXXSFXXSYXX

SEQ ID NO: 67573 - protein, 145 aa, Gossypium hirsutum
  unsure (1)..(145): unsure at all Xaa locations
  Clone ID: LIB3585-064-P1-K2-F10.pep
MSKEVSEEGQGRKDYVDPPPAPLIDMAELKSWSFYRALIAEFIATLLFLYVTVATVIGHKKQQDACDGVGLLGIAWAFGGMIFILVYCTAGISGGHINPAVTFGLILARKVSLIMAXAYMVSQCLGAICVVGLVXTFMKHPYNFH

SEQ ID NO: 67574 - protein, 98 aa, Gossypium hirsutum
  Clone ID: uC-gsronu33b112f04b1.pep
DPKRSARDSHVPVLAPLPIGFAVFMVHLATIPITGTGINPARSFGAAVIYNNDKAWDDHWIFWVGPFVGALAAAIYHQYILRAAAIKALGSFRSNPTN

SEQ ID NO: 67575 - protein, 110 aa, Gossypium hirsutum
  unsure (1)..(110): unsure at all Xaa locations
  Clone ID: LIB3828-005-Q1-N6-G1.pep
TFVLVYTXFSATDPKRSARDSHVPVLAPLPIGFAVFMVHLATIPITGTGINPARSFGAAVIYNNDKAWDDHWIFWVGPFVGALAAAIYHQYILRAAAIKALGSFRSNPTN

SEQ ID NO: 67576 - protein, 128 aa, Gossypium hirsutum
  Clone ID: LIB3584-017-P1-K1-G1.pep
AYMVSQCLGAICGVGLVKAFMKHPYNSLGGGANTVASGYNNGTALGAEIIGTFVLVYTVFSATDPKRSARDSHVPVLAPLPIGFAVFMVHLATIPITGTGINPARSFGAAVIYNNDKAWDDHVSVHIL

SEQ ID NO: 67577 - protein, 53 aa, Gossypium hirsutum
  unsure (1)..(53): unsure at all Xaa locations
  Clone ID: uC-gsronu33B062b05b1.pep
FFILVYCTAGIGGXHINPAVTFGLLLARKVSLIRAVANMVSQCLGAFCESGLD

SEQ ID NO: 67578 - protein, 263 aa, Gossypium hirsutum
  Clone ID: GOSHI-09MAY01-C3733_2.pep
MYSHRDREGGPLDRKRISDVLDKHLEKSPSSTSRGLNSKDKERSSLPSTSTGKSQLDHRSASLSKAKYSDEESETDSEESDVSGSDGDDTSWISWFCNLRGNEFFCEVDDAYIQDDFNLCGLTSQVPYYDYALDLILDVESSHGDMFTEEQNELVESAAEMLYGLIHVRYILTSKGMSAMLEKYKSYDFGRCPRVCCCGQPCLPVGQSDIPRSSTVKIYCPKCEDIYYPRSKYQGSILTISSLAFSLFGFSPILCLRHMKHIL

SEQ ID NO: 67579 - protein, 246 aa, Gossypium hirsutum
  Clone ID: GOSHI-09MAY01-C3733_1.pep
GFNRKDKERSSVPSTSTGKAQLDHRDSRTAPLSKAKCDEESETDSEESDVSGSDGDGTSWISWFCNLRGNEFFCEVDDDYIQDDFNLCGLSRQVPYYDYALDLILDVESSHGDMFTEEQNELVESAAEMLYGLIHVRYILTSKGMSAMLEKYKNYDFGRCPRVCCCGQPCLPVGQSDIPRASTVKIYCPKCEDIYYPRSKYQGNIDGAYFGTTFPHLFLMTYGHLKPQKPTQNYIPRVFGFKIHKP

SEQ ID NO: 67580 - protein, 178 aa, Gossypium hirsutum
  Clone ID: GOSHI-09MAY01-C3723_3.pep
MLVRRNLSALAVSASLLLGKRSSPSFNQTLLSFPQISPVYLVSHSIKTGSPRSLVGSLRFDHTMAAESSKGSVHDFTVKDAKGNDVDLSIYKGKVLLIVNVASQCGLTNSNYTELSKLYEKYKDQGFEILAFPCNQFGGQEPGNNEEILEFACTRFKAEYPIFDKVDVNGENATPIYK

SEQ ID NO: 67581 - protein, 166 aa, Gossypium hirsutum
  Clone ID: GOSHI-09MAY01-C3723_2.pep
MASQSSKGSVHDFTVKDARGNDVDLSIYKGKVLLIVNVASQCGLTNSNYTELSKLYEQYKDQGFEILAFPCNQFGGQEPGNNEQILEFACTRFKAEYPIFDKVDVNGEKAAPIYKFLKSSKGGLFGDSIKWNFSKFLVDKEGHVVDRYAPTTSPLSIEKDIKKLLA

SEQ ID NO: 67582 - protein, 166 aa, Gossypium hirsutum
  Clone ID: GOSHI-09MAY01-C3723_1.pep
MASQPSKGSVHDFTVKDARGNDVDLSIYKGKVLLIVNVASQCGLTNSNYTELSKLYEQYKDQGFEILAFPCNQFGGQEPGNNEQILEFACTRFKAEYPIFDKVDVNGEKAAPIYKFLKSSKGGLFGDSIKWNFSKFLVDKEGHVVDRYAPTTSPLSIEKDIKKLLA

SEQ ID NO: 67583 - protein, 75 aa, Gossypium hirsutum
  Clone ID: LIB3585-057-P1-K1-C10.pep
MASQPSKGSVHDFTVKDARGNDVDLSIYKGKVLLIVNVASQCGLTNSNYTELSKLYEQYKDQGLFLASFWIYIYI

SEQ ID NO: 67584 - protein, 70 aa, Gossypium hirsutum
  Clone ID: LIB3585-034-P1-K1-A8.pep
VKFNLSFIYLTGFCFCILAVQDARGNDVDLNIYKGKVLVIVNVASQWLISILEGFFPLLSIIRHLLIRSI

SEQ ID NO: 67585 - protein, 66 aa, Gossypium hirsutum
  Clone ID: LIB3146-004-P1-K1-B4.pep
SPHGVNKLDMPTNKKKTNLSLVMFPPSSNDWNDSSTHLNACPLYKVFFHGATSKVLPPILIFPFYF

SEQ ID NO: 67586 - protein, 373 aa, Gossypium hirsutum
  Clone ID: GOSHI-09MAY01-C3653_1.pep
MLSIRSLSTTKLVVRSCSYYYSSSTASAAAVEAERTIREGPRNDWTRQQIDSIYHSPLLDLLFHGAQVHRYAHNFREVQQCTLLSIKTGGCSEDCSYCPQSSRYHTGLKPQKLMTKDAVMQAAKQAKEAGSTRFCMGAAWRDTVRRKTNFNQILEYVKEIRDMGMEVCCTLGMLEKQQALELKKAGLTAYNHNLDTSKEYYPNIITTRTYDERLETLQHVREAGINVCSGGIIGLGEAVEDRVGLLHTLATLPTHPESVPINALVAVKGTPLQDQKPVEIWEMIRMIATARIVMPKSMVRLSAGRVRFSMPEQALCFLAGANSIFTGEKLLTTPNNDYDADQVMFKILGLIPKAPSFTEEEAENCDEAVSTSG

SEQ ID NO: 67587 - protein, 97 aa, Gossypium hirsutum
  Clone ID: LIB3831-001-Q1-N6-D6.pep
ERLETLQHVREAGINVCSGGIIGLGEAVEDRVGLLHTLATLPTHPESVPINALVAVKGTPLQDQKVILTSTDNVQHWHWNSFHCSFFSLSLFSSLLL

SEQ ID NO: 67588 - protein, 153 aa, Gossypium hirsutum
  Clone ID: GOSHI-09MAY01-C3643_1.pep
QKESKTAKRVSSNNFPSNVKSLLSTGMLDGVVVKYVSWSREKSLKGYIQGTGYMCGCKDCNFKKALNAYEFEHHANCKTKHPNNHIYFENGKTIYAVVQELKNTPQERLFDVIQNVTGSQINQKNFRIWKASYQAATRELQRIYGKDNAVVSS

SEQ ID NO: 67589 - protein, 195 aa, Gossypium hirsutum
  unsure (1)..(195): unsure at all Xaa locations
  Clone ID: LIB3583-053-P1-K6-F12.pep
MGGGGGGGIYNAELYGKVGVPFVMGTTGGDRDRLYKTVEESKVYAVISPQMGKQXRESMAEQFPGAFSGYSLQVMESHQAGKLDTSGTAKAIISCFQKLGVSFDMDQIQMIRDAKQQIEMVGVPEEHLSGHAFHLYHLTSPDQTVSFEFQHNVCGRSIYAEGTVDAILFLAKKLSXKADKRLYNMIDVLREGNMR

SEQ ID NO: 67590 - protein, 193 aa, Gossypium hirsutum
  Clone ID: LIB3829-030-Q6-K6-B4.pep
KLYNAELYGKVGVPFVMGTTGGDRDRLYKTVEESKVYAVISPQMGKQVVAFLAAMEIMAEQFPGAFSGYSLQVMESHQAGKLDTSGTAKAIISCFQKLGVSFDMDQIQMIRDAKQQIEMVGVPEEHLSGHAFHLYHLTSPDQTVSFEFQHNVCGRSIYAEGTVDAILFLAKKVKSKADKRLYNMIDVLREERR

SEQ ID NO: 67591 - protein, 461 aa, Gossypium hirsutum
  unsure (1)..(461): unsure at all Xaa locations
  Clone ID: GOSHI-09MAY01-C3613_2.pep
RVLPKHRLPPLPSSRSSPFRVQISVPVEDKKRNYTLQMSQEAFNAALHLMPGGVNSXPARAFKSPGXQPISMDSVKGSHMWDIDGNEYIDYVGSWGPAIIGHADDEVLEALAETMKKGTSFGSPCLLESVLAEMVISAVPSIEMVRFVNSGTEACMGVLRLARTFTGREKIIKFEGCYHGHADPFLVKAGSGVATLGLPDSPGVPKATTSGTLTAPYNDIAAVESLFNSNEGELAAVILEPAVGNSGFITPKPDFLEAIRRLTKENGALLIFDEVMAGFRLSYGGAQEYFGITPDLTTLGKVIGGGLPVGAYGGRREIMEMVAPAGPMYQAGTLSGNPLAMTAGIQTLKRLKAPGTYEYLDRITRELVQGILNAGKKTGHAICGGHIRGMFGFFFTEGPVHNFDDAKKSDAAKFVRFYQGMLREGVYFAPSQFEAGFTSLAHSPEDIQKTVAAAENVLSKI

SEQ ID NO: 67592 - protein, 179 aa, Gossypium hirsutum
  Clone ID: GOSHI-09MAY01-C3613_1.pep
PGRPASAQRPPSVRGRVGKIIARAPPVGAYGGRREIMEMVAPAGPMYQAGTLSGNPLAMTAGIQTLKRLKEPGTYEYLDKITGQLVQGILDAGKKTGHAICGGYINGMFGFFFTEGPVYNFDDAKKSDTAKFARFYRGMLEEGVYLAPSQFEAGFTSLAHTQEDIQKTIAAAEKVLSKI

SEQ ID NO: 67593 - protein, 160 aa, Gossypium hirsutum
  unsure (1)..(160): unsure at all Xaa locations
  Clone ID: GOSHI-09MAY01-C103638_2.pep
ARLNFPHLKREGAHISGEFGDYKPLHSAVDAKLQAICQSLQKQEFRKGXSVHDSKPKVEFDYPVKREEFDQSPRFASPKVEMNSLSSSSSSSPSPDLSDESLAGSSSPESDITFFDFSDSKWDDNEIFGLEKYPSVEIDWEAIRELSESYKKKKITATIM

SEQ ID NO: 67594 - protein, 80 aa, Gossypium hirsutum
  Clone ID: LIB3825-025-Q6-N6-G8.pep
VRSLISLQGSLTLKWRIHWYHHQQLRIYPMNHWLDLLSQNLISLSWISLIQSGMMMRPSVWKSTLQWKLIGKPSGNCLES

SEQ ID NO: 67595 - protein, 173 aa, Gossypium hirsutum
  Clone ID: GOSHI-09MAY01-C3153_1.pep
MESSGPSRRTCFIQEDDGLASIVDMEAGYSGSHYQKVNQNGFLSRPLCYSRRSSLRNLSSFSSSSSSGSVSSPRPARFYDARFEDVHQPYFLDVCFLCKKPLGCNRDIFMYRGDTPFCSEDCRQEQIEIDEAKEKDMNLSSSVKAMRKKSQRESTSPNEAQGYSIRTSTVAAA

SEQ ID NO: 67596 - protein, 139 aa, Gossypium hirsutum
  Clone ID: LIB3583-014-P1-K1-H1.pep
MESSGPSRRTCFIQEDDGLASIVDMEAGYSGSHYQKVNQNGFLSRPLCYSRRSSLRNLSSFSSSSSSGSVSSPRPARFYDARFEDVHQPYFLDVCFLCKKPLGCNRDIFMYRFILNFQSLRKKDQNFGKVDWIFLCIFA

SEQ ID NO: 67597 - protein, 230 aa, Gossypium hirsutum
  Clone ID: GOSHI-09MAY01-C3173_3.pep
MQASSHLVRGKGGIEISKRRVFPCFGEVRQRCLTLNRNFCIRSGSTCSGLRSGDVSMGAGLVRAKNGIETAVRSSVKSRSIKAQASGGDIEDLTPINPQAKSSGAVLPFVGVACLGAMLFGYHLGVVNGALEYLSKDLGIAENTVMQGWIVSTLLAGATVGSFTGGTLADKFGRTRTFQLDAIPLIIGAFLTATAQTVQTMIIGRSLAGIGIGISSAIVPLYISEISPTE

SEQ ID NO: 67598 - protein, 363 aa, Gossypium hirsutum
  unsure (1)..(363): unsure at all Xaa locations
  Clone ID: GOSHI-09MAY01-C3173_1.pep
NALIDFSATAQTVQTMIIGRFLAGIGIGISSAIVPLYISEISPTEIRGALGSINQLFICIGILAALVAGLPLAGNPLWWRTMFGVAIVPAILLAVGMAFSPESPRWLFQQGKIPEAEKAIRTLYGKERVAEVMYELRTAGQGSTEQEAGWFDLFSSRYWKGVSVGAALFLFXQQLAGINAVVYYSTAVFRSAGIASDVAASALVGASNVFGSAIASSLMDRQGRKSLLMTSFSGMAASWLLLSLSFTWKVLAPYSGTLAVVGTVLYVLSFSLGAGPVPALLLPEIFASRIRAKAVALSLGTHWISNFVIGLYFLSVVNKFGISSVYLGFAGVCALAVLYIAGNVVETKGRSLEEIELALNPTT

SEQ ID NO: 67599 - protein, 177 aa, Gossypium hirsutum
  unsure (1)..(177): unsure at all Xaa locations
  Clone ID: AI055741.1.pep
KVVSVGAALFLFQQLAGINAVVYYSTAVFRSAGIASDVAASALVGASNVFGSAIASSLMDRQGRKSLLMTSFSGMAASMLLLSLSFTWKVLAPYSGTLAVVGTVLYVXSFSLGAGPVPGLFLSQIYAFTNLASNQAALSLGNLGISHFGYGLILWVWRPFWKPLGALGIPGVPPFVV

SEQ ID NO: 67600 - protein, 103 aa, Gossypium hirsutum
  Clone ID: LIB3829-020-Q6-N6-E5.pep
VGTVLYVLSFSLGAGPVPALLLPEIFASRIRAKAVALSLCMHWISNFVIGLYFLSVVDKFGISVVYLVFAAVCLLAVLFMAGNVVETKGRSLEEIELALNPTT

SEQ ID NO: 67601 - protein, 73 aa, Gossypium hirsutum
  Clone ID: AI726696.1.pep
LCLSFTWKVLAPYCGTIAVVGTVLYVLSFSLGAGPVPALLLPEIFASRIRAKAVALSLGTHWVSHHREPAQSC

SEQ ID NO: 67602 - protein, 313 aa, Gossypium hirsutum
  Clone ID: GOSHI-09MAY01-C3113_1.pep
MAAKQTTILVAAILVTAFYGGAVTSAQAPAADPAMAMSPSAMAPTPDCMTNLLNLSDCLTYVEAGSNLTKPDKPCCPELAGLVESSPQCLCYLLDKNATANYGFNIDMDRALKLPDVCHVKTPPVSLCSAIVGAPIGVPTQSTEGSMSPASEPTGSVAYGPSPSAMAPTPDCMTNLFNLSDCLGYVTAGSNLTKPDKPCCPELAGLVESSPQCLCLLLDKNATSSYGVDIDIDRALKLPNVCHVKTPPVSLCSTINGGAPIGVPTSGTEVSLSPGLAPGPSKGSNTGASNMEIFGLASFIALPIAFLPMLFGI

SEQ ID NO: 67603 - protein, 277 aa, Gossypium hirsutum
  Clone ID: GOSHI-09MAY01-C103098_1.pep
IFIIESTPFKLVEEVKDLKELAAKLRNVDEFAVDLEHNQYRSFQGLTCLMQISTRTEDFIVDTLKLRIHIGPYLREVFKDPMKKKVMHGADRDIVWLQRDFGIYVCNLLDTGQASRVLKLERNSLEHLLQHFCGVTANKEYQNADWRVRPLPDEMLRYAREDTHYLLYIYDLMRIKLLSMPQEGEHLDAPLVEVYKRSSDVCTQLYGKELLTENSYLHIHGLQVAGFNAEQLAVVAGLCEWRDIIARAEDESTGYVLPNKTLLEIAKQMPVAAHKLR

SEQ ID NO: 67604 - protein, 312 aa, Gossypium hirsutum
  Clone ID: GOSHI-09MAY01-C3053_1.pep
VGSVSTGPGGFPITRPGTGGLMPGMPGTRRMPGMPGMDNDNWEVPRGRSMPRGDAQSLPVGRGQSPSIQKSSMNPRLLPQGSGDLMSGKTSALLQGSSAPPAWQSNTSLGAEPMAQPSVSAKPVPVAAVSPIAEKSPAPAAILNPDDLQRKIRALLDEYFYVRLLDEALLCVEELKSPSHHPEVVKEAISIALDKSPPCVEPVWKLLEYLFSKKVFAARDIATGCLLYGALLDDIAIDLPKAPNNFGEIIGRLILAGGLDFKVVKEILKKMEDNFYQKAVFDAATKTISLNPSGQGLLDASASEVEACQNLF

SEQ ID NO: 67605 - protein, 355 aa, Gossypium hirsutum
  Clone ID: GOSHI-09MAY01-C3043_1.pep
VTFSVGIRTIGGGDGSGPGFGFSEAPDYRNGVECPVSVNKEVVSSCDPDLVHVAMTLDSEYLRGSIAAVHSVLRHASWPENVFFHFIAAEFDPASPRVLSRLVRSTLPGLNFKIYIFPEDAAINLISSSIRQALENPLNYARNYLGDILDLCVDRVIYLDSDLVVVDDIHKLWNTALTNSRVIGAPEYCHANFTKYFTDGFWSDPVLSRVFHSRRPCYFNTGVMVMDLVRWREGNYRKRIENWMEIQRKRRIYELGSLPPFLLVFAGNVEAIDHKWNQHGLGGDNVRGSCRSLHTGPVSLLHWSGKGKPWVRLDARNPCPLDHLWKPYDLYKGSSIKDRSSFPSSIFLGFSSFLS

SEQ ID NO: 67606 - protein, 124 aa, Gossypium hirsutum
  Clone ID: LIB3166-024-P1-K1-C6.pep
AHAVGQPFRQPFLLSSGPKVLSRRFQSTFPSLNFKIYIFREDAVINLISSSIRQALENPLNYARNYLGDILDLCVDRVIYLDSDLVVVDDIHKLWNTALTNSRVIGAPEYCHANFTKYFTDGFW

SEQ ID NO: 67607 - protein, 85 aa, Gossypium hirsutum
  unsure (1)..(85): unsure at all Xaa locations
  Clone ID: LIB3148-057-Q1-K1-B12.pep
FQTRVFKFGTFKTPPLFFLFRLSQKNFFLRPIGAFLSFFPLKRPHNKNFSFFFXFNNPKNIYSVRIQLSFSIKRISHHFCNNVIF

SEQ ID NO: 67608 - protein, 343 aa, Gossypium hirsutum
  Clone ID: GOSHI-09MAY01-C3073_1.pep
MGSTQSVQAVEEEHEESPDDDEDDDEDEEEDNNQGGPNMRQLENNHLVKKVLEQEPEMLPCYASATPLSPQLSSLGTPRMGPSIKVWDPYNVLAPPPPLPPPPVFSRSFSFHHDRLLLEVYFICHGESDLNLRPDIVGGRCDGAALTSNGKRQARALAVFLNSQGVTFNAVYCSPLDRARSMALSVCQEMNFAVSEIQSSDALMDLNMGHWEGCPRSEIYTPEVLTLMERYQPDFSAPSGESLRQLEFRMVQFLNGTVLGLPEKFRSEFSLHQNESQGFTHHNNPALANSVHDRDVASLQLPHWDRQRHVLSRKKSGKSRLQFVSNIGEHDADDEMSPREASH

SEQ ID NO: 67609 - protein, 487 aa, Gossypium hirsutum
  Clone ID: GOSHI-09MAY01-C3063_1.pep
MVKAVVGEESQLQLAEDRLSRSSEPAHVGLVIGKLYSVLDRGFVFELVPTQNDAGQPASSALEPAKDNKKKGSKSKSQTSDSSSNLVIDKDWVAEHARQVSRMMVGGIKVVGIYVWASESAFKNSTMVLCQTVKGVAEAASTLEDDLDERLLIHICYSPRRWTCRNCTLSSNITSSSLRPCDFKMGRVLTSLQTFKCLYNFDLRLPIYQEKTSKSETLVDVLYNGISNYVKELRGAKAVIDGNLVVNDEACTTEGLHEVELLLPFMKDMYIGACSQKDVVGVVNFTGSLCSFSFLNSKEPISQAFADIKDDIIRSLRSRLDIICDEADEDPGPIDNGIKEAGNDLASEKPVSQLVLHSLRKNCNLSLPRRVFVPWLAGTYICDYLQPSETLEVLKDHCVELMSMEAPNDASKILEPEEEAIRVSTRSFWDVVLPYCSTSSSTQEKNMEITGKENSQKTSKSPSLYFIAAVIILLLSVLVGFVFVRKS

SEQ ID NO: 67610 - protein, 104 aa, Gossypium hirsutum
  Clone ID: GOSHI-09MAY01-C3013_1.pep
ATIETEIETLVNSAMDDESSTEIKDHMPSPMPLSSVTNNLGVNETLWEELVHEDLIAGEPKEEIVVGDQAEVDVEVEDLAANPIDWGDDLQELVDQMGYLRSNP

SEQ ID NO: 67611 - protein, 172 aa, Gossypium hirsutum
  Clone ID: GOSHI-09MAY01-C3353_1.pep
GRVGGRVGGDQIHGGELSLGAMEQMPLMKSVVYEAFRIEPPVPAQYAKAKEDLLIESHDAVFEVKKGEMLFGYQPFATKDPIIFERAEEFVPERFMGVEGEKLLKHVFWSNGPETEHPTVENKQCAGKEFVVLISRLFVVELFRRYDTFEIEVGTSTLGAAITIKSLNKTSF

SEQ ID NO: 67612 - protein, 72 aa, Gossypium hirsutum
  Clone ID: LIB3149-039-Q1-K1-B1.pep
EKLLKHVFWSNGPETEHPTVENKQCAGKEFLVLISRLFVVELFRRYDTFEIEVGTSTFGAAITIKSLNKASF

SEQ ID NO: 67613 - protein, 69 aa, Gossypium hirsutum
  Clone ID: LIB3196-009-P1-M1-H10.pep
FVPERFMGVEGEKLLKHVFWSNGPETEHPTVENKQCAGKESVALISRMLVVALLRRFDTFGIEVATSSL

SEQ ID NO: 67614 - protein, 133 aa, Gossypium hirsutum
  Clone ID: GOSHI-09MAY01-C3313_1.pep
KKQSKALKVACNLNDAACKLKLKDYKQAEKLCTKVLELESANVKALYRRAQAYINLADLDLAELDIKKALELDPDNREVKLEYKALKEKIKEYNKKEAKFYGNMFAKMNKMDSGDSSKSAAKEPEPMSIDSKA

SEQ ID NO: 67615 - protein, 448 aa, Gossypium hirsutum
  unsure (1)..(448): unsure at all Xaa locations
  Clone ID: GOSHI-09MAY01-C3303_1.pep
PTRPPTRPPTRPGLSSEFSINKKRKRASHVGMKMKKGKKDIDSSTIDPSAGALAKPAWFRVILDEAQTIKNHRTQVASACCSLRAKRRWCLSGTPIQNAIDDLYSYFRFLKYEPYSVYTAFCHGIKGSIAKDYVKGYKKLQAILKVVMLRRTKATLIDGEPIIKLPPKSVLMSKVDFTAEERDFYTQLEADSRSQFKAYAAAGTVNQNYANILLMLLRLRPARPHPLLVQGFDSDSIRKSXSVGQVSVEMAKSLPREMLINLVNCLEASAICLVCKDPPDDPVVTMCCHVFCYQCVSEHLTGDDNTCPARGCKEQLGADIVFSRSTLRICITDGYNGSLVHPQFENSVILQDEYSSSKIKTVIEILKSKCLLKNSSLESQSAIGCSETSLSSEQTYKETDHSGIRVVKRTTVYSNSLADRPTKAIVFSQWTRMLDLVEHSLRNHSINY

SEQ ID NO: 67616 - protein, 136 aa, Gossypium hirsutum
  Clone ID: GOSHI-09MAY01-C3333_3.pep
MEMAAVKGVVLKHLRVNATSLSLLRNPKPIPNGHCALTFNAIRRRYSDDVMGSFLDKSEVTDRVVSVVKNFQKIDPSKVTPNAHFQKDLGLDSLDTVEVVMALEEDFGFEIPDNEADKISTISHAVEFIASHPQAK

SEQ ID NO: 67617 - protein, 134 aa, Gossypium hirsutum
  Clone ID: GOSHI-09MAY01-C3333_2.pep
MAAVREALLKRLRVNATSLSLLRNPKPSLNGLFALTFNAVHRRFSDDVMGSFLDKSEVTDRVVSVVKNFQKVDPSKVTPNAHFQNDLGLDSLDTVEVVMALEEEFGFEIPDNEADKISTINHAVEFIASHPQAK

SEQ ID NO: 67618 - protein, 134 aa, Gossypium hirsutum
  Clone ID: GOSHI-09MAY01-C3333_1.pep
MAAVRGVVLKHLRVNATSLSLLRNPKPIPNGHCALTFNAIRRRFSDDVMGSFLDKSEVTDRVVSVVKNFQKIDPSKVTPNAHFQKDLGLDSLDTVEVVMALEEEFGFEIPDNEADKISTISHAVEFIASHPQAK

SEQ ID NO: 67619 - protein, 207 aa, Gossypium hirsutum
  Clone ID: GOSHI-09MAY01-C3253_1.pep
LDYWGQRDKDYQIFALSNEEWRNVAILCKFLKVFYDVTCVFSGSNYPTANLYFRGVWKVHNVLLDTVKGPYSFLTPMVKQMQEKFNKYSAQYSLILSCAAILDPRYKFNYVQYCFTTIYGVHASDFVETILSNLRLLFDEYVEKSKSTPSSFAGSSNVSDKNPVDSGLDEHNVSSADFEGYFDESDDYKRYLNESSTRSEKSQLDIY

SEQ ID NO: 67620 - protein, 180 aa, Gossypium hirsutum
  unsure (1)..(180): unsure at all Xaa locations
  Clone ID: GOSHI-09MAY01-C3263_1.pep
ILETLTQLHCHHAFHTQPSLYQTSAWEDPRCPLPPHPSTNLHRQIXPISAVAAAPPKPQKTHSMPPEKQEIFKSLENWATQNVLPLLKPVKECWQPQTFLPDPALPLGEFNEQVKALRQRTADLPDEYFVVLVGDMITEEALPTYQTMINTLDGVRDDTGASSSPWAIWTRAWTAEENRH

SEQ ID NO: 67621 - protein, 83 aa, Gossypium hirsutum
  Clone ID: GOSHI-09MAY01-C3213_9.pep
LMAEKSNGLGGANPGPGIALGGKAPACAGCEPPVEGSGVEVFFSVVDVSGFELLLSVFKADFSSAVAGFFELEAMVEMTEKKN

SEQ ID NO: 67622 - protein, 126 aa, Gossypium hirsutum
  Clone ID: GOSHI-09MAY01-C3213_8.pep
MASNLQKESTSSDEKSTLTTESKSSNPETSTAENKTSSTGPSQPAQAGASPTTMPGFVPPNPFDFSAMSGLLNDPSIKELAEQIAKDPSFTQMAERLTKTFQGAATEDSMPQIDPQQFLSTIPPGF

SEQ ID NO: 67623 - protein, 166 aa, Gossypium hirsutum
  Clone ID: GOSHI-09MAY01-C3213_5.pep
MASNSKKPATADEKSALETESKSSKSETSSTEKKTSTPEPSTGGSQPAQAGAFPPNAMPGPGFVPPNPFDFSAMSGLLNDPSIKELAEQIAKDPSFNQMAEQLTKTFQGAAAEETTPQFDPQQYYSTMQQVMQNPQFMTMAERLGNALMQDPAMSTMLDSLANPQQ

SEQ ID NO: 67624 - protein, 94 aa, Gossypium hirsutum
  Clone ID: GOSHI-09MAY01-C3213_3.pep
SEGRTALHFACGYGEVKCAQVLIEAGAKVDALDKNKNTALHYAAGYGRKDCVALLLENGAAVTLQNMDGKTAIDVAKLNNQHEVLKLLEKDAFL

SEQ ID NO: 67625 - protein, 207 aa, Gossypium hirsutum
  unsure (1)..(207): unsure at all Xaa locations
  Clone ID: GOSHI-09MAY01-C3213_2.pep
MSSNSQKESTATGEKSNLTTEGEGAGPETSTGESKPVQGGASPDTMPGMGFTPPNPFDFSAMSGLLNDPSIKELAEQIAKDPSFNQMAEQLSKTFQGAAVEESIPQFDPQQYHSTMQQVMQNPQFMSMAEHLGNALMQDPAMSSMLDSLTNPQHKDQIEERMSRIKEDPSLKHILKEIETSGPAAMMRYWNDKXILQKLVNNGCGWF

SEQ ID NO: 67626 - protein, 361 aa, Gossypium hirsutum
  Clone ID: GOSHI-09MAY01-C3213_1.pep
MASNLQHDSTSSNEKSALTTDTKGLKSETSTIDSKTSKPEASQPAQAGASPSNMGPGFVPPNPFDFSAMSGLLEDPSIKTLAEQIAKDPSFNQMAEQLTKTFQGAAAEESMPQFDPQQYYSTMQQVMQNPQFMTMAERLGNALMQDPAMSSMLDSLANPQQKDQIEERMARIKEDPSLKHILDEIETGGPAAMMRYWNDKDVLQKLGEAMGLAVSGDAATSAGNSAADEGDEAGNEDESIVHHCASVGDVEGLKAALASGADKDEEDSEGRTALHFACGYGEVKCTQILLEAGAKVDALDKNKNTALHYAAGYGRKDCVALLLENGAAVTLQNMDGKTPIEVAKLNNQHEVLKLLEKDAFL

SEQ ID NO: 67627 - protein, 165 aa, Gossypium hirsutum
  Clone ID: uC-gsronu33B011f02b1.pep
LARAPPTRPIFLSCSYRRCKNTSAGNSAADEEDEAGNEDESIVHHCASVGDVEGLKTALSSGADKDEEDSEGRTALHFACGYGEVKCTQILLEAGAKVDALDKNKNTALHYAAGYGRKDCVALLLENGAAVTLQNMDGKTPIEVAKLNNQHEVLKLLENDAFLEA

SEQ ID NO: 67628 - protein, 154 aa, Gossypium hirsutum
  Clone ID: LIB3543-031-Q1-K6-E9.pep
MSSNSQKESTATGEKSNLTTEGESSKPETSTGESKPVQGGASPDTMPGMGFTPPNPFDFSAMSGLLNDPSIKELAEQIAKDPSFNQMAEQLSKTFQGAAVEESIPQFDPQQYHSTMQQVMQNPQFMSMAEHLGNALMQDPAMSSMLDSLTNPQH

SEQ ID NO: 67629 - protein, 96 aa, Gossypium hirsutum
  Clone ID: LIB3197-025-Q1-M1-C6.pep
FPINIFYFKFSFLNLFFFQSFQPWLPIRRSPLLLMRNRLWKRRAKVQSLKHPPLRRKLQHLSLQLGVHSQHKQGPSLPTLCLVLGLSHPIHLISQP

SEQ ID NO: 67630 - protein, 93 aa, Gossypium hirsutum
  unsure (1)..(93): unsure at all Xaa locations
  Clone ID: LIB3197-014-P1-M1-F3.pep
EGHSCLQNPMDWVGQTQAQAQRWEGRPLLVXXVNPQLKAQVLKFSSQWWMFQALNFCSPTINTPXPIRSSGLLRIGSHGXNDSPHTPTLENLK

SEQ ID NO: 67631 - protein, 78 aa, Gossypium hirsutum
  unsure (1)..(78): unsure at all Xaa locations
  Clone ID: LIB3493-009-P1-M1-G9.pep
AVCKLICSLFFMFLLSLLDEKSALTTDTKGMKSETSTIDSKTSKPEASQPAQAGASPSNMGPXFVPPNPFDFSAMSGL

SEQ ID NO: 67632 - protein, 116 aa, Gossypium hirsutum
  unsure (1)..(116): unsure at all Xaa locations
  Clone ID: GOSHI-09MAY01-C3223_1.pep
MASVQDQLEIKFRLTDGSDIGPKTFPAATSVATLKESVVAQWPKEKENGPRTVKDVKLISAGKILENNKTLGXCQSPLCDIPGGVTTCTLFNLSPGGKRKESSNRTKANKCVCVIL

SEQ ID NO: 67633 - protein, 100 aa, Gossypium hirsutum
  Clone ID: uC-gsflmaxxa047g10b1.pep
DNPSRVFHFFSSSSSSSSSSSFIWFWCDPLLDLLADFAILKTIIWGFSLPFLLYIVHIHGSLLIRCFYFLDLPNLGYLETIIQIYVLLELLTFYALFFLK

SEQ ID NO: 67634 - protein, 72 aa, Gossypium hirsutum
  Clone ID: uC-gsronu33B109h03b1.pep
TLPNMVLSPNLYRNINLNDLQICQDSSEVVGFRYLQQLISSQELSTGNFCRIESKTNLGWLKKPSFEEEDRY

SEQ ID NO: 67635 - protein, 86 aa, Gossypium hirsutum
  Clone ID: LIB3166-005-P1-K1-A10.pep
SYQSRPINIYLLLQSLAFSANPDQFWTQFCRNFRLRVLDLGISSYWVGIRFWKMASVQDQLEINFRLTDGSDFCPKTFPAATSVAT

SEQ ID NO: 67636 - protein, 117 aa, Gossypium hirsutum
  Clone ID: LIB3196-048-P1-M1-B3.pep
PFFALSFPSFSLQWLPSSPDLFVTAAFNVDHDIIRKIQRVRGNRGTIIRVRDRLQVVTPPRMEEEEREERQQEQRYRHTRGGSQDNGLEETFCSMRIKENLADPERADIFNPQAGRI

SEQ ID NO: 67637 - protein, 217 aa, Gossypium hirsutum
  unsure (1)..(217): unsure at all Xaa locations
  Clone ID: LIB3582-055-P1-K1-F12.pep
MAINPSLLFLSLLFLFNGCLARQTFSSQQSQNECQINRLRASAPQTRIRSEAGTTEWGDPNCQQLRCAGVSVMRQTIEPNGLVLPSFTNAPQLLYIVQGRGIQGIVMPGCAETFQDSQQWQHQSRGRFQDQHQKVRRFRQGDIIALPQGVVHWSYNDGNERVVTINLLDTGNSANQLDNIPRRXGEGEEEEEEDNPSRRSRHQEEEEQGRESSSCNN

SEQ ID NO: 67638 - protein, 184 aa, Gossypium hirsutum
  Clone ID: LIB3582-059-P1-K1-G7.pep
VSEEEEGEGEEEEEEDNPSRRSRHQEEEEQGRESSSCNNLLCAFDRNFLAQAFNVDHDIIRKIQRVRGNRGTIIRVRDRLQVVTPPRMEEEEREERQQEQRYRHTRGGSQDNGLEETFCSMRIKENLADPERADIFNPQAGRISTLNRFNLPILQRLELSAERGVLYNRAGLIPQWNVNAHKYS

SEQ ID NO: 67639 - protein, 145 aa, Gossypium hirsutum
  unsure (1)..(145): unsure at all Xaa locations
  Clone ID: LIB3582-012-P1-K1-G1.pep
MANNPSSLCLYLLFLWNGXCLARQTFSSQQTQNEYQINRLRAYAPQTRIHFEPCTTEWWNHNCQHLRSAVASVMKHTIEPNGHSMPYFTNAAQLLYIVQGRGNQGIEMPGCAQTFQYSQQWQHQSRRKFHDQHQKVRRFTHCDII

SEQ ID NO: 67640 - protein, 92 aa, Gossypium hirsutum
  unsure (1)..(92): unsure at all Xaa locations
  Clone ID: LIB3583-026-P1-K1-A6.pep
SRSFGVLPFFSSXLSLLFLFKXASRASQTFSSLLSLNRXLIYWLRASAPQTRIRSVAGSSERRYPFCQLLKSAGVSVXWQTIVPIGLVWPSL

SEQ ID NO: 67641 - protein, 72 aa, Gossypium hirsutum
  Clone ID: GOSHI-09MAY01-C13_6.pep
RPRGFFFSNCNSHLFSSLSFSSSLSSSVSESVGTSSIRSISCSVNSFFSSLAINGVTPIDIKRGEKPCDETH

SEQ ID NO: 67642 - protein, 58 aa, Gossypium hirsutum
  Clone ID: GOSHI-09MAY01-C13_7.pep
HFKLLSPYPSSGIQKAFFHSWVELIISSSNNCLMLDSSPHCFPHPFIFSHLTSPHQIL

SEQ ID NO: 67643 - protein, 111 aa, Gossypium hirsutum
  unsure (1)..(111): unsure at all Xaa locations
  Clone ID: GOSHI-09MAY01-C13_8.pep
MSVKSIGSAPVDYYHGAGPDVMPANPYHQQQQQQQXLADMINQQLSMPGGNERSQPMMHARPPAAVNYMPPYPYQYPYPYPTSQAXQQRQHQPHRYTHYYSDENTSSCNVM

SEQ ID NO: 67644 - protein, 259 aa, Gossypium hirsutum
  Clone ID: GOSHI-09MAY01-C13_9.pep
FLQHSSKPISQTPFFIPIFPTNTINLYNQRYQNLQFQIRSNSTSIMSSSAFKPEQARLPPALPLSSPPLTKFKIGICQLAVTPDKERNIQHAREAIEESAQKGAHLVVLPEIWNSPYSNDGFPVYAEDIDAGHDASPSTAMLSEVSSRLKITVVGGSIPERCGDKLYNTCCVFGTDGKLKAKHRKIHLFDIDIPGKITFMESKTLTAGETSTIVDTDVGRIGVGICYDIRFQELAMIYASRGAHLLCYPGAFNMTTGPL

SEQ ID NO: 67645 - protein, 236 aa, Gossypium hirsutum
  unsure (1)..(236): unsure at all Xaa locations
  Clone ID: GOSHI-09MAY01-C13_10.pep
LFLSLLFLFNXSCLARQTFSSLLSQNRESNQXLRASAPQTRIRSEAGSTERRYPNCQLLKSAGVSVMWLTIEPKGLVLPSFTKAPQLLYIVQRRSIQGIEMPGCAETFQDSQQWLHLSRGXFQDLHQKVRRFRQGDIIALPHGEVHWSYNDGYVRVVTINLLDTGNSANQLDNIPRRFHLAGNPEEEQRQLRRLAQQMQGRSERGEESEKERKRERRGEEKKEEKRERKESKEKEG

SEQ ID NO: 67646 - protein, 504 aa, Gossypium hirsutum
  unsure (1)..(504): unsure at all Xaa locations
  Clone ID: GOSHI-09MAY01-C13_11.pep
LVLSLLFLFNRASLARQSFSSLLSLKVCLIXELRASAPQTRIRSVAGSSVWRFPFCLLLXCAGVSVXELTIVPKGLVLPSFTKAPQLLYIVQRRGIQSIEMPGCAVSFQDSLLWLHLIRGRFLDLLQLVRQFRQRDIIALPQGEVHWSYFDGYERVVTINLLDTGNSANQLDNIPRRFHLAGNPQEEQRQLRRLAQQMQGRSERGEESEEEEGEGEEEEEEDNPSRRSRHQEEEEQGRESSSCNNLLCAFDRNFLAQAFNVDHDIIRKIQRVRXNRGTIIRVRDRLQVVTPPRMEEEEREERQQEQRYRHTRGGSQDNGLEETFCSMRINENLAXPERAVIFFPQAGRISTLNMFNLPILQRLELIAERGVLYNRAGLIPLXDRLRSQNTVLVLRAEPXVLEVVPXGVAEFVDFEELGLLLTEPLFFAFMFQAGFVSAVRISFFSNCVATITPKAGCVSFMRALPEEEVAASYLESXVDARRIXFYINYTFFFTPSLSERRADA

SEQ ID NO: 67647 - protein, 237 aa, Gossypium hirsutum
  unsure (1)..(237): unsure at all Xaa locations
  Clone ID: GOSHI-09MAY01-C13_12.pep
MAINPSLLFLSLLFLFNGCXLARQTFSSQQSQNECQINRLRASAPQTRIRSEAGTTEWWNPNCQQLRCAGVSVMRQTIEPNGLVLPSFTNAPQLLYIVQGRGIQGIVMPGCAETFQDSQQWQHQSRGRFQDQHQKVRRFRQGDIIALXPQGVVHWSYNDGNERVVTINLLDTGNSANQLDNIPRRFHLAGNPEEEQRQLRRLAQQMQGRSERGEESEEEGGEGEGEEEEEDNPSRHS

SEQ ID NO: 67648 - protein, 523 aa, Gossypium hirsutum
  unsure (1)..(523): unsure at all Xaa locations
  Clone ID: GOSHI-09MAY01-C13_13.pep
MAINPPLLFLSLLFLFNGCASSRRAFSSQQSQNECQINRLRASAPQTRIRSEARTTEWWNPNCQQLRCAGVSVMRQTIEPNGLVLPSFTNAPQLLYPLSKEERYSRVFVMPGCAETFQDXQQWQHQXARGRFQDQHQKVRRXFRQGDXIIGFAAGCWFTWSYNDGNERVVTINLXDTGNSANQLDNIPRRFHLAGNPEEEQRQLRRLAQQMXQGRSERGEESEEEGGEGEGEEEEEDNPSRHSRHQEEEEQGRESSSCNNLLCAFDXNFLAQAFNVDHDIIXRKIQRVRGNRGTIIRVRDRLQVVTPPRMEEXEEREEXQQEQRYRHTRGGSQDNGLEETFCSMRIKENLADPERADIFNPQAGRISTLNRXFNLPILQRLELSAERGXVLYNRAGLIPQWNVNAHKILYMLRGCARVQVVNHNGDAVFDDNVEQGQLLTVPQNFAFMKQAGNEGAEWISFFTNSEATNTPMAGSVSFMRALXPEEVVAASYQVSREDARRIKFNNKNTFFFTPSQSERRADA

SEQ ID NO: 67649 - protein, 123 aa, Gossypium hirsutum
  Clone ID: GOSHI-09MAY01-C3_3.pep
MKVCNKNLFLSALLCIAIAGVLGQAPSNPPTSTPAQPPPPATPPATPPPAPLASPPATVPAISPVQTPLTSPPAPPTEAPAPTLGAATPGPAGTDTSGANQMWTVQKMMGSLAMGWALLNLMV

SEQ ID NO: 67650 - protein, 223 aa, Gossypium hirsutum
  unsure (1)..(223): unsure at all Xaa locations
  Clone ID: GOSHI-09MAY01-C3_2.pep
MKVCNKNLFLSALLCIAIAGVLGQAPSNPPTSTPAPPTPPASTPPPTTQPPPTPTATPPPVSTPPPTSSPPPVTASPPPVSTPPPSSPPPATPPPASPPPATPPPASPPSATSPSATPPPASPPAATPPPATPPPATPPATPPPAPLASPPATVPAISPVQTPLTSPPAPPTDAPAPTLGAAXPCPSGKYTSGSYQMLNVQKMMGSLXMGWALLNSDGLKHPL

SEQ ID NO: 67651 - protein, 214 aa, Gossypium hirsutum
  Clone ID: GOSHI-09MAY01-C3_1.pep
MKVCNKNLFLSALLCIAVAGVLGQAPSNPPTSTPAPPTPPASTPPPTTQAPPTPTATPPLVSTPPPTSSPPPVTASPPPVSTPPPSSPPPATPPPASPPPATPPPASPPPATPPPASPPPATPPPATPPPATPPPATPPPAPLASPPATVPAISPVQTPLTSPPAPPTEAPAPTLGAATPGPAGTDTSGANQMWTVQKMMGSLAMGWALLNLMV

SEQ ID NO: 67652 - protein, 187 aa, Gossypium hirsutum
  unsure (1)..(187): unsure at all Xaa locations
  Clone ID: AI726118.1.pep
MKVCNKNLFLSALLCIAIAGVLGQAPINPPTSTPAPPTPPASTPPPTTQPPPTPTATPPPVSTPPPTSSPPPVTASPPPVSTPPPSSPPPAIPPPASPPPATPPPASPPPATPPPATPPQVSPPPANPQPETPPXATPLATPPTASIGFLFHATFPPISSVKNTIEPPPNFPQTKVSIPTPRGVFPE

SEQ ID NO: 67653 - protein, 173 aa, Gossypium hirsutum
  Clone ID: AI727118.1.pep
MKVCNKNLFLSALLCIAVAGVLGQAPINPPTSTPAPPTPPASTPPPTTQAPPTPTATPPLVSTPPPTSSPPPVTASPPPVSTPPPSSPPPATPPPASPPPATPPPASPPPATPPPATPPPATPPPATPPPAPLASPPATVPAISPVQTPLTSPPAPPTEAPAPTLGAATPGPA

SEQ ID NO: 67654 - protein, 115 aa, Gossypium hirsutum
  unsure (1)..(115): unsure at all Xaa locations
  Clone ID: LIB3189-013-P1-K1-H1.pep
MKVCNKXLFLSALLCIAIAGVLGQAPSNPPTSTPAPPTPPASTPPPTTQPPSTPTATPPPVSTPPPTSSPPPVTASPPPATPPXAXSPSGTPAPAFXPSATSPPATPPPATSSAT

SEQ ID NO: 67655 - protein, 42 aa, Gossypium hirsutum
  Clone ID: uC-gsflnu33B025d04b1.pep
GSNTVPFNTAEKGVDVMTLASAMQSSADRDKFLFQTFMLKQW

SEQ ID NO: 67656 - protein, 331 aa, Gossypium hirsutum
  Clone ID: GOSHI-09MAY01-C93_1.pep
MATASTWILSLKVFLISTGILGIVLGLKISVPLVLEFSVSQAPLWWSGFRSWLKPPYLYVVINGIIITIAASSRFNQNNGEKDQMEQMQPRPKISEDQQPIVEYDTKSGWGSDAVESSDFVYEENQRGEEVATRVSEEESNVAVEDDRDGNEFVISKSEWIPPSRTDSSEIPLDALLIQEKPAPSSRFGHRKPVKVNPEGGRALKAAKPKRHETLENTWKMITEGKSMPLSRHLKKSDTWENHGRDINVEALTSSPLMKKSETFRDRTNYQLPPEQVSSFPASGKLRKEPSLSQDELNRRVEAFIKKFNDEMRLQRQESLNQYMEMVNRGS

SEQ ID NO: 67657 - protein, 978 aa, Gossypium hirsutum
  Clone ID: GOSHI-09MAY01-C53_1.pep
MFLRMMESGVPVCHTCGEHVGLNVNGEPFVACHECNFPICKSCFEYDLKEGRKACLRCGSPYDENLLDDVEKATGDQSTMAAHLSKSQDVGIHARHISSVSTLDSEMTEDNGNPIWKNRVESWKEKKNKKKKPATTKVEREAEIPPEQQMEDKPAPDASQPLSTIIPIPKSRLAPYRTVIIMRLIILGLFFHYRVTNPVDSAFGLWLTSVICEIWFAFSWVLDQFPKWYPVNRETYIDRLSARYEREGEPDELAAVDFFVSTVDPLKEPPLITANTVLSILALDYPVDKVSCYISDDGAAMLTFESLVETADFARKWVPFCKKFSIEPRAPEFYFSQKIDYLKDKVQPSFVKERRAMKRDYEEYKIRINALVAKAQKTPDEGWTMQDGTSWPGNNPRDHPGMIQVFLGYSGARDIEGNELPRLVYVSREKRPGYQHHKKAGAENALVRVSAVLTNAPFILNLDCDHYVNNSKAVREAMCFLMDPQVGRDVCYVQFPQRFDGIDRSDRYANRNTVFFDVNMKGLDGIQGPVYVGTGCVFNRQALYGYGPPSMPSFPKSSSSSCSCCCPGKKEPKDPSELYRDAKREELDAAIFNLREIDNYDEYERSMLISQTSFEKTFGLSSVFIESTLMENGGVAESANPSTLIKEAIHVISCGYEEKTAWGKEIGWIYGSVTEDILTGFKMHCRGWRSIYCMPLRPAFKGSAPINLSDRLHQVLRWALGSVEIFLSRHCPLWYGFGGGRLKWLQRLAYINTIVYPFTSLPLIAYCSLPAICLLTGKFIIPTLSNLASVLFLGLFLSIIVTAVLELRWSGVSIEDLWRNEQFWVIGGVSAHLFAVFQGFLKMLAGIDTNFTVTAKAADDADFGELYIVKWTTLLIPPTTLLIVNMVGVVAGFSDALNKGYEAWGPLFGKVFFSFWVILHLYPFLKGLMGRQNRTPTIVVLWSVLLASVFSLVWVRINPFVSTADSTTVSQSCISIDC

SEQ ID NO: 67658 - protein, 97 aa, Gossypium hirsutum
  Clone ID: uC-gsronu33B002c10b1.pep
RNSEGDLLSWSSSGFWDGSSGFLKVILGKVFFSFWVILHLYPFLKGLMGRQNRTPTIVVLWSVLLASVFSLVWVRINPFVSTADSTTVSQSCISIDC

SEQ ID NO: 67659 - protein, 83 aa, Gossypium hirsutum
  unsure (1)..(83): unsure at all Xaa locations
  Clone ID: LIB3083-066-Q1-L1-G3.pep
CRFNEAIHVISCGYEEKTAWGKEIGWIYGSVTEDILTXGFKMHCRGWRSIYCMPLRPAFKGSAPINLSDRVHQVLRWALGSVE

SEQ ID NO: 67660 - protein, 36 aa, Gossypium hirsutum
  Clone ID: uC-gsronu33B060a12b1.pep
QGACSSSGRNGDRWDLIVSSFQVSVFVDALGIKIER

SEQ ID NO: 67661 - protein, 202 aa, Gossypium hirsutum
  unsure (1)..(202): unsure at all Xaa locations
  Clone ID: GOSHI-09MAY01-C73_2.pep
MNDGDVSRQIQQMVRFIRQEAEEKANEISVSAEEEFNIEKLQLVEAEKKKIRQEYEKKEKQVEVRKKIEYSMQLNASRIKVLQAQDDVVNEMKESAAKELLNVSRDHHVYRTLLKDVIVQSLVRLKEPAVLLRCRKDDVPLVESVLDSAKEEYASKVNVHPPEIFIDNVHLPPAPSHHNAHGPFCSXGVVIASRDGKIVCEN

SEQ ID NO: 67662 - protein, 237 aa, Gossypium hirsutum
  Clone ID: GOSHI-09MAY01-C73_1.pep
MNDADVSKQIQQMVRFIRQEAEEKANEISVSAEEEFNIEKLQLVEAEKKKIRQEYEKKEKQVEIRKKIEYSMQLNASRIKVLQAQDDVVNAMKESASKDLLNVSHDHHVYKRLLKDLIVQSLVRLKEPGVLLRCRKEDLHLVESVLDSAKEEYASKVNVHPPEIIIDDVHLPPGPSHHHGFFHHHAEAHGPFCSGGVVIASRDGKIVFENTLDARLDVAFNKKLPEIRKWLFGQVAA

SEQ ID NO: 67663 - protein, 128 aa, Gossypium hirsutum
  Clone ID: GOSHI-09MAY01-C33_3.pep
MSDEQMRDFIPRIAKLGFCWQFITLAGFHADALVTDTFARDFARRGMLAYVEKIQREERNNGVDTLAHQKWSGANFYDRYLKTVQGGISSTAAMGKGVTEEQFKETWTRPGAMEVANEGNMVVAKARM

SEQ ID NO: 67664 - protein, 576 aa, Gossypium hirsutum
  Clone ID: GOSHI-09MAY01-C33_1.pep
MAASFSVPSMIMEEEGRFETEVAEVQAWWNSERFKLTRRPYSARDVVALRGSLKQSYGSNEMAKKLWTTLKTHQANGTASRTFGALDPVQVTMMAKHLDSIYVSGWQCSSTHTTTNEPGPDLADYPYDTVPNKVEHLFFAQQYHDRKQREARMSMSREERARTPYVDYLKPIIADGDTGFGGTTATVKLCKLFVERGAAGVHIEDQSSVTKKCGHMAGKVLVAVSEHINRLVAARLQFDVMGVETVLVARTDAVAATLIQTNVDTRDHQFILGATNPNLRGKSLANMLAEGMAAGKNGPQLQAIEDNWLAIAQLKTFSECVMDAIKSMNITEDEKRRRMNEWMNHSSYDKCLSNEQAREIAERLGLQNLFWDWDLPRTREGFYRFRGSVMAAIVRGWAFAPHADLIWMETSSPDMVECTRFAEGVKSMHPEIMLAYNLSPSFNWDASGMTDEQMRDFIPRIAKLGFCWQFITLAGFHADALVTDTFARDFARRGMLAYVEKIQREERNNGVDTLAHQKWSGANFYDRYLKTVQGGISSTAAMGKGVTEEQFKETWTRPGAGNIGSEGNLVVAKARM

SEQ ID NO: 67665 - protein, 213 aa, Gossypium hirsutum
  unsure (1)..(213): unsure at all Xaa locations
  Clone ID: LIB3583-022-P1-K1-C2.pep
HASAHASAHASAHASARLQFDVMGVETVLVARTDAVAATLIQTNVDTRDHQFILGATNPNLRGKSLANMLAEGMAAGKNGPQLQAIEDNWLAIAQLKTFSECVMDAIKSMNITEDEKRRRMNEWMNHSSYDKCLSNEQAREIAERLGLQNLFWDWDLPRTREGFYRFRGSVMAAIVRGWAFAPHADLIWMETLSPHMVECTRFGXGVKIMHPE

SEQ ID NO: 67666 - protein, 323 aa, Gossypium hirsutum
  Clone ID: GOSHI-09MAY01-C23_1.pep
MASSWFFIVFLVLTVASVRCTTVDHMPSTDEDARDYSKLKTKTEEATDEHHRPAPRATERPESKADHAANEVKSNTQQAKDRASEVGKEAKEYTESWTEWAKEKISEGLGFKQDDDPKGSVGKASDSVADTATKTKDKLQDMASGAGEYSAGKAKDMKDTAYKKTDDVTNAAKGKSSEMRQATTEKARELADSAKENANTAYIAAKEKVRDMADRTSEMTNEAQERGARKAEEAKEVVAEKAEGAAEETKKKNEETGESLKWAKEKAKQGYDAAKSKAEETIESAKDTIASGYESAKQKSQELKDNYVNGGGQGRGRERDEEL

SEQ ID NO: 67667 - protein, 147 aa, Gossypium hirsutum
  Clone ID: LIB3827-002-Q1-N6-E12.pep
KEKVRDRPDRTSKMPNKAQERAARKAEKAKEVAAEKAKDAAEETKKKNEKTGESLKWAKEKAKQGYDATTEKAKETAKQGYDAAKSKAGETIESAKDTIASGYESAKQKSQELKDNYVNGGGQGRGRERDEELSVAAMLSGGDDFKI

SEQ ID NO: 67668 - protein, 173 aa, Gossypium hirsutum
  Clone ID: LIB3827-002-Q1-K6-E12.pep
PGSTHALRRFARGSTSKLKTKTEEATDEHHSRTQQAKDELKSKADHAANEVKSNTQQAKDRASEVGKEAKEYTESWTEWAKEKISEGLGFKQDDDPKGSVEKAFDSVADTATKTKDKLQDMASGAGEYSAGKAKDMKDTAYKKTDDVKNAAKGKSSEMRQATTEKARELADSA

SEQ ID NO: 67669 - protein, 85 aa, Gossypium hirsutum
  Clone ID: GOSHI-09MAY01-C953_3.pep
KKDFRPGGGPPPSAIHESIPIHESVLRCCGWLGHWYLVAATKNCLIVSVAYLRMIYDEQRHGSFLILHKETLIVYLCPWTAENLK

SEQ ID NO: 67670 - protein, 104 aa, Gossypium hirsutum
  Clone ID: GOSHI-09MAY01-C953_1.pep
IPKTETPLDSRSLIHLLDRSPFTFESSYLSPQPVLFRQNSLSPLDSQPAAATTHPSQPLSVTQLNLCNRQSVARLASSAIGSQSRGSQAVQSVVSRADRKQCNR

SEQ ID NO: 67671 - protein, 108 aa, Gossypium hirsutum
  Clone ID: LIB3825-026-Q6-K6-B2.pep
RTRGLLARSPFTFESSYLSLQSMLFRQNSLSPLDSQPAAATTHPSQPLSVAQLNPCNRQGGARLASSAIGSQLRSKLVIAVSHPEVSANLLIGSFEICCLFKFHNTDR

SEQ ID NO: 67672 - protein, 83 aa, Gossypium hirsutum
  Clone ID: LIB3583-055-P1-K1-B2.pep
YLSPQPAPFRQNSLSPLDSQPAAATTHPSQPLSVAQLNPCNRQSVAQLASNAIGSQSRGSQAVQSVVSCAARKQQARRRRLTP

SEQ ID NO: 67673 - protein, 592 aa, Gossypium hirsutum
  unsure (1)..(592): unsure at all Xaa locations
  Clone ID: GOSHI-09MAY01-C943_1.pep
MAAATSNSALPKLSTLTSSFKSSIPISKSSLPFSTTPQKPTPYRSFDVSCSLSHASSNPRSAAASVTQKTAPPHYFISRYADDEPRKGADILVEALEREGVKDVFAYPGGASMEIHQALTRSKIIRNVLPRHEQGGVFAAEGYARSSGISGVCIATSGPGATNLVSGLADAMLDSIPLVAITGQVPRRMIGTDAFQETPIVEVTRSITKHNYLVLDVDDIPRIVSEAFFLASSGRPGPVLIDVPKDIQQQLAVPKWNHSLRLPGYLSRLPKAPGEAHLEQIVRLVSESKKPGLYVGGGCLNSSDPRVRFVELTGIPVASTLMGLGAFPISDDLSLQMLGMHGTVYANYAVDKSDLLLAFGVRFDDRVTGKLEAFASRAKIVHIDIDSAEIGKNKQPHMSVCSDVKLALQGINKILETTGAKLNLDYSEWRQELNEQKLKFPLSYKTFGEAIPPQYAIQVLDELTGGNAIISTGVGQHQMWAAQFYKYKKPRQWLTSGGLGAMGFGLPAAIGAAVANPEAVVVDIDGDGSFIMNVQELATIRVENLPVKILLLNNQHLGMVVQWEDRFYKANRAHTYLXDLSNESEIFPNMLK

SEQ ID NO: 67674 - protein, 105 aa, Gossypium hirsutum
  unsure (1)..(105): unsure at all Xaa locations
  Clone ID: LIB3166-020-P1-K1-A11.pep
NKXXQMXKXFVLKXAXQGPNAIFKTTGANLNXDYSEWKQELNEHKLKFPLSYKTFDEAIPPQYAIQVLDELTGWNAIISTGFGQHQMCAAQFYKYKKPSQWLTSG

SEQ ID NO: 67675 - protein, 138 aa, Gossypium hirsutum
  unsure (1)..(138): unsure at all Xaa locations
  Clone ID: GOSHI-09MAY01-C893_1.pep
MECNKEEAVRARGIAEQKMQNGDFEGAKKFALKAQKLFPELENIPQLLTVCNVHYCAKNKLFGSEMDWYGILQIEQSADETSIKKQYRKLALLLHPDKEXFAGAEAAFKLIGEANRVLSDQTNRSLFVWWGRSPWDPA

SEQ ID NO: 67676 - protein, 330 aa, Gossypium hirsutum
  unsure (1)..(330): unsure at all Xaa locations
  Clone ID: GOSHI-09MAY01-C883_2.pep
GENHMRISWITDDNSAPSIVEYGTLPGQYTFSSSGETASYNYLFYSSGKIHHTGTGGLEHDTIYFYRCGGQGPEFQLKTPPGQFPVTFAVAGDLGQTGWTKSTLDHIDQCKYDVHLLPGDLSYADCMQHLWDNFGELVQPLASARPWMVTQGNHEKEKIPFFTDAFESYNARWKMPFEESESTSNLYYSFEVAGVHVIMLGSYTDYDELSDQYSWLKADLSKVDRKKTPWLVVLFHVPWYNSNHAHQGEGDGMMTAMEPLLYAAGVDLVFAGHVHAYERSKRVNKGKSDPCGTVHITXGDGGNREGLAXKYIHPTPEWSMFREASLSWRA

SEQ ID NO: 67677 - protein, 105 aa, Gossypium hirsutum
  Clone ID: GOSHI-09MAY01-C883_1.pep
QRSKRVNKGKSDPCGTVHITIGDGGNREGLAQKYIHPTPEWSMFREASFGHGELKIVNSTHAFWSWHRNDDDEPVRSDQVWIISLIGSGCLAEKAYESSKILVSP

SEQ ID NO: 67678 - protein, 97 aa, Gossypium hirsutum
  Clone ID: LIB3583-054-P1-K1-D12.pep
TSYIYLVCCNNVEPEYSKSCKFTYRYIHPTPEWSMFREASFGHGELKIVNSTHAFWSWHRNDDDEPVRSDQVWITSLISSGCLAEKAYESSKILVSP

SEQ ID NO: 67679 - protein, 62 aa, Gossypium hirsutum
  Clone ID: LIB3166-057-P1-K1-D10.pep
IHYLELARPWMVTQGNHEKEKIPFFTDAFESYNARWKMPFEESESTSNLYYSFEVAGVHVIM

SEQ ID NO: 67680 - protein, 92 aa, Gossypium hirsutum
  unsure (1)..(92): unsure at all Xaa locations
  Clone ID: LIB3493-043-P1-M1-G4.pep
GTLPGQYTFSSSGEATSYNGLFYSCGKIHHTVIGPLEHDXVYFYRCGRHGXNVRLRPQSRQYYVTFASGGELSQTGLTISTLNHMYQCLYDV

SEQ ID NO: 67681 - protein, 171 aa, Gossypium hirsutum
  unsure (1)..(171): unsure at all Xaa locations
  Clone ID: GOSHI-09MAY01-C853_1.pep
MGGNGEEILMLEAPPETARPWASACXAQTLDALPYIDDDYGNPMVKEEVDRLVEEEMRKSIKKPADFLKDLPPLPSFNFQHHPMIGKEYERVRAGRPPVTLDFSSRYQVEPPPMNKRNDETAWKQALQRSQRSLQHQVIRLENLELMLKYGPDVWRQNNQRLGGFWPGCIN

SEQ ID NO: 67682 - protein, 278 aa, Gossypium hirsutum
  Clone ID: GOSHI-09MAY01-C803_1.pep
MSKEVSEEGVSRKDYVDPPPAPLIDVAEIKLWSFYRALIAEFIATLLFLYVTIATVIGHKKQHDACDGVGLLGIAWAFGGMIFILVYCTAGISGGHINPAVTFGLFLARKVSLIRAVAYMVAQCLGAICGVGLVKAFMKSEYNSLGGGVNTVATGYNKGTALGAEIIGTFVLVYTVFSATDPKRSARDSHVPVLAPLPIGFAVFMVHLATIPITGTGINPARSFGAAVIYNNDKAWDDHWIFWVGPMVGALAAAAYHQYILRAAAIKALGSFRSNPSN

SEQ ID NO: 67683 - protein, 131 aa, Gossypium hirsutum
  unsure (1)..(131): unsure at all Xaa locations
  Clone ID: LIB3148-037-Q1-K1-B5.pep
PRVRPRVRAEFIATLLFLYVTIATVIGHKKQHDACMIFILVYCTAGISGGHINPAVTFGLFLARKVSLIRAVAYMVAQCLGAICGVGLVKAFMKSEYNSLGGGANTVATGYNKRTAXGAEIIGHSCLLHCF

SEQ ID NO: 67684 - protein, 89 aa, Gossypium hirsutum
  Clone ID: LIB3197-015-P1-M1-H3.pep
SNVGHDVTYQWLIRKDYKDPPPAPLIDKADIKLRSFYRGLIAEFIATILFLYVTIATVIGHKKQHDACHGVCLIGIAWLLVHDYILVTA

SEQ ID NO: 67685 - protein, 292 aa, Gossypium hirsutum
  unsure (1)..(292): unsure at all Xaa locations
  Clone ID: GOSHI-09MAY01-C823_8.pep
CSIVYAVRPLGGRFKPFFPQNYQKTQIFVKTLTGKTITLEVESSDTIEXVKAKNQDKEGIPPDQQRLIFADKQLEDGRTLADYNIQKEPTLHQDLRLRGGKQIFVKTLTGKTISPEVESXDTTDNVKXAKIQDKEGXIPPHQHRLIFAGTQPGDGRTLADYNIQKESTLHXFCHCKEGCNIFLNTLTDKTITPAGESSNTIDTVELNIHDKRRIXTEHAHCIGALKAGGDGVTLTDYDILTESTLARSFRLIRAFXIVQTLTAKTITLGAPYLGTQLSVLQLIFPTKLGIAA

SEQ ID NO: 67686 - protein, 136 aa, Gossypium hirsutum
  Clone ID: GOSHI-09MAY01-C823_7.pep
ESSDTVDNVKAKIQDKEGIPPDQQRLIFAGKQLEDGRTLADYNIQKESTLHLVLRLRGGMQIFVKTLTGKTITLEVESSDTIDNVKAKIQDKEGIPPDQQRLIFAGKQLEDGRTLADYNIQKESTLHLVLRLRGGF

SEQ ID NO: 67687 - protein, 326 aa, Gossypium hirsutum
  unsure (1)..(326): unsure at all Xaa locations
  Clone ID: GOSHI-09MAY01-C823_6.pep
PRVRGRVGQIFVKTLTGKTITLEVESSDTIDNVKAKIQDKEGIPPDQQRLIFAGEQLEDGRTLADYNIQKESTLHLVLRLTGGMQIFVKTLTGKTITLDRESSDTTDNVKANSHDKEGIPPDQHRLIFAGKQLENGRTLADYNIQKESTLHLVLRLRGGMQIFVKTLTGKTITXLEVESSDTVDNVKAKIQDKEGIPPDQQRLIFAGKQLEDGRTLADYNIQRESTLHLVLRLRGGMQIFVKTLTGITITLEVESSDTIDNVKAKIQDKEGIPPDQQSLIFAGKQLEDGRTLADYNIQKESTLHLVLRLRGGXQIFVKTLTGKTIT

SEQ ID NO: 67688 - protein, 329 aa, Gossypium hirsutum
  Clone ID: GOSHI-09MAY01-C823_5.pep
GRTLADYNIQKESTLHLVLRLRGGMQIFVKTLTGKTITLEVDSSDTIDNPTPPIQDKEGIPPDQQRLIFAGKQLEDGRTLADYNIQKESTLHLVLRLRGGMQVFVKTLTGKTITLEVESSDTIDNVKAKIQDTEGIPPDQQRLIFAGKQLEDGRTLADYNIQKESTLHLVLRLRGGMQIFVKTLTGKTITLEVESSDTVDNVKAKIQDKEGIPPDQQRLIFAGKQLEDGRTLADYNIQKESTLHLVLRLRGGMQIFVKTLTGKTITLEVESSDTIDNVKAKIQDKEGIPPDQQRLIFAGKQLEDGRTLADYNIQKESTLHLVLRLRGGF

SEQ ID NO: 67689 - protein, 262 aa, Gossypium hirsutum
  unsure (1)..(262): unsure at all Xaa locations
  Clone ID: GOSHI-09MAY01-C823_4.pep
GPPSRSTQLLGGACGYNIQRXSTLHLVLRLRGGMQIFVKTLTGKTITLEVESSDTIDNVKTKIQDKEGIPPDQQRLIFAGKQLEDGRTLADYNIQKESTLHLVLRLRGGMQIFVKTLTGKTVTLEVESSDTIDNVKAKIQDKEGIPPDQQRLIFAGKQLEDGRTLADYNIQKESTLHLVLRLRGGMQIFVKTLTGKTITLEVESSDTIDNVKSKIQDKEGIPPDQQRLIFAGKQLEDGRTLADYNIQKESTLHLVLRLRGGF

SEQ ID NO: 67690 - protein, 225 aa, Gossypium hirsutum
  Clone ID: GOSHI-09MAY01-C823_3.pep
RLSRQSLPINKSTNSPNFPSKSNYFNSLLLIPNLSQKMQIFVKTLTGKTITLEVESSDTIDNVKAKIQDKEGIPPDQQRLIFAGKQLEDGRTLADYNIQKESTLHLVLRLRGGMQIFVKTLTGKTITLEVESSDTIDNVKAKIQDKEGIPPDQQRLIFAGKQLEDGRTLADYNIQKESTLHLVLRLKGGMQIFVKTLTGRTLPLKGEIQTFANGRAKSKKGGVPR

SEQ ID NO: 67691 - protein, 381 aa, Gossypium hirsutum
  Clone ID: GOSHI-09MAY01-C823_2.pep
MQIFVKTLTGKTITLEVESSDTIDNVKAKIQDKEGIPPDQQRLIFAGKQLEDGRTLADYNIQKESTLHLVLRLRGGMQIFVKTLTGKTITLEVESSDTIDNVKAKIQDKEGIPPDQQRLIFAGKQLEDGRTLADYNIQKESTLHLVLRLRGGMQIFVKTLTGKTITLEVESSDTIDNIKAKIQDKEGIPPDQQRLIFAGKQLEDGRTLADYNIQKESTLHLVLRLRGGMQIFVKTLTGKTITLEVESSDTIDNVKAKIQDKEGIPPDQQRLIFAGKQLEDGRTLADYNIQKESTLHLVLRLRGGMQIFVKTLTGKTITLEVESSDTIDNVKAKIQDKEGIPPDQQRLIFAGKQLEDGRTLADYNIQKESTLHLVLRLRGGF

SEQ ID NO: 67692 - protein, 533 aa, Gossypium hirsutum
  Clone ID: GOSHI-09MAY01-C823_1.pep
MQIFVKTLTGKTITLEVESSDTIDNVKAKIQDKEGIPPDQQRLIFAGKQLEDGRTLADYNIQKESTLHLVLRLRGGMQIFVKTLTGKTITLEVESSDTIDNVKAKIQDKEGIPPDQQRLIFAGKQLEDGRTLADYNIQKESTLHLVLRLRGGMQIFVKTLTGKTITLEVESSDTIDNVKAKIQDKEGIPPDQQRLIFAGKQLEDGRTLADYNIQKESTLHLVLRLRGGMQIFVKTLTGKTITLEVESSDTIDNVKAKIQDKEGIPPDQQRLIFAGKQLEDGRTLADYSIQKESTLHLVLRLRGGMQIFVKTLTGKTITLEVESSDTIDNVKAKIQDKEGIPPDQQRLIFAGKQLEDGRTLADYNIQKESTLHLVLRLRGGMQIFVKTLTGKTITLEVESSDTIDNVKAKIQDKEGIPPDQQRLIFAGKQLEDGRTLADYNIQKESTLHLVLRLRGGMQIFVKTLTGKTITLEVESSDTIDNVKAKIQDKEGIPPDQQRLIFAGKQLEDGRTLADYNIQKESTLHLVLRLRGGF

SEQ ID NO: 67693 - protein, 122 aa, Gossypium hirsutum
  Clone ID: LIB3083-100-Q1-L1-C10.pep
EIWNQEKTQIFVKTLTGKTITLEVESSDTIDNVKAKIQDKEGIPPDQQRLIFAGKQLEDGRTLADYNIQKESTLHLVLRLRGGMQIFVKTLTGKTITLEVESSDTIDNVKAKIQDKEGIPPD

SEQ ID NO: 67694 - protein, 122 aa, Gossypium hirsutum
  Clone ID: GOSHI-09MAY01-C593_2.pep
MGIYAMDFALKFNHSIFSTPYPPKPSPKCRFLTARCSLPLSSDGAATGLAERPWKVADARLVLEDGSIWRAKSFGASGTQVGEVVFNTFLTGYQEILTDPSYAGQFVLMTNPHIGNTGVNFD

SEQ ID NO: 67695 - protein, 202 aa, Gossypium hirsutum
  Clone ID: GOSHI-09MAY01-C593_1.pep
MSIKAMDFSLRINPSICFTQNLPKPSSKLRFLTVRCSLPLTSDDAATGLAERPWKVADARLVLEDGSIWKAKSFGASGTQVGEVVFNTSLTGYQEILTDPSYAGQFVLMTNPHIGNTGVNFDDEESRQCFLAGLVIRSLSITTSNWRCAETLGDYLAERNIMGIYDVDTRAITRRLRQDGSLIGVLSTEQSRSDEVLLEMSR

SEQ ID NO: 67696 - protein, 450 aa, Gossypium hirsutum
  Clone ID: GOSHI-09MAY01-C553_1.pep
MRECISVHIGQAGIQVGNACWELYCLEHGIQPDGQMPGDKTVGGGDDAFNTFFSETGAGKHVPRAVFLDLEPTVIDEVRTGAYRQLFHPEQLISGKEDAANNFARGHYTIGKEIVDLCLDRIRKLADNCTGLQGFLVFHAVGGGTGSGLGSLLLERLSVDYGKKSKLGFTVYPSPQVSTSVVEPYNSVLSTHSLLEHTDVAVLLDNEAIYDICRRSLDIERPAYTNLNRLVSQVISSLTASLRFDGALNVDVNEFQTNLVPYPRIHFMLSSYAPVISAEKAYHEQLSVAEITSSAFEPASMMAKCDPRHGKYMACCLMYRGDVVPKDVNAAVATIKTKRTIQFVDWCPTGFKCGINYQPPTVVPGGDLAKVQRAVCMISNSTSVAEVFSRIDHKFDLMYAKRAFVHWYVGEGMEEGEFSEAREDLAALEKDYEEVGLESGEGDEDEGDEY

SEQ ID NO: 67697 - protein, 155 aa, Gossypium hirsutum
  unsure (1)..(155): unsure at all Xaa locations
  Clone ID: LIB3582-025-P1-K1-G3.pep
DCISVHIGQAGNACWELYCLEHDIQXVGGGDHAFNTFFSETGAGKHPLRSKFLDLEPTVVDEVRSGSYRQLFQPEHFISAKEDAANNFARGHFTSNQXSVRKVGSFSSKLTILVFXLGLLLLERLSVDYGKNXKTGFHCLPFPQVSTSFVEPYKR

SEQ ID NO: 67698 - protein, 175 aa, Gossypium hirsutum
  Clone ID: GOSHI-09MAY01-C573_1.pep
PRVRPFCVFPFFSLPFSALVLNAPILPRFLARGEGVRPLSEIVDLSSTSSKLNTTINGPRGSRIVGDRGSREGSSVAQWPHGEEAPYWLGQQALETESAPRDKQWSSQLSPNLDSKHLCRTSSYPEQQQNQHFSSEPILVFDFDLLLLFLCLILIGEVGVGASGMMLILLFFSTC

SEQ ID NO: 67699 - protein, 283 aa, Gossypium hirsutum
  Clone ID: GOSHI-09MAY01-C563_1.pep
METKPTEIGSSKMFGGYNKRYKHFSPTLGCSMTFHIYFPPSSSPSHKFPILYWLSGLTCTDENFIIKSGAQRAASAEGVALIAPDTSPRGLNVEGEADSWDFGVGAGFYLNATQQKWKNWRMYDYVVKELPKLLSENFPQLDTSKASISGHSMGGHGALTIYLKNLDKYKSASAFAPIANPINCPWGQKAFTNYLGNDKAAWEEYDATCLIKKFHNVSATILIDQGEDDKFLDQLLAHKFEEACRSVNVPLLLRLQPGYDHSYFFISTFIDDHIRHHAQALKL

SEQ ID NO: 67700 - protein, 254 aa, Gossypium hirsutum
  unsure (1)..(254): unsure at all Xaa locations
  Clone ID: GOSHI-09MAY01-C503_1.pep
MIVDGSSPLPLKRRRFTSIDSMEAESAKAKLAAAKEKFGREIRVFETASLLPTQDGVPNTEEPDDFYDFTAEDYYRLMASKKEDKHLKTRKIREAEEAARRSRITKAVVRIRFPDNHTLELTFHPSETLQSLVDLISKLIARPDLPFYLYTTPPKKQIKDMTQDFFSAGFIPGAIVYFSYDLPKGEDAAAANSGPFLQEEIMSLKGLEVIAGAEQPESLQSAPEPASASAVPSPAVHESKPTEKKTXKPKWFKM

SEQ ID NO: 67701 - protein, 160 aa, Gossypium hirsutum
  Clone ID: GOSHI-09MAY01-C533_1.pep
MASSLNLTTLSLTLPIPHPHPHPHPRPSSSTRLPRGSLQLPQFNKVRKALKLSSSQTISAFPSFASKALPAFSPAPQTLQSPTVFAAKGYKMKTHMASAKRFLVTGRGKIVRRRAGKQHLLAKKNTKRKLRPAKMHAVSRSDYDNVIGALPYLKVNRNAK

SEQ ID NO: 67702 - protein, 505 aa, Gossypium hirsutum
  Clone ID: GOSHI-09MAY01-C453_1.pep
SPPGHRSVKGKKRLKMGKGVSFLLLALVLCYGVTVTMGYRGEKQWRKERERREEEMEPEEEEEEESESRKSWFLMPKSRPVMTTDAGEMRLVRSPGGRTVDKPLHMGFITMEPQSLFIPQYLDSSLILFVRTGEARVGCIYKDEMVERRLKIGDVYHIPAGSTFYILNPGEGQRLHIICSIDPSESLNLDTFQSFFIGGGTHPTSVLAGFGPETLSTAFNVSMSKLEEIMRGQQEGPIVHVTKFHAPSIWTKLSQLQEQDRLKQVKRMIQGEADEDEKEWSWWKLFGMFSGNERRVFGDKAPDSYNIYKRKADFKNDYGWSVAVDGSVYKPFKHSGTGVFLVNLTAGSMMAPHVNPRATEYGIVLRGTGRIQIVYPNGTLAMDARVREGDVFWVPRYLAFCQIASRSSPFEFFGFTTTSDKNRPQFLVGANSLLHTFNTPELAAAFGVTEERMRRFINAQKEAVILPSASAAPPDEDLKEREEKSEDGGPKVIRNFGDQMIMGFD

SEQ ID NO: 67703 - protein, 74 aa, Gossypium hirsutum
  Clone ID: LIB3583-015-P1-K1-E9.pep
RVLLSMCPCFMLLAFGLCSLYFLCLISYCWCCVCSWVLLLLSCLSGLGGFCLVCFLGMFVEFSEIMPPTHTTST

SEQ ID NO: 67704 - protein, 178 aa, Gossypium hirsutum
  unsure (1)..(178): unsure at all Xaa locations
  Clone ID: GOSHI-09MAY01-C443_1.pep
RLVLVNLSSNLLTGELPACLRENVEEGAGSYDGNCLSGEEGNQMPSSFCHNEASAAEVSPQKLRHKERKAMAVLVSSLVGGIVGLAVIAGXVYGVFQRRNRTAAMKGPSTRLITEKLSTVNTAKLLSDARYISETMKMGANLPTYRAFALEELNEATNYLSHPFIGGEPSLIQIYIGK

SEQ ID NO: 67705 - protein, 107 aa, Gossypium hirsutum
  Clone ID: GOSHI-09MAY01-C413_2.pep
YLLQAQNNIKTQIRTSPIGPFPQQFQKPRSPPFSPVPQQQPPCAFSPVRLYARLRTPHAKRQHDPRTRALHRYRASKPWISSPFFVEIGVEEGFRAKIPSGSNSPTW

SEQ ID NO: 67706 - protein, 83 aa, Gossypium hirsutum
  Clone ID: GOSHI-09MAY01-C413_1.pep
AIQKDSQYRKVIFRSKSTGFLFVIILLFCCVLSFYFISKANKVKRKGPYRASKPWISSPFFVEIGVEEGFRAKIPSGSSSPPW

SEQ ID NO: 67707 - protein, 104 aa, Gossypium hirsutum
  unsure (1)..(104): unsure at all Xaa locations
  Clone ID: GOSHI-09MAY01-C783_1.pep
MSFVFPGTRGDIESGFSGFIPERPAVRMPAARPANSNSLAFLVTALLLFMILNSHQMSPNFLLWLVVGVFLMATSLMMYATCQHTXAHARAHAAAASGLLGHTE

SEQ ID NO: 67708 - protein, 219 aa, Gossypium hirsutum
  Clone ID: GOSHI-09MAY01-C743_1.pep
DAWGSGARVNIWNDPWIPGSGNGRLLVHSMDIQWITVEQLITAETRTWNKEVLYRLFGVEQAERIITIPIAGCGSSDLQVWRHDASGEYSVKSGYRFLITSMINQTVSEGYSKIFTSIWDLQIPAKNKIHLWRLLKNYVPHFMNLVKRRLRADPVCPLCKSEPEDSHHLLWQCNVLQQLWSLLKFSMGSGVFTSDGTTNFVSAFLAMNMNEKKLCAISL

SEQ ID NO: 67709 - protein, 55 aa, Gossypium hirsutum
  Clone ID: GOSHI-09MAY01-C773_3.pep
KTPTNTTLAAQVLVRRTLAWITGVVLLIATLLGVYFLLNMPLTRDTLLYSNVKLD

SEQ ID NO: 67710 - protein, 123 aa, Gossypium hirsutum
  Clone ID: LIB3582-049-P1-K1-A12.pep
QQDADGFDKLGMRLLLATLPKIFDSLQTAYEGQIVGVFVFNGASQPVSKPLINVMFTSRPSPRWLAETKTPTNTTLAAQVLVRRTLAWITGVVLLIATLLGVYFLLNMPLTRDTLLYSNVKLD

SEQ ID NO: 67711 - protein, 137 aa, Gossypium hirsutum
  unsure (1)..(137): unsure at all Xaa locations
  Clone ID: uC-gsflmaxxa011b08b1.pep
AIPLENGDNVNLHMSKKXREFASKLFALSHNIRKAMQMHEDLSQALHRPAELIVGSFDGIKALQEQQDADGFDKLGMRLLLATLPKIFDSLQTAYEGQIVGVFVFNGASQPGSSLLISGDLIMVLIITYLDFRNLEK

SEQ ID NO: 67712 - protein, 127 aa, Gossypium hirsutum
  Clone ID: GOSHI-09MAY01-C763_6.pep
LSSASNIYQVDMVIVPATTGQMGVLPGHVPTIAELKPGSCRPRGRPRGGNDVTKYFLSSGFALIHANSVADIIAVEAVPVDRLDPALVQKGLADFTQKLVSATTDLEKAEAQIGVDVHSAMNSAITG

SEQ ID NO: 67713 - protein, 40 aa, Gossypium hirsutum
  Clone ID: GOSHI-09MAY01-C763_4.pep
KKKGLADFTQKLGSATTDLEKSEAQIGVDVHSAMSSAITG

SEQ ID NO: 67714 - protein, 201 aa, Gossypium hirsutum
  Clone ID: GOSHI-09MAY01-C763_2.pep
MFRQASRLLARTTTPWRRSRAFSSDLPATPAQDSNFIESWSKVIPNIDPPKTPSSFMTPRPATPSAIPSKLTVNFVLPYASELSAKEVDMVIVPATTGQMGILPGHVPTIAELKPGILSVHEGNDVTKYFLSSGFALIHANSVADIIAVEAVPVDRLDPALVQKGLADFTQKLVSATTDLEKAEAQIGVDVHSAMNSAITG

SEQ ID NO: 67715 - protein, 68 aa, Gossypium hirsutum
  Clone ID: GOSHI-09MAY01-C763_1.pep
MINVRREKISERMKYLQDLVPGCNKITDKAGMLNEIINYVQSLQRQVEVKNNGERTYGFVFKGKTETS

SEQ ID NO: 67716 - protein, 99 aa, Gossypium hirsutum
  Clone ID: LIB3145-026-Q1-K1-E6.pep
MFRQASRLLARTTTPWRGSRAFSSDVPATLDLDGFEVVHDVIYLLSDWAKGVIPFDTNTKVDGDLGLFLFKIPLKAKVSCEVYMDRNNQSIVRQDCYAE

SEQ ID NO: 67717 - protein, 147 aa, Gossypium hirsutum
  unsure (1)..(147): unsure at all Xaa locations
  Clone ID: uC-gsronu33B016f07b1.pep
MFRQASRLLARTTTPWRRSRAFSSDLPATPAQDSNFIESWSKVIPNIDPPKTPSSFMTPRPATPSAIPSKLTVNFVLPYASXLSAKEVDMVIVSATTGQMVALPGHVPTIAELKPGNLSEHEGKDVTKFLAKSLFWAETSLQCCGFY

SEQ ID NO: 67718 - protein, 57 aa, Gossypium hirsutum
  unsure (1)..(57): unsure at all Xaa locations
  Clone ID: LIB3147-051-Q1-K1-G7.pep
FNSKSALVFTPHKYYKLLKLXNCIKVVSIFLSHIVLILLLAKKITTNKYVLTWRTKS

SEQ ID NO: 67719 - protein, 98 aa, Gossypium hirsutum
  Clone ID: LIB3582-047-P1-K1-E1.pep
TSKYSEPTSFFLVWNFIQNLADSKQLKGCPASMNIVNLTASNSLFTTECWGCEQSYANQRQCPSDIFPRTEEFLLFVKFANWLGNTSRLEARINWANQ

SEQ ID NO: 67720 - protein, 98 aa, Gossypium hirsutum
  Clone ID: LIB3829-020-Q6-N6-G8.pep
QWHSIIVPIMNMCASLNSHIIHEINHLYISSRIGQTLHKLRVKWNNKFPNAISPIIIMLQQRDCSKSNNELLLNRTSFMCMNGHFPCFSSSSSTKGQT

SEQ ID NO: 67721 - protein, 122 aa, Gossypium hirsutum
  Clone ID: GOSHI-09MAY01-C723_3.pep
NYKLKGHITEWHLHPFNSPLHFALSSARRRRYENPLVFLSILHYSRRPLLRRPSLFRLGLEPFRGPGSFIGEPRRRWPGPPWRKGKGKGKSKFLIPRRIFRFRSLYTPAGLAALLSKEKGQF

SEQ ID NO: 67722 - protein, 260 aa, Gossypium hirsutum
  unsure (1)..(260): unsure at all Xaa locations
  Clone ID: GOSHI-09MAY01-C723_2.pep
MAGTAMEKGKGKGKVEVFDSEENLSVSLAKYTADLAAKFSKEKGSFTVVLSGGSLIKSLRKLVEPPYVDAIDWSTWHVFWVDERVVPKDHDDSNYKLAFDGFLSKVPILPGNVYAINDALSAEGAADDYETCLKHLVKSNVLSVSTATGFPKFDLMLLGMGPDGHVASLFPGHPLVKENEKWVTFIKDSPKXPPPERITFTFPVINSSAHIALVICGXGKAGAVHSALGNSQNSDPLPVQMVSPEGDLVWFLDKDAASKL

SEQ ID NO: 67723 - protein, 214 aa, Gossypium hirsutum
  Clone ID: GOSHI-09MAY01-C723_1.pep
MASSPFQFSTPVLTLLLSSPSLRKSPCLPFHPSLFSPPLTQKTLTFSTGTRAVSGSGKSPGLPFRPSLFSPPLTQKTLTFSTGTRAVSGSGKFCWRAKASMSGTTMEKGKGKVEVIDSKENLSVSLAKYTADLAAKFSKEKGSFTVVLSGGSLIKSLRKLVEPPYVDAIDWSTWHVFWVDERVVPKDHDDSNYKLAFDGFLSKVQILPGNVYAN

SEQ ID NO: 67724 - protein, 97 aa, Gossypium hirsutum
  Clone ID: LIB3582-047-P1-K1-A11.pep
ALDSPNGFKKLHWEERYYHLQMLLKKLDQSDLEDYTQMLRSLSAVELSKHAIELEKRSIQLSLEEAKELQRVAVLNVLGKTMKIAKAPSNQPDQSYK

SEQ ID NO: 67725 - protein, 88 aa, Gossypium hirsutum
  Clone ID: LIB3582-047-P1-K1-A12.pep
KKGSFQNTYDNTVLSVLSVPFRYENTRNFQDKTTVNTALASNCRATTKNEDQNKCARLCTGFYITTYNIGYLVILFICTIDPVDSRVL

SEQ ID NO: 67726 - protein, 199 aa, Gossypium hirsutum
  unsure (1)..(199): unsure at all Xaa locations
  Clone ID: GOSHI-09MAY01-C683_1.pep
MSLLVVNRLKRVKSEPAVALASSSTNKDLLPQVFYKSLLKATDGFSSGNLIGVGSFGSVYRGILDQSEIIVTVKVLYLHRTGALKSFMAECETLSNVRYRNLVKLITACSSVDFQGNEFKAXSEFMPNGNLESWLHPGPNAGGNGSEYDLRILSLPQRLNIAIDVASALEYLHHRCQKPIVHRDLKPSNILLDYDMTAH

SEQ ID NO: 67727 - protein, 175 aa, Gossypium hirsutum
  Clone ID: GOSHI-09MAY01-C653_1.pep
EIQFMMTLGGGKEDLKSLEIELPGNVAGKLNVLLTDSDDGSEFSYEGSVEEEKLEEIMQELYKEIASTSPQPSVTFPSLSSSSSSSSSLTFSPISDVKISESCGASMSDSSSTVMAGIAFVGPTGKFPDVKQGSPEKELWIKGMERCDEEEGEVGDDPWLARVLGWGPLQLVEWT

SEQ ID NO: 67728 - protein, 497 aa, Gossypium hirsutum
  Clone ID: GOSHI-09MAY01-C663_1.pep
KLASVEARILPAPWLKYHDTGIEKNCLPQVGQWNMMNKKMVNGGTVNNWICINFSRQVQDSVARRFCYDLPQMCYISGMAFTPEPVLPPISARPEYVERVLKTRYHDAMIKLQPQNKELDLLIVILPDNNGSLYGDLKRICETDLGIVSQCCLTKHVFRMSKQYLANVALKINVKVGGRNTVLVDAISRRIPLVSDRPTIIFGADVTHPHPGEDSSPSIAAVVASQDWPEVTKYAGLVCAQAHRQELIQDLFKTWQDPVRGTVSGGMIKELLISFRRATGQKPQRIIFYRDGVSEGQFYQVLLYELDAIRKACASLEPNYQPPVTFVVVQKRHHTRLFANNHNDRRSVDRSGNILPGTVVDSKICHPTEFDFYLCSHAGIQGTSRPAHYHVLWDENKFTADALQSLTNNLCYTYARCTRSVSIVPPAYYAHLAAFRARFYMEPETSDSGSMTSATAAGRGGGAAAAGGRSTRGPGASAAVRPLPALKENVKRVMFYC

SEQ ID NO: 67729 - protein, 77 aa, Gossypium hirsutum
  Clone ID: LIB3584-008-P1-K1-A7.pep
MCAVPPAYYAHLAAFRARFYMEPETSDSGSMTSATAAGRGGGAAAAGGRSTRGPGASAAVRPLPALKENVKRVMFYW

SEQ ID NO: 67730 - protein, 140 aa, Gossypium hirsutum
  Clone ID: LIB3825-014-Q1-K6-H4.pep
IILFPLQVISKRICETDLGIVSQCCLTKHVFRMSKQYLANVALKINVKVGGRNTVLVDAISRRIPLVSDRPTIIFGADVTHPHPGEDSSPSIAAVVASQDWPEVTKYAGLVCAQAHRQELIQDLFKTWQDPVRGTVSGGM

SEQ ID NO: 67731 - protein, 44 aa, Gossypium hirsutum
  Clone ID: LIB3582-001-P1-K1-D2.pep
VLLLNNFMWEGFQWTSTLDICFICRLLLLNQCFLQLVLVQSKWR

SEQ ID NO: 67732 - protein, 231 aa, Gossypium hirsutum
  Clone ID: GOSHI-09MAY01-C613_1.pep
MRMSCNGCRVLRKGCTENCTIRPCLQWIKSSDSQANATLFLAKFYGRAGLLNLIEAGPENLRPAIFRSLLYEACGRVVNPVYGSIGMLWSGNWGECQAAVDAVLKGSPITQTSSSLESVEEEQPISPLKTYDIRHVFKDTKPAAAADIDKVKTRTRFKRSRTRSKRQVVDSWMSQLGNGDSKEDESTFSVETVEGSLVNHAKRGPILKFEDSSNVGLELTLALLPEATHLG

SEQ ID NO: 67733 - protein, 62 aa, Gossypium hirsutum
  unsure (1)..(62): unsure at all Xaa locations
  Clone ID: LIB3583-042-Q6-K7-D1.pep
PXSPRVRPASAIFRSLLYEACGRVVNPVYGSIGMLWSGNWGECQAVVDVVLKGLFFVLWWWF

SEQ ID NO: 67734 - protein, 221 aa, Gossypium hirsutum
  unsure (1)..(221): unsure at all Xaa locations
  Clone ID: GOSHI-09MAY01-C603_1.pep
IVSPTEQFSGIPYVMTLLNCLLSAWYGLPFVSKNNILVSTINGTGAAIESIYVLIFIIYAPKEEKAYIFGLFTFVLTVCTAVALISLFSLHGNGRKLFCGLAATIFSIIMXASPLSIMRLVIKTKSVEFMPFFLSLFVFLCGTSWFIYGLLGRDAFVAVPNGFGCGLGTMQLILYFIYRNNKGSQEIKKPSGNGTSIEIGEKKPRQDKQQPNGKVPQDEQV

SEQ ID NO: 67735 - protein, 192 aa, Gossypium hirsutum
  Clone ID: LIB3825-010-Q1-K6-F8.pep
MEVLHFVFGVFGNATALFLFLSPTITFKRIIRSKSTEQFSGIPYVMTLLNCLLSAWYGLPFVSKNNILVSTINGTGAAIESIYVLIFIIYAPKKEKAKIFGLFTFVLTVFTAVALISLFSLHGNGRKLFCGLAATIFSIIMYASPLSIMRLVIKTKSVEFMPFFLSLFVFLCGTSWFIYGLLGRDAFVAVPM

SEQ ID NO: 67736 - protein, 88 aa, Gossypium hirsutum
  Clone ID: LIB3585-055-P1-K1-C10.pep
RTRGRTRGRTRGPPWKWQSCVCGLAATIFSIIMYASPLSIMRLVIKSKSVEFMPFFLSLFVFLCGTSWFIYGLLGRDAFVAVRYMPSS

SEQ ID NO: 67737 - protein, 223 aa, Gossypium hirsutum
  Clone ID: GOSHI-09MAY01-C633_1.pep
DPPSDSLKRYLNHVVRSNSRKDQQVELVFDINKEDSLNNRFKEIKDLKTDAVFSIDDDVIFPCTSVEFAFTVWQSASDTMVGYVPRMHWVDQKKGENKYKYGGWWSVWWTGTYSMVLSKAAFFHKKYLKLYTDEMPASLKEYITKNRNCEDIAMSFLVANATDAPPIWVKGKIFEIGSTGISSLGGHSERRTECVNKFVDEFGRMPLVPTVMKAVDSRYSWFW

SEQ ID NO: 67738 - protein, 145 aa, Gossypium hirsutum
  unsure (1)..(145): unsure at all Xaa locations
  Clone ID: GOSHI-09MAY01-C193_2.pep
MAKLALLVATFALAFFLVNASIXRTSITPGGDEETWSRHSRQSCQDQIWRQGYLPNCQRYMNEETGSSHHRYSSHYLNSCCDELENLREDGRCQGLKQALGQQLKLQGVRWESPEAEDMCEAAETALNRCGLGSRRCDMHSGRWL

SEQ ID NO: 67739 - protein, 138 aa, Gossypium hirsutum
  Clone ID: GOSHI-09MAY01-C193_1.pep
MAKFALLVATFALAFFLVNASIYRTTDGDEENWYRHDRRSCQDQIWQQGYLPNCQWYMNEQAGRSHSGYGTHYLNSCCYELQNLRQDCRCQGLKQALGQQLKLQGVRWESREAEDMCEAAETALNRCRLDSRRCDMHS

SEQ ID NO: 67740 - protein, 90 aa, Gossypium hirsutum
  unsure (1)..(90): unsure at all Xaa locations
  Clone ID: LIB3582-053-P1-K1-A9.pep
ISYKTYHGRVRSPKTHFRSHFLPHQRLHLPDHGLRHKKTGTDTIGYHVKTRYGNKATSQMGGVHXLIKPPQPQXIXHPLPQLXLLXXPXP

SEQ ID NO: 67741 - protein, 87 aa, Gossypium hirsutum
  Clone ID: GOSHI-09MAY01-C153_2.pep
MKIEDLDDVENEDGDYGAKQLQIVRVDDAKRLLVGAGARILFYPTLLYNVFRNKIQSEFRWWDEVDQFLLLGAVPFPKDVRRLKQLG

SEQ ID NO: 67742 - protein, 211 aa, Gossypium hirsutum
  Clone ID: GOSHI-09MAY01-C153_1.pep
MKIEELDEVENDRRNDGVKQLQIVRVDDAKRVLVGAGARILFYPTLLYNVFRNKIQSEFRWWDEVDQFLLLGAVPFPKDVRRLKQLGVGGVITLNEPFETLVSTSLYRAHGIDHLVIPTRDYLFAPTVSDISRAVDFIHNNASCGRTTYVHCKAGRGRSSTIVLCYLVEHKQMTPAGALEYVRSRRPRVLLAPSQWKAAVEYSMHQQPLLY

SEQ ID NO: 67743 - protein, 97 aa, Gossypium hirsutum
  Clone ID: GOSHI-09MAY01-C143_1.pep
MVTKTVDLRSDTVTKPTEAMRAAMATAEVDDDVLGADPTAARLESEVAKIMGKEAGLFVASGTMGNLISVLVHCDIRGSEVILGDNCHIHIYENGGI

SEQ ID NO: 67744 - protein, 64 aa, Gossypium hirsutum
  Clone ID: LIB3493-001-P1-M1-H1.pep
SQENSRNPSIKKNLQTRLKNAYYIYACVCIERDGHILPVEALLVLCLTTQNEKVENLPLLFPEN

SEQ ID NO: 67745 - protein, 122 aa, Gossypium hirsutum
  Clone ID: GOSHI-09MAY01-C163_2.pep
DPPSLSPPLSPLGHQQRTPRYGGDRLSKFGTEMTSSYDDVLLKEVMSCLGTMNLSEASSPMATTANTNIPWLDVSFKGAPSMVSPSGSGEYFNGGGDDEKNNGNGVVLDHDLDLGWVNELLM

SEQ ID NO: 67746 - protein, 335 aa, Gossypium hirsutum
  Clone ID: GOSHI-09MAY01-C163_1.pep
MTLHTISPPKNCVSRTLKSLQGKKQLHCCHNAAAMELPHHEARLHKYLPSNEDDDGTDDPYGTDHFRMYEFKVRRCTRSRSHDWTDCPFAHPGEKARRRDPTRYQYSSTICSDFRRGGGCPRGDDCEFAHGVFECWLHPTRYRTEACKDGKNCKRKVCFFAHSSRELRLLPESQPPYKNSDKNYNHCCLFCRSVTSSSSLSPTSTLLGLSQFSRSPSLSPPLSPLKHQQRTPRYGGDRISKFGTEMTTSYDDVLLKEVMSCLGTMTLSEVPSPMATTPNTNIPWLDVSFKGAPSMVSPSGSGEYFNGGGDDEKNNGNGVVLDHDLDLGWVNELLM

SEQ ID NO: 67747 - protein, 274 aa, Gossypium hirsutum
  Clone ID: GOSHI-09MAY01-C133_2.pep
MYADTGLFFPYMQNFAQDFQQFEGYCKTQKPNASMNNMVPTSTISEYDLGGDGDLFKAPEPIIEEPIVSLDPMTAAISSLISCGEDVITSQELKAAHIESFQNEQLLEVLYECEKDMMAQAAIETPLAAEVIDVKIPMDENWNQENEMSCDVTSGSLSSMEWMQQAAIKPNFLDFTGMDFSSVYGMRRAFSEGDMKTLGNGNVSIIHSPVERPSIVSCCSNEDRKEKLSRYRNKKTKRNFGRKIKYACRKALADSQPRIRGRFARTEESDHSKR

SEQ ID NO: 67748 - protein, 281 aa, Gossypium hirsutum
  unsure (1)..(281): unsure at all Xaa locations
  Clone ID: GOSHI-09MAY01-C133_1.pep
MYAETGLFIPYMQNFAQDFQQFEDYYKTQKPNASMNDLAETSTISEYNLEGEGDLFRALEPIIEEPIVGLDSMTAAISLISCGEDVITSQELKDADIESFQNEQLLEVLYECEKDLMARGAIGTAPAAVLDIDTPVVKTEXSQNRDASFEECVSSDCLSSMECMQEAAVEPNFLDFTGMDFDSVYGMRRAFSEGDIKTLGNGDVSVIHSSVKWPLIVRSCSSEDRREKLSRYRNKKTKRNFGRKIKYACRKALADSQPRIHGRFAKTEVSDNSKRQLWSTN

SEQ ID NO: 67749 - protein, 136 aa, Gossypium hirsutum
  Clone ID: LIB3584-011-P1-K1-E6.pep
NPETECFNEQAGGPTLFLYRNDLGGDGDLFKAPEPIIEEPIVSLDPMTAAISSLVSCGEDVITSQELKAADIESFQNEQLLEVLYECEKDMMAQAAIETPLAAEVIDVKIPVDENWNQENEMSCDVPFSKGLAQVV

SEQ ID NO: 67750 - protein, 90 aa, Gossypium hirsutum
  Clone ID: LIB3148-046-Q1-K1-A1.pep
VKTNESPNRDASFEECASSDCLSSMECMQGAAVEPNFLDFTGMDFGSVYGMRRAFSEGDIKVSLKIFSVVFDIFTSGNDVEAFLGIYVGY

SEQ ID NO: 67751 - protein, 189 aa, Gossypium hirsutum
  unsure (1)..(189): unsure at all Xaa locations
  Clone ID: GOSHI-09MAY01-C353_1.pep
MASSFLLFLLIFLSVSSFILLSESQKTSKPNRFVLQLQKDPKTKLYVTNIYKRTPSQKVPFVVDLNGRLLWVTCEKSYRSSTYHAPRCRSTQCSRADSHYCHICSTRDGPGCHNNTCGVMSMNPVTGLTAMSELAQDVLSIQSTQGSXLGPMVRVPQFLVTCAPSLLLHRGLPRTVHGVAVLEHCSISL

SEQ ID NO: 67752 - protein, 56 aa, Gossypium hirsutum
  Clone ID: LIB3196-033-P1-M1-C8.pep
MEGYYGLLVRNVTVGTMGRVHKYLFTRAPYFILHRGLPSTVQGVARQMHMSHVLYA

SEQ ID NO: 67753 - protein, 244 aa, Gossypium hirsutum
  unsure (1)..(244): unsure at all Xaa locations
  Clone ID: GOSHI-09MAY01-C363_13.pep
LLFLQEIVLKGLHCHCEGXCRKVRRCLSGIFXQELKNVMDGGGESHNFVVVKGGRKRIPLKVLERVQRKSHRKVELLSPIPKPPAPEEEKTEDKEKSKPEDKKEEPPAAVVTVVLKVYMHCEACAMEIRKRIQRMKGVESAEPDLKSSEVTVKGPRVPPKLVEYVYRRTGKTAVIVKLEAETPKTEEEKAKDANKDEKKSEESGEKDKKEAGGEELDSPRDALSGRRVIDLIFCYFMIHKNKRK

SEQ ID NO: 67754 - protein, 190 aa, Gossypium hirsutum
  unsure (1)..(190): unsure at all Xaa locations
  Clone ID: GOSHI-09MAY01-C363_9.pep
MGEEEKKPVEEKKMEEKKVEDDGKKSEEKKETKEETTPPPPPPPSQEIVLKVYMHCEGCARKVRRCLKGFQGVEDVMTDCKSNKVVVKGEKADPLKVLERVQRKSHKQVELLSPIPKPPATAEGKKPEENXKPKSDEKKEEPQVIMVVLKVHMHCEACAQGIKKRIQRMKGVESAEPDLKSSEVTVKGVF

SEQ ID NO: 67755 - protein, 288 aa, Gossypium hirsutum
  Clone ID: GOSHI-09MAY01-C363_7.pep
KRKKNLLLFPQEIVLKVYMHCEGCARKVRRCLSGFPGVEDVMTDCRTHKVVVKGEKADPLKVLERVQRKSHRKVELLSPIPKPPAPEEEKTEDKEKSKPEDKKEEPPAAVVTVVLKVYMHCEACAMEIRKRIQRMKGVESAEPDLKSSEVTVKGVFEPPKLVEYVYRRTGKTAVIVKLEAETPKTEEEKAKDANKDEKKSEECGEKDKKEAGGEEKDDGKDKKQEGNNKEAPAADAAPATEGATEETKVAVELKKNEYYYYPPRYATEFYAYPPQMFSDENPNACTGM

SEQ ID NO: 67756 - protein, 86 aa, Gossypium hirsutum
  Clone ID: GOSHI-09MAY01-C363_6.pep
MGLQNDIDLLNPPAELEKKKHKLKRLVQTPNSFFMDVKCQGCFNIATVFSHSQTVVVCGNCQTVLCQPTGGKARLTEGCSFRKKGD

SEQ ID NO: 67757 - protein, 86 aa, Gossypium hirsutum
  Clone ID: GOSHI-09MAY01-C363_5.pep
MVLQNDIDLLNPPAELEKKKHKLKRLVQSPNSFFMDVKCQGCFNITTVFSHSQTVVVCGNCQTVLCQPTGGRARLTEGCSFRKKGD

SEQ ID NO: 67758 - protein, 86 aa, Gossypium hirsutum; identical to SEQ ID NO: 67757
  Clone ID: GOSHI-09MAY01-C363_4.pep

SEQ ID NO: 67759 - protein, 210 aa, Gossypium hirsutum
  unsure (1)..(210): unsure at all Xaa locations
  Clone ID: GOSHI-09MAY01-C363_2.pep
TSGTNDEDMGSKEEMQDWLLSVGIISPVTXESAGALYHQQLSRQLADFVRIPLERAGGMINLIDAYCLFNRARGTKMISPDDMLQACSLWEKFDVPVMLMKFDSGVMVIQNKFHSDEEVFARNKRLVTKPEALLTGISPTDAAMTLGIAPAMAKEHLLTAEIKGLLCRDISPDGFRFYINLFPEIDPCNMYFVKNYGICSTWIKAVSTTG

SEQ ID NO: 67760 - protein, 327 aa, Gossypium hirsutum
  Clone ID: GOSHI-09MAY01-C363_1.pep
PASGLIWLPSSSASTPTSASAIPLAAISHIFSSQKSLKSVFHSPRIRFQVLVSSDGRVFDPRSGSGSSSGSGSRSVVVTAVIRGKGDCDGFLVKFWDSWRARGRGARETSGSGSGSASGSGAATGTGGGLYSSDGSVRMVGVAGILRKEQEMWESTDKSLQDAFQDLNALMSKAKEMVMLAEKMRQKLLSGTSSQTSGTNDEDMGSKEEMQDWLLSVGIISPVTKESAGALYHQQLSCQLADFVRIPLERAGGMINLIDAYCLFNRARGTDRNFGFPAANNVYSFEVAVKRRCIISINLFFFFIISPRLWHISINILLITASIFNFA

SEQ ID NO: 67761 - protein, 121 aa, Gossypium hirsutum
  Clone ID: LIB3829-008-Q6-N6-G4.pep
LRKFDSGVMVIQNKSHSDEEVFARIKSLVTKPEALRTGISPTDAAMTLGIAPAMAKEHLLTAESKGLLCRDISPDGFRFYINLFPEIDPCNMYFVKDYGICSTWIKAVSTTGIGERSSTFR

SEQ ID NO: 67762 - protein, 124 aa, Gossypium hirsutum
  unsure (1)..(124): unsure at all Xaa locations
  Clone ID: LIB3825-030-Q6-K6-C12.pep
NEEKTPNRQKQKRVLQNDIKYCSNPPAELXEKKKHKLKRLVQTPNSFFMDVKCQGCFNITTVFSHSQTVVVCGNCQTVLCQPTGGKARLTEGCSFRKKVIDMVFVKESFTMGQFGSSFCFDHHI

SEQ ID NO: 67763 - protein, 72 aa, Gossypium hirsutum
  Clone ID: LIB3149-059-Q1-K1-B5.pep
FFSFKLKCFIFGVFNLVVYLLLRSRDVPSLAGLKLKRLVQSPNSFFMDVKCQGCFNITTVFSHSQTVVVCGN

SEQ ID NO: 67764 - protein, 74 aa, Gossypium hirsutum
  unsure (1)..(74): unsure at all Xaa locations
  Clone ID: LIB3189-018-P1-K1-E8.pep
MVLQNDIDVLXPPAEREKKKHKLKRLVQSPNSFFMYVKFQGFFYLSSDFSHSYTLISCLLFKLMNFFIFFYFPL

SEQ ID NO: 67765 - protein, 81 aa, Gossypium hirsutum
  Clone ID: LIB3083-065-Q1-L1-E6.pep
DIDLLNPPAGVEGKKHKLKRLVQSPNSFFMDVKCQGCFNITTVFSHSQTVVVCGNCQTVLCQPTGGRARLTEGCSFRKKGD

SEQ ID NO: 67766 - protein, 47 aa, Gossypium hirsutum
  Clone ID: uC-gsronu33B147a09b1.pep
LKHMKKITHMIPIFDPKMGAYFCELKGSFQPQGQAQDLKHLTLPHES

SEQ ID NO: 67767 - protein, 254 aa, Gossypium hirsutum
  unsure (1)..(254): unsure at all Xaa locations
  Clone ID: GOSHI-09MAY01-C333_1.pep
PTRPPTRPPTRPRTRGSWCAVEYFEDSGAILRMLLQHLPLETLHHGRTLLHHAILCCNAGAVKVLLDCGANVECPVKTLKTEFCPIHMAARLGLSAALQSLIDAGCDLNSKTDSGDTALMVCAKFKHEECVEVLTMAGADFGLVNVSGQSAGSIARSNQWSLSFQQAXLDAIKVGKIPKSSHLSVFSPLMVVAQAGDVQALKALIGSGEVNIDYQDGKGFSVVMVAALKGHVEAFRLLVYAGADVKLLNKSGET

SEQ ID NO: 67768 - protein, 77 aa, Gossypium hirsutum
  Clone ID: GOSHI-09MAY01-C283_4.pep
MCQISGLSFLFEKKKIKKKKKITLSAIDLLAYERQLAMSKMGGVHALMHPQGQHPLKQAAMGVGAAGASQAIYDGLI

SEQ ID NO: 67769 - protein, 100 aa, Gossypium hirsutum
  unsure (1)..(100): unsure at all Xaa locations
  Clone ID: GOSHI-09MAY01-C283_3.pep
RVRVSSYPSLRKPTAPGTSSNPLPPPPPXPLAGLSATDLLAYERQLAMNKMGGVHALMHPQGQHPLKQAAMGVGAAGASQAIYDGGFQNVAAAQQLMYYQ

SEQ ID NO: 67770 - protein, 112 aa, Gossypium hirsutum
  Clone ID: GOSHI-09MAY01-C283_2.pep
LAIQMGNTQSFLCGKQIKCSWGSKPTPPGTSSNPLPPPAAAPLPGLSAIDLLAYERQLAMSKMGGVHALMHPQGQHPLKQAAMGVGAAGASQAIYDGGFQNVAAAQQLLYYQ

SEQ ID NO: 67771 - protein, 421 aa, Gossypium hirsutum
  Clone ID: GOSHI-09MAY01-C283_1.pep
MQHQRLKQQQQALMQQALLQQQSLYHPGILAPPQIEPIPSGNLPAGFDPSTCRSVYVGNIHTQVTEPLLQEVFASTGPVEGCKLVRKEKSSYGFVHYFDRRSAALAILSLNGRHLFGQPIKVNWAYASGQREDTSGHFNIFVGDLSPEVTDAMLFACFSVYPSCSDARVMWDQKTGRSRGFGFVSFRNQQDAQSAINDLSGKWLGSRQIRCNWATKGASSNDDKQSSDAKSVVELTNGSSEDGKETTNNEAPESNPQYTTVYVGNLAPEVTQLELHRHFHALGAGVIEEVRVQRDKGFGFVRYSTHAEAALAIQMGNAQSYLCGKQIKCSWGSKPTPPGTSSNPLPPPAAPLPGLSATDLLAYERQLAMSKMGGVHALMHPQGQHPLKQAAMGVGAAGASQAIYDGGYPNVAAAQQLMYYQ

SEQ ID NO: 67772 - protein, 153 aa, Gossypium hirsutum
  Clone ID: LIB3585-013-P1-K1-E3.pep
DAWVELHCHFHALGAGVIEEVRVQRDKSFGFVRYSTHAGAALAIQMGNTQSFLCGKQIKCSWGSKPTPPGTSSNPLPPPAAAPLPGLSAIDLLAYERQLAMSKMGGVHALMHPQGQHPLKQAAIGVGAAGASQAIYDGGFQNVAAAQQLLYYQ

SEQ ID NO: 67773 - protein, 69 aa, Gossypium hirsutum
  Clone ID: LIB3166-004-P1-K1-C2.pep
SGPTKGVSSSDDKQSSDAKSVGELTNGSSEDGKEMTNNEAPESNPQYTTVYVGNLAPEASNYKDLQNSF

SEQ ID NO: 67774 - protein, 117 aa, Gossypium hirsutum
  Clone ID: AI729757.1.pep
MQHQRLKQQQQALMQQALIQQQSLYHPGILAPPQIEPIPSGNLPPGFDPSTCRSVYVGNIHTQVTEPLLQEVFASTGPVEGCKLVRKEKSSYGFIHYFDRRSAALAILSLNGRHLFG

SEQ ID NO: 67775 - protein, 111 aa, Gossypium hirsutum
  Clone ID: LIB3583-059-P1-K1-G1.pep
MSSHTKHTDLFFLENRRGKMQHLMLKQQQQALMQQALLQQQSLYHPVILAPPQIEPIPSGNLPPGFDPSTCLNVYVENIHSQVTEPLLQEVFASTGPVEGCKLIIKGKSSY

SEQ ID NO: 67776 - protein, 105 aa, Gossypium hirsutum
  Clone ID: LIB3146-019-Q1-K1-A2.pep
RTRGRTRGRTRGRTRGRTRGFVHYFDRRSAALAILSLNGRHLFGQPIKVNWAYASGQREDTSGHFNIFVGDLSPEVTDAMLFACFSVYPSCSDARVMWDQKTGRS

SEQ ID NO: 67777 - protein, 232 aa, Gossypium hirsutum
  Clone ID: GOSHI-09MAY01-C253_1.pep
MGTPETSREPCPDRILDDIGGAFGMGAVGGAAFHFLKGTYNSPSGSRLLGGTQAVRMNAPRVGGSFAVWGGLFSTFDCTMVYVRQKEDPWNSIIAGAATGGFLSMRQGFGAASRSAVFGGILLALIEGAGIMLNKVLSQPQMPIMIDEPAPNVAGMPGYPMGQLPNQAPASIESLRRDSPPPPPQQSSSNSSSSWFGGLFGGKKQEPATGSGSKTEVLESFDAPPVPSFEYK

SEQ ID NO: 67778 - protein, 146 aa, Gossypium hirsutum
  Clone ID: GOSHI-09MAY01-C243_1.pep
MGLVRNPDNNTASPETRTATHLSSSASYNDGDCTETPRLSEAFDSTCSSPYVSAPSSPGRGPTSGYFFSAPASPMHFILSSSPSPTYHLKSESLAILGQSDASSFEFEFSSRFSSNGSVTVGSMSSADELFLNGQIRPMKLSSHLQ

SEQ ID NO: 67779 - protein, 154 aa, Gossypium hirsutum
  unsure (1)..(154): unsure at all Xaa locations
  Clone ID: LIB3585-063-P1-K2-D2.pep
PRVRPRVRPRVRPRVRFSAPASAMHFILSSSPSPTYHLKSESLAISGQSDASSFEFEFSSRFSSNGSVTVGSMSSADELFLNGQIRPMKLSSHLQRPQNLAPLLDLYVEEDDXGLNKPEASRGRDLKLRSRSSYRKARSLSPLRNPEFQWEEEE

SEQ ID NO: 67780 - protein, 177 aa, Gossypium hirsutum
  Clone ID: GOSHI-09MAY01-C273_4.pep
MGRVIRAQRKGAGSVFKAHTHHRKGPARGRSLDFGERNGYLKGVVTDVIHDPGRGAPLARVVFRHPFRYKKQKELFVAAEGMYTGQFVYCGKKATLVVGNVLPLRSIPEGAVVCNVEHHGGDRGVFARASGDYAIVISHNPDNDTTRSLISYSCFNFNFNFDLFALIICLVYDKGAL

SEQ ID NO: 67781 - protein, 259 aa, Gossypium hirsutum
  unsure (1)..(259): unsure at all Xaa locations
  Clone ID: GOSHI-09MAY01-C273_3.pep
MGRVIRAQRKGAGSVFKXHTHHRXGPARFRSLDFGERGGPQGVVTDVIHDPGRGAPLARVVFRHPFRYKKQKELFVAAEGMYTGQFVYCGKKATLVVGNVLPLRSIPEGAVVCNVEHHVGDRGVFARASGDYAIVISHNPDNDTTRIKLPSGSKKIVPSGCRAMIGQIAGGGRTEXPLLKAGSAYHKYRVKRNCWPKVRGVAMNPVEHPHGGGNHQHIGHASTVRRDAPPGQKVGLIAARRTGRLKRQAAATAAKADKA

SEQ ID NO: 67782 - protein, 260 aa, Gossypium hirsutum
  Clone ID: GOSHI-09MAY01-C273_2.pep
MGRVIRAQRKGAGSVFKAHTHHRKGPARFRSLDFGERNGYLKGVVTDVIHDPGRGAPLARVVFRHPFRYKKQKELFVAAEGMYTGQFVYCGKKATLVVGNVLPLRSIPEGAVVCNVEHHVGDRGVFARASGDYAIVISHNPDNDTTRIKLPSGSKKIVPSGCRAMIGQVAGGGRTEKPLLKAGNAYHKFRVKRNCWPKVRGVAMNPVEHPHGGGNHQHIGHASTVRRDAPPGQKVGLIAARRTGRLRGQAAATAAKADKA

SEQ ID NO: 67783 - protein, 260 aa, Gossypium hirsutum
  Clone ID: GOSHI-09MAY01-C273_1.pep
MGRVIRAQRKGAGSVFKAHTHHRKGPARFRSLDFGERNGYLKGVVTDVIHDPGRGAPLARVVFRHPFRYKKQKELFVAAEGMYTGQFVYCGKKATLVVGNVLPLRSIPEGAVVCNVEHHVGDRGVFARASGDYAIVISHNPDNDTTRIKLPSGSKKIVPSGCRAMIGQVAGGGRTEKPLLKAGNAFHKYRVKRNCWPKVRGVAMNPVEHPHGGGNHQHIGHASTVRRDAPPGQKVGLIAARRTGRLRGQAAATAAKADKA

SEQ ID NO: 67784 - protein, 61 aa, Gossypium hirsutum
  Clone ID: LIB3189-047-P1-K1-A6.pep
MGRVIRAQRKGAGSVFKAHTHHRKGPARFRSLDFGERNGYLKGVDYDVIHDSGRQASCGAA

SEQ ID NO: 67785 - protein, 125 aa, Gossypium hirsutum
  Clone ID: uC-gsronu33B046d05b1.pep
VFSYNPDNDTTRIKLPSGSKKIVPSGCRAMIGQVAGGGRTEKPLLKAGNAYHKFRVKRNCWPKVRGVAMNPVEHPHGGGNHQHIGHASTVRRDAPPGQKVGLIAARRTGRLRGQAAATAAKADKA

SEQ ID NO: 67786 - protein, 55 aa, Gossypium hirsutum
  unsure (1)..(55): unsure at all Xaa locations
  Clone ID: uC-gsflnu33B089e05b1.pep
VLKAHTHHLKGTLQFFSLNXRELDGFLKGEGTAFINYIGHGAALALMIYPDAIRY

SEQ ID NO: 67787 - protein, 80 aa, Gossypium hirsutum
  Clone ID: uC-gsronu33B039f06b1.pep
IVFKREISLQLPYTFTHTFTEWVESSELNVRVLVPYSRPTLTTLKVSAFFFMSDLSYLFSFLLAFPFLRLSCFLLSSLLF

SEQ ID NO: 67788 - protein, 207 aa, Gossypium hirsutum
  Clone ID: GOSHI-09MAY01-C263_3.pep
MEKSEKGNGVAPATRSPRALMRSSRNENQEVNTSMRTAETMLRLVPMALGVAALVVMLKNSQSNDFGSVSYSDLGAFRYLVHANGICAGYSLLSAIIAAVPSPSTMPRAWTFFLLDQILTYVILGAAAVSTEVLYLANKGDSAITWSAACGTFAGCCHKATIAVVITFVAVICYAVLSLVSSYRLFTKFDAPVNYPSKTIEATVFHG

SEQ ID NO: 67789 - protein, 207 aa, Gossypium hirsutum
  Clone ID: GOSHI-09MAY01-C263_1.pep
MEKSEKGNGVAPATRSPMALMGSSRNENQEVNTSMRTAETMLRLVPMALGVAALVVMLKNSQSNDFGSVSYSDLGAFRYLVHANGICAGYSLLSAIIAAVPSPSTMPRAWTFFLLDQILTYVILGAAAVSTEVLYLANKGDSAITWSAACGTFAGFCHKATIAVVITFVAVICYAVLSLVSSYRLFTKFDAPVNYPSKTIETTVFHG

SEQ ID NO: 67790 - protein, 166 aa, Gossypium hirsutum
  Clone ID: LIB3189-052-P1-K1-F7.pep
RVTTEIPDPRLKGYIAYKEMQIMAYLAKECLVVDPDARPTISEVVQILSTIAPDKSKRRIVHVNFLQMSSAHNMKNETLVERHQSVIEALYDTDEYMPTESTNSTEISLPLRTDGIGTVGKQRDTLSAECLERLVLLSSNTRRLGVPDDEAVDLTEPRLESFDVAN

SEQ ID NO: 67791 - protein, 68 aa, Gossypium hirsutum
  Clone ID: LIB3189-052-P1-K1-F2.pep
EKSEKGNGVAPATRSPMALMGSGRNENQEGSTTMRTAETMLRLVPMALGVAALVVMLKNSQSNDSDFI

SEQ ID NO: 67792 - protein, 104 aa, Gossypium hirsutum
  Clone ID: GOSHI-09MAY01-C38960_1.pep
QYLNTSTSIFNLEHIRVLRTTIHQLAMHTKQKQLLLCHDRLILICFGSLFLRLLLLHFSLVGGASLLAEERTEERRIDVVNHFRMKETLGSLGRSHSCFYNLRC

SEQ ID NO: 67793 - protein, 50 aa, Gossypium hirsutum
  Clone ID: LIB3147-017-Q1-K1-G10.pep
MSGGIYNVNSPLFRSFLSQKGGSSDKRKMEEQKPKEQRPKANENKPVMTE

SEQ ID NO: 67794 - protein, 133 aa, Gossypium hirsutum
  Clone ID: GOSHI-09MAY01-C38540_1.pep
MKKDLRSHWSLRKMVTRNGMLYPILGFASCVAFLYMSFGDLKLSANFTKGPRFSFVERNGTQFFLNGKPLYINGWNSYWLMAHSVDESSRPKVSAMLQAGAKMGLTVCRTWAFNDGGYNALQISPCQFDERVF

SEQ ID NO: 67795 - protein, 137 aa, Gossypium hirsutum
  Clone ID: GOSHI-09MAY01-C38460_1.pep
MIDLVHKVMCSHSEDELNSESLPPKVIEQGGEPDNFVPEKQDLGVKPEFLGQGGFPEVKFSSTSSPWEDPVGMPPEWTPPNVSVPLLNLVDKVFQLKRRGWLRRQVFWISKQILQLVMEDAIDDWLLRQIYWLRRED

SEQ ID NO: 67796 - protein, 104 aa, Gossypium hirsutum
  Clone ID: GOSHI-09MAY01-C38430_1.pep
NLQLPSKITVIIWRIAWNYISTLANLRYRRIVTDAVCPRCGYWEEDCHHIFRKCPRFSNQGISMNQCRYSFVNTYMGCLWSLLGIQLIAMKRNIPHQDKEPRHK

SEQ ID NO: 67797 - protein, 230 aa, Gossypium hirsutum
  Clone ID: GOSHI-09MAY01-C38750_1.pep
MPSIPEEPLLAANPDRFCMFPIQYPEVWEMYKKAEASFWTAEEVDLSSDLRHWEALTADEHHFISHVLAFFAASDGIVLENLAVRFMKEVQISEARAFYGFQIAIENIHSEMYSLLLETYIKDSDEKNRLFRAIETVPCVAKKAEWAMKWIDGGETFAERLIAFACVEGIFFSGSFCAIFWLKKRGLMPGLTFSNELISRDEGLHCDFACLLYSLLRSKLSEERLRGIVM

SEQ ID NO: 67798 - protein, 233 aa, Gossypium hirsutum
  Clone ID: GOSHI-09MAY01-C38720_1.pep
VKSLKLVQKNLINKIYTDSAEAKIPAVLDYLGTIVEADCKFLIFAHPRPRIEAIHQFLLKKKVGCIRIDGTTPASSRQALVNDFQEKDAIKAAVLSIKAGGVGLTLTAASTVIFAELSWTPGDLIQAEDRAHRIGQVSSVNIYYLLANDTVDDIIWDVVQNKLENLGQMLDGHENSLEVSSSQEHRSPTKQKTVDLIHQGSPGKQKTLDSFMKRCINMDDAEHQSKLKYPRNM

SEQ ID NO: 67799 - protein, 143 aa, Gossypium hirsutum
  Clone ID: GOSHI-09MAY01-C38680_1.pep
DFRVQDDRSLGGCSSPLLRREPPNLNNRNGNLKEEMSDNSAFQEEHFYVRNSHMDQADGVTRRDMMDDKDKSITPSGLKEIDRDVQNVETSGSDTSSTKGKNAVDKLAECHRENADVREDEKVETGQTEEKHRRKRKRTIMND

SEQ ID NO: 67800 - protein, 180 aa, Gossypium hirsutum
  Clone ID: GOSHI-09MAY01-C38170_1.pep
MAYKLLKSLEVVAISVLFVILQNSANAKPQVPCYFIFGDSLSDNGNNNNLNTLAKVNYSPYGIDFPKGPTGRFSNGKNMQDYIAEYLGFTRSMPPFAESKGENILNGVNYASGAAGIRDETGKDLGDRIPLDKQIQNHKIIILRLSKLMRNNIETILLLNRCIYSIQIGSNDYINNYFKP

SEQ ID NO: 67801 - protein, 66 aa, Gossypium hirsutum
  Clone ID: LIB3145-051-Q1-K1-A11.pep
GTKTFVLVVKEGLGTKGPTLTPYPKLRSRFWILLACCDRIGVSKKITGVERTRLKVIAKTLQSQGF

SEQ ID NO: 67802 - protein, 100 aa, Gossypium hirsutum
  Clone ID: LIB3145-051-Q1-K1-A10.pep
HASALEMSNSCSVSHSQDIEGADENKWHHVRKGTKIIVQVVKEGLGTKGPTLTPYPKLRSRFWILLACCDRIGVSKKITGVERTRLKVIAKTLQPQGFGL

SEQ ID NO: 67803 - protein, 157 aa, Gossypium hirsutum
  unsure (1)..(157): unsure at all Xaa locations
  Clone ID: GOSHI-09MAY01-C38080_1.pep
GKKTASLASQAGPISASGVYEALPSFRDVPSSEKQNLFLKKLSLCYVVFDFSDPSKNLREKEIKRQTLLELVDYISSVSSKFNEVAMQEVTRMVAANLFRTFPSPNHDSKILEMYDMEDEEPAMDPAWPHLQIVYELLLRFXVSPETDAKLAKKIVD

SEQ ID NO: 67804 - protein, 78 aa, Gossypium hirsutum
  Clone ID: GOSHI-09MAY01-C38070_1.pep
MEKSSRSMSSLVLLMLVLLATEMGSMTVEGRTCETKSSEYKGICLFDANCDSICKVEPGFDGGHCHGFFRRCYCTKPC

SEQ ID NO: 67805 - protein, 231 aa, Gossypium hirsutum
  Clone ID: GOSHI-09MAY01-C38060_1.pep
MDKMKIEEVQSTAKKQRIATHTHIKGLGLDATGNAIPLTAGFVGQAEAREAAGLVVDMIRQKKMAGRALLLAGPPGTGKTALALGISQELGSKVPFCPMVGSEVYSSEVKKTEVLMENFRRAIGLRIKENKEVYEGEVTELSLEETESVTGGYGKSISHVIIGLKTVKGTKQLKLDPTIYDALIKEKVAVGDVIYIEANSGAVKRVGRNDTFATEFDLETEEFVPLPQREV

SEQ ID NO: 67806 - protein, 117 aa, Gossypium hirsutum
  Clone ID: GOSHI-09MAY01-C38380_1.pep
MAAKILANLIVMGSGILARAVVQAYRQALSNAAKSGVTHETLQNAVRRGGKVMTEQEARLILGVSEETAWEEILKKYEILFEKNAKNGSFYLQSKVHRAKECLESVYQGKAEGSPPS

SEQ ID NO: 67807 - protein, 208 aa, Gossypium hirsutum
  Clone ID: GOSHI-09MAY01-C38310_3.pep
MVPIFASFSLLLISALFIVADCGSIGVNYGRIANNLPSATKVVELLISHALNRVKVYDTDPAVLHALSGSGIKVTVDLPNEQLFAAAKSTSFANSWVQRNVAAYYPHTEIEAIAVGNEVFVDPHNTTKFLVPAMKNIHQALVKSNLHSDIKISSPIALAALQNSYPSSAGSFRPELIEPVFKPMLNFLRQTGSFLMVNAYPFFAYESN

SEQ ID NO: 67808 - protein, 121 aa, Gossypium hirsutum
  Clone ID: GOSHI-09MAY01-C38310_2.pep
LKNYHDRRSPVAGNQPVNRGKGGVSKSTTGNTWCVANGEAGKEKLQAALDFACGEGGADCHPIQPGATCYDPNTLEAHASFAFNSYYQKNGRHMGTCYFGGAAYVVTQPPKYGDCEFPTGY

SEQ ID NO: 67809 - protein, 364 aa, Gossypium hirsutum
  Clone ID: GOSHI-09MAY01-C38310_1.pep
CVINIKAVIRVLHLPDEPHNLTMRPVRCMKNMHHALVKSNLLSDIKSSSPIALSALQNSYPSSAGSFRPELIEPVFKPMLNFLRQTGSFLMVNAYPFFAYESNTDVISLDYALFRENPGVVDAGNGLRGGGLFDAQIDAVFAAMSALKYDDIRLVVTETGWPSKGDENEIGASAENAAAYNGNLVRRILTGGGTPLRPKADLTVYLFALFNENNKVGPTSERNYGLFYPTEEKVYDIPFTVEGLKNYHDRRSPVAGNQPVNGGKGGVSKSTTGNTWCVANGEAGKEKLQAALDFACGEGGADCHSIQPGATCYDPNTLEAHASFAFNSYYQKNGRHMGTCYFGGAAYVVTQPPKYGDCEFPTGY

SEQ ID NO: 67810 - protein, 262 aa, Gossypium hirsutum
  unsure (1)..(262): unsure at all Xaa locations
  Clone ID: GOSHI-09MAY01-C39990_1.pep
AGDEGSITSVKKGVVLETATEAEGSYVAGPLYDDITYNIRASKPGFHLKQVGPYSFSCQKLSQISVKIYSKDDATEPMPSVLLSLSGDDGYRNNSMSGTGGIFVFENLFPGSFYLRPLLKEYAFSPSAQAIELGSGESREVVFHATRVAYSAMGMVTLLSGQPKEGVSIDARSESKGYYEVTVTDSSGTYRLRGLVPDALYSIKVVKKDGLGSAKIEXASPESGPVKVGNNDIKGLXFLVFEEPEMTILXCHVEANRTGELH

SEQ ID NO: 67811 - protein, 48 aa, Gossypium hirsutum
  Clone ID: GOSHI-09MAY01-C39930_1.pep
EDHTKGIEKKSPLASCIAKKPYPKTAAISSSYDHYDHHHDEYILLTMN

SEQ ID NO: 67812 - protein, 222 aa, Gossypium hirsutum
  unsure (1)..(222): unsure at all Xaa locations
  Clone ID: GOSHI-09MAY01-C39920_1.pep
MRKTPSLVDLCVRTVIDNVRYLGDVGETDSHLLERILPHCTVDQLLHVETSTKGRDLCSVTDKLWKNFYELQFGRESMKIVIERMKLKKVXLRWRQLYEAKLKDVQEAENKAIDRLKQLYMXEDARKQSRRVQLCTKVPPSSKRSFFAGSGPGYNMSNVKSNIMKKAKIDLMKSQEVKNLAAMKKKAVQSHHSGTTITKSSGFCGKNSASTSKHSKPLERRF

SEQ ID NO: 67813 - protein, 416 aa, Gossypium hirsutum
  unsure (1)..(416): unsure at all Xaa locations
  Clone ID: GOSHI-09MAY01-C39850_1.pep
SMDAASFFRDKSLGADSPLSGVISLLAAVDALSHVDGLDNLNKQLVFLVFTGEAWGYLGSRRFLLELDQQSDAVRGLNSSLIQLVMEIGSTGKGFSQGNKTFFAHTQVSSDTNEALDALKLAQESLKSEGVTVSNASSSNPGIPPSSLMAFLRKNSSTSGIVLEDFDTVFANKFYHSHLDDSANINSSAIVAAASLVARTLYVLASDKKDSTSPALSSINVNASLVEELISCLLDCDPGLSCELVSSYITSVDTCPSHYVGVVLGEPSSTPSPNQVDDISRFVWNFLADRTSTPKGTTTVCSKDCSNNGGVCIRAQTDGKGICVNSTTRYVPAYSTRLKLDSGTWKVLPPNSSDPMGMLDPVWTESNWNTIGLRVYTVQEAAYDRVVLLGGISVTVLAYLAICTNKSXITKALKQD

SEQ ID NO: 67814 - protein, 140 aa, Gossypium hirsutum
  unsure (1)..(140): unsure at all Xaa locations
  Clone ID: LIB3584-011-P1-K1-D8.pep
MLLKLAQECLKSDSVTDSNASSSNPGIPPXYLMAYLRKNSVRWGEGXEDSDTGFANKFYHSHLDYSSNINSSAIVAAAYLGARTLYVLASDRMDSTSSALSTINANASVVQELYTCLLDCDPRLACEQVSNCIISVDTCP

SEQ ID NO: 67815 - protein, 105 aa, Gossypium hirsutum
  unsure (1)..(105): unsure at all Xaa locations
  Clone ID: LIB3147-017-Q1-K1-G7.pep
RNRWETPFLKTPQRIYKPAYSTRLKLDSGTWKVLPPNSSDPMGMLDPVWTESNWNTIGLRVYTVQEAAYDRLVLLGXISVTILAYLTIVLTRTLLTKAFKSKFYK

SEQ ID NO: 67816 - protein, 141 aa, Gossypium hirsutum
  Clone ID: GOSHI-09MAY01-C39810_1.pep
MATVQKPASSSESDPRCANIDEKKRKRMLSNRESARRSRMKKQKLLEDLVNEVSALQKNNTQICEKIKFTTQRFVKMEASNSVLRAQVIELTESLQSLNSMLHMVEDISGYDVDIPEIPDPLMKPWQLPCATQPICSTFDG

SEQ ID NO: 67817 - protein, 193 aa, Gossypium hirsutum
  unsure (1)..(193): unsure at all Xaa locations
  Clone ID: GOSHI-09MAY01-C39570_1.pep
CKQKEWPLLYKNXGSYLWLLALQKRKEGRCPLEPGEVAVILRAMGYPKETQIYVASGQVYGGQNRMAPLRNMFPNLVTKEELASNEELAGFRKHVTSLAGLVFLVCLKSDLCVMTHGGNFAKLIIGARRYMGHRQKSIKPDKGLMSKSFGDPYMGWATFVEDVVVTHQTRXPEETFPNYDLWENPLTPCMCKA

SEQ ID NO: 67818 - protein, 48 aa, Gossypium hirsutum
  Clone ID: LIB3189-033-P1-K1-A12.pep
SVALFPCSFQILKASSFVKYSFISMKLNVHKQVPRRKKWLSSFTHARS

SEQ ID NO: 67819 - protein, 99 aa, Gossypium hirsutum
  Clone ID: GOSHI-09MAY01-C39560_1.pep
HASGNRENGAAVLVHLCSGDQQHLAEAQELGVMGPLVDLAQNGTDRGKRKAAQLLERMNRFVEQQKLAQVQAEAEVQQPESQSQTQQRRPPSGAVPGQG

SEQ ID NO: 67820 - protein, 127 aa, Gossypium hirsutum
  unsure (1)..(127): unsure at all Xaa locations
  Clone ID: GOSHI-09MAY01-C39740_1.pep
KTNSKPTIFFSTNTQEEEKRVIVRVLGVHSSNNPERYLGLPNLVGRGKKAAFXSLKDRLKKSIDNWSVKYLSQGGDVIFIKVVLQSIPTYSMXCFLLFLLPKSLCNKLEGIIAKFWWRKNQGKNGIH

SEQ ID NO: 67821 - protein, 178 aa, Gossypium hirsutum
  Clone ID: GOSHI-09MAY01-C39730_1.pep
PKPIIDIDIAREHLREAIFKMWEMEAAAKAATSDGMNEEVFDNSVGIETSAIPKVILKENSSCPTYSSNDQRVPSFQNGNNGSLHRKRAKCVEEERLPADKPNNHNKEAGTSRGEEDLCSTAESSASKRQTISRMSFSVPQSCSSSDGRPMLECESSDMKRSWQEKIDLEQTSSKNGN

SEQ ID NO: 67822 - protein, 137 aa, Gossypium hirsutum
  Clone ID: GOSHI-09MAY01-C39660_1.pep
HSPELQRILSRDKLKLSRTAGLKGKKKGVTFTIDCSKPVEDKIMDIAPLEKFLQERIKVGGKAGALGETVALTREKSKITVTSDGDFSKRYLKYLTKKYLKKHNVRDWLRVIASNKDQTVYELRYFNIAENEGEEED

SEQ ID NO: 67823 - protein, 154 aa, Gossypium hirsutum
  unsure (1)..(154): unsure at all Xaa locations
  Clone ID: GOSHI-09MAY01-C39630_1.pep
VLTNFDRNLGIRFSTALNYIVRVGYILHLVLVFPVIHFSLRQTVDNLVFEGSAPLTESKKRSLTLTVVLLVLIYIGSTMIPNIWTAFRVTGATTAVXLGFTFPALIALRISQQEESMSLSRVEKSLSWLMLILAMIVSIAGIIGSIYTIPSSSE

SEQ ID NO: 67824 - protein, 159 aa, Gossypium hirsutum
  Clone ID: GOSHI-09MAY01-C39180_1.pep
KRGKVLAMKKSSRTATERRLALAQTGGKAAVIELNCETDFVARNEIFEYLALALAKKALFVQNSSQQIPGVFSFGPECLEDLKLNLDHPKISGETTIQNAVTEVAAMMGENIKLRRGVVMSTSSHGVVSAYLHRCPQPGLGRIAGILSLEVENENSQWD

SEQ ID NO: 67825 - protein, 148 aa, Gossypium hirsutum
  unsure (1)..(148): unsure at all Xaa locations
  Clone ID: LIB3147-056-Q1-K1-C9.pep
AVTAAGSGCVAALSVERYLVRNDLLVEFHQPQTEEVKKELTDRDIQEGFDITLTKHKGQYALRKLYHESPRLICVLYTSPTCGPCRTLKPILSKVIDEFDQNVHFIEIDIEEDPEIAEAAGIMGTPCVQFFKNKEMLXTVSWVKMKRE

SEQ ID NO: 67826 - protein, 82 aa, Gossypium hirsutum
  Clone ID: LIB3147-005-Q1-K1-H7.pep
CNIKRLFILLSFYSVFLQVMDEFDQNVHFIEIDIEEDPEIAEAAGIMGTACVRGFKIKKMLRTVSGAKLKKDSLELLEPIKE

SEQ ID NO: 67827 - protein, 84 aa, Gossypium hirsutum
  Clone ID: GOSHI-09MAY01-C39160_1.pep
RSNHASDEVYLGQRTPIWATDAGPLQASDAFNRRLAEIDGVILKMNIDKKLKNRIGPVNVPYNLLHPTGEIGISGKGIPNSISI

SEQ ID NO: 67828 - protein, 215 aa, Gossypium hirsutum
  unsure (1)..(215): unsure at all Xaa locations
  Clone ID: GOSHI-09MAY01-C39090_4.pep
MQSAVFKNMVESLSVPTFRVGYPVTTDALDALYEKVKPKGVTMTALLAKAAAMALAQHPVVNSSCKDGKSFTYNSNINIAVAVAINGGLITPVLQDADKLDLYLLSQKWKELVEKARAKQLQPQEYNSGTFTLSNLGMFGVDRFDAILPPGQGAIMAVGASKPTVVADAEGFFSVKNKMLVNVTADHRIIYGADLAAFLQXFSKIVENAEASLCR

SEQ ID NO: 67829 - protein, 44 aa, Gossypium hirsutum
  Clone ID: GOSHI-09MAY01-C39090_1.pep
LSYHEILPFQVNVTADPRIIYGADLAAFLQTFSKIVENPESLTL

SEQ ID NO: 67830 - protein, 59 aa, Gossypium hirsutum
  Clone ID: uC-gsflmaxxa076a06b1.pep
FILSHKFSIKFERKLYLQGIVIGSIIETGLTSILFFTLKNPSASATTVGFDAPTAMIAK

SEQ ID NO: 67831 - protein, 69 aa, Gossypium hirsutum
  Clone ID: uC-gsflmaxxa076a11b1.pep
SAFSISIGTFMCHFMHHTGLYSAVQDATNHTRWCIFCCIFSPNHSCSHVCSIVLDILFHSLVLRPFLHP

SEQ ID NO: 67832 - protein, 110 aa, Gossypium hirsutum
  unsure (1)..(110): unsure at all Xaa locations
  Clone ID: GOSHI-09MAY01-C39040_1.pep
MVRGKALXAYRALLRATRGSFAGDTLMLNASAVEVRQKFEANRHVTSEPEIQKLLEEAREASHFVSTMIVQAKLNERGGYEVKPSKEHAGATLEIPSEEIIRKSASQSKQ

SEQ ID NO: 67833 - protein, 52 aa, Gossypium hirsutum
  Clone ID: GOSHI-09MAY01-C39310_1.pep
CGVIGPDRFNWDIKPMCDEYSLTVGGNRPTWRQAASMTKCRGTIFGCPQLRI

SEQ ID NO: 67834 - protein, 184 aa, Gossypium hirsutum
  Clone ID: GOSHI-09MAY01-C39330_1.pep
SVAIVKNLTYIEEEDLVNNGSQSFAVFGGNQSWLQREENFNLKPSMKVHCGFLKNGGADMNPVDIEYVKRCRFLVASGIFDGYDVPHQPSNINIRSKKLFCFLMVVDEVSLTFIKENVTVRKDKDKGMWVGLWRLIPLKHQPYDEPRRNGKVSKILTHRLFPQAQYSIWIDGKMELIVDPLLIS

SEQ ID NO: 67835 - protein, 103 aa, Gossypium hirsutum
  unsure (1)..(103): unsure at all Xaa locations
  Clone ID: GOSHI-09MAY01-C39240_1.pep
RCCLARVLPCGALDLIRIVHLNGYVEXLTGPITAAEILRANPNLVLSTPTFQGVLRRILILSPDSQLKRRNIYCLIPSPPSLPQKKKTGVHHMKSSTKMQSNI

SEQ ID NO: 67836 - protein, 106 aa, Gossypium hirsutum
  Clone ID: GOSHI-09MAY01-C134938_1.pep
KVRSPSSRRRNWSSSSSSEDERSRKHSRRHRYRSSDSNNDSSSDDRERYHPRSKGKRKRSSREKSSSSRKHSKHHKHRSRDSPSRSHHGSEREHSESRKEKRKRRN

SEQ ID NO: 67837 - protein, 184 aa, Gossypium hirsutum
  Clone ID: GOSHI-09MAY01-C34850_1.pep
LASVSSSENLQQTNVNHQIHGTSRQNESATAGSQASFSELRSGSVPVGVYALQRENVFPERPGEPECQFYMKTGDCKFGAVCKFHHPRERVLPAPDCVLSPIGLPLRPGEPLCIFYSRYGICKFGPSCKFNHPMGIFTYSYSPSSPSDAPVHCFLGSSSGTAGLNLSSEGLVEAVPTKPQATIT

SEQ ID NO: 67838 - protein, 214 aa, Gossypium hirsutum
  Clone ID: GOSHI-09MAY01-C34840_1.pep
MCGLASSSIPTSTFPSFQQSKVQTKPCINPCNSLVLPPTKLCSSDLCLTSFSFGGPRLIHRSPGVPRSSTGPGGAPGSGDNESRNVLDAFFLGKAVAEALNERIESTIGEFLSVVGRLQAEQQKQVQDFQEEVLERAKRAKEQAAREALEAQGLIPKSTSLSTSMGSGATANNGAAAKASPSTANNGVSTTPSSYNPANPAAANTDPGPDAKKE

SEQ ID NO: 67839 - protein, 99 aa, Gossypium hirsutum
  Clone ID: LIB3135-052-Q1-K1-D1.pep
LCVFFLPFYVKLSGILSIAGDNGSRNVLDVFFLRKAVAEALNERIESTIGEFLSVVGRLQAEQQKQVQDFQEKVLERAKRAKEQAAREALEAQRLIPKS

SEQ ID NO: 67840 - protein, 255 aa, Gossypium hirsutum
  unsure (1)..(255): unsure at all Xaa locations
  Clone ID: GOSHI-09MAY01-C34860_1.pep
SSLKANHGSPPPQQGHDLVYNLRLSSVGPGCVTGSDVVHDLSGLDLTMKLHYLKAVYFFSSHAVEGLTIMNMKEAMFYLLNDYYITCGRIKRSESSGRPYIKCNDCGIRFVEGVCDETVDEWLETDDDSKRNLLVYHRAIGPELPFSPLVYLQVTLFKCGGISLGLSWAHILGDAFSVSNFINNWGQHMAIGXVNSSPALAPRSLTNTAKPEAPSEPLSAKQVNHVGDLWVLANNCKMETFSFNLTTQHLSNLQA

SEQ ID NO: 67841 - protein, 112 aa, Gossypium hirsutum
  Clone ID: GOSHI-09MAY01-C34440_1.pep
FSPGPNKPKTYKINPRPKILQWPNTQLHKPHYPNFFFQKQQTLLSPCAVAPTLYASPPRTSTRPRTTPSSHVHAPRSCTPLQHHSTAHCAHTVGGPCFADRKGFWGGWRAGA

SEQ ID NO: 67842 - protein, 68 aa, Gossypium hirsutum
  Clone ID: LIB3135-021-Q1-K1-D4.pep
RLYSQIQYSFYLFLCSNCRYCDVVEECMIVGRGRAIYGSCVGVSMYVVERRITWGLQRKEKERFVRSD

SEQ ID NO: 67843 - protein, 125 aa, Gossypium hirsutum
  Clone ID: GOSHI-09MAY01-C34460_1.pep
AASTLGSALEHSKPLAIQSSELSSTSHPLAAVMKCGILSSTSFTGSLPTKISQDGGQTSQPSAPNRPPAVLTTSRLMLDRAIASGSATHDSISATPNSSREKVEQLPLSAGPPPSSLVSNAPSPT

SEQ ID NO: 67844 - protein, 67 aa, Gossypium hirsutum
  Clone ID: LIB3135-021-Q1-K1-G5.pep
RERLWQHSLECLFYVFLFLNEQYPDFNTADVMKCGILSSTSFTGSLPTKISQDGGQISGGVSLKYPC

SEQ ID NO: 67845 - protein, 69 aa, Gossypium hirsutum
  Clone ID: GOSHI-09MAY01-C34420_2.pep
MPKQIHEIKDFLLTARKKGACSVKIKKSRDVVKFKVRCSKYLYTLCVSDAEKADKLKQSLPPGLSVQDL

SEQ ID NO: 67846 - protein, 69 aa, Gossypium hirsutum
  Clone ID: GOSHI-09MAY01-C34420_1.pep
MPKQIHEIKDFLLTARRKDARSVKIKKSKDFVKFKVRCSKYLYTHCVSDAEKADKLKQSLPPGLSVQDL

SEQ ID NO: 67847 - protein, 93 aa, Gossypium hirsutum
  Clone ID: LIB3146-055-Q1-K1-H4.pep
EKIMKTERFKPDKAFAGTSEKSGPRDRPVEFEKEVEEADPFGLDQFLTEVKKGKKAMDKVGSGGTMKASAGSSMRDGYEGGSNRSRINFERGH

SEQ ID NO: 67848 - protein, 76 aa, Gossypium hirsutum
  Clone ID: LIB3145-006-Q1-K1-B3.pep
RIVASSHFPFCSLIVRPRSPLLFRWNFAKKKSVSLKSNEEQHPLQKNFHHLKSPFWHMEKLNNLTFLQPKVLLANN

SEQ ID NO: 67849 - protein, 249 aa, Gossypium hirsutum
  unsure (1)..(249): unsure at all Xaa locations
  Clone ID: GOSHI-09MAY01-C134738_1.pep
RCHWILVLLFTGLSLVVKCTYFSAVLFKVDQGGWVPLVIAAAFLLIMYVWHYGTLKRYEFEMHSKVSMAWILGLGPSLGLVRVPGIGLVYTELASGVPHIFSHFITNLPAIHSVVVFVCVKYLPVYTVPEEERFLVKRIGPKNFHMFRCVARYGYKDLHKKDDESEKKLFDSLFLFVRLESMMERCSDSDEYTCMGSKRXRSKKGLLNNNGNGNTITSYAEYHNFISWIQLCPRKSPMHGSMTVIFSEH

SEQ ID NO: 67850 - protein, 251 aa, Gossypium hirsutum
  unsure (1)..(251): unsure at all Xaa locations
  Clone ID: GOSHI-09MAY01-C34730_1.pep
PFSMKVQPIDTDSRXGKKLLRLEQNRQARAKSLIKRLFDRSFXRSESISSGEVEYWETQFSNKDGTTEFEPSSICVDKMARNFIEDSHNDKQPPPQPPPAKXGRNRCNCFNGNSNDSSHDEFDEFSESSNGSPPDTCETVKSLVQCATVVERNLLADTAVIVGENKNCKRKDDLRKIVTDGLLSLGYNSSICKSKWDKSPSFPAGDYEYIDVVMEGERMLIDVDFRSEFEMARSTGTYKAIVQSLPFIFVG

SEQ ID NO: 67851 - protein, 113 aa, Gossypium hirsutum
  Clone ID: uC-gsflnu33B056a12b1.pep
MAMANSFNAARLLTLGYNSSICKSKWDKSPSFPAGDYEYIDVVMEGERMLIDVDFRSEFEMARSTGTYKAIVQSLAIIFVGKPDRLDRIVTIVSEAAEQSLKNKGMHLPSWKE

SEQ ID NO: 67852 - protein, 81 aa, Gossypium hirsutum
  Clone ID: GOSHI-09MAY01-C34640_1.pep
HASAKPLFTLCLLSRVSKDSLFLIQFFSDFLKFVFQGSFTFSIGGFWGGFFIEFFLRSSSQTKNNNVNITIGRVSNTRRRP

SEQ ID NO: 67853 - protein, 149 aa, Gossypium hirsutum
  Clone ID: GOSHI-09MAY01-C34160_1.pep
LDGDMKNHIWVDPTKDYHNYAVKGNPSEIIFFVDDVPIRTYPRKSDATFPTRPMWVYGSIWDASSWATENGRYKADYNYQPFVGRFTNFKVTPGTANSPAPCRPPSASPYGSSSLSPQQALAMNWVKNNYLVYDYCHDPKRDHTQIPEC

SEQ ID NO: 67854 - protein, 115 aa, Gossypium hirsutum
  Clone ID: GOSHI-09MAY01-C34040_1.pep
YTKVNYITLLSLVLALSLVCDTFSLLVLLGLLAAWLFLYLFRPSDQPLAIFGRTFSDRETLGILAVLTVFIVFLTSIGSLLISAILFGVAIVCIHRAFRVPEDLFLDDQDPANSG

SEQ ID NO: 67855 - protein, 110 aa, Gossypium hirsutum
  Clone ID: GOSHI-09MAY01-C34350_1.pep
MAKHHPDLIMCRKQPGIAIGRLCEKCDGKCVICDSYVRPCTLVRVCDECNYGSFQGRCVICGGVGISDAYYCKECTQQEKDRDGCPKIVNLGSAKTDLFYERKKYGFKKR

SEQ ID NO: 67856 - protein, 110 aa, Gossypium hirsutum
  unsure (1)..(110): unsure at all Xaa locations
  Clone ID: LIB3135-020-Q1-K1-A4.pep
MAKHHPDLIMCRKQPGIAIGRLCEKCDGKCVICDSYVRPCTLVRVCDECNYGSFQGRCVICGGVGISDAYYCKECTQQEKDRDGCPKIVNLGSAKTDLFYETXKYXFKKR

SEQ ID NO: 67857 - protein, 132 aa, Gossypium hirsutum
  Clone ID: GOSHI-09MAY01-C34360_1.pep
HSSESPPPVLVLHGHYGGCVGDLPSYDAFTLGGPYSVRGYNMGELGAARNILELGAEIRIPVRNTHVYAFAEHGNDLGSSKDVKGNPTEVYRRMGHGSSYGVGVKLGLVRAEYAVDHNNGTGAVFFRFGERY

SEQ ID NO: 67858 - protein, 100 aa, Gossypium hirsutum
  Clone ID: LIB3147-033-Q1-K1-B6.pep
PRVRPRVRLILAPRLPSMPRSPIATERGTNSAIPAKKVRACGEGPRFATARCAGLTRKVRERGAPHWRGRCGAELAANSLGFLQWFLLWASGLGLGVGPF

SEQ ID NO: 67859 - protein, 56 aa, Gossypium hirsutum
  unsure (1)..(56): unsure at all Xaa locations
  Clone ID: LIB3135-018-Q1-K1-B6.pep
RPRXRTLLGFPQPSYATAQPRAKAFVDAPISDRDREGHQLGDSGEKGRFSLPFFIF

SEQ ID NO: 67860 - protein, 89 aa, Gossypium hirsutum
  Clone ID: GOSHI-09MAY01-C35980_2.pep
KKIHTKIRREATKNISKVIIYCNFVLFFLFFSFFHLDPQHIRRIGERRRGLPGIEPAPLEGHASPVTSGQLEAWTLDIRLEVERTSQKF

SEQ ID NO: 67861 - protein, 99 aa, Gossypium hirsutum
  Clone ID: LIB3145-021-Q1-K1-C6.pep
PPTLQPPRSAPLHHARRHAPSSRIHVPRSCTPPPRPHSTCDLSKEIGKNCLSFGYKAFDFFTGIVPAPLEGLASPVTSGQLEAWTLDIRLEVERTSQKF

SEQ ID NO: 67862 - protein, 234 aa, Gossypium hirsutum
  unsure (1)..(234): unsure at all Xaa locations
  Clone ID: GOSHI-09MAY01-C135998_1.pep
VIQDQIPYVESGTYVAYNNENSGVVECLKKDGIVDLDSEFQSAPDWVSIQAMINSWLADALTYELWVGTDGRSAYKIYYSDLSWPIGKVLFLKQVYSVKQRLGITKDNAEHREDEIYRRAKXAYGALSTKLGEQNFLFDDRPSSLDATFLGHVLVTLHALPDTSVLRSKLLEHDNIVRYAEKLKTELIESGSSSSGPQFRSVPSSSTPRKGPSNWSSKPKSKPKREKTEEEKTF

SEQ ID NO: 67863 - protein, 192 aa, Gossypium hirsutum
  Clone ID: GOSHI-09MAY01-C35900_1.pep
MPLDLPGFDVINPVLHDETKSNSDQKNQVKLQNAMQLKPLPPPPPPAQWRVSKPCFNEAEERQHALSESLRHELDLKLLSSFVSQKPEPPLVNQQEINDKANALKPEKKVDEEKNNGQEGVSLLSGGGGMDEKEDFLHQIRTKSFNLRPTATARPTVISGPTANVQVTAILQKANAIRQAVGSDDDDNWSDN

SEQ ID NO: 67864 - protein, 100 aa, Gossypium hirsutum
  Clone ID: LIB3825-032-Q6-N6-D9.pep
IKYLNAKHKKNKVVMIQNQVSGYCARNYPALLIPVFAAAENYTFKQDGETGNCNHSLFAAQIGNIHVLTTTQHPAFLIFNGQTEMFSYTQFIHIKLHYNF

SEQ ID NO: 67865 - protein, 265 aa, Gossypium hirsutum
  Clone ID: GOSHI-09MAY01-C35500_1.pep
RTDEPAAISLTTPLTDGTLKYTSDIMAETVNLPESAAVSSSCIPAPEESNLEIDSQNIYSEEKADDSIVKQNLDSEHAGSVKHSDNIEHADNEVAVPVQASKDAGKDVLTNGFDGTVQMSEDVNDIKHHGNSKLEMVECVSDFVKTVVQSEEAKIFYFVKSIFQSEEEKNCHAIGKDATNQTSPSTSQGAQHAPNGHYDVASNDSESGPSRQGVKMEASGEVSSTIDVNFITYEVCSDTSKRENVQQRMCKPAEVVSAGSEVCHD

SEQ ID NO: 67866 - protein, 144 aa, Gossypium hirsutum
  Clone ID: GOSHI-09MAY01-C35400_1.pep
MATKSLIRNGAMLMNRVLVKQALNSNPISKNRVLNQGIQITPQLFPSLSKSKLEIPHLPRNDVDSLSEVSSTGFLYPFGLPSLRFFLPDGDSSSEPMLLFPKRTYQPSTIRRKRNHGFFARKATKGGRRVIARRIAKGRSRITA

SEQ ID NO: 67867 - protein, 141 aa, Gossypium hirsutum
  Clone ID: GOSHI-09MAY01-C35750_1.pep
MELGELWAIFGPGVAGAVFGAGWWFWVDAVVCSSVHVSFVHYLPGIFASIAALMFNCVRKEDIDYSPYDEGEWRLKLWLFFAYVVSFVSLAASVGLLIQDSLVKSGPSLWTGTAGILQCVFVSIRGLIYWTCHSRYHIYIQ

SEQ ID NO: 67868 - protein, 61 aa, Gossypium hirsutum
  Clone ID: LIB3145-022-Q1-K1-D5.pep
MELGELWAIFCPGVAGAVFGAGWWLWIDAVVCSSVNVSFIHYLPGIFASIAALMLNCVRKE

SEQ ID NO: 67869 - protein, 117 aa, Gossypium hirsutum
  Clone ID: GOSHI-09MAY01-C35710_2.pep
GRVGGRVGGRLGLLDTFGGASSFLVSGMTARTAVIFFCFAVIKTVDDHCGLWLPGDIFHIFFWNNSAYHDIHHQLQGTKYYYSQPFFAHWDKLLGTHMAYDLLKRPEGGFVVRLKKD

SEQ ID NO: 67870 - protein, 101 aa, Gossypium hirsutum
  unsure (1)..(101): unsure at all Xaa locations
  Clone ID: GOSHI-09MAY01-C35710_1.pep
GGALFLPCSLGRTPRTSXLFFGLAGIKTGDDPCGLWLPGNIFPIFFGNNSAFHDIPXQLQATRFNYSHPFFANWDKLLGTHMAYDLLKRPEGGFEVRLKKD

SEQ ID NO: 67871 - protein, 135 aa, Gossypium hirsutum
  Clone ID: GOSHI-09MAY01-C35660_3.pep
RTRTLPRPRPLTPIDGKTSCSTVGGGLAMNNPTPAAVTHVLHNTRDFPSVNGVEDLLVLSIGNGPSCGRSQVHNNGECSTSSVVDIALDSVSETVDQMLANSFCWNRTDYVRIQACGVDTAYSPGSLLSMLCLVP

SEQ ID NO: 67872 - protein, 264 aa, Gossypium hirsutum
  unsure (1)..(264): unsure at all Xaa locations
  Clone ID: GOSHI-09MAY01-C35660_2.pep
GGGGGVHHQKKISGKSMDKVLKEMFRREDGTVLTLKDTCKPLLVPCFDLNSVGGGGVSXATFRSPSFNFXLWKVCRATSATPSLFKPFQLSSIDGKTSCYAVDGGLVMNNPTAAAVTHVLHNKRDFPSVPRVRGRVGLSLGNGPSCGRSKVGSNGECSTSSVVDIVLDGVSETVDQMLGNAFCWNRTDYVRIQANGLGSGRMRMEEVLKERGVESLPFGGKRLLTETNGNRIESFVQRLVASGKTSLPPSPCKESAVSPLANGR

SEQ ID NO: 67873 - protein, 179 aa, Gossypium hirsutum
  Clone ID: GOSHI-09MAY01-C35660_1.pep
PFTSIDGKTSCSTVDGGLVMNNPTAAAVTHVLHNKRDFPSVNGVEDLLVLSLGPAPPPARPKVRINGECSTSSGGDIALDGVSETVDQMLANSFCWNRTDYVRIQANGVETENTVGPKTEAILKERGVESLPFGGKRLLTETNGERIECFVQRLVATGKSSLPPSPCKESTVSPLANGR

SEQ ID NO: 67874 - protein, 228 aa, Gossypium hirsutum
  unsure (1)..(228): unsure at all Xaa locations
  Clone ID: GOSHI-09MAY01-C135618_1.pep
SLKLEIDPDADTSEDSGLQEVLPGISDHSMIKWENKLLLLGGHSKKSSDAMIVHFINLETHVCGVMETSGKIPVARGGHSVTLVGSKLIVFGGEDRSRKLLNDVHVLDLQTMTWSVVQATQTPPAPRFDHSAAVHSERYLLIFGGCSHSVFFNDLHVLDLYTMEWSQPPVQGDLVSPXRAGHAGISIDEMWYFVGGGDNNNGCPENPALNMSNLVWSTRTTLKISFPC

SEQ ID NO: 67875 - protein, 63 aa, Gossypium hirsutum
  Clone ID: GOSHI-09MAY01-C35620_1.pep
ASISHFRQLGKQLNSFPLSFALDRSQGQSTHSGHDSEDEEGAGTSVQCYGFLISLWSSGLVGL

SEQ ID NO: 67876 - protein, 113 aa, Gossypium hirsutum
  Clone ID: LIB3582-015-P1-K1-H9.pep
LNIDPNHKPDKPIVWRTETLRFLPHFCTATRQPSPSPHASYLRTLQYSPRTRASTAPYASRQGPAHVLCSVPIVFFLRRLTHLRLCEWAIEIPLHFAEIEAWGGISGAEIGGL

SEQ ID NO: 67877 - protein, 104 aa, Gossypium hirsutum
  Clone ID: LIB3145-011-Q1-K1-B5.pep
NPNLKPGWPNKPNAQTKNQSRNPSGSCLRRNSDPSPHASYLCTLQNSPHTRASTAPYASRQGPAHVLCSVPVNKTNTTAAKQGNIVFFYFSFGYKAKKAPIVFF

SEQ ID NO: 67878 - protein, 97 aa, Gossypium hirsutum
  Clone ID: LIB3196-052-P1-M1-G7.pep
NKSLLLPFGRPQDPRSPTATTANGGEPHARPHLEPRLKDHRFQPQKSHPKLRFRRSGKGFRWPIRTGTEQRTCAGPWREAYRAVLARVRGLCWRVWR

SEQ ID NO: 67879 - protein, 59 aa, Gossypium hirsutum
  Clone ID: GOSHI-09MAY01-C35100_1.pep
SSALFFFFFFFFFFFFFFFFFFFYQRYCLIETFDYVFNLHSHITIRRYDYLRTRDKRTP

SEQ ID NO: 67880 - protein, 102 aa, Gossypium hirsutum
  Clone ID: GOSHI-09MAY01-C35120_1.pep
RFAQFIKEINEKNFNHPKFSNLIYEAGHSKNPYRHIARKTTDKHHRPPAYQVQNLPLNLTASKSNPLCFSDLEWYKLENFLSTSTKQYLVHSFPKFKLKRVC

SEQ ID NO: 67881 - protein, 82 aa, Gossypium hirsutum
  Clone ID: LIB3582-052-P1-K1-G8.pep
PRVRPASDGAGGIDPFPSTYTMDSCRNELSEFLNAISSDPFHPHLRDLLSFPSVASTLRSASSIQILGDDHCFPSSAIVCAI

SEQ ID NO: 67882 - protein, 70 aa, Gossypium hirsutum
  unsure (1)..(70): unsure at all Xaa locations
  Clone ID: LIB3145-009-Q1-K1-A4.pep
QAETASLLSSSFFIDPFPSTCTIYSCRNELSXVLKCHFLRPISSSSHRPSVFSICRFYSKRRLLNPYPPR

SEQ ID NO: 67883 - protein, 105 aa, Gossypium hirsutum
  Clone ID: GOSHI-09MAY01-C35300_1.pep
EQGMQHEQLKRDKAQIEKSLMLESQKSPLCHTDLNDILNFEEFVKHLTNEEQQQLLQYLPPVDIAKLPDSLQSMFESSQFKENLCYFQQLLAEGVFNISGPGVES

SEQ ID NO: 67884 - protein, 213 aa, Gossypium hirsutum
  unsure (1)..(213): unsure at all Xaa locations
  Clone ID: GOSHI-09MAY01-C35280_1.pep
MIHHDGPMLTKNVKLALIWYGDCGKDIKNTMRNFIKSLVLPGKDHLQPQVTRWWEVVESYQAMMPGAKPGKSPKIKVEVVKQSTNKSXSPRAAVTLQAHIPILIEELTKGDTSVLPVIVAARDVSIQGLCNGKCADHLLTEDPKPRPYIIVGNPETECPEECGWPFVPAEPGSKGPVLKPPSGNMAADAMVIAFASTLADAVTNPMENGIYHE

SEQ ID NO: 67885 - protein, 137 aa, Gossypium hirsutum
  Clone ID: GOSHI-09MAY01-C35250_1.pep
VFPPQITLCAYLSPPARPDNLLTGQIPQQLGFLSRLSAFDVSYNKLSGPIPASLGNRSGNRPSFNVTSFEGNKDLYGYPLPPMKSKGLSVLAIVGIGLGSGLASLVLSFTGVCIWLKIRDEKMAAEEGKMSHPMPDY

SEQ ID NO: 67886 - protein, 117 aa, Gossypium hirsutum
  Clone ID: LIB3148-053-Q1-K1-B8.pep
PTRPIPQELGLLARLSAFDVSSNKLSGPIPASLGNRSGNLPRFNATSFGGNKDLYGYPLPPMKSKGLSVLAIVGIGLGSGLASLVISFTGVCIWLKITEEKMAAAEEGKIGQFMPDY

SEQ ID NO: 67887 - protein, 173 aa, Gossypium hirsutum
  Clone ID: GOSHI-09MAY01-C35260_1.pep
SAKVFSVLSWSWSSKSLQLARDAFQCRYSEPCNPGAHCITLDKLYVAEQKLYKEVKEEEVTKLELEKKLMLLQKQDENHDWTKTQKIKSSVENLENDMTRLQHSISTACSSILELIDEELYPQLVALTSGLMGMWKMMYKSHQFQNHISKQLNHLTDHLSMDLTTESRLQATA

SEQ ID NO: 67888 - protein, 246 aa, Gossypium hirsutum
  Clone ID: GOSHI-09MAY01-C36860_1.pep
DGSNLLLLLQMLHSAPACREGALHVLYALASTPELAWAAAKHGGIVYILALLLPLQEEIPLQQRAAAASLLGKLVAQPMHGPRVAITLARFFPDGLVSIIRDGPGEAVVSALERNTETPELVWTPAMAASLSAQIATMVSNLYHEQTKGRVIDWDVPEQPSSQQEMRDEPQVGGIYVRLFLKDPKFPLRNPKRFLEGLLDQYLSSIAATHYESQSVDSGLPLLLSAALVSLLRVHPALADHVGYLG

SEQ ID NO: 67889 - protein, 145 aa, Gossypium hirsutum
  Clone ID: GOSHI-09MAY01-C36810_2.pep
MGENIDFRRWDELIPDALGMIFKNLPLQEILTVVPRVCKSWRKAVAGPYCWQDIDIEQWSQQCRPETLDRMLQMLITRSSGSLRKLCVTGLANDQSFSLIADKLLGGFFSVTFLDVSYCKNIGAPALGAIGKNCKLLMGLRRTMH

SEQ ID NO: 67890 - protein, 248 aa, Gossypium hirsutum
  unsure (1)..(248): unsure at all Xaa locations
  Clone ID: GOSHI-09MAY01-C36810_1.pep
MGENVDFRRWDELIPDALGLIFKNLPLQEILTVVPGVCKSWRKAVAGPYCWQDIDIEQWSQQCRPETLDRMLQMLITRSSGSLRKLCVTGLANDQSFSLIADNAKSLQTLRLPRSEISDSIVEQVAGRLFSVTFLDVSYCRNIGAPALEAIGKNCKLLMGLRRTMHPLKVIDKLSQHDEAFAIATTMPKLKQLEVAYLLISTEAVLKILENCPELELLDVRRCWNVXLDENCVTKFTRLRVVGPHVVY

SEQ ID NO: 67891 - protein, 127 aa, Gossypium hirsutum
  unsure (1)..(127): unsure at all Xaa locations
  Clone ID: GOSHI-09MAY01-C36590_1.pep
RFVNARADAVLSSQRSNAEKSLYNALTTTSKLRESVRAKRTELQLLRQNLKLISILKGQMLFLDEWALLXDHDYFSSLSGATEALKASTFRLPVVSGPRAXCQKLKDAICSTVDVMHAMASSILSVI

SEQ ID NO: 67892 - protein, 133 aa, Gossypium hirsutum
  Clone ID: GOSHI-09MAY01-C36460_2.pep
HYLTAATVTLATKVQPPLPPLPLAITRATTTAWGTNHRPSTRLTRESVGASSPEIPPRSSGSRRLERERPFQFRIVWLKTRPSKGPKNGVEIPIVARHRPLKTVVVRWAVREPDRWKDKRGRGCFVFSLENKR

SEQ ID NO: 67893 - protein, 94 aa, Gossypium hirsutum
  Clone ID: GOSHI-09MAY01-C36460_1.pep
KGLSLSKRRDPDDGGGISRDEAPTDSGEALYSLPLFIFVPTLFNRFASKDKKKLKEISIEMKTKRIDRKSPFFLSGLLLIFMAKCRVQKNYNGC

SEQ ID NO: 67894 - protein, 93 aa, Gossypium hirsutum
  Clone ID: GOSHI-09MAY01-C36770_1.pep
IMKLTQTIITSLKYSRNQIKVKHTIQSTLPMPLISIHSQIAYIFSANTVFPLPHFHPKILAVAIFIQALWLYVQHLHLTYHLIQQIKSAFVWS

SEQ ID NO: 67895 - protein, 69 aa, Gossypium hirsutum
  Clone ID: LIB3147-036-Q1-K1-G9.pep
KLIRTIITSVKYSRNQIKVKHTIQSTLLMNLISIYSQTAYILSANTFHFLTPIPKFYERVGERVVGRVG

SEQ ID NO: 67896 - protein, 95 aa, Gossypium hirsutum
  Clone ID: LIB3146-032-Q1-K1-B4.pep
FFYSFWPYQLQPVAVQINCSTRGLVILRQIVSSSKLFIQVCIRKKFKKLWRVISAQNHLNAWMFLQMEVYVSWRFHVSWHWEMKIVSSVFWYRVH

SEQ ID NO: 67897 - protein, 44 aa, Gossypium hirsutum
  Clone ID: LIB3145-030-Q1-K1-G5.pep
SNELDTITPDITFSSLKAMKHVITNEHSLPFEYKAYSKIQFVSR

SEQ ID NO: 67898 - protein, 97 aa, Gossypium hirsutum
  Clone ID: GOSHI-09MAY01-C36610_1.pep
MARQIFVLVLVLIAIVKMVSADIMATAAPGYTDAIGKNVGAPNNGEGGQDIVEGRLDNAVNAISGAATGLPPSSSSATIIGLSAIAKAVAIAGYFLF

SEQ ID NO: 67899 - protein, 160 aa, Gossypium hirsutum
  unsure (1)..(160): unsure at all Xaa locations
  Clone ID: GOSHI-09MAY01-C36630_1.pep
MNNLIDTDGHVQNDCDELECLRKNHRIYTLLARAFNPFVRKDCISEAVIASSTDNYPEESIHNTLEPFDRIDTRASYWSSEGQNNPXAVSETLLYKLMTKMCIVTEIHVQPFQAYFQYGFPIYSSKAVRFRMGHKLQSEMTDSLTSSNKLADDEFIWTYT

SEQ ID NO: 67900 - protein, 100 aa, Gossypium hirsutum
  unsure (1)..(100): unsure at all Xaa locations
  Clone ID: GOSHI-09MAY01-C36090_1.pep
MQAEQLDPENSEAFQGQHSSSKAPTSSSSDCEERGDAKVNTGVNATDDETAARVIEPQDANKTXNKKQVDRSSCGSDTPSSGEVETDALEKHEKDKEDSK

SEQ ID NO: 67901 - protein, 117 aa, Gossypium hirsutum
  Clone ID: GOSHI-09MAY01-C36050_1.pep
TMNNNVLKFQHHQPSYLRISQTTLPRHPTSLLHLFPKLSFRPSSFSLSKTSRSFKFSSLSNVEQPVYFDDEEERGGPSNESVVEFEDLVQNGVVYRETLRLVECSMFAAVLKCDCLI

SEQ ID NO: 67902 - protein, 111 aa, Gossypium hirsutum
  Clone ID: LIB3145-022-Q1-K1-A7.pep
HAYASFSLSKTSRSFKFWSLSNVEQPVYFDDEEERGGPSSESVVEFEDLVQNGVVYRETLRLVECSMFAAVTGLVYFLSNSLAVENYFGCFFSLPVVISSMRWGVACGRKQ

SEQ ID NO: 67903 - protein, 121 aa, Gossypium hirsutum
  Clone ID: GOSHI-09MAY01-C36040_1.pep
KNREIQSFKSYHGDSKEPSPKTKHNTTNFRAFEADPPYLFQLSSKPSQEPLQPRYQKTVFSFLPSPKCGPLHLSSEEQTGIGNPFTEQKVKSFHMPYLQHERVNYVRKQIKFCSYYSLQNL

SEQ ID NO: 67904 - protein, 111 aa, Gossypium hirsutum
  Clone ID: GOSHI-09MAY01-C36240_1.pep
MASGFGESTSMPPPSPSCSSSNNANDAGDFECNICFELAQDPIVTLCGHLFCWPCLYRWLHHHSHSQECPVCKAPIQEEKLVPLYGRGKNKTDPRSKSYTGMEIPKPPAGQ

SEQ ID NO: 67905 - protein, 157 aa, Gossypium hirsutum
  unsure (1)..(157): unsure at all Xaa locations
  Clone ID: GOSHI-09MAY01-C36210_1.pep
MSCNGMAFFPADFMLQTPHHDHEDHQRSTNSINQILPSCTAPQEFHGVASFLGKRSMSSYSGIDHVCEEANGEDDISDDGSQAGEKKRRLNMEQVKTLEKNFELGNKLEPERKMQLARALGLQPRQIAIWFQNRRARWKTKQLEXDYDLLKRQYELI

SEQ ID NO: 67906 - protein, 146 aa, Gossypium hirsutum
  Clone ID: GOSHI-09MAY01-C37870_1.pep
FERLKIFPPLPSTPAHAIWKSKEKVVTAAPNKRKASTEPMEHEPALKKIATDGPTTVSANSSPSPMQVETVTTLASPGQYEAGQPSSSEKMPNRVGKDGKVLKKSAILNQIWKDDLNSGRTLVTVFELFGESILSFIPSPEMSLFI

SEQ ID NO: 67907 - protein, 78 aa, Gossypium hirsutum
  Clone ID: GOSHI-09MAY01-C37860_1.pep
LPNGAAVTVARHVHVSTQDILSQRRPKILQLWGPIQIKNIFNLDPCTHTLPNEQWVKFKFNMRGWVTNNWIARGCNII

SEQ ID NO: 67908 - protein, 124 aa, Gossypium hirsutum
  Clone ID: GOSHI-09MAY01-C37530_1.pep
YKGYSSYTHLLSLKRNSYSFLCLYSFPSVSSIHTYWKRDFYKTFTTYTYLHFLYKQHPQWLLKEQQTQQARVSLSVPFTGPETPETFNDAKRHDSLDSLAIMGLALTILGITTSSAPVILSKVL

SEQ ID NO: 67909 - protein, 212 aa, Gossypium hirsutum
  Clone ID: GOSHI-09MAY01-C37740_1.pep
PEQGGSAEGILQVRADRIQSDLEELMKALTERCKKHGYDVKSAAVIELPTGWQPGVSEGAALWDEEWDKFEDEGFGNELTIDVKKGAVSQRGKASPDGSLTPDSTSYADEKTANLFSASDRAIESESAYTHSEDESARSPRGSPTDRNSLESPSKPFSDDPFGKSTEAEAERHQSFDESGWGTFDNDDMDSVWGLILLIPRTRTRPETFWIK

SEQ ID NO: 67910 - protein, 119 aa, Gossypium hirsutum
  Clone ID: GOSHI-09MAY01-C37680_1.pep
LKVNELIDSNKRLWKRELINSTSTGEDAARILRIPLARTPHEDFIIWGGELSGEFTVRSAYKLLQSSNGNPSAYALQIIYRKFYKKLWSLNLPTKITITIWRLSWNFLPTKVNMQHKKL

SEQ ID NO: 67911 - protein, 101 aa, Gossypium hirsutum
  unsure (1)..(101): unsure at all Xaa locations
  Clone ID: LIB3145-045-Q1-K1-B12.pep
IIWXGELSGEFTVRSAYKLLQSSNGNPSAYALQIIYRKFYKKLWSLNLPTKITITIWRLSWNFLPTKVNMQHKKLXNSTSCPRCEARAETMDHLFRKCPGY

SEQ ID NO: 67912 - protein, 129 aa, Gossypium hirsutum
  Clone ID: GOSHI-09MAY01-C37140_1.pep
DRPEPGATRVRAAIWDEGFVYLVSLESDVVIPTCEGDMAKVVEGHRRFLGYKQTILLDRRLLVDLIDQYNSGSLSWNEFSNAGKESHKYRKGQPTQRSVFPDRPKEEDYFYANPEECLKPSSYGQVSST

SEQ ID NO: 67913 - protein, 137 aa, Gossypium hirsutum
  Clone ID: GOSHI-09MAY01-C37170_1.pep
HASAIVGWVAVLLGVFSRLPFVVMGFVSIPKLKPARWLVVNMHHVDWNLYLNTLFWNLNYWDSISTLAGEVENPKKTLPKALFYALILVVVGYFFPLLVGTGALPLDRELWTDGYFSDIAKLLGGVWLRWWIQAAAA

SEQ ID NO: 67914 - protein, 74 aa, Gossypium hirsutum
  Clone ID: GOSHI-09MAY01-C37160_1.pep
MVKRSLGFFFLLLIVLASQWGVQPTEARVCQSQSHKFHGACVSSHNCAMVCRDEGFSGGRCRGFRRRCFCTKLC

SEQ ID NO: 67915 - protein, 518 aa, Gossypium hirsutum
  unsure (1)..(518): unsure at all Xaa locations
  Clone ID: GOSHI-09MAY01-C37060_1.pep
LGKWFEKKASEXSDTNESGSDGVPRRVSNIIPNIHDNYNKLLELAASFRSSPGSPATQTMSVARRVRGALRQADKPRFVSAFCQTNCGDVSPNVLGAFCTDTGLPCDFNHSTCGGKNELCYGRGPGYLDEFESTRIIGERQFRKAVDLFEKASEQLKGEVDYRHTYIDFSQLEVTLTKVGGGSEVVKTCPAAMGFAFAAGTTDGPGAFDFQQGDDQGNPFWRLVRDVLKTPDKKQVDCQHPKPILLDTGEMKQPYDWAPSVLPIQILRIGQFVILSVPGEFTTMSGRRLRNAVKTVLTRSGNGEFGSNTHVVIAGLTNTYSQYVATLEEYQVQRYEGASTLYGPHTLSAYIQEFQKLATALIKGQPVEAGMPPPDLLQKQISLLTPVIMDSTPAGKNFGDVSSDVPANSTFKRGSTVTVVFWSSCPRNDLLTEGTFALVEMLQGKDTWTPMYDDDDFCLRFKWSRPSKLSPRSKATIEWIIPSSSSPGVYRIRHFGASKGLMGSIRHFTGSSSAFVVA

SEQ ID NO: 67916 - protein, 57 aa, Gossypium hirsutum
  Clone ID: LIB3828-008-Q1-N6-G9.pep
KWSRPSKLSPRSKATIEWIIPSSSSPGVYRIRHFGASKGLMGSIRHFTGSSSAFVVA

SEQ ID NO: 67917 - protein, 188 aa, Gossypium hirsutum
  unsure (1)..(188): unsure at all Xaa locations
  Clone ID: GOSHI-09MAY01-C37000_1.pep
GDYVGGGGGGERNLKIVVSYLRSERQISRIGLWGRSMGAVTSLLYGAEDPSIAGMGGDSAFSNLFDLMMELVDVYKIRLPKFTVKMAVQYMRRVIQKKAKFDIMDLNCLKVAPXTSIPALLGHARVDKXCQPHHSDLIFKSFAGDKNVIKFDGDHNSSRPQFYYDSVSIFFFNVLRPPQFSSACTSKL

SEQ ID NO: 67918 - protein, 97 aa, Gossypium hirsutum
  Clone ID: GOSHI-09MAY01-C37390_1.pep
MASEEESAVKEPLDLIRLSLDERIYVKLRSDRELRGKLHAYDQHLNMILGDVEEVVTTVEIDDETYEEIVRTTKRTVPFLFVRGDGVILVSPPLRTA

SEQ ID NO: 67919 - protein, 38 aa, Gossypium hirsutum
  Clone ID: LIB3493-055-P1-M1-F10.pep
LSEQITIILKGTSNKITYPNNLFIGFIIYFTRCNNLFN

SEQ ID NO: 67920 - protein, 97 aa, Gossypium hirsutum
  Clone ID: uC-gsflnu33B022g02b1.pep
MATEEDSTVKEPLDLIRLSLDERIYVKLRSDRELRGKLHAYDQHLNMILGDVEEIVTTVEIDDETYEEIVRTTRRTVPFLFVRGDGVILVSPPLRTA

SEQ ID NO: 67921 - protein, 73 aa, Gossypium hirsutum
  Clone ID: uC-gsflnu33B068c05b1.pep
LKSSECIDLAVPENDRNRSLLSVPKISSAFLKVSFVCLKLRPPNQAVRRGGETSMTPSPLTKRNGTVRLVVRT

SEQ ID NO: 67922 - protein, 162 aa, Gossypium hirsutum
  Clone ID: GOSHI-09MAY01-C37350_1.pep
MGACATKPKVLKDENSPATVPAPEPVKEESVQPVETKDEPVVVMEADETKPNSLGSLLDNEEKSNETKVEAITVEEPKIKEEAAIVEAPKKVEEAIVEAPKEAPKKADVIVEAKTMVEAEKQKKKEEEEEGDEVIVLAEKKSEETKKEEPIVKEVKTEAPIV

SEQ ID NO: 67923 - protein, 99 aa, Gossypium hirsutum
  Clone ID: GOSHI-09MAY01-C37280_1.pep
NIKFGHVQQSSNRNQLKSHAKKLYAKYTWSKKRITMEHYHANYTRFGNIRIHMIFEVCASVSYCIISTKNQLRVHLKLCKVQNINMIKYLGMIFSRIKT

SEQ ID NO: 67924 - protein, 98 aa, Gossypium hirsutum
  unsure (1)..(98): unsure at all Xaa locations
  Clone ID: LIB3828-002-Q1-K6-H8.pep
FLRPHDNGKAIESLHDRVXFXKRLTGDIHDEVESHNRMLDRMGNGMDATRGIMSGTMDRWKKVFEKKSNRKMCTLVMAFVVSFLIIYYLFRMLRYVRG

SEQ ID NO: 67925 - protein, 71 aa, Gossypium hirsutum
  Clone ID: uC-gsflmaxxa054h06b1.pep
FLKFAASTGASFQLTGDIHDEVESHNRMLDRMGNGMDATRGIMSGTMDRFKKVFEKKSNRKIMGQEYLLMY

SEQ ID NO: 67926 - protein, 129 aa, Gossypium hirsutum
  Clone ID: GOSHI-09MAY01-C37260_1.pep
PWQNPPNDDFQVWRGEPSGNFSVRSAYKLLQESTLNPSNHIQADTTAFYKKLWTNEHCHRKIKINNVKDFIGDFIPNFLNLKLKRVAVEDLCWRCQPSGENISHIFRQCLGCLVKVQRSNVGSSAVGCG

SEQ ID NO: 67927 - protein, 204 aa, Gossypium hirsutum
  unsure (1)..(204): unsure at all Xaa locations
  Clone ID: GOSHI-09MAY01-C37230_1.pep
RGSAVGFKLDSLLKLSDTRAGNNKMTLMHYLCKLLSEKMPELLDFDKDLVHLEAASKIQLKNLAEEMQAVSKGLEKVEQELSASDNDGDISLGFQKXEAEVRSLISLYSEVGRSADSLSQYFGEDPGRCPFEQVTHILVVFVKMFKKSREENEKLADAEKKKLEKEAIKERAAANVTVKKDGTDTNEPNLTSHILNSHLLKHAP

SEQ ID NO: 67928 - protein, 111 aa, Gossypium hirsutum
  unsure (1)..(111): unsure at all Xaa locations
  Clone ID: GOSHI-09MAY01-C30500_1.pep
MGFGFSSKPFFLFLSFLVFFTNLELYPLVESAPDYITLVYKGCAKQSFTDPAGIYSQALSALVQTLLSQAXRERFTRQTPGTGQTTITGLFQCRGDLSNSDCYSCASRLPT

SEQ ID NO: 67929 - protein, 148 aa, Gossypium hirsutum
  unsure (1)..(148): unsure at all Xaa locations
  Clone ID: GOSHI-09MAY01-C30520_1.pep
VPGILVPEALLLGNWVKAQEWAAIPGGRATYLGNPVPWGTLPTILVIEFLSIAFVEHQRSMEKDTEKNKYPGGAFDPLRFSKDPKKFEEYNVKEIKNGRLALLAFCGXCVQQSXAYPGTGPLENLATHLADPWHNNIGDVIIPRSLYP

SEQ ID NO: 67930 - protein, 203 aa, Gossypium hirsutum
  Clone ID: GOSHI-09MAY01-C30480_1.pep
GKCIFFVGMGSNDYLNNYLMPNFPTRNQYDGQQYADLLVQKYNQQLRTLYNLGARKFVLAGLGRMGCIPSILAQSTAGRCSEEVNQLVLPFNANVKTMMNSLNANLPGARFIYVDIAHLFEDIVANARTYGFSVVNRGCCGIGRNRGQITCLPFQTPCENRDEYVFWDAFHPTEKVNIIMARKAFNGDPSIGYPINIQQLANL

SEQ ID NO: 67931 - protein, 170 aa, Gossypium hirsutum
  unsure (1)..(170): unsure at all Xaa locations
  Clone ID: GOSHI-09MAY01-C30410_1.pep
MAETTGGVTTTTCCTQSPNPMMMDPSQPSSSAMPAPAPPPPTAVTTTSRTLAPAPSTNSSILPQNNNNPSPSPSIDPSSLQNQQQQQQQIYANFVSTSCPTTTSXQLRQQQQTQPNVAALSNFPIQQSLQRSPSISRLNQLQQHQQQSQQQQQQQHQSQYNNVLRQGLYG

SEQ ID NO: 67932 - protein, 66 aa, Gossypium hirsutum
  Clone ID: GOSHI-09MAY01-C30640_1.pep
MCCGRVCMLCTCLILVVVAIGLLFGFGVFKNGFHKLKDTFHEDYCDPKLSSSCGRPFLGYAAPPPF

SEQ ID NO: 67933 - protein, 66 aa, Gossypium hirsutum
  Clone ID: LIB3120-009-Q1-K1-D9.pep
MCCGRVCMLGTCLILAVVAIGLVFGFGAFKNGFYKLKDTFHEDYCDPKLSSSCRRPCLGYASTPPF

SEQ ID NO: 67934 - protein, 123 aa, Gossypium hirsutum
  unsure (1)..(123): unsure at all Xaa locations
  Clone ID: GOSHI-09MAY01-C30090_1.pep
MARFVLRLPTGNLRSFSVHASSNGAPPGSGSQNGGPMILELPLDKIRRPLMRTRSNDPNKVQELMDSIRQXGLQVPIDVLEVDGVYYGFSGCHRYEAHQRLGLPTIRCKVRRGTKETLRHHLR

SEQ ID NO: 67935 - protein, 195 aa, Gossypium hirsutum
  Clone ID: GOSHI-09MAY01-C30240_1.pep
MAMATQAGLFTPTMTTPKSLAPWKPASSFSFATCSKSLNFSVAQRTIRAAAADEEASSAAATKEAPVGFTPPELDPNTPSPIFGGSTGGLLRKAQVEEFYVITWDSPKEQIFEMPTGGAAIMRQGPNLLKLARKEQCLALGTRLRSKYKIKYQFYRVFPNGEVQYLHPKDGVYPEIVNPGRQGFGQNFRSIGKNV

SEQ ID NO: 67936 - protein, 87 aa, Gossypium hirsutum
  Clone ID: LIB3120-043-P1-K1-G4.pep
MATQAGLFTPTITTSKSLAPWNPSSPFSLATPKSINFSMAKKTSVRAAAANEAVAAVATKEAPVGFTPPDLDPNTPSPIFGGSTGGL

SEQ ID NO: 67937 - protein, 132 aa, Gossypium hirsutum
  Clone ID: LIB3120-025-Q1-K1-G1.pep
MATFHFLQSSARFVSKPTCLALPNPSLSLHFPLKRLGSFPKRPELKRLHEAAVATGSAQPAVDLQNVPVQDTQKQEQSGKLVLSTNDSSDELLRIRHTCAHVMAMAVQKLYPDAKVTIGPWIDNGFYYDFDM

SEQ ID NO: 67938 - protein, 107 aa, Gossypium hirsutum
  Clone ID: LIB3165-049-Q1-K1-D3.pep
FLNSTFFFPSSFSLFPFPNPFLFPSISPLNAWFPSPNARNSNAYMRQQWPLAQLNQQVTLQNVPVQDTHKQEQSGKLVLSTNDSSDELLRIRHTCAHVMAMAVKKLY

SEQ ID NO: 67939 - protein, 86 aa, Gossypium hirsutum
  Clone ID: GOSHI-09MAY01-C31890_1.pep
FLKLAMPPFLSTSKAVGSVISRRNVINQFAGHAKNGGRTGNFGQIRWVTSISGIQMPSVHPVLGSRKVDSIVPLNYLFNHYTFQRR

SEQ ID NO: 67940 - protein, 164 aa, Gossypium hirsutum
  unsure (1)..(164): unsure at all Xaa locations
  Clone ID: GOSHI-09MAY01-C31880_2.pep
MHVDSRYRGRLQIGVGEKGYEKDPAIVAKEAIHEATRNGSDVVLVDTAGRMQDNEPLMRALSKLIYLNNPDLVLFVGEALVXGNDAVDQFSKLNHILADLSTSSTPRSIVGISLTKFDTIDDKVGAALSMVYISGAPVMFVGCGQSYTDLKKLNVKSIVKTLLK

SEQ ID NO: 67941 - protein, 541 aa, Gossypium hirsutum
  unsure (1)..(541): unsure at all Xaa locations
  Clone ID: GOSHI-09MAY01-C31880_1.pep
PTRPLLAMMRREFSEIYDPKRTVYNDFDETFRQLRREAEARAEELKKSKQTDKPVNNKKKQGQVQKAGSDKGSKKSEGCLATDXGDGDTAIGRKLENGHSNGNHVEMEEPRAGVVNGKENTSSXISAFDVSKLQKRTKGVKKTVTVVNKGSKPDPNKKATKXNRLWDDAPPEEKLDFTDPPDGNGSGNDNLHVVAANHGESMMDIEQIISSDXSEGEVDDNVQKDSKPEAKKKGWFSSMFQSIAGKXANLXKEDLEPALKALKDGLMTKNVAEEIADKLXESVXASLEGKKLASFTRVSSTVRAAMEDALVRILTPRRSIDILRDVHAAKEQRKPYVVVFVGVNGVGKSTNLAKVAYWLLQHNVSVMMAACDTFRSGAVEQLRTHARRLQIPIFEKGYEKDPAIVAKEAIQEATRNGSDVVLVDTAGRMQDNEPLMRALSKLIYLNNPDLVLFVGEALVGNDAVDQLSKFNQKLADLSTSPTPRLIDGILLTKFDTIDDKVGAALSMVYISGAPVMFVGCGQSYTDLKNLNVKSIVKTLLK

SEQ ID NO: 67942 - protein, 63 aa, Gossypium hirsutum
  Clone ID: uC-gsronu33B167a02b1.pep
TSSTPRLIDGILLTKFDTIDDKVGAALSMVYISGAPVMFVGCGQSYTDLKKLNVKSIVKTLLK

SEQ ID NO: 67943 - protein, 98 aa, Gossypium hirsutum
  Clone ID: GOSHI-09MAY01-C31570_1.pep
MLNVNSMASLSNSKRPGQYFHYYNKHSSTCCKVLTPRKSELRLRIVRAPSSAAAPDVDLNTLECAISKKDSEAVKEALNQLSESGWAKKWSSQPYVSR

SEQ ID NO: 67944 - protein, 194 aa, Gossypium hirsutum
  Clone ID: GOSHI-09MAY01-C31560_1.pep
MRGCSFATYEVIPKGQGREAHCDHVVKDQCNNQVANLYPKPNVGGQQKLQIGQNVSRKDKIKFLVTTLLDLKDSKEAVYSALDAWVAWEQNFPIGPLKNVILALEKEHQWHRVVQVGKWMLSKGQGNTMGTYGQLLRALDMDNRADEAHQFWVKKVSADLHSVPWQLCGLMISVYYRNNMLENLVKLFKAWSFW

SEQ ID NO: 67945 - protein, 143 aa, Gossypium hirsutum
  Clone ID: GOSHI-09MAY01-C31760_1.pep
KKKLWLWLCISWLLHLIQNPVQILMLLLFLHCFTQNPNTLSSSSLLLLLLLAGKLLLNLKEKMGELKRKTLPLSLVHCLPHAHSSIFWTSLVQRASLATGFKSNGGFGNSRFVTISAVIGERTKIYYSLAKLENVIQVLTFYK

SEQ ID NO: 67946 - protein, 80 aa, Gossypium hirsutum
  Clone ID: GOSHI-09MAY01-C31700_1.pep
IKGMTKFTKHCRRRLTNITLQKIIYLFHPKILHSDQHCLLYSCFHSLPMTPCQSIKKFCCPSKLQYADSLLSLSIVPPQK

SEQ ID NO: 67947 - protein, 134 aa, Gossypium hirsutum
  Clone ID: GOSHI-09MAY01-C31660_1.pep
MAATSSYVACTKFSMLGWSGGKRDLRMKRVLSVSAQQQAEVGETQEAKVQEEQEKVKHHQPTQPRPVEKQLNVKSKNMGKDYGGQWLSSVTRHVRIYAAYIDPETSEFDQTQMDKLTLILDPTDEFVWTPETCN

SEQ ID NO: 67948 - protein, 115 aa, Gossypium hirsutum
  Clone ID: GOSHI-09MAY01-C31180_1.pep
MPTLNLYTNVPVDAVTTSDILKDATKAVAKIIGKPESYVMILVNGGVPMAFAGTEAPAAYGELISIGGLGPSVNAKLSSTVADILQTKLSIDSSRFYIKFYDVQRSFFGFNGSTF

SEQ ID NO: 67949 - protein, 110 aa, Gossypium hirsutum
  Clone ID: LIB3120-017-Q1-K1-F10.pep
MPTLNLYTNVPVDAVTTSDILKDATKAVVKIIGKPESYVMILVNGGVPMAFAGTEAPAAYGELISIGGLGPSVNAKLSSTVADILHTKLSIDSSRFYIKFYDVQRPFFGF

SEQ ID NO: 67950 - protein, 165 aa, Gossypium hirsutum
  Clone ID: GOSHI-09MAY01-C131198_1.pep
PVAGAVAICSPWDLLIGDRFICRRLLQKLYDRALTIGLQGYAKLHEPRYSRLANWEGIKKSRSIRDFDNFATCLVGKFETVDTYYRRSTSTPYVLNVSVPLLCISALDDPVCTREAIPWDECRANKNIVLATIKHGGHLAFLEGLPGSKLWWVRATDEFLGGPTL

SEQ ID NO: 67951 - protein, 88 aa, Gossypium hirsutum
  Clone ID: GOSHI-09MAY01-C31100_1.pep
NKYRYLTCIEEAKKASHVVKSLRNFALANSPLTFQEDQIDLPCRIWIIQSQRKLSFLLNNLVAHTQPNPLASPPFMILSLLQEEMNIL

SEQ ID NO: 67952 - protein, 60 aa, Gossypium hirsutum
  Clone ID: GOSHI-09MAY01-C31390_3.pep
VIVHLYPFLKGLMGKQDRLPTIIVVWSILLASILSLLWARVNPFVSKGDIVLEVCGLDCD

SEQ ID NO: 67953 - protein, 429 aa, Gossypium hirsutum
  unsure (1)..(429): unsure at all Xaa locations
  Clone ID: GOSHI-09MAY01-C31390_2.pep
VSAAQKVPEDGWTMQDGTPWPGNCVRDHPGMIQVFLGHSGVRDVEGNELPHLVYVSREKRPGFEHHKKAGAMNALIRVSAVLSNAPYLLNVDCDHYINNSKALXRPCASLMDPTSGKKVCYVQFPQRFDGIDRHDRYSNRNVVFFDINMKGLDGIQGPIYVGTGCVFRRQALYGFDAPITKKPPGKTCNCLPKWCCCLCCCSRKNKKTKQKKDKTKKSKQREASKQIHALENIEGISESNTLKSSEASQVKLEKKFGQSPVFVASTLLEDGGIPQNASPASLLSEAIQVISCGYEDPTRPGKEVGWIYGSVTEDILTGFKMHCHGWRSVYCIPKRPAFKGSAPINLSDRLHQVLRWALGSVEIFLSRHCPIWYGYGGGLKWLERFSYINSVVYPWTSIPLLVYCTLPALXLLTGKFIVPEIYNYASLVF

SEQ ID NO: 67954 - protein, 404 aa, Gossypium hirsutum
  Clone ID: GOSHI-09MAY01-C31390_1.pep
KSKSNDKKNNKEVTKQIYALENIEEGIEGIDNEKSSLMPQIKFEKKFGQSPVFIASTLTHAAGVPKGATTASLLKEAIHGISCGYEDGTDWGKEVGWIYGSVTEDILTGFKMHCHGWRSVYCIPKRPAFKGSAPINLSDRLHQVLRWALGSVEIFLSRHCPIWYGYGCGLKSLERFSYIASVVYPLTSVPLLVYCTLPAICLLTGKFIVPEISNYASLLFMSLFIVIAVTSILEMQWGGVGIHDWWRNEQFWVIGGVSSHLFALFQGLLKVLAGVNTNFTVTSKGGDDGEFSELYLFKWTSLLIPPMTLLIINIIRVIVGISDAISNGYDSWGPLFGRLFFAFWVIVHLYPFLKGLMGKQDRLPTIIVVWSILLASIFSLLWARVNPFISKGGIVLEVCGLNCD

SEQ ID NO: 67955 - protein, 203 aa, Gossypium hirsutum
  unsure (1)..(203): unsure at all Xaa locations
  Clone ID: LIB3825-016-Q1-K6-F7.pep
RPRGQKQXKEKTXKSKQREASKQIHALENIEGAISESNSQSSVTSEMKLEKKFGQSPVFVASTLLEDGGVPQNASPASLLREAIQVISCGYEDKTEWGKEVGWIYGSVTEDILTGFKMHCHGWRSVYCIPKRPAFKGSAPINLSDRLHQVLRWALGSVEIFLSRHCPIWYGYGGGLKWLERFSYINSVVYPWTSIPLLVYCTL

SEQ ID NO: 67956 - protein, 144 aa, Gossypium hirsutum
  unsure (1)..(144): unsure at all Xaa locations
  Clone ID: uC-gsflnu33B140c07b1.pep
PTRPPTRTVRIALTLIGDRGIPKGATTESLXKEAIHVVSCGYEDKTDCRKEDGGIYGSVTEDILTGFKMHCHGWRTVYCIPKRPAFKGSDAIYLXDRVHQVLRWALGSVEIFLSRHCPIWYGYGCGXKFLERFSYIASAEYPLP

SEQ ID NO: 67957 - protein, 169 aa, Gossypium hirsutum
  Clone ID: GOSHI-09MAY01-C31380_1.pep
MAAAMKVVCMMFLVAIFHKHHAHGAISADTQKLIDEANMNGPYLGLLIPNLFEMNPLLQHPNYTSTNFTIDIAGRRFRFGKIVEKNVILVMTGLSMINAGITSQLLLTLFKIEGVVHYGIAGNANPSLHIGFVTIPQYWSHSALWSWQRYGYGPSDELPLDPNGDYTRN

SEQ ID NO: 67958 - protein, 136 aa, Gossypium hirsutum
  Clone ID: GOSHI-09MAY01-C31220_1.pep
RYMYGCSAPVALLMGLGMWRLPPSPRWLILRAVQGKGSLQELKEKAILALSKLRGRAPGDAASEKQIEDTLISVKSAYMEQESEGNILEVFQGPSLKAFIIGGGLVLFQQITGQPSVLYYAGPILQSAGFSAAADA

SEQ ID NO: 67959 - protein, 93 aa, Gossypium hirsutum
  Clone ID: GOSHI-09MAY01-C32970_1.pep
MAPKAEKKPAEKKPAEEKKTTVAEKSPAEKKPKAGKKLPKEGGAAADKKKKKAKKSVETYKIYIFKVLKQVHPDIGISSNATGVLNSFINDIF

SEQ ID NO: 67960 - protein, 170 aa, Gossypium hirsutum
  Clone ID: GOSHI-09MAY01-C32870_1.pep
GKSIGREEIEFMKNNGCSPNLFNYSALMNGLCKEGKSRFHEALQMLEKLPYEGVYLNKASYRIVLNALWQKDEMEKAAKLLGLMLDRGVFPHYATSNEVLIQLCKAGMLDDAVTALFGLAETGFKPEPHCWEFLIEMNCKDRKLLPVFELLDELVIKECTHNLHVGATFA

SEQ ID NO: 67961 - protein, 93 aa, Gossypium hirsutum
  Clone ID: LIB3120-045-P1-K1-G5.pep
CWIGGFFHDYATSNEVLIQLCKAGMLDDAVTALFGLAETGFKPEPHCWEFLIEMNCKDRKLLPVFELLDELVIKDCPYNLHVGATFCLASYCL

SEQ ID NO: 67962 - protein, 273 aa, Gossypium hirsutum
  unsure (1)..(273): unsure at all Xaa locations
  Clone ID: GOSHI-09MAY01-C132578_1.pep
MWSVKCCLNPSFIIIVVAAVLSQALTVTSVVVPKSPCYAFDNSSHLLDFSDWIGSPFVYEGKDTDVVFRFCKDVESRSQAGYVDFGRYDKFNYFVAGSGHVDLVQEFYNGDLLNCEHTFDKMGRTAQVNIICGKCLNGQCXGRHGCICNVSYESPCRTIVELAIPCENPGPRVFEGVTVGFHPPSWEIVHNGLTHLGFEKSHPDFSFPPEHPPVTPYLTAIASPSPLLKKPPVQVLPEKRLGVVFSRTAAPGRXPPTFSPSNLLFDMENFVWA

SEQ ID NO: 67963 - protein, 84 aa, Gossypium hirsutum
  Clone ID: GOSHI-09MAY01-C32440_1.pep
MFGNEARRAVAWMNGCEGDPKLPVGSIETRTLTVVPSPSKAMERLSVAIRELKCSPPPLTSGILRLQVPIEEQIEAIEWLHAQH

SEQ ID NO: 67964 - protein, 60 aa, Gossypium hirsutum
  Clone ID: GOSHI-09MAY01-C32430_1.pep
RKGGRENKKTILKRKEKERKNQNKGRQRRHNLQEKEGSLIKDLERRQKLFNVSFNYQKTL

SEQ ID NO: 67965 - protein, 199 aa, Gossypium hirsutum
  Clone ID: GOSHI-09MAY01-C132638_1.pep
ALKRLVARSPSLKKLRLNRYVSIGQLYRLMVQAPQLTHLGTGSFSPSEVAGQGDQKPDYVTAFAACKSLVCLSGFREIIPDYLPAIYPICANLTSLNFSYANITAEQLKPIISNCHKLQVFWVLDSICDEGLQAVAATCKELRELRVFPVDAREDSDGPVSEVGFQAISEGCRKLQSILYFCQRMTNAAVIAMSKNCPN

SEQ ID NO: 67966 - protein, 160 aa, Gossypium hirsutum
  Clone ID: GOSHI-09MAY01-C32090_1.pep
MAALYSTSSCFCGSLGSYPVHKSVKLGHGKVRDSGFYFPHRFQCATPKLHVQAKALSVDGLPEMMDSSLVVCFGEMLIDFVPTISGLSLAEAPAFKKAPGGAPANVAVRIARLGGSSAFIGKVGEDEFGYMLADILKENNVNNEGMRFDPGARTALAFVT

SEQ ID NO: 67967 - protein, 100 aa, Gossypium hirsutum
  unsure (1)..(100): unsure at all Xaa locations
  Clone ID: GOSHI-09MAY01-C32060_1.pep
MRIHPLPKKRNITVQYEMNPRTTRSQAETLLTGGSNKKLRRLPHIFSRVLELPFRSDADVAVEESPDCFKFVAETDGMIGDVVRAHXVEIHPVVTKIVIR

SEQ ID NO: 67968 - protein, 250 aa, Gossypium hirsutum
  unsure (1)..(250): unsure at all Xaa locations
  Clone ID: GOSHI-09MAY01-C132308_1.pep
IPGLFGYAIVQSQVRFFQSQSLVLPMMFSSLATLCSHIIVCWVLVFKFGFGSKGGALAISFSNWFNVILLGFYMRYSPSCEKTRTLHLKDVFLSVKEFFHFAIPSAVMACLEWWSFEILVLMSGLLPNSKLETSVLSICLSSDSLHYTISFGISVAASTRISNELGAGNPQAAQIATLVSMLIALVETLIASTILLCCRHVFGYAYSSENDVVIKVTRTVPLICLSFITDGLHGVLXGIVRGIGWQHVGA

SEQ ID NO: 67969 - protein, 110 aa, Gossypium hirsutum
  unsure (1)..(110): unsure at all Xaa locations
  Clone ID: GOSHI-09MAY01-C32240_1.pep
TPTRPPTRPPTRPPTRPRDAKCLMDELKRQVESQELDFPESDLVQFITFLLLTLERDALPLFNMLRXNYKSSIDREPAFNELLDEIAEKFYGVQRRNPLQGMFGDLFKMM

SEQ ID NO: 67970 - protein, 190 aa, Gossypium hirsutum
  Clone ID: GOSHI-09MAY01-C32210_1.pep
MAMNVSSACFSVLSCKKPNRIRADASEDFATTAALKTDTEDKLRLGGSELKVTRLGIGAWSWGDTSYWNNFQWDDQKLKAAKAAFNGSLDCGITFFDTAELYGSPLALRAENSETLLGRFIKERENDNPGEEVVVATKFAALPWRFGRQSVISALKDSLNRLGLSSVDLYQLHWPGIWGNEGYIDGLGDA

SEQ ID NO: 67971 - protein, 106 aa, Gossypium hirsutum
  Clone ID: GOSHI-09MAY01-C33880_1.pep
IARFMCVLIMATNRPVTLVSGIHSVVLLRWMRQFPLEACFKSSFETSITATGTFIPYCCNSMLASFMSTCGTITSIFTKIEELELDNEPGKRTWPKDFFLQCICLG

SEQ ID NO: 67972 - protein, 117 aa, Gossypium hirsutum
  Clone ID: GOSHI-09MAY01-C33540_1.pep
MEGRRVIGWAARDVSAHLSPYSFTLRKTGPEDVVLKVLHCGVHHTDLHQMRGELMPINYPLVPGHEVVGDVVEVGSEVNKFKLGDKVGAGCLVSSCGKCSSCISNNEQYCNHRVFTY

SEQ ID NO: 67973 - protein, 114 aa, Gossypium hirsutum
  Clone ID: GOSHI-09MAY01-C33450_2.pep
RLFIRNLVISLLTLVSIGFLGAEKIAYEWIFLIVILLISVIILYREINKKKNWILLLLIHLLLVILAFILTLFPIPDDFHFAWSFFGFLLFFGLQWGWTSSSFQSRPFRSSKLQ

SEQ ID NO: 67974 - protein, 250 aa, Gossypium hirsutum
  unsure (1)..(250): unsure at all Xaa locations
  Clone ID: GOSHI-09MAY01-C33450_1.pep
ALTLFIRNLVISLLTLVSIGFLGAEKIAYEWIFLIVILLISFIILYREINKKKNWILLLLIHFLLVILAFILRSFLSEMISTLLGVSLVFCFSSDSSGGGHSLPALESSSSSESLNTFRPTRPADYERTIFERIRSLEXRQYYNLPPQTXPGEYETIVRAHFDQALSVDHLRSAMDMEYREILILEKKALLQERLFSNLISEDNLERIMELSPYNNIRKEAYEFVEGEVDTLDLRSEEQRRAMDERLPLF

SEQ ID NO: 67975 - protein, 96 aa, Gossypium hirsutum
  Clone ID: LIB3135-045-Q1-K1-D12.pep
QNKKMMRQSKERRALRLFIRNLVISLLTLVSIGFLGAEKIAYEWIFLIVILLISFIILYRKILIFFFFIFIYFGVCLFFIFHFFISLFVFIFLFTF

SEQ ID NO: 67976 - protein, 214 aa, Gossypium hirsutum
  unsure (1)..(214): unsure at all Xaa locations
  Clone ID: GOSHI-09MAY01-C33440_1.pep
VLAGEFEAKETWMEYADNEEREGWYKGEGYEKMHLQGRRWGGWIKAKFNAAKGIDYKGSIYDAAPTFVSYGVAHGSSELMKAVSSKTHXKFLADMVWVHEEHDVCIETQEGVKHCKLIAVHAGLERGKNVREQLEFLKAKDARVPKVTDLSGXKDVWDIPKELTETILVSGHHGKLHIXGLRLIIDECGGLDGNPVAAIVLPSMKIVRDTDNFS

SEQ ID NO: 67977 - protein, 91 aa, Gossypium hirsutum
  Clone ID: GOSHI-09MAY01-C33460_3.pep
RIDFASMILPFSFLTIRPDADLWFCESKAASKKMDLFALRTRCLGLALTSKIPHSSQQNPKHCSFVPTLKIQESQLHKSKWLLLSTQGKFN

SEQ ID NO: 67978 - protein, 107 aa, Gossypium hirsutum
  Clone ID: GOSHI-09MAY01-C33460_1.pep
LFTKISKYGEERQLGFSVRSAYKLLQEFTLDPNDYLQADSKNFYKKLWNLHMPSKIKITVWKIAWNYIPTFSNLKLKRVMTEDPCPRCGQEEEDNFHVFQRCPGSSA

SEQ ID NO: 67979 - protein, 209 aa, Gossypium hirsutum
  Clone ID: AI728555.1.pep
NLIISTFNTDIARKILQIPLSKTIHEDIQVWRGEATGIFSVRSAYKLLQESTIDPNDYLQADSKHFYRKLWNLHMPSKIKITVWKIAWNYIPTFSNLKLKRVMTEDRCSRCGQEEEDSFHIFQRCPWKSAQGLDRVYKGQISPSFSMQLLTHRTTDLHQVLLLRMRRVESLKQNRSFMTMLHIWWERLHDRSVMNQSQIALAIQSRRKG

SEQ ID NO: 67980 - protein, 83 aa, Gossypium hirsutum
  Clone ID: LIB3585-044-P1-K1-E8.pep
YNEVVHDDVSPSTIYGAEHGLRLFVKFPELLAYVNIEEETLIRLQQKLMDFLKFLQKNQSTFFLSAYDGPKGVSEGRGKGKDD

SEQ ID NO: 67981 - protein, 66 aa, Gossypium hirsutum
  Clone ID: LIB3135-003-Q1-K1-D2.pep
EIYPINSPRSSKGGNGVKQRITNSIVTTILCCLYQIKRRHINRLPNSATDFIFFLGIKIVKMAMVA

SEQ ID NO: 67982 - protein, 198 aa, Gossypium hirsutum
  Clone ID: GOSHI-09MAY01-C33420_2.pep
KRTLPGLTIGDTVPNLELATTHGTCNLHDYFNNGWTIIFSHPSDFTPVCTTELGKMAAYLPEFEKRGVKLLGFSCDDVQSHKEWIKDVEAYTPGCKVAYPIVADPKRGIIKQLNMVDPNEKDSSGNELPSRALHIVGSDNKIKLSILYPATTGRNMDEVMRAVDSLQKTSQYKVATPANWKQGEPVVISPSVPNEEAK

SEQ ID NO: 67983 - protein, 211 aa, Gossypium hirsutum
  unsure (1)..(211): unsure at all Xaa locations
  Clone ID: GOSHI-09MAY01-C33420_1.pep
MPGLTIGDTVPNLEVETTHGTFKLHDYFNNGWTIIFSHPSDFTPVCTTELGKMAAYLPEFEKRGVKLLGFSCDDVQSHKEWIKDVEAYTPGCKVAYPIVADPRREIIKQLNMVDPNERDSSGSELPSRALHIVGSDXQATTGRNMDEVMRAVDSLQKTSQYKVATPANWKQGEPVVISPSVPNEEAKKMFPPGFETKNLPSGKDYLRFTNV

SEQ ID NO: 67984 - protein, 253 aa, Gossypium hirsutum
  Clone ID: GOSHI-09MAY01-C33020_1.pep
MASLFKDPAKLSAYRDRRFNGSQEEFEQALLNSTTVYIGNMSFYTTEEQVYELFSRAGEIKKIIMGLDKNSKTPCGFCFVLYYSREDAEDAVKYISGTILDDRPIRVDFDWGFVEGRQWGRGRSGGQVRDEYRTDYDPGRGGYGKLVQKELEAQRQLVDYGAGSLGSFPPVMAPHYGRHGGGRGHGGSYRHGRDYHRKRHRDDDHYARESSKRNSDHESRRASDHDARPEKNPRFRESGDSDEEEDDDRKRRS

SEQ ID NO: 67985 - protein, 196 aa, Gossypium hirsutum
  Clone ID: GOSHI-09MAY01-C33360_1.pep
MAVVKLFGAWFSPYGYRVIWALKLKGIPYEYIEEDLRNKSPLLLQYNPIHKQVPVLVHDGKPICESTVILQYIDEIWPQNPLLPADPYDRAVALFWIKFADDKGPLMSKLYRANGEEQQAAVKEWLEMLEVMEEHALIGVKKFFGGDEINMVDIAFSFVAHWLGILEDVLGLEIFKPHKFPRVSSWIQNFKSSPII

SEQ ID NO: 67986 - protein, 289 aa, Gossypium hirsutum
  Clone ID: GOSHI-09MAY01-C28860_1.pep
MGSSSGYTEDDFSTSAFDPSTFSVQELVKLAAPDFSIPQPFVRINQQPPSLSVTTPLPPTIDMSRLLLEDDLQNLELHKLHSTCQDWGIFQLVNHGLSSSLLEKLKHEVEEFYRLPLEEKLKYKIGERGWARAAAHASADGKYDWVDTLNIITNPLHMRSPHVFPQLPPPLRSTMECYLSELQKLATKLIGFMGKALKIKEKEMMELFDDGLQAVKMAYYPPCPHPESVMGLIPHSDMTLLTILHQLNGVDGLEIKKNGLWFPFNVNPDAFVVNVGDIFEIFSTGFIQR

SEQ ID NO: 67987 - protein, 224 aa, Gossypium hirsutum
  unsure (1)..(224): unsure at all Xaa locations
  Clone ID: GOSHI-09MAY01-C28560_1.pep
MAFNLKNPRNIINNLKSKVGLWSLMKQSHSTCCYSSCLNTIHLHRFLPLTTLPQFTNPESISHKKGHFPHFQRFQSTTTEKQIDSVPNDEHNQVLDFPGGKVVFSPEMRFLSESPSVYSQCYRVLDDAGQLISHSNFVPVSEEVAVKMYSNMVTLQTLDTVFYEAQRQGRISFYVTXMGEEAINIASAAALTSDXLFPQYREPESIMAGFTLAELQPVFETSCY

SEQ ID NO: 67988 - protein, 238 aa, Gossypium hirsutum
  unsure (1)..(238): unsure at all Xaa locations
  Clone ID: GOSHI-09MAY01-C28510_1.pep
ALWTSTGSEKGTVLLLLDPHCAYKASIAVSVTSAASRFRLLYLPQIAGFCVAAVFSALMRQAHARPIPSILKAAESNLRMPFPALPFGAVPILXHLFFAFLVSQPFPPFSSFTIVSIICYLLANGIVILLILVSQLVFYVAAYLHVFIKTRWQLWEGNFGFLFLHWFMNLSSRFFSLKVVRILRANPLFVPISAAIVLSMFVHPALGLFILLLSHALCCHSSLRKSLTASLRSHARKK

SEQ ID NO: 67989 - protein, 423 aa, Gossypium hirsutum
  Clone ID: GOSHI-09MAY01-C28790_1.pep
MGKLVPDRSFFLLFFLFLHFLLFDFALSEIFFEERFEDGWKSRWVLSDWKRSEGKAGTFKHTAGKWSGDPDDKGIQTYNDAKHYAISAKIPEFSNKNRTLVVQYSIKLEQDIECGGGYIKLLSGYVNQKKFGGDTPYSLMFGPDICGTQTKKLHVILSYQGQNYPIRKDLQCETDKLTHFYTFILRPDASYSVLIDNRERETGSMYTDWDILPPRKIKDVKAKKPADWDDREYIEDPNDVKPEGYDKIPAQIPDPKAKEPDDWDDEEDGIWKPPKIPNPAYKGPWKRKKIKNPNYKGKWKTPWIDNPEFEDDPDLYVLRPIKYVGIEVWQVKAGSVFDNILICDDPQYAREVVEDIWARNREAEKEAFEEAEKERRAREEEEAKRAREEGEKRRRERDHRHRDRRHRRRHDPRDYLDDYHDEL

SEQ ID NO: 67990 - protein, 55 aa, Gossypium hirsutum
  Clone ID: LIB3048-039-Q1-L1-B5.pep
FVNFPLSSFSCPPEFEDDPDLYVLRPIKYVGIEVWQVKAGSVFDNILICDDPQYA

SEQ ID NO: 67991 - protein, 242 aa, Gossypium hirsutum
  unsure (1)..(242): unsure at all Xaa locations
  Clone ID: GOSHI-09MAY01-C128098_1.pep
IILTDMLMFVSSDIIARCXLSHKNEEEDGCSMFGELAKRLLILXTSSCIGDMFSYLRWVDVLTGYIPSMKAVSTELDAFLDQVIEEHKAIESNDQVFNKKDFVSIIMQLQKDGMYEMDLTHDNIKAILLDMFVGGTDTSTTTKEWMMAELLKHPNAMKKVQEEVRNVVGNKLRVDAEDVSKMEYLKCVLKETLRLHPAGPLMVPRETTASVKLGGYDIPSNTTVLVNVWAIQRDPKWWENPK

SEQ ID NO: 67992 - protein, 153 aa, Gossypium hirsutum
  unsure (1)..(153): unsure at all Xaa locations
  Clone ID: GOSHI-09MAY01-C28280_1.pep
MACTISMKMTLAILALSLFSSCLQATLGEIICEHLDQDTCAYAVASTGKRCVLEKHVKRSGEEEYTCRTSEIEADKINNWIETDQCVKSCGLDRKSFGISSDSLLESRFTEMLCSPQCYNGCPNVIDLYFNLAAGEGIFLPXLCEAQKGNIRR

SEQ ID NO: 67993 - protein, 151 aa, Gossypium hirsutum
  Clone ID: AW187340.1.pep
MASSSSFFRQLSGKQGWKSKSLRWGVNNKNNICGGCDTSLKAHQMEGLDMYGNGGAGSGDDGLVLRKRVMVLVDKSSHSRHAMMWALTHVANKGDLLTLLHVIPPTPNCSHSPSSFTYLANSLGSLCKACKPEVPQTILTSWAVLLHFFSF

SEQ ID NO: 67994 - protein, 188 aa, Gossypium hirsutum
  unsure (1)..(188): unsure at all Xaa locations
  Clone ID: AW187030.1.pep
MASSSSFFRQLAGKQGWKSKSLRWGVNNKNNICGGCDTSLKAHQMEGLDMYGNGGAGSGDDGLVLRKRVMVLVDKSSHSRHAMMWALTHVANKGDLLTLLHVIPPTPNCSHSPSSFTYLANSLGSLCKACKPQVKIXIXIIQGPKLWTVKSQLXKLGVSVLVXGQKXQSPLLTLCLXGSXQNDEFVEH

SEQ ID NO: 67995 - protein, 181 aa, Gossypium hirsutum
  Clone ID: GOSHI-09MAY01-C29410_1.pep
MGVSNIFNPASLCLLKSNVRQTQRPIRSFEGNQKGLIMATFSSSPSTVSVEHVNQKLSGDSFIRPHLRKLSPYQPILPCEVLSAKLGRKPEDIIKLDANENPYGPPPEIVCKVLEALGSLKFPYIYPDPGSRQLRAALAEDSGIESDYILVGCGCDELIDLILRCVLDPGEQVWSRSTSHV

SEQ ID NO: 67996 - protein, 205 aa, Gossypium hirsutum
  unsure (1)..(205): unsure at all Xaa locations
  Clone ID: AI728979.1.pep
SNIFNPASLCLLKSNVRQTQRPIRSFEGNQKGLIMATFSSSPSTVSVEHVNQKLSGDSFIRPHLRKLSPYQPILPFEVLSAKLGRKPEDIIKLNANENPYGPPPEVLEALGSLKFPYIYPDPESRQLRAALAEDSGIESDXILVSCGCXELIDLIIXAFLNLGDKILDCSSTLHMYEFXDPVVNGAQLFKFQRKQNSTLNIKTIA

SEQ ID NO: 67997 - protein, 127 aa, Gossypium hirsutum
  unsure (1)..(127): unsure at all Xaa locations
  Clone ID: LIB3048-050-Q1-L1-H2.pep
IRPHLIKLSPYQPILPVEVLSAXLGTNPDDIIKLDANENPYGPPPEVLEAMGSLKYPYIYPDPESXKQRAGLGEDSGIESDYILVGXTCDELIDLIMRSVLDPLDTIGSXTTTLTMYECDAGANGAQ

SEQ ID NO: 67998 - protein, 184 aa, Gossypium hirsutum
  Clone ID: GOSHI-09MAY01-C129738_1.pep
MGSSSVITPEDVLESLMNDGTIDALRLKIINQLKANEDLKNTTIKMAEQSKVLNTSGAEKQTKRELFDALRQELETPVLKRASKAVWELILDSNGLGKEISETVERVFCKLSGREPPLFPYSNNIVLQPEKAVGNEKKKGKEKEYENERENSKSKSKKRSFNDMNAEGNATDITGNSNDTPAAL

SEQ ID NO: 67999 - protein, 104 aa, Gossypium hirsutum
  Clone ID: GOSHI-09MAY01-C29170_1.pep
MEGQRFVVNGGIKTPIGYRFRPTDEELVVHYLKRKALNLPLPASVIPEFDVFQTDPWSLPGDVEEKRCFFSNRYGNESNNKKRKRVVAGSGTGSQLVRETILAF

SEQ ID NO: 68000 - protein, 236 aa, Gossypium hirsutum
  unsure (1)..(236): unsure at all Xaa locations
  Clone ID: GOSHI-09MAY01-C24940_1.pep
RKSLENPQLYLEQMHTKYKELYEKVEQXKRLKTNGGHTNGSSSGGVGRGERLNAAQRERMRLLTTAAFDRGKGEDTFGAKDEDWQLYKLMGKDNDDDDDGADEDEAELARVSSRLQEIDPTFVPKPEPTASQPATTEVPHVRPLTKEDFQIVLGVERFRCPEILFHPNLVGIDQVGLDEMTGVSIRRLPSKDKALANRLTSSVFMTRGCSLFPGINERLEAGIRMLRPCGSAIKGA

SEQ ID NO: 68001 - protein, 131 aa, Gossypium hirsutum
  Clone ID: GOSHI-09MAY01-C24880_1.pep
MALSLKPYCLVVLFLFWISLNALVSDVGAAGECGRTRIRSAAASLSPCLGAARNARAKVPPACCAKVGALLMTSPRCLCAILLSPLAKQAGIMPGIAIAIPKKCNIRNRQAGKKCGRYTGPFERNHVGEKL

SEQ ID NO: 68002 - protein, 183 aa, Gossypium hirsutum
  Clone ID: GOSHI-09MAY01-C24580_1.pep
MQSPSLPRLLLLSFTLISVFNLVLGDEGFCSAPSILDQTDSSSKPLYWKVTSPTLSPSHLQDLPGFTRSVYRRDHALITPESHVFSPLPDWTNTLGAYLITPAIGSHFVMYLAKMQENSRSGLPPNDVERLIFVTQGAGTLTNSSGISNKLVVDSYAYLPPNFDHSLKCDGSATLVVFERKYA

SEQ ID NO: 68003 - protein, 107 aa, Gossypium hirsutum
  Clone ID: LIB3493-052-P1-M1-G1.pep
RISVRSACIWDQADSSSKPLYWTVTSPTLSASHLQDLPGFTRSVYRRDHALITPESHVFSPLPDWTNTLGAYLITPAIGSHFVMYLAKMQENSRSGLPPNDVERLIF

SEQ ID NO: 68004 - protein, 169 aa, Gossypium hirsutum
  Clone ID: GOSHI-09MAY01-C24570_1.pep
PRVRAVKPVLSKEHDEPGINLGLMLGIIGGVVAIARPIALLMFVIIRRSRTTEDANYDERSIVDKMSVRSSPKPPIDSRRVPQTMRSAAIGLPRYRVFSLEEIEDATNNFNPSNFMGEGSQGQLYKGCLVDGPGVVVKCLKLQQKHAPQNLMQHMEVLFKLKHRHLGSV

SEQ ID NO: 68005 - protein, 127 aa, Gossypium hirsutum
  Clone ID: GOSHI-09MAY01-C24510_1.pep
MQQGTGGSETEVTWEDQQNINKFGRLNNRFHELDDEIKVAKEAIDNLEDASNELILTDEEVVRFQIGEVFAHVPKEEVETRIEEMKELNSKNLEKLEEEKESVVAQMAELKKILYGKFKDSINLEED

SEQ ID NO: 68006 - protein, 152 aa, Gossypium hirsutum
  Clone ID: AA659970.1.pep
TESCDSGGFPAGFFHRKWSNWIPWQIQSWYQMVLPFISLQLPSTFFTVSIDAKFLVKFNTPNKQGARQTKSRLQQFIIFRDKTIIYTSDHHHHKKNSKATMIVDDDPHQTVTISSASSKLGSLTSITSFQTRSRPAKAHLPPKCICHRDLLS

SEQ ID NO: 68007 - protein, 59 aa, Gossypium hirsutum
  Clone ID: uC-gsflnu33B141a05b1.pep
PFDGDHHRRSSLPLSFFYDDDDRMCKFIVLSLKMNKFDANASFVEANFHYVEAAKITES

SEQ ID NO: 68008 - protein, 83 aa, Gossypium hirsutum
  unsure (1)..(83): unsure at all Xaa locations
  Clone ID: GOSHI-09MAY01-C24450_1.pep
QYYIVVICYIYFTRVVVYALETITSYKYLWTAVXVAGELATXAFYVFTGFKFKPEAHNPYFVIDDEEEEAAAEQLKLEDEFEL

SEQ ID NO: 68009 - protein, 190 aa, Gossypium hirsutum
  Clone ID: GOSHI-09MAY01-C24400_1.pep
HASASMFTNARCSGEKQINGEDCFILKLCADPATLKARSEGPAEIVRHVLFGYFSQKTGLLVHLEDSHLTRIQNNGGDAVYWETTIDSSLEDYRLVEGIMVAHSGRSVVTLFRFGDTAMSHTRTRMEEAWAIEEVAFNVPGLSAECFIPPDEIRLASMDEACEFSQGPTLKTSLATAPYRPKVGKLDKSS

SEQ ID NO: 68010 - protein, 187 aa, Gossypium hirsutum
  Clone ID: GOSHI-09MAY01-C24780_1.pep
EMARLLPPQLFFLLTLVVIIHPSYGLKHLKGTALVDEVCRHTSHNEYCVNTIVPKPPLSGERIASTTLGWAQIKALEAGTIIASLLNDSSSILPVAKNPLQAKELLQICWDSNMNTMEDLWIASSLLYNKIINPMIARLYHAANTTRVCQDGVKGTGFTALAAKIEDIIKLCEICVVSTNFFVNGAH

SEQ ID NO: 68011 - protein, 67 aa, Gossypium hirsutum
  unsure (1)..(67): unsure at all Xaa locations
  Clone ID: LIB3145-039-Q1-K1-A1.pep
KKKKREREKKRGXXXNXKKLLGKKKKKXKEKKNXXKKNKKKKKKKIXXKKKKKKFTGQRASPNMLGF

SEQ ID NO: 68012 - protein, 148 aa, Gossypium hirsutum
  unsure (1)..(148): unsure at all Xaa locations
  Clone ID: GOSHI-09MAY01-C24750_1.pep
LVQGGHGHLVMMKKKDGDDDDDDDDGPREADLEGRVEKYIGVKVKVSFTGQGETQSMKQLSGGQKTVVALTLIFAIQRCDPAPFYLFDEIDAALDPQYRTAVGNMIRRLADMANTQFITTTFWPELVKVXADHIYGVTHKNKVSPCNV

SEQ ID NO: 68013 - protein, 135 aa, Gossypium hirsutum
  Clone ID: GOSHI-09MAY01-C24710_1.pep
IPFPQMGCCVSTNTGSLRAKESHLQVGVESKAPPPSAEEETVKEVLSETPKTKAPIFTPQQEESKQTQIEKPVFVKIQEKESLNFNVKTKPKSPVLEESASEEVSEICSVSLSESLSTVTDRRDEEDEVRQLKVF

SEQ ID NO: 68014 - protein, 273 aa, Gossypium hirsutum
  Clone ID: GOSHI-09MAY01-C24700_1.pep
DKLVDLTTGMCWELIARKVQTAIWIKEEDPSCLKHNAELKLIDICDAVDETKPSWMTPLMNCIQLAGATTASKKLPPRPERLSVYSESLSRIGISREEFSSDSNFWQDQVHYYWKLMNVSRTEIRNVMDMNALFGGFAAALNEYPVWVMNVVPSSMQNTLSAIYDRGLIGAFHDWCEPFSTYPRTYDGLHANHLFSQYKNSGEGCQFEDIMLEMDRILRPQGFVIIRDEDSIISRIQDLAPKFLWEFESHILENKEKQRETLLICRKKFWAVL

SEQ ID NO: 68015 - protein, 57 aa, Gossypium hirsutum
  Clone ID: GOSHI-09MAY01-C24730_1.pep
DPREMTVQIHWLLVLYTPQMVSRDVCAVLDILTIFSWSLCFNSNLKNEMHLPFEDRP

SEQ ID NO: 68016 - protein, 102 aa, Gossypium hirsutum
  Clone ID: GOSHI-09MAY01-C24680_1.pep
MKKSMEIADSASWYCALALLTLILMGCIKTSSVSSDEAARGKQLLKPPCDEIYVVGEGETLHTISDKCDDPFIVERNPHIHDPDHVFPGLVIKIIPSTAGKL

SEQ ID NO: 68017 - protein, 138 aa, Gossypium hirsutum
  Clone ID: GOSHI-09MAY01-C24600_1.pep
RMSMDSDYLVDRRIVIKLLVTYFQRNQSKEVLELMVRMLGFSDEDKQRIGSAQQGTGKGVVRGVLGLPGRLVGGILGGGSADVPASIAPDNQSIADLWVDFLLKETEEREKRAEGASKSNGDLNGRNPNATGPTTSAS

SEQ ID NO: 68018 - protein, 121 aa, Gossypium hirsutum
  Clone ID: GOSHI-09MAY01-C24630_1.pep
PTRPPTRPSEVFLHRLGIPVKKVVSVEISEVNRNIVRGWWEQTNQRGTLIDIADVQELNGDRLEQLMSRFGGFDLVVGGSPCNNLAGSNRHHRDGLEGKESSLFFDYCRILDLVRCMQRNQ

SEQ ID NO: 68019 - protein, 206 aa, Gossypium hirsutum
  Clone ID: GOSHI-09MAY01-C24140_1.pep
TTHACAHAFLSQNVSHPVSQTSAPVIQDDAPENSYLSLGHALPKNSAPFIVRAPPPKPKPVQQSRKAAIPEESAPKSYNTSEKSNESSGKNTSIFVANLPMSATEEMLKEVFQKFGPIKPNGIQVRSFKDNKNCFGFVEFESATSVQSAVMASPIKIGNRQANIEEKRGPSSGGKPGYGGYRDENGYRNDNFRGRGNFNGSRNFRR

SEQ ID NO: 68020 - protein, 195 aa, Gossypium hirsutum
  Clone ID: GOSHI-09MAY01-C24170_1.pep
RYLSDSDDDDDESSTKKGRMDDSYHFDADERREWRAKIREVISKHPEIQEEIDPAEKLSKMQKLLADYPLVVDDDDPNWPEDADGWGFNLGQFFDKITIKNAKKENDDDDDYDSEKEVVWQDDNYIRPIKYIKIAQWEETVFKDISPLIILVHNRYKRPKENERAWDELEKAVHIIWNCRLPLPRCVAVDAIVED

SEQ ID NO: 68021 - protein, 312 aa, Gossypium hirsutum
  Clone ID: GOSHI-09MAY01-C24120_1.pep
RDLINILEEAIRSGYPILIIAEDIEQEALATLVVNKLRGALKIAALKAPGFGERKSQYLDDIAILTGGTVIRDEVGLSLDKASKEVLGHASKVVLTKDTTTIVGDGSTQEAVNKRVVQIKNLIEAAEQDYEKEKLNERIAKLSGGVAVIQVGAQTETELKEKKLRVEDALNATKAAVEEGIVVGGGCTLLRLASKVDAIKDSLDNDEEKVGADIVKRALSYPLKLIAKNAGVNGSVVLSNDNPRYGFNAATGNYEDLMSAGIIDPTKVVRCCLEHAASVAKTFLMSDCVVVEIKEPETVPAGNPMDNSGYGY

SEQ ID NO: 68022 - protein, 44 aa, Gossypium hirsutum
  Clone ID: uC-gsflnu33B074d04b1.pep
TSFFSETKKVVFTICYFLQVENLLTEFYLNCCNKLNLNTLLIRN

SEQ ID NO: 68023 - protein, 40 aa, Gossypium hirsutum
  Clone ID: LIB3146-038-P1-K1-B5.pep
MVVRCCLEHAASVAKTFLVSDCVVVEIKEPEPVPAGNPMD

SEQ ID NO: 68024 - protein, 74 aa, Gossypium hirsutum
  Clone ID: LIB3582-052-P1-K1-B11.pep
MIREIPYKTACFWAIYQAAVEEGIVVGGGCTLLRLASKVDAIKDSLDNDQEKVVRCCLEHATSVAKTVLMSHCV

SEQ ID NO: 68025 - protein, 104 aa, Gossypium hirsutum
  unsure (1)..(104): unsure at all Xaa locations
  Clone ID: uC-gsronu33B057g06b1.pep
LLVAIRSGYPTLMIADDIEQEALATLVVNKLRGALKIAALKAPGFGERKSQYXLDDIAILTGGTGIRDEGGLSLDKASIEVLGHASKVVLTKDATTIVGDGSTH

SEQ ID NO: 68026 - protein, 29 aa, Gossypium hirsutum
  unsure (1)..(29): unsure at all Xaa locations
  Clone ID: LIB3583-048-P1-K1-G3.pep
IXFPQNCKMQILXXTGISSHFSIINQQRK

SEQ ID NO: 68027 - protein, 66 aa, Gossypium hirsutum
  Clone ID: GOSHI-09MAY01-C24070_1.pep
SFKTAAPFFFFFFFFFFFFFFFFFFFFFFFFFFFFFFFNTNTDILLKKNTDRTMSQNIRTDINKQR

SEQ ID NO: 68028 - protein, 236 aa, Gossypium hirsutum
  Clone ID: GOSHI-09MAY01-C24000_1.pep
NWYFGNKKSMLIPNCLFRVGGSAVLLSNKSKDRRRAKYKLIHVVRTHRGADDTAFRCVYQEQDDAGKTGVSLSKDLMAIAGGALKTNITTLGPLVLPISEQLLFFTTLVVKKLFNAGIKPYIPDFKLAFDHVCIHAAGRAVIDELEKNLQLLPIHVEASRMTLHRFGNTPSSSIWYELAYIEAKGRMPERNPVWQIAFGSGFKCNSAVWEALRNVKSSSNGPWEDCIDMYPVKINT

SEQ ID NO: 68029 - protein, 193 aa, Gossypium hirsutum
  Clone ID: GOSHI-09MAY01-C24020_1.pep
MFSTMAFDGGVGFKLFMDSQADLSLEIRKKKLSGLQKREALEKEVSMLQNMLNQEEKMHEILTQFQLQEDGSSISIPDFLPPKMKELLTELAMVESEIAHLETQISQLKHGLNQEHEVIITKEKTPSKQKNPIMQDQQENVVFETNALHFISKAIKGDYTLTDFMSLNETMGNSRALFQEKIPKKICYFKTRE

SEQ ID NO: 68030 - protein, 95 aa, Gossypium hirsutum
  Clone ID: GOSHI-09MAY01-C24360_1.pep
MSFNFPLVWKPGRSCGQNNLEMSETLATFLASTPLLEEAWRVCNIANISSPGAYLVERIGSVAYIAFSGPQMTSGSDQKCMYLVALTIDYRISKG

SEQ ID NO: 68031 - protein, 234 aa, Gossypium hirsutum
  unsure (1)..(234): unsure at all Xaa locations
  Clone ID: GOSHI-09MAY01-C24210_1.pep
SGATKYAGDDLQLNVDPYLSSDKDNILIFKSNSSLPSRGAIDFVPGIRKMVCQDSGVWKYDRNGSANSTVGSSRSSHGLANTFSLAPGRGVYANRLQTRVHSDPAWLETGDAVANLYPELREDAQDHARSRNAYFDQARQGFLTGNKALTKELSVKGQLQNMHMKATHGNTQESLFRQRNQVPPEIVGGQERIIDLHGLPVSEAIHMLXYELSVLRRTARXADQRLQVYISVGT

SEQ ID NO: 68032 - protein, 184 aa, Gossypium hirsutum
  Clone ID: GOSHI-09MAY01-C24220_1.pep
STFASHGGRDEDESEYTEDDSDSEYYEDDEDETVNTEEVEHLERENGGRSRKGRMVFSEEKDSRPVKLSFRRGKVVDIQTENNGPRRLKFRRGRLLGVNQNIKAERRTFRTREVDGDMNDNEPCGEKVVLRHQDLQGKKDEKGLFNNVIEETASKLVETRKSKVKALVGAFETVISLQDGKPSS

SEQ ID NO: 68033 - protein, 47 aa, Gossypium hirsutum
  Clone ID: GOSHI-09MAY01-C25940_1.pep
GTEMNYLYKVTLIGTKLKYIYLFLENFVKPRNEDFTGSKNHKTILNQ

SEQ ID NO: 68034 - protein, 146 aa, Gossypium hirsutum
  Clone ID: GOSHI-09MAY01-C25970_1.pep
DNSGVPPLAFTITGPPVPFVLCPVYNIPAETGAPDASTSHFGWDEGLDNNDSCQNFESSAGLDQSEVLSTSSSTRNASSLEPVERKSDILNGDIASHWQNLQYGRFCQNSQYPPPLIYPSPVVVPPLYLQGHFPWDGPGRPLIKCE

SEQ ID NO: 68035 - protein, 94 aa, Gossypium hirsutum
  Clone ID: GOSHI-09MAY01-C25910_3.pep
SKKRNSSLMDNLLGLLRIRIKRGVNLAVRDVRSSDPYVVVKLDKQKLKTRVIKKDVNPEWNEDLTLSITDPSTPIKLVSFQLLVTISMECITEM

SEQ ID NO: 68036 - protein, 155 aa, Gossypium hirsutum
  unsure (1)..(155): unsure at all Xaa locations
  Clone ID: GOSHI-09MAY01-C25910_2.pep
GSEKTKSSSLMDNLLGLLRVRGKRGVNLAVRDVRSSDPYVVVKLDKQKLKTRVIKRDVNPEWNEDLTLSITDPSTPIRLTVYDHDTFSKDDKMGNAEVDIXPDIEALKVDVDGIPIGTTIARVQPCRTNLLSEESAITLVDENVEQDILFSIEKR

SEQ ID NO: 68037 - protein, 133 aa, Gossypium hirsutum
  Clone ID: uC-gsronu33B048h05b1.pep
CFKHLSLRLLLFFIFVFFLGEGGGGGGGPFFFIYLFFFFYFWGVCYIYSFFLLLFYLFYFFFFFFFFFFFMSIFVCELCFFFFFFFIINYYLFFFSNCIFYIIYLFIIIFYIFIYFLISSFYSFFIFFFYFYF

SEQ ID NO: 68038 - protein, 141 aa, Gossypium hirsutum
  Clone ID: GOSHI-09MAY01-C25890_1.pep
DDLTNSRIPAKLEETGHFESNFSSRGRPDVQLACQDVITRNEDTTGKTRVLNEEKLNFSQNSQDSRRRAVLSHKRKALALKRDGKLEEAREELRQAKLLEKSMAEDDTPPKFGSNDVSASASTVCSGAAIEQGTLAFAPKP

SEQ ID NO: 68039 - protein, 45 aa, Gossypium hirsutum
  Clone ID: GOSHI-09MAY01-C25850_1.pep
GKQISTIKQLMEQAKQRTHKMHILFIYKRINDERPKSFRSRVVVI

SEQ ID NO: 68040 - protein, 166 aa, Gossypium hirsutum
  Clone ID: GOSHI-09MAY01-C25840_2.pep
VYHIVLFFFLLLSSSVQIQARESKFFSKIFHLGAKISPLVVPTPTPAPASAPVLAPTVAPATAPANIGIQDPYYGLYGHGSGMFPPAKEGVTTSNTPTAFENDLFAEELADEKYESGYEKNNYYYNNNNNNNGYTLSSYNNNGYSGHYHTNGYNDNYNNNGYETER

SEQ ID NO: 68041 - protein, 218 aa, Gossypium hirsutum
  unsure (1)..(218): unsure at all Xaa locations
  Clone ID: GOSHI-09MAY01-C25840_1.pep
GAKISPLVVPTPTPAPAPASAPALAPTVAPAAAPANIGIQDPYYGLYGHGSGMVPPAKEGVTTSNTPTAFENDLFAEELADEKYESGYEKNNYNYNNNNNGYTTSKYNNNGYTLSSDNNNGYSGNYNTNGYNDNYNNNGYETERQGMSDTRFVEGGKYYYNMKNEKYYPNGYEFSSSKGTTXNEGYYGNTENSNEFNSMEEFQNKEDQYMERQEEYVP

SEQ ID NO: 68042 - protein, 38 aa, Gossypium hirsutum
  Clone ID: uC-gsflnu33B061c09b1.pep
IVFFFFLFGVLYLYLLLFFFNKTQERLHKLQSSSSLNI

SEQ ID NO: 68043 - protein, 60 aa, Gossypium hirsutum
  Clone ID: GOSHI-09MAY01-C25820_1.pep
YDRITCDDEEERASRRVYRGCTRSPTCKGCTSCVCFGCEICRFTDCSCQTCIDFTRNAKA

SEQ ID NO: 68044 - protein, 92 aa, Gossypium hirsutum
  Clone ID: GOSHI-09MAY01-C25570_1.pep
LSCYFRKRKQKLTQITKTNRFDIIQQTTHVSKQRPRHFFAANANSDGRLLSTWFVVVNQYSSFWFKIWIVNKEKVSDDGGSHNAAEDDNWAC

SEQ ID NO: 68045 - protein, 87 aa, Gossypium hirsutum
  Clone ID: LIB3493-024-P1-M1-G2.pep
TCSCPYNLLNKNFVVELLFKKEKTEANPHYKLYRFDIIQQTTHVLNSDLGISLLQMPTATSASFYLVCGGESVFFFGLRYGSSTKRK

SEQ ID NO: 68046 - protein, 333 aa, Gossypium hirsutum
  Clone ID: GOSHI-09MAY01-C25530_1.pep
DIKLQPFSLKKEQQSFTPLRPEIPPWLASQPMLGAGPGPPHPIDLSSSSSSIFSQRLDHQDLTLHGTPSANPSLVPTLPPYHHTALPSPHMSATALLQKAAHMGATMSRKSGSSSVPSTVAAAASASLMRPHQQTHVSADSAGTNNNTTTAGFGLDLPSREELDVGSSSGMRPGLAPFGNRKPAANAGDDDDDNNNIAGSGATPSLLQDMINSLSSATGFDATNSFDDIAFGGIFNATKKLCGSSINESFSKTTTPTVPTTTNGTRNDHHGSTAGSTTTTTTTQGGDQGLTRDFLGLRAFSHTDILNIAGPGRNYCIDTSQEQHNQSQKPWQG

SEQ ID NO: 68047 - protein, 237 aa, Gossypium hirsutum
  Clone ID: GOSHI-09MAY01-C25480_1.pep
MATRFYSCSLIPARPTSGSVLNKYSLLPNPRISITRRHTTLVSSSSSSSSFTLRASVSSAATSTAVDGTISSTKPSKSLPFRVGHGFDLHRLEPGYPLIIGGIDIPHDRGCEAHSDGDVLLHCVVDAILGGLGLPDIGQIFPDSDPKWKGAPSSVVIIEAVRLMHEAGYEIGYLDATLFLHRPKLSPHKGVIRANLSELLGADPSVINLKAKTHEKGDSLGENRSIAAHTVVLLMRK

SEQ ID NO: 68048 - protein, 115 aa, Gossypium hirsutum
  Clone ID: GOSHI-09MAY01-C25780_1.pep
MTNSDFGLLFIVGILATQAMSRTVYESAIAEHEQWMVKHGRHYKNKAENDKRFKIFKENLEYIQNFNNAGNRTYKLSINKYSDLTHDEFVAARTGYINPGNTMTSMETSFRYAEF

SEQ ID NO: 68049 - protein, 87 aa, Gossypium hirsutum
  unsure (1)..(87): unsure at all Xaa locations
  Clone ID: GOSHI-09MAY01-C25740_1.pep
MVESLQRYAVVTGANKGIGLAICKLLASKGVMVVLTARDEKRGLVALEKLKGXGISGHLVFHRLDVADPATITCLADFVKNKFGKLD

SEQ ID NO: 68050 - protein, 135 aa, Gossypium hirsutum
  Clone ID: GOSHI-09MAY01-C25770_2.pep
VGGFGIGMVYYGVPLGLGNLSVNLYLGVTLNALSELPASLITFFLIGKMKRKDSLLGFTILSGVCSVLCVVVGKVSPSLQIAMELISFFSACSAFNMSLIYTLELFPTCVRNSAISMVRQALVFGGVFSPLLVAA

SEQ ID NO: 68051 - protein, 297 aa, Gossypium hirsutum
  unsure (1)..(297): unsure at all Xaa locations
  Clone ID: GOSHI-09MAY01-C25770_1.pep
CLAGGLALASLADSTLGRKDMLLFSCLMMSFSSIFTVFSPNIWIYSVLRFINGFGRPTVGTCALVLSTELVGKRWRGQVGVVGFFCFTLGFLSLPVMAYVNRGSSWRTLYLWISVPTILYCILVHFLVHESPRWLFVRGRKEEAVLTLKSMAQANQSPITMSFSNVLIEQESWNVDIYSSIKILLNKRWAAKRLAAVMVGGFGIGMXVYYGMPLGLGNLSVNLYLGVTLNALSELPASLITFFLIGKMKRKDSLLGFTLLSGVCSVLCVVVGKRVLIYSMQWELLIFFNGCSAFKWT

SEQ ID NO: 68052 - protein, 56 aa, Gossypium hirsutum
  Clone ID: LIB3493-041-P1-M1-D12.pep
CRPFLPPIKESDTLLLNNPNSQPKLPKNADLAAPPFLLARLITRGHKFQQLRGQTR

SEQ ID NO: 68053 - protein, 130 aa, Gossypium hirsutum
  Clone ID: GOSHI-09MAY01-C25720_1.pep
QRSPERRRPSYSRRRSQSRSPYRRGSPTPVRRRSRSPYRRRSPTPVHCRSRSPIRRYRSPSPITRRRSPLSIRRRRSPSLVRRRRSPSPMLHGSRSPVRRRSPSPIRRKSPLPVRRRSPSPVRRRSPPSM

SEQ ID NO: 68054 - protein, 153 aa, Gossypium hirsutum
  unsure (1)..(153): unsure at all Xaa locations
  Clone ID: GOSHI-09MAY01-C25660_2.pep
PGLKDSGPRVVQERIRGGVSDLGLTLEGFLFLHALFIEKGRLETTWAVLRKFGYNDELKLRDDILPVPTKHAPDQTVELTNEAIDFLRGIFRLYDSDNDGSLQPSEFDDIFVTAPEXWALMTTLDPSYCLANLICIGYGCDPTSVLSVTRRRS

SEQ ID NO: 68055 - protein, 239 aa, Gossypium hirsutum
  unsure (1)..(239): unsure at all Xaa locations
  Clone ID: GOSHI-09MAY01-C25660_1.pep
VYGRLETTWAVLRKFGYNDELKLRDDILPVPTKHAPDQTVELTNEAIDFLRGIFRLYDSDNDGSLQPSEFDDIFVTAPESPWTVDPYVDAAERTPQGNLTINGFLSEWASLPPLDPSYCLANLICIGLGGDPTSALPGTRRRSVDRMKKQTEXNVFHCFVFGPKKSGKSALLNSFIGRPFSSNYTPTNDVRHVANAVEQIGGSQKTLILQEIPEDGVKKLLSNRECLAACDVAVFLYDR

SEQ ID NO: 68056 - protein, 96 aa, Gossypium hirsutum
  Clone ID: GOSHI-09MAY01-C25030_3.pep
STRSSTRSSTRPYFELVLISNVGGAGSIQSVSVKGSKTGWMSMSRNWGANWQSNAYLNRQSLSFKVTTTDGVTRLFPDIVPASWGFGQTFSSKVQF

SEQ ID NO: 68057 - protein, 176 aa, Gossypium hirsutum
  unsure (1)..(176): unsure at all Xaa locations
  Clone ID: GOSHI-09MAY01-C25030_2.pep
MAKSIFALPILLGLCYLATDVSAFTASGWTKAHATFYGGSDASGTMGGACGYGNLYSTGYGTRTAALSTALFNDGASCGQCYKIMCDYQADPKWCIKGTSVTITATNFCPPNFALPNNAGGXWCNPPLQHFDMAQPAWEKIGIYRGGIVPVLVQRVPPAPWPPPQQRSESDQSLQN

SEQ ID NO: 68058 - protein, 255 aa, Gossypium hirsutum
  Clone ID: GOSHI-09MAY01-C25030_1.pep
MAKSIFALPILLGLCYLATDVSAFTASGWTKAHATFYGGSDASGTMGGACGYGNLYSAGYGTRTAAWGTALFNNGASCGQCYKIMCDYQTDPRWCIKGTSVTITATNFCPPNFALPNNAGGWCNPPLQHFDMAQPAWEKIGIYRGGIVPVLFQRVPCKKHGGVRFTINGRDYFELVMISNVGGAGSIQSVSIKGSKTGWMAMSRNWGANWQSNAYLNGQSLSFRVTTTDGVTRLFPDIVPANWGFGQTFSSKLQF

SEQ ID NO: 68059 - protein, 100 aa, Gossypium hirsutum
  unsure (1)..(100): unsure at all Xaa locations
  Clone ID: LIB3149-063-Q1-K1-G10.pep
EGWFNPPFSXFDMAQPAWGKIGIYRGGIVPVLFQRVPCKKHGGVRFTINGRDYFXLGMISNVGGARSIQSVSIKGSKTVLMALSRNWGANWQSNPDLNGQ

SEQ ID NO: 68060 - protein, 118 aa, Gossypium hirsutum
  Clone ID: GOSHI-09MAY01-C25380_1.pep
MFRSINFIAMLVFLNFSRDITETAAASPLCDVVIFYLSPCEGFIKGGADPAPECCVGAKRLINELKAKEDRIELCLCLKAILPLLGPFDPNRVPLLGQKCGIKNFFPPITPATDCSKI

SEQ ID NO: 68061 - protein, 159 aa, Gossypium hirsutum
  Clone ID: GOSHI-09MAY01-C25200_2.pep
MGSEGSRVVVPRNFRLLEELERGEKGIGDGTVSYGMDDADDIYMQSWTGTIIGPPNTVHEGRIYQLKLFCGLDYPDNPPSVRFQTRINMTCVNQETGVVEPSLFPMLANWQREYTMEDILTQLKKDMMSPQNRRLAQPPEGNEEAGLDQKGLPLKCCIF

SEQ ID NO: 68062 - protein, 142 aa, Gossypium hirsutum
  Clone ID: GOSHI-09MAY01-C25200_1.pep
MGSEGSCVVVPRSFRLLEELERGEKGIGDGTVSYGMDDADDIYMQSWTGTIIGPPNTVHEGCIYQLKLFCGKDYPDNPPSVRFQTRINMTCVNQETGVVEPSLFPMLANWQREYTMEDILTQLKKEMMSPQNRKLAQPPEGV

SEQ ID NO: 68063 - protein, 99 aa, Gossypium hirsutum
  Clone ID: LIB3148-033-Q1-K1-A9.pep
PTRPQLKLFCGMDYPDNPPSVRFQTRINMTCVNPETKVVEPSLFPMLANWRREYTMEDILTQLKKEMISPQNRKLTQPPEGNDEARIDQKGLVVKCCIF

SEQ ID NO: 68064 - protein, 100 aa, Gossypium hirsutum
  Clone ID: LIB3149-006-Q1-K1-A11.pep
LEELERGEMGIGDGTVSYGMDDADDIYMQSWTGTIIGPPNTVHEGCIYQLKLFCGKDYPDNPPSVRFQTRINMTCVNQETGVVGDVILRTFYATICTESR

SEQ ID NO: 68065 - protein, 129 aa, Gossypium hirsutum
  Clone ID: GOSHI-09MAY01-C26960_1.pep
MGSDSKTNGRGGGDGGVQMSASVKKVVQNLKEIVNNSCTDWEIYAVLRDCNMDPSDAVQRLLSQDTFHEVKSKRERRKEMKETQEQKTRANSRASSHGVRDGSEHSFGRSRSMLISNELGKAACKKENV

SEQ ID NO: 68066 - protein, 336 aa, Gossypium hirsutum
  Clone ID: GOSHI-09MAY01-C26920_1.pep
CKEYNIDMSDLQCLSPTHEPRVSDHMEQIKDMITQIINKDFGYVVDGDVFFAVDKFPNYGKLSGQKLENNRAGERVAVDSRKRNPSDFALWKAAKPGEPSWDSSWGPGRPGWHIECSAMSAHYLSFKFDIHGGGLDLIFPHHENEIAQSCAACEESDVSYWMHNGHVTNNNEKMSKSLGNFFTIRQITERYHPLALRYFLINAHYRSPLNYSVVQLEGASDAVFYIYQTLKDCQDALLQLQEEMPNDGKPARITPDAKECISKLRNEFQVKMSDDLSTSLILTGAFLEALKLVNNLLTMLKKKQQKQQRLLVIQSLKEIQNEVTKVLDVLGLQPPC

SEQ ID NO: 68067 - protein, 446 aa, Gossypium hirsutum
  Clone ID: GOSHI-09MAY01-C26860_1.pep
MDEFAIVPNTATFNFVLKAMKQAKETEAAEKLLERMLQGGTESLSDDETYDLVIGMLFESQQFEAALNHIDMALKSGYKLSMRVFTECVACCVKQGRLDELATVIEMCKTTDQNRALYPNWTLCNYLAEVAMQADNSKLAFYALEFMAKWIARGENARPPFLLSVDQGLIVSALATAGRTYSSKLLDVSWAILRRSLRQKKVPNPESFLGKIYAHASLGNLQKAFGTLHEFEAAHGKSTNEAEDLFSPFTSLYPLVVACSKNGFETLDSVYFQLENLSRADPSYKSGAGLNWIILGCGNIWDIERAYQTFDAISSSFGLTPDIHSYNALIYAFGKLKKTFEASRVFEHMLSLGVKPNAKSYSLLIDAHLINRDQKAALSMIDKMVTSGFVPSKETLKRVRRRCIREMDYECDDKVESLAKKFRIRMGSENRRGILFDLDYGTEYAS

SEQ ID NO: 68068 - protein, 87 aa, Gossypium hirsutum
  unsure (1)..(87): unsure at all Xaa locations
  Clone ID: uC-gsflnu33B094g06b1.pep
SLGVKPNAKSYALLIDAHLINRDQKAALSMIDKMVTSGFVPSKETLKRVRRXDDKVESLAKKFRIRMGSENRRGILFDLDYGTEYAS

SEQ ID NO: 68069 - protein, 105 aa, Gossypium hirsutum
  unsure (1)..(105): unsure at all Xaa locations
  Clone ID: GOSHI-09MAY01-C26810_1.pep
PTRPVDFLQHKTMQMMYDIIYKALVETGLENRYEPHDFLNFFCLGNREVGDSLVARDATASSTPQALAKKNRRFMIYIHSXGMIVDDEYVIIGSAYINQRSMEGT

SEQ ID NO: 68070 - protein, 112 aa, Gossypium hirsutum
  Clone ID: GOSHI-09MAY01-C26590_1.pep
MGDHLVLCVDRLITPESLQSMQETEAAGSSGESSSQSSDPNACAIGVKEVEEHGCCDEEEPLIQTAECRICQEEDCIKNLETPCACNGSLKFAHRKCVQHWCNEKGDITREI

SEQ ID NO: 68071 - protein, 133 aa, Gossypium hirsutum
  Clone ID: GOSHI-09MAY01-C26570_1.pep
YPEDLSLECGRSSKQSVVYTESAVSPEMFDMVLLNCQSVTELQKVLQDETSKNVQQNGQLKGSNGGKARGKKHGGKKNMVDLRTLLTLCAQAVAADDWRSANELIKQIRQHSSPMGDGMQRIAHYFIDGLRHA

SEQ ID NO: 68072 - protein, 141 aa, Gossypium hirsutum
  Clone ID: GOSHI-09MAY01-C26450_1.pep
ETEKHLRHEKHYKYISSHDVAYWARSFDQDLVRACRDHYHKRYWRVGLGLAFRLVALEPNFRKLLGDTLNSAYKITSSRLILLDYDGTMMPPTSVNKGPSHEVISVLNRLCDDPKNIVFIVSGRDRDTLSKWFSSWGEMGI

SEQ ID NO: 68073 - protein, 309 aa, Gossypium hirsutum
  Clone ID: GOSHI-09MAY01-C26410_1.pep
MAKELEGFNFEQRHGKARVRVGRVWRSKDGCRHFMVEWNVNISLLSNCVAAYVRDDNSDIVATDTMKNSVYVKAKECSEQLSAEEFAILLGKHFTSFYPQVFTAIVKIVEKPWERISVNGQPHEHGFKLGSEKHTTEAIVQKSGVLQLTSGVEGLSLLKTTQSGFEGFIRDKYTALPETRERMLATEVTASWRYSYESVSSIPQKSLYLNEQYLNVKKALVDAFFGPPERGVYSASVQSTLLQMAKAVLGRFGDISSVKLKMPNIHFLPVNISSKDHGSIVKFNDDVYLPTDEPHGSIEASLSRFWSKM

SEQ ID NO: 68074 - protein, 177 aa, Gossypium hirsutum
  unsure (1)..(177): unsure at all Xaa locations
  Clone ID: LIB3825-021-Q1-K6-H12.pep
DPILGSVVFFSFLSLKLNIFFSLLIFGIFEYEQSGFEGFIRDKYTALPETRERMLATEVTASWRYSYESVSSIPQKSLYFNEQYLNVKKALVDTFFGPPERGVYSASVQSTLLQMAKAVLGRFGDISSVKLKMPNIHFLPVNISSKDHGSIVKXNDDVYLPTDEPHGSIEASLSRFW

SEQ ID NO: 68075 - protein, 213 aa, Gossypium hirsutum
  unsure (1)..(213): unsure at all Xaa locations
  Clone ID: AI055696.1.pep
KNTVYIKAKECSEQLSAEEFAILLGKHFTSXYPQVFTAIVKIVEKPWERISVKCQTHEHGFKLGIRKPSTETNGQKSWGLPLTSGVXSLSFLKTTQSGFERIITDTITGLSETRERMLATKVTDFWRYSYEYGSNIPXKSLYFNEQYLNVKKAFGDTFFWAPEQGXYNASFYSTFFQMAKAVLCRVVGKLLINYKKPKSLFNRGIYNKVPALF

SEQ ID NO: 68076 - protein, 39 aa, Gossypium hirsutum
  Clone ID: LIB3148-019-Q1-K1-G3.pep
TKREAEIYYTLLPPYTTFVLYLLGRVNGSVDGRVGGRVG

SEQ ID NO: 68077 - protein, 123 aa, Gossypium hirsutum
  Clone ID: GOSHI-09MAY01-C26790_1.pep
CLAWREVTKKGQKRITQPRFAFMTKSEADHLEDGYRWPKYGQKAVKNSPFPRSYYRCTNSKCTVKKTVERSSEDPTIVITTYDGQHCHHSVGLPRGGLISHEAAFAGQFTPGVSQFYYSQGVQ

SEQ ID NO: 68078 - protein, 141 aa, Gossypium hirsutum
  Clone ID: GOSHI-09MAY01-C26740_1.pep
PTRPALSLFSDQFIVQTLNVTFLVYLLAITLTLCALAVLEIKWSGIELEEWWRNEQFWLIGGTSAHLAAVLHGLLKVIAGIEISFTLTSKSAGDDVDDDFADLYIFKWTSLMIPPLTIIFVNLIAIAYGVLRTVYSDVPEW

SEQ ID NO: 68079 - protein, 58 aa, Gossypium hirsutum
  Clone ID: GOSHI-09MAY01-C26770_1.pep
ASLYLLLDDLFELNMCLRDPGYFVDAPRRIRGTLSMPQDVAYFLIVHSGVASLLYASL

SEQ ID NO: 68080 - protein, 143 aa, Gossypium hirsutum
  Clone ID: GOSHI-09MAY01-C26610_1.pep
EDIKVKQCPMMEQIIKGAEETEMDILLLPKLREIRLKSCSRLTSFCMGSITLECPSLNEIAVKDCPKMYAMASTREQEDIEIVGREKTPFFNHKVLCARLMFLNLSSTNIKKLWPDKPDWAISSNVLNLEYLSVKRCHNLEYL

SEQ ID NO: 68081 - protein, 146 aa, Gossypium hirsutum
  Clone ID: GOSHI-09MAY01-C26170_1.pep
MGEIFGDMKMKKMESDEFSFENSINASIASSSDLVDDATSSASSSNGPLYELSEMMAQLPIKRGLSKHYRGKSQSFTSLANVKSIEDLPKKVVRVRAKMMKSCKSYGWGLDGHHHHNKVYYSPKATISKKGSSSTRGLFMSSSLAT

SEQ ID NO: 68082 - protein, 142 aa, Gossypium hirsutum
  Clone ID: GOSHI-09MAY01-C26100_1.pep
FVLLDTRDNSYIVARDAIGVASLYIGWGLDGSVWISSEMKGLNDDCEHFECFPPGHLYSSKTGGFRRWYNPPWFSEAIPSVPYDPLVLRRAFENAVIKRLMTDVPFGVLLSGGLDSSLVASITARYWAGTKTAKHWEASSIL

SEQ ID NO: 68083 - protein, 251 aa, Gossypium hirsutum
  Clone ID: GOSHI-09MAY01-C26080_1.pep
MGEEQQNQSDVIPRVKLGTQGLEVSKLGFGCMRLTGIYNDPVPEDVDISIIKQAIDIGITFFDTSDIYGPKRNELLVGPPLRLLPRENVQLATEFDIVKSDPATGIAINGTSEHVRASVEASLKRLDVDYIDLYYQHRVDTKTPIEDTMGELKKLVEEGKIKYIGLSGASPETIRRAHVVHPVSAIKMKWPLWTRDSKDEIIPLCRELGIGIVPYSLLGRGFFGAGLLRKLCLQLVFGWRTWLKSMEAPLH

SEQ ID NO: 68084 - protein, 154 aa, Gossypium hirsutum
  Clone ID: GOSHI-09MAY01-C126048_1.pep
MMMEKHVDLDDVEDDSDDEKNDKNGSWLTTTPSTKLGSYEYFEKVLRKPKHILAPMVDQSELAFRLLCRKYNVNLCYTPMVHSRLLVEQRKYRKKYLVTCPEDRPLVTQLCGNDPAIVLQAALIAQERTDAIDMNFGCPQRIARRGYYGAFLMD

SEQ ID NO: 68085 - protein, 286 aa, Gossypium hirsutum
  Clone ID: GOSHI-09MAY01-C26060_1.pep
MGIVGNLSPQQRQSFDSQGFLVIESFASPAEIEAMRKRMDGMLQAFDPTTTASIFSTKNQVKLTSEYFYESAENISFFFEEKAFDDNGNLKQPKELSINKVGHALHEIDPVFKEFSCSEKVSSLLFSLGYKKPVIIQSMYIFKQPGIGGEVTPHQDNSFLYTEPKTCTGLWLALEDATVVNGCLWAIPESQKNGLVRRFIRGDDGVYFDRPSPSYDQKDFVPIEVKAGSLVVIHGDLIHQSFENQSSNSRHAYSLHAVDTDGCKWAEDNWIRRKVEPKPLYASGQT

SEQ ID NO: 68086 - protein, 123 aa, Gossypium hirsutum
  Clone ID: GOSHI-09MAY01-C26010_1.pep
MGEETECCRTKGPGYETPLKAMSGPKEALLYVTCVYTGTGREKPDFLATVDVDPNSPTYSKVIHRLSMPYVGDELHHSGWNACSSCHGDPSADRRFLILPSLVSGRVYVIDTQKYPKAPSLHK

SEQ ID NO: 68087 - protein, 176 aa, Gossypium hirsutum
  unsure (1)..(176): unsure at all Xaa locations
  Clone ID: GOSHI-09MAY01-C26000_1.pep
MVEPATATQAAAPVMPQLKDELDIVIPTIRNLDFLEMWRPFFQPYHLIIVQDGDPSKTIKVPPGFDYELYNRNDINKILGPKASCISFKDSACPCFXGYMVSKKKYIFTIDDDCFVAKDPSGKAVNALEQHIKNLLCPSTPFFFNTLYDPFREGADFVRGYPFSLREGVPTAVSHG

SEQ ID NO: 68088 - protein, 114 aa, Gossypium hirsutum
  unsure (1)..(114): unsure at all Xaa locations
  Clone ID: AI054847.1.pep
MVEPATATQAAAPVMPQLKDELDIVIPTIRNLDFLEMWRPFFQPYHLIIVQXGDPSKTIKVPPGFDYELYNRNDINKILGPKASCISFKDSVXRCXXGTLVSKKKYIFTIDDDC

SEQ ID NO: 68089 - protein, 111 aa, Gossypium hirsutum
  Clone ID: LIB3584-020-P1-K1-E1.pep
VPPGFDYELYNRNDINKILGPKASCVSFKDSACRCFGYMVSKKKYIFTIDDDCFVAKDPSGKAVNALEQHIKNLLCPSTPFFFNTLYDPFREGADFVRGYPFSPREGVPTA

SEQ ID NO: 68090 - protein, 96 aa, Gossypium hirsutum
  Clone ID: GOSHI-09MAY01-C26030_1.pep
LNCRPRVDLLSILAVPPSLLRLSFICHNRKILSNNNIHRCITSTLAFTPLFLFLISVVSLAACNSQFLLFLFSLHLRPILPTWILGKFDSFFVLLL

SEQ ID NO: 68091 - protein, 187 aa, Gossypium hirsutum
  Clone ID: GOSHI-09MAY01-C26360_1.pep
MAPKSFSFPGIFPALLASSLALLLLPTPIIAVHDYHDALRKSILFFEGQRSGKLPPDQRVKWRRDSALRDGSTAGVDLTGGYYDAGDNVKFGFPMAFTTTLLAWSIIDFGRNMRPELKNAVKAVKWSTDYLLKATAKPGVVYVQVGDAYSDHSCWERPEDMDTLRTVYKIDNAHPGSDVASETAAAL

SEQ ID NO: 68092 - protein, 86 aa, Gossypium hirsutum
  Clone ID: GOSHI-09MAY01-C26310_4.pep
TSIRKRRWYCDSCSGRYCGRSNVCCFADFRHPLVEGLFKTEENFGTRYLGRISLYSVAYTSRATSLFYGFPFFFILIFVTIDMLCD

SEQ ID NO: 68093 - protein, 248 aa, Gossypium hirsutum
  unsure (1)..(248): unsure at all Xaa locations
  Clone ID: GOSHI-09MAY01-C26310_3.pep
LAFALFGPQESQLTLDWPTRMKICIGIARGLAYLHEESRLKIVHRDIKATNVLLDKNLNPKISDFGLAKLDEEDNTHISTRVAGTYGYMAPEYALHGHLTEKADVYSFGIVALEIVSGRCNTRSRPKQEPVILLEWAHVLKENGSLLEXVDTGIGSDCNTDEVMAMINIALLCTNPTSSARPLMSSVVSMLEGKAEVQEYLTDSSISSNRQMSAEIMKKLYRKLEEDDTNVSQTRSMLADGPWTNSST

SEQ ID NO: 68094 - protein, 178 aa, Gossypium hirsutum
  unsure (1)..(178): unsure at all Xaa locations
  Clone ID: AI055189.1.pep
DFHASNKIGEGGFGPVYKGTLADGTVIAVKQLSARSKQGNREFVTEIGMISALQHPHLVKLSXCCIEGNQLMLIYEYLENNSLARALFGTQESQLTLDWPTRMKICIGIARGLAYLHEESRLKNVHRDIKATNVLLXDRXLNPKISDFGMANLMKKIYPLNTRMHDLCYMALICIDGH

SEQ ID NO: 68095 - protein, 205 aa, Gossypium hirsutum
  unsure (1)..(205): unsure at all Xaa locations
  Clone ID: AI054665.1.pep
MFAALLILGILWWKGCLRQKRTLEQDLKGIELQTTSFTLRQIKAATNDFHASNKIGEGGFGPVYKGTLADGTVIAVKQLSARSKQGNREFVTEIGMISALQHPHLXKLLRCCIEGNQLMLIYEYLENNSLARALFGPQESXLTLNWPTRMKICFGXARGVAYLHEESCLKYVLVDYXATNVLVGKNLTPNNPLLVGQLFEHIIPH

SEQ ID NO: 68096 - protein, 286 aa, Gossypium hirsutum
  Clone ID: GOSHI-09MAY01-C26330_1.pep
SRSYYGSIASLSPSFRSVIRSGEIYKSRRQKGVTEHWVHFSCDLLQWEAFDPIQCKWMHLPPMPPNGCFIFGDKESLAVGTELLVFGKELNSQVIYRYSILTNSWTFGTSMNSPRCLFGSASLGEIAILAGGCDSQGNILSTAEMYNSETQKWETLPSMNTPRKMCSGVFMDKKFYVIGGTGGVGNDARVLTCGEEYDLELKKWTKIPNMSVAAGEAEKPVAPGAPPLVAVVNNELYAADHADMEVKKYDKEKKSWLTIGRLPERAVSMNGWGLAFRACRDRLIVI

SEQ ID NO: 68097 - protein, 126 aa, Gossypium hirsutum
  unsure (1)..(126): unsure at all Xaa locations
  Clone ID: GOSHI-09MAY01-C26320_1.pep
EELIVRVLCPFDGIGRVIGRAGSTIKSIRQASGARIDVDDTKADRDDCIITVIATESPDDLKSMAVEAVLLLQGKINDEDYETVIMRLLVPSKVIGCIIGKXGSIINEIRKRTKAGVRISKKDKPK

SEQ ID NO: 68098 - protein, 144 aa, Gossypium hirsutum
  Clone ID: GOSHI-09MAY01-C26210_1.pep
PYVRRVGSRRLSLESNAGGGATQVSKKVDLSQVLSAMLPFVVAITAVAALVQPSTFTWVSNDLYAPALGGIMLSIGIRLSFDDLTLAFKRPLPLSVGFIAQYLLKPALGFLVAKAFCLSPTFYAGFILTSCVARAQLSSYASFL

SEQ ID NO: 68099 - protein, 217 aa, Gossypium hirsutum
  Clone ID: GOSHI-09MAY01-C27900_1.pep
MKGGDEEVAAPAGPPQPLDWKFSQVFGERTAGEEIQEVDIISAIEFDKTGDHLATGDRGGRVVLFERTDAKDHGLSRRDLERTDYPISRHPELRYKTEFQSHEPEFDYLKSLEIEEKINKIRWCQTANSALFLLSANDKTIKFWKVQEKKIKKISKIIADPSKAVGNGNVASSSNSNSPKSFLANGVSPDRSCNHLGNDISFPPGGLPSLCLPVVTS

SEQ ID NO: 68100 - protein, 117 aa, Gossypium hirsutum
  Clone ID: GOSHI-09MAY01-C27890_1.pep
IMTSFISTHCCNWSVGVSEHVCSSRGRFHKPPGLRCCGPYFHLGGFSFSRGQAQCFAATSSQSRGRCGPIFSGAVDDGGADSGDAEDGDGQKESSQSENQGTNGDILRENLERIVGT

SEQ ID NO: 68101 - protein, 145 aa, Gossypium hirsutum
  unsure (1)..(145): unsure at all Xaa locations
  Clone ID: GOSHI-09MAY01-C27540_1.pep
TLFDISGNLMSGSIPRFNQSVCPGFSSLSYGLLQTRDPVFVYLSLFAYKTRHAMVFPFSGSKAVLIHNFGGNSFSGSLPGLPGVPTRLEKQIDYAFLAGGNKLTGSFPGSLFGNCNKLHGLXLELDSKNKLSGHIPFGISAICRS

SEQ ID NO: 68102 - protein, 134 aa, Gossypium hirsutum
  Clone ID: GOSHI-09MAY01-C27710_1.pep
KVLQLSVLSFLIVILSLNGATLAHPYGDFLHCLSLRISNSSTISKVIYTQNNPSYSSVLNASIHNTRFATPTTPKPYAIITPLKTSHVQSTIYCSKNHGFQLRIRSGGHDVEGVSYVSQVPFVVLEFLGQLSRC

SEQ ID NO: 68103 - protein, 64 aa, Gossypium hirsutum
  Clone ID: GOSHI-09MAY01-C27190_1.pep
SFALRDLKSFITEFSSCFEIAFLKSKSDPFITIDQILETCQAQLVYLFISPTWKFYCLISDVCF

SEQ ID NO: 68104 - protein, 118 aa, Gossypium hirsutum
  Clone ID: GOSHI-09MAY01-C27170_1.pep
QAGIPHEVLNAKPENVEREAEIVAQSGRLGAVTIATNMAGRGTDIILGGNAEFMARLKLREMLMPRVVKPAGGVFVSVKKPPPMKPWKVNEKLFPCKLSDKNTKLAEEAVELSVNTWG

SEQ ID NO: 68105 - protein, 139 aa, Gossypium hirsutum
  unsure (1)..(139): unsure at all Xaa locations
  Clone ID: GOSHI-09MAY01-C27160_1.pep
MESELKDLNSKPAKIQQPDTTHDDTSSKDDRPLLKADSSSTAAAAANIHELEKKFAAYVRNDVYGTMGRGELPLKEKIMLGISLVTLLPLRIVFGMSLVVGYYLICRICTMFSAPXPEEEEEGYAHLGGWRRAVIVRSG

SEQ ID NO: 68106 - protein, 215 aa, Gossypium hirsutum
  Clone ID: GOSHI-09MAY01-C27050_1.pep
MLQCIFLLSDSGEVMLEKQLTGHRVDRSICDWFWDHVISQGDSFKSQPVIASPTHYLFQVVREGITFLACTQVEMPPLMGIEFLCRVSVGRSDYLGGLNEDVIKDNFVIVYELLDEMIDNGFPLTTEANILREMIAPPNIVSKVLSVVTGNSSNVSDTLPGATRSCIPWRAAEPKYANNEVYVDLVEEMDAVINRDGALVKCEVYGEVRVIPIYG

SEQ ID NO: 68107 - protein, 171 aa, Gossypium hirsutum
  Clone ID: GOSHI-09MAY01-C20990_1.pep
MAMAMAMAEALWLLLSPLLFLSVSALTQTKLTDNPADELVAVLNANRTAHKSSSLADNPGLACIALQYIKAYQGDCEAVGGSDAKKPPDSEFAQTFAPYCGVDASTLSPITGRFLGCQSKYVQPSEAFSMLIKNEKSLEILYNKNQTEIGAAVTGTDGGAPYFWCVLVSNG

SEQ ID NO: 68108 - protein, 128 aa, Gossypium hirsutum
  Clone ID: LIB3083-055-Q1-L1-H2.pep
GVDASTLSPITGRVLGCQSKYVQPSEAFSMLIKNEKSLEILYNKNQTEIGAAVTGIDGGAPYFWCVLLSNGKHNSCFDLEDGVAKISRPGCFSRANDDCSITDGPSPIGHNWVYAITAFIAMGYAFCL

SEQ ID NO: 68109 - protein, 80 aa, Gossypium hirsutum
  unsure (1)..(80): unsure at all Xaa locations
  Clone ID: LIB3120-023-Q1-K1-B3.pep
LKITTMAMAMAMAEAVWLLLAPFLFLSGSALTQTKLTDNPTDDLVAVLNANRTAHKSSSLADNPXLGCIALQYIKAYQGD

SEQ ID NO: 68110 - protein, 120 aa, Gossypium hirsutum
  Clone ID: GOSHI-09MAY01-C20870_1.pep
MADGEDIQPLVCDNGTGMVKAGFAGDDAPRAVFPSIVGRPRHTGVMVGMGQKDAYVGDEAQSKRGILTLKYPIEHGIVNNWDDMEKIWHHTFYNELRVAPEEHPVLLTEAPLNPKSHREK

SEQ ID NO: 68111 - protein, 140 aa, Gossypium hirsutum
  Clone ID: GOSHI-09MAY01-C20590_1.pep
KSACPCLLIRVLRETPAHDSAARTSTEQLPKDQKNGKIRNSLGSKRPENIDDEPRDSDNSTSLPHFMQATESARAKVNAKNSPRSSPDVQDRDIYIKKRHPLPAANGRQGSPRITRSVAKAQQGAKENGSTNPIHEKWQR

SEQ ID NO: 68112 - protein, 66 aa, Gossypium hirsutum
  Clone ID: GOSHI-09MAY01-C20580_1.pep
IQPKDEMIKGYQLALWDYNYIVGDSHFIYKLDILPHAIVIMLYHASVNSQTTNLFFHNIAKHMHNS

SEQ ID NO: 68113 - protein, 275 aa, Gossypium hirsutum
  Clone ID: GOSHI-09MAY01-C120568_1.pep
FSILELVSSVDDEQICYDHLAFRTFGVNGYGINSLASLFLDYGYTQKEELRFPAKKLKALWFSPPNSSSQDGGSGVNGPLPRVFISELLVDQLNPRAQEIIRKYARKSGSGNKYAALASALGSLTWEKPLYSEFQQLAGESEYAAWTLVNGYALNHVTISTHRLKSNLRNIKSLNEFIKKNGFKLNSDGGVLKVSPDGLLLQSSTVADSMPFSFSDGVVESVPCSYIEFAERLVLPQYKNLSESEIKEFHRRDGSEVGNADIIFESTSKEQLTWR

SEQ ID NO: 68114 - protein, 57 aa, Gossypium hirsutum
  Clone ID: GOSHI-09MAY01-C20520_1.pep
MADDSTATCVDILLAIILPPLGVFLKFGCQVEFWICLVLTLFGYIPGIIYAIYAITK

SEQ ID NO: 68115 - protein, 89 aa, Gossypium hirsutum
  Clone ID: uC-gsflnu33B113e05b1.pep
PPSSSPKPAPKISPTTAPTVSPTASPPSTASPPAPPTSPTGSPGATSPTTSISQPPASSPTAPSAAALKTVTLAGSAFAVVLAAAALLI

SEQ ID NO: 68116 - protein, 122 aa, Gossypium hirsutum
  unsure (1)..(122): unsure at all Xaa locations
  Clone ID: uC-gsflnu33B080h02b1.pep
YRFDPRARLXFRTRDRAEGGPFEGFFPLAKPSARWLLLALIAGCALGQAPSCAPTMSPPSSSPKPAPKISPTTDPTVTPTATPTLTATPPCSAPESSPTFLSCCSSQPVHWFSRRYFSYQPP

SEQ ID NO: 68117 - protein, 158 aa, Gossypium hirsutum
  unsure (1)..(158): unsure at all Xaa locations
  Clone ID: GOSHI-09MAY01-C20740_1.pep
PGGIILHGKXSYGRGPEDDETPQIPVITGVRSRPVSGEFPGAGALAYGEHMPNASLHKRVHPYPMSETEGAERWDDKKEGGWKERMDDWKMHQGNLGPEADDAYDDMSMLDEARQPLSRKVPIASSKINPYRMVIVARLLILAFFLRYRILNPVHDAI

SEQ ID NO: 68118 - protein, 145 aa, Gossypium hirsutum
  Clone ID: GOSHI-09MAY01-C20770_1.pep
MKMVSIELSPELIPGLPEEIGLDCLIRFHYSTYRVAARVCRRWQQHLQSRELHYLRKQAGYTRKAACLVQLLNNTSDSAGSKPVGPPTYGLTVFDPVSGIWDRIDPVPKYPYGLPLVCQIASSEGKLVVMGGWDPSSYDPVRDVF

SEQ ID NO: 68119 - protein, 231 aa, Gossypium hirsutum
  unsure (1)..(231): unsure at all Xaa locations
  Clone ID: GOSHI-09MAY01-C20630_1.pep
PRVRTFVYSAATVKQMLQEKKSSSSRPLNVAAEKDRLRRDLEIAQSKHDDAEVERIKKRLQQLEASRQSQEKDAKAVRLAEMNRKNRVENFKNASGLKPVNTGLKAGEAGYDPFSRRWTRSRNYYNAKAPGGDAAAVANGDTNGAIGSGNGNDAGAAAAEAGRAATAAALQEAAGAGKLVXTNAPVDEGTESNMLHDFELPISLDVLSEVRWSQGARGAGFMARKQRIEAT

SEQ ID NO: 68120 - protein, 117 aa, Gossypium hirsutum
  Clone ID: GOSHI-09MAY01-C20180_2.pep
DQEKHVVGTFHGRKMRCNANLTSMYNRETILSKFCGHRNSVIALLYYWYKYLVGLSTHQDFHALGMKNTRKNLTKIMRREPSTAGMIELQCRTSSTILQASIWYNLPYLVISLVPLP

SEQ ID NO: 68121 - protein, 75 aa, Gossypium hirsutum
  Clone ID: GOSHI-09MAY01-C20180_1.pep
KTLEKNLTKIMRREPSTAGMIELQCRTSSTILQASIWYNLPYLVISHVPMPQHYSRTILDSNKSLIAVESIAYEI

SEQ ID NO: 68122 - protein, 339 aa, Gossypium hirsutum
  Clone ID: GOSHI-09MAY01-C20150_1.pep
MASFNHPPSHRTHVPLPSDSGGNPFDDEASPVPIHIVTNASQLPAEFLNPSPEKQLVVGFDCEGVDLCRNGTLCIMQLAFQDAIYLVDAIEGGEVLINACKPALESSYIQKVIHDCKRDSEALYFQFGIKLNNVMDTQIAYSLLEEQEGQTRLPDDNISFVGLLADPRYCGISYQEKEEVRLLLRQDPKFWKYRPLSELMVRAAADDVRFLLYIYHMMMKKLNERSLWHLAVRGALYCRCFCINDNNYADWPSIPPIPDNVMVEGDAPEEEILSILDVPQGKMGRVIGRKGVSILSIKESCNAEIHFGGAKGPPDKVFILGPVRQVRKAAAMLRGRMMD

SEQ ID NO: 68123 - protein, 91 aa, Gossypium hirsutum
  Clone ID: LIB3829-018-Q6_N6-H12.pep
ADWPSIPPIPDNVMVEGDAPEEEILSILDVPQGKMGRVIGRKGVSILSIKESCNAEIHFGGAKGPPDKVFILGPVRQVRKAAAMLRGRMMD

SEQ ID NO: 68124 - protein, 93 aa, Gossypium hirsutum
  Clone ID: uC-gsflmaxxa093g11b1.pep
DDVRLLLRQDPKCWKYRPLSELMVRAAADDVRFLLYIYHMMMKKLNERSLWHLAVRGALYCRCFCINDNNYADWPSIPPIPDNVMVERGCHCL

SEQ ID NO: 68125 - protein, 82 aa, Gossypium hirsutum
  unsure (1)..(82): unsure at all Xaa locations
  Clone ID: GOSHI-09MAY01-C20170_1.pep
CVHELSCNGNKFHXCVFHLTSPSLLVIGCYQSLELWNMTEGKTKTLSAHEGLIAALAVSPVTGLVSSASHXSLINLWKSYNC

SEQ ID NO: 68126 - protein, 96 aa, Gossypium hirsutum
  Clone ID: uC-gsflnu33B091a02b1.pep
SANLAITISNSSFFWHLLWNWLSVIKLKIKTKTKDIKLEASVQNQTLDKNKLNAGETFSNTRINKQKNFFRCHTKIFQAVLRSDVLWFYTLYFRKS

SEQ ID NO: 68127 - protein, 141 aa, Gossypium hirsutum
  Clone ID: uC-gsflnu33B005d03b1.pep
SRVRFDGAEAFAREQGLETVEMSHFITPENIERLKQAQESDRVQLDYTQPIPKEVPKEAAVADGDSQIGTVGCVAVDSEGSLATATSTGGIVNKMVGRIGDTPIIGAGTYANHLCAISATGRGEAIIRGTIARDVAAVMEF

SEQ ID NO: 68128 - protein, 142 aa, Gossypium hirsutum
  unsure (1)..(142): unsure at all Xaa locations
  Clone ID: GOSHI-09MAY01-C120008_1.pep
VLRASTEDCVISGYEIPEGTRLFVNVWALGRDPNQCENPLEFIPERFLSEECRQGKNQFLDVRGQHFSLLPFGSGRRSCPGASLALQVVPTVLGIMIQCFDWKVRDGAHGTGNMEEKAGMTLLRAHPLVCXPVTRLSPFPPA

SEQ ID NO: 68129 - protein, 61 aa, Gossypium hirsutum
  Clone ID: GOSHI-09MAY01-C20350_1.pep
KFARRSVSDADIRKYQAFAQTLQQSRGFGSEFKFAETGSRAATSDPFATTAGGADEDDLYS

SEQ ID NO: 68130 - protein, 196 aa, Gossypium hirsutum
  Clone ID: GOSHI-09MAY01-C20360_1.pep
MMAEEEGQSLPYVSEIVLKKRKIRDELAITRRTQLELGKYGAKKSKKQSDVSDIKRPEQLIKEFRDKELDLIRTKQRAKRPKSMIPTIKSKLLFIIRIQGKNDMHPKTRKILYNLRLRKVFSGVLVKATDGVIHMLQKVEPYVTYGYPNLNNVKELAYKKGYALIDKKANPQTDNNIIEQTLGKHCIICIVDIIHE

SEQ ID NO: 68131 - protein, 134 aa, Gossypium hirsutum
  Clone ID: uC-gsronu33B040b02b1.pep
MHPKTRKILYNLRLRKVFSGCFVILFLFVLIILFLFFSFSFLVYSTFFILFFFSFILPLITFFYFLFIFFIFFLFFFCFFNFFYITIFFFILLFFIFFNLIIFLSLLFSFFLYPSFFSFIFFFFFLFFYILFFF

SEQ ID NO: 68132 - protein, 173 aa, Gossypium hirsutum
  unsure (1)..(173): unsure at all Xaa locations
  Clone ID: GOSHI-09MAY01-C20300_1.pep
MNSSEGKLKSSSSELDLDRPNIEDYLPSGSSIQEPHGKLRLRDLLDISPALTEAAGAIVDDSFTRCFKSNPPEPWNWNVYLFPLWCCGVVFRYLILFPMRALVLTIGWIIFLSCFIPVHFLLKGNDNLRKKMERALVELICSFFVASWTGVGKYHGPRPXMRPKQVFVANHTS

SEQ ID NO: 68133 - protein, 128 aa, Gossypium hirsutum
  unsure (1)..(128): unsure at all Xaa locations
  Clone ID: GOSHI-09MAY01-C21960_1.pep
MQKPPPQSVDFALKQTSPNIGAGXVTRDKLSCTYDLVEQMQYLYVLVVKAKDLPGKDVTGSCDPYVEVKLGNYKGVTKHFEKKSNPEWNQVFGFSKERIQASILEVFVKDKDVVVDDLIGRVVFDVNE

SEQ ID NO: 68134 - protein, 85 aa, Gossypium hirsutum
  Clone ID: GOSHI-09MAY01-C21850_1.pep
LSFNDKTWYNPYINYTKIFTLVLFFHVHLHFACSYNIQTKDFIRARIYMYNLDNHASKKEREHFSFRRGGSAVDATLCGVWTLCF

SEQ ID NO: 68135 - protein, 89 aa, Gossypium hirsutum
  unsure (1)..(89): unsure at all Xaa locations
  Clone ID: GOSHI-09MAY01-C21490_1.pep
MGSRFPSHQLSSGLYVSGRKEQPKERTPTMSSVPMPYTGGDIKKAXELGKMCDIPVDGSKARKSGPISSAPSRTGSFGVAASHSGPIIP

SEQ ID NO: 68136 - protein, 183 aa, Gossypium hirsutum
  Clone ID: GOSHI-09MAY01-C21440_1.pep
PRVRANGGGASSRRTTIASLPSNKPAKSGPGNTAAKPSSSSESVDSKPIAATMQSKEDDDAHSTTSATSRSTRRSSGSGFTFRLEERAEKRKEFLSKLEEKIHAKEVEKNNLQAKSKENQEAEIKQLRKSLTFKATPMPNFYKEPPPKVELKKIPTTRAISPKLGRNKSNVAATNNPSEVDGS

SEQ ID NO: 68137 - protein, 186 aa, Gossypium hirsutum
  Clone ID: GOSHI-09MAY01-C21470_1.pep
EARKREEAERRRKEEAEHKAKMDEIAEKQRQRERELEEKERLRREALLGRALEGISRPSEIPAGSHSTEPVVAAPAAAAAAPAPGKYVPRFRLRPESSGPAPPSEPDRWGKPAPLEPDRWAAGSRAPPSQSDRWTSGSRAPPQDSDRLAGGGSRATPPDSNRFGGGSGSSKAEPWRPSRARNPQRG

SEQ ID NO: 68138 - protein, 274 aa, Gossypium hirsutum
  unsure (1)..(274): unsure at all Xaa locations
  Clone ID: GOSHI-09MAY01-C121428_1.pep
MNSQSWLEFLLFLSLSSLFLSLSSSTNDTDTLTLFRRQADTHGNLISNWTGRDACSSAWHGVVCSSTGRVISLSLPSLSLRGPIAALSLLDQLRILDLQNNRLNGTVSPLTNCSNLKLVYLSDNDFSGDIPPEISRLKRVLRLDLSNNNIRGNVPKEISGLKRLITLRLQNNALTGEIPDFFSSFKSLKELNLTNNEFFGRLPGSLLKKFSEKSFVGNEGLCGSNPFPVCSFTGSPPLDTPTQTVPSNPSSMPRTPIIEQRDXKAHKGLTPGAI

SEQ ID NO: 68139 - protein, 61 aa, Gossypium hirsutum
  Clone ID: GOSHI-09MAY01-C21430_1.pep
MASSMEFFLLVFVSVFALMASAMAAEAPAPSPTSGTGSITPSFVSVFAAAVALLFGSTLVL

SEQ ID NO: 68140 - protein, 119 aa, Gossypium hirsutum
  Clone ID: GOSHI-09MAY01-C21670_4.pep
MALVVYWYDFICFGVVAAAFIGSLWVLWKKEAASRCDEESVYESLLEARPDADGFIRATPRAHVGSNQLWTSCWIRVHPGWLVLTRFVSFAVMAGFLVWDIVEWDASIFVYYTEWTFVL

SEQ ID NO: 68141 - protein, 123 aa, Gossypium hirsutum
  unsure (1)..(123): unsure at all Xaa locations
  Clone ID: GOSHI-09MAY01-C21670_2.pep
VIVPFLSNSHLGLNTLMGRAPALNAMFLILDTLLNSLPFPWFRLAYFVQWSCLYVVFQWVLHACGFTWWPYPFLELNTPWAPLWYFALALVHIPCYGMYALIVKAXKNSILPRLFPHALVRSY

SEQ ID NO: 68142 - protein, 265 aa, Gossypium hirsutum
  Clone ID: GOSHI-09MAY01-C21670_1.pep
MALVVYWYDFICFGVVAAAFIGSRSPRVRKGTASRCDEESVYESLLEARPDADGFIRATPRAHVGSNQLWTSCWIRVHPGWLVLTRVVSFAVMAGFLVWDIVEWDASIFVYYTEWTFVLVMVYFALGTAISAYGCWVCFTTPLPENSLRDEFVKTDVEEGRIANSVTYQAKNVWCKIKLQSHYAQEEFQRRAGFWGYLMRIIYQTCGGAVILADIVFWLVIVPFLSNSHLGLNMLMGCMHTVNAVLLILDTLFNSLVSILHLFLL

SEQ ID NO: 68143 - protein, 129 aa, Gossypium hirsutum
  unsure (1)..(129): unsure at all Xaa locations
  Clone ID: LIB3493-018-P1-M1-E7.pep
MQIIYQTCGGAVILTDIVFWLVIVPFLSNSHLGLNMLMGCMHTVNAVLLILDTLFNSLPFPWFRLAYFVQWSCLYAIFQWVLHACGFTWWPYPFLELNTPWAPLWYFXMAVVHIPCYGIYALIVKAKNS

SEQ ID NO: 68144 - protein, 155 aa, Gossypium hirsutum
  Clone ID: GOSHI-09MAY01-C21140_2.pep
MTVPESQGTPSSQVSIKSKKKKTEKSGQKRKSFSTAKGSPTADRNSGAKSSTEQPSKDQRSGKRHNSFGSTKPDNIDEEPRDSNSSNSLPRFMQATESARAKVNANNSPRSSPDVQNGDLYIKKRHSLPGANGKQHSPRIQPSSGAKGNDRKWQR

SEQ ID NO: 68145 - protein, 254 aa, Gossypium hirsutum
  Clone ID: GOSHI-09MAY01-C21140_1.pep
GRSAPRVDVRKLESIRHKTERDSLDQTIETEAHCLDVGVESLDAVLSGADTISRSKEPSITENPVLHDRKGQHDGSECGTELSVTSTLDSPDRYEVGTVEYENGVKVSEQENCSSNGAKDLDVKENATIAILVPGSSLSIANQPNKLDDTKGELANLVAVDSPRVEHEPCRLSPEASPRSHMTVPESQGTPSSQVSIKSKKKKTEKSGQKRKSFSTAKGSPTADRNMVPSNIEQPPRSKKRKRPNLWFTKLNTR

SEQ ID NO: 68146 - protein, 99 aa, Gossypium hirsutum
  unsure (1)..(99): unsure at all Xaa locations
  Clone ID: LIB3083-059-Q1-L1-E6.pep
NLITYFGGGFXYEAGLPTSSXTXDLERTRIDNMSTFYLKETSLDQTIETEAHFXDVGVESLDAVSSGADTISRSKEPNIAENPVLRDRKGQHYGSECGT

SEQ ID NO: 68147 - protein, 73 aa, Gossypium hirsutum
  Clone ID: GOSHI-09MAY01-C121098_1.pep
RWNWRTMISKGFNCCTALILTITVPPLRIRRRERVATAFPVIWVHGGALLYSWPLDLGLYFCRFFISCSVDYE

SEQ ID NO: 68148 - protein, 239 aa, Gossypium hirsutum
  unsure (1)..(239): unsure at all Xaa locations
  Clone ID: GOSHI-09MAY01-C21060_2.pep
SLASGPGGFPITRPGAGGLMPGMPGTRRMPGMPGMENDNWEVPRTRSMPRGDGLGMLPGGRVPSPSINKPTSVNPRLLPQGSGALMSGRTSALLQGSSSPPVAQPSLPAKPVLVAAVSPVLEKPVTPASRLNQDEPSRKTKALLEEYFSVRLLDDALQCVEELKSPGYYPEVVKEAISIALEKIPPCVEPVSKLIKYLFIKKVLTARDIXTGCLLYXALFDYIGIDLPKAPNNFREIIW

SEQ ID NO: 68149 - protein, 443 aa, Gossypium hirsutum
  unsure (1)..(443): unsure at all Xaa locations
  Clone ID: GOSHI-09MAY01-C21060_1.pep
RTLGNIRGIGELLKQKMVPEKIVHHIVQELLGHDTKGCPVEENVEAICQFFNTPAXQLDESPKXRRINDAYFNRLKELATNPQLAPRLRFMVRDVLDLRANNWVPRREEVKAGTITEIHSEAEKNLGLRPGATASIRNSRVVSVGPMSPGPGGFPITRPGTGGLMPGMPGTRRMPGMDNDNWEVPRSRPMPRGDGLGTQSGGRGASPVVNKSTSMNQRLLPQGSGGLMSGRTSALLQGSSTPPAKPPNSILGAESVAQPSLSPKPAPVEKPLTQAARLNTDDLQRKTRALLEEYFSVRLLDEALQCVEELKSPAYHPEVVKEAISIALEKSPPCVEPVSKLLEYLFIKEVLTARDIGTGCLLYGALLDDIGIDLPKAPNNFGEIIGKLVLAGGLDFKVVKEILKKMEDDMYQNAVFDATMRIISLDPSGKVSVRCSGDRMCCP

SEQ ID NO: 68150 - protein, 127 aa, Gossypium hirsutum
  unsure (1)..(127): unsure at all Xaa locations
  Clone ID: LIB3083-056-Q1-L1-G6.pep
VEAICQFFNIIGKRAWXSPKSRRINDVYFNRLKELTTNPQLAPRLRFMDRDVLDLHANNWVPKREEVKAKTITEIHSEAEKNLGLRPSATASIRNTRVDSASPMSPGPGGFTINRSDTGGMMPAMPG

SEQ ID NO: 68151 - protein, 192 aa, Gossypium hirsutum
  unsure (1)..(192): unsure at all Xaa locations
  Clone ID: GOSHI-09MAY01-C21000_1.pep
YVAPEVLDRSYGTEADMWSIGVIAYILLCGSRPFWARTESGIFRAVLKADPSFDESPWPSLSPGAMEFVKRLGNTDYRKRLTAAQALSHPWLANCHDIKIPSDMIICRLVKTYIGSSTLRRATLGALAKTLTIPQLAYLRXQFSLLGPNKSGFILMQNFKMVMLENSTDAMNDSRVLDYVNMISSIQYRKLD

SEQ ID NO: 68152 - protein, 169 aa, Gossypium hirsutum
  unsure (1)..(169): unsure at all Xaa locations
  Clone ID: GOSHI-09MAY01-C21340_1.pep
DIGTVYLCRLADVDEXSCYAMKVVDKDVLVMKKKXHRAEMEKKILKILDHPVLPTLYPXFEPSNFSCIVMEYCSGGDLHSLTHKQPQKRFSLNSAXFYAAEVLVALEYLHMLGIIYRDLIPENVLVRSDGHIMLSDFDLSLCSDAIPAAESPSSSPDPMPPQNQCCNLT

SEQ ID NO: 68153 - protein, 231 aa, Gossypium hirsutum
  unsure (1)..(231): unsure at all Xaa locations
  Clone ID: GOSHI-09MAY01-C21300_1.pep
PTRPGKSHPWVEAISKKVKDNVXKMEAQLAKDVVPFNFLTPMRIIRDAILGVGSPAPVVVSEGANTMDVGRSVLVQTEPRTRLDAGTWGTMGVGLGYCIAAAVANPERLVVAVEGDSGFGFSAMEVETLVRYKLPVVVIVFNNGGVYGGDRRSPEEVSGPFKDDPAPTSFVPGAAYHTLIEAFGGKGYLVGTPDELKSALSESFSARKPVVINVIIDPFAGAESGRMQHKN

SEQ ID NO: 68154 - protein, 185 aa, Gossypium hirsutum
  unsure (1)..(185): unsure at all Xaa locations
  Clone ID: GOSHI-09MAY01-C21240_1.pep
TFLMALVVXLCWQISVLLAAMFLVFFWFSEGVYLSSALMKVPQGGWVPLVLSVISMLGMYIWHYGTRKKYNFDLHNKVSLKWLLGLGPSLGIVRVPGIGLIYSELATGVPAIFSHFVTYLPAFHKVLRFVCVKSVPVPYVSPEERFLIGRVCPKPYRMYRCIVRYGYKDIQRDDGDFEDQLIQSI

SEQ ID NO: 68155 - protein, 119 aa, Gossypium hirsutum
  unsure (1)..(119): unsure at all Xaa locations
  Clone ID: GOSHI-09MAY01-C22900_2.pep
QALEWSHLVWPAFVGPLISLLGLVEFEPITLLELGLGLYDSYQRPYQLQGLSNEGQFKVPQQVRIAFSIGKYQDEVMCDVVPIKVCHLLLRDPWXRDRKVPPDGRTNRFSFKHQEGKSP

SEQ ID NO: 68156 - protein, 288 aa, Gossypium hirsutum
  Clone ID: GOSHI-09MAY01-C22900_1.pep
MKVQQQLDRHTAAITQINVTLQALNTTLNEVRVNQKHQYRDPIKKDRDNQPHRCNPQRVPRMDDDCHDHGQSSLAKPKSEQQREHLFHTRCHVQGKLCRVIIDGESCSNIASTTMVEKLCLTTTKHPQPYQLQGLSNEGQFRVTQQVRIAFSIGKYQDEIVCDVMPIQACHLLLGEPWQLDRKVTHDGRTNRYSFKHQGKKLTLVPLTPEQVHEGQIKLRNSVKTSEEKEKENEKEQKEIESEKECETEKKFEKEVEERRENELEKETKEKDEERLVRNVSTNQDMNF

SEQ ID NO: 68157 - protein, 81 aa, Gossypium hirsutum
  Clone ID: LIB3147-041-Q1-K1-D9.pep
NREQPSLAKPKSEQQREHFFHTRCHVQGKLCRVIIDGESCTNVASTTMVEKLCLTTTKHPQPYQLQELSNEGRFKVTQQVR

SEQ ID NO: 68158 - protein, 93 aa, Gossypium hirsutum
  Clone ID: LIB3083-091-Q1-L1-E7.pep
ERDGLKLPQGPITRSKARQMRSKLNGTIQELVSKALDAYTREQENQDSLSCCQENQETESWPNFALRRDFKNQDNQDFKSCQSWSKKPNLAAK

SEQ ID NO: 68159 - protein, 185 aa, Gossypium hirsutum
  unsure (1)..(185): unsure at all Xaa locations
  Clone ID: GOSHI-09MAY01-C22920_1.pep
MAMIPTIFGNNRRSSLFDPFSLDLWDPSKEFDFPTVTSFPSLSRENSAFVNTRVDWKETPEAHVFKADLPGXKKEEVKVEIEGDRVLQISGERHVEKEERNDTWHRVERSSGKFSRRFTLPENVRMGDVKASMXNGVLAVAGPVCVVDLPVITFVCLLCCFGVITWFWPSLGFCLVLATFPDCWF

SEQ ID NO: 68160 - protein, 170 aa, Gossypium hirsutum
  unsure (1)..(170): unsure at all Xaa locations
  Clone ID: uC-gsflnu33B141d01b1.pep
FSQHTITCFRLNLAMIPTIFGDNRRSSVFDPFSLDLWDPFKEFDFPTVTSFASLSRENSAFVNTRVDWKETPEAHVFKADLPGMEKEEVKXVEIEDDRVLQISGERDVEKEDRNDTWHRVERSSGKVSRGFKLPENVRMGDMKAFMENGVFSFTGPKVGMKXPEIKSREI

SEQ ID NO: 68161 - protein, 95 aa, Gossypium hirsutum
  Clone ID: GOSHI-09MAY01-C22890_1.pep
MEMKSKTLLILYATQTGNALDVAERIAREAERRACTVVIRSTDDYEANSLPAEDTVIFVVSTTGQGDTPDSMKVFWRFLLQRNLGSHWLERIHYA

SEQ ID NO: 68162 - protein, 104 aa, Gossypium hirsutum
  Clone ID: GOSHI-09MAY01-C22880_1.pep
MGSRFPSHQLSNGLYVSGRPEQPKERTPTMSSVAMPYTGGDIKKSGELGKMFDIPTDGSKSRKSGPISGAPSRTGSFGGAASHSGPIMPNAAPRAGYTTSVLVA

SEQ ID NO: 68163 - protein, 186 aa, Gossypium hirsutum
  Clone ID: GOSHI-09MAY01-C22560_1.pep
PTRPPLTESENHLKRILLKSQLCMNTAEALFKLNIPISILHSNSYDHHIDQDSKLVLDCGYEVMKRKGRRQELSVHPFLKVPITSNKAKSLDELVKQMCKDFDKLKLYGKDGREDSPFEDYQPKMLEADVNNKEPDLNCMWDLGWNNAMFGFLEKDDVIKDVEKYVLNGLLDEITRELFTSITVTV

SEQ ID NO: 68164 - protein, 250 aa, Gossypium hirsutum
  Clone ID: GOSHI-09MAY01-C22520_1.pep
LTNNLLLLPLIMVVLLVSKTVADAFNGNVYDLIMKVKGFPYLETHAEPYMRQLTVADVVSGPLQLCHGIEKVGNIVHILKTTMHHGFPVIDESPHSESPVLYGLILRAHLIALLKKKAFLCTPVQLGADAFRHFSSDDFAKKGLGNVDKIEDIELTDEEMDMFLDLHPFTNASPYTVVETMSLAKALILFREVGLRHLLVIPKISSRAPVVGILTRHDFMPEHILGLHPSLVRSRWKRLRFQFPLLLKIF

SEQ ID NO: 68165 - protein, 51 aa, Gossypium hirsutum
  Clone ID: GOSHI-09MAY01-C122448_1.pep
IPPKPPIHEPPKKEKPEPKPPVYEHPKKPPSGHYPGHPPLEKLPSPSHPKN

SEQ ID NO: 68166 - protein, 197 aa, Gossypium hirsutum
  Clone ID: GOSHI-09MAY01-C22410_1.pep
TESFCDWVSDLPAMPITQVIETIRRKLMEFIYTRKMDSDQWSSNLTPSAEENLQRSLVNSRSLEVVLSHSSCFKVRDTLDMINVVNLENWDCSCREWQINGLPCLHAVAAIEHVGKNVYEACYGSFSASINPIPPLDRCMKRESSPVLVHPPCVTRPVGRPKERKYALKSNQAVKRTLQCSKCKKLVHNKRKCKQSA

SEQ ID NO: 68167 - protein, 206 aa, Gossypium hirsutum
  Clone ID: GOSHI-09MAY01-C22430_1.pep
IDHGALACLMNLLTNNYKKSIKKEACWTISNITAGNKEQIQAVINAGLIGPLVNLLQNAEFDVKKEAAWAISNATSGGAHEQIKYMVSQGCIKPLCDLLACPDPRIIMVCLEGLENFLKVGEAEKATGAVEFNFCAQLIEDADGLEKIENLQTHDNSEIYEKAVKILETYWLEEDEETLPPADGTQQSFQFGENGLQVPSGGFNFS

SEQ ID NO: 68168 - protein, 199 aa, Gossypium hirsutum
  Clone ID: GOSHI-09MAY01-C22740_1.pep
VWQLKEYDGKMLVSATKEGLKLEDETEEEKKKKEEKKKSFEDLCQTRKDRSGGGGGKVVVSDRIVDSPCCLVTGEGGWTANMERIMKAQALRDNSMSSYMSSKKTMEINPDNGIMEELRKRAEADKNDKSVKDLVLLLFETALLTSGFSLDDPNTFAGRIHRMLKLGLSIDEDGTGGDDADMPTLEEDEAEGSKMEEVD

SEQ ID NO: 68169 - protein, 135 aa, Gossypium hirsutum
  Clone ID: GOSHI-09MAY01-C22700_1.pep
SGMTIKESVKDVFIGGGGYIVNDVKFTVNQAVEPVEKGLTKFNEKLHKISQNIKRHDKDRRKTKDDSCITTTARRVIRGIDDPLLLGSISDSGIGRGRKHRRRSGYTSAESGGESSSDQSYGGYQIRGSRWVTKD

SEQ ID NO: 68170 - protein, 113 aa, Gossypium hirsutum
  unsure (1)..(113): unsure at all Xaa locations
  Clone ID: GOSHI-09MAY01-C22730_1.pep
GTCIRDYIDVTDLVDAHVKALQKAXPSKVGIYNVGTGKGRSVKEFVEACKKATGVDIKVDYLPRRPGDYAEVFSDPTKIRRELNWTAQHTDLEESLKTAWRWQKAHRDGYGAS

SEQ ID NO: 68171 - protein, 178 aa, Gossypium hirsutum
  Clone ID: GOSHI-09MAY01-C22600_1.pep
MATSAPVPASPGGGGSHESGGEQSPRSNVREQERFPPIANISRIMKKALPANAKIAKDAKETVQECVSEFISFITSEASDKCQKEKRKTINGDDLLWAMATLGFEDYIDPLKIYLTKYREMEGDTKGSVKGGDTFAKKDVQPGPNAQLVHQGSFSQGVYYGNSQSQSQAHMMASDARH

SEQ ID NO: 68172 - protein, 197 aa, Gossypium hirsutum
  Clone ID: GOSHI-09MAY01-C22140_1.pep
SLKEKGKILEVLKNWPERSVQVIVVTDGERILGLGDLGCQGMGIPVGKRARYTALGGVRPSACLPITIDVGTNNEKLLNDEFYIGLRQRRATGQEYAELLHEFMSAVKQNYGEKVLIQFEDFANHNAFELLARYSSSHLVFNDDIQGTASVVLAGLLAALKLLGGTLADHRFLFLGAGEAGTGIAELIALEMSKQTG

SEQ ID NO: 68173 - protein, 135 aa, Gossypium hirsutum
  unsure (1)..(135): unsure at all Xaa locations
  Clone ID: GOSHI-09MAY01-C22370_1.pep
MESHDETGCQAPEGPILCVNNCGFFGSAATMNMCSKCHKAMILKHEQVQLAAASIGSIVNGCSSGSSKEPAVAAALDVQPVNIESKIVSAEPSIDPSRTTVSELETKKGPNXCSTCHKRVGLTGFNCRCGNLFCA

SEQ ID NO: 68174 - protein, 201 aa, Gossypium hirsutum
  Clone ID: GOSHI-09MAY01-C22320_1.pep
VGLLLDGLFGTGSGSTASVENAGLLGLTRVGSRTVIQISAVFMLFFSVLGKFGAVLASIPLPIMAALYCVLFAYVASAGLGLLQFCNLNSFRTKFIVGFSVFMGLSVPQYFNQYLLVSGHGPVHTRSTWFNNVMQVIFSSPATVGFIVAFFLDCTHSYGHSSVRRDSGRHWWEECRNFNTDTRSEEFYSLPANLNRFFPSF

SEQ ID NO: 68175 - protein, 220 aa, Gossypium hirsutum
  unsure (1)..(220): unsure at all Xaa locations
  Clone ID: GOSHI-09MAY01-C122268_1.pep
FSRVRPRVRRRVRKSVKVRPNLVVYNTLIEAMGRAGKPGFARNLFEDLIESGLTPNEKTLTAIAKIYGKARWEKDALKLWEEMKSKNWPVDFILYNTLLTMFADIGLVEEAEQLFIDXKRSENFKPDSWSFSAMLIIYASGGNVDKAMELFEEMFEVGVELNVMGTTCLIQCLGKTQRIQELVRVFTVSIQQEIEPDDKLCGCLLSVVSLCDNREDIDKV

SEQ ID NO: 68176 - protein, 158 aa, Gossypium hirsutum
  Clone ID: GOSHI-09MAY01-C122278_1.pep
MVKETDFYDILGVSPSATESEIKKAYYMNARQVHPDKNPNDPQAAQNFQVLGEAYQVLSDPAQRQAYDAHGKAGISTEAIIDPAAIFAMLFGSELFEEYIGQLAMASMASLDIFTEGEHFDARKVHEKMKVVHNERENKLAQLLKDRLNQYVQGNKAD

SEQ ID NO: 68177 - protein, 191 aa, Gossypium hirsutum
  unsure (1)..(191): unsure at all Xaa locations
  Clone ID: GOSHI-09MAY01-C122258_1.pep
FRGIWKPVFMGGTDWPSPLANLSVVLQQIKKGIAATGVDVPSLETGGSSPAMLPLPLAALVSLTITYKLDKSSERSLVLLGPAMSSLGXSCPWPCMPIISALWAQKVKRRNDFLVFSSARTVFHHNSDAVVQLLRSCFTATLGLSPSIMCSNRGVGALLGHGFGSHFSGGMASVSPGICTYDTLNNQRFML

SEQ ID NO: 68178 - protein, 210 aa, Gossypium hirsutum
  unsure (1)..(210): unsure at all Xaa locations
  Clone ID: GOSHI-09MAY01-C22260_3.pep
LGHLASKCQGIGMLLEGLFGSLVGTTASVENVGLLGLTHIGSRRVVQISTAFMIFFARVGKFGAFFASIPLPIFAAIYCILLGIVAASGITFIQFANSNSMRNIYVLGVSLFLGLSIPQYFVMNTTGDGHGPVRTNAGWFNSILNTFFSSPATVAIIVGTVLDNTLXAKQVDDRGIPWWKPIQHTKGDSRTEEFYSYPLRINEYIPTRFL

SEQ ID NO: 68179 - protein, 333 aa, Gossypium hirsutum
  unsure (1)..(333): unsure at all Xaa locations
  Clone ID: GOSHI-09MAY01-C22260_2.pep
PASGRAWGELTRFFSPIVVVPVVCLVGLGLFARGFPLLGNCVEIGLPMLILLMICQQYLKRIHSRAHLILERFALLLCIGIVWAFAAILTVSGAYNNVKPATKQSCRTDRSFLMSSAPWIKIPYPFQWGTPIFRASHVFGMLGAALVSSAESTGTFFAAARLSGATAPPAHVLSRSIGLQGIGMLLEGRFGPLVGTTLHLCENVGLLGLTWFXLTSRVEGRNSMRNIYVLGVSLFLGLSIPQYFVMNTTGDGHGPVRTNAGWFNSILNTFFSSPATVAIIVGTVLDNTLEAKQVDDRGIPWWKPFQHSKGDARTEEFYSYPLRINEYIPTRFL

SEQ ID NO: 68180 - protein, 418 aa, Gossypium hirsutum
  Clone ID: GOSHI-09MAY01-C22260_1.pep
MFGTHGDKARVIQVLLFMSGINTLLQTLIGSRLPTVMGASIAYTLPLFSIINDYNDEDFASPHDRFVHSMRTIQGSMIVSSFLNIILGYGRAWGELTRFFSPIVVVPVVCLVGLGLFARGFPLLGNCVEIGLPMLILLIISQQYLKRVPSRAHLILERFALLICIGIVWAFAAILTVSGAYNNVKTATKLSCRTDRSYLMSSAPWYGHNVLFCLLSPRSRASHVFGMFGAALVSSAESTATFFAAARLSGATAPPAHVLSRSIGLQGIGMLLEGLFGSLVGTTASVENVGLLGLTHIGSRRVVQISTAFMIFFSIFGKFGAFFASIPLPIFAAIYCILLGIVAASGITFIQFANSNSMRNIYVLGVSLFLRLSIPQYFVTSRTFDGHGPVRTYAVWFNDILNTIFLSPATVPLLLDFA

SEQ ID NO: 68181 - protein, 114 aa, Gossypium hirsutum
  Clone ID: LIB3584-011-P1-K1-C10.pep
VLFFAAARLSGATGPPAHVLSRSIGLQGIGMLLEGLFGSLVGTTASVENVGLLGLTHIGSRRVVQISTAFMIFFSIFGLFLYLLIISLKNLPFYSSFIYSIGSRCILGMFGAFF

SEQ ID NO: 68182 - protein, 220 aa, Gossypium hirsutum
  Clone ID: GOSHI-09MAY01-C23910_1.pep
MGSEGPAAVTIHVTGFKKFHGVSENPTETVVSNLKEYTEKKGLPKGVILGSCSVLETAGQGALPQLYQTLQSALTGKDSESSCSGRIIWVHFGVNSGASRFAVERQAANEATFRCPDEMGWKPQKVPIIPADGGISRVRETSLPVEEITKALAKKGFEVMTSDDAGRFVCNYVYYHSLRFAEQNGIKSLFVHVPLFLTIDEETQMKFAASLLVVLASLCQ

SEQ ID NO: 68183 - protein, 110 aa, Gossypium hirsutum
  Clone ID: LIB3543-042-Q1-K6-E11.pep
FCPASAPRGRRGRSEVPIIPADGGISRVRETSLPVEEITKALAKKGFEVMTSDDAGRFGGGGVYYHSLRFAEQNGIKSLFVHVPLFLTIDEETQMKFAASLLVVLASLCQ

SEQ ID NO: 68184 - protein, 357 aa, Gossypium hirsutum
  Clone ID: GOSHI-09MAY01-C23930_2.pep
LYLRPASSWGQGAPPMQQPGYGYMQPGAYPGPSSQYNMSQPPYGGYPSQPSSGGYASGWDQSSVQPNQQTSAASGYDYYNQQPSQQQQQQTSGDSVTPADNSGYNYSQPPASSYMQPGQGYSQYGYGGYHQSGYGQPSSYDQQQSYGSASSYGNVTNPTQGGQGDSGQAPTSTQPSATGQQGYNTSQQPNPNPGSYPPPGSTQPGYGMPPSQTGYGNQPPAQPGYGAGYGQPQTQKPLANPQMYGQAQQSPSTPGSYGQPGYHSQPPSSGYGQPETGSQLAQPPSYGAASAQPGYGAPTYGAGYGAPYNTSYGGSYSQPPTYPADNIAGGSTNGNYEAAPASKTVEQGGVAKASPPT

SEQ ID NO: 68185 - protein, 379 aa, Gossypium hirsutum
  Clone ID: GOSHI-09MAY01-C23930_1.pep
GNNFVQNRMRNPAMAGGYQQQGYQARPPANWGQGAPQMQQPGYGYMQPGAYPGPSPQYNMSQPPYGGYPSQPSSGGYASGWDQSAIPPNQQSSSAGGYDYYNQQPSSQQQQTPGGSAAPTDNSGYHYSQPPASGYMQPGQGYAQDGYGGYHAPPQSGYGQPASYEQEGYGSAQSYGSATNPTQEGHTPSYGGQGDAGQAPTSTQPSAVGQQGYNTSQVPSPNPGSYPPQGSTQPSYSQSGYGSQPPAQSGYGPGYGPPQGQKPLVNHPAYGQTQQSPTTPGSYGQAGYQSQPPSSGYGQAESGLQRPQSSAYGGAAAAQPGYGAPPYAAQYNASYSSYSQPPAYPSDSNASGGTRGTYEAAPAAQTGQQGGAGNASPRT

SEQ ID NO: 68186 - protein, 90 aa, Gossypium hirsutum
  Clone ID: LIB3585-011-P1-K1-A3.pep
QNKHYIQDPPTVEKCNLLSKQLFYTRLASMPSRYEAFQKEMDYVKLMWKKRNEWKIEDAGIATLFGLECFAWYCTGEIVGRGFTFTGYYI

SEQ ID NO: 68187 - protein, 62 aa, Gossypium hirsutum
  Clone ID: LIB3825-008-Q1-N6-A10.pep
GIPSRYGAFQKEMDYVKLMWKKRNEWKIEDAGIATLFGLECFAWYCTGKIVGRGFPFPGYYI

SEQ ID NO: 68188 - protein, 81 aa, Gossypium hirsutum
  Clone ID: GOSHI-09MAY01-C23850_1.pep
VEVSKFLGLKKKERNSPFSFNLFLNDYYYSIFTCFGFYFNRVEIIIITRICILHPIGPLLFIISLWSASEKKKQGLQEVFN

SEQ ID NO: 68189 - protein, 140 aa, Gossypium hirsutum
  Clone ID: GOSHI-09MAY01-C23800_1.pep
FEKTFTFLRAKSRKQLFLHCSLVFSGISTQDTCTVNLGMIGKTFTFKRFFDAFRFGRDCVRIYRFCSNLRTCSSILSRCLCDIISVVFHNQRHITRYVSTCFQIHSSMLFLGINIHINFQAWLAIKRRVNILRGRCRLGK

SEQ ID NO: 68190 - protein, 460 aa, Gossypium hirsutum
  unsure (1)..(460): unsure at all Xaa locations
  Clone ID: GOSHI-09MAY01-C23820_1.pep
PNSPSHHRHHRRRSSEKEGTGVRAWLILDSTCQTQMVEAGKHAIMRRTGLPARDLRILDPLLSYPSTILGRERAIVINLEHIKAIITAQEVLLLNSKDPAVTPFVDEIQSRILCHYQATKDQEGGVDDSSYIIRSSSQNLSSRFSQTQTQDDEGKSEEKQSLENPNGSKILPFEFVALEACLEAACSCLENEAKTLEQEAHPALDKLTSKISTLNLERVRQIKSRLVAITGRVQKVRDELEHLPDDDEDMARRCIXTEKQLLENSSTSSMNERDDMDDHVLRPDINERTPAEISLAANYEGDIQDADNPQDNMFGATNAIGRDSHGTHTSTTRSAISKHLDVEELEMLLEAYFVQIDGTLNKLSTLREYVDDTEDYINIMLDDKQNHLLQMGVMLTTATLVISAFIVVAGIFGMNIHIELFDEDKAGMPEFLWTIGGGAAGSIFLYVIAIAWCKYKRLLE

SEQ ID NO: 68191 - protein, 90 aa, Gossypium hirsutum
  unsure (1)..(90): unsure at all Xaa locations
  Clone ID: LIB3048-015-Q1-L1-G12.pep
MQAKTLEQEAHPALDKLTSKISTLNLERVRQIKSRLVAITGRVPKGRDXLEHLLHDYXNIGQMYLTGKPLLGNSLTLSINEKDDMDDDIL

SEQ ID NO: 68192 - protein, 127 aa, Gossypium hirsutum
  Clone ID: LIB3083-108-Q1-L1-D5.pep
INHYRPFSTKNRRGVRQQRVQEVLLLNSKDPSVTPFVDEIQSRILCHFQATKDQEGGVDDSSYIIRSSSQNLSSRFSQSQTQDDEGKLEEKQSLENPNGSKILPFEFVALEACLEAACSCLENEAKT

SEQ ID NO: 68193 - protein, 104 aa, Gossypium hirsutum
  Clone ID: GOSHI-09MAY01-C23400_1.pep
PLTYYNKTKPKFKKKNPSPQKFFSKEGNPRFAASLQPPCANIQPPLPTFSTTTHHAPTHHVQTMFAIPNLRGLSRSSPPLAESAIICALSATVWWWSDGCTFLV

SEQ ID NO: 68194 - protein, 257 aa, Gossypium hirsutum
  Clone ID: GOSHI-09MAY01-C23790_1.pep
MGKKGSWFSAIKRVFIPHSKEKLSNESDKRSGKEKKKKGLGKLRHGETNSFIPLFREPSSIEKILGEAEREHKLVFRPPTPPEQPTTPPFVPHKDASPRVPSQRIASPRIASPRAASPRTVSPPRAASPRAAPPKVVCPRPEPTLRNHHASATKIQAAYRGYMARRSFRAWKGLVRLQGVVRGQNVKRQTSTAMKRMQLLVRIQSQIQSRRIQMLENQARQEVHFKNDKEVESTLGKLAFSQASEAGNEDWDDSVLP

SEQ ID NO: 68195 - protein, 63 aa, Gossypium hirsutum
  Clone ID: LIB3585-054-P1-K1-E7.pep
MGKKGSWFSAIKRVFIPHSKEKLSNESDKRSGKEKKKKGLGKLRHGETNSFIPLFREPNSIEK

SEQ ID NO: 68196 - protein, 184 aa, Gossypium hirsutum
  unsure (1)..(184): unsure at all Xaa locations
  Clone ID: GOSHI-09MAY01-C23710_1.pep
GRVGGRVGEKVPRNSSESHYCGSCGFGCRRGDKKGTDRTWLVDAVNNNAVIITRCKAERFILERNNVGSVRKLKCLGVIAKPSNQNITKELHIEAKVTISACGALLTPLLMHSSGLKNRNIGQNLHLHPVLMAWGYFPDSDSKFKGXAYEGGIITSVHKVVGNDNKVQAIIETPSLGPAQYSAV

SEQ ID NO: 68197 - protein, 137 aa, Gossypium hirsutum
  Clone ID: GOSHI-09MAY01-C23720_1.pep
MSGEEEENAAELKIGEEFLKAKCLMNCEVALILEHKYEQLQQMSDDPMNQVSQVFEKSLQYVKRFSRYKNPDSVRQVREILSRYQLAEFELCVLGNLCPETVEEAIAMVPSIKTKGRAHDDDAIERMLNDLSLIKEI

SEQ ID NO: 68198 - protein, 124 aa, Gossypium hirsutum
  unsure (1)..(124): unsure at all Xaa locations
  Clone ID: uC-gsflnu33B144c06b1.pep
PRFRGRVGDPRVRVALILEHKYEQLQQMSDDPMNXKCSRYFEKSLLYVKRFSRYKNPDSVRQVREILSRYQLAEFELCVLGNLCSETVEEAIAMVPFIKTKGRAYDDHAIERMLNDLSLIKKFE

SEQ ID NO: 68199 - protein, 62 aa, Gossypium hirsutum
  Clone ID: LIB3829-035-Q1-N6-G6.pep
MIRILSRYQLAEFELCVFGNLCPETVEEAIAMVPSIKTKGRAPDDDAIERMLNDLSLIKKFE

SEQ ID NO: 68200 - protein, 129 aa, Gossypium hirsutum
  Clone ID: GOSHI-09MAY01-C23140_1.pep
MATILGPSSAAISASCGSLIYPSSKLVIPSISINAGSCYWKKFYGGIGIQGKKGKPQFHIAVTNVATEINSVQQAQKLGAKESQRPVYPFAAIVGQDEMKLCLLLNGIDPKIGGVMIMGDRGTGKSPTV

SEQ ID NO: 68201 - protein, 114 aa, Gossypium hirsutum
  Clone ID: GOSHI-09MAY01-C23090_1.pep
IWHDFLSVSIVKISCKKITMEFHRNLIQQVKVLHVKGSSILQCGDLAESIQRHEGLLTQTFSLNNAPDEHDNMEIGDGNCTTAADQVEQISEMVYLPEGGSVVPENLSPQSMGD

SEQ ID NO: 68202 - protein, 119 aa, Gossypium hirsutum
  Clone ID: GOSHI-09MAY01-C23310_1.pep
KGDLHPTYGARVIPVFVLALADVDPQLMMEDESFVWTGNDVVIVLEHQSPNIPLSYVSETERRHAIPSQAQRHIVAGLASAVGAVAAPDAWASPVHERPVVNWLWAAGCHPFGPFLNTS

SEQ ID NO: 68203 - protein, 128 aa, Gossypium hirsutum
  Clone ID: LIB3196-054-P1-M1-C3.pep
PRVRVIPVFVLSLADVDPQLMMEDESFVWTGNDVVIVLEHQSPNIPLSYVSETERRHAIPSQAQRHIVAGLASAVGGLSAPYEKASHVHERPVVNWLWAAGCHPFGPFSNTSRISQMLQDVALRNTIY

SEQ ID NO: 68204 - protein, 394 aa, Gossypium hirsutum
  Clone ID: GOSHI-09MAY01-C23290_1.pep
KVGSEVARRAKGLGMHVIAHDPYASADRARAIGVELVNFEEAISTADFISLHMPLTAAPASVLNDETFAKMKKGVRIVSVARGGVIDEEALVRALDAGTVAQAALDVFSEEPPKQDSKLVQHERVTVTPHLGASTMEAQEGAAIEIAEAVVGALKGELAATAVNAPMVPAEVLTELKPYVELAEKLGRLGVQLVAGGSGVKTVKVSYASSRAPDDLDTRLLRAMITKGIIEPISSVFVNLVNADYTAKQRGLRITEERILLDGSPESPLESIQVQIANVESKFASAMSESGEIKVEGRVKDGIPHLTKVGSFEVDVSLEGSIILCRQVDQPGMIGTVGSILGEENVNVSFMSVGRVAPRKHAVMAIGVDEQPSKETLKRIGEVPAIEEFVFLKL

SEQ ID NO: 68205 - protein, 196 aa, Gossypium hirsutum
  Clone ID: GOSHI-09MAY01-C23260_1.pep
MLLRSDYSFGATAIIQFDPTQKDSSPSPSRSKASPARSAKKPPPGAPNPDDSSLDNPDLGPFLLRLARDTIASGEGPTKALDYAIRAAKSFERCAVEGEPSLDLAMSLHVLAAIYCSLGRFDEAVPVLEQAIQVPDVERGPDHALAAFSGHMQLGDTYSMLGQAEKSIGCYEQGLKIQIQALGETDARVGQTCRYL

SEQ ID NO: 68206 - protein, 163 aa, Gossypium hirsutum
  unsure (1)..(163): unsure at all Xaa locations
  Clone ID: GOSHI-09MAY01-C98390_1.pep
ATHQHGCCVLQRCISHSTGEYREXLVEEISSNGLLLAQDAYGNYVVQFILELKIPSATSTLISQFEGNYVHLSSQKFSSHVVEKCLMVLNDESRSKLIHELLSTDHFERLLQDPHANYVVQTALRVSEGSLHNSLVEAIESHKAISRNSPYSKRILSQKLLKK

SEQ ID NO: 68207 - protein, 111 aa, Gossypium hirsutum
  Clone ID: GOSHI-09MAY01-C98230_1.pep
EITAPKEKKICTDISSLNSMHRLLAGSKHRFYEPSKLLLGLKRTYGPPKSCEVNELPRYVAKAKIYAHSFPVGTSPLDRSMATPGHPFPGKTVSILTHSSAPRKWRCLISF

SEQ ID NO: 68208 - protein, 183 aa, Gossypium hirsutum
  Clone ID: GOSHI-09MAY01-C98220_1.pep
APIKSKEELIFHVGFRQFVARPIFSTDNINSDKHKMERFLHAGRFSIASIYAPISFPPLPLIALKGAAGAGTPAVAAVGSLRSIDPDRIILKKIILTGYPQRVSKLKATVRYMFHNPEDVRWFKPVEVWTKCGRRGRVKEPVGTHGAMKCIFNGGLQQHDTVCMSLYKRAYPKWPEHRFPANV

SEQ ID NO: 68209 - protein, 138 aa, Gossypium hirsutum
  unsure (1)..(138): unsure at all Xaa locations
  Clone ID: GOSHI-09MAY01-C99550_1.pep
RKNPVPSFLPSTDVVDEVRKTLKINKKQFLQCWEILIYLGLDPIEKXMEDYVTIICNRVKADILGKDSETAGKEVIEVPSVHDEETSFAMFRLQNSKAGGIQMDEDQTKTQEQQLQQLVDERIKEVKLIAQKVSHKHV

SEQ ID NO: 68210 - protein, 33 aa, Gossypium hirsutum
  Clone ID: GOSHI-09MAY01-C99530_1.pep
AVNLLKILKRLIALHAMLLHSFLTPPAELKWLI

SEQ ID NO: 68211 - protein, 168 aa, Gossypium hirsutum
  unsure (1)..(168): unsure at all Xaa locations
  Clone ID: GOSHI-09MAY01-C99780_1.pep
SCLSTKVGHEYLKTAGQGAQQYAPGXGPAMSATALLQKAAQMGATVSXASLLHGFGGGGGSSLSAQQDNLQWGQREVEPENTSVVAGLGPGLPRDGSSGLKELMMGTPVFGPRQATLDFLGLGMAAGGSPNGGLSALITSIGDELDVVAAATSFGGGDFTSKDIGRSS

SEQ ID NO: 68212 - protein, 148 aa, Gossypium hirsutum
  unsure (1)..(148): unsure at all Xaa locations
  Clone ID: GOSHI-09MAY01-C99250_1.pep
MLVLFETPAGFALFKVLDEGKLNKVEDLSKEFLAPDSARKVVSLKAFSKFENTAEALEAATKLLESAPSKGLRKFLRAHCDGETLGVADSKLGNAIKEKLKIDXCVHNNAXVMELLRGVRTQLTELISGLGAQDLAPMSLGLSHSLSR

SEQ ID NO: 68213 - protein, 183 aa, Gossypium hirsutum
  Clone ID: GOSHI-09MAY01-C99220_1.pep
NLSETTQMGSGGSKGCCRVGGGGRDTAPAASSSSSGGLRGRSKVKNRVFRSSCLGALSRSASPKPNFDHRKQPASESDLVKRESNRKVEGEAASNEEMQLPLPTPCISSGGSTSGAAVTAAHRSPSRCLSGISFLPGNLSFRFSRANSMGSSAEMLNPDDDSETLEPQQPPRNSCSPIIFNDS

SEQ ID NO: 68214 - protein, 63 aa, Gossypium hirsutum
  Clone ID: GOSHI-09MAY01-C94140_1.pep
KNIYSLSSYVTIKIMLKIFNRIFLKNIILTRHNKINFFVGVVFLRKISANIFIEIINNINYLG

SEQ ID NO: 68215 - protein, 411 aa, Gossypium hirsutum
  unsure (1)..(411): unsure at all Xaa locations
  Clone ID: GOSHI-09MAY01-C94000_1.pep
GKILLEGGMRYLEVKQILLLAYCQAITFYLLLKSEGQPVRGHPVLGRIVEIQGLLDKVKQLGGNLSSEWKEILKNKEAEMGQNLVKESAEPISDSGTKDHGTSLVTDLQMAELEDTPNLLKMEFASNLDNKGMKLKRENDQVGVQSREMLKVRAALEEKLKQKGIFSSNIQKPDKTKKHRKPVKGQLETLXDDFVDDAMDVEGSAHGLSNGHASSNHSNISKLITARQNKSKVISGDDDLPKRDDIGERRRKHELRVLAGATVKSEDDHGGEYDMLEEDDGGNGGISGDEDGDTEDTEESEDEFYKQVKQQRASKLAAKAEIYTRTSAPPSLPETVDGKRLITHQIEKNRGLTRQRNKNIKNPRKKYRLQSKKREKQRKGQVRDTRKPVGQYGGEASGINVGISRSIRFKG

SEQ ID NO: 68216 - protein, 186 aa, Gossypium hirsutum
  Clone ID: GOSHI-09MAY01-C94030_1.pep
MAGRNRVPREAFNDRRGFPPERPFFRGPPLPQPPHPALLEEELEMQHAEIRKLLTDNHRLVEDRMAIQQELVAAKEEIHRLNLVIGEIRAEQELHSRGLIEKGLKLEADLRATEPLKKEAMQLRSEVQKLNNVNQDLTGQVQTLKKDITRLQADNQQIPILRAEVDGLHQELMRARTAIDYEKKAN

SEQ ID NO: 68217 - protein, 121 aa, Gossypium hirsutum
  Clone ID: GOSHI-09MAY01-C94350_1.pep
QSSITSPLNVSPKTPNPSPIAQNNFNTKNQQQTLNPLAPQAPMRGLLPRAPPHVRRPPRHRTASVHLQKINTQRAQQTSKRQAETAQQKEKKNCNSEEKTERGAIFVFFFWLYKAITKSVK

SEQ ID NO: 68218 - protein, 71 aa, Gossypium hirsutum
  Clone ID: GOSHI-09MAY01-C94340_1.pep
TKYVGIKGLLNLIIKDERIGSSFCSPKEREKEILIILFSMHRAPTRKVSLDYGSIYVKIERRNAWESTTDC

SEQ ID NO: 68219 - protein, 166 aa, Gossypium hirsutum
  unsure (1)..(166): unsure at all Xaa locations
  Clone ID: GOSHI-09MAY01-C94310_1.pep
DFSRAHNEVNLAALAIDRIGRGCVDEIIDPYLXDPHRDAWTLSSIHNVAELAFRCLASHRDMRPTMIEVAEELEHIRLSAWVPGMCIESPAASSDEESEKSFNKSTEMSDVGSRRLMKLKQREGECLTTLLEDVKNRSPISVQDHWSSGQSSPSTNSLLGNSSRRE

SEQ ID NO: 68220 - protein, 50 aa, Gossypium hirsutum
  Clone ID: GOSHI-09MAY01-C94330_1.pep
SVQHISCIYTTGFSTFYTRNTSQIIQFSIIEKLYKALHHCQFKTHNRFHN

SEQ ID NO: 68221 - protein, 103 aa, Gossypium hirsutum
  Clone ID: GOSHI-09MAY01-C94230_1.pep
FHITRPIIPSFWKLLPRRFLVFRWLKNHTMISKYGALKRRVSSQSGAPINYYKTLNNPRAYALQDDYKDFYRKLWLLDLPSKIKITVWKISGISLATRVNMLL

SEQ ID NO: 68222 - protein, 209 aa, Gossypium hirsutum
  Clone ID: GOSHI-09MAY01-C95920_1.pep
KSAKQYKWLERDLTNVDRTMTPWLVAAWHPPWYNTYTAHYKEAECMRMEMEELLYSYGVDIVFNGHVHAYERSNRVYNYTLDPCGPVHITVGDGGNREKMAIEHADEAANCPEPSSTHDEDMGGFCATNFTSGPAAGKFCWDQQPDYSAFRESSFGHGILEVKNETWALWTWYRNQDSSGKVGDQVYIVRQPELCLGSIKLPKSSFADS

SEQ ID NO: 68223 - protein, 52 aa, Gossypium hirsutum
  Clone ID: GOSHI-09MAY01-C95590_1.pep
RRRRDVAMKRSKNVRKMKAVEKAIAKNEKYAEKSSKTESKKSRTQSAKLLYD

SEQ ID NO: 68224 - protein, 254 aa, Gossypium hirsutum
  unsure (1)..(254): unsure at all Xaa locations
  Clone ID: GOSHI-09MAY01-C95540_1.pep
LYSISDXNVQEIKISPGXMLLIFTKVGGHVPLKILSIEDGTVLKSFSHLLHRNKKVDFIEQFNEKLLVKQENENLQILDVRNAELTEVSKNEFMTPSAFIFLYENQLFLTFRNRTVAVWNFRGELVTSFEDHLLWHPDCNTNNIYITSDQDLIISYCKADSDDPLSEGNGSINISNILTGKCLAKIRASNSFPVEEQCSCSDKCGCSSKTQSNASRIRSRVAEALEDITALFYDEERNEIYTGNRYGLVHVWSN

SEQ ID NO: 68225 - protein, 128 aa, Gossypium hirsutum
  unsure (1)..(128): unsure at all Xaa locations
  Clone ID: GOSHI-09MAY01-C95450_1.pep
TAVRVLAVAAXGTMHWSRAILSAAGAKIRKKHKKAKVIADRRLRRSSEINKGKKKSTVVERKLKVLRRLVPGCRKLSSYSNVLDEARDYIAALEMQVRSMTAVAEFLGGGGIVRAPPPAYRLGSNVDS

SEQ ID NO: 68226 - protein, 235 aa, Gossypium hirsutum
  Clone ID: GOSHI-09MAY01-C95780_1.pep
HCRSWRFSNCFHRSSGRGLCKRIIAVVKAANVLGLSFPEAFGKQPIELLQLLSLKAQESFEEAHLLVQTHVMPAASIAQILAESFLKGLLAAHRGGYMDSQKEEGPAPLLWRFSDFLKWAELCPSEPEIGHALMRLVITGQEIPLACEVELLILSHHFYKSSACLDGVDVLVALAATRVEAYVSEGDFACLARLITGVGNFHALNFILGILIENGQLDLLLQKYSTAADTNTGTA

SEQ ID NO: 68227 - protein, 186 aa, Gossypium hirsutum
  unsure (1)..(186): unsure at all Xaa locations
  Clone ID: GOSHI-09MAY01-C95750_1.pep
CFSNNILRLLRXKIQYEHDHCPPKQPTTRFNSFTVDDRSGEQWIRLKRXFGEKEDITIDVTMFDGSVPVPDSGQVQSDEQLHITFIVNISKGDDSDVLEIVCSAWPNTIDIQKFYVRGCNRTANHPYTGPEFKELDEQLQDSLYEFLEERSINDGLAIFLHEYMKNKDKTEFIRWLQTVKSHIEKK

SEQ ID NO: 68228 - protein, 71 aa, Gossypium hirsutum
  Clone ID: GOSHI-09MAY01-C95770_1.pep
MDNEHLCRVLPQNKISYYPPMYRRRLGFKIPPPTYKDLTPILLSPQNLFLYFLGHIYDSTLNHDFISKIIK

SEQ ID NO: 68229 - protein, 61 aa, Gossypium hirsutum
  Clone ID: LIB3829-035-Q1-N6-G12.pep
MGNEHLCRVLHQNKRSYYPPMYSRRLWFKIPPPTYKDLTTIGVGALKIYSFISLGIYMIVH

SEQ ID NO: 68230 - protein, 145 aa, Gossypium hirsutum
  Clone ID: GOSHI-09MAY01-C96870_1.pep
FASAHASASLASLVPPTIPTSISTIPGLPGGLQLPTNGIPAIDTIGSPSECLLLKNMFDPTLETEPEFDLDIKEDVQEECSKFGKLKHIHVDRDSAGFVYLRFEDAQGAINAQRNLHGRWFAGKMITATYMVPQTYEAKFPSSKR

SEQ ID NO: 68231 - protein, 147 aa, Gossypium hirsutum
  unsure (1)..(147): unsure at all Xaa locations
  Clone ID: GOSHI-09MAY01-C96580_1.pep
YTYCLAGITAASGISAELGIPLTHRGIANSVRFLTGHSRXGGTDPLFVAENAADPDSTLVVYMGLSTLPSLAQKLIHHGLPPDTPATAVERGTTPQQRMVFAKLKDLADKIKTAELVSPTLIIIGKVVALSPFWPQSLTEASRLVEV

SEQ ID NO: 68232 - protein, 84 aa, Gossypium hirsutum
  Clone ID: GOSHI-09MAY01-C96530_1.pep
CVKRVSDSAQAILRDLVASQHQENEGKRPKPRLPIDEPKVHLSTSLMWPSRGVLDAEGRATSGAWEPPRLQRLRVLDARVFIVL

SEQ ID NO: 68233 - protein, 41 aa, Gossypium hirsutum
  Clone ID: GOSHI-09MAY01-C96760_1.pep
PPNSLHNKKRLWPVIMPLKVKPIDHENLWGVFKVDRRVWNN

SEQ ID NO: 68234 - protein, 91 aa, Gossypium hirsutum
  Clone ID: GOSHI-09MAY01-C96110_1.pep
AETPATTTTTTAAITNNKSSSVSLSGVTVSDGGALSQTRCVDFDFDLNLPALCELEIKDGSRFCQIYTEQEVESPLPTKKPRFMTASLAQH

SEQ ID NO: 68235 - protein, 87 aa, Gossypium hirsutum
  unsure (1)..(87): unsure at all Xaa locations
  Clone ID: GOSHI-09MAY01-C96050_1.pep
CNVALKSLCKKXGLQIEEANLIGVDRXSLGIDVRIFSGVEVRTCRFPFKIRAMSEAAAEKKIRQLLFPRSRRKKFQSHGYELRDPGS

SEQ ID NO: 68236 - protein, 144 aa, Gossypium hirsutum
  Clone ID: GOSHI-09MAY01-C97970_1.pep
MKVIPLILMGCGGVGRQLLQHIGACRSLHAKQGVHLRVVGVSDSKSLIIASDVKQKELDDNILAEVCRVKSDGSSLSKLTSLGESQVFSNSESRTKVLDIASILGKSTGLALVDCSASSETIGVLKEGVNLGCCVVLANKEPFT

SEQ ID NO: 68237 - protein, 159 aa, Gossypium hirsutum
  unsure (1)..(159): unsure at all Xaa locations
  Clone ID: GOSHI-09MAY01-C97870_1.pep
HLGGGGGGIPKSEILVVPRQLNPGKGESNAITAHGRTDPAQSTGLFFXNCSLNGAGGYTKYYYSNPKVHKNFLGRPWKEYSRTVYINCVMGDLISPQGWLPWSGDFALKTLFYGEYQNSGPGSNMSARVPWSSPIPGQNVYTYSVQNFIQGDQWIPTKA

SEQ ID NO: 68238 - protein, 196 aa, Gossypium hirsutum
  Clone ID: GOSHI-09MAY01-C97540_1.pep
MVQDFIESEPSSPIVPSYHLQSSNHLAQLSTLQEILRCRTDTERKVLEIVGKHIRSKRAVQKSSGLKKWLAMRLKMNGFNASLRQTCWVTSSGCPAGDYEYVDIVMENENGETVRLIVDIDFKSQFELARPSPTYKELTDALPSIFIGSEEKLREIISVVCSAAKQSFREAGLHVPPWRTTTYMHSKWLSATPNVN

SEQ ID NO: 68239 - protein, 39 aa, Gossypium hirsutum
  Clone ID: GOSHI-09MAY01-C97510_1.pep
LVGYIKIFLASASYFFPNANGDEFICHYLFIMKFFFFFL

SEQ ID NO: 68240 - protein, 207 aa, Gossypium hirsutum
  Clone ID: GOSHI-09MAY01-C97410_1.pep
RRVGQLVAGGSGVKFVKVTYASARGPDDLDTRLLRAMVTKGLIEPISSVFVNLVNADFIGKQRGLRLTEERIVLDGSPEKPLEFIQVRIANVESKFASAISNSGEITVEGRVKDGKPHLTKVGSFGVDVSLEGSIVLCRQSDQPGIIGKVGNILSEENVNVNFMSVGRIAPGKQAVMTIGLDEEPSRDALKKIGEITAVEEFVFLKL

SEQ ID NO: 68241 - protein, 208 aa, Gossypium hirsutum
  Clone ID: GOSHI-09MAY01-C97160_1.pep
KELSHSDIRPNVEWTDGNWISKSKEVIIASDDQELIGDALCGTRNTKVAGELESSLSTKENTEDKIPLKKMKRNATEQPTPTDENSTLHSGRKKVKLETSNGNTSNSLSSKKQTEGNAVVTPISVTGDQLKDMPSETLCKEGNPRTGGKATKFPKKTVIADQPRAKSESPLTEATTQTASNDRLFCQHHRSNWTTKMQIVGSADGKVD

SEQ ID NO: 68242 - protein, 146 aa, Gossypium hirsutum
  Clone ID: LIB3825-020-Q1-N6-B6.pep
QELIGDALCGTRNTKVAGELESSLSTKENTEDKIPLKKMKRNATEQPTPTDENSTLHSGKKKVKLETSNGNTSNSRSSKKLTEGNAVVTPISVTGDQLKDMPSETLCKEGNPRTGGKATKFPKKTVIADQPCAKSESPLTEATTVS

SEQ ID NO: 68243 - protein, 116 aa, Gossypium hirsutum
  Clone ID: GOSHI-09MAY01-C97220_1.pep
LLYVGVNSDASYRERVLKALTRKFRLHEDISLYSIAKRCPPNFTGADMYALCADAWFHAAKRKVLSPDSSSMDQADSIVVEYDDFVKVLRELSPSLSMAELKKYEILRDQLEGSSS

SEQ ID NO: 68244 - protein, 157 aa, Gossypium hirsutum
  Clone ID: GOSHI-09MAY01-C90830_1.pep
PKDGKNRGGVTPSFNPQSQYQYGTFQGVANYYHPHFPQQPPPQPFVGLPHAIPPPGCPANPYVHGYQAVTGFPVEEPVPLRQPRLPVCGLGMGWLLFFLGFFFGGIPWYVGTFILLCVKVDYREKAGYLACAIAILQSVVAMIAITFGLTKGGTRAW

SEQ ID NO: 68245 - protein, 191 aa, Gossypium hirsutum
  Clone ID: GOSHI-09MAY01-C90540_1.pep
MDNSKNRLNDHLGVNKIGKNIKKSPLHQPNFANNATRQQPQPQVYNISKNDFRNIVQQLTGSPSHNDPLPRPPQNPPKPQSMRLQRIRPPPLTPINRPHIPPLAPVPAPVPAHAPAPVPPPGPYNNPGLVRPGPPGQYGQPPSTMMQPMVPGDAPWANTADSPISAYMRYLQTSLIDPSQLEIKFNLNYIR

SEQ ID NO: 68246 - protein, 240 aa, Gossypium hirsutum
  Clone ID: GOSHI-09MAY01-C90560_1.pep
MNFHTRASVPLLPSLAMLLVFICLLLVSPLLVQSFDANASSTSAARALDALLQDSPRPPPRRPRTGVPYDARVPSNFTGISITAMRLRSGSLRTRGVRMYKEFEIPIGVVEQPYVERLVLVYQNLGNWSLRYYSLPNYTYLAPLLGLLAYDASNLSATDLPELDLRASGDPIKIKFSDVRPAPNGSLPKCVWFDLHGLVKLSNLTSANECSTIQQGHFSIVTESIAPPSPPTRSEGKESN

SEQ ID NO: 68247 - protein, 249 aa, Gossypium hirsutum
  unsure (1)..(249): unsure at all Xaa locations
  Clone ID: GOSHI-09MAY01-C90730_1.pep
RPRGSGGASRWSHGHHHHHHRGNKNLKXKDEDAAHRNSSQPVGDTPDDSLNADNASQPEIRKRKSSAGTNDGKSDTGFADGSAYSVKTSALKETSHSPSNLVFGYLNLFSDGVHNFTDGMALGSAFLLHGSVGGWSRTLFLLAHELPQEVGDFGILVRSGFSVSKALFFNFLSALVALAGTAMALLWGQDPGQSSLIEGFTAGGFIYIAVAGVLAEMNNNGKTTLKNTAVQLLSLASGMAVALYISLVE

SEQ ID NO: 68248 - protein, 207 aa, Gossypium hirsutum
  unsure (1)..(207): unsure at all Xaa locations
  Clone ID: LIB3543-062-Q6-K6-A12.pep
MSLRPSAGTEVRRNRYKVAVDAEEGRRRREDNMVEIRKNXREENLLKKRREGLFAEQQQPQQQQLLSSTAGSEKKLESLPAMVAGVWSDDRNMQLEATTQFRKLLSIERSPPINEVVQSGVVPRFVELLNRDDFPQLQFEAAWALTNIASGTSDNTRVVIDHGAVPIFVKLLGSPTDDVREQAVWALGNVAGDSPKCRDLVLGHGAL

SEQ ID NO: 68249 - protein, 166 aa, Gossypium hirsutum
  unsure (1)..(166): unsure at all Xaa locations
  Clone ID: LIB3543-030-Q1-K6-E11.pep
MSLRPSARTEVRRNRYKVAVDAEEGRRRREDNMGREXRENKREENLLKKRREGLFAQQQQPQQQQLLSSTAGSEKKLESLPAMVAGVWSDDRNMQLEATTQFRKLLSIERSPPINEVVQSGVVPRFVELLNRDDFPQLQFEAAWALTNIASGTSDNTRVVIDHGAV

SEQ ID NO: 68250 - protein, 100 aa, Gossypium hirsutum
  unsure (1)..(100): unsure at all Xaa locations
  Clone ID: uC-gsflnu33B137f01b1.pep
MSLRPSARTEVRRNRYKVAVDAEEGRRRREDNMVEIRKNKREENLLKKRREGLLAQQPQPQQQQMLSSALVXENKLESLPAMVXGVWSDDKNAQLEATTQ

SEQ ID NO: 68251 - protein, 253 aa, Gossypium hirsutum
  Clone ID: GOSHI-09MAY01-C90370_1.pep
MSSNPSNSGGSVGGGSGSCSGSAAAAAAGGGGGGGPCGACKFLRRKCVPGCIFAPYFDSEQGAAHFAAVHKVFGASNVSKLLLHIPVHKRLDAVVTICFEAQARLRDPVYGCVAHIFALQQQVVNLQAELSYLQAHLTTLELPSPPPPPPPPSQTLVAAPPLSISDLPSASSVPATYDLSSLFDPMVAQTSWAMQQRQIDPRQYGGTGSASSTGSGDLQALARELLQRQGSPHLPCTDASVSPAPSPSRSLSK

SEQ ID NO: 68252 - protein, 162 aa, Gossypium hirsutum
  Clone ID: GOSHI-09MAY01-C91890_1.pep
GQTADLAVLGTTMFTCIVWSLNCQIALTMSHFTWIQHVTIWGSIAAWYIFLLIYGAVSPRISGNAYQILVEALAPAPIYWQTTLLATIACTLPYMAHIAYQRCFEPEDHHIIQEIKYYRKDVEDQHMWTRERSKARQKTKIGFPARVDAKIRQVRAKLNKKQ

SEQ ID NO: 68253 - protein, 136 aa, Gossypium hirsutum
  Clone ID: GOSHI-09MAY01-C91850_1.pep
FQPQRAKHSPHECNEEVNMWVVKYNEGLKEVLKGLKSELPGLNYAFLDLYGIMQKVIRDPSAHGFKKVRAACCGLGELRAKIPCLPFSSYCPNRADHVFWDLSHPTEAMSRIVAETVFDGPSEYCVPMNVRQLIAS

SEQ ID NO: 68254 - protein, 180 aa, Gossypium hirsutum
  Clone ID: GOSHI-09MAY01-C91830_1.pep
MKNWFVIIFAFLVCQANAFRPILLLGNQNLIERTCKQTPFYDLCIWSLKSNPESRDASVKKLAQIMVDSLKTKATETLDLIDELLQDGLALDPEMQKALTSCAERYNVIIRGDVPEINEALKTGDYKFAAKGANDAAIEANSCEIEFSTKSPLTDMNKVVHDVSVVAASIVKIIQTKFSF

SEQ ID NO: 68255 - protein, 129 aa, Gossypium hirsutum
  Clone ID: GOSHI-09MAY01-C91550_1.pep
RVAHLRERFRALEVLFQPSMIGMEAAGIHETTYNSIMKCDVDIRKDLYGNIVLSGGTTMFPGIADRMSKEITALAPSSMKIKVVAPPERKYSVWIGGSILASLSTFQQMWIAKAEYDESGPSIVHRKCF

SEQ ID NO: 68256 - protein, 235 aa, Gossypium hirsutum
  unsure (1)..(235): unsure at all Xaa locations
  Clone ID: GOSHI-09MAY01-C91500_1.pep
MEKKTNYTQNGFPKVQWVKGGPSEGVTWYKGYFDAPEGDNPVAVKMTGMGKGMVYINGRNIGRYWMSYLSPLKRPTQSEYHIPRSYLQPTMNLIVIVEDEKGDPKDIEIVLVDRDTICGFITEKHLPSVRLFEGKGGKLVALEKDLKPRVELTCPSQKQIVAVEFASFGDPFGACGXYVEGNCTSPVAKQVVEKFCLGKPSCNIPLDTPDLHNKNEACPEMKKTLAIQAKCAFKA

SEQ ID NO: 68257 - protein, 129 aa, Gossypium hirsutum
  Clone ID: GOSHI-09MAY01-C91450_1.pep
DNKKNEDDDDDSDSEDGSGSDDEADERAEAGGSDDEDEETPKKVESSKKRPAEAATPVSAKKAKPAATPQKTDGKKGGHTATPHPSKQAGKTSGKSPKSGGQFSCGSCSKSFGSEGGLESHKKAKHGGK

SEQ ID NO: 68258 - protein, 177 aa, Gossypium hirsutum
  Clone ID: GOSHI-09MAY01-C91430_1.pep
STASTVEIHKSEIEKGICSSCDSTHVATAKLILHDGRLQEFPYPVKASYVLQKNPMCFICNADEMDFDDFVSAIEEDEELQPGQLYFALPLSWLNHPLQAEEMAALAVKASSALMKTTASEKCRRGSKAVTPFAFSEGSPRRKVSPAAGAGGGNGGEKRGRGRGRGQFKAVLSSIPE

SEQ ID NO: 68259 - protein, 319 aa, Gossypium hirsutum
  Clone ID: GOSHI-09MAY01-C91600_1.pep
IKRNWDTLLLNSTNMMILTAATMAGVTATSHGVSVLGLKLGSILLFSGATATLVIMNKIQPSKLLEEQRKATKLFKQLGSQVQTLITVGSPSKEDVKGVMAKILVIDKAYPLALLGGAMLEKFPESLEHAVWWPRNESQKENINRKVEMGNGWTKELESEMREIVEVIKRKDSQDYERLGNKALKINKVLATSGTLLTGIAALASTFMGSSNIGPWAATVATITGALASAVNTFEHGGQVGMVFEMYRNNAGFFKYMQESIESTLDESDVKKREDGALFEMKVALQLGRSLSQLRNLAKKSTYSRIEGIPIDEFASNLF

SEQ ID NO: 68260 - protein, 89 aa, Gossypium hirsutum
  Clone ID: GOSHI-09MAY01-C91180_1.pep
MASANRWLKPEVYPLFASVGVAVGICAMQLVRNITTNPEVRVTKENRAAGVLNNFEEGEKYAEHGLRKFVRNRQPQIMPSVNNFFSDPK

SEQ ID NO: 68261 - protein, 70 aa, Gossypium hirsutum
  Clone ID: GOSHI-09MAY01-C91120_1.pep
RINPDPNYISPKGPNHFKSRNPRALSVRRNHSASTALARSSTPPATPAPSVPCETAMDLFTSLRSRLERS

SEQ ID NO: 68262 - protein, 93 aa, Gossypium hirsutum
  Clone ID: AW187560.1.pep
INQRKQKQNRKKNENQITLWRLFCSSFSVLIFFCFCVCIRKKKEPPFPKIKSWAFIFEKGNQLKIYNIFVSIRCCFCFFLAGTVCWHAHGVGA

SEQ ID NO: 68263 - protein, 134 aa, Gossypium hirsutum
  Clone ID: GOSHI-09MAY01-C91340_1.pep
GIQQTYHQFPHEAVPRIFTSQLTIPTFLGRMLVGIPTILIVKFCSKALAKWILPVVSNTLGIPIKSTSYIPMLNGSATARKSSEIKQSSYMPKMLFFSQQDLFDVDTGIRFLQYAGLAWSVVDLVPSLFCHLRL

SEQ ID NO: 68264 - protein, 128 aa, Gossypium hirsutum
  unsure (1)..(128): unsure at all Xaa locations
  Clone ID: GOSHI-09MAY01-C91250_1.pep
MAKSSFKLEHPLERRQAEAARIREKYPDRIPVIVERAEKTDVPEIDXKKYLVPADLTVGQFVYVVRKRIKLSPEKAIFIFVKNILPPTAAMLSAIYEENKDEDGFLYMTYSGENTFGIIEAHDQDISM

SEQ ID NO: 68265 - protein, 257 aa, Gossypium hirsutum
  unsure (1)..(257): unsure at all Xaa locations
  Clone ID: GOSHI-09MAY01-C92920_1.pep
IIFHLLSASYAVVSIVALVQLCRXIQLRVSEYGWTTQKXFHLMNFIVNGLRAVLFGFYKSVFLVKSKALEMVLLDLPGLLFFSTYTLLVLFWAEIYHQARSLPINKLRPAYYSINGFIYFAQACLWISVRLSQSNLAVELSRLFISVISFCAALGFMIYGGXRLFFMLRRFPIERTRGRTRGFEVGFVTGICCTCCLIRCIVSTLSADMNAGLYVLDHPILNLIYYMFVEILPSALVLFILRKLPPKRVSEQYHPIR

SEQ ID NO: 68266 - protein, 90 aa, Gossypium hirsutum
  Clone ID: GOSHI-09MAY01-C92440_1.pep
NFFFLNNICLAAFINLFMCNMPKYRGKVYLLIKYCSDNLDSMTKTSIKLSPPDTNHSNHVVDNDMRKVYDLCHCSFFDAILSVVALYLDS

SEQ ID NO: 68267 - protein, 285 aa, Gossypium hirsutum
  unsure (1)..(285): unsure at all Xaa locations
  Clone ID: GOSHI-09MAY01-C92430_1.pep
VFESRPDAFVQIASLAIRTGNGLLLKGGKEARRSNAILHKIITSAIPDSVGDKLIGLVASREDIPDLLKLDDVIDLVIPRGSNSLVSQINNSTKKXIVRDAKIDYPAACNTMETLLLHQDLSNNDLLKELLAELRREGVTLYGGPRASSLLNLPRAQSLHCEYSSLACTVEFVDDVGAAIDHIHQHRSSHTDCIVTEDREVAEMFLHRVDSAAVFHNANTRFCDGARFGLGAEVGVSTSRVHARGPVGVEGLLTTRWILRGSGQVVDGDKGVTYSHKDLPLQTQI

SEQ ID NO: 68268 - protein, 79 aa, Gossypium hirsutum
  Clone ID: GOSHI-09MAY01-C92790_1.pep
FVLIEGIHSSIEFMFKLHVPIPSRSQAILHSRRHNHGVGATCLLFLFDRMGNQYQKIEFSFGSSFCTIMHCSKFSTKIW

SEQ ID NO: 68269 - protein, 38 aa, Gossypium hirsutum
  Clone ID: GOSHI-09MAY01-C92170_1.pep
VVSTPHPHFYKSQCLILVLLFLECEIHQSIMEPTFPHK

SEQ ID NO: 68270 - protein, 69 aa, Gossypium hirsutum
  Clone ID: GOSHI-09MAY01-C92160_1.pep
KKGFGRGGGGGGGGVGASVAAKNAYAAGSATSSSDEEMIPLKCCLMSITLPWEHIAYDLLFKGSPPVNL

SEQ ID NO: 68271 - protein, 104 aa, Gossypium hirsutum
  Clone ID: GOSHI-09MAY01-C92060_1.pep
SLSLSSSSDDRVLSLPAAPPLHSVAGYAQKWAFQPHFKAPLKAKPSASYKKQKKRTLTPLSNPIATTEKAFRRHVRGDSGVRGVGEQWLAREVAEHAWGGQWWE

SEQ ID NO: 68272 - protein, 134 aa, Gossypium hirsutum
  Clone ID: GOSHI-09MAY01-C93950_1.pep
MLSAQRARDISSEIEREFLREVEHAEELAKVIEPGSAEMPDAIETIFQAALALGRHGGVDQLMGDMESAALLYSKAERLLVFLLVEAPSLILNPPFSLTNSDRYRLRTYIDFLRNRQGYSRSQMMALLKCKVQP

SEQ ID NO: 68273 - protein, 291 aa, Gossypium hirsutum
  unsure (1)..(291): unsure at all Xaa locations
  Clone ID: GOSHI-09MAY01-C93960_1.pep
VRYPLVVAVLLDVPEDHRKILVAQGCIVKEIEPVLPPENQTQFAMAYYVINYSKLRIWEFVEDSKMIYLDGDIQVFDNIDHLFDMEDGYFYAVMDCFCEKTWSHTPQYKIGYCQQCPDKVQWPAXLGPKPPLYFNAGMFVYEPSLSTYDHLLATLRVTPPTPFAEQDYLNMYFRDIYRPIPPIYNLVMAMLWRHPENIELDMAKVVHYCAAGSKPWRYTGKEDNMDREDIKTLVAKWWEIYDDESLDYNNVVASGQAAEADEDKQSGLQLLLAALSKAGGFVHRINAPSAA

SEQ ID NO: 68274 - protein, 46 aa, Gossypium hirsutum
  Clone ID: LIB3825-018-Q1-K6-G10.pep
VPGLTPENQTQRAIGYYVINYCMLRIWKFVEYPKMIYLDGDIQVFD

SEQ ID NO: 68275 - protein, 187 aa, Gossypium hirsutum
  Clone ID: GOSHI-09MAY01-C93810_1.pep
RLDIDLGVASPLSEFLSPGDAIASLDGAAIHSMQDWIEMTALLDKKILHNSSDSHYFKGFGAVDSRKGYCVPNALLEDGKNVQLAKNQSVCPEDFTAFVKIYCFDPSKSVDMDGEDVDLGRKENALCLNTKDIVNLEKCNGRGKVKKNGSSCMCSEDESCLSPVQFPDLMWFEITYSRLYSERMLTT

SEQ ID NO: 68276 - protein, 161 aa, Gossypium hirsutum
  Clone ID: GOSHI-09MAY01-C93590_1.pep
NNPIPFFEPYPTKMDQIFLGLCHRLYNFITKYLATYAMKSVTLGDVSHQASAQLPSPGAESAISSSMTDQATHPVAEATPVEDSSLQAKVEPEPMYNHSESGIPSATSNEEKNEDVIEAAMSEARPPKKMVSINDTVEEMTATASKKKSKKKKRAEKMGSL

SEQ ID NO: 68277 - protein, 47 aa, Gossypium hirsutum
  Clone ID: GOSHI-09MAY01-C93510_1.pep
VQGNSTGSVVNELRVEDRDPLFVANVGDYYSGLAKTGSARWIRGGNN

SEQ ID NO: 68278 - protein, 127 aa, Gossypium hirsutum
  Clone ID: GOSHI-09MAY01-C93040_1.pep
ADCITRMVERANTPIIYLSTDAAESETGLLQSMVVLNGKTIPLVKRPPRNSAEKWDALLYRHGIEDDPQVEAMLDKTICAMASVFIGAPGSTFTEDILRLRKDWGTASLCDEYLCQGEGPNFIAGEE

SEQ ID NO: 68279 - protein, 124 aa, Gossypium hirsutum
  Clone ID: GOSHI-09MAY01-C93060_1.pep
GFHHLAANDGVRETIDPEITATCKDLGAVKKVFQLALLCTKRHPSDRPTMHEVTRVLGSLMPLEPPAKQPTTIPPAPLSSTKVTSYMDEYANLKTPHLVNCPSMSTSDAQLFINFGEVISRNSE

SEQ ID NO: 68280 - protein, 271 aa, Gossypium hirsutum
  unsure (1)..(271): unsure at all Xaa locations
  Clone ID: GOSHI-09MAY01-C93010_1.pep
VLVNLVVISNLHLLKFILSFGPVVFRIGSKVLELRKHKLTASTFAGAIGFWPLRRTQLWLEKLGAIEPFYGNLATCWGNIKEEEAFERYKQITGNTIEFPEFQVYGKMNPEDNWLAASPDGLVNRFVYGLPPGGVLEIKCPYIDGKMSEAFPWKRIPLYCIPQAQGLMEIMDREWMDFYVWTPNGSSLFRIYRDVKYWEXLKSALSDFWWKHVQPAKEICSKNVITDPLRELKSLRPDSRHESCGDIVRQSKLVADTSNLLICEINGQLIT

SEQ ID NO: 68281 - protein, 154 aa, Gossypium hirsutum
  Clone ID: GOSHI-09MAY01-C93020_1.pep
MESTCFVSLRPKYLFIAFTAKEGNHFSAQVPMIQRDTTGLTTENKELKLRLQAMEQQAQLRDALNEKLKEEVQRLRIQAGQVSAMNGNPFNRGLSPQYLTHQPAPHHFGVLQTPHQQQQQQQQQQQLQMPHSSTNNPTLNGQPQPHFMDFNQRA

SEQ ID NO: 68282 - protein, 242 aa, Gossypium hirsutum
  unsure (1)..(242): unsure at all Xaa locations
  Clone ID: GOSHI-09MAY01-C93390_1.pep
NTGCLTEELACQCISFYTQLGRLEEAKKVAENLCSGKISDSVQLWLLRVSVDIRCITKDSLSPSKADALSIFELFRTVLTKMSISEAESLWIMALKFFANQKKSFEKLIELSLKAVAKYGGSEKGFSLSSAVVNFILQKDGLKHARGVYKRFLAXLPHPGLALYKNCIELESNLAFFGNEDFLVNTRKLYEAALATYAQAPSLWKDSHSLETKLGTTETAAAIYWRARKSLKDSAVDFTSPD

SEQ ID NO: 68283 - protein, 66 aa, Gossypium hirsutum
  Clone ID: GOSHI-09MAY01-C93370_1.pep
VCRICISVGLSSWVGIMVVAECVGENRVMCMLFDMGFEYLFMFSGMDDDKCLLFKLGWVHSKHFLL

SEQ ID NO: 68284 - protein, 290 aa, Gossypium hirsutum
  unsure (1)..(290): unsure at all Xaa locations
  Clone ID: GOSHI-09MAY01-C93360_1.pep
VKEFGERKKSFEEEKERELDNINYLREVARREMEELKQERLKIEKERQEVNASKSHLEGQQIEIRKDIDDLVDLSKKLKDQREQLIKERNRFISFLEKQKSCKNCGEITSEFLLSDLKYLQEIENEGVPLLPSLADNYTSGKYFWGILLHLRRQMMSASVASGSPMSAGTMSWLRKCTSKIFKFSPAKNIEPHALKKLNVGPSLSSQQVNMKGMSTSENEPELTSVAATESXEIHRFQSDTSTRDVEAGQDLSVDNQNNMDCKELEALEDSQNCDLNHGKAVHRISRPNT

SEQ ID NO: 68285 - protein, 71 aa, Gossypium hirsutum
  Clone ID: GOSHI-09MAY01-C93270_1.pep
MKNKNYIFLLSFGCIFCYSFFSCVLCRNGRTEERGKGCVKEAVRGNRSWEPDPLALFWDVPEDSSARKLLR

SEQ ID NO: 68286 - protein, 67 aa, Gossypium hirsutum
  Clone ID: GOSHI-09MAY01-C88590_1.pep
SQIRGRQVREAFICSFMVGLRNRATEVIILLTIYSSLISASENHIIIRVSYFNFLLQFSINTFRLFL

SEQ ID NO: 68287 - protein, 278 aa, Gossypium hirsutum
  Clone ID: GOSHI-09MAY01-C88500_1.pep
AFESLRNYGFQPDTKIYNSMMMAYINAGEPRQGEQLLREMETRDIKPSEEIYMALLRSYARRGDAVGAGRIANSMQFAGFQHNLEYFALLVEAYGQAGDCDQARSNFDNMIKLGHKPDDKCTANMIAAYEKKNLLDKALNLLLELEKDGFEPGIETYTVLVDWLGRLRLVDETEKLLDKIAELGEVPPLKVHVSLCDMYSRATSEKKALQAVGVLEARKDELGPNEFERIITALCAGGFVQDAQRILQLMEAKGFAASEQVKFSLSSSQVINQKRPKK

SEQ ID NO: 68288 - protein, 114 aa, Gossypium hirsutum
  Clone ID: LIB3825-002-Q1-N6-F10.pep
PSGKSVIEMEPRFDDILKCPGRGLIVSGAAPPDSEFDFISRFFCPKYGIKKDPVCGSAHCALAPYWSQKLGKLDFVAHAASPRGGIVKIHFDEQNQRVFFLGKPVMVMEGGVLV

SEQ ID NO: 68289 - protein, 72 aa, Gossypium hirsutum
  unsure (1)..(72): unsure at all Xaa locations
  Clone ID: uC-gsflnu33B063h03b1.pep
EYPVCGSAHCALAXWSQKLGKLDFVAHAASPRGGIEKIHLDEQNHRVLLXGNAVMVMEGSVLVQIWSQICLP

SEQ ID NO: 68290 - protein, 103 aa, Gossypium hirsutum
  unsure (1)..(103): unsure at all Xaa locations
  Clone ID: uC-gsronu33B111f07b1.pep
VESNLTAPCETSILYPADGGNMHCFTAVTVCTVLDVLGPPYSDLEGRHCTYYLAYPFTKFSGDEQVSIPDEEKDXGALLQERDKPEDLVVEGALNTRPVIREN

SEQ ID NO: 68291 - protein, 92 aa, Gossypium hirsutum
  Clone ID: LIB3825-001-Q1-K6-G6.pep
MNDASISWIKYEGLARFGQVGIDLNFSQPNSDAEGRHCTYYLAYPFTKFSGDEQVSIPDEEKNNYAWLQERDKPEDLVVKGALYTGPVIREN

SEQ ID NO: 68292 - protein, 127 aa, Gossypium hirsutum
  Clone ID: GOSHI-09MAY01-C88110_1.pep
KKHQSLGEEELLRYCFSSAYIVALLHDSLGIALDDERISFANRVENIPLDWALGAFIVQNTAKLDAPQIDWITPIVSNDSPPLFSIIAVSAILMFIAWFILKWRNPELKPVYDLEKGRYIVTRIGRK

SEQ ID NO: 68293 - protein, 167 aa, Gossypium hirsutum
  Clone ID: GOSHI-09MAY01-C88050_1.pep
HASAFLMKAGKALHRKRAEIRVQFRHVPGNLYKRNFGTDLDKATNELVLRVQPDEAIYLKINNKVPGLGMRLDRSDLNLLYRARYPTEIPDAYERLLLDAIAGERRLFIRSDELDAAWSLFTPLLKELEAKKISPELYPYGSRGPVGAHYLAAKYNVRWGDVGGEDD

SEQ ID NO: 68294 - protein, 276 aa, Gossypium hirsutum
  unsure (1)..(276): unsure at all Xaa locations
  Clone ID: GOSHI-09MAY01-C88340_1.pep
MSFQNKSFWMAKGPPHVSDGDAAFDNPSRIEPKRSHGWFVDADSQLFPNKKQAVQAANNKSSSGISNSNVPPWENVSSFQSVPSPFIDRLFGSEXPERSVSFTERNISPIEADYMRRKSIEDHFGEDASFGLSISPSIEDPETCFNYGGIRKVKVNQVKDSDSGMHDPKELSFSRESNSEMSNIEAYNGENENSFISMGHSYDKRCDNVAVMSHTYNRDDMRITTPAYSKDNEIPISMANSYVKEDANILSFGGFHEEHEIIPVGRPLGSLTHHTV

SEQ ID NO: 68295 - protein, 90 aa, Gossypium hirsutum
  Clone ID: AW187653.1.pep
HCLPIISKCSESQALECLVRLASVRRSLFVNDAARSKFLAHLMTGTKDILQSEQDCSTKCILLYITIYHEIRRGYGSGAWLWTIWHHYYE

SEQ ID NO: 68296 - protein, 135 aa, Gossypium hirsutum
  Clone ID: LIB3543-050-Q6-K6-A1.pep
VGKSLDIVCQLSPNAVNPRYLQINPQENLSNSIKALECLVRLASVRRSLFVNDAARSKFLAHLMTGTKDILQSEQDCSTKCILLYITIYHEIRRGYGSGAWLWTIWHHYYECIIILYILFAYAVSKLASNSYKVA

SEQ ID NO: 68297 - protein, 276 aa, Gossypium hirsutum
  Clone ID: GOSHI-09MAY01-C89180_1.pep
MAIAAAAVIVPLGLLFFISGLAVNLIQAVCFVLIRPLSKNTYRKINRVLAELLWLQLVWLVDWWAGVKIEVFADHESFNLMGKEHALVICNHRSDIDWLVGWVLAQRSGCLGSTLAVMKKSSKFLPVIGWSMWFSEYLFLERSWAKDENTLKAGLQRLRDFPRPFWLALFVEGTRFTQAKLVAAQEYATSQGLPIPRNVLIPRTKGFVSAVSHMRSFVPAIYDITVAIPKSSPSPTMLRLFKGQSSVVHVHIKRHLMKELPEMDEAVAQWCKDLFV

SEQ ID NO: 68298 - protein, 65 aa, Gossypium hirsutum
  Clone ID: GOSHI-09MAY01-C84410_1.pep
YFELTVHTLILAFHPTRCPQKKSAFKLCRFQSLSQGRKKANTFASISILSSFFFSNKCRKVTEKI

SEQ ID NO: 68299 - protein, 99 aa, Gossypium hirsutum
  Clone ID: LIB3585-037-P1-K1-G7.pep
VKKSIKSTLIIKGSQFFLLKPSKQSKVHSLYQLFSSFQSSTLSIQPQLSELTNKIQKTITFLIKEKVKQLHQTLQRQQLHNILSLQYTHLSLESFPSRS

SEQ ID NO: 68300 - protein, 189 aa, Gossypium hirsutum
  unsure (1)..(189): unsure at all Xaa locations
  Clone ID: LIB3582-028-P1-K1-B6.pep
HSRSMGLVAVDKNTVAISSSDVMLSFAAYPIEIPGVVVFLHPVHNYALVAYDPSTLGPVGASVVRAAELLPEPALRRGDSVYLVGLSRSLQATSRKSVVTNPCAALNIASADCPRYRATNMEVIELDTGVLTDEHGRVRAIWGSFSTQLKFGCNTSEDHQXVRGIPVYAISQVLDKIIAGANGPPLLIN

SEQ ID NO: 68301 - protein, 180 aa, Gossypium hirsutum
  unsure (1)..(180): unsure at all Xaa locations
  Clone ID: uC-gsflnu33B146a07b1.pep
DSAAELLPEPALRRGDSVYLVGLSRSLQATSRKSVVTNPCAALNIASADCPRYRATNMEVIELDTDFGSTFSGVLTDEHGRVQAIWGSFSTQLKFGCNTSEDHQFVRGIPVYAISQVLDKIIAGANGPPLLINGVKRPMPLVRILEVEYYPTLLSKARSFGLSDELIQALVXKDPVRRQV

SEQ ID NO: 68302 - protein, 195 aa, Gossypium hirsutum
  unsure (1)..(195): unsure at all Xaa locations
  Clone ID: GOSHI-09MAY01-C84670_1.pep
PRVRKEHEDRVTRLGEQLDNLQKDLQARECSQKLLKDEVLRIEHDIMQAVAKAGANNDCELRKLLDEVSPKNFEKINKLLTVKDEEITKLKDEIRIMSAHWKLKTKELESQLEKQRRADQELKKRVLKLEFWPQEARSQTRKLQRMGERKDTALKELXKITGNQTNKTEAFGAEKQIFWETSGFKIVVSMSMLIL

SEQ ID NO: 68303 - protein, 232 aa, Gossypium hirsutum
  unsure (1)..(232): unsure at all Xaa locations
  Clone ID: GOSHI-09MAY01-C84160_1.pep
CLISPSVHGVGTSPSSEVFVHNLVAEESLVSRSSEFESAIXNGERSSLRVLCEKKSQESESQHDREAWGFLKVMFEDDGTAGTKLLMHLGFSPPAEEKDTVQNDLSQSVTDITLEEKVSYEKEATPFAADNGEDFFNNLPSPNADTPVATSENNFHVEGTVPSTDLTPQESDGLEGSADPSFDDAVLRALVVGDYKGAVAQCIAANKMADALVMLXCGGTFLWESTCDQYLK

SEQ ID NO: 68304 - protein, 203 aa, Gossypium hirsutum
  Clone ID: GOSHI-09MAY01-C84310_1.pep
MGNLFCCVQVDQSTVAVKERFGKFDEVLEPGCHCLPWCIGSQLAGHLTLRLQQLDVRCETKTKDNVFVNVVASIQYRALAEKANDAFYKLSNPRTQIQAYVFDVIRASVPKLDLDDAFEQKNDIAKAVEDELEKAMSAYGYEIVQTLIVDIEPDEHVKRAMNEINAAARMRVAANEKAEAEKIIQIKRAEGEAESKYLSGVGI

SEQ ID NO: 68305 - protein, 284 aa, Gossypium hirsutum
  Clone ID: GOSHI-09MAY01-C85810_1.pep
MVTGGLAPGLSRKLKKVLECRTDTPEVLASLNTLSTFYTENTPQARRNLRSTIEKRSLQINLDFLRASQAAQLALDRVEDEVNSLADCCDKIAKALSSCSASTGDIINTTERLNQELEVTTQKQQIVSYFLRDYQLSPQEISALRDEELNENFFKALSHVQEIHANCKILLRTHHQRAGLELMDMMAMYQEGAYERLCRWVQAECRKLGDNDNPEVGDLLKTAVRCLKERPVLFKYCAEEVANMRHNALFRRFISALTRGGPGGMPRPIEVHAHDPLRYVGDML

SEQ ID NO: 68306 - protein, 278 aa, Gossypium hirsutum
  unsure (1)..(278): unsure at all Xaa locations
  Clone ID: GOSHI-09MAY01-C85430_1.pep
TRDYCTXTSKHIIQMCLSAVRGSIEMGQFAHVTSYVSKAEQTPEALDPPTIAKLRCAAGLAHLEAKKYKLAARKFLEVGPELGNSYSEVIAPQDVATYGGLCALASFDRTELKNKVIDNINFRNFLELVPEVRELINDFYSSHYASCLEYLGNLKSNLMLDIHIHDHVETLYDQIRSKALIQYTHPFVSVDMRMMADAFKTSVAGLEKELESLITDNQIQARIDSHNKILYARHADQRNATFQRVGQTGNEFDREVRAMLLRASLLKHEYNLRASRKI

SEQ ID NO: 68307 - protein, 119 aa, Gossypium hirsutum
  unsure (1)..(119): unsure at all Xaa locations
  Clone ID: LIB3825-029-Q6-N6-F5.pep
MMADAFKTSVAGLEKELESLITDNQIQLDGEVESILVYTLVPWSEGSQFKWKWAFANXVIKARIDSHNKILYARHADQRNATFQRVLQTGNEFDWDVRAMLLRANLLKHEYNLRASRKI

SEQ ID NO: 68308 - protein, 410 aa, Gossypium hirsutum
  unsure (1)..(410): unsure at all Xaa locations
  Clone ID: GOSHI-09MAY01-C85620_1.pep
LNLIQYMSTDEVEGILRMQLAATHSNDPYVDDYYHQACLARKSAGATLRHHFCPTHLRDLPSRARANAEPHAFLQVDALGRVPFSSVRRPRPLLEVDPPNSSFVTNNDQKASDMPLELEPMLAARVTIEDGLCLLLDVDDIDRFLQFNQLQDGGAQLRRRRQVLLEGLAASLQLVDPLAKSGHTDELAQKDDLVFLRIVALPKGRKLLARFLQLLPPGGELMRIVCMSIFRHLRFLFGGLPSDPGAAETTVNLARVVSSCVHGMDLRALSVCLAAVVCSSEQPPLRPLGKPAGDWASXILKSVLDRATKLMTDSRAAGNYNTANLSLWKASFDEFFNLLTKYCINKYDTVMQSLRMQAKPNMAIDESDVTKAIKREMPVDLLHACLPHINDQQKKLILDLSQRSLVVGQS

SEQ ID NO: 68309 - protein, 341 aa, Gossypium hirsutum
  unsure (1)..(341): unsure at all Xaa locations
  Clone ID: GOSHI-09MAY01-C85050_1.pep
FASGASPYPGQNSLQRVVIFGDMGKAEADGSNEYNDFQHGSLNTTKQLIRDLNNIDIAFLIGDICYANGYLSQWDQFTAQVEPIASTVPFMIASGNHERDWPGSGSFYGNKDSGGECGVLAETMFYVPTENRAKFWYSTDYGMFRFCVADTEHDWREGTEQYQFIEHCLASVXLTKSHRGWIFLAHRVLGYSSATFYADTGSFGEPMGRESLQKLWQKYKVDIAIYGHAHHYERTCPIYQNICTNKEKQHYKGAMNGTIHVVAGGGGAGLAEFTTLNTKWSFFKDYDYGFVKLTAFDHLSLLFEYKKSSDGKVYDSFTISRDYRDILACTVDSCPSTTLAS

SEQ ID NO: 68310 - protein, 268 aa, Gossypium hirsutum
  unsure (1)..(268): unsure at all Xaa locations
  Clone ID: GOSHI-09MAY01-C85030_1.pep
QGKTPAFLASLTNLKYLVIGYFNAYVGGIPPEYGSLXNVGLLDMASCNLTGEIPSSLSNLKHLHSLFLQLNRLTGRIPSQLSGLISLKSLDLSINELTGEIPDSFSALNNITLINLFKNNLYGSIPSFVGDYPHLEVFQVWGNNFTFELPQNLGRNGKLYKLDVASNHLTGLIPRDLCRGGRLETFXMMENFFFGPLPEELGNCKSLTKIRIMKNLLNGTIPAGIFNLPLLSIMELGGNFFSGELPSQMSGASLGQLKISNIGSMAKI

SEQ ID NO: 68311 - protein, 129 aa, Gossypium hirsutum
  unsure (1)..(129): unsure at all Xaa locations
  Clone ID: GOSHI-09MAY01-C86930_1.pep
ERSLYMGNLNLLHRPLRXKWAVTYEEWPEEVYPPYANGPGYIISSDIAKFIVSQHADQKLGLFKMEDVSMGMWVEQFNQSTTVQYSHSWKFCQYGCMVDYYTAHYQSPRQMICLWDKLSRGQARCCNFR

SEQ ID NO: 68312 - protein, 123 aa, Gossypium hirsutum
  Clone ID: GOSHI-09MAY01-C86890_2.pep
KLGFYSRKKRKINRKYTICLCFYSLLFLFPSCRYGCAFVYGGPVGAWREEYRGEGIGRLLLRRRRKKGTLGFLKFLGHLGSFRVLGQSLGRGVLVIGSRGMYWRQSSVNRHYNGLIYYFLFWD

SEQ ID NO: 68313 - protein, 163 aa, Gossypium hirsutum
  Clone ID: GOSHI-09MAY01-C86890_1.pep
PLAKSFGPHPHRPQPQAYFRLLKSIFDLKIPPPPSTSTRQGRTNSRFARYGCAFVYGGPVGAWREEYRGEGIGRLLLRRRRKKGTLGFLKFLGHLGSFRVLGQSLGRGVLVIGSRACIGPKSVNRHLMDYILFFVLGLFFGCWARADLAHYNVNLSEGLNHKL

SEQ ID NO: 68314 - protein, 128 aa, Gossypium hirsutum
  unsure (1)..(128): unsure at all Xaa locations
  Clone ID: GOSHI-09MAY01-C86790_1.pep
QLREENKHNFEDAXELREVAHKHKIESEALESQLMERQFEVEASKKEIEKHLTEREILEKRVSELLERCRNIDVEDYNRLKNDVLQKEENLKEKDAQIEEITNLLCKKQDIISKLEQDLANSKLELNE

SEQ ID NO: 68315 - protein, 302 aa, Gossypium hirsutum
  unsure (1)..(302): unsure at all Xaa locations
  Clone ID: GOSHI-09MAY01-C86760_1.pep
MALLRRFNTIRSLYQTLGMHQSSSFLSSRSYSTGFSNVSQFYGQGVTSCLYKTQTNALPWTCRNTPTLRSTTVTFXAAELLIFLNDKKSLSTQAPTQTRKVGAQISMTSPGFVYEPYALREPIPFWKRYFTRTGWRQTKEDIKSELKSAYAIAKLRKTGYSKQKVYKEAVELYKEISTLVANGDKTSLRKAVTENMFSALKNEIKQRESIWSKVYWELVEPIVKIRTLRARLIGVDKNDLNKAFIQLTLEFLTKEKFEAYDSKGAVVAGDKMKEVLVRSIWVFEKSLFHSGAHWRLCGRIKV

SEQ ID NO: 68316 - protein, 150 aa, Gossypium hirsutum
  unsure (1)..(150): unsure at all Xaa locations
  Clone ID: GOSHI-09MAY01-C86130_1.pep
RRQPPIDTTWQQIYFCLRTGYYDEARQVALSSRASHQFAPLLAEWVNGGGMVPAHAAAAAAEECEKMFRMGDRVGRASYDKKKLLLYAIISGSRRRVGRLLRDIPSLFSTIEDFLWFILSAAQDFPGGTSSXGLVPYSLDDLQAYLTNLS

SEQ ID NO: 68317 - protein, 141 aa, Gossypium hirsutum
  Clone ID: GOSHI-09MAY01-C86330_1.pep
MAALTVLTKSLGYHCAKRSKISTFSQNFPSHNSRGRAGRSLFLEPSLSESVKLNRLSDYNSGIVEVNLDRPEAKNAIGKDMLSGLRHAFEAIDRDSSARVVMISSSVPKVFCAGADLKERKKMTAAEVHSFVNYLRSTFSL

SEQ ID NO: 68318 - protein, 198 aa, Gossypium hirsutum
  unsure (1)..(198): unsure at all Xaa locations
  Clone ID: GOSHI-09MAY01-C86200_1.pep
CPASADSVTLIGLLTACSHAGLAGLGFHYFNLMSSKYQIRPSKEHYGCMIDLLCRAGRLTEAEEMIKSMPFHRDDVVWSTLLRACRVQGNVDCGERAAEKLLEMDPNCAGTHITLANIYSAQGKMEXEAADVRKMMRTKGVMKEPGWSWIKVKDRVSAFVAGERSYPEGEEIYGMLDLLASRVDISVRQLGSLLDLED

SEQ ID NO: 68319 - protein, 200 aa, Gossypium hirsutum
  unsure (1)..(200): unsure at all Xaa locations
  Clone ID: LIB3825-016-Q1-K6-D10.pep
PIQLLXCKIXXEETPMNPKTLDEETKTSSTNSAEETSTTPTTSGVETPTIPGMLGRETLTIPTIVCEETTIPATLGQETPTLPATLGEGTHSIPSTSSEESHIIPTNLDEETPTDPVTLAEERPSIPETLGEETPTVPLTFSEETQVIPPSFSEGATIPPSFNEGSPTVPVTLGPETQTIPTTTGEETAHIPATSGEETT

SEQ ID NO: 68320 - protein, 129 aa, Gossypium hirsutum
  unsure (1)..(129): unsure at all Xaa locations
  Clone ID: LIB3826-002-Q1-K6-D3.pep
LLPFLQXLGEGTHSIPSTSSEESHIIPTNLDEETPTDPVTLAEERPSIPETLGEETPTVPLTFSEETQVIPPSFSEGATIPPSFNEGSPTVPVTLGPETQTIPTTTGEETANIPATSGEETTSAPVTLH

SEQ ID NO: 68321 - protein, 82 aa, Gossypium hirsutum
  Clone ID: GOSHI-09MAY01-C87000_1.pep
GQSQNRQDPSKKLKNPRARNFDDQSCTRLQINAIFQGLMLVFMEFVQKSINNMDSHFDPNDRLKHKEKKGFQIQSQKFRNQR

SEQ ID NO: 68322 - protein, 144 aa, Gossypium hirsutum
  Clone ID: GOSHI-09MAY01-C87310_1.pep
FSSASLPAADWVAMSSLVRNATSNFSRRVDGYELLDQSGETREENPSQYRTSSKRRPHSVVASLSYRRDRAKKRQIFLRSYKLSAMDNNWGQPKPKSRKLKKMVLKVKTVVVSLVSFMRIGSFKSCNCGSAICAAAPIAIKKCC

SEQ ID NO: 68323 - protein, 269 aa, Gossypium hirsutum
  unsure (1)..(269): unsure at all Xaa locations
  Clone ID: GOSHI-09MAY01-C87300_1.pep
PASAPRPRARGLSRTSSSSIPCRTNANMRKSELCDPTRXRSFNGSPFTMPAVITNPKAFNLNTPANSPSDFSRRHSTDRESVASLRDPNKENYIDQNPKPTRLRSPAVSKGKKNFMAPTISAASKINASPRKKILVERNELARSSVSFSDVKSLIMQHNESTSEIALKPKKVSFSDVKSMIMEDNECKEPLEGNANSVQVIPSFEISPKVSILAPLDADPLMLPHDPQTNYLSPRPQFLHYRPNPRIELYQEQDGKQLKECLATESYYD

SEQ ID NO: 68324 - protein, 165 aa, Gossypium hirsutum
  Clone ID: GOSHI-09MAY01-C87330_1.pep
RISEAVEYIYIMMGERISPGSYFQYPPPGFPSLSPHRPSSIPTDRERYLAELFTEKEKLGPFTQVLPQCTALLNQEIIRVSGFSPSLLDHERFEHDSPIRSFGHHPNGRQMDLEGWSIMQTEENGHLQRVAPVQAASMGWPGLPGAPTTPLVKKVVRLNVPVGSI

SEQ ID NO: 68325 - protein, 216 aa, Gossypium hirsutum
  Clone ID: GOSHI-09MAY01-C80830_1.pep
NNKSDKKKHAATQESVPQYIQLLDPKKAQNLAILLRALNVTTEEVCDALREGNELPVELLQTLLKMAPTVDEELKLRMFNGEISQLGPAERFLKVLVDIPFAFKRMEVLLYMCSLYEEVTFARESFETLEIACKELRSSRLFLKLLEAVLKTGNRMNDGTFRGGAQAFKLDTLLKLSDVKGVDGKTTLLHFVVQEIIRTESLRAARAARENKSSLS

SEQ ID NO: 68326 - protein, 173 aa, Gossypium hirsutum
  unsure (1)..(173): unsure at all Xaa locations
  Clone ID: GOSHI-09MAY01-C80530_1.pep
MGKKRKHSETQTAEPKKKDDAAPERPKRSLFGWKDKEEVQQQTESNTDPPQVFRNKEKVMVTCSRRINYRYRHLMLNMVSLLPHCKKDNKVESRNSKGATLNELIELRGCSSALFFECRKHQDLYLWMARCPNGPSVKFLVNAVHTMEELKLTGNHLXKGSRPLLTFSSNFEI

SEQ ID NO: 68327 - protein, 111 aa, Gossypium hirsutum
  Clone ID: GOSHI-09MAY01-C80440_1.pep
GDTIGPIVHDPKLSKSEKREEIVTPEVMNVGIMGSGTEATCSGLNQHRVPNPCNSSVEGGISPFVPEGRVHGGSLMAMLAGGSGLGSGNCEGLAGNPSEPNKSHMAPQKWM

SEQ ID NO: 68328 - protein, 74 aa, Gossypium hirsutum
  unsure (1)..(74): unsure at all Xaa locations
  Clone ID: GOSHI-09MAY01-C80710_1.pep
FVFEGMEHRRNQHXLGGDNLEGLCRALHPGPVSLLHWSGKGKPWLRIDSKRPCPLDSLWAPYDLFRHPSLFSNS

SEQ ID NO: 68329 - protein, 199 aa, Gossypium hirsutum
  Clone ID: GOSHI-09MAY01-C80670_1.pep
MISLRSNPSTAPPPPEDAWVTSYQRLLPHWHSVSLSHQHSTLPISISRVNQFDAARLDIELSAMLKEQLVKVFSLMKPGMLFQYEPELDAFLEFLIWRFSIWVDKPTPGIALMNLRYTDERAVALRGKVRTGLEGPGLTFAQKMWYCVAPVGGQYIWARLQSFSAFRRWGDSEQRPLARRAWGLMQRIEGLFKAASFGN

SEQ ID NO: 68330 - protein, 218 aa, Gossypium hirsutum
  unsure (1)..(218): unsure at all Xaa locations
  Clone ID: GOSHI-09MAY01-C80660_1.pep
MAYIQYGRHALRQIIKETNVQQSHDRLMQPLFYACQGIRYRKLDVILTTSIEKLGKAGETVKVAPGYFRNHLMPKLLAVPNIDKFAYLIKEQRKIYQPKEEEVQVVTKNVEDKSKVYEKAAYRLLNXRLVLRRSINVEKFRAQSTKDDPIELRSPVTKDEIGAEVARQLCVQIDPENLHLPTPLETFGLFDVQLRMPKSIPLPKGRYNWTLKVKIRGK

SEQ ID NO: 68331 - protein, 90 aa, Gossypium hirsutum
  Clone ID: uC-gsflmaxxa006e09b1.pep
MQNGRHALPCIMKETSVQERHERLMEPVIYACEGIRCRKSDVILTTSIEKLGKAGETVKVAPGYFRNHLMPKLLAVPNIDKFAYFIKEQR

SEQ ID NO: 68332 - protein, 150 aa, Gossypium hirsutum
  Clone ID: GOSHI-09MAY01-C80140_1.pep
GDQTQDLHSRIVLDHPRGYSQQVHKCIVAHSSGQAVFDGNVKVNRYAQQTDAGQLTRSLLLEPRATVNVKPNLQIIADDVKCSHGAAISDLEDSQLFYFQARGIDLETAREALVFSFGAEVIDKLPYSFVQKQVKDHVEALLKSRRKGSS

SEQ ID NO: 68333 - protein, 264 aa, Gossypium hirsutum
  Clone ID: GOSHI-09MAY01-C80160_1.pep
DAWVREFELLVKIILEGPVESPDEESDSTLSKPLTFRSQLAAFDKAWCSYLSSFMVWKVKDARSLEEDLVRAACQLELSMIQKCKLTPEGDKTALTHDMKAIQRQVMEDQKLLREKVQHLCGDAGIERMECALSETRTKFFQSEEGGSQTGSPITPSLSSSTDGSPSSLTARTDNGTDLAQMPNRVVRSLFKDDEDSTSSSKNSVSSVTSSSHLNTQLASSIEKQPVSENEWMVNEFLNERCGFVDSISGIEEDQIGIKAKIRE

SEQ ID NO: 68334 - protein, 97 aa, Gossypium hirsutum
  unsure (1)..(97): unsure at all Xaa locations
  Clone ID: LIB3585-049-P1-K1-C6.pep
KKXRVXXCEXXDVLXVXXSNKIPNXXNQXXQXRRKXXVGKIKSSGXKRTXXIDKXKICESXXLFGNLGXXSNXYRILESNXHFSNKSKFKPAQXXIA

SEQ ID NO: 68335 - protein, 190 aa, Gossypium hirsutum
  unsure (1)..(190): unsure at all Xaa locations
  Clone ID: LIB3543-035-Q1-K1-B11.pep
LTVSQLDSLRHQATQIVSMRLGRAEPPLRKEXVEYMLDVGSHMWSMRRSKANFFRIMNVLGGLIAVGKWFDQICNWKNPITTVLIHILFIILVLYPELILPTIFLYLFLIGVWYYRWRPRHPPHMDTRLSHADSAHPDELDEEFDTFPTSRPSDIVRMRYDRLRSIAGRIQTVVGDLATQGERLQSLLSW

SEQ ID NO: 68336 - protein, 97 aa, Gossypium hirsutum
  Clone ID: LIB3585-005-P1-K1-C8.pep
KLGNLNINKYFGISRKLGKEETQALKQFSYMLLTYNHLDSTYMRKTENSLTENKRVMIIKRKYTRWKLMRIQITIKSIRQQCLFLPMVLCVKGCLSQ

SEQ ID NO: 68337 - protein, 171 aa, Gossypium hirsutum
  Clone ID: uC-gsflnu33B136a12b1.pep
KRIETYQTYLMWKKAEITSSADIAPMVSASPRVRHSLSQMLQEESSEGYITDWGNAESLPAMVYQKDAPKGLKKLLKFARKSKGDANITGWSSPSVFSEGEDDAEESKVNNKRNSDNLLRKAALHTKNHGQEKTLLSDGFDRNLNSHELPSAQSGIRTFNTHKWHNGQRSA

SEQ ID NO: 68338 - protein, 235 aa, Gossypium hirsutum
  unsure (1)..(235): unsure at all Xaa locations
  Clone ID: GOSHI-09MAY01-C81190_1.pep
RSRVRGRVGGRVGGSKYELGDEVGRGHFGYTCTAKFKKGELKGQQVAVKVIPKAKMTTAIAIEDVRREVKILRALSGHSNLVQFYDAYEDHDNVYIVMELCEGGELLDRILSRGGKYTEDDAKDVMIQILNVVSFCHLQGVVHRDLKPENFLFTSKDENSQLKAIDFGLSDFVKPDERLNDIVGSAYYVAPEVLHRFYSTEADVWSISVIAYILLCGSXRPFWARTESGIFRAVL

SEQ ID NO: 68339 - protein, 108 aa, Gossypium hirsutum
  unsure (1)..(108): unsure at all Xaa locations
  Clone ID: GOSHI-09MAY01-C81170_1.pep
MVSGSNHIQNHNHHENGEKNPTLGGASRSWGTTVSGQSVSTSGSVGSPSSRSEQAMATPASENTFLRLNHLDIHGDDAGSQGAXGKKKKRGQRAVAGDKSGRGLRQFT

SEQ ID NO: 68340 - protein, 221 aa, Gossypium hirsutum
  Clone ID: GOSHI-09MAY01-C81090_1.pep
EVLKMECVVQGIIVPQYVEALEILLQGLCGVNKERLRVHEICLKSGPNLGFVASEVRLLGDLEQSEPTWTVKHVGGALRGAGVEQISVLVRSMVESKASKNVLRLFYALGYKLDHELLRVGITFHFQRGAQITVTVSSVNKMLKLHATDEAVPVTPGIQLVEVTAPATSENYNEVVAAVSSFCEYLAPLLHLSKPGVSTGVVPTAAAAAASLMSDGGGTTL

SEQ ID NO: 68341 - protein, 179 aa, Gossypium hirsutum
  Clone ID: GOSHI-09MAY01-C81050_1.pep
HLHFQIYDIFQQLPPKIQVGVFSATMPPEALEITRKFMNKPVRILVKRDELTLEGIKQFYVNVDKEEWKLDTLCDLYETLAITQSVIFVNTRRKVDWLTDQMRSRDHTVSATHGEMDQNTRDIIMREFRSGSSRVLITTDLLARGIDVQQVSLVINYDLPTQPENYLHRIGRGGRFGRK

SEQ ID NO: 68342 - protein, 187 aa, Gossypium hirsutum
  Clone ID: AI728358.1.pep
DYLGVKVHACVGGTSVREDQRILAAGVHVVVGTPGRVFDMLRRQSLRADYIKMFVLDEADEMLSRGFKDQIYDIFQQLPPKIQVGVFSATMPPEALEITRKFMNKPVRILVKRDELTLEGIKQFYVNVDKEEWKLDTLCDLYETLAITQSVIFVNTKRKVDWLTDQMRSRDHTVSATHGEMDQNTRE

SEQ ID NO: 68343 - protein, 141 aa, Gossypium hirsutum
  unsure (1)..(141): unsure at all Xaa locations
  Clone ID: GOSHI-09MAY01-C81230_1.pep
LNFKPSSSKNITINVSDPSSPICVKAPSPPLFGSNLYVFTLAELRLITHNFARCNLLGEGGFGPVYKGFVDDKLRPGLKAQPVAVKTLDLDGLQGHREWLAEIIFLGQLKHPHLVKLIGYCYXDENRLLVYEYMPRGSLEN

SEQ ID NO: 68344 - protein, 56 aa, Gossypium hirsutum
  Clone ID: GOSHI-09MAY01-C82970_1.pep
MKNVTDSFVSLGHWPSAGSFGVNTDILATNLINLSVVLGVLIFFGKGVCASCLFQE

SEQ ID NO: 68345 - protein, 178 aa, Gossypium hirsutum
  Clone ID: GOSHI-09MAY01-C82080_1.pep
YFLLCVIMHSNDNSDLLSSMSRLSAEAKKDQAVQHALAVRSAVTSGNYVLFFRLYKTAPNLNSCLMDLYVEKMRYKAVSCMSRSYRPQVPVSYIAQVLGFSSGVLTNEGSAEKESDGLEDCVDWLKTHGACLVVDSNGEMQLDAKASSSTLYMPDPEDAVAHGDSSRAVNDFLTRTSS

SEQ ID NO: 68346 - protein, 134 aa, Gossypium hirsutum
  unsure (1)..(134): unsure at all Xaa locations
  Clone ID: LIB3583-015-P1-K1-D10.pep
FFRLYKTAPXRTPSLMDLYVEKMXYLAVCCMSRSYRPHVPVSYIALELGFCYGVLSYVSSVVFESDGLXSELSGFRLXGACLVEDSYGEMLLDAKASSSTIYMPDPEDAEAHGDSSLAVNDFLTRTSSYPCTPF

SEQ ID NO: 68347 - protein, 143 aa, Gossypium hirsutum
  Clone ID: LIB3585-003-P1-K1-D4.pep
MSFSFLLASACLSDTTQILALHNMQNQDMNLVLSTDAKPRLKWTPELHQRFVEAVNQLGGPDKATPKNLMRVIGISGLTLYHLKSHLQKYRLGKSQQTEICLSDNLDDYREIQSSNRDLSSDTSDGTHKLMNESSKIAHALQM

SEQ ID NO: 68348 - protein, 132 aa, Gossypium hirsutum
  Clone ID: uC-gsflmaxxa043b07b1.pep
FSTKKGSKTTCEIQFPACLSYINLVLQNTQNQRMNLVLSTDAKPRLKWTPELHQRFVDAVNQLGGPDKATPKSVMRVMGIPGLTLYHLKSHLQKYRLGKSLGNNTDYKEMQSSNGNFIRDTSDGIHGHMNES

SEQ ID NO: 68349 - protein, 171 aa, Gossypium hirsutum
  Clone ID: GOSHI-09MAY01-C82390_1.pep
VRSMLITGGVTITRILTDPMAPSSFLQWMNHAGIHHISAISFLIMDFLLFFGVASLTAVQASRISQNITTNEMANVMRYSYLKGAGGLFKNPYDHGCRKNCTDFLFKGYNEDVEACEDIEHSKGIGVAQMLRNLNLANRNGHLAINANSSNTISHIHPSNCKHSHHSKART

SEQ ID NO: 68350 - protein, 294 aa, Gossypium hirsutum
  Clone ID: GOSHI-09MAY01-C82310_1.pep
MESKISIFLPTYNLCNLLVLVFFCFAACPSLGRLSFNFYATSCPAAELMVSNTVRAASSNDPTIPGKLLRLLFHDCFVEGCDASVLLQGNGTERSDPANTSLGGFSVIDSAKRVLEIFCPGTVSCADIIALAARDAVAIAGGPAFQIPTGRKDGRISNSVNVRPNILNTSFTMDEMIKLFNSKGLSLDDLVTLSGAHTIGLPHCSAFSDPFHQDSKGKLRLVDTSLDITYAKELIRKCPAGGSSTSNTVSNDPETSFAFDNQYYGNLLAHKGLFQSDSILLKDGRTRKQVEEFA

SEQ ID NO: 68351 - protein, 110 aa, Gossypium hirsutum
  Clone ID: GOSHI-09MAY01-C83950_1.pep
YQISLGFFFFLFIELSVARKMGIKQFIGYALAVLASLVVPAQGSDFAFYKLSLIWPTSACYPLANCKTPIPTFFTIHGLWPTFANDTAVPAYGPNNRCHANPVGSRCCCG

SEQ ID NO: 68352 - protein, 142 aa, Gossypium hirsutum
  unsure (1)..(142): unsure at all Xaa locations
  Clone ID: GOSHI-09MAY01-C83830_1.pep
MPTPPDTSKTLKLERYNNYLRKIHSTKLITASSKLLFRATLLIALILILFFTINYPPLSDTPHHVPPHHRLHHHSLLSTSLFSAGGGAAWEKQVRLSSTPRRTNGFSVLVTGAAGFVGSHCSLALKKRGDGVLXGLDNFNNY

SEQ ID NO: 68353 - protein, 93 aa, Gossypium hirsutum
  Clone ID: GOSHI-09MAY01-C58987_1.pep
SIESITRRRHVLSLRHLCFTSRAGEPFASRRYSKHGIDVRELLRSKRHYRLLLFFPKPNIFIRLVNLFLKFCPLSSSYMILIVKDMLLITNIK

SEQ ID NO: 68354 - protein, 142 aa, Gossypium hirsutum
  Clone ID: GOSHI-09MAY01-C58507_1.pep
MSTEAPATMEIETVPSEPKPESNPLPPKPKFEPLKAHEMSDGRVQFRKVSVPPHRYSPLKKYWVDIYTPVYEQMKIDIRMNLKARKVELKTRQDTPDISNLQKCADFVQAFMLGFDVPDAIALLRLDELYVESFEINDVKTL

SEQ ID NO: 68355 - protein, 365 aa, Gossypium hirsutum
  unsure (1)..(365): unsure at all Xaa locations
  Clone ID: GOSHI-09MAY01-C58487_1.pep
VDAPGLHHLYDCLVFPQXGERPHTNEASGSDLDGDLYFVTWEEALIPPSKKSSQPMQYDPDAPRELNRSVTHKDIIEFFSKNMVNEHLGSICNAHVVHSDLSEHGASDEKCIHLAELAAIAVDFPKTGKIVSMPAQLKPKLYPDFMGKEEFQSYKSNKILGRLYRYIKDAYDKDVSESSELNFGASDINYDADLEITGSADYITDAWAKKCSYDGQLIGLLKQYKVKREEEVVTGQIWSMPKYASKKLGDLKEKLGHSYGSLXRKEFRQLFENMDSEFEQLNEDEKNKLYERKASAWYQVTYHPEWVQKKLEFQKPDGDEGVVMLSFAWIAADYLARIKVRHQGTENLDFAKPVNSLVRYLADRI

SEQ ID NO: 68356 - protein, 199 aa, Gossypium hirsutum
  unsure (1)..(199): unsure at all Xaa locations
  Clone ID: GOSHI-09MAY01-C58697_1.pep
SPVGKPFIKAAFYFXEALQLLLPLNTSNTSVMSNYNMIFKIGAYKSFSEISPIVQFANFTCNQALLEVFEGCNRLHIIDFDVGYGGQWASLMQELVLRNGGAPSMKITAFASPSSHDDIELGFTIENLKHYASEINMDFDIEIMSLEALNSGSWPLPLHLGENEAIAVNLPIGSFSNYPSILPLVLXFVKQLSPKIVVS

SEQ ID NO: 68357 - protein, 173 aa, Gossypium hirsutum
  Clone ID: GOSHI-09MAY01-C58157_1.pep
GIFFIFFSFFIAGEQDPYFRMTRDVAPRIGYHKPALIESLFFPALQGETGKMSASDPNSAIYVTDSAKDIKYKVNKHAFTGGQETIEKHRQYGANLEVDIPIKYLNFFLEDDAELEHIKKAYGAGRMLTGEVKKRLIEVVTEIVERHRRARAAVSDEMVDAFMAVRPLPNMFD

SEQ ID NO: 68358 - protein, 320 aa, Gossypium hirsutum
  Clone ID: GOSHI-09MAY01-C58097_1.pep
MAQLPPKIPNMTQNWPSFPHQRLPTMANFISTTANTATMNASHHHQPSWVDEFLDFSSARRGAHRRSISDSIAFLEQPLVEECRDSNTNHNNNAMITETNVFDRLDDKQLMSMFSDDVAITMAAAPTLSSSNPSTPTSDQNSNNDEKPVPSLDLQQPKNEPGEVESSCKPEPQAAQPPSTSNGDPIVDPKRVKRILANRQSAQRSRVRKLQYISELERSVTTLQTEVSALSPRVAFLDHQRLILNVDNSALKQRIAALAQDKIFKDAHQEALKKEIERLRRVYQQQQILKKMNSNNSNNHHAPPQQQPSQPPQTKKEEQL

SEQ ID NO: 68359 - protein, 162 aa, Gossypium hirsutum
  unsure (1)..(162): unsure at all Xaa locations
  Clone ID: GOSHI-09MAY01-C58017_1.pep
PGESLEEAVRRETYEEAGIEVGEVVYHSSQPWPVGPSSIPCQLMVGFFAYAKSLEINVDKEELEDAQWHSREVVRKALAVAEYKKAQKTTAAKVDQMCKGVEKGRCLSADFNVESGGLTPMFXPGPFAIAPHLXISTWANQGVPTDGVEASSKQPSSSISNL

SEQ ID NO: 68360 - protein, 138 aa, Gossypium hirsutum
  unsure (1)..(138): unsure at all Xaa locations
  Clone ID: LIB3149-040-Q1-K1-C5.pep
KPGPTHASGPVLKSIEVFYHXPQPWPGGPCILPCQLMDKXFAYAKSLEINEDKEELEDAQCHIKEVVRKAFADAEYNNAQKTTATKVDQICKGVFKAPTFSSYFNVESCLLTPMFFPXPYTIAHHLISTFSNQGVPTF

SEQ ID NO: 68361 - protein, 187 aa, Gossypium hirsutum
  unsure (1)..(187): unsure at all Xaa locations
  Clone ID: GOSHI-09MAY01-C58387_1.pep
NNFEGLISTRVSTDDGSNIEAFDANTAVDARCGWXKDIGWLRSITNLPVLLKGVLTHEDAIKAVEVGVDGIVVSNHGARQLDYAPPTISVLEEVVSAVKGKIPVLFDGGIRRGTDVFKALALGAQAVLIGRPAVYGLAAKGEYGVKRVIEMLRDELELTMALSGCPTLNHITRXHVRTKHERPRSML

SEQ ID NO: 68362 - protein, 141 aa, Gossypium hirsutum
  Clone ID: GOSHI-09MAY01-C59857_1.pep
VRLTYLRNQLAEKDEFDIPDLTDNSRRQLFRTKSKRRFFFRVSEEQQKQQRREMLKDPFVRSKLISPPTNFNHLVHVGPANGRPGARDTSRALEEKGRVSRGSSGPQRPHSFSEALRRPASMGSEGLGGDADPLKRKPWTI

SEQ ID NO: 68363 - protein, 109 aa, Gossypium hirsutum
  Clone ID: GOSHI-09MAY01-C59877_1.pep
MLAARLVCLRTLPSRVFHPAFTKASPVVKNSITKNQWLLTPSREYATKTRIGMRRGRTGQELKEAAFEPSMEKIFKIDQMGRWFVAGGAAVGLGALCYYGLGLSNEIGA

SEQ ID NO: 68364 - protein, 139 aa, Gossypium hirsutum
  Clone ID: GOSHI-09MAY01-C59867_1.pep
MSMTLGYWDIRGLAHAIRLLLEYTDSSYEEKKYRMGHAPDYDRSQWLNEKFKLGLDFPNLPYLIDGTHKITQSNAILRYIARKHNLCGETEEEKILVDILENQLMDSRMEMVRLCFDPNFEKLKPKYLEELPEKLKLYS

SEQ ID NO: 68365 - protein, 182 aa, Gossypium hirsutum
  Clone ID: GOSHI-09MAY01-C59547_1.pep
MSSFEMSHIDLEQGTHRRNESEVSAGEASVCFSDADEGSCYSQFYSTTGGSYDEYSFGCEIGGDSDSRRVSSASDCSVEVRAPSGANELKLHLAKVEKDCRICHLGLESNSHESGAPIELGCSCKDDLAAAHKHCAEAWFKIRGNKTCEICHSIARNVVGVNEVESTEQPNETNSSTATTAV

SEQ ID NO: 68366 - protein, 153 aa, Gossypium hirsutum
  Clone ID: GOSHI-09MAY01-C59527_1.pep
MVKVTFNSALAQKEAKKDEPKSGEEALIIPPDAVAVDCKDPDDVVPVGQRRAWCWCMCFGLAFMLAGVILGGAYLYKYFALQPDDVYYCGIKYIKDDVILNEPSADAPAALYQTIEENIKIFEEEEVEFISVPVPEFADSDPANIVHDFNKKL

SEQ ID NO: 68367 - protein, 134 aa, Gossypium hirsutum
  Clone ID: GOSHI-09MAY01-C59457_1.pep
MNSLSEANTKVMFDLFQQVGKSQMNNTFYSPISITTALGMVLLGAKDNTAQQINKVLHFDQVPENTTEKAATYHVDRSGNGHHQLQKLLTELNKSTDAYELKIANKLFGEMTFQFLQEYLDAIKKFYQTSVESV

SEQ ID NO: 68368 - protein, 57 aa, Gossypium hirsutum
  Clone ID: GOSHI-09MAY01-C59447_1.pep
IWLLTFLLYCDNDSRLLFSVRNGGSKFLIKDTRYKATFYFCCDKKNQVTFYRYNVEP

SEQ ID NO: 68369 - protein, 285 aa, Gossypium hirsutum
  Clone ID: GOSHI-09MAY01-C59767_1.pep
MVLKSMDMDIRKLILVLFLLALVFGVAESFDYYESDLASEESLWDLYERWRSQHTVSRDLEEKQKRFNVFKENLKHIHKVNQMDKPYKLKLNKYADMTNHEFMSTRSSKVSHYRMLHGPRQMTDFRHDKTDNLPPSIDWRTKGAVTGIKDQGKCGSCWAFSTVVAVEGINKIKTGELVTLSEQELVDCDKENQGCEGGLMEQAFQFIKQSDGITTENYYPYRAKDESCDSSKLNGPVVIIDGYEMVPEKDEKALMKAVANQPVSIAIDAGGTDFQFYSEGVFIGD

SEQ ID NO: 68370 - protein, 125 aa, Gossypium hirsutum
  Clone ID: GOSHI-09MAY01-C59017_1.pep
MSAIPPSASQNSSSSGFQDFLPVMADKLGGDGLIGELCNGFNLLMDREKGVITFDSLKKNSAPLGLQDLTDDDLKCMMEEGDFDGDGALNQMEFCVLMFRLSPELMEASRFLFEEAFQHEFKDFH

SEQ ID NO: 68371 - protein, 134 aa, Gossypium hirsutum
  Clone ID: GOSHI-09MAY01-C59377_1.pep
MVLDLDLFRVDKGGDPALIRETQEKRFKDPGLVDQLVKADSEWRRCRFRADNLNKLKNLCSKTIGEKMKKKEPVEDDESVPENVLNFDDLTADALANLKVSQIKKVRLLIDEAILKCDAERIKLEAERFENLRE

SEQ ID NO: 68372 - protein, 115 aa, Gossypium hirsutum
  Clone ID: GOSHI-09MAY01-C59287_1.pep
HRMECMAQEPVLFEDILCQIIDMIKPEAESYITLRDLKGSKLSGSVFNILFNLNKFMAFETRDPFLIRQERENPTLTEWDRFAHREYIRLSMEDDVEDASNGSAEVWDESLEAPF

SEQ ID NO: 68373 - protein, 262 aa, Gossypium hirsutum
  unsure (1)..(262): unsure at all Xaa locations
  Clone ID: GOSHI-09MAY01-C59217_1.pep
LIVKWVQGLGYXGKLQRKENSQIKCFAAAEEEIVTSGFDNKIWRISLHGDQCGDGDSVDIGSQPKDLSLALLSPELALVTTDSGVVMLRCTKVVSTINLGFAVTASVVAPDGSEAIVGGQDGKLHVFCIVGDSLKEEAVLEKHRGAITVIRYSPDFSMFASGDANREAIVWDRVSRDVKLKNMLYHTARINCLAWSPNNSMVATGSLDTCVIXYEVDKPASSRMTIKGAHLGGVYALAFTDEHSVVSSGEDACVRVWKLTPQ

SEQ ID NO: 68374 - protein, 188 aa, Gossypium hirsutum
  Clone ID: GOSHI-09MAY01-C54027_1.pep
MATTAVLTLTPLSSTSFLTAHTYSKLSSALTSTSIKPKFRSYQIKAIKEKAEEIQTPPPAPPSSSVDEVTKKYGLEVGLWKIFSSKEEGGQKKSKGDQAKELLAKYGGAYLATSITLSLISFSLCYALISAGVDVQALLQKVGISTDATGEKVGTFALAYAAHKAASPIRFPPTVALTPIVAGWIGKK

SEQ ID NO: 68375 - protein, 151 aa, Gossypium hirsutum
  Clone ID: GOSHI-09MAY01-C54217_1.pep
FDEKGSEGETKGRHLRGKRSTESDGKADNGDDKIVVRSQTKKNRRLGLDKRIELKKNREEKSVVSGQSKKGISNESEKIDRLVRDYSASTDLVSLDWKKMKIPPVLPSTEHTWLFKLMQPMKALLEAKENLQKDLGRDPTEDELAEATNSS

SEQ ID NO: 68376 - protein, 123 aa, Gossypium hirsutum
  Clone ID: GOSHI-09MAY01-C55577_1.pep
IVDGTYCRTELVYKKGLSQEPNNPLLLANYAQFLYLVVHDYDRAEELFKKAIQMEPVDAEAHNKYAIFLWKAKKDMWAAEENFLEAIEVDPNNSYYPASYANFLWSTGGEDTCFPLGSSDGIA

SEQ ID NO: 68377 - protein, 117 aa, Gossypium hirsutum
  unsure (1)..(117): unsure at all Xaa locations
  Clone ID: GOSHI-09MAY01-C55477_2.pep
NKQDPRYMATIIMDSAKVVVLDIRFPTLPXVVELQRHQASVNAIAWAPHSSCHICTAGDDSQALIWDLSSMSQPVEGGLDPILAYTAGAEIEQLQWSSSQPDWVAIAFSTKLQILRV

SEQ ID NO: 68378 - protein, 346 aa, Gossypium hirsutum
  Clone ID: GOSHI-09MAY01-C55477_1.pep
MAASSDPNPEGSDEQQKRSEIYTYEAPWHIYAMNWSVRRDKKYRLAIASLLEHYNNRLEIVQLDDSNGEIRSDPNLSFDHPYPPTKTIFIPDKECQKPDLLATSSDFLRIWRISDDHSRVDLKSLLNGNKNSEFCGPLTSFDWNEAEPKRIGTSSIDTTCTIWDIERETVDTQLIAHDKEVYDIAWGGVGVFASASADGSVRVFDLRDKEHSTIIYESSEPDTPLVRLGWNKQDPRYMATIIMDSAKVVVLDIRFPTLPVVELQRHQASVNAIAWAPHSSCHICTAGDDSQALIWDLSSMSQPVEGGLDPILAYTAGAEIEQLQWSSSQPDWVAIAFSTKLQILRL

SEQ ID NO: 68379 - protein, 287 aa, Gossypium hirsutum
  Clone ID: GOSHI-09MAY01-C55717_1.pep
MASSKVITTTSQTNPDLPRQPSLCPSLSTLLADLQNQQNNQNQSQNGLGSMNMDDLLKNICSSPPPPPPTSDAHPQFAGVSISREGSFSLPKDVANKSVDEVWKDIVVGGDDQRQPTPPVGMTLEDFLTKAGAVREEDVRGVANQVGVGAGVYPVDPAVINGGGNHFSAFGNSGGVDHQRLVAVAGGGARGKRRAVEAPPLDKATQQKQRRMIKNRESAATSCVRTQAYTVELESLVTQLEEEKARLLREEAELNKARFKQLMENLVPVVEKRRPPRVLRRVHSMQW

SEQ ID NO: 68380 - protein, 106 aa, Gossypium hirsutum
  Clone ID: uC-gsronu33B162a10b2.pep
VQGFILLSPAVINGGGNHFSAFGNSGGVDHQRLVAVAGGGARGKRRAVEAPPLDKATQQKQRRMIKNRESAARSRERKHVRLSFFKIWLVAEKMERNSTWVNGNTF

SEQ ID NO: 68381 - protein, 60 aa, Gossypium hirsutum
  Clone ID: LIB3149-013-Q1-K1-H9.pep
AYTVELESLVTQLEEEKARLLREEAELNKARFKQLMENLVPVVEKRRPPRVLRRVHSMQW

SEQ ID NO: 68382 - protein, 212 aa, Gossypium hirsutum
  Clone ID: GOSHI-09MAY01-C56947_1.pep
GKSLRYLSMYDNRCLRYFKGHKERVVSLCMSPVNDSFMSGSLDHSVRIWDLRVNACQGILRLRGRPTVAYDQQGLVFAVAMEGGAIKLFDSRSYDKGPFDTFLVGGDTAEVCDIKFSNDGKSMLLTTTNNNIYVLDAYGGEKRCGFRLEPSPNTTIEATITPDGQYVISGSGDGTLHAWNINMRNEVAAWNSHIGVAACLKWAPRRAMFGAA

SEQ ID NO: 68383 - protein, 147 aa, Gossypium hirsutum
  unsure (1)..(147): unsure at all Xaa locations
  Clone ID: GOSHI-09MAY01-C56887_1.pep
MSTSAAAFRLICLLHSVIALSSGALMMFYMREKCTXFTHGIETATKLLGSTPHDQLLIRTSDSFAGLLLFAVGFLLFMVSFVKDREFQSFFAKGCTVLHGSVAVWRFWFERRVEDLAWDWLRQTVGDILLAFSWVFFLVYSWREKYD

SEQ ID NO: 68384 - protein, 104 aa, Gossypium hirsutum
  Clone ID: GOSHI-09MAY01-C56827_1.pep
LNPCKILIHSKREKRMQIYGGGGPGSNSGGQQLLNIPQQHRNHKHDSHNPPSGGDGASSGVVGGGVGRGGGGSMLVVEIRLWKDSLYPVRLLYKLMNYHPFSKS

SEQ ID NO: 68385 - protein, 84 aa, Gossypium hirsutum
  Clone ID: GOSHI-09MAY01-C56597_1.pep
IKQRRFFFFFFFKFLEYANIKSSSSKSLLSFTEWNKFTTAANAEHMTFRMNECLKGNLRLPDLANTHHDSTTEDVSSSRTRGER

SEQ ID NO: 68386 - protein, 91 aa, Gossypium hirsutum
  unsure (1)..(91): unsure at all Xaa locations
  Clone ID: uC-gsronu33B029g04b1.pep
FFYLIILFYIYLSFXFKYTFFNHFIFFIFFFIIKFFILNSLILFLIFILYSYFYIFIXLIISLYFFFYLYIFYTLLLSLISILFYFNPVLF

SEQ ID NO: 68387 - protein, 97 aa, Gossypium hirsutum
  unsure (1)..(97): unsure at all Xaa locations
  Clone ID: LIB3149-019-Q1-K1-B12.pep
CFGYKLAKDISREGRTSMSGDLTNTKGTRRMLGYSIFWSVLNLRLPSLLHQRDAPILKLNFMYKILILPTRSQNRKLPPXGNQVYAPRLDDPYSKNM

SEQ ID NO: 68388 - protein, 156 aa, Gossypium hirsutum
  Clone ID: GOSHI-09MAY01-C56187_1.pep
MSSVYSDPIHGTHPEPIDHFDRLPDSLLLLVFNMIGDVKALGRCCVVSRRFHSLVPQVENVVVRVDCVISDDDYSPSSSVKSRADGPFSTLFRLVFGGIVKPLQALGQFLGPERPSLNKTLNTSSSSSLSVGLGGGEDGERDQGGVTHHSSTQVLR

SEQ ID NO: 68389 - protein, 209 aa, Gossypium hirsutum
  Clone ID: GOSHI-09MAY01-C56177_1.pep
MENDDNRGDKKSAREEFENFESEANSVPFLKLSRVHSPESTRVESALDYVDVQLPETKHIQEDLLNFLDDSDPDIGPGLGIQGLDLVLKSFEEEIVVPTQATLPVTSLETGKSRPDLGFLLEASDDELGLPPSFSSVEQGVDIEGSVELGADGIEEMMGYEFPIPSYGSFDFGIGGDSDADNKNHSNSGDFVALGGLFEPIVEISELTS

SEQ ID NO: 68390 - protein, 65 aa, Gossypium hirsutum
  Clone ID: GOSHI-09MAY01-C56367_1.pep
HASGQNKGPPFKFLVPLVYAPVLPLIRLSLRKNPVLRDRLFTIVLAGAFIHGSYLVSDLYDAESK

SEQ ID NO: 68391 - protein, 231 aa, Gossypium hirsutum
  unsure (1)..(231): unsure at all Xaa locations
  Clone ID: GOSHI-09MAY01-C56307_1.pep
GNLTHWTSLSFTKLVISVIKILSGLYCKSSCGSSSIGKACGNSKAVGGVDEFALTTDCKVDRHDIIYISSXEKSSSMEWSSEKCFNKSQIEPGPSTQWLGHLVPSFQSENTSTNDSRLLKTRTRSSFASSCRGKLGNSYDEIPVASDWSGILSERPVGSKDDKWQVLEDSQDPFAFDEEEFVPSKWDLVSGSKKPSQTKKHRNLGPRNREVQIEHQCHTISQKELLVREIV

SEQ ID NO: 68392 - protein, 175 aa, Gossypium hirsutum
  Clone ID: GOSHI-09MAY01-C56257_1.pep
DGIIDDSCWSSEEFCRENKLWLALGETKADKVAWMKAKELKVNLVTVCPGLLMAPTFPNSHIQTSIPYLKGGQVMLQQGCLAIAEVGKVAKAHVSVYEGMNYGARWTGLMLLMGVVRRQQEAIELEKGLKMTGFLLGERHVVLSEEDEEEIPIKIRNSKLAALLNKINQRLPCKT

SEQ ID NO: 68393 - protein, 112 aa, Gossypium hirsutum
  unsure (1)..(112): unsure at all Xaa locations
  Clone ID: AI054797.1.pep
SNRTALIAGLTAGLGTALVAVIIGILLYKRHRRIVEAQERLRKERETILGAGGYGEVYKGILDDGTPVAAKCAKLGNTKGTDQVLNEVRILCQVNHRSLXWTLGCCVELDNL

SEQ ID NO: 68394 - protein, 109 aa, Gossypium hirsutum
  Clone ID: LIB3165-060-Q1-K1-F7.pep
PRVREIKKATNNFSKDRILGAGGYGEVYKGILDDGTPVAVKCAKLGNTKGTDQVLNEVRILCQVNHRSLVGLLGCCVELDQPIMVYEFIENGNLLDHLQSPNINDRSLL

SEQ ID NO: 68395 - protein, 46 aa, Gossypium hirsutum
  Clone ID: GOSHI-09MAY01-C57847_1.pep
RRKKMKKQLGHRFPLFAVLVKEGATRDDSPPQEEVLGRNGSLVPKM

SEQ ID NO: 68396 - protein, 238 aa, Gossypium hirsutum
  Clone ID: GOSHI-09MAY01-C57587_1.pep
QKFPNADPLALRLLQRLLAFDPKDRPTAEEALADPYFKGLARVEREPSCQPITKMEFEFERRRVTKDDIQELIFREILEYHPQLRKDHMNGTERANFLYPSAVDQFKKQFAHLEENGGKSAPVIPLERKHVSLPRSTIVHSNTIAPKEQQPSLKSLKERQNAEEAYQASKSLQAQQRIPLAKPGKIVGPVALYENGTIMKDAYDTRTFIRSTGLPPQAVHPAYTYSKSNTGNQERSER

SEQ ID NO: 68397 - protein, 213 aa, Gossypium hirsutum
  unsure (1)..(213): unsure at all Xaa locations
  Clone ID: GOSHI-09MAY01-C57567_1.pep
GKHKQHVNILKQYRSKAEYYXCSCLNKNNDTTTNIDRTPGGLLYIRQWNNMQYVTTAAFLLTIYSEFLQDLNQNLRCPAGTVDHEEILSFAKSQVDYILGSNPMNMSYLVGYGSKYPTKVHHRGASIVSYRENKGFIGCTQGYDHWYNRAEVNPNVLVGAVVGGPDSEDNFWDQRDNYMQTEACTYNTAPLVGVLAKLLQLEENHELELLASY

SEQ ID NO: 68398 - protein, 144 aa, Gossypium hirsutum
  Clone ID: GOSHI-09MAY01-C57677_1.pep
AILLNTCLACPLASILHTPLDEQSARFCAASIVTALEDLHENGVLYRGVSPDVLMLDKTGHLQLVDFRFGKKLSSERTFTICGMADSLAPEVVQGKGHGLPADWWALGVLIYFLLQGEMPFGSWRQSELDSFAKIARGYFYSFT

SEQ ID NO: 68399 - protein, 127 aa, Gossypium hirsutum
  Clone ID: GOSHI-09MAY01-C57607_1.pep
VREFMECNSARFKGDTYHLIVKNCNHFCKDICYRLTGKHIPKWVNRLARIGSMCNCILPEALKTSVVKHDPNYQPYDSEKRRLRCAFSCLSSVSIRQKSSVLLQSPLRGCLPLWEPKKSNKLLLKER

SEQ ID NO: 68400 - protein, 63 aa, Gossypium hirsutum
  Clone ID: GOSHI-09MAY01-C57187_1.pep
KVKIFEIGTPTYHTEKEKDQSQTKQPASMWVFPRSKPKYWTKVSLSTVKCGNLNCFSTSGNET

SEQ ID NO: 68401 - protein, 144 aa, Gossypium hirsutum
  Clone ID: GOSHI-09MAY01-C57107_1.pep
SNSTSSTKINVEIVFPVSSDSMTKTSTSASPALISVKAGDDVILPVVPGVASGEGCSIHGGCASCPYMKMNSLGSLLNVCHHLPDERNNLKAYETERFKSQTPQGKSIADVGCQPILHMRHFQAKKELSEELVYQVLGSHGNGK

SEQ ID NO: 68402 - protein, 54 aa, Gossypium hirsutum
  Clone ID: GOSHI-09MAY01-C57137_1.pep
VNKIYRKELTLAFLLLTASVRSLLSAQGVHFYFLLFQGVTFLLVGLDLIGEQMS

SEQ ID NO: 68403 - protein, 146 aa, Gossypium hirsutum
  unsure (1)..(146): unsure at all Xaa locations
  Clone ID: GOSHI-09MAY01-C57257_1.pep
MVTNDYITMNGNGFSKRAEEFIKRYHELEVKENQCSSSLVKHIKAPVHLVWSLVRRFDQPQKYKPFVSRCVVQGXPSVGSVAEVNVKSGLPATTSTERLEYLDDDEHILSMTIVGGDHMLKNYSSIXTVHPEVIDGRPGTVVIESF

SEQ ID NO: 68404 - protein, 88 aa, Gossypium hirsutum
  unsure (1)..(88): unsure at all Xaa locations
  Clone ID: uC-gsflmaxxa064a03b1.pep
QKPWPEEEKRKKPVQKLTPGASGSGYRRVLERSETKRHRQAVFFIGPRIFWTDAVKLRTTAYLSLLVWCYWAQFSGPKFPXQGSIFLA

SEQ ID NO: 68405 - protein, 124 aa, Gossypium hirsutum
  unsure (1)..(124): unsure at all Xaa locations
  Clone ID: uC-gsronu33B007g06b1.pep
MVTNDYITMNGNGFSKRAEEFIKRYHELEVKENQCSSSLVKHIKAPVHLVWSLVRKFDQPQKYKPFVSRCVVQGDLQVGSVGEVXLRSGLPATXATERLEYLDXDXHILSMTICRGDHMLKNYS

SEQ ID NO: 68406 - protein, 206 aa, Gossypium hirsutum
  Clone ID: GOSHI-09MAY01-C57247_1.pep
HASAHASVRSVSPTPKRGPNNSRRSSRSMSPPKDDVRSSPRKSGARTSRSPLNSPSRKAPASNQGCIASRSPSPGGTSKRIRKGRGFTDRYSFARRYRTPSPERSPPRSYAYGGRNVPERNHDRYSSYRNHSDRSTRRRYRSPPRGRSPPRYEGRKSRSPSRSPVHYRRRYRDHSESQSPVRSPSPRDKRPAISEGLKSRLGPRID

SEQ ID NO: 68407 - protein, 243 aa, Gossypium hirsutum
  unsure (1)..(243): unsure at all Xaa locations
  Clone ID: GOSHI-09MAY01-C50887_1.pep
MNFPFTSQSHCEIKMATSKFFLSSLLLLLFVHGVLPRAESKTYWGDVDALKQLKNGVQPNSVSPGSCLGSWDFTFDPCDSLFSERFTCGFRCDLTVSGLSRVTEVTLDSAAYSGSLSSISWNLPYLQTLDLSNNFFSGRIPGSLSNLTRLTRLGLSRNAFSGEVPASIGSLSTLEELYLDNNNLQGPIPPTFNGLGSLKRLEIQSNNISGEXPELGSLKNLYFLDASNNVISGYLPTTLPPFL

SEQ ID NO: 68408 - protein, 176 aa, Gossypium hirsutum
  Clone ID: GOSHI-09MAY01-C50877_1.pep
GRVGLHGAEKETDPLDWGARMKIALGAARGLAYLHEDSSPRVIHRDFKSSNILLEHDFTPKVSDFGLARTAIDEGNKYISTHVMGTFGYLAPEYAMTGHLLVKSDVYSYGVVLLELLTGRKPVDLLQPPGQENLVAWARPLLTDKEGLEMVIDPAIKSDISLDSIAKVAAIASMCV

SEQ ID NO: 68409 - protein, 191 aa, Gossypium hirsutum
  Clone ID: GOSHI-09MAY01-C50487_1.pep
KVPSTSPKQLFLHAVSMWDAEFYVKVDDDVHLNLGMLATTLAQYRSKPRVYIGCMKSGPVLSEKGVKYHEPEYWKFGEDGNKYFRHATGQIYGISKDLAAYISINSPILHRYANEDVSLGSWLIGLEVEHVDDRSMCCGTPPDCEWKAQAGNICVASFDWSCSGVCKSVEKMKYVHNSCGEGDSSIWKSDF

SEQ ID NO: 68410 - protein, 90 aa, Gossypium hirsutum
  Clone ID: LIB3829-030-Q6-N6-C6.pep
VRQWTRTILAGYDGSGEVAFGSSRSFFAGLGSFPCPLDELGVFRFAVSTTSAESGELSFMLSPSFTFDEPDFNLPVPLVSGLPSFFRGLS

SEQ ID NO: 68411 - protein, 61 aa, Gossypium hirsutum
  Clone ID: LIB3146-020-Q1-K1-F11.pep
LIFFSSKVQEGYREFFNIPDSSVVAETAKRKSPSSSKGQGNDPKPAKKLRDEPKATSPVPS

SEQ ID NO: 68412 - protein, 172 aa, Gossypium hirsutum
  Clone ID: GOSHI-09MAY01-C50737_1.pep
AVSWDNWKRRIPLQRCGKDFTIMKVLPSGVYQYRFIADGQWRYAPDLPWAQDGTGNANNILDLQDYVPEDIASISSFEPPLSPESSYSNLPLGAEDFAKEPPLVPPHLQLPLLNLPASHMEIPPPLSRPKHVILNHLYIQKGKNGQPVVALGSTHRFRAKYVTVVLYKPVQR

SEQ ID NO: 68413 - protein, 127 aa, Gossypium hirsutum
  Clone ID: LIB3583-020-P1-K1-G7.pep
MPPPPPHYFSFSKESMDSTSATKLQLHKKKTWFLLLTFSLLLSTLLITISITSTSSTTPSLLNYAHNRKPKPPLPQFVESKLHVASISPNPVPKLAYLISGSAGDGVSLLRTLKALYHPRNQYAVHL

SEQ ID NO: 68414 - protein, 147 aa, Gossypium hirsutum
  Clone ID: LIB3146-019-Q1-K1-D9.pep
RTHASAHAVSHACGSSTTAGVLNYAHNRKPKPPLAQFVESKLHVASISPNPIPKLAYLISGSAGDGVSLLRTLKALYHPRNQYAVHLDLEASAEERLEVAELVENEPVFKRVGNVRMVTRANLVTYRGPTMVTNTLHAAAILFKEGG

SEQ ID NO: 68415 - protein, 86 aa, Gossypium hirsutum
  Clone ID: GOSHI-09MAY01-C50677_1.pep
EQNTMLAKQIKEREKTVAQQQQQQQQQPQWGQQNHGLNTSSFLLPQPPPCLNIGGTYQEETTEMRRNELDLTLEPIYSCHLGCFAA

SEQ ID NO: 68416 - protein, 124 aa, Gossypium hirsutum
  Clone ID: LIB3146-019-Q1-K1-G4.pep
LKELQNLEQQLDTALKLIRSKKNQLMYESISELQRKEKAIQEQNTMLAKQIKEREKTVAQQQQQQPLWGQQDHGLNTSSFLLPQPPPCLNIGGTYQEEATEMRRNELDLTLEPIYSCHLGCFAA

SEQ ID NO: 68417 - protein, 59 aa, Gossypium hirsutum
  Clone ID: uC-gsflmaxxa040h08b1.pep
VNRFQIKVQFSPPHFCCFFLVCATAKIVNYKQPNLLTKLLPLHYRQQKTKAYVDSRLLC

SEQ ID NO: 68418 - protein, 187 aa, Gossypium hirsutum
  unsure (1)..(187): unsure at all Xaa locations
  Clone ID: GOSHI-09MAY01-C50127_1.pep
NFTHSKTEEIRKKGFIAIKLEMSKTXDRVEWNFVQEMMVRMGFDPSWIESIMTCVSTTSYSVVFNGHIGENFRPTRGLRQGDPLSLFLFLICGEGLSCLMRLTLREGQLXGLRLAEGXPQVSHLLFKDDCILFGESTERGALLLKAILCEHGTFSGQCVNFDNSIVFFRNNTQEEETQSGYSHTRCS

SEQ ID NO: 68419 - protein, 56 aa, Gossypium hirsutum
  Clone ID: GOSHI-09MAY01-C50067_1.pep
VIIKLILQLGYKHKLRLFSSNVLELFMHIALLLKLVMRIIFSPFLLSNHIFGSPMF

SEQ ID NO: 68420 - protein, 91 aa, Gossypium hirsutum
  Clone ID: LIB3146-011-Q1-K1-C3.pep
QRFTGVDSGVDHGMIQSLESWPGITALIVGNWNDARRTNALIEVFAAPKVCETLGLPSLAYDLGHLGFSELGQGCNGLVGLGITGCGLIGL

SEQ ID NO: 68421 - protein, 47 aa, Gossypium hirsutum
  Clone ID: LIB3582-050-P1-K1-F5.pep
AHTQLYLNPLTHYTLDPTQRSPSGPISPHPVIPKPTNPSPDAWADAW

SEQ ID NO: 68422 - protein, 154 aa, Gossypium hirsutum
  Clone ID: GOSHI-09MAY01-C50307_1.pep
LGLLKLIMTGVAVVVVDRLGRRPLLLGGVSGMVISLFLLGSYYLFLDDLAAIAVVALLLYVGCYQLSFGPIGWLMISEVFPLRLRGRGLSVAVLVNFGANALVTFAFSPLKAWLGAGIVFYVFGVIAILSLVFIFFIVPETKGLTLEEIEVKCL

SEQ ID NO: 68423 - protein, 102 aa, Gossypium hirsutum
  unsure (1)..(102): unsure at all Xaa locations
  Clone ID: LIB3146-014-Q1-K1-H7.pep
SXXLNXSKHKVPKXXIRHXSPXXFXLXXXLXXPSGLXXYNLKXXIKDXRXXNIXXYHXXKHPLKHPIPGAPSXHALQRXENXQMGYEWAFGLRXXHKXTAPH

SEQ ID NO: 68424 - protein, 147 aa, Gossypium hirsutum
  Clone ID: GOSHI-09MAY01-C51947_1.pep
MGSIDTPTITENGSTQSQAAAPSGGDHKPPASANGAQVEVSPEPEGTKKRRSSMLPLEVGTRVMCRWRDGKYHPVKVIERRKMPYAVPYDYEYYVHYTEFNRRLDEWVKLEQLDLDSVETVVDEKVEDKVTSLKMTRHQKREDDETH

SEQ ID NO: 68425 - protein, 156 aa, Gossypium hirsutum
  Clone ID: GOSHI-09MAY01-C51937_1.pep
MHEKRNPITKLKAIICLSNSKPKPGSPSKENSSSYIQTQEDIFHLRHGLLVLHILATLMFVPSLVSWLQRIGMHQSFPRFLDSFLCICLILHGIFSSESLLNSEVPLPRIMVLYAMGAIGIISFALSILQAWTGATSVWKTKALAQVHPIPHPFCK

SEQ ID NO: 68426 - protein, 112 aa, Gossypium hirsutum
  Clone ID: LIB3146-037-P1-K1-B11.pep
CLSLFEFSQKCIHLNFFYHLVGPILRLQRIGMHQSFPRFLDSFLCICLILHGIFSSESLLNSEVPLPRIMGKEVRLNLIYLTAGIYSYLSGMELAPYKVLYAMGAIGIIFFA

SEQ ID NO: 68427 - protein, 40 aa, Gossypium hirsutum
  Clone ID: LIB3146-034-Q1-K1-D3.pep
RHPHLKETLLETNPQLMQIAFVEMTQGKESINLFYFFGPC

SEQ ID NO: 68428 - protein, 44 aa, Gossypium hirsutum
  Clone ID: LIB3146-034-Q1-K1-D5.pep
VLRTNVRGLSQLRIIVLYSNRDIFIRRKLYHKLFLIPCKFILVD

SEQ ID NO: 68429 - protein, 138 aa, Gossypium hirsutum
  Clone ID: GOSHI-09MAY01-C51557_1.pep
KAKNVKGKGSVGKTAKKPQSERVKKAGNEAANVDGSGNLSGASTVPEGVVTAESSRRGVVNSGRKQMARGTKNLGKLDLNVEFSNEVEEPAPRRNEGNHPGYGEEDNIEGNGFFEGLDEFLSSLPILSAVGDDKVKAT

SEQ ID NO: 68430 - protein, 104 aa, Gossypium hirsutum
  Clone ID: GOSHI-09MAY01-C51497_2.pep
CFVQIVGWPPVRSYRKNCLQGKKDDVEGGTGMYVKVSVDGAPYLRKIDLKVYRSYPQLLLALENMFKLTIGAYSEREGYNGSNYAPTYEDRDGDWMLVGDVPWE

SEQ ID NO: 68431 - protein, 153 aa, Gossypium hirsutum
  Clone ID: GOSHI-09MAY01-C51497_1.pep
MENDLNLKATELRLGLPGSDEPERQMTPRPNKRTLSDIVSEGSRSTTEEDHQDTAPPAKVQIVGWPPVRSYRKNCLQGKKDDVEGGTGMYVKVSVDGAPYLRKIDLKVYRSYPQLLLALENMFKLTIGAYSEREGYNGSNYAPTYEDRDGDWM

SEQ ID NO: 68432 - protein, 184 aa, Gossypium hirsutum
  unsure (1)..(184): unsure at all Xaa locations
  Clone ID: GOSHI-09MAY01-C51727_1.pep
THTVVRSTICARGGARGIYADTVGHRGYALQRGNXYAEHTGAPGDGEVLQXARVVIDCARANPDGRKRALLIGGGIANYTDVAATFNGIIRALREKEAKLKAARMHIYVRRGGPNYQTGLAWMRALGEELGVPLEVYGPDATMTGICKQAIDCIMSKHKRVLFLFSKIEVFCPCNLVFFGQSIN

SEQ ID NO: 68433 - protein, 82 aa, Gossypium hirsutum
  unsure (1)..(82): unsure at all Xaa locations
  Clone ID: uC-gsronu33B076h02b1.pep
EKTHASQLGNYAXYRTPNEEEVLXYARVVIDCATANPDGRKRALLIGGGIANFTDVAATFNGIIPALREKEAPLKAARMHIF

SEQ ID NO: 68434 - protein, 174 aa, Gossypium hirsutum
  Clone ID: GOSHI-09MAY01-C51677_2.pep
SLSFLHPLLTPPPQKKNHLCKQNFSLGGLEGACNTGLVLGLGFSSTLETPSKANNNQTPKKSSMSMAATSFEPSLTLGGAGGGYLHNHEEPGSGDLYRQASPHSAVSSFSSGRVKRERDLSCEEVEVEKNSSRVSEEDEDGVNARKKLRLTKDQSALLEESFKQHSTLNPKQKQ

SEQ ID NO: 68435 - protein, 179 aa, Gossypium hirsutum
  Clone ID: GOSHI-09MAY01-C51677_1.pep
MVLISLMGLDDDACNTGLVLGLGFSSALETPSKKPSCLKFEQPAATVAPPTTFEPSLTLGLFGDQGYQVTKKSDVNKSGYLHHHEEPGAGDLYRRQASPHSAVSSFSSGRVKREREVSSEELEVEKNSSRVSDEDEDGVNARKKLRLTKEQSALLEESFKQHSTLNPKQKQALAKQLNL

SEQ ID NO: 68436 - protein, 86 aa, Gossypium hirsutum
  Clone ID: GOSHI-09MAY01-C51187_1.pep
CGPKSICFRVARLFAHTNVFFFFFFFFLSRYMGTVTGISDLDQVRWPNSHWRSVKVIINIFLHGSHSRWFLLFGMDNIMFYFIMHV

SEQ ID NO: 68437 - protein, 95 aa, Gossypium hirsutum
  Clone ID: GOSHI-09MAY01-C51157_1.pep
NAYSGEAEMVVEGVETVAEVVEKVATTAEKVSTEVAEKLPDDSMLKIAAMEVEHVSDITAHDAHATTHFIHQVEEIKHELDDLVNKVGEARTPKN

SEQ ID NO: 68438 - protein, 80 aa, Gossypium hirsutum
  Clone ID: LIB3146-025-Q1-K1-B1.pep
VELGLVLKLLCQNCQFGNLLLLLCCECCFPMQLDLVKCVGSSMRRVPSPPSHFRCFHCLINICYLLHFLIIADTSTSKKR

SEQ ID NO: 68439 - protein, 111 aa, Gossypium hirsutum
  Clone ID: LIB3146-026-Q1-K2-A7.pep
VELGLVLKLLCQNCQFGNLLLLLCCECCFPMQLDLVKCVGSSMRRVPSPPSHFRCFHCLINICYLLHFLIIADTSTSKKKKTKKKKKKKNKKKKKNKLQNKKTKKKKTKKT

SEQ ID NO: 68440 - protein, 196 aa, Gossypium hirsutum
  Clone ID: GOSHI-09MAY01-C51047_1.pep
GYPSVIHWLQAYHQLILALCRLSPRLLLWPLVLLQVEIKLISRVSHNWVLHIEQAHLKRASVSESIKSKWSTASARYKETISKGTKGLKEKLLARNNSVKELSKGVQREMTAGVAKMIERLDISSKRSGASVPASGGTGSTSNILFKGKGVQDNVIAQNLTNNNVEFVRGLNSEAPSYPSRIMPDKLEASHPQRDH

SEQ ID NO: 68441 - protein, 74 aa, Gossypium hirsutum
  Clone ID: GOSHI-09MAY01-C51237_1.pep
KGGDIKRFLNTKRFFFHLFIWCSSFLVIGFVFIFFLYFLVIFLLKYKRERGNSPNRRSRRAGAISVTIGALAHG

SEQ ID NO: 68442 - protein, 169 aa, Gossypium hirsutum
  unsure (1)..(169): unsure at all Xaa locations
  Clone ID: GOSHI-09MAY01-C52987_1.pep
STRPQEQGAPVGGIGIQGHIGSPVGPVVCTALDKLGILGLPIWFTELDVSSINEHVRGEDLEVMLREAFAHPAVEGVMLGGFWELFMSRDNAHLVNAEGEVNETGKRFLALKHEWLSHARGQVDVKGQFNFRGFXGKYAMEIDTPSKKIVKTFVVDKGDTPWLFPLNYK

SEQ ID NO: 68443 - protein, 184 aa, Gossypium hirsutum
  Clone ID: LIB3584-050-P1-K2-G1.pep
PTRPKEIKMLREEVNSLEAKIAELQSHKSEDTTENKEMLVRKPPSLQKFDQKLVVTLDDAAQRYTPYIRYTKLEFKVDTFFAVGSPLGVFLALRNIRIGLGKGQDYWDEENISEEMPACRQMLNIFHPYDPVAYRIEPLVCKEHITKRPVIIPYHKGGRRLHIGFQEFTEDLAARSQGVMDRLS

SEQ ID NO: 68444 - protein, 93 aa, Gossypium hirsutum
  Clone ID: LIB3146-050-Q1-K1-D7.pep
PRVRLRVRPRVRPRVRISEEMPACRQMLNIFHPYDPVAYRIEPLVCKEHITKRPVIIPYHKGGRRLHIGFQEFTEDLAARSQGVMDRLSFIRA

SEQ ID NO: 68445 - protein, 93 aa, Gossypium hirsutum
  Clone ID: GOSHI-09MAY01-C52897_1.pep
EFVASGSPNSSYGQALPTEEDFAKEPVIVPSQLHQTVLGTDNQDGASSSKPQHVVLNHLFIEKGWASHSVVALGLTHRFESKYVTVVLYKPLK

SEQ ID NO: 68446 - protein, 110 aa, Gossypium hirsutum
  Clone ID: GOSHI-09MAY01-C52807_1.pep
MKSGYGVTLFLLFLFFSAFVFNYNEATSMAQVNGPSEMFPLVEEKMMLFNESRRKLGSFQICAVCTCCGGAKGACLPSPCCYAINCNIPNRPFGFCSFTPKTCNCFGCHL

SEQ ID NO: 68447 - protein, 176 aa, Gossypium hirsutum
  unsure (1)..(176): unsure at all Xaa locations
  Clone ID: GOSHI-09MAY01-C52717_1.pep
PRVRLDHPKSGPRSLSGEMSGFAGVPPTCMGHCLHKGFNHPGGYKCAPENVKVGSLQMYMKNAGSGEDVGPGGFPVEEAHKLSVLHIRMANADRRAGNIXLIGKRENDQTVLIPIDHGYCFPENFQDLTFDWIXWPQSRQPYSIETFDYIKSLEAEQDVALLRFXGWVIPLVRLTL

SEQ ID NO: 68448 - protein, 139 aa, Gossypium hirsutum
  Clone ID: GOSHI-09MAY01-C52617_1.pep
SGLVIWGMRDEFLVSKSIIHANIASPFAAEAHAGMDAVKLGIEMGFQEDQILGDSRTVIQKCQSTTRDYSVIGAIIGDIHSKKSCFQKIEFKYIQRTGNRRAHNIGSESLKKGENTHLESEELIRRTGGEVEQRVMNPD

SEQ ID NO: 68449 - protein, 144 aa, Gossypium hirsutum
  Clone ID: GOSHI-09MAY01-C52107_1.pep
SFDHKPERADEGERIEAGGGWVIKWNGHRVLGVLATSRSIGDGCLKPFVTSTPEVTVSELTNGDEFLILASDGLWDVVSNEVACGVVRRCLNSQMTKRKSSLQFVDGNRRAEAAAAMLVELAIARGSQDNISVIVVDFRNSTYH

SEQ ID NO: 68450 - protein, 240 aa, Gossypium hirsutum
  unsure (1)..(240): unsure at all Xaa locations
  Clone ID: GOSHI-09MAY01-C52067_1.pep
STTLLGFIVVRNTLLTXDGSNDRIGFLNTNCSELRRRVQLSGAPAPTPLVSPSKDTKMEIPSVLSPSGSPSNVLPGSSHVGFITFHMSISTTDSNFKSILKELTELISEELEVDNSQIRLLNVTSQEKDYLVRWGIFPAEPANYISNTIARSIILRLRDHRIQLPERFGNYKLMEWNAEPQRKLTSWQHRFLIMLVGSVTTLILSLSAIGIWLVHRQRQQTAYEPVGASIPERYLQPLQS

SEQ ID NO: 68451 - protein, 127 aa, Gossypium hirsutum
  Clone ID: GOSHI-09MAY01-C52007_1.pep
MPKTFSKLSSSTFFFHFTLLFFSATSSGSFSNILSPKKFGLKREKLTHLHFYFHDIVSSRNPTAIPVASAASTNKSHTGFGVVMMADDPLTAAPDPNSKLVGKAQGIYASAAQDEVGLLMVMNLAFM

SEQ ID NO: 68452 - protein, 235 aa, Gossypium hirsutum
  Clone ID: GOSHI-09MAY01-C53887_1.pep
MDAWSSSFLSTLTPSTKLLSPVITTTLRSTSPSPYYAPRPRVRSVRIEEKPPTSTTTTKTSHPPPPQSPKAWPPPAPSYASPSVGAKKRVEPRLSTMIFNTFDDIINNFIDPPLRPSVDPKHVLSHNFAPVDELPPTPCEVIQGSLPPCLDGAYIRNGPNPQFLPRGPYHLFDGDGMLHSIRISKGKATLCSRYVKTYKYSIENQMGSPVFPNVFSGFNGLTAAATRGALSAVRI

SEQ ID NO: 68453 - protein, 66 aa, Gossypium hirsutum
  Clone ID: LIB3146-058-Q1-K1-A2.pep
NNPQPHSISPRPALPQKEKTERSANELCHVHHGLLLETIMIWMNCYKNDKEVLYIMGNQIYPSRHS

SEQ ID NO: 68454 - protein, 93 aa, Gossypium hirsutum
  unsure (1)..(93): unsure at all Xaa locations
  Clone ID: LIB3829-009-Q6-K6-G10.pep
FCHVHHGLLLEGCSMELASELSSRKRRIVGRLSESGDLVLDKPCSGNIPHAFCRGARGGVLLPRPRAAPRVFRTRFLRAXQHFLXXCPFLVPR

SEQ ID NO: 68455 - protein, 204 aa, Gossypium hirsutum
  Clone ID: GOSHI-09MAY01-C53417_1.pep
PTRPQDFIVTLNEMKAEVSCVCRLYEYKGYLCRHAMVVLQINGHSAIPSQYILKRWTKEAKSRHFMSEESEQVQSRVQRYNDLFQRGMKLIEEGSLSQESYYIAFRSLEEAFGSCLSANTSNKSLAEAVASPSQGMICIEEDNQSRSTSKTNKKKNPTKKRKGNSEQEVMAVAPTDGLQQMVSSVLYISRLVKDVLMIYGTCIK

SEQ ID NO: 68456 - protein, 181 aa, Gossypium hirsutum
  unsure (1)..(181): unsure at all Xaa locations
  Clone ID: GOSHI-09MAY01-C53687_1.pep
GGWKATRLHYHSNFADNRGHIDHSARVMRVITWNSSFRGMTNGENRKDEGDSEEHESHATVLDKLLAWEKKLYDEVKQGELMKLEYKRKVAWLNKQKKRGASAESLEKTKAAGSHLHTRYIGDMQSXMDSTVSEGNRLRDEQVYPXLVMLGDGMANMWASMCIHHDRQLKVGEKLKSLDVA

SEQ ID NO: 68457 - protein, 229 aa, Gossypium hirsutum
  Clone ID: GOSHI-09MAY01-C53657_1.pep
SVDHSAPTLMGTLGVSNSILKQYGVEFAAEHILPLLTPLLTAQQLNVQQFAKCMLFVKDILRRIEENRGVTVTDSGVPDLKPATTSNGLQSQVLSKANGTVASAKSSPAWDEDWGPTTRAAANASHTAHQPPKDNLSFHFILDDKSIQSAPTQSQSSLISTISSQQTSNSCPAVDIEWPPRPSSGVTVESGIGEKQLNAGTSLSSNFEDLDPFANWPPRPSASQMTLEL

SEQ ID NO: 68458 - protein, 73 aa, Gossypium hirsutum
  Clone ID: GOSHI-09MAY01-C53377_1.pep
QTRTSKAQLSCTNQLINLNVCAPFMVPGATETQPSSLCCGALQAVQHDCLCSTLRIAAQLPSQCNLPPLYCAT

SEQ ID NO: 68459 - protein, 120 aa, Gossypium hirsutum
  Clone ID: LIB3146-055-Q1-K1-G7.pep
PRVRAFINMLSPSHIIPFGGAFNGKKWEKFNSEKVASLAYARIQGKAALVAHFQNSSLMNEDKRCRPILFHSEGPDGGDQTIPEHLHSSLNIIRQPNGLPSGDSSSSPKKKDAGEELETF

SEQ ID NO: 68460 - protein, 88 aa, Gossypium hirsutum
  Clone ID: uC-gsronu33B077e03b1.pep
NHQGTYDFLYLPIDFKNKCNVGYAFINMLSPSHIIPFYEAFNGKKWEKFNSEKVASLAYARIQGKAALVAHFQNSSLAFPWGIPTKSP

SEQ ID NO: 68461 - protein, 145 aa, Gossypium hirsutum
  Clone ID: GOSHI-09MAY01-C53327_1.pep
QMWDAKNIMCAADPRHGRDLTASAMFRGKMSTKEVDEQMLNVQNKNSSYFVEWIPNNVKSTVCDIPPNGLKMASTFIGNSTSIQEMFRRVSEQFTAMFRRKAFLHWYTGEGMDEMEFTEAESNMNDLVSEYQQYQDATAADEEDV

SEQ ID NO: 68462 - protein, 151 aa, Gossypium hirsutum
  Clone ID: GOSHI-09MAY01-C53207_1.pep
TEDLVVTADVKRLESWVRAEAEKSANVIEKRHHLELDAFAEQMRLKDEKLEGFRWRLLSMELESERAQAHVDGLNQDVSQLRQDNMKLEAMLLEREDELNSLKDQFASQSKPMTCQKSDILNISLHDPALTHDSFWPNVRIVKKKATEKEQ

SEQ ID NO: 68463 - protein, 351 aa, Gossypium hirsutum
  Clone ID: GOSHI-09MAY01-C53237_1.pep
MGFPDASAIGGGPEPDSESALLLRTSLKPEDKFNLGYIIYFTLGVGFLLPWNSFITAVDYFSYLYPEASVDRVFAVVYMVVGLACLLVIVFYAHKSEAYMRINVGLGIFVVSLVVVPVMDAVYIKGRVGLYDGFYVTVGLLALAGIGDALVQGGLIGAAGELPERYMQAIVAGSGGSGVLVSMLRILTKAVFPQDGDGLRKSAYLYFFATRPFMVICIVLFNVAHKLPVVQYYEELKAEAVKEEKAEKGPMTGPVWRATLWNIVGTVKWYGFGIVLIYVVTLSIFSGYITEDVHSLVLKDWYPVLLITGYNVFDLVGKSLTAVYLLENAKVAISACVVRLPVFPLFIGCLH

SEQ ID NO: 68464 - protein, 130 aa, Gossypium hirsutum
  unsure (1)..(130): unsure at all Xaa locations
  Clone ID: LIB3585-041-P1-K1-E12.pep
SSESSKKSTKGKRPGKRGNRFWKSIGLGFKAPREAIEGVLVSMLRILTKAVFPQDADGLRKSAYLYFXTSILFMVICIVLYNVAHKLPIMQXELKAEAVKEEKAEKGPMTGPVWRATLWNIVGTVKWYGF

SEQ ID NO: 68465 - protein, 98 aa, Gossypium hirsutum
  unsure (1)..(98): unsure at all Xaa locations
  Clone ID: GOSHI-09MAY01-C48977_1.pep
PTRPTKESVMSDEKKGKFVEXEDSEFEKVIDFHICSQSDVFVPAISGLFYANVAGKRIASGKPQILVPADIPATSAPITNYLSPYVAKRNHLAYSCFC

SEQ ID NO: 68466 - protein, 63 aa, Gossypium hirsutum
  Clone ID: LIB3135-051-Q1-K1-G8.pep
SFDNFRDLIWKLQARGSSATSHTITIHCLLLLCFELFYGMYRIGQWPKNILVNVYKPCENGIF

SEQ ID NO: 68467 - protein, 64 aa, Gossypium hirsutum
  Clone ID: LIB3582-051-P1-K1-F8.pep
LPNDNRKWSTTRYPRLFVYFLFIQNCPSMLLSLTYLKPSFAECPKLKGFYFLYTLTVRRSGSVG

SEQ ID NO: 68468 - protein, 46 aa, Gossypium hirsutum
  Clone ID: LIB3196-022-P1-M1-G12.pep
CLLRLLCFLCFIDLIWKLQARGSSAASHTITIHCLLLLCFELFYGM

SEQ ID NO: 68469 - protein, 212 aa, Gossypium hirsutum
  Clone ID: GOSHI-09MAY01-C48627_1.pep
GRTGSGKSTLIQTLFRIVEPAAGHIIIDGVNISSIGLHDLRSRLGIIPPEPTMFEGTIRSNLDPLEEYTDEQIWEALDKCRLGDGVRNKAGRLNSLVSENGENWSMGQRQLVCLGRVLLKKSKILVLDEATASVDTATDNLIQMTLREHFSDCTVMTIAHRITSVLDSDMVLLLSHGVIEEYDSPSSLLENKSSSFAQLVAEYTVRSNSGLN

SEQ ID NO: 68470 - protein, 218 aa, Gossypium hirsutum
  Clone ID: GOSHI-09MAY01-C48147_1.pep
NFSDAHGCGNRCVVPGCPRGPPRRPDCCVRHGGGKRCKFENCGKSAQGSTDLCKAHGGGKRCSWGEGKCEKFARGRSGLCAAHSSMLQERQASKGGLIGVFHGLVSATSTTGSSSNNNHSSSGNSVISDCIDSPDKPVKRQQLIPPQVLVPPSMKSSASYSSFLSSEQQDEGINRHGNHNAGGVGNTSFDFLIPEGRVHGGGLMSLLGGNLKNPIDGI

SEQ ID NO: 68471 - protein, 170 aa, Gossypium hirsutum
  unsure (1)..(170): unsure at all Xaa locations
  Clone ID: GOSHI-09MAY01-C48397_1.pep
RKIEWKWRKREQPDNGSIEGGVMKKLXAKEEEIEKIGKLNWALEERVKSLCVENQIWRDLAQTNEATANALRTNLEQVLAAAANTREEAEAAAADEVHDAQSCCGSNWEATAEKTVAGGGGRECRNCGKEEACVLLLPCRHLCLCTICGSTLHVCPVCKSTKNASVHVNL

SEQ ID NO: 68472 - protein, 119 aa, Gossypium hirsutum
  unsure (1)..(119): unsure at all Xaa locations
  Clone ID: LIB3135-044-Q1-K1-G8.pep
HASVEKMLVVMEERRKRGACKIFEAIEGVLINKLKAKEEEIEKIGKLNWALEERVKSLCVXNQIWRDLAQTNEATANALRTNLEQVLAAAANNREETEAAAADDVHDAQSCCGSNWEAT

SEQ ID NO: 68473 - protein, 139 aa, Gossypium hirsutum
  unsure (1)..(139): unsure at all Xaa locations
  Clone ID: GOSHI-09MAY01-C48357_1.pep
KNLTGTSSDEXDADDEWTDKSTREQASSASGKAFFFLSSDERNGGGGGANFIHLPPSSNSFSNSVHAKSRFGSSSSRNSSMRRAEMSASSNASNSRSGSSFKAGGSSNSKTGNSSNLSSNSDARKPRRKRRPKKRKQQA

SEQ ID NO: 68474 - protein, 81 aa, Gossypium hirsutum
  Clone ID: GOSHI-09MAY01-C48327_1.pep
HHAWGTNHRPSTRQPPAKTKLRHRENPRKSKKEKNSSQEEKTKKPNLCNSVIKVETSICSFFFWGTRTLANKITIAKKQEG

SEQ ID NO: 68475 - protein, 83 aa, Gossypium hirsutum
  Clone ID: LIB3135-044-Q1-K1-A1.pep
ASNDSVTDFSDVGDDPRATLAALGLQKWKHPFVVFFLGDTNFSKQNHNSKKTGRLILFLVLFYVLISFIFCIICFFIFIFIRK

SEQ ID NO: 68476 - protein, 193 aa, Gossypium hirsutum
  Clone ID: GOSHI-09MAY01-C49987_1.pep
SGSMHGIPMEVSVALGVLVSDLSEKPWKGKLITFSESPKLILVEGENLKEKTEFVRDMEWGGNTDFQKVFDLILKVVVEGNLKPEQMIKRLFVFSDMEFDQASMSPWETDYDVIVKKFTEKGYGDVIPQIVFWNLRHSRATPVPATQKGVALVSGFSKNLLKMFLDEDGDINPVAVMEAAISGEEYQKLVVLD

SEQ ID NO: 68477 - protein, 53 aa, Gossypium hirsutum
  Clone ID: uC-gsflnu33B050f08b1.pep
YRIYCKEELLLPLLLRIIEIKKKQNRLLKVIFFIYVFVCFILFLFLFYLLHKK

SEQ ID NO: 68478 - protein, 71 aa, Gossypium hirsutum
  Clone ID: LIB3146-010-Q1-K1-C6.pep
NKARWPKTLKNFGMARNPRVSGAPRAVATPCAPSARTTPDVCHRQPSFHRNGKLTLLCTSAIAGSKSERGG

SEQ ID NO: 68479 - protein, 217 aa, Gossypium hirsutum
  unsure (1)..(217): unsure at all Xaa locations
  Clone ID: AI725471.1.pep
QTLKIESRFGMEEIIQDSQVSTTSFQCLREVQVTECNKLKFLFPMCVANSLGQLQTLRIKSCSQLQEIIQGPVVLISMSQGLARLNKVKLINLPQLNGRDRNDIVLTSPSLHMLKVRDCPQLTPFIVSTNIQFSDMTEKKQISNVTVPERRGGTXXCTEYLTIFNFEELFEYSGYNLSSLKFLTLSELTELRVIWSGPTQVEHFQNLTQLTVDXCKG

SEQ ID NO: 68480 - protein, 135 aa, Gossypium hirsutum
  Clone ID: LIB3146-008-Q1-K1-G2.pep
PTRPLFPIIVDKGSSKKLNVPNLQTLKIERCFVMEEIIQDSRVSTISFQCLREIQVTESNDLKFLFPMCIANSLGKLQTLKIERCFGMKEIIQDSQVSSTISFQCLREVQVTECNKLKFLLPMCVANSLGQLQTL

SEQ ID NO: 68481 - protein, 149 aa, Gossypium hirsutum
  unsure (1)..(149): unsure at all Xaa locations
  Clone ID: GOSHI-09MAY01-C49817_1.pep
MDLVQLQRQLVDYRTSLYHEGFLDEQFTQLQSLQDENNPDFVVEVVSLFFEDSERLLNELSKALEQQVIDFKRMDAQVHQLKGSSSSIGAHRVQKLCIVFRNYCEAHNVEGCLKCLQQVKHEYXLLKPKLESMFQLEQQILNAGGSIPV

SEQ ID NO: 68482 - protein, 156 aa, Gossypium hirsutum
  Clone ID: GOSHI-09MAY01-C49807_1.pep
VRVSRRYGEKLKLSGQLSLGSLKPAATPPSTAAQKPASGKATTVEKGQVEAEGGKNLKQVNIPAGLRVVCKHLGKSRSASSAVAASPPAPTLSKRRDDSLLQQQDGIQSAILHCKRSFNGCQDSSESSGLPRSVSDPSHEKSINLSRNSSPDEAKA

SEQ ID NO: 68483 - protein, 122 aa, Gossypium hirsutum
  unsure (1)..(122): unsure at all Xaa locations
  Clone ID: GOSHI-09MAY01-C49657_1.pep
MKGEYLESKNQNPNNMFSKLHHHQHHPHQHQHQHQPQHQTHPFSXSLPTLSGDGASIEIVRRPRGRPPGSKNKPKPPVIITHEPDPAMSPYILEIPGGNDIVEAISRFSRRKNIGICVLTAS

SEQ ID NO: 68484 - protein, 195 aa, Gossypium hirsutum
  unsure (1)..(195): unsure at all Xaa locations
  Clone ID: GOSHI-09MAY01-C49297_1.pep
MDEIYGFYSMGDQYVDNALMLPENMIFPSDYQPRLCSSDRVPAFGSDELISVASAISEAAYVTPQIQGEVDVSNVIKAKIASHPYYPRLLEAYIDCQKVGATPEIARILDEILMETDVNKRDILPTCLGADPELDEFMETYCDMLVKYKSDISRPFDEATXFLNKIEMQLRNLCTGASITGPFGERCSVLFESTE

SEQ ID NO: 68485 - protein, 86 aa, Gossypium hirsutum
  Clone ID: GOSHI-09MAY01-C49247_1.pep
PPRPLPPPPPPPDPFAPPPPPHLYGAPPPPPPYYAAPPPPAPPHHHHPPGPPPPPHAFSPPPGPPPPPYFDPYRPPPPWNRPPPPY

SEQ ID NO: 68486 - protein, 76 aa, Gossypium hirsutum
  unsure (1)..(76): unsure at all Xaa locations
  Clone ID: LIB3583-034-P1-K1-C4.pep
ESLGYPRRNPHVQRLSTQXGGTTRHDPQLVRCSPTSIHVSTTYDLSKKIAGKLLVFGYKASKFFIVKGWVFWTFFF

SEQ ID NO: 68487 - protein, 104 aa, Gossypium hirsutum
  Clone ID: LIB3148-033-Q1-K1-F6.pep
KKNETLNHLKQIWLLYLSVCFDIIFIFNFFEKKVPKKTPYNEKFGGFIAEYKQFSCYFLAQIAGRGDVNGRGRLTNELGVVPGVPRVWWRGVDGRGWRTWAHGG

SEQ ID NO: 68488 - protein, 171 aa, Gossypium hirsutum
  unsure (1)..(171): unsure at all Xaa locations
  Clone ID: GOSHI-09MAY01-C44817_1.pep
QVIDPEFAFYGPMGFDIGAFIGNLILAFFAQDGHAGQGNDRKSYKEWILKTIEDTWNLFHQKFTALWDEHKNGSGEAYLPAIYNNPELQKLIQEKYMKELFHDTLGFGAAKMIRRIVGVAHVXEDFESIKEANIRADFEXRALELGKTLLKRRREFVSISEVISAMKHVQS

SEQ ID NO: 68489 - protein, 59 aa, Gossypium hirsutum
  Clone ID: GOSHI-09MAY01-C44437_1.pep
ERILQKGRPSKFFLFFFFFFFFFFFFFYKTQNFFLKKKKRKERKGKTEHPQRVIDYTWD

SEQ ID NO: 68490 - protein, 45 aa, Gossypium hirsutum
  Clone ID: LIB3148-030-Q1-K1-D6.pep
VFIINKLLHSPHLQLRSSYMRFSHATTWNLLHSFTRILATSIKKI

SEQ ID NO: 68491 - protein, 51 aa, Gossypium hirsutum
  Clone ID: LIB3148-034-Q1-K1-G3.pep
EKTSESCQYLSIHFLLRIVCMYVFQLLHCINVSFICNNNTVRYIKIDTQSL

SEQ ID NO: 68492 - protein, 123 aa, Gossypium hirsutum
  Clone ID: GOSHI-09MAY01-C44647_1.pep
ETGTLGYMAPEVLDGKPYNRKCDVYSFSICLWEIYCCDMPYADLSFAEVSSAVVCQNLRPEIPRCCPSSLASIMRKCWDAHPERRPDMDEVVRLLEAVDTSKGGGMIPDDQARGCFWFTCLGP

SEQ ID NO: 68493 - protein, 87 aa, Gossypium hirsutum
  unsure (1)..(87): unsure at all Xaa locations
  Clone ID: GOSHI-09MAY01-C44157_3.pep
GSGGYQIPRGFLFTIVPCANYTQEIYQWLXGFNIATQTVAGYVFLVVATSIMTNWALAKHRRLKKLFDGKDGRPKYPRRWVILPPFL

SEQ ID NO: 68494 - protein, 310 aa, Gossypium hirsutum
  Clone ID: GOSHI-09MAY01-C44157_1.pep
MKVTLVSRSGREFIKGGLELNDSATVADLQEAIHKRTKKFYPSRQRLTLPVPSGSRERPVILNYKKSLKDYCDGNENTLTIVFKDLGPQVSYRTLFFFEYLGPLILYPVFYYFPVYKYFGYEEKRVIHPVQTYALYYWCFHYFKRIMETFFIHRFSHATSPLSNVFRNCAYYWTFGSYIAYYVNHPLYTPVSDLQMKIGFGFGIVCQLANFYCHIILKNLRSPDGSGGYQIPRGFLFNIVTCANYTTEIYQWLGFNIATQTVAGYVFLVVATSIMTNWALAKHRRLKKLFDGKDGRPKYPRRWVILPPFL

SEQ ID NO: 68495 - protein, 101 aa, Gossypium hirsutum
  Clone ID: uC-gsronu33B149g05b1.pep
FKPAMILHKQRSILMHAHILKFHNLARIDLSMNSETMFQRRKFNISKSTMLIDPFYRNGGRITHLRGYFGLPSLPSNSCEQQEVKGKGNLKIDHGRNNGTQ

SEQ ID NO: 68496 - protein, 105 aa, Gossypium hirsutum
  unsure (1)..(105): unsure at all Xaa locations
  Clone ID: uC-gsronu33B169e02b1.pep
PLVRQEALHKRTKMFYPSRQRLTLPVPSGSRERPVALNYKKSLKDYCARNDNSLTIVCRDLGPQVAHGTLPFFEYLRPLILYPVXYYLPEYKHCGYQQKRAIHPV

SEQ ID NO: 68497 - protein, 87 aa, Gossypium hirsutum
  Clone ID: LIB3825-026-Q6-N6-F12.pep
GCNKGHHGPVHCVRFSPGGGSFASGSEDGTIRIWQTSPVTHDESDLLGSEPSGKVKAVADEVARKIESGLHIGGEGKTGDTDKATDA

SEQ ID NO: 68498 - protein, 50 aa, Gossypium hirsutum
  Clone ID: LIB3148-022-Q1-K1-C2.pep
TKPKRSLILRSKLPTLLKIKGSLAVHFISIEKTNRKGAERHHNPTNLARK

SEQ ID NO: 68499 - protein, 128 aa, Gossypium hirsutum
  unsure (1)..(128): unsure at all Xaa locations
  Clone ID: GOSHI-09MAY01-C44177_1.pep
TVTAKQWAEALEAAIAAVSKYGGASTGYRTLLDALMPALAVLKERLTSGEDSCTSFVLSSEAAVAGAGSTKDMQAQXAGRSSYVSAAILATVPDPGAMAAAAWYRAAALAVKDKFHPSFNSSINKSES

SEQ ID NO: 68500 - protein, 85 aa, Gossypium hirsutum
  Clone ID: GOSHI-09MAY01-C44057_1.pep
HASLLANTVINFFNNGYFQGPGDAPLEAGSACTGIFGSGSYPGYPGKLLVEKSTGASYNANGINGRKYLLPAMWDPQTSRCKALV

SEQ ID NO: 68501 - protein, 115 aa, Gossypium hirsutum
  Clone ID: GOSHI-09MAY01-C44067_1.pep
MAKTIFALSILLGFNYLATTVNAYAASGWTKAHATFYGGSDASGTMGGACGYGNLYATGYGTMTAALSTALFDDGASCGQCYNIKCDYQTDPRWCIKGKSVTITATNFCPQTLLF

SEQ ID NO: 68502 - protein, 122 aa, Gossypium hirsutum
  Clone ID: GOSHI-09MAY01-C44317_1.pep
RRVGFNVPRQFPWSAPILWLHERILEESKKRDRKNACGLLREIYQMEKCSRLLAAAPASVQFPLSEDKEREVKQRVKELEQVLDALKEDLEPLEKLVREVFHRIVRSRTEGLDSFARGHNPE

SEQ ID NO: 68503 - protein, 219 aa, Gossypium hirsutum
  Clone ID: GOSHI-09MAY01-C44327_1.pep
LKFLAVSAAPCGHCRQFLQELRAAPDVNILITATEKEKENKTINNRNDKDMQFAPLSYFLPHRFGPDDLLEKDVPLLLEPHRNGLSFCSDTRNGEINGDGDDSKYAALEAANASHAPYSGCPSGVALVDVEGKIYKGSYMESAAYNPSLPPVHAALVAYVASGGGGGYERIVTAVLVEKADAVIKQEHTAKLLLQCISPKCEFKVVHCNKNMLKCEYQV

SEQ ID NO: 68504 - protein, 92 aa, Gossypium hirsutum
  Clone ID: GOSHI-09MAY01-C44297_1.pep
KRGPPLFFFFFFFFFFFFFFFFFFFFFFFFFFFFFFFFFRALEGYTYFFHNQWGFQFQMVFNKTLVVGYTILACKYGNFTFTAHSTFMQLST

SEQ ID NO: 68505 - protein, 217 aa, Gossypium hirsutum
  Clone ID: GOSHI-09MAY01-C44287_1.pep
RQGYQVAPAPQVAQQKNHQISDGKSGSSSTSKDDGKKASSGKSHTTNGQTYFFDNSARSLNFVSSTVTGNRTPRARTSTTVAISPPVVANSSNSHQQLLQLQKQHMVQQHHQQPATASRSKVQTTNTMPASSIAAKFSSNAAIYTHTVPQSNPAAQSTPWKNSARTPASPATNVRPFPQQPLRPPQGQTQISFGVNTKSVLSPKAQEIPTAASLHRL

SEQ ID NO: 68506 - protein, 81 aa, Gossypium hirsutum
  Clone ID: GOSHI-09MAY01-C44257_1.pep
RFLNCVQAFVVARLDVIRARNQQWRRGWYASKHFVHGTSGSRMDSFFILLLLFRDEKNNPLRLLNRTLANIQLTCLLWFML

SEQ ID NO: 68507 - protein, 75 aa, Gossypium hirsutum
  Clone ID: GOSHI-09MAY01-C44217_1.pep
DLFSLLPAALVGNVLGSLTLSVDHILQALFRKIAAALPGMETLSSTKHEDMVDVNLKSSNSNGSQSQQESGGCAC

SEQ ID NO: 68508 - protein, 82 aa, Gossypium hirsutum
  Clone ID: GOSHI-09MAY01-C45977_1.pep
RIRKFKHFDCYVVLLFNQGLSLCGINNGKIVKQANSCWVKHLDLSVAYMVNMEILKSNLSSILNCEKKKKKERIISTKKNSE

SEQ ID NO: 68509 - protein, 77 aa, Gossypium hirsutum
  Clone ID: GOSHI-09MAY01-C45817_1.pep
DTTRMNYYKAYLTQLKKAVDNGANVIGYFAWSLLDNFEWRLGYTSRFGIVYVDYSTLKRYPKMSAYWFKQLLTRKKH

SEQ ID NO: 68510 - protein, 161 aa, Gossypium hirsutum
  Clone ID: GOSHI-09MAY01-C45517_1.pep
MGVFTKEAEVSTPLPPAKAFKAFAVDIENLMPKVAPQTVKSIEVLEGNGGPGTIRKITFAEGHGLSHAKHKVDVLDKDNLVYAYTVMESDFFNKKIEKISYDIKFVAAADGGSTVKVAATFYTAGDTEVTPDLMAQIKEASEKRALVMKAIESYILANPDA

SEQ ID NO: 68511 - protein, 130 aa, Gossypium hirsutum
  unsure (1)..(130): unsure at all Xaa locations
  Clone ID: GOSHI-09MAY01-C45717_1.pep
EQYVLPKFFKGAHLQVLDAAEYEESPDVPFNLITEGELVTTASFADDGEILDGMITRSRGEIRHMCSPKVTSSSGTTPSXNLRAFKAHGSSEKVYSPRISQLRGELSPGNAGRGPFSPRANEKPSNLGKG

SEQ ID NO: 68512 - protein, 206 aa, Gossypium hirsutum
  Clone ID: GOSHI-09MAY01-C45657_1.pep
LMEFGDFKLTIWGMLGTYGFERRILDTAKSLIEDDTFYTMELTEEWEPSHWIMHHRSSLCCICNSLLTKTSSSFRVRVFSCGHATHIQCELLENESSTRGLSSGCPVCLPKKNTHRSRSKTALTENGLVSSLPSRSQPAHGSTLHPHENDALDNSYGLQQISRFEILSNLQKDQRLAQIENLPQLRLAPSAIYHEKVKKGSGVLAA

SEQ ID NO: 68513 - protein, 94 aa, Gossypium hirsutum
  Clone ID: LIB3148-038-Q1-K1-E1.pep
RPRLPPNQTKKKRLLKRLEFGVSKSPTSSSEIALSKAVEEPNFLGNIHILNMLEDVNDIPHSEICTWLQCIGFFLVFYFHLSKGTIRTIIQCVM

SEQ ID NO: 68514 - protein, 85 aa, Gossypium hirsutum
  Clone ID: LIB3148-038-Q1-K1-E2.pep
LSLYSDGNKILKKIQYIGAMYKSPNGEYHSHLPTCLRYVYSLKNWAPSLPYLMQFHLRMLKTSPTQNSNIFIRQKIFVIVLSDAW

SEQ ID NO: 68515 - protein, 149 aa, Gossypium hirsutum
  unsure (1)..(149): unsure at all Xaa locations
  Clone ID: GOSHI-09MAY01-C46867_1.pep
SKSLRVVRSMXLYAILRMGILLAPPVGNSMAPHGAWKRTEFFLNHEALQQVIRVDQRQITRSLSGRTSDVTDMDKRAIRVDIPDIVSVSACADLTLPPGAGLCIDTTSGPVFLVADSWESLDGWLDAIRLVYTIYARGKTDILAGIITG

SEQ ID NO: 68516 - protein, 72 aa, Gossypium hirsutum
  Clone ID: GOSHI-09MAY01-C46767_1.pep
IWHILNTFPRHLQMLVEDSSQRLPLHKLLEHPWIVQDADPSGIYNAPDTFVRLYSFHDEYSLSKNVPDAWST

SEQ ID NO: 68517 - protein, 67 aa, Gossypium hirsutum
  Clone ID: uC-gsronu33B125e10b1.pep
GMVRWKTHCWWSNSFQLDITMTTIRFMILILGLSSALKAPETSLIVYESISYYLILQQRTKQLQLYS

SEQ ID NO: 68518 - protein, 58 aa, Gossypium hirsutum
  Clone ID: LIB3148-057-Q1-K1-G10.pep
HVNLNWIPSYKSCFTNIASCILPISLSIIVHTGEKDKRGLLLLCLKKIHTTRPVYFPK

SEQ ID NO: 68519 - protein, 123 aa, Gossypium hirsutum
  Clone ID: LIB3148-056-Q1-K1-E8.pep
PNAFPSLFSPKSETHLARSTIPPLVTGLPRLHLRSNGASSESSLQHLLPLNFKGLLRYKLDADERCKILHRNFWDLPDDACNILPAFKLSYYHLSSYLKRCFAYWSYFPKHYEFQIEKLIHLW

SEQ ID NO: 68520 - protein, 39 aa, Gossypium hirsutum
  Clone ID: uC-gsronu33B048g01b1.pep
STIPPPVTGLPRLHLRSNGASSESSLQHLLPLNFKETSY

SEQ ID NO: 68521 - protein, 136 aa, Gossypium hirsutum
  unsure (1)..(136): unsure at all Xaa locations
  Clone ID: GOSHI-09MAY01-C46617_1.pep
RSVPSLDQTAITFNARGDVIYAILRRNLEDVMSAVNTRRVKHPLFAAFRTLDAINYSDIATIPVDRCVLDFATEPTDSFVGLITMDDQEEMFSSXARVYEIGRRRPTDDDSDPDDAESDEDEDDDDDDADVDPILG

SEQ ID NO: 68522 - protein, 61 aa, Gossypium hirsutum
  unsure (1)..(61): unsure at all Xaa locations
  Clone ID: LIB3148-056-Q1-K1-B4.pep
NSILTITVDRCVLELXKHEPTNSFVGLITMDDQQEMFSSARVYEIGRRMPTDDDSDPDDAS

SEQ ID NO: 68523 - protein, 80 aa, Gossypium hirsutum
  Clone ID: GOSHI-09MAY01-C46197_1.pep
ILFFFSLLDSSLITTPFILFLATSNFLFFLDNFLKTLLKFRVSSTICSCTSLIAVVPSIGMVLSLESYTFLTFGLASQLI

SEQ ID NO: 68524 - protein, 129 aa, Gossypium hirsutum
  Clone ID: GOSHI-09MAY01-C46157_1.pep
MGRRILNDALRSIVNAERRGKATVELKPISNVISSFLNIMKYRGYIKNFEVHDPHRVGRITVDLQGRVNDCRALTYRQDIKAKEIEKYKTLKLPTHQWGYVVISTPDGVLDHEEAIRRNVGGQVLGYFH

SEQ ID NO: 68525 - protein, 93 aa, Gossypium hirsutum
  Clone ID: GOSHI-09MAY01-C46127_1.pep
PTRPKEEPPRKTTTNSSLTITTVRYGECQRNHAASSGGYVVDGCREFMASGEEGTSGALACAACGCHRNFHRREVETEVVSECSSPNNSSSRA

SEQ ID NO: 68526 - protein, 76 aa, Gossypium hirsutum
  Clone ID: GOSHI-09MAY01-C46057_1.pep
RLKINQLDIYVCVCVCVQESVNNSLGNLLTYPYVRDAMTSGQLALRGGYYDFVNGHFEQWRAFTPAPPLPPMPQPF

SEQ ID NO: 68527 - protein, 109 aa, Gossypium hirsutum
  unsure (1)..(109): unsure at all Xaa locations
  Clone ID: LIB3148-048-Q1-K1-H2.pep
ETHARPRVPRVRSHTYDFIDDWXKIGLAAKKRGPGXNNGLPCEELLKLCEKESVNNSLGNLLTYPYVRDAMTSGHLALRGGYYDFVNGHFEQWRAFTPPPPVMPPMPQP

SEQ ID NO: 68528 - protein, 140 aa, Gossypium hirsutum
  Clone ID: GOSHI-09MAY01-C46347_1.pep
GHAFGWILVVIICLFAFAYGRSWGPLGWLVPSELLPFDTRSAGQSMVVCVNLLFTALIAQCFLGSLCHLKYGLFSLFAGSIFIMSSFIFFLLPETKRVPIEEVYLLWKDHWFWKKYVEDDDEKDIKKPTTSYYLKYEKPL

SEQ ID NO: 68529 - protein, 118 aa, Gossypium hirsutum
  Clone ID: GOSHI-09MAY01-C47937_1.pep
MLQTLREEQRLTMDDSNIFPDTSVHLDGGSHRFMAASGYNVSELGRFGSGVSLTLGLQHYEDGSISMSGGSHHQNFVAMRGDDMYNHIPTGTGDFECMNPSNRQHRLSSSQLVHDFVA

SEQ ID NO: 68530 - protein, 145 aa, Gossypium hirsutum
  unsure (1)..(145): unsure at all Xaa locations
  Clone ID: uC-gsronu33B155e02b2.pep
KRRSNRCKKEKITFKNDIYKRKRRRALIKKEEKRKEKKIRKKNWKKRENXKYKAVRKEKKKNKKNKKXKKKDNKXKKKKYXKNRKKRKKQKQKKKINKYXNKKEKKKGKEEKYNKIKIKKKKLEYKSKYKRLLVKTNYREDNIQE

SEQ ID NO: 68531 - protein, 200 aa, Gossypium hirsutum
  Clone ID: GOSHI-09MAY01-C47927_1.pep
KPKEKSLGSSLSRKGGIVVVEEEDSPNSEATASAASSFERKVSRSRSVGCGSRSFSGDFFERISTGLGDCTLRRVESQREGKPKSSAVGAASSSSAMKERVKCGGIFGGFIITSSSSSSSSSSYWLSSSAEEHNGNGKATGAALIHGRSRSWGWAFASPMRAFTKPSSGKKDATTVIRESNNKNTTPNLAAIPSLLAVRS

SEQ ID NO: 68532 - protein, 206 aa, Gossypium hirsutum
  Clone ID: GOSHI-09MAY01-C47467_1.pep
ASNAMALDGIIFEGAPVKVRRPSDYNPSLAATLGPSQPSPNLNLAAVGLSPGSAGGLEGPDRIFVGGLPYYFTEAQIRELLESFGPLRGFDLVKDRETGNSKGYAFCIYQDLSVTDIACAALNGIKMGDKTLTVRRANQGATHPKPEQESILQHAQQQIALQRLMLQPQGVPTKVVCLTQAISEDDLRDDEEYGDIVEDMRQEGGK

SEQ ID NO: 68533 - protein, 34 aa, Gossypium hirsutum
  Clone ID: GOSHI-09MAY01-C47797_1.pep
KHENMQMRKLPSRFILILCILVYFFKLVQFSSLV

SEQ ID NO: 68534 - protein, 202 aa, Gossypium hirsutum
  unsure (1)..(202): unsure at all Xaa locations
  Clone ID: LIB3543-002-Q1-K1-H9.pep
VRPHLSKGDAMWCLLMSDLHVGRASTMEIPSLPSPNGCSPVSNTLESVDNNGVGVVSPALCRFHGGWGFGNGGDFAVNGLFSCGAEMTLQRDIECPKRFNLSPSMKSLLKKNVAIFAASFRANSKQMQTQNQACVGTLSSGDAPLAVAGDEVSAEKSEESQNLMSQDGVNSVLSKFRDLNIDENLERXWEDQKSEMIISLLH

SEQ ID NO: 68535 - protein, 64 aa, Gossypium hirsutum
  Clone ID: LIB3135-036-Q1-K1-F4.pep
LKKTPKTIMSSVPNIISTLSSLMTSHMLRTRICWIRRSWLIQICDSYDLSTKSSPPAKPEGHPH

SEQ ID NO: 68536 - protein, 137 aa, Gossypium hirsutum
  Clone ID: GOSHI-09MAY01-C47127_1.pep
MANAASGMAVDDECKLKFLELKAKRNYRFIVFKIQEQQVVVEKVGSPQETYEDFTAALPADECRYAVFDFDFTTDENCQKSKIFFIAWSPDTSRVRSKMVYASSKDRFKRELDGIQVELQATDPSEMSFDIIKARAI

SEQ ID NO: 68537 - protein, 154 aa, Gossypium hirsutum
  Clone ID: GOSHI-09MAY01-C47027_1.pep
MEGDKGTVCVTGGTGYVGSWLIKLLLELGYSVHTTVRADPGNNGRLSFLTNLPGANEGLKIFTADLNDPESFGTAIEGCKGVFHVAAPMDFQDNEPVAGVTQRSIDGTLRILKTCLTSNTVKKVVYTSSITAVYFNKIKNVEIMDESYWSDVDF

SEQ ID NO: 68538 - protein, 177 aa, Gossypium hirsutum
  unsure (1)..(177): unsure at all Xaa locations
  Clone ID: GOSHI-09MAY01-C47397_1.pep
MRASSVIAMDTLCHSARGDSMESVENYRGDVDDIHFPSSSTYGHLDMNETSELNYSNQAQQSICFQPAAEEVPGEMGISSTNDGEEIFNAEPETVTAQARDGXSFGISGGRVGMCASHEAEIHGADVSVHRTDSVVGDVEPRIEDVDYQGLTGESAPDPGLMDEFCPWRNKYGGYLR

SEQ ID NO: 68539 - protein, 108 aa, Gossypium hirsutum
  Clone ID: GOSHI-09MAY01-C47367_1.pep
NCRYSSYMYNKAAGFLKIKRNPFLVVDVIKAYRMEKCSVNLKMFKVVLNLCKEANIADEALLLLRKMPEFNLRPDTTAYNVVIRLLCEKGDMDMAHKLMKEICLIDLY

SEQ ID NO: 68540 - protein, 53 aa, Gossypium hirsutum
  Clone ID: LIB3147-035-Q1-K1-F10.pep
LLNLGSNSEAINFLFLLVDSIAVEGHMVGVVGKGIKVGYFISVFVFGIHIQLK

SEQ ID NO: 68541 - protein, 32 aa, Gossypium hirsutum
  Clone ID: LIB3148-025-Q1-K1-F4.pep
LKFFCSILVTGCKGEFIFLYIYDIHIRLSLFS

SEQ ID NO: 68542 - protein, 94 aa, Gossypium hirsutum
  Clone ID: GOSHI-09MAY01-C40517_1.pep
SFEILTNPARVVPAQEKFIKFLEDSRYAPVKLAPSGFVLLRDLRPDEPEALSLTDAPALAASPAAGSAAGQQSSSSAMAVDDEPQPPQPFEFTS

SEQ ID NO: 68543 - protein, 74 aa, Gossypium hirsutum
  Clone ID: LIB3147-028-Q1-K1-F11.pep
SLKPVDLCKKKKKQKQMAGARGEMINGGNYSPRIAGRPIPRRGQVKIAILMGIAHSFASIFSASSRRQSASHLS

SEQ ID NO: 68544 - protein, 75 aa, Gossypium hirsutum
  Clone ID: LIB3148-054-Q1-K1-F6.pep
IQALYKTDMNIDKKKKTAHIFPRTGNVYPPSSLGNVYPPSSLTFWEKLNNLGQVRCRLPATTCRENRSKRMGNPH

SEQ ID NO: 68545 - protein, 176 aa, Gossypium hirsutum
  unsure (1)..(176): unsure at all Xaa locations
  Clone ID: GOSHI-09MAY01-C40727_1.pep
METNSGVTVIGAEAPSTYHMAPRTENANQISSGLTPVDGLTPVDVPAVSVGLTGSTEKKKRGRPRKYGPDGKMARALSPMPISSSGPPGTAEFPSGGKPGRGRGSAYQIKHHKGMDIDNLGELAGTSIGTNFMPHVITVNPGEDVTMKXISFSQQGPRAICILSANGVISNVTLRQ

SEQ ID NO: 68546 - protein, 155 aa, Gossypium hirsutum
  unsure (1)..(155): unsure at all Xaa locations
  Clone ID: AI725988.1.pep
METNSGVTVIGAEAPSTYHMAPRTENANQISSGLTPVDVPAVSVGLTGSTEKKKRGRPRKYGPDGKMARSLSPMPISSSVPPGTAEFLSGGKPGRGRGXAYQIKHHKGMEIDNLGESPGTSVGTNFMPHVITVNPGEDVTMKVISFCXQGPRAIC

SEQ ID NO: 68547 - protein, 75 aa, Gossypium hirsutum
  Clone ID: GOSHI-09MAY01-C40697_1.pep
GRGRAGPNSGYRTGVRDTLLLGSKQFIKPGLFSSRLCLCQSCTIKSHMKGMDMCGYVSPVATGRLGSLLFIHLTL

SEQ ID NO: 68548 - protein, 157 aa, Gossypium hirsutum
  Clone ID: GOSHI-09MAY01-C40117_1.pep
MCALIDAAGSRISDTEKVGIVLAGLPSEFDTVLTLASFSSEPLPFQRLVEVLLEFESRQVRAVQEVPVHAHFVEAFSTPAVVDSGRGGRPSVSRVRAFRSCAQCQICGRFGHLAQLCYYRFNREYGGPESGVRASRGRLITVRVRQWWMVLCRMVVR

SEQ ID NO: 68549 - protein, 231 aa, Gossypium hirsutum
  Clone ID: GOSHI-09MAY01-C40107_1.pep
LAARYDMGAICLQEHSEKLQHLVDDAVDKGAEIVARGSFGHLSEGAVDQFFPPTVLKNVNHTMKLMQEETFGPIMPIMKFNSDEEVVKLANDSRYGLGCAVFSGSQRRAKEIASQIHCGVAAVNDFASTYMCQSLPFGGTKDSGFGRFAGVEGLRACCLVKAVVEDRWWPYIKTKIPKPIQYPVAENGFEFQESLVEALYGLNIWDRLRALVNALKIISEQNPCATSKIND

SEQ ID NO: 68550 - protein, 145 aa, Gossypium hirsutum
  unsure (1)..(145): unsure at all Xaa locations
  Clone ID: GOSHI-09MAY01-C40317_1.pep
GDLVYKIGVSDXERWFFAQPVRKXGDNAYQGTTXWQIKFELDNVDRNGIYKLRVALASATLAELQVRVNDPNSNRPLFTTGLIGRDNAIARHGIHGIYKLYNVDIPGTRFVKGENTIFFKQPRCNSPFQGFMYDYIRLEGPSTPC

SEQ ID NO: 68551 - protein, 144 aa, Gossypium hirsutum
  unsure (1)..(144): unsure at all Xaa locations
  Clone ID: GOSHI-09MAY01-C40337_1.pep
MATRIWSLLALLALFATATNASIIPQCSLAPSSXIIPQFLPPDTSMAFEHPSVQAYMLQQAIAASVLQQPIAQLQQQSLAHLTIQTIATQQQQQFLPALIHLSMVXNPVPYLQQQLLAFNPLALANVVANHSQQQLQQFLSTLN

SEQ ID NO: 68552 - protein, 202 aa, Gossypium hirsutum
  Clone ID: GOSHI-09MAY01-C41987_1.pep
STQRFLRVGRRLPLRAFVLNAGPEIAEFFFMDTTPFVTKYFTDPEDHVYDWKAILPREKYLNNLLMEVESALGESRAKGKIVVGHHAIKSAGHHGNAKELNIHLLPLLQTYDVDLYINGHDHCLQHISSSDSGTQFMTSGGGSKAWRGDVSWWNPQELKFYHDGQGFMSVEMTPTEVSIKFYDVFGNVLHNWSSSKQLSFAI

SEQ ID NO: 68553 - protein, 160 aa, Gossypium hirsutum
  Clone ID: GOSHI-09MAY01-C41957_1.pep
ILQDHYPERLGLAILYNPPKFFEPFWKVVKPFLEPKTQNKVKFVYSDDPNSKKIMDELFDMEKLESAFGGNDDSGFNISKYAERMREDDKRMPAFWTRGNPQSAEPPVDLNSLDLNSDSDTSDNGKVDSSPSHVSDSETLSPSESVIVTKGSDNDSTEVH

SEQ ID NO: 68554 - protein, 137 aa, Gossypium hirsutum
  Clone ID: GOSHI-09MAY01-C41817_1.pep
CSVKGSSVRKLKGVDVLYDPVGGKLTKESMKLLNWGAQILVIGFASGEIPVIPANITLVKNWTVHGLYWGSYSIHRPAVLEDSIQESISWMEKGLITIHISHTYSISEANLAFSALRDRKAIGKVMIVFDDMGRSKL

SEQ ID NO: 68555 - protein, 117 aa, Gossypium hirsutum
  Clone ID: LIB3584-047-P1-K2-F10.pep
HASEGVDVLYDPVGGKLTKESMKLLNWGAQILVIGFASGEIPVIPANITLVKNWTVHGLYWGSYSIHRPAVLEDSIQELLSWMEKGLITIHISHTYSISEVWSYYQYSIFLLCSFIL

SEQ ID NO: 68556 - protein, 86 aa, Gossypium hirsutum
  Clone ID: LIB3147-046-Q1-K1-C5.pep
PIICILKVNKGVPSIDILIIFHIILFLDSALEQGMHISSQLNPNRLKLRPSHIIKYNHHFPYGFSISQCRECKVGWETRTGNNIFH

SEQ ID NO: 68557 - protein, 69 aa, Gossypium hirsutum
  Clone ID: LIB3147-043-Q1-K1-B6.pep
VITWTKTEKCYQVQGLNVTFISSYYHNRYNLRIFSALKPGIMKMVRAKLAVLSNEDIILENDSEEKEIE

SEQ ID NO: 68558 - protein, 59 aa, Gossypium hirsutum
  Clone ID: LIB3149-018-Q1-K1-B1.pep
TILSKNSIYSTTSRCICNNTIQQTKHAIHTIFPVSYHEKLTTFLKLVPKLFLFHIRLET

SEQ ID NO: 68559 - protein, 106 aa, Gossypium hirsutum
  Clone ID: GOSHI-09MAY01-C41577_1.pep
MDFMKVFDQTVREIKREVNLKVLKVPEIEQKVLDATDNEPWGPHGTALAEIAQATKKFSEFQMVMNVLWTRLGETGKDWRYVYKALTVIEYLISHGSERAVDDIIE

SEQ ID NO: 68560 - protein, 102 aa, Gossypium hirsutum
  Clone ID: GOSHI-09MAY01-C41497_1.pep
VQKALRKSFRQYITFKKDYDGLLLVLLRELVNNAVRFEEILSGSTSGLTHVDVKMADLQAKAEEYEITNLEAFFSSSEFRAHYELDEQRRVIRHHLVYDDKP

SEQ ID NO: 68561 - protein, 93 aa, Gossypium hirsutum
  Clone ID: GOSHI-09MAY01-C41757_2.pep
MKAKFSGFITFLFLAFLLLCSSSVSARLLLQINNHGEKELKANEMMMIQADRKDDFSELMGAEECYEKDEECVKRRMMADAHLDYIYTQNHKP

SEQ ID NO: 68562 - protein, 79 aa, Gossypium hirsutum
  Clone ID: GOSHI-09MAY01-C41757_1.pep
AFLLLCCSSESARLLLQIHNHGEKEFKAGGGGMILADTKDDFSELMGAEECYEKDEECVKRRMMADAHLDYIYTQNHKP

SEQ ID NO: 68563 - protein, 204 aa, Gossypium hirsutum
  Clone ID: GOSHI-09MAY01-C41777_1.pep
EKQKPTGVSTSLGKSTSSKMKTVVSEIGRSGFDHELQSTPILWTSAAQTSHLLSNLTSMRATLNPNPNTLSNPVSIKEEVSLLGSQVMNEPVVAAAALNARTLGLDLVNPFWKNNQHHAQQQQNNNGFLVGEVQNTGIQELYQRLKSSSSYYSDTSAVILSNVASSSSTSILESAPVAGGELGYWNPAFSSSWSDLPTTNGAYP

SEQ ID NO: 68564 - protein, 49 aa, Gossypium hirsutum
  Clone ID: LIB3493-002-P1-M1-D7.pep
FVVRSDHDDEKPGFQFINSPPAAEPDCSMHVAIAEASMLSLPAKASHVS

SEQ ID NO: 68565 - protein, 106 aa, Gossypium hirsutum
  Clone ID: GOSHI-09MAY01-C41717_1.pep
CNYHRGPNYLEIDVDISSSAIANAILHLALGYVTSVTIDMGFLVEAQTENELPEKLIGAVRVCQMEMSSATVVDALTPQIQPAAARVMGCSKVNHHKSGDDEDDDK

SEQ ID NO: 68566 - protein, 114 aa, Gossypium hirsutum
  Clone ID: AW187774.1.pep
QSKSKNTKKRLISISIFVLQKKVDFDFYFRVFSFYTFIFLCKSTLNENKKKKLTGFISWPHRRSSHLRRRGRFLKRKRGTFTFLFSELGERGLSGSPGMGLKSPFRATPAFGPD

SEQ ID NO: 68567 - protein, 105 aa, Gossypium hirsutum
  Clone ID: LIB3147-044-Q1-K1-D6.pep
ITRATTIAQGINHRPSTRRIYLVAASSEFSSPSPWSFPKKEERDFYLFIFGAWRTWPFGFTWNGTKESLSRNSSLWPRQQHGGLLRVPSVGDKRRGRESLKADAW

SEQ ID NO: 68568 - protein, 164 aa, Gossypium hirsutum
  Clone ID: GOSHI-09MAY01-C41197_1.pep
MDLEARSLQPGVKASLLAKLREYKADLNKLKKEFKRISSPNAHDELLESGIADIHSVSAEQRDRLSMSVERLNQSSERIKESRRTVLETEELGISILEDLHQQRQTLLHAHNKLYDVDSAIDKSKKVLTTMSRRITKNKWIVISIIVALVLAIILILYYKISHG

SEQ ID NO: 68569 - protein, 145 aa, Gossypium hirsutum
  unsure (1)..(145): unsure at all Xaa locations
  Clone ID: GOSHI-09MAY01-C41007_1.pep
PSPTFPFCFLKTLTPPWHGYPDSELPAPLLLHPPSSHSDGWIRDIGSAAALELDYDYDYYEYERASXGDRRLPQQKLDVDGSVPERGIQWVLIGEPGVKRHAYAERLSKLLGIPHISMGSLIRQELDPYSSLYKQVVNAVNEGKL

SEQ ID NO: 68570 - protein, 248 aa, Gossypium hirsutum
  unsure (1)..(248): unsure at all Xaa locations
  Clone ID: GOSHI-09MAY01-C41327_1.pep
PTRPVPFFSHLDDQLLDAICXERLVSSLSTEGTYLVREGDPVTEMLFIGGGRLESAATNGGRTGFFNSIVLRPGDFCGEELLAWALLPKSTMNLPSSTRTVRALVEVEAFALRAEHLKCVPNLFRRLHSKNLQHTFRFYSRHXWRTWXAACFIQAAWRRYKRRMMENSLMTESLSLDETHDDEIGARETQEXLVGSYPSRATLNLGVSISASRFASHTRRGAQKITHVXMPTLLTPHEPDFSADPYHD

SEQ ID NO: 68571 - protein, 119 aa, Gossypium hirsutum
  Clone ID: GOSHI-09MAY01-C42957_1.pep
RPRGRKITNLLSLRRLSYAIQFLKGSPERDPPFILFFSFIGEINMAVLRFCFVPVQAALAIGMIASPVTVQAQSPALAPTLAPTTNDGTSIDQGVACVLMLVALLLTYMIHVADLCFNF

SEQ ID NO: 68572 - protein, 42 aa, Gossypium hirsutum
  Clone ID: GOSHI-09MAY01-C42947_1.pep
YGEESRWRNVLIMVCFILVYRFVSYVILRCRCSQRGLRASLS

SEQ ID NO: 68573 - protein, 135 aa, Gossypium hirsutum
  unsure (1)..(135): unsure at all Xaa locations
  Clone ID: GOSHI-09MAY01-C42917_1.pep
MANITVSNFAAVLTKATLKGSNKVQSSKVLGLPVMATNGRARCSLEQKSASNGLSSNPSMVASMMAAAAAAVTTAAAPATALVDERLSTEGTGLPFGXSNNLLGWILFGVFGLIWALYFIYVSSLKEDEESGLSL

SEQ ID NO: 68574 - protein, 98 aa, Gossypium hirsutum
  unsure (1)..(98): unsure at all Xaa locations
  Clone ID: GOSHI-09MAY01-C42907_2.pep
MAWRSQLSRGLKELRILFCQTSPSSASARSFVEQNYKDLKTLNPKFPILIRECRGIEPQIWARYDMGVERXIRLEGLTEPQILKALEDLVKAGASLKA

SEQ ID NO: 68575 - protein, 98 aa, Gossypium hirsutum
  Clone ID: GOSHI-09MAY01-C42907_1.pep
MAWRNQLSRNLKELRILFCQTSPASAPARSFVEKNYKDLKTLNPKLPILIRECRGIEPQMWARYDMGVEKGIRLEGLSEPQILKALEDLAKAGASTKA

SEQ ID NO: 68576 - protein, 65 aa, Gossypium hirsutum
  unsure (1)..(65): unsure at all Xaa locations
  Clone ID: GOSHI-09MAY01-C42927_1.pep
GIPRGKIFXIINPKGEVVVNRRXDTKSYSSLHALVHGMFPPMASHEQEDYNSWNFWKLPPPGIDI

SEQ ID NO: 68577 - protein, 131 aa, Gossypium hirsutum
  unsure (1)..(131): unsure at all Xaa locations
  Clone ID: uC-gsronu33B004b08b1.pep
MQNNPPQKLTCRFQNQGLDPQEASIKVIEDLQNVVMRVVSSNSKPKKDKFLIETSRKIDSVNTRLAVVDMKLDSKPGYLETFAIGVASGAAFNGICSVLAHVXEGFAQIWSFCRTATKPSSFLNSFRLIFK

SEQ ID NO: 68578 - protein, 126 aa, Gossypium hirsutum
  unsure (1)..(126): unsure at all Xaa locations
  Clone ID: LIB3148-004-Q1-K1-A1.pep
MEQPAAPSAVPQKLSDRDSSSKAKRKIPTPQELISHYQNQGLDSQEASIKVIEDLQNVVMRVVSSNSKPKKDKFLIETSRKIDSVNTRLAVVDMKLDSKPGYLETFAIGXASGAAFNGICSVLPHV

SEQ ID NO: 68579 - protein, 82 aa, Gossypium hirsutum
  Clone ID: GOSHI-09MAY01-C42507_1.pep
FMQIHAVDCARKTHDSLEKFTSKALALTLRKVFDGVYGPAWHCIVGTSFGSFVTHSVGGFLYFSMDQKLYVLLFKTSVQRAD

SEQ ID NO: 68580 - protein, 136 aa, Gossypium hirsutum
  Clone ID: GOSHI-09MAY01-C42427_1.pep
PKKGKIYSVNEGNAKNWDGPTAKYVENCKFPKDGSPSKSLRYIGSMVADVHRTLLYGGTFMYPADKKSPSGKLRVLYEVFPMSFLMENAGGQAFTGKQRALDLVPTKIHDRSPIFLGSYDDIEEIKALYAAEGKKE

SEQ ID NO: 68581 - protein, 65 aa, Gossypium hirsutum
  Clone ID: GOSHI-09MAY01-C42747_1.pep
PTRPSLVTSPLLFKLIPALLHLGVLLRWFSPERESPIEVGIKGDNLRSDSGKHRITLMVQEPHDS

SEQ ID NO: 68582 - protein, 120 aa, Gossypium hirsutum
  Clone ID: GOSHI-09MAY01-C42687_1.pep
MASTVALKLACGVVLCLVVGAPLAEGAISCGQVISALAPCIPYVRNNGAGGVPASCCNGIRSLNEAAQSTPERQSACNCVKALAASISGINYDLTNKLPGMCGVHSPFKISPSTNCKSVK

SEQ ID NO: 68583 - protein, 75 aa, Gossypium hirsutum
  Clone ID: LIB3148-025-Q1-K1-A3.pep
GYDVFLGNFRGLVSREHVDKNISLRQYWRFSINEHGTEDIPAMIEKIHEVKTAELKLSHPNQLQSANQLATASKL

SEQ ID NO: 68584 - protein, 270 aa, Gossypium hirsutum
  unsure (1)..(270): unsure at all Xaa locations
  Clone ID: GOSHI-09MAY01-C42657_1.pep
NKEISSYWLGLNEFADLTHEEFKNKYLGLKPEVFKKNRSPPEEFTFRDDVDLPKSVDWRQKGAVTPVKNQRSCGSCWAFSAVAAVEGINKIVTGNLTSLSEQELIDCDTSFNNGCNGGLMDYAFEFIVANGGLHKEEDYPYLMVHGTCEEKKEGMDVVTISGYKDVPENDEKSLLKALAHQPLSVAIEASGRDFQFYSGGVFNGPCGTDLDHGVAAVGYGTWKGSDYIIVKNSWGPKWGEKGYIRMNRNTGKPEGLLGINKISXYPTKNK

SEQ ID NO: 68585 - protein, 139 aa, Gossypium hirsutum
  Clone ID: GOSHI-09MAY01-C42677_1.pep
HTGKQYSSPEEMKKVALERYNKMKGNAPERLVSGSDDFTMFLWEPAVSKHHKVRMTGHQQLVNHVYFSPDGQWVASASFDKSVKLWNGTTGEFVAAFRGHVGPVYQISWSADSMLLLSGSKDSTLKVWDIRTKKLKQDL

SEQ ID NO: 68586 - protein, 143 aa, Gossypium hirsutum
  Clone ID: GOSHI-09MAY01-C42667_1.pep
MGLPSNEVENVMEDDSDVMDDVSEEEFESESDSEEEDVKLAEPSKNSIYNRDGLIEKLEDISWPENVEWMHKLSLDIDQEKEVDVNDDLARELAVYTQALEGTRLAFEKFESMKLPFLRPADYYAEMVKTDAHLQKVKGRLLY

SEQ ID NO: 68587 - protein, 92 aa, Gossypium hirsutum
  Clone ID: LIB3148-010-Q1-K1-H12.pep
ILSHCPSLRYFSRLIFGVECLVLESCTLPVEKIERSRFRLKKKKIKKKKKKKKKKKKKKKKKKKKKKKKKKKKKKKKKKKKKKKKKKKGAPF

SEQ ID NO: 68588 - protein, 52 aa, Gossypium hirsutum
  Clone ID: LIB3148-012-Q1-K1-E1.pep
NFLFKGFLDPNENRNKNKNFYGSEKNRDRIKSINSTYNPKARSFYFLYRECT

SEQ ID NO: 68589 - protein, 89 aa, Gossypium hirsutum
  Clone ID: LIB3147-060-Q1-K1-B5.pep
CLFFFYFFFFFFFFFFFFFFSDMYIILFITIKISTGLKKTERIKSINSTYNRKRDLSIFSTGSVHDSNTKHSTPNMSREKYLTKDNEIK

SEQ ID NO: 68590 - protein, 85 aa, Gossypium hirsutum
  Clone ID: GOSHI-09MAY01-C42117_1.pep
IAKSSIAQLIIIHKHGPMALILLVRVIANSPLHLFLNPSSKQKKFSNIKDHPSNYMEHSSVSAPVRYAYHTAILPFRKSYVCILY

SEQ ID NO: 68591 - protein, 184 aa, Gossypium hirsutum
  Clone ID: GOSHI-09MAY01-C42127_1.pep
MAGMLAGVECARRRRFHQSGGSSDSVLGFTRRPSFCLYTSNHESLHSSVFSQRRVIIEGYEDDDEKLGEVAREAKERLDERLRSQRKSEPKRQNSKETMNHMHGKCLIQGELHREVFGSKRRLGWVNLSRKALEHDECLICLERFKAGDTLVRPPCAHRFHSRCLVPWLENNGHCPCCRLGNLS

SEQ ID NO: 68592 - protein, 93 aa, Gossypium hirsutum
  Clone ID: uC-gsflmaxxa046f08b1.pep
MAGMLAGVECARRRRFHQSGGSSDSVLGFTRRPSFCLYTSNHESLHSSVFSQRRVLIEGYEDDDEKLGEVAREAKERLDERLRSQRKSEPKRY

SEQ ID NO: 68593 - protein, 140 aa, Gossypium hirsutum
  Clone ID: GOSHI-09MAY01-C42027_1.pep
SPCYHLQSSLVLISEPLTEFSVFAASSVSLFVVESSEDCATVSESLATVFKACSLSFFTGSTSCDGGFASESFISVLQASSLSFFNGGTSCEAGLASGTSTSFLEASSLSFFKGGDSCDTGFALEFSVSVFLASLDRERP

SEQ ID NO: 68594 - protein, 190 aa, Gossypium hirsutum
  unsure (1)..(190): unsure at all Xaa locations
  Clone ID: GOSHI-09MAY01-C43937_1.pep
GVVALGKGLRKVKSPLVVXEHRLILENQGCIXQPVYPPVNQTQFAMAYYGINYSKLRLWEFVEYSKMLYLDGDIQLYDNIDHLFDLRNGHFYAVMDCFCENKQXSHTPQYNLDYCQQCPDNIKXPDEMGQQLPSLYFNAGMFIFEPNLTTYKKPSNSEGEAEPANLQPLLMAAEFSEVGQVKDVTAPSAA

SEQ ID NO: 68595 - protein, 73 aa, Gossypium hirsutum
  Clone ID: LIB3828-020-Q1-K6-C2.pep
NFLYKLQILVNNSRSGKTQKLSFLEKKGGGYSPFFTVFFFTTSIRSCFFFFFVLTLSLTFLFIVLKRELSKFF

SEQ ID NO: 68596 - protein, 128 aa, Gossypium hirsutum
  Clone ID: GOSHI-09MAY01-C43857_1.pep
LIVDKRRHGRTAILSLKKSGPELPQLLSQFSAGIAGTGLAVLLSVIWKVACWRVPFCTPKLFSASIGFGLVWISWAVNQLRDTVVQISKNTSKSGLKEEEMVERVEKSVNQIYFRAATLMAIAVLRFA

SEQ ID NO: 68597 - protein, 89 aa, Gossypium hirsutum
  Clone ID: LIB3149-019-Q1-K1-B11.pep
LYIYIYERFVPFGPKAVVTLLFDTDPLHLHVYDCYTYRSTRVLDPSHMCSQANHRTPHGYSIEVRVPLLPSEPLSVLQILTSQINIIES

SEQ ID NO: 68598 - protein, 127 aa, Gossypium hirsutum
  Clone ID: GOSHI-09MAY01-C43877_1.pep
DDWMDPVGAIILALYTIRTWSMTVLENVNSLVGKSAAPEYLQKLTYLCWNHHKAIRHIDTVRAYTFGSHYFVEVDIVLPANMALQEAHDIGESLQEKLELLPEIERAFVHLDYEFSHKPEHAQAHAL

SEQ ID NO: 68599 - protein, 148 aa, Gossypium hirsutum
  Clone ID: GOSHI-09MAY01-C43597_1.pep
SNGPGDPSAVPYAVETVKEILGKVPVFGICMGHQLLGQALGGKTFKMKFGHHGGNHPVRNLRNGRVEISAQCFMIWQNHNYAVDPASLPEGVEVTHVNLNDGSCAGLAYPALNVMSLQYHPEASPGPHDSDCAFREFIGLMKSTKQAA

SEQ ID NO: 68600 - protein, 139 aa, Gossypium hirsutum
  Clone ID: GOSHI-09MAY01-C43527_1.pep
MANSASGMAVNDECKMRFLELKAKRSYRFIVFKIEENIQQVMVEKLGGPKEKYDDFSACLPHNECRYAVFDFDFTTDENVQKSKIFFIAWSPDTSRVRSKMLYASSKDRFRRELDGVQVELQATDASEMSIDIVKERAF

SEQ ID NO: 68601 - protein, 263 aa, Gossypium hirsutum
  unsure (1)..(263): unsure at all Xaa locations
  Clone ID: GOSHI-09MAY01-C43757_1.pep
EIENPAITAVKKHXRRDYKGDGALLXIQFDSLPPGAFEFPSSSPVNEPMYVGDTRQTHSPDISGVIKQPSNIVNVHNSKISSQDSDMEGAKFNTVQGSERLDRKSHHQLKHKSSLDIYNDSTKKSTLTDSKRIKTSSKFAVEKMGSDSFPNHPSPYGMKISDEQQKPWLHDDDSHTYKALKNENLSRTSNLIRGYNESSSTERGSSARMGKVEKLRGEWKTKKECPVTVKTDLKNKLRVSKQVNVQYPQQEFAAYAPHARLPL

SEQ ID NO: 68602 - protein, 386 aa, Gossypium hirsutum
  unsure (1)..(386): unsure at all Xaa locations
  Clone ID: GOSHI-09MAY01-C43727_1.pep
SNYGKNGNGVPNDFTSYGKDSNVMGSDFSGYGKTANGAKDTFTSYAFDSNNPVNGFKSYGDGGNAAVDSFSSYRDQSNVGDSSFQSYAKSSNGAKVDFDNYGQSFNEGTEKFTGYGQGADGQSIGFKISGXNTTFKDYTKKGVTFSRYSNESSTASGKVVVSKWVEPGKFFREKMLKPGMVIPMPDIKDKMPARSFLPRTILSKIPFSSSEIDQLKRIFHAGDNSTLATIMLDALKECERPPSPGETKRCVGSAEDMVDFATPAPGRNVEVRTTQNVNGSKKNIMIGXVGKIIGGKVTKSVSCHQSLYPYLLYYCHSVPKVRVYEADILDPNSMEKINHGVAICHLDTSSWSSGHGAFLALGSGPGRIEVCHWIFENDMTWTIADS

SEQ ID NO: 68603 - protein, 119 aa, Gossypium hirsutum
  Clone ID: GOSHI-09MAY01-C43677_1.pep
RAYKLLQSMEPRIYALHPDYKAFYKKLWSLDLPKKKIIITCWKISWNYLPTRVNMSCRKLVNSPTCPCCGEGAETMDHLFWDCPGSSLTSQLPFADCFVVRYVPYGGREMLWSNSKNKL

SEQ ID NO: 68604 - protein, 66 aa, Gossypium hirsutum
  Clone ID: LIB3196-056-P1-M1-F1.pep
QSAFGIVVRNSEGFVLLTCTEIHYRVLSAFPAEALTCRKATQIAPVESVPTYAENQRNIDYEREPD

SEQ ID NO: 68605 - protein, 251 aa, Gossypium hirsutum
  Clone ID: GOSHI-09MAY01-C43197_1.pep
GRPSVRSTLIFLEKLVWWSSRNGEESVPFVVCSDPSIDGALASQASIQSSFDETAQNEANHEAIVRNLRHKRVFLEQSGASCIVMPCHISNAWHQQISEGCSLPFFHIGECAAKELVHASVKPHGTGSNVRIGVLAATETIAAASYQDQLGNQGFEVVLPDKATMEHILIPAIESLNKRDTEGARNLLRIAIQVLLIGAVNVVILASDELQNILPREDPLLKKWMDPMDALARSTIKWAKTGKQGMQKNTC

SEQ ID NO: 68606 - protein, 281 aa, Gossypium hirsutum
  Clone ID: GOSHI-09MAY01-C43147_1.pep
MFGFMKPKQKGDSPADSDTMTPARRTTSEPAMLVPESIEDDNVGRKKQSSASTRASPARNNRDKYKDDFRDSGGLENQTMEDLEGYAVYKAEETTSTVNNCLKIAENIRSDATKTLDTLHAQGEQIERTHQMAVNIDKDLNKGEKLLNNLGGMFSMPWKPKKTKEITGPVITSDDNKKGKAATKEQREKLGVAPVPKSKAGSKTPTPEPTDAIQKVELEKQKQDDGLSDLSDILGDLKGMALDMGSELDRQNKALDHLGEDIDELNSRVKGANQRARHLLK

SEQ ID NO: 68607 - protein, 65 aa, Gossypium hirsutum
  Clone ID: LIB3829-036-Q1-N6-G10.pep
RLSSSKLQLITGIISCETSKSYIFLDLCLFSCFCKCVGWEMNQILYQQKATYLPSKETPLKPKDT

SEQ ID NO: 68608 - protein, 65 aa, Gossypium hirsutum
  Clone ID: LIB3148-006-Q1-K1-G9.pep
RLSSSKLQLITSIISCQTSKSYIFLYLCLFSCFCKCVVCEMNQISYQQKATYLPSKETPLKPRDT

SEQ ID NO: 68609 - protein, 116 aa, Gossypium hirsutum
  Clone ID: GOSHI-09MAY01-C43017_1.pep
HASGSSEPQIWPFGTASGNTLQAPLHFVPRINLQGDLESQGGRASPLQLGSMLLQQQHQPSQHLGLGLSESNLGMLAALNAYSRGGPNINSDQNNPMEHHQQQGTNSGDENPNNSQ

SEQ ID NO: 68610 - protein, 65 aa, Gossypium hirsutum
  Clone ID: uC-gsronu33B116a09b1.pep
SFDFFFFNKTKCIFLKGKKNSKASQLWELKFLPTNHIIENYLGNHLHNLNLAVDDVPWDNNGKDS

SEQ ID NO: 68611 - protein, 104 aa, Gossypium hirsutum
  Clone ID: GOSHI-09MAY01-C43387_1.pep
MALTTMLRRRLFSRSFSSHDGPSRWTTPGHQERPNGYLFNRTPPPPGQSRKWEDWELPCYVTSFLTIVILGVGLNAKPDLTIETWAHQKALEKLAAEASSSSSD

SEQ ID NO: 68612 - protein, 106 aa, Gossypium hirsutum
  Clone ID: LIB3584-025-P1-K1-C5.pep
MKFEIALSLLLVVLVGITIIQGCNGKAVQFIFGDSLSDNGNNNRLSMTLAKANLPYYGIDFGNGLPNGRFTNGRTVADIIGDSTGLPRPPAFLDPSINEDVILENG

SEQ ID NO: 68613 - protein, 173 aa, Gossypium hirsutum
  unsure (1)..(173): unsure at all Xaa locations
  Clone ID: uC-gsflnu33B081c08b1.pep
KLNVRWSCLLCLVLIGIAIEGVQCKVVQFIFGDSLSDVGNNMYLSKSLAQANLPFYGIDFGNGLPNGRFTNGRTVADIIGDSTGLPRPPAFLDPSLTEDVILESGVNYASGGGGILNETGGYFIQRFSLWKQIELFRGTSELITNKLGKQANDKFIXEANFVVALGSNDXINN

SEQ ID NO: 68614 - protein, 108 aa, Gossypium hirsutum
  Clone ID: uC-gsflnu33B012a02b1.pep
DGPSRWTTPGHQERPNGYLFNRTPRPPAFLDPSINEDVILENGVNYASGGGGILNETGTYFIQRLSLWKQIELFHGTTESITKKGSTVVDETCKANQTLKCVIYMFLV

SEQ ID NO: 68615 - protein, 51 aa, Gossypium hirsutum
  Clone ID: uC-gsronu33B148d03b1.pep
KLIIIIHTVLNKKHINYTFESLICFACFIHYMPSQCWVDLTVSTTPYNKIW

SEQ ID NO: 68616 - protein, 112 aa, Gossypium hirsutum
  Clone ID: GOSHI-09MAY01-C43307_1.pep
TLAQTELIIGMEIGSRITIYDMENIKVLISRLEIEMESLLHNADFAVREEDAVKLAINEIKGKLEAFMKTIEELGRQAENCSRDIRMARTVVLQKMMKRSGNSSTGDSPWEV

SEQ ID NO: 68617 - protein, 82 aa, Gossypium hirsutum
  unsure (1)..(82): unsure at all Xaa locations
  Clone ID: LIB3148-010-Q1-K1-H9.pep
TKDKRKSLIFGSRKTLFLSXSIFLRNIFVKKILFVSKVFLKSNTKLSLNVIMYGNAWCFFRAPRERGFFKEEIVFCTRSLGP

SEQ ID NO: 68618 - protein, 66 aa, Gossypium hirsutum
  unsure (1)..(66): unsure at all Xaa locations
  Clone ID: LIB3148-010-Q1-K1-H3.pep
NKDKRKSLIFGSRKTLFLSXSIFLRNIFVKKILFVSKVFLKSNTKHTLNVIMYGKFVMNFSCTLIN

SEQ ID NO: 68619 - protein, 98 aa, Gossypium hirsutum
  Clone ID: GOSHI-09MAY01-C43297_1.pep
MAAVADLSDTPNQWEFSCDLEVDFESEENASIVYAALGVDKELQPDKVKRQMWISDGKLSVHFEAVEARFLRASFSAFVDVLTLASKTIEELGPGMVL

SEQ ID NO: 68620 - protein, 176 aa, Gossypium hirsutum
  unsure (1)..(176): unsure at all Xaa locations
  Clone ID: GOSHI-09MAY01-C43217_1.pep
MATKQRVTIVVATVFVLTFCRVATGQEPAAVGLGLGPSAEAPTADCFTNLLNLSDCLTFVEAGSNLTKPVKACCPELAGLVESSPQCLCNLLGKNATAVVGMDIDMKRALNLXTVCNVSTPPVTLCSVINRAPVAGPPQSEESVSPGGSPSNGNRNGAVIGLAFATAILHALFGIY

SEQ ID NO: 68621 - protein, 66 aa, Gossypium hirsutum
  Clone ID: GOSHI-09MAY01-C43227_1.pep
LSFLSLFLCPLDVGGNGKPLHLSIEESIDLFREKEKRKKNYTMNLDTDVFSDVGNCRVKMIGRKAY

SEQ ID NO: 68622 - protein, 206 aa, Gossypium hirsutum
  unsure (1)..(206): unsure at all Xaa locations
  Clone ID: GOSHI-09MAY01-C78907_1.pep
MVVLSPSLLSLPTLPSFRHEPGSNGSGMLSHNYSNYSTKFHQKTTLCCSVASKPTSPNVLWRRDLLLLALSSSLSTHFPSSGCLAAEDVRMTSLVDEINAYTYSYPVELPSKKFLFKWVESRKPERYSSAAPLSPDARLRIVSERVDIVDNLIISVSIGPPNVQFLKSKDKKTWAAKDVADSVLSDKSALRVTSSXRMSESSVLDA

SEQ ID NO: 68623 - protein, 203 aa, Gossypium hirsutum
  unsure (1)..(203): unsure at all Xaa locations
  Clone ID: GOSHI-09MAY01-C78867_1.pep
NWRLMLGLAAVPAIAIGIGVTAMPESPRWLVMKGRTDEXKRVLIKVSDTVQEAEFRLSEIMKAAAMDLGEATSSNHSDWRGQGVWKELLLNPSRPVCRIIIAAIGINCFMQASGNDAGIYYRPEVFKDAGIQDNETALRCECDNGSSQGYLGVISAAYLDRFGRRPLLLLGSIGMAVSLAVLGMGSKFLQYSETKPLWAIIVC

SEQ ID NO: 68624 - protein, 214 aa, Gossypium hirsutum
  unsure (1)..(214): unsure at all Xaa locations
  Clone ID: GOSHI-09MAY01-C78827_1.pep
LFRKSEMASPPILSLALPSNTGRVLSIQSHTVQGYVGNKSAVFPLQLLGYDVDPINSVQFSNHTGYPTFKGQGLNGQQLLDLVEGLEANNLLDYTHLLTGYFGSGSFLKSVLEVVDQLRSINPNLTYVCDPVMGDEGKLYVPEDLGSVYREXVVPVASMLTPNQFEAKLLTKLKNGSETDGRKACNILHAAGPFKVVITXININGNLLLIGSHH

SEQ ID NO: 68625 - protein, 54 aa, Gossypium hirsutum
  Clone ID: LIB3582-009-P1-K1-A6.pep
SLYNLLCLFMILIFFQIINKYLNLDLGILFMTKTQYFTAKIIIISLENFNLFNL

SEQ ID NO: 68626 - protein, 158 aa, Gossypium hirsutum
  unsure (1)..(158): unsure at all Xaa locations
  Clone ID: GOSHI-09MAY01-C78597_1.pep
FSHSPKKHPNHRRHCRLMLRSSFSFSNPTHHEPVAFDPLVADIERRREDRQWEKQYLEHTHPELVNDHAPGHESQPEWEDFMNAEDYLNDEDKFNVTNRLVMLFPKIDADPADGFVTENELTEWHLQQAAXEVLHRSMREMEVHDRTXDGFVSLAEYE

SEQ ID NO: 68627 - protein, 224 aa, Gossypium hirsutum
  unsure (1)..(224): unsure at all Xaa locations
  Clone ID: GOSHI-09MAY01-C78447_1.pep
PLGAITSGSQFLEPDGLFPNHIPNPEDKAAMKAITQAVLDNKANLGIIFDTDVDRSAAVDSTGRELNRNRLIALMSAIVLEEHPGTTIVTDSVTSDGLTSFIEKKLGGKHHRFKRGYKNVIDEAIRLNSIGEESHLAIETSGHGALKENHWLDDGAYLMVKLLNKLASAWASGKGAGMPSFXTDLVEGLEEPAIAVELRLKINQNHPDLKGRSFREYGEAVLQH

SEQ ID NO: 68628 - protein, 177 aa, Gossypium hirsutum
  unsure (1)..(177): unsure at all Xaa locations
  Clone ID: GOSHI-09MAY01-C78687_1.pep
MYRGERAAGGSKGELGSVDRKRINEALDKQLERSSPSTSRATNGKDKSAHSLLVGKHPPDHHRDSRSTSLPKANASHVTDESETDTEESDVSGSDGDDTSWISWFCNLRGNEFFCEGDDDYIQDDFNLCGLSSQVPYYDYALDLILDIESSHGDMFYEEQNDLVDSAAXMLYGLIHA

SEQ ID NO: 68629 - protein, 211 aa, Gossypium hirsutum
  unsure (1)..(211): unsure at all Xaa locations
  Clone ID: GOSHI-09MAY01-C78157_1.pep
EAFLGQVRRRLLEFMLASFQRSPDFIALLKKPIVDRLGEAYDSPEKTELALQLCWAVXEHGGGGGSHKDAARELFESLELLLYENLSSIRLGLRQESINSDSRNFRKSSQSRLLCFVITAIAKLATYHRELLPRARVXLGKVARSRISNSRVWRRARDYLGLMDDPAICLSVLGPSHLHMGTHXSSTVNWNDGGTKMIAHIPFYILGEQDR

SEQ ID NO: 68630 - protein, 180 aa, Gossypium hirsutum
  Clone ID: GOSHI-09MAY01-C78097_1.pep
MATEEVNNPPSLPSYPQLIINAIEALNDKDGSNKTSISKYIESKYGDLAAGHSTLLSHHLNIMKESGELVFWKNNYMKADPSAPPRRGRGRPPKPKVPLPPGMVLSSARPRGRPPKNPNAPLRFPKPSGSGKPRGRPRKMARPEGGIAASSTTMMSASVRPRGRPPKVKTSAFTEVSVGH

SEQ ID NO: 68631 - protein, 73 aa, Gossypium hirsutum
  unsure (1)..(73): unsure at all Xaa locations
  Clone ID: LIB3585-043-P1-K1-E8.pep
EILDRYLDVVLKGNKDGVKKXRLRIEDPPRRKHMVYLGGAVLAGIMKDAPEFWISREDYLEEGVACLSKCGPA

SEQ ID NO: 68632 - protein, 74 aa, Gossypium hirsutum
  Clone ID: LIB3585-037-P1-K1-B6.pep
PRVRRLRIDDPPRRKHMVYLGGAVLAGIMKDAPEFWISREDYLKEGVGCINKCSLDRLLTSASNACWMITDFTL

SEQ ID NO: 68633 - protein, 271 aa, Gossypium hirsutum
  Clone ID: GOSHI-09MAY01-C79467_1.pep
FALFVLRSLYSSLYIYSNKDNVVKYTPDQIRKMEESDKIRRASEPIELVKLIKRIKHEFSSDESLAELPRAVKHKITDEILQRLRSLRPNASISDQQEAVETWRKEKLKEAKTLALGGEGLNSTLLQEEAGMLVKALQSNWAALSEEIGLWIPTEVINQEHDDKPEGVEDTEEEDQILAGRPLPPQCHAELHTDYDGAAVRWGLTHHKESAADCCQACLDQVKNAKPGEKKCNIWVYCPSEDGCYSPDLFQHKHMECWLKFSKKPRLNFKN

SEQ ID NO: 68634 - protein, 411 aa, Gossypium hirsutum
  Clone ID: GOSHI-09MAY01-C79727_1.pep
SFVGTSYLGCGGGNGHLLNFQVNMSNGEGTDRKKVSLGTQPITLRTFSSKSTAHVFASSGGPTVIYSSNKKLLYSNVNLKEVGHMCPFNSAAFPDSLAIAKEGELTIGTIDDIQKLHIRTIPLGEHARRICHQEQSRTFAICCLKNQSSADESEMHFIRLLDDQTLECISTYPLDTFEYGCSILSCSFSDDTNVYYCVGTAYVLPQENEPTKGRILVFIVEDGKLQLIAEKETKGAVYSLNAFNGKLLAAINQKIQLYKWMLREDGSREIQTECGHHGHILALYVKTRGDFIVVGDLMKSISLLIYNHEEGAIKERARDYNANWMSAVEILDDDTYLGAENNFNLFTVRKNSEGATDEERGRLEVIGEYHLGEIVNRFRHGSLVMRCQIPNWPESPLFGTSWCIGVILLSA

SEQ ID NO: 68635 - protein, 73 aa, Gossypium hirsutum
  Clone ID: GOSHI-09MAY01-C79127_1.pep
KIFHLLAILTTPFLHHQQSQSGFRLHLPFGARSLWFSASPTRTLSEGMMVFFFFGATARTCDICNHSLMSKVD

SEQ ID NO: 68636 - protein, 186 aa, Gossypium hirsutum
  Clone ID: GOSHI-09MAY01-C79057_1.pep
MAAPSRHRHNGTSNVVSNTAQAWPAVSLQPNMSAAGAHRSRPVTKFSHLSTTNNSSGSSKSKPTRIRESLPKVEDFQSANKALVEKIRVSLEFDQDKFSAFTGITGEYRQGFISTEEYLAYVHQFGLSHLVLELARLCPNVEKQRELVEIYNFNISNSYSCNDDTGQWKNDKRSKKGKEKCEDYGS

SEQ ID NO: 68637 - protein, 172 aa, Gossypium hirsutum
  Clone ID: LIB3584-020-P1-K1-C4.pep
KKYVFSVYQQGISFYFQEKDVSFNHVYKCGICNRLANALMQGIHIAGASDAGYFGLSGTVNSGITSFEMEYRHWVEEQNRLICELRTAVQAHVTDIELRILVESGLNHYYNLFCMKADAAKADVFYLISGIWRTSAERFFHWIGGFRPSALLNVMLNLILLLFFWKAANSVD

SEQ ID NO: 68638 - protein, 162 aa, Gossypium hirsutum
  Clone ID: uC-gsflnu33B058e03b1.pep
FISNIGSSTIVPADVRLKNKAECIPCEQVEPSISDQETNKPSDKIQRRLAQNREAARKSRMRKKAYVQQLESSRLKLAQLEQELERARQHGIHIAGASEAGYFGLSGTVNSGITSFEMEYRHWVEEQNRLICELRTAVQAHITDIELHILVESGLNHYYNLV

SEQ ID NO: 68639 - protein, 143 aa, Gossypium hirsutum
  Clone ID: GOSHI-09MAY01-C79317_1.pep
MSFTSSLIASLGVDAPVTETAFTYFALAVVYGSILLYRGQKLRIPWYWYLALGFVDVQGNYLVNKAFQFSSITSVTLLDCWTIVWAIFLTYFFIGTRYSLLQLGGAALCVLGLGLVLLSHARVGGGGGSKPNLGDALVIAGTL

SEQ ID NO: 68640 - protein, 228 aa, Gossypium hirsutum
  Clone ID: GOSHI-09MAY01-C79287_1.pep
MEKNDVPTSFSEYSSRSSPNPKNFGYSMSSGTGNQGFMHSYSGNESAYSSPRQHWNMEFKDATTAAQAAAESAELASMAARAAAELSSRGNFSPRYSMSPSHRMRDEEPWKYTGSASQHEHVGRDPVNVSLHGRNSRNYERVDSNEQYARAGNGDKSTNSSFKSTASSYNEETSPKNQTADAYSRRDSFEGMHMEPFAGSKRNSSENGDPSYGWVREQSKFSSSRFSI

SEQ ID NO: 68641 - protein, 194 aa, Gossypium hirsutum
  Clone ID: GOSHI-09MAY01-C74907_1.pep
HASVTGDHKLSAWRVANAVGINEVYCSLKPEDKLNHVKRISGDMGGGLIMVGEGINDAPALAAATVGIVLAHRASATAIAVADVLLLQDNISGVPFSIAKARQTTSLVKQNVALALTCIILASLPSVLGFLPLWLTVLLHEGGTLLVCLNSIRALNDPSWSWGQDLRNLIGKLKSKLAFLRHNATSSPIQTAPL

SEQ ID NO: 68642 - protein, 195 aa, Gossypium hirsutum
  Clone ID: GOSHI-09MAY01-C74857_1.pep
LILPEATSKECLPDVKLELNSGKKDSFEGVRDINATVILPSGVHSLPNKGEPSSLIQRWKSGGACDCGGWDLGCKLRILSNKSQCNQRPSSLRGSSISNQFELFFQGGAQDNMPFFSLASFNDGIYSVEFNSSLSLMQAFSICIAVWDSGKHCELSESVPLYEERTLGETILNDGTNEPNQIEGEGPARYVSYPP

SEQ ID NO: 68643 - protein, 259 aa, Gossypium hirsutum
  Clone ID: GOSHI-09MAY01-C74527_1.pep
MGTAAAPGPYMTNIKPCISSSRKIVVSTMVNIIAQHKEASWSGLASASHISSRQPFLHRITSKPVKFEKFVTRAMSEPSDNKPLSGLPIDLRGKRAFIAGVADDNGYGWAIAKSLAAAGAEILVGTWVPALNIFESSLRRGKFDESRVLPDGSLMEITKVYPMDAVYDSPEDVPVDVKTNKRYAGSSNWTVQELVECVKKDFGSIDILVHSLANGPEVSKPPLETSRNGYLAALSASSYSYISLLKHFLPIMNPGGASI

SEQ ID NO: 68644 - protein, 169 aa, Gossypium hirsutum
  Clone ID: GOSHI-09MAY01-C74667_1.pep
AISYNGHVIKEIVSGKGTPLMPNRTFETYMFALFNENQKPGPLVEKYWGMFNPDLTPIYDVGLLRRGQSAPTPATPAPSSSKNFCVPKVDVSNTQLQSNLDYACGQDGIDCTPIQPGGACYEPNTLRAHAAFAMNTYYRTKGESYFSCDFAGTGQITTVDPSYPTCRFV

SEQ ID NO: 68645 - protein, 222 aa, Gossypium hirsutum
  unsure (1)..(222): unsure at all Xaa locations
  Clone ID: GOSHI-09MAY01-C74277_1.pep
MEGGLVLLGGGANGGGSGGSSGFSTNESAMSEASSYPAETELELGLGLSIGGPTGKINKASGRILTAKDFPVPRRASMNGGTPPSVTVSGTKRAADQSVPHDGGSPTATSQVVGWPPIRSYRMNSLVNNNQAKAPRAEEEHRGMNVEEEEEEDKAIKDGSKLKKPNENLGHIGFIKVNMDGIRIGRKVNLNAHSSYHXLASALDNMFLRSAGAEKQQLTMPS

SEQ ID NO: 68646 - protein, 129 aa, Gossypium hirsutum
  Clone ID: uC-gsflnu33B108d01b1.pep
MVQSKKPNENLGHIGFIKVNMDGIRIGRKVDLNAHSSYHSLASALENMFVRSAGAEKQQLTMPSKLLDGSSEFVLTYEDKEGDWMLVGDVPWMMFLTSVRRLRIMKTSEVNGLAPRFHERNRTQRSKLI

SEQ ID NO: 68647 - protein, 184 aa, Gossypium hirsutum
  Clone ID: GOSHI-09MAY01-C75507_1.pep
MNALKSIPMSRSLIQRITPFFIARIKQNHKLLSSSFSSSSSAIHEASSESPSPSLDAVHMTDNCIKRMKELQASEQSSDHKMLRLSVETGGCSGFQYVFDLDDKTNPDDRVFVREGVKLVVDDISYDPVKGATIDYVEELIRSAFVVTTNPSAVGGCSCKSSFMVKQPMFQAHRSYQIKFFSLS

SEQ ID NO: 68648 - protein, 63 aa, Gossypium hirsutum
  Clone ID: LIB3543-022-Q1-K1-F12.pep
ASEQSFDQMLRLSVETGGCSGFQYVFDLDDKTNPDDRFLCSLLFFILVLQKVCLISLSLFLLL

SEQ ID NO: 68649 - protein, 175 aa, Gossypium hirsutum
  Clone ID: GOSHI-09MAY01-C75407_1.pep
SQSATKRVTSALVNSSQFNSACDSVYSQCLSLTQEAYPGVFPYQLLNAAANLHQHLTSLRPHPLILRWVPHPPARSQVDSAFRFVTRHQDNPRSDEEALLLDSSDFREWAVVLFSDAVVGNAGKAVLQRVPLGVLGIAGIGAAARRGKEVVGAAIGVYALGMATSIYLSLSGLVS

SEQ ID NO: 68650 - protein, 110 aa, Gossypium hirsutum
  Clone ID: LIB3825-011-Q1-K6-B5.pep
MAAAKLLIPTLSHFRPLTCAAAVSATNPARLVPHPPDLLKWIKREGGFVHEAVTITQDTTYGLGLVASGGIPKGSDLIVLPEHFPLKFQSDKDDEADSVLLPLSNRVPGT

SEQ ID NO: 68651 - protein, 111 aa, Gossypium hirsutum
  Clone ID: LIB3493-008-P1-M1-A7.pep
RFRPLTCAAAVFASNPARLVPRPPDLLKWIKREGGFVHEAVTITQDTTYRLGLVGSGGIPKGSDLIVLPEHVPLKFQSDKDDEADSVSLPLSNRVPKELWAMKLGLKLLQE

SEQ ID NO: 68652 - protein, 79 aa, Gossypium hirsutum
  Clone ID: GOSHI-09MAY01-C75637_1.pep
MAYNPNESPADDFLEQILGLSHFAPTETGLAGPDGRLSGNATTAGAPMLLQLSSGGGTGHIGAIGGGGGGAFHGQVFPL

SEQ ID NO: 68653 - protein, 225 aa, Gossypium hirsutum
  Clone ID: GOSHI-09MAY01-C75197_1.pep
LVPARGGSPLVTPWSSIVNVGIGFVMFVYIIIPLCYWKFNTFDARKFPIFSNQLFTHSGHKYDTTKILTPQYDLNISAYNSYSKLYLSPLFALSIGSGFARFTATLTHVALFNGSDILKQSRSAMKNVKLDIHAKLMKKYKQVPEWWFYILLIGSIVLSLMMSFVYKKEVQLPWWGMLLAFALAWIVTLPIGVIQATTNQQPEYDIITHFIIGYILPGEPICKLL

SEQ ID NO: 68654 - protein, 134 aa, Gossypium hirsutum
  unsure (1)..(134): unsure at all Xaa locations
  Clone ID: GOSHI-09MAY01-C75167_1.pep
MFNKSFLLYVQTNSNSTKTPLKRPLICFIKPHSLNYHKPKGFEDKLEKGSFSLSETFSKAGLLALVSASILLVDPXALALKGGGPYGSEVTRGQDLTGKDFSGKTLIKQDFKTSILRQANFKGAKLLGASSLMP

SEQ ID NO: 68655 - protein, 192 aa, Gossypium hirsutum
  Clone ID: GOSHI-09MAY01-C75117_2.pep
MGIKRSILLISIFSLAAISACARPPSDITDTPESPDSTPESPDSTPESPDSTPESPDDDYSPNAPDEAADGYAPPPEAPTPSATFTILPGGSYPELDQICGATDYPTECVRFISPYLNDGIKIDPLNVLKVGIHVATNMTIEALNLARKIRDGPRTSPNAQSCLSVCAENYDLIPDGNELALRAIEERNWSD

SEQ ID NO: 68656 - protein, 206 aa, Gossypium hirsutum
  Clone ID: GOSHI-09MAY01-C75117_1.pep
MGIKRSLLLISIFSLVAISACARPPSDITDTPESPDSTPESPDSTPEAPDDDYSPNAPDEAADGYAPPPEAPTPSTTFTILPGGSYPELDQICGATDYPIECVRFISPYLNDSIKIDPLNVLKVGIHVATNMTIEALNLAIKIRDDPKTSPNAQSCLRVCTENYDLIPDGNELALRAIGERNWSDLRNQLSGGPTSVNTCIDVYHE

SEQ ID NO: 68657 - protein, 187 aa, Gossypium hirsutum
  Clone ID: GOSHI-09MAY01-C75077_1.pep
AFVGLFEVFLPLVCFLLLYCLRGKYHGPPKSFPLVGMIPQFLFNIPRLHDWFTDTLEICHCTFLFKGFAKMNVLVTCDPSNIHYIMSSNFNNFPKGPGFKQIFDILGDGIFNVDMDLWRKQRIAAQGFMRHQLFYPFLSRTTGAKVEEGLIPLLDHVAKRGLVVNLEDRFQRFAFDATCILVTGYDP

SEQ ID NO: 68658 - protein, 168 aa, Gossypium hirsutum
  unsure (1)..(168): unsure at all Xaa locations
  Clone ID: GOSHI-09MAY01-C75327_1.pep
RRKGIAWTEDEHRLFLLGLEKYGKGDWRSISRNFVVTRTPTQVASHAQKYFIRLNSINKDRRRSSIHDITSVGNGEILATQGPITGEPNGAATGGSSAKSAKQPSQLPAAPPGVSMYSSPTIGQPIGGPLVSTVGTPVNLPAPPHXAYGAVVPTAPMKHGPVNSSAAS

SEQ ID NO: 68659 - protein, 101 aa, Gossypium hirsutum
  Clone ID: GOSHI-09MAY01-C75267_1.pep
PTRPPTRPPSPPILNLFPNVLFGGFGFEVTEHGYFSFHEPPKLIQSKSIKRKLRHPQFFVYLLVLALCCQYAQERGGRFMSFSATLLCLWGLSNRASRLDQ

SEQ ID NO: 68660 - protein, 260 aa, Gossypium hirsutum
  Clone ID: GOSHI-09MAY01-C76527_1.pep
NKEVAIRGKEIAEKDVAGAKRFVLMAENLYPVLGGLPQLIFALDRSRAADEKINGEVDWYRVLGVQPYADEDTIWKHYMKLAFILHPDENKFAGAGAFKLLLEAWSLLSDKARRFSYDQKLNLRGSFTNVLHGKSSMATTSSNGFHNSYSVKNSNIGDQHGATYSNSAPPCSTRTDTFWTTCSSCQEGLKSCKGCLKLDPAATPSELLQVFTEAQVVIMKRAREDVPFVDSKRSEEKELVENDQEMKPNTTKEGVREGLL

SEQ ID NO: 68661 - protein, 86 aa, Gossypium hirsutum
  Clone ID: GOSHI-09MAY01-C76487_1.pep
MVCIACLLPLFLVPIVNILPLLFYFIMGKVYWLLGWEYRKPERAPAACPYKPPAKTENSSKVGPETEPAVPESSSKPMGVTDNKQD

SEQ ID NO: 68662 - protein, 297 aa, Gossypium hirsutum
  Clone ID: GOSHI-09MAY01-C76197_1.pep
PTRPLVLDLWDIGELSLGASRMKEIDFCPEESENHIPCFNISENLALGYSDGSEYDRQCGQGSRQSCLVLPPVNYKIPLRWPTGRDVIWVANVKITGQEVFTSGSLTKRMMMLEEEQISFRSASLMFDGVEDYSHQIAEMIGLRNESNFIQAGVRTILDIGCGYGSFGAHLFSKQLLTMCIANYESSGSQVQLTLERGLPAMIGSFNAKQLPYPSLSFDMLHCARCGIDWDEKDGIFLIEVDRVLKPGGYFVWTSPLTNVQSFLRNKEKQKRWNFVRDFAENLCWEVMSQQEETVLW

SEQ ID NO: 68663 - protein, 277 aa, Gossypium hirsutum
  unsure (1)..(277): unsure at all Xaa locations
  Clone ID: GOSHI-09MAY01-C76187_1.pep
MAWSNTLLQIHIKSPSSPSLHFPHSLPKSSPFLLNPNPINPIPRSLRMQFLHRPNAVPLVSRAMDIIQSSPPTWQSAVLSNLLIFVVGTPLLVAGLSLSGICAAFLLGTLTWRAFGSPGFLLVASYFVIGTAVTKVKMAQKEAQGIAEKRKGRRGPGSVIGSSAAGCVXAVLTIYGVGGXAFTRLWRLGFMASFCTKLSDTXVSSEIGRAFGKKTYLVTNFXIVPRGTEGAXSVEGTVAGLLASILACTYCCLLGEIMSLSMVWYSNPDAKLVEHMV

SEQ ID NO: 68664 - protein, 154 aa, Gossypium hirsutum
  Clone ID: GOSHI-09MAY01-C76217_1.pep
RETVRPSTLSGGFNQQGYRPRGNSGPPQWGPRGHPPQTSYDYQQRGPYPSHNSHYQPPYGGYPSHQMAPRSNFGSSWEQRPHSMQGTSSEWQVMITTAGRGGVSNPHLTSIPGHGPGSSPAPAMGPAPSQSSYNYGQLLVSRYAHHHPFEAAPT

SEQ ID NO: 68665 - protein, 162 aa, Gossypium hirsutum
  Clone ID: uC-gsflmaxxa067d05b1.pep
DRDAPTRPVEIMGTLSSIIKAEKLINAVIAEADAGGSPSLVARGLATTQAAGAADQIEIQVPNEKVGLIIGRGGETIKGLQTRSGARIQLIPQHLPEGDGSKERTVRVTGDKKQIEIAREMIKDVMNQTVRPSPLSGGFNQQGYRPRGNSGPPQWGPRWHPP

SEQ ID NO: 68666 - protein, 128 aa, Gossypium hirsutum
  Clone ID: GOSHI-09MAY01-C76227_1.pep
KRKHSSREHQKLLERPESWAPVRGSLHGLLRSSLCSSVRPSLQKEYTRRGQDNRIQQMTANKMYFYFFSINLAIKADDCTCKFLRRDYVHCMHTIRLCKYTEYRKIRDIKGDLRCFFFPFLFFFDLSL

SEQ ID NO: 68667 - protein, 170 aa, Gossypium hirsutum
  Clone ID: GOSHI-09MAY01-C77977_1.pep
ARTTDATAAFEGEHPRIIEPSSHAQHKHLIWRLTELQKLLRDGASHAIQTLEHHKNDAKDWTCVRKEAFPSNKNEYGHLLVQDFSDTVQTLPPDNLQNFMVDMRDPAHLGGQVANPPAGGQAPALRDVANRNPLAVLFESLLPWVNYGGPEDGIVDENRVNEQGQGNEDL

SEQ ID NO: 68668 - protein, 183 aa, Gossypium hirsutum
  Clone ID: GOSHI-09MAY01-C77967_1.pep
KKKKGRPSRLEGEKGRSVEEKYTQWKSLVPVLYDWLANHNLVWPSLSCRWGPQLEQATYKTRQRLYLSEQTDGSVPNTLVIANCEVVKPRVAAAEHISQFNEEARSPFVKKYKTIIHPGEVNRIRELPQNSKIVATHTDSPDVLIWDVEAQPNRHAVLGAADSRPDLILTGHQENAEFALAMC

SEQ ID NO: 68669 - protein, 158 aa, Gossypium hirsutum
  Clone ID: GOSHI-09MAY01-C77557_1.pep
PTRRHASPTRPPTRPVFNYTGTPPKNLQTRNGTKVFRLAYNSTVQLVLQDTGIIAPENHPIHVHGFNFFAVGKGLGNYNPKTDPQKFNLVDPVERNTIGVPSGGWVAIRFRADNPGVWFMHCHLEVHTTWGLKMAFLVDNGKGPNQSLLPPPSDLPKC

SEQ ID NO: 68670 - protein, 244 aa, Gossypium hirsutum
  unsure (1)..(244): unsure at all Xaa locations
  Clone ID: GOSHI-09MAY01-C77537_1.pep
MGDGKRFAVLLCAEDSDYVKRYGGYYGVFVEMLAEEGEAWEVFKVANGEFPDDDEIANFDGFVITGSCNDAHGNDVWICKLIALLKKLDSLNKKVLGICFGHQILSRALGGKTGRAISGWDIGVTAIHLSSSTSTLFSSLNIPTTLSVIECHQDEVRELPPEAEVIAWSEKTGVEMFRYGDHMMGIQGHPEYTKDILLHLIDRLMQLTLSKIHMLMXAESKSGESKPDKDAWKKLCTIFLKGRL

SEQ ID NO: 68671 - protein, 260 aa, Gossypium hirsutum
  unsure (1)..(260): unsure at all Xaa locations
  Clone ID: GOSHI-09MAY01-C77457_1.pep
RGRPTRPLNLSLGFNSIGFYQMTKLAIIPSTELLETIFLKTQRPRPRGLALGALLVGVGIASITDLQLTSVGTIRSLLAIGTTCVGQILTNTIQKRLNGAASXQLLYQSAPFQAASLFGSGPLVDQFLTKQNVFAFKYSSIVSAFIILSCIISVSVNFSTFLVIGKTSPVTYQVLGHLKTCLVLTFGYTLLHDPFTERNIIGILIAIFGMVLYSYFCTQENKKKQADPLVSQMKDKEGAPFLGLEKEGQEDKNADKDSHV

SEQ ID NO: 68672 - protein, 177 aa, Gossypium hirsutum
  Clone ID: GOSHI-09MAY01-C77697_1.pep
MEEYWRMCVGVSITQNFPHRKSMENTGFFQKNSSVFMADDHDFSDVFGGPPRSVLCREFTDDFTQSASFYDEAFGPLDFSSCYSIKGGRSLPAFRIPAKVEWSFSTDIFESDDDLRRSSWERTESDSSSVMSWQEMSGLRRPDGDDFGLSSYFAPKLTWNSATMVTNQGPAKQQHRC

SEQ ID NO: 68673 - protein, 195 aa, Gossypium hirsutum
  Clone ID: GOSHI-09MAY01-C77657_1.pep
TKFKLAIENQESTVREIKPKNRRIMGGGGPDEEDNNNEKWPPWLKPLLKEQFFVQCKLHIESHKSECNMYCLDCMNGSLCSFCLAYHRDHNYIQIRRSSYHDVIRVSEIQKYLDISGVQTYVINSAKVVFLNERPQPRPGKGVINTCEVCDRSLVDNFRFCSLGCKIVGTSKDFQKKKRQLAMVSSDSEDSYSSS

SEQ ID NO: 68674 - protein, 164 aa, Gossypium hirsutum
  Clone ID: GOSHI-09MAY01-C77157_1.pep
FLEELWRRFGSGLNLVGICLMLLMMVLKMVVLLWWRPRKIEEHFSRQGIRGPPYHFFIGNVKELVGMMLKASSQPMPFSHNILPRVLSFYHHWKKIYGATFIVWFGPTVRLTVSDPDIIREIFTSKSELYEKNEAHPLIKQLEGDGLLSLKGEKWAHHRKIISP

SEQ ID NO: 68675 - protein, 109 aa, Gossypium hirsutum
  Clone ID: GOSHI-09MAY01-C77297_1.pep
TTLLELCSIAVHTFGSKLADMPWRMGLVLRPAPTIGELRSGSPRLVQLNDFLRRLHKRQTLPVLTFCETKVTPIVEGYGGWAFRMEIVPIELTLPGFWENWWKVVINFT

SEQ ID NO: 68676 - protein, 94 aa, Gossypium hirsutum
  Clone ID: LIB3825-031-Q6-N6-C10.pep
RLVQLNDFLRRLHKRQMLQVLSFCETKVTPIVEGYGGWAFRMEIVPIESAYPGFGELVVLESTDHINSCKPLSRSDPSYTETLEFLRKLKAQYT

SEQ ID NO: 68677 - protein, 55 aa, Gossypium hirsutum
  Clone ID: LIB3582-002-P1-K1-H7.pep
SGYTEDVMELKLRSDKKQLAKFVVFCSCSLSYCCFCLRLGTFLWDWDMNDLIDAA

SEQ ID NO: 68678 - protein, 49 aa, Gossypium hirsutum
  unsure (1)..(49): unsure at all Xaa locations
  Clone ID: LIB3543-027-Q6-K6-E3.pep
XPYVHVLDEXPTPSGVLARGIYSANLKFEDDDRRCHMXLKYAFEIKKNS

SEQ ID NO: 68679 - protein, 158 aa, Gossypium hirsutum
  Clone ID: GOSHI-09MAY01-C70897_2.pep
MAHFGGPSENPRRLSPSPAPPGGGVKQGGGWGLVEAPGENDTDEYDCESEEGIEALVDEALPKPAPPRSSSKRSRAAEVHNLSEKRRRSRINEKMKALQNLIPNSNKTDKASMLDEAIEYLKQLQLQVQMLSMRNGLSLHPMCLPGVLQPLQFSQTRM

SEQ ID NO: 68680 - protein, 178 aa, Gossypium hirsutum
  Clone ID: LIB3583-007-P1-K1-D4.pep
MAHFGGPSENPRRLSPSPAPPGGGVKQGGGWGLVEAPGENDTDEYDCESEFEICHKQEGIEALVDEALPKPAPPRSSSKRSRAAEVHNLSEKRRRSRINEKMKALQNLIPNSNKTDKASMLDEAIEYLKQLQLQVQMLSMRNGLSLHPMCLPGVLQPLQFSQTRMNFREENGSLPMNM

SEQ ID NO: 68681 - protein, 313 aa, Gossypium hirsutum
  Clone ID: GOSHI-09MAY01-C70887_1.pep
PGCLTQEEELEVAFSSFPDSISQHQNRSSIHDCIFFFRFQRHKHSKQGNGTSSEISEIDDKETSSTPDEVKSIRRSRSTDISKSSKYLYGYVFNRQRHDERLKRPARPPSRPPSPPGPYSSVFRPLLQIMGPLYFDIGRKAIEHIAGYVSLWPSPVPGKLMELPIGNAMLKVNLPPAHSLPLESGISYEESASSMAPFLPSNPSVPQGLFHDSDIFGTFRGLLLQLWLLWELLLIGEPILIIAPTPPQCCEAVASLVSLVAPLLCSVDFRPYFTIHDPDFAQLNALQEGDKYPPMVLGVTNLFFLKALRYIPH

SEQ ID NO: 68682 - protein, 148 aa, Gossypium hirsutum
  Clone ID: GOSHI-09MAY01-C70707_1.pep
PGSNEGPHRTSNLNLDEQRTQITVWAMAKSPLMFGGDVRKLDETTYNLITNPTLLEINSFSLNNMEFPYITSRRRCRSKEKVLSQDLAEGGMLGIRALGLITCKDPKANGWSTKALDQDLEQICWKEKSESKFEEPPCLYKRKPLIAS

SEQ ID NO: 68683 - protein, 182 aa, Gossypium hirsutum
  Clone ID: GOSHI-09MAY01-C70107_1.pep
LHSIADTNRQGRTGNRAPKGPRHHRGTRAAHRSKPQHFRPHTTGREKNRAPTEEERTRDTRKQRATKDRERSQRPSRKHRHPATKTTRKSNKQAHRPGKTRTTRNPSGSQRPSRTRAERKRAAQTRRSSRRAGGGKAAKAAGTGKPKASQEQKGQSQEAPPREKRARETPNQKSQTPATQPK

SEQ ID NO: 68684 - protein, 269 aa, Gossypium hirsutum
  Clone ID: GOSHI-09MAY01-C70317_1.pep
MGKLKSDSPLSRRIVRSFLDFLDSVEPAPGVDLEGLEVARECLVEVFKLDSASINYVKPDLLIDIFSSLDESEDKKIKSDLRHRGTSDNATASLSAHDIGDNWTKESQSTGVSKDELFGQFFAALEKIHFLRAMPDGNDDPAQLDKATRLFEDAVNEMERSGCQAFDRKNLPETFKCQGNRTMHSKQYSDAIELYSIAVSLCDDNAVYYCNRAAAYTQIQKYNEAIRDCHKSIEIDPNYSKAYSRLGLAYYAQGNYADAIEKGFKKALQ

SEQ ID NO: 68685 - protein, 338 aa, Gossypium hirsutum
  unsure (1)..(338): unsure at all Xaa locations
  Clone ID: GOSHI-09MAY01-C71987_1.pep
GFRSSLRIQSLTWRVAGIHPYHQQWPPVPAPPPPPAAASAAPPPPPVHHPPPPAPSHDEVRTIFITGLPEDVKERELQNLLRWLPGYEASQVNYKGEKPMGFALFSSARLAGAAKDALQEMVXFDAESKSLLHVEMAKKNLFVKRGIVTDSDAYDQTKRLRTGGNYSHSPYTSPSPFHPPAPVWGPHGYMAPTPPYDPYGCYPVPPVPMPTPAPVPAPSSYVPVQNTKDNPPCNTLFIGNLGENINEEELRGLFSAQPGFKHMKILRQERHTVCFIEFEDVSTATNVHHSLQGAVIPSSGSIGMRIQYSKNPFGKRKDSGHLVPSPGANGPPPALTYQ

SEQ ID NO: 68686 - protein, 97 aa, Gossypium hirsutum
  unsure (1)..(97): unsure at all Xaa locations
  Clone ID: LIB3825-009-Q1-K6-D9.pep
VKXXELQNLLRWLPGYEASQVNYXGEKPMGFALFSSARLAVAAKDALQEMVFDAESKSLLHVEMAKKNLFVKRAYSLNLAPAKWNIYSETAIIFQEH

SEQ ID NO: 68687 - protein, 143 aa, Gossypium hirsutum
  Clone ID: GOSHI-09MAY01-C71957_1.pep
LKFTIMAKGVIMAVLVILGTMVTSAYAQASCAQNLVSCYPYLNNATAKPEDDCCNPIRQTVAKDLPCLCNLYNDPNTLASFNVTVPEALRISRECGVSTDLSACNATSPTSAPSPPGQSGGADRIALTGVITLFLVLVSIAPY

SEQ ID NO: 68688 - protein, 157 aa, Gossypium hirsutum
  unsure (1)..(157): unsure at all Xaa locations
  Clone ID: GOSHI-09MAY01-C71587_2.pep
MDLDQRIAKAKEGQHLSEDELQLLCEYVKEILIEESNVQPVNRPVTVCGDIHGQFHDLMKLFQTGGQVPETNYIPMGDFVDRGYNXLEVFTILLLLKARHPXNITLLRGNHESKQLTQVYGFYDECQRKYGNANAWRYCTNVFDYLTLSAIINGTVL

SEQ ID NO: 68689 - protein, 177 aa, Gossypium hirsutum
  Clone ID: GOSHI-09MAY01-C71587_1.pep
MDLDQWISKVKEGQHLLEDELQLLCEYVKEILIEESNVQPVNSPVTVCGDIHGQFHDPMKLFQTGGHVPDTNYIFMGDFVDRGYNSLEVFTILLLLKARYPANITLLRGNHESRQLTQVYGFYDECQRKYGNANAWRYCTDVFDYLTLSAIIDGTVLCVHGGLSPDIRTIDQIRVID

SEQ ID NO: 68690 - protein, 149 aa, Gossypium hirsutum
  Clone ID: uC-gsflmaxxa061g11b1.pep
MDLDQWISKVKEGQHLLEDELQLLCEYVKEILIEESNVQPVNSPVTVCGDIHGQFHDLMKLFRTGGHVPETNYIFMGDFVDRGYNSLEVFTILLLLKARYPANITLLRGNHESRQLTQVYGFYDECHRMYGNANAWRYCTDVIDYLTLS

SEQ ID NO: 68691 - protein, 30 aa, Gossypium hirsutum
  Clone ID: uC-gsflmaxxa028b12b1.pep
MDLDQWISKVKERQHLLEDELQLLCEHIKE

SEQ ID NO: 68692 - protein, 139 aa, Gossypium hirsutum
  unsure (1)..(139): unsure at all Xaa locations
  Clone ID: GOSHI-09MAY01-C71577_1.pep
EYGHKAAFYHGNMDPAQRAFIQKQWSKDEINIXICATVAFGMGINKPDVRFVIHHSLPKSIEGYHQECGRAGRDGQRSSCLLYYSYSDYIRVKHMISQGAAEQSPLITGHSRFNNSGRILETNTENLLRMVGYCENDVD

SEQ ID NO: 68693 - protein, 149 aa, Gossypium hirsutum
  Clone ID: GOSHI-09MAY01-C71567_1.pep
SFFSLCCFRAERKCLKMELSKVTLEIFTKLEQKWLSHCEKSGKKVRILSIDGGGTTGIVAGAALIHLEDQIRLKTSDAHAHIADFFDLIAGTGVGAVLAAMISADDGTGHPLFSARDAGEFITQNNSELFKGNKLAGVLRRREKFSGKS

SEQ ID NO: 68694 - protein, 69 aa, Gossypium hirsutum
  Clone ID: LIB3493-041-P1-M1-B7.pep
CFPAAKREQKIKLSRCRSLKIFSLCCLRTERKCLKMDLNKATLQTLTKLEHDMAYSQRDQRFRRYHFYR

SEQ ID NO: 68695 - protein, 99 aa, Gossypium hirsutum
  Clone ID: GOSHI-09MAY01-C71507_1.pep
NLSRFFAIFSAINQWHKQNRSKKVRVDLISSSPPSLFSISWFFIIFFIFLFAKSVLNTNKKKTLTWIAPESHYGSLISIHGVDFKTPPHKGSSSPSFLG

SEQ ID NO: 68696 - protein, 88 aa, Gossypium hirsutum
  Clone ID: GOSHI-09MAY01-C71477_1.pep
MAKGRRLTTSRSERFLGSYSYGHSHGDALTGESELGEEDAWSMVDDVTDRDDRREWSPRAESESNETGSFDVRGGRRRIPRGDASHVG

SEQ ID NO: 68697 - protein, 171 aa, Gossypium hirsutum
  unsure (1)..(171): unsure at all Xaa locations
  Clone ID: GOSHI-09MAY01-C71707_1.pep
MAEAPAPASPGGGSHESGEQSPRSNVREQDRFLPIANISRIMKKALPANGKIAKDAKETVQECVSEFISFITSEASDKCLREKRKTINGDDLLWAMATLGFEDYIDPLRIYLSRYREMEGDAKGSAKGGDASAKKMSXGPNGQLVHQGSFSPGVFYGNSQAPLMLPIQGAD

SEQ ID NO: 68698 - protein, 218 aa, Gossypium hirsutum
  Clone ID: GOSHI-09MAY01-C71077_2.pep
MASEQLSRRENTTSERDIHLEENRVPKMATHFESLAEKSRQSDVGAAAAKHNPIHGERHEFHSLEGKVGDVNVSATIIAKTEAGDQAREGRGKQLQERKGEPYAIGKFQATAPGAGAGAGAGQERGTSMASKAEHESDKQKGRRSYAAAAAGHRQERGASMESKGRKHESDKEQGHCTHMASSEERVNTGANTEGGEKQEQTSVEEISKLTTSAQQNS

SEQ ID NO: 68699 - protein, 633 aa, Gossypium hirsutum
  unsure (1)..(633): unsure at all Xaa locations
  Clone ID: GOSHI-09MAY01-C71077_1.pep
MASEQLSRRENTTSERDIHLEENRVPKMATHFESLAEKSRQSDVGAAAAKHNPIHGERHEFHSLEGKVGDVNVSATIIAKTEAGDQAREGRGKQLQERKGEPYAIGKFQVTAPGAGAGAGAGQERGTSMASKAEHESDKEKGRRSYAAGTGQERGTSVASKAEHESDKEKGRRSYAAAAAGHRQERGASMESKGSKHESDKEQGRRTQMASSEEGVNKGAKTESGEKQEQLSVEEISKLRASAQQNSMETLRAAEERYNQAKESAAQALNTAADYTKEKGQQAKETAVQSAQYATEKGGQAKDTIIEGAKRTTQYIAEKGTQTKDTAAETLASAGNYTAPRVEQAKDYALQTAVKAKDTAVDVSKNIASYAGEKAVVTKDVTVEKSKEAAEVARTRAVDVKDKAVVAGWSAAHYTTEKAVEGTKVAARMVEGAGEYAGXKSMELAAKPIRAAKGXASAAGETLKEYTARKKEEAARELEAKRATETQGDISSYREEETQERSSESQQQMEDLAIKPKEKFEKTAKPIGNAPTQTFQGSSEPNKTGELTQETEKRSQVEEERIKKVPMEGVERRMESGAEKTVEGSGVREEEEEENQTGVLGAIAETIVEIAQNTKDLVIGPDDQTQYSERQPL

SEQ ID NO: 68700 - protein, 139 aa, Gossypium hirsutum
  Clone ID: GOSHI-09MAY01-C71307_1.pep
AIFNLCIIHENKARAVRDGAVSVILKKIMDGVLVNELLAILAMLSTHQRAVEEMGELGAVPCLIRIVRESTCERNKENCIAVLHTVCLNDRTKLKALREEENSHGTISKLALDGTSRAKRKASGILDRLRKGVNITHTA

SEQ ID NO: 68701 - protein, 92 aa, Gossypium hirsutum
  unsure (1)..(92): unsure at all Xaa locations
  Clone ID: GOSHI-09MAY01-C72537_1.pep
MSSRRSRQSTAGVSRISDDQIIELVSKLRQLLPEIRDRRSDKVSASWVSRVSCCFIXSLHREVDDLSERLSQLLATIDADSAEAAIIRSLIM

SEQ ID NO: 68702 - protein, 171 aa, Gossypium hirsutum
  Clone ID: GOSHI-09MAY01-C72447_1.pep
MSPMRTKMTRIVTVLLVGFILGVRSGEARKGKVTESFAYTGISCRRHTASITDFGGVGDGKTSNTKAFQDAVNHLSKYASDGGAQLYVPAGKWLTGSFSLTSHFTLYLQKHALLLASQDMKEWPVLKPLPSYGPGRDAAGGRFTSLIYGTNLTDVIVTGANGTIDGQSSFW

SEQ ID NO: 68703 - protein, 161 aa, Gossypium hirsutum
  Clone ID: GOSHI-09MAY01-C72417_1.pep
MRNDEGGTMVMEQQTGLHSRPNMGTLFQQSEPPSFSDDDDFHNRKSNASLSSPRYSTTTSGDGEVSPYMMSPWNSQPSSWHLQHHQPCPSENDFGQDGLIGSIVKEEGHIYSLAASGDMLYTGTDSKNIRVWKNLKEFSGFKAKSGLVKAIIILGDRVFTG

SEQ ID NO: 68704 - protein, 244 aa, Gossypium hirsutum
  Clone ID: GOSHI-09MAY01-C72687_1.pep
MGRGRVELKRIENKINRQVTFAKRRNGLLKKAYELSILCDAEVALIIFSNRGKLYEFCSTSSMAKTLEKYNSYTYGALEPAQTEIDAQSNYQEYLKLKSKVEVLQQSQRHFLGEEIADLGTKELEQLEHQLDFSLKKIRSTKMQLMIDQLSELQTKEEVLLETNRNLRMKLDESGPSMRSSWETGEQSIPYNHPPPPPQSEGFFEPLHCNNSLQIGYNPSSVTVEDTATASALAPSGFIPGWML

SEQ ID NO: 68705 - protein, 65 aa, Gossypium hirsutum
  Clone ID: GOSHI-09MAY01-C72107_1.pep
VVHLLLCSTKMMLVELSSSYLLVKQSAIVLNYFLDQISVLFSKLLGSNLVALSSIWASWCCFFFG

SEQ ID NO: 68706 - protein, 207 aa, Gossypium hirsutum
  unsure (1)..(207): unsure at all Xaa locations
  Clone ID: GOSHI-09MAY01-C72097_1.pep
MTFNDDNNDDEGGEVVPELKLRVEGDDDVNEKRVSLRQRLLEECEAEENNSLSLRQRLLEECEAEENNSLLKEPGFSSQSRRSIWYWIKLGILLTFLGLLAAVFLKWVGPFXMDKELMPLIKWEMATFSTPMLAVLIFASVALFPTIFLPSSPSMWVAGMAFGYGFGFLLIISAXAVGVSLPFFISSLFLHRIQSLLEKYPKKTTFL

SEQ ID NO: 68707 - protein, 162 aa, Gossypium hirsutum
  Clone ID: GOSHI-09MAY01-C72327_1.pep
IFADIQIGMNPMDMIIGGGSPVGTDPAKVPRIGIIPRYAKDESEIRWFDVPGFNLIQAINAWDEDDGNAIVLLAPNILSVEHTLERMDLVHALVEKVRIDLRTGLVTRHPISARNLDFAVLNPAYVAKKNKYVYAAGGDPMPKIAGVVKLDVSKGEPDECNR

SEQ ID NO: 68708 - protein, 166 aa, Gossypium hirsutum
  Clone ID: GOSHI-09MAY01-C73807_1.pep
MCYSICLTLAATAGNNIGKVLQKKGTGILPPLSFKFKVIRAYAVNKSWLIGFLIDISGALLMLRALSLAPVSIIQPVSGCGLAILSIFSHFYLQEVMNVIDWLGITLAGIGTIGVGAGGEEQVASSVSILQLPWLAFFAAILFVGTPEWVAPHLHASAERARTDGV

SEQ ID NO: 68709 - protein, 140 aa, Gossypium hirsutum
  Clone ID: GOSHI-09MAY01-C73567_1.pep
PHDGCTLDAEGEKERVIKCLEASIHRRVSEGLSLELCAKDRVGLLSEVTRILRENGLSVRRAGISTIGEEAVNVFYVRDTYGNPVESKKIEALRREIGHTMMLNVKKDPGSAKAPEAEAISTGWAKTSFFFGNLLDKLLA

SEQ ID NO: 68710 - protein, 290 aa, Gossypium hirsutum
  unsure (1)..(290): unsure at all Xaa locations
  Clone ID: GOSHI-09MAY01-C73537_1.pep
MAVEYSCCEWELVIHILIVVLLVLFAGLMSGLTLGLMSMSLVDLEVLAKSGTPKDRKHAAKILPVVKKQHLLLCTLLICNAAAMEALPIFLDGLVTAWGAILISVTLILLFGEIIPQSVCSRYGLAIGATVAPFAQVLVWXCFPVAYPISKLLDFLLGHGHVALFRRAELKTLVNLHGNEAGKGGELTHDETTIIAGALELSEKTAKDAMTPISETFAIDINAKLDRELMSLILEKGHSRVPVYYEHSTNIIGLVLVKNLLTVHPEDEVPVKSVTIRRIPRVQETLPLYD

SEQ ID NO: 68711 - protein, 249 aa, Gossypium hirsutum
  unsure (1)..(249): unsure at all Xaa locations
  Clone ID: GOSHI-09MAY01-C73407_1.pep
FANQLARQGLNLILVSRNLNKLKTVSAEIRARFPHLKIKVVAQDFSGNISAGAGLIEEAVKGVEVGVLINNVGITYPRAMYFHEVEEXMVKGIIKVNLKGTTWVTKTVLPGMLNRXRGAIVNVGSGASIVVPSHPLYTIYAATKAYIDKLSRSLYVEYKLRGIDVQCQVPLYVATNLASKVASIEKSSMFVPSPEDYPKAAIRQIGYEPRCTPYWSHAVQWCFARLLPDVLLDAWRLSIALRRRAEVLA

SEQ ID NO: 68712 - protein, 138 aa, Gossypium hirsutum
  unsure (1)..(138): unsure at all Xaa locations
  Clone ID: GOSHI-09MAY01-C73427_1.pep
RPRVRPRVRTIYILRFDSGLLSSLGEEALLGYLASSVVIPDSGQFASQHGFQHIDVVNVIMCLHGFRYIDAQDIKRESWVLTDEGMXYAADGSPEVQLFLAVPQEGSISKDELQKKLEPSVFNIGCSQAGLFLWVVLG

SEQ ID NO: 68713 - protein, 200 aa, Gossypium hirsutum
  unsure (1)..(200): unsure at all Xaa locations
  Clone ID: GOSHI-09MAY01-C73617_1.pep
NIWQAQRWWSEGLSGSRGVYNVQRLNRNAFALPTPPMSEDESSKMESAEASPVTPPLTRERVPRNLYRPAGMGVGYSSSDSLDQHPMQARHYCDSXGLTSTPKLSSISGAKTEISSMDASMRSSSSREADRSGELSISNASDLETEWVEQDEPGVYITIRALPGGKRELRPGRFSREIFGEMHAKLWWEENRARIHEQYL

SEQ ID NO: 68714 - protein, 295 aa, Gossypium hirsutum
  unsure (1)..(295): unsure at all Xaa locations
  Clone ID: GOSHI-09MAY01-C73097_1.pep
MGLGLLASRTLKTSRVLSSQYSRFRPIVTKPGLQSPDASAAAPATQPEPTPPLPKKPVGGARVHFTNPDDALEVFVDGYPVKIPKGMTVLQACEIAGVDIPRFCYHSRLSIAGNCRMCLVEVEKSPKPVASCAMPALPGMKIKTDTPLAKKAREGVMEFLLMNHPLDWPICDQGGECDLQDQSMAFGSDRGRFTEMKRSGVDKNLGPLGKTVMTRGIQGTRCVRFATEVAXGVQDLGMLGRGSGEEIGTYVEKLMTSELSGNIIDICPVGALTSRPFAFKARNWELKGTGLIDVN

SEQ ID NO: 68715 - protein, 169 aa, Gossypium hirsutum
  Clone ID: GOSHI-09MAY01-C73067_1.pep
MDCSYDDSLCSVTERQKFLVKPNLRAFVNKIREQSQRGGATDLLWWKGLARIMEAKGYIREGDDKIHVQIKFPEPTERGLEFLQSESDKGFHGYPEADMLYSMRKPRAYSSFSDWGKGWANPEIRRQRLDKIRSSNRKPRKPRIRKSRKHFSDTSTSRGRISAKISQKK

SEQ ID NO: 68716 - protein, 175 aa, Gossypium hirsutum
  unsure (1)..(175): unsure at all Xaa locations
  Clone ID: GOSHI-09MAY01-C68467_1.pep
NACTREKMVAACGEPLQRWAAYVLEGASLARSVNHRQSNTYKASKRHEPTSSELMSYMHILFRICPYYKFAYTSPNXVIKEVMEYEQRIHIIDSQIAQGTQWXTLLQLFQNGPGGPPFIRVTGIDDSQSNHARCGGLSIVGQKLSEFAKSYNVPFEFHDTSVSTSEIQVQNLNIC

SEQ ID NO: 68717 - protein, 129 aa, Gossypium hirsutum
  Clone ID: uC-gsronu33B029b04b1.pep
FAYTSANAVIKEVMEYEQRIHIIDFQIAQGTQWMYLIAALSKRPGGPPFIRFIVIDAYLLNYSFIFFLLFFSFHLFFYFLLLFLLFSSFFLIYFSFFFYLIFLYFIHFHYLFYFSKYFFFKYLIFLFFI

SEQ ID NO: 68718 - protein, 173 aa, Gossypium hirsutum
  unsure (1)..(173): unsure at all Xaa locations
  Clone ID: GOSHI-09MAY01-C68647_1.pep
MANAVSHQTVGTLQLHGSSGIHFQGGNNSVRLVPKGFKVEVGACTTGICSSGEKKFSIIQASASQTSVFYPVLSPSNNGTHESLKKSNEAALILIRHGESLWNEKNLFTGCVDVPLTKKGVEEAIEAGKRISNIPVDMIFTSALIRAQMTAMLAMTQQRRKKXPIIMHNENEQ

SEQ ID NO: 68719 - protein, 52 aa, Gossypium hirsutum
  Clone ID: LIB3189-014-P1-K1-A3.pep
PMLCCTKQLGLFYFMAVLEFISKVEIIQRDWFPKVSRWKLGSAREGFSLPQQ

SEQ ID NO: 68720 - protein, 112 aa, Gossypium hirsutum
  Clone ID: GOSHI-09MAY01-C68187_1.pep
MSGVWVFKNGVVRLVENPAAESLDGSRQSSNTRRKVLVHTPSNEVITSYAVLEHKLWSLGWERYYEDPSLLQFHKRSTVHLISLPKDFNTFKSVHMYDIVVENRNVCEVRDG

SEQ ID NO: 68721 - protein, 99 aa, Gossypium hirsutum
  Clone ID: GOSHI-09MAY01-C68027_1.pep
MNPADNTDHPQLPTIKIHHPSSPHHPTSAATPTPTSGARRKIGVAVDLSDESAFAVRWAVQNYLRPGDTVILLHVSPTLVLFGADWGPLPQTPANPGTP

SEQ ID NO: 68722 - protein, 107 aa, Gossypium hirsutum
  Clone ID: GOSHI-09MAY01-C68217_1.pep
MGGIISKRSTTSQSSSVASNSYSWDSHRYAQPSNAPSGQDYVPEQRYAPPHHSYGSHAPESKRRLERKFSKIDDNYNSLEQVTDALARAGLESSNLICGIDFTKSNE

SEQ ID NO: 68723 - protein, 205 aa, Gossypium hirsutum
  unsure (1)..(205): unsure at all Xaa locations
  Clone ID: LIB3583-046-P1-K1-A3.pep
EPDLPGFTHAFALVDSDQVFMSSNLVVSGIKIQNSPQFHMKFDGCEGVLIEKLVISTPKLSPNTDGIHIGNTKSVGIYNSMISNGDDCISIGPGCLDVHIEGVTCGPSHGISIGSLGVHNSQACVSNITVRNTVIRESDNGVRIKTWQGGTGSVSGISFENIQMENVRNCINIDQYYCLQKACLNQTSAXYVRDVQYWNIKGCYD

SEQ ID NO: 68724 - protein, 154 aa, Gossypium hirsutum
  Clone ID: uC-gsronu33B021d10b1.pep
PRVRPRVRQRVRLHVRWFFMSSNLVVSGIKIQNSPQFHMKFDGCEGVLIEKLVISTPKLSPNTDGIHIGNTKSVGIYNSMISNGDDCISIGPGCLDVHIEGVTCGPSHGISIGSLGVHNSQACVSNITVRNTVIRESDNGVRIKTWQGGTGSVS

SEQ ID NO: 68725 - protein, 473 aa, Gossypium hirsutum
  unsure (1)..(473): unsure at all Xaa locations
  Clone ID: GOSHI-09MAY01-C69897_1.pep
IQQGHQNTNMSIGASSSQKHLQNLQQRPHGSGASSGSGTLQGFPAPKNQSSHPLPLQQRQQQPSQHASYQARHLEGELSGKDSPSTSDSRVSRANMNIYCQNFAMPLQPPNFTLMTAASLGGSTSSGCNQGEKKQHIQQPGSKAGVESLTSQSFAMSIASINGTTTPGVDISSFGRDHAILQSLPESTRQGFLPIMAAAVAAQTAQQKKKNYLASEEGNHGTNDASSVEEGRNAMAGKSSASAGQSIAFSRADLSDSSVSTIPGSNVIDSSARTTNPGSAPTTSGSVMPASISCVNAPSGQQQLQRXQQQQQQQMLQLQKPHQFGAASASRSKVPVTSNGNAYSDHLPSSSMATKFQNALSPFPQNLVQTSSSPAQSPQWKNSVRTTGPQVSSPSLSSTSSSLKNFPXQQARPQQNHTEISFTANPNSTQNQQPPSSTPSPSTPIVVGSPTTSISRSAGGSPRTTSSTSTGNK

SEQ ID NO: 68726 - protein, 144 aa, Gossypium hirsutum
  Clone ID: AI055715.1.pep
SRADLSDSSVSTIPGSNVIDSSARTTNPGSAPRTSGSFMPASISCVNAPSGQQQRQMLQLQKPHQFGAASASQSKVQVTSNGNAYSDHIPSSSMATKFPNAPSPFPQNLVQTNSSPAQSPQWKNSVKTTGSQSSFSILISTYKA

SEQ ID NO: 68727 - protein, 124 aa, Gossypium hirsutum
  Clone ID: GOSHI-09MAY01-C69867_1.pep
IILPTKFMVMAATSSTTTNCSHFFNLRSNDDEPKLVRPSPTAHGSPAASGSGCGKLDGVIMWFVNGVATVFFASLERCSCVRITTADDGQEANDVPLIHGDGNVRLDAGTTRRRTAGKGPFLQD

SEQ ID NO: 68728 - protein, 121 aa, Gossypium hirsutum
  Clone ID: uC-gsflnu33B036a02b1.pep
VLFQWRFGQSLYFCIFSNNLDLAFDQWLTRAFGVSCTPQRCLLCCALWVIWRDRNTRVHERKIVPEKASGECSVLCKKSFCCGEDEGTRLKKGELFWKSFGRKVVFCVLLGRIRLFLRIKP

SEQ ID NO: 68729 - protein, 105 aa, Gossypium hirsutum
  Clone ID: LIB3583-043-Q6-K1-D6.pep
EIKAKEAVEWKQPMGTIIKINFDGTYDRQRNRSASCIVARDAEREVLVSKSENHEGFPPAFAAEAIASHRAMRLRLENGWWGVLHPLQGVLLLQRRRAHASAHAS

SEQ ID NO: 68730 - protein, 103 aa, Gossypium hirsutum
  Clone ID: LIB3543-051-Q6-K6-C11.pep
KVDLIYSAFSREKADRIVRSPLTMNLCGLMVRKEEASGEFSVRSAYKLLHDIFPNYLQTEAKIFYKKLWNIHILGKIKILIWKFLGILFLTLLIFGVRDCSQW

SEQ ID NO: 68731 - protein, 153 aa, Gossypium hirsutum
  Clone ID: LIB3584-056-P1-K2-E12.pep
PTRPQLSHFPFLFSLKDHLSNNTQPGSLLRRSTSDVLCSRTLPISAWRHVRASTANKEVTSLRTTVLNEMTCPETLLATTPETDFGQDSSKVASKLSLKTEPAGGHQPMDSCLVQNTRHCMLELFLNTQPYRAISEDMINVFSSISTSGTYYH

SEQ ID NO: 68732 - protein, 181 aa, Gossypium hirsutum
  Clone ID: GOSHI-09MAY01-C69087_1.pep
MGDFPIQISTRLIDRLTEDDEKVKKRTKKTKTRVPREPRLPETKVDQPQISDGSEQQKGTSTGTGWAVPPPLFMPVNQPPYSVSAELDAIRSVVKESENVVEKLRKQEKNMVQEVTQKAKDLHDKEFKIPEPKPMPCSVESNAWMTCYKENTNDLTKCAPLAQNFAECARRVRQLAKPADK

SEQ ID NO: 68733 - protein, 204 aa, Gossypium hirsutum
  unsure (1)..(204): unsure at all Xaa locations
  Clone ID: GOSHI-09MAY01-C69247_1.pep
METSAELPVLNARSVEDIDLAFKQLHEGVDVEEVVLASMIEDQLDHEDFTSKLPVVEARSLEDIHNVRLSYMVXEPNLAELPLSTDWRNGSSEMEQHDVVSNKEIEVGRAVSGIQENSQNSAGEPKNDHEETEEMKMETNAELPVLEARSLEDIDLAFKQFHEGVDVEEIILPSMIVNHQGDACSNSDLPVVDARSFGDIQSAF

SEQ ID NO: 68734 - protein, 181 aa, Gossypium hirsutum
  unsure (1)..(181): unsure at all Xaa locations
  Clone ID: GOSHI-09MAY01-C69267_1.pep
MAVMSKQDPSPAFVETVQEIMRLYRSLPPRPSIEDVAAAKFXFSKLLENEEKIKLEEISMERPPEDVPEELFSVLHQVRKTMVLFQSHQQKKEALYLVEADKMFETFDGLIQRASFLVSGDTQDEKVTTFREQVRKFDREAVISDDSLVKRKEDGDLDKDDVKGLVRCSSSKASFFSGENS

SEQ ID NO: 68735 - protein, 104 aa, Gossypium hirsutum
  Clone ID: GOSHI-09MAY01-C64987_1.pep
FPSWENEEKSTRRLSWAALVEDIKRAGYLAGPMVAVTLSQYLLQVISTMMVGHLGELALSSSAIAISLAGVTGFSLLLGMACALETLCGQAYGAQQYRKLGIHT

SEQ ID NO: 68736 - protein, 84 aa, Gossypium hirsutum
  Clone ID: GOSHI-09MAY01-C64957_1.pep
CRCILLIHDLRWHCTASTPRKSQKLKAQNLSLKAPFNRHIQKREKIFVLLFLFVFFYKNMITKSYPKFKYIYIRSLWGSLIPER

SEQ ID NO: 68737 - protein, 95 aa, Gossypium hirsutum
  Clone ID: GOSHI-09MAY01-C64967_1.pep
MNMEARVGVVVEGGQRALNSAHGAVVDAGARKFLQQQQQQQHEHSSKQGLNPQIGTVQQLLAGGIAGAFSKTCTAPLASLTILFQVQGMQSDLSA

SEQ ID NO: 68738 - protein, 158 aa, Gossypium hirsutum
  Clone ID: GOSHI-09MAY01-C64937_1.pep
MGGGSGRLVDGVRRWFQRRHLIPSSSNQQNNNIIIDHHDTSSSSSTTLTLTQKQSQESTADIVVQDFDFSSLRLVKVPKRHYFPVSSMDSHKKGALEKEFFTQYGEASRYQVQEVIGKGSYGVVASAIDTHTSEKVAIKKINEVFEHVSDATRILREI

SEQ ID NO: 68739 - protein, 99 aa, Gossypium hirsutum
  Clone ID: GOSHI-09MAY01-C64807_1.pep
MSLACLVCHSVESPSHSFRSYSVSSSDNEGRCSAVANCLARKTSLPSARPAITTTSKVAPQPNFQNSVGMAGPPRLVRSRAVRRDLVRDWNFEEVVMER

SEQ ID NO: 68740 - protein, 63 aa, Gossypium hirsutum
  Clone ID: GOSHI-09MAY01-C64367_1.pep
AVDLPSKIKILIWKTLNNFIPTLFNLYQRRLGNSTNCIQCSDCLETLSMSLGSALLLLMFGPV

SEQ ID NO: 68741 - protein, 115 aa, Gossypium hirsutum
  Clone ID: LIB3272-004-P1-K1-A4.pep
MIGPGRPLFVLFGSSIVQFSYSNEGWGAILAHAYARKADIILRGYAGWNSRRALEVLDKVFPKDAAVQPSLVIVYFGGNDSIKPHASGLGPHVPLPEYVENMKKIAMHLKGLSEN

SEQ ID NO: 68742 - protein, 76 aa, Gossypium hirsutum
  unsure (1)..(76): unsure at all Xaa locations
  Clone ID: uC-gsflnu33B070g06b1.pep
MIGPGRPLFVLFGSSIVQLSYSHEGWGAILAHAYARKADIILRGYRGWNSRRALEVLDKVFPMDAAVQPXSLVIVY

SEQ ID NO: 68743 - protein, 198 aa, Gossypium hirsutum
  unsure (1)..(198): unsure at all Xaa locations
  Clone ID: GOSHI-09MAY01-C64207_1.pep
IEYDASYRVIRNDVYTFYTYPFRLCFYNTTPDAYIFAMRAGIPNDESLMRWVWDANRNDPVHENATLKFGEDGNFVLADADGRVVWQTNTANKGVTGIRLLPNGNLVLFDKNGKFIWQSFDYPTDTLLVGQSVKINGRNRLVSRKSDMDGSDGPYSLILDHNGFIMYLNNLGQQLIYGGWPTXDFADIVTFAAEPETL

SEQ ID NO: 68744 - protein, 204 aa, Gossypium hirsutum
  unsure (1)..(204): unsure at all Xaa locations
  Clone ID: GOSHI-09MAY01-C65937_1.pep
MAAFIPFKLSLLLSLLSNIGFWPETSKNDVGIFPPTCNRIECPSFDLIEVGNGYEIRRYNSTIWVTTSPIQDISLVEATRTGFLQLFDYIQGKNKYKQQIEMTAPVITEVLPSDGPFCESSFRISFYLPKVNQXNPPPAEGLHIQKWKSTYLAVRQFIGFVTDYNVGVEAAALEASLADTVWSPAIKKSQKEKTTSGLSGLLNI

SEQ ID NO: 68745 - protein, 188 aa, Gossypium hirsutum
  Clone ID: GOSHI-09MAY01-C65587_1.pep
GRVYATGLNDFGQLGSSDLIKYSREPVEVSGLAKGIVQIAAGYHHSCAITVDGELYMWGKNSSGQLGLGKKAAKAVHRPTKVECLSGLTIKLAALGSEHTVAVTDGGEALSWGAVASGRLGHGLESSIFGFLTSNSILFISLLRMMKLILSWRISRRMMRLVNLLLQLLEGQFIVFWLKIDTTSPIVV

SEQ ID NO: 68746 - protein, 78 aa, Gossypium hirsutum
  Clone ID: GOSHI-09MAY01-C65567_1.pep
MEGIKGGGGGRVGVGVGVEEDMGDGMQCSNHPYRNNPGGICAFCLQEKLGKLGSSSFPLPIRASPSSSSSPPSFRSDT

SEQ ID NO: 68747 - protein, 167 aa, Gossypium hirsutum
  unsure (1)..(167): unsure at all Xaa locations
  Clone ID: GOSHI-09MAY01-C65497_1.pep
MTTQSDPSASDPQGIGNAFVKQYYTVLHNDPSHAYKFYLDLSVLSRPGTDGAMKSVTTLKEINELILSLDYQSYKAEISFADAQFSXQTGVIVLVTGSLIGKDDVRRKVTQSFFLAPQEGGYYVLNDVFRYVDDKEPVDVAYNDIDECNQADLSQDTEVTPVPKNAV

SEQ ID NO: 68748 - protein, 159 aa, Gossypium hirsutum
  Clone ID: GOSHI-09MAY01-C65127_2.pep
MASADSNLLILNFLTLAALALFYADKAFCIRIPDRASTTPRELSDQSLKTAVFALGSFWRSEAVFGCLNGVVRTTSGYAGGSKINPEYRSLGDHAESVMVEYDPKEINFRLLLEVFWSSHDPRQVFGQGPDVGPQYRSIILTNGTAEARLADMSKEREH

SEQ ID NO: 68749 - protein, 190 aa, Gossypium hirsutum
  unsure (1)..(190): unsure at all Xaa locations
  Clone ID: uC-gsflnu33B107h05b1.pep
MASADSNLLILNFLTLASLSLFYADKAFCIRIPDRASTTPRELSDQSLKTAVFALGSFWRSEAVFGCLNGVVRTTSGYAGGSKINPEYRSLGDHAESVMEINFRLLLEVFWSSHDPRQVFGQGPDVGPQYRSIIFTNGTEEARLAAMSKEREQTKSRSSILTTQINNLNHXIRQXPXHQKXELXRHPMLL

SEQ ID NO: 68750 - protein, 87 aa, Gossypium hirsutum
  Clone ID: GOSHI-09MAY01-C65287_1.pep
YHLVMISDIVIFEVSVAVKVQQLPMKVLCLKGLDLKFGFDKSFVNGEIYISKLLTFKFDKLGFLGRILSLYKLPKGKNLKPFLIGWT

SEQ ID NO: 68751 - protein, 115 aa, Gossypium hirsutum
  unsure (1)..(115): unsure at all Xaa locations
  Clone ID: GOSHI-09MAY01-C66497_1.pep
MSTSSSAVSTQKRLEGKVALITGGAGGIGEATARLFVQHGAKXVVIADIQDDLGQAISQELGEENISYVHCXVTLDSDVGTAVDSXVSKHGKLDIXMFNNAGISSPDKNISSFKR

SEQ ID NO: 68752 - protein, 148 aa, Gossypium hirsutum
  Clone ID: GOSHI-09MAY01-C66647_1.pep
NHMDWYLCNGMEDLVVPRNQELEDNIPSPESWSKWEFSPPANVNGECFGVDTNLSGDKPKFSGKLCHDVADVKDPSICSSVYGGFLNQGHIFQQQTDYQLHDFGRFEQLDDIFLGSLLEDPTWSEDLQKSFCFSPEYECETMATDHLL

SEQ ID NO: 68753 - protein, 267 aa, Gossypium hirsutum
  Clone ID: GOSHI-09MAY01-C66007_1.pep
MRKFFSMSSLLNKGSIQRRVSNKYLINAIRPYSEDLSSPKSPGPLLQYRKLVEQGRLQHDPYQERVALALENLLGRLEQYEKEMEDYHIKLAEWEKNRETERRKLLMEEAELNHRGDLWTSVNKRKSELLERWSFRRKSEDIEPGVGKWVSYLNREKKLDSLVGRRPTAPPAPKGLYIYGNVGSGKTMLMDMFYSATDGIVKHRQRFHFHEAMLQINEAMHKLWKNQVEEKSIQSSISSWIMNLSFDIKAKEWLAAEERYKQEVQMK

SEQ ID NO: 68754 - protein, 133 aa, Gossypium hirsutum
  Clone ID: GOSHI-09MAY01-C67937_1.pep
MSNLILFEDIFVVDKLDPDGKKFDKVTRIEARSQNCDMFMHLDVNTEIYPMHVGDKFTMALAHTLNLDGTPDTGYFNPGRKSLADKYEYVMHGKLYKISDDSSGKGLKAEIYVSYGGLLMLLRGEASHVSHFE

SEQ ID NO: 68755 - protein, 225 aa, Gossypium hirsutum
  unsure (1)..(225): unsure at all Xaa locations
  Clone ID: GOSHI-09MAY01-C67197_1.pep
MAGIAILLDLYRKNPSFCSQESFHSSGFFSASAAAASAAATVVAGTPFASRFLFGNPKVSHCDAAAAFPEDYLSNVQRLSEDIVKNVKNLKNDALKYAVKEYKVELKPLYSAFELRPFAMTTLRSFLMFYLPLLEPATNVEEDDEDFLQDTPKEQHVDLVVPFKKSVKQIIRETTVVTTKRVLERLAVIYVSQRMAWKLLKDVPKSAVRKSQXGLPTTVYFFRVS

SEQ ID NO: 68756 - protein, 99 aa, Gossypium hirsutum
  Clone ID: LIB3272-042-P1-K1-C5.pep
RILTHKTSTRPLSPTTDFMVVDIAPLKLKSNVSLDQKLRLFLYTATTSALPAIVCLATHNTHNRPALVYITTIAVISSSSFSAVWFSRERSRLSGFLSF

SEQ ID NO: 68757 - protein, 87 aa, Gossypium hirsutum
  Clone ID: GOSHI-09MAY01-C60447_1.pep
PRCLRTCKRRQTRDGHSTKSKKPSRTFVFFFSFVVAIKSQETSMYPFFFTHTHTKQSNRRCKYFKVVHSLFLLSYFSLSFLIYLFFL

SEQ ID NO: 68758 - protein, 84 aa, Gossypium hirsutum
  Clone ID: LIB3196-018-P1-M1-H10.pep
LVVLTWDGKMSAVSQDSIEDSRLAQTETVVDDWDEEFDRGKEKKIKKFKREKRRNFNAFQKLQTRRNFWSVTHPAKAASLSYRR

SEQ ID NO: 68759 - protein, 84 aa, Gossypium hirsutum
  unsure (1)..(84): unsure at all Xaa locations
  Clone ID: LIB3196-018-P1-M1-H6.pep
LVVLTWDGKMSAVSQDSIEDSRLAQTETVVDDWDEEFDRGKEXKINKFKREKRRNFNAFHKLQTRRNFWSENXPSKAAMLMYRR

SEQ ID NO: 68760 - protein, 74 aa, Gossypium hirsutum
  Clone ID: LIB3196-011-P1-M1-H9.pep
PTRPRTRGHSLKPSTRSDTQSCLLCSLSLHVPHGHSLLYGLATRLCNPSTWLKALHTTMCPYFTVLSRIVNYSI

SEQ ID NO: 68761 - protein, 63 aa, Gossypium hirsutum
  Clone ID: LIB3196-011-P1-M1-H3.pep
GPLIVVCNALSHVEGLHSRVARPYNRLWPCATCLLHLQRRHDCVSDRVEGFRLCPRVRGRVGA

SEQ ID NO: 68762 - protein, 170 aa, Gossypium hirsutum
  Clone ID: LIB3582-005-P1-K1-C6.pep
TSRVSNFFIPQPDNSVCSFIQVPSVFGETSCDLDLLIPQSDHSLCFFEPDAAAAKLSPSSAFLCHADKASQPTSTFGETTSCDLDLLAPQSEHSFCFFELVAAAANLSPSSAFLFHPDKASQPTSCELDLLAPQPDHSFCFSELVVAAANLSTSSAFLFHPDASQPPDAW

SEQ ID NO: 68763 - protein, 128 aa, Gossypium hirsutum
  Clone ID: LIB3196-010-P1-M1-E4.pep
DKVSDVGWDASGWNKNVEDVDKFAAAATSSEKQNEWSGWGASKSNSQVVSPKVDVGWDALSGWNKNAEEGDKFAAAATSSKKKNECSDWGARKSKSQDVVSPKVDVGWDALSAWNKNAEDGDNFAAAA

SEQ ID NO: 68764 - protein, 102 aa, Gossypium hirsutum
  Clone ID: GOSHI-09MAY01-C60047_1.pep
PILRFNIITRSKRYSLFPILSGLIEPSLRYFRIPLSNGLFSPVEIGGSIPSLRTVLESFLPHTARQSILLVSHFFTLPYIQLNEISHRSIDLSRVNQKGLIT

SEQ ID NO: 68765 - protein, 115 aa, Gossypium hirsutum
  Clone ID: GOSHI-09MAY01-C60017_1.pep
MKIATVSVLLPLALCLIQDAASENEDQEICHEFQAFMKNGKLFCPQDKKFFLSLDGIMFINKCATCKMILEKEAKSQKRVRHLARATKATAPTELNCDDFKKGERDGDFICPEFY

SEQ ID NO: 68766 - protein, 131 aa, Gossypium hirsutum
  Clone ID: GOSHI-09MAY01-C61997_1.pep
LMSRCGEMLHIRHRLLRQALAECLGTLILVMFGCGSVAQVVLSRGTHGGFLTINLAFGFAVTLGILIAGQVSGAHLNPAVTFAMCFLAREPWIKLPVYTLAQTLGAFLGAGIVFGLYYDAIWGFADNQLFV

SEQ ID NO: 68767 - protein, 125 aa, Gossypium hirsutum
  unsure (1)..(125): unsure at all Xaa locations
  Clone ID: GOSHI-09MAY01-C61947_1.pep
CCQERSRTHLPXLEAERDSIAMEDXGTSRVWNMRYRFWPNNKSRMYLLENTGDFVRTNGLQEGDFIVIYSDVKCGKYLIRGVKVRQSGTKSETKRPGKSQKNHHTNSPSAAVSGSLPTPITQTVK

SEQ ID NO: 68768 - protein, 86 aa, Gossypium hirsutum
  Clone ID: GOSHI-09MAY01-C61537_1.pep
MLQTNTGPSYLVYDLEGQRVREKGPISRGRERQRESPSTLRQLPVCCVQLYSTGQKRQVVYSVDNLMRKKGQLRKNMVTPPTCIPQ

SEQ ID NO: 68769 - protein, 133 aa, Gossypium hirsutum
  Clone ID: GOSHI-09MAY01-C61767_1.pep
MSSEIEVVEETVPLKQLSGAVANGNEYGGGHHGVVGDVADDESLKNDVYTAAAYGDLEKLQRLVESEGCSLSEPDGLGYYALQWAALNNRTAAAQYIIEHGGDVHAGDHNGQTALHWRPRGIQLSYSQGACNL

SEQ ID NO: 68770 - protein, 126 aa, Gossypium hirsutum
  Clone ID: AI054512.1.pep
GKVALALVLCLGFGIISQPGTDAKAKHPPIPSPLFLLPSKYPKCCPPTFLFETELLKNKVNPRSLKMKKNHWSFSIVGSLRYVVGDRCCGGYCTFEAIECPLSNGNYLGEGIMELLCKFLINKNFK

SEQ ID NO: 68771 - protein, 437 aa, Gossypium hirsutum
  Clone ID: GOSHI-09MAY01-C61187_1.pep
MIAYLGRIVHDNDAESKLDDDVSSISKSLDLQGSIEKGDVSSLASKDFGGLYSVKPLFLIKPSGAEDISRVVKLASRTSNLTVAARGNGHSINGQAMAEGGLVIDMSSTEKNHFEFLPINGSHYIDVSGGALWEDVLTRCVSRYGYAPRSWTDYLTLTVGGTLSNAGVSGQAFRYGPQTSNVTELEVVTGKGEITVCSETLNSELFFGVLGGLGQFGVITRARIKLQQAPDMVRWIRVVYSEFEEFTRDAEFLVTQKEGESFDYVEGFVFCNNDDPFNGWPSVPLDSGHEFNPTHISQTAGSVLYCLEVAFRYRNSDHPTVDTAVNGLLGRLRFVEGLKSQVDVSYTKFLLRVNRAEEQVKANGTWDGPHPWLNLFVSKSDVVNFDRTVFKTMLKDGVGGPMLIYPLLRSKWDDRTSVVLPEGEIFYIVALLRFVPN

SEQ ID NO: 68772 - protein, 158 aa, Gossypium hirsutum
  Clone ID: GOSHI-09MAY01-C61027_1.pep
MSYPDHEPPPPPPFPAALKPPLPLYKQRSWSPDIIRNEAWLRRKGKSKNRRSKSVTDEDLDELRACIELGFGFDSLEIDQRLSNTLPALGLYQAVNKNYNHTISKYASSPSAASDCDSISSAIGSPHAIFGPGDKPQIVKTKLRQWAQVVACTVRQSS

SEQ ID NO: 68773 - protein, 128 aa, Gossypium hirsutum
  Clone ID: LIB3196-025-P1-M1-B7.pep
LKLGLQLGLREIEVEGDSRTIIRKLQEEKDDRFEISVYIKDAQNLSCQFNLCVFPFANREANRVAYCLAQEGLKKRESTYLTNLVSPSAVEAVAEDRRWTEVVGEERWRRNEGAEESVLEFCSMLRVS

SEQ ID NO: 68774 - protein, 69 aa, Gossypium hirsutum
  Clone ID: uC-gsronu33B027a04b1.pep
NSQHNQNSRTLSSAPSFLLHLSSPTTSVHLLSSATVSTALGDTSFRMIVRESPSTLISLNPSCYPNFSA

SEQ ID NO: 68775 - protein, 123 aa, Gossypium hirsutum
  Clone ID: GOSHI-09MAY01-C62257_1.pep
MKCGAKPAGSGLVSCLLGPALGPVPPEAYRGTMLHCPLNFTGTPGPLKGQAALPFSPLVIPAFPAHFLATAGPSPMAAGLMHFPPTSFDSALRHRLCPASSAWHAPPVTTYAAPHFFHLNTKL

SEQ ID NO: 68776 - protein, 55 aa, Gossypium hirsutum
  Clone ID: GOSHI-09MAY01-C62217_1.pep
CKNSLDCEIVSAKSSEMNVLIPTEGGDFNEFPVPEQFKTLWNGQKLVTTVTEIAG

SEQ ID NO: 68777 - protein, 138 aa, Gossypium hirsutum
  Clone ID: GOSHI-09MAY01-C63967_1.pep
PPVAPISDSLSRSLGSSSINDMLRNLQLGKVKFMPIGLCSSPSPSMFGSPRDSMILHGFCSLLNTPTQNLTRHGIGGYLDLFEKRCEEDEPAMERAESGRDLRAQLFEKLSKENCSGRGNPGQGSGDPNLDWVSDLVN

SEQ ID NO: 68778 - protein, 155 aa, Gossypium hirsutum
  unsure (1)..(155): unsure at all Xaa locations
  Clone ID: GOSHI-09MAY01-C63897_1.pep
LIHGFRSTAEAMNEAISMADAEKQLRHEKHYRYISSHDVAFWSRSFFQDMERTCKDHFRRRCWGIGLSFGFRVVALDPNFRKLSIDHIESVYVRSKNRAILLDYDGTVMPQTSHNKTPNAEVIPIVNRLLGDTKNTVFVVSGRGKEXLDKWFSPC

SEQ ID NO: 68779 - protein, 60 aa, Gossypium hirsutum
  Clone ID: GOSHI-09MAY01-C63627_1.pep
GERRKAVIAIQLLSLHCLKDPLCSDYVSFWVSTAKQVEYLINEKHIYLLPSGRINVSGLT

SEQ ID NO: 68780 - protein, 149 aa, Gossypium hirsutum
  Clone ID: GOSHI-09MAY01-C63197_1.pep
TNISSSSSSSSSLCCIFSVLRRVFSVFSFQFSLQVPTSHFLFLKLNNTVEKFCFVFLAMDFLRNVSVSGEYHQPEQVLSSPCSKLGASIDDLFPTQNTEVDVSLEGLSIFVEDCLSSTGNCIPVAATAAPNVTTTATTTTKPTNSSKKP

SEQ ID NO: 68781 - protein, 105 aa, Gossypium hirsutum
  Clone ID: uC-gsronu33B124d05b1.pep
KGVFSFQFSLQVPTSHFLFLKLNNTVEKFCFVFLAMDFLRNVSVSGEYHQPEQVLSSPCSKLGASIDDLFPTQNTEVDVSLEWLSIFVEDGKAVSVDTPLFVIEP

SEQ ID NO: 68782 - protein, 208 aa, Gossypium hirsutum
  Clone ID: GOSHI-09MAY01-C63307_1.pep
MRKMGSSSSETKLLQELILYAASAALSCLVLFAGLRHLDPNREASKKALEHKKEIAKRLGRPLINTNPYEDVIACDVINPDHIDVEFESIGGLEAIKQALYELVILPLRRPELFSHGKLLGPQKGVLLYGPPGTGKTMLAKAIAKESGAVFINVRISNLMSKWFGDAQKLVAAVFSLAYKLQPAIIFIDEVDSFLGQRRNTDHEAMTN

SEQ ID NO: 68783 - protein, 272 aa, Gossypium hirsutum
  Clone ID: GOSHI-09MAY01-C18997_1.pep
GLLNLDLNNKIVLNAVKAFSPLKIRLGGSLQDKVIYGTDDNQEPCTSFVKDPSEMFGFTKGCLPMKRWDELNAFFAKAGAKIIVGLNALAGKSIKPGGSAVGAWNYTNAESFIRYTVEKNYKIHGWELGNELSGNGVGTRIAVNQYAADTAALQRIVQKIYKDVDLKPLIIAPGGFYESKWFKEFIDKTTTSLDVVTHHIYNLGPGVDTHLIEKILNPSVLDGISGTFSGLHNVIKSSATKAIAWVGEAGGAYNSGRNLVTNACVFSFWYLD

SEQ ID NO: 68784 - protein, 158 aa, Gossypium hirsutum
  unsure (1)..(158): unsure at all Xaa locations
  Clone ID: LIB3584-010-P1-K1-B11.pep
NHGWELGNELSGNGVGTRIAVNHYAADTAALQRXGGVFFYXXXKPLIIAPGGFYESKWFKEFIDKTTTSLDVVTHHIYNLGPGVDTHLIEKILNPSVLDGISGTFSGLHNVIKSSATKAIAWVGEAGGAYNSGRNLGTNAFGFSFWDLDQLGMASKFD

SEQ ID NO: 68785 - protein, 498 aa, Gossypium hirsutum
  unsure (1)..(498): unsure at all Xaa locations
  Clone ID: GOSHI-09MAY01-C18947_1.pep
GDGRYFNRNLQIXIKIAAGNGVGKILVGREGILSPPARPPVRPRGRANGGFIMSASHNPGGPEYDWGIKFNYNSGQPAPESITDKIYGNTLSISKIKMAEIPDVDLSRLGVTKYGNFTVEVIDPVSDYLELMESVFDFQMIKNLLSRSDFSFAFDAMHAVTGAYAKPIFVDKLGARPDSISNGVPLEDFGHGHPDPNLTYAKDLVNIMYSENGPDFGAASDGDGDRNMILGKKFFVTPSDSVAIIAANAQAAIPYFRSGPKGLARSMPTSGALDRVAEKLGLTFFEVPTGWKFFGNLMDAGKLSICGEESFGTGSDHIREKDGIWAVLAWLSIIAYRNKDKKPGEKLVSISDVVKEHWATYGRNSFSRYEYEECESEGANKMIEYLRGLISKSKAGEKYGNYVLQFADDFSYTDPVDGSVASKQGVRFVFTDGSRIIFRLSGTGSAGATVRIYIEQFEPDASKHDMDAQVALKPLIDLASSVSKLEXFPGREKPPVIT

SEQ ID NO: 68786 - protein, 299 aa, Gossypium hirsutum
  Clone ID: GOSHI-09MAY01-C18977_1.pep
MGAYRCFEPISKCSSDGRSNQTVAADLDGTLLVSRSAFPYFMLVALEAGSLVRALVLLTSVPFVYFTYLFISESVAINTFIFITFSGLKVRDIELVSGSVLPKFYAEDVHPDTWRVFSSFGKRYIITASPRIMVEPFAKTYLGADKVIGTELEVTKSGRATGFAIKPGVLVGEHKRAAVLKEFGTNLPDLGLGDRETDHDFMSLCKEGYMVPRTKCEPLPRNKLLSHVIFHEGRLVQRPTPLAALLTFLWLPIGFILSLLRVYTNIPLPERIARYNYRLLGIKLIVKGTPPPAPRKGQS

SEQ ID NO: 68787 - protein, 213 aa, Gossypium hirsutum
  Clone ID: GOSHI-09MAY01-C18967_1.pep
VDATDFIGHAWALHNEGRHLAHPALNFVKRTKLYAESSARFPGGSPYIYPLYGLGELPHAFARLSAVYGGTYMLNKPECKVEFDGDGKVIGVTSEGETAKCNKVVCDPSYLSDKVKKVGKVARAVCVMSHPIPDTNDSHSAQVILPQKQLGRKSDMYVFCCSYAHNVAPKGKYIAFVSAEAETDNPEQELKPGVDLLGSVDEIFYDTYDRYVP

SEQ ID NO: 68788 - protein, 244 aa, Gossypium hirsutum
  Clone ID: GOSHI-09MAY01-C18917_1.pep
MVSSESEDNLITYDAANFKFEACQPSSSSVTDDSEQPQIDSAIKSDLKETSPEMNSQGQTMQISAHSQIEVHCLSNKPETGSEQPKHSMERFASEHLETEAKKFVFGSKRTSNPAFIAAQTKFEELSSTANSSRSIDSSYQDVSVESNLDTVPSGADMISRSKEPSISENPVLNNWRVQHGGSECGTELSITSTLDSPDRSEAGTLEYESATKVSEQENCTSKSTKDLDVKNNDTVAIPVPDSS

SEQ ID NO: 68789 - protein, 171 aa, Gossypium hirsutum
  unsure (1)..(171): unsure at all Xaa locations
  Clone ID: GOSHI-09MAY01-C18937_1.pep
GPNSRVVYIDGAFELFXAGHVEILKKARQLGDFLLVGIHTDHIAREHRGMPYPVMHVHERSLSVLACRYVDEVIIGAPWEVTKDMITTFNISIVVHGTVAESNSLLPGETDPYAFPKSMGIFRLLESPKSLTTSSVSQRIVANHEAYVKRNAKKAQSEMKYYEEKTYVAGE

SEQ ID NO: 68790 - protein, 75 aa, Gossypium hirsutum
  Clone ID: LIB3147-015-Q1-K1-B7.pep
LVVHFCTLYSNSIGNLHYIIAAAATTNITIAISLSLFKIGKLSWLMIFLCFNRLRPSTFLLLCMELLQRVILCCL

SEQ ID NO: 68791 - protein, 174 aa, Gossypium hirsutum
  Clone ID: GOSHI-09MAY01-C18897_1.pep
SEFIESCDCGEYLKKAERRLNEEIERVSHYLDTRSEVKITNVVETEMIESHMHRLVQMENSGLINMIVDEKYEDLGRMYCLFRRVSNGLVLIRDVMTSYIRDTGKQLLTDPERLKDPVDFVQHLLDLKDKYDKIITSAFRNDKTFQNALNSSFEYFINLNSRSPEFISLFVDDK

SEQ ID NO: 68792 - protein, 190 aa, Gossypium hirsutum
  Clone ID: GOSHI-09MAY01-C18847_1.pep
MLLKLGLARLVEKRLLAVYHSSFIDEEGITKACGFPLLPLKSHIKGPAPVSDQGKTDIVDEAITFFRANVFFRNFDVKSPADKLLIYLTFYINVALKRLEGCRTLAEGTKAIINLGLENVPVPGESGFPFPGLFVLPQSQKEAELLRNYLKQIREETSGRLLSVAYRPNGTPNKWWLAFAKRKFMNIIIP

SEQ ID NO: 68793 - protein, 167 aa, Gossypium hirsutum
  unsure (1)..(167): unsure at all Xaa locations
  Clone ID: AI054490.1.pep
MVYHSSFIDEEGITKACGFPLLPLKSHIKGPAPVSDQGKTDIVDEAITFFRANVFFXNFDVKSPADKLLIYLTXYXNVALKRLEXCRTLAEGTKAIINLGXENVPVPGESGXXFPGXFVLPQSQKKQTTXEYLKXIEKNEWEIVMPIAPWTNNVVALQKIMIYILKG

SEQ ID NO: 68794 - protein, 80 aa, Gossypium hirsutum
  Clone ID: uC-gsflmaxxa074h09b1.pep
MVYHSSFVGEEGITKACGFPLLPLKSHIKGPAPVSDQGKTDIVDEAITFFRANVFFRNFDVKSPADKLLIYLTFYIKVAL

SEQ ID NO: 68795 - protein, 47 aa, Gossypium hirsutum
  Clone ID: LIB3083-002-Q1-L1-G2.pep
MAYHSSFDGEEGITKACGSPLLPLKSHIKGPAPVSDQGKTDIADEAI

SEQ ID NO: 68796 - protein, 213 aa, Gossypium hirsutum
  unsure (1)..(213): unsure at all Xaa locations
  Clone ID: GOSHI-09MAY01-C18587_1.pep
HASARTPLFAWIVGYSSGCVATLPLLYWRYRHRNQASEQDSAQNRHASHNNAPARSFSLSVTRTSDGGDHRTATTSPRGGQNMAITSAIIKALVEYFRTILDCFFAVWFVVGNVWIFGGHSSASEAPNLYRLCIVFLTISCIGYAIPFILCATICCCLPCIISVLGFREDLSHARGATPESIEALPTYKFKVKKNRNSDGKDVNSAXSEGGVV

SEQ ID NO: 68797 - protein, 183 aa, Gossypium hirsutum
  Clone ID: GOSHI-09MAY01-C18497_1.pep
MMLGETHRPNPTVHVPPWPDLDDDQTDVVYSPIHYNATDNNLSSNGNPFYLHEALSALQRYLPSNGPDVELDSEFPGLDSPDSPVDAYSCDHFRMYEFKIRRCARGRSHDWTECPYAHPGEKARRRDPRKYHYSGTACPDFRKGNCRKGDSCEFAHGVFECWLHPARYRTQPCKDGSGCRRRV

SEQ ID NO: 68798 - protein, 153 aa, Gossypium hirsutum
  Clone ID: GOSHI-09MAY01-C18767_1.pep
MSRHPEVLWAQRSDKVYLTISLPDAKDISVKCDPQGLFSFSAMGVQGESFDFSLELFGKIVPEGCKTNVGLRNIICSIMKEETGWWKRLLKSEEKPAPYIKVDWNKWCDEDDEDPNSDLASDDDDATYVGQEEESSDDEGLLYLPDLEKARGN

SEQ ID NO: 68799 - protein, 158 aa, Gossypium hirsutum
  Clone ID: GOSHI-09MAY01-C18697_1.pep
MDLETVKKYLEKGVGADGDDKNASTINGMPSRFFENFIMQGLHVDQIEKGRVLCSMKVPPRLLNAGNFLHGGATASLVDLVGSAVIYTYGVSTSGVSVEISITYLDAAYVGEEIEIEAKALRVGKTVAVVTVEFRKKKTGKIIAQGRHTKYLTAQSKM

SEQ ID NO: 68800 - protein, 320 aa, Gossypium hirsutum
  Clone ID: GOSHI-09MAY01-C18627_1.pep
MATQGQVITCKAAVAYEPNKPLVIEDVQVAPPQAGEVRIKILFTALCHTDAYTWSGKDPEGLFPCILGHEAAGIVKSVGEGVTEVQPGDHVIPCYQAECRECKFCKSGKTNLCGKVRTATGAGVMMNDRKSRFSINGKPIYHFMGTSTFSQYTVVHDVSVAKIDPQAPLDKVCLLGCGVPTGLGAVWNTAKVEPGAIVAIFGLGTVGLAVAEGAKSAGASRIIGVDIDSKKFDVAKNFGVTEFVNPKDYDKPIQLVLVDLTDGGVDYSFECIGNVSVMRAALECCHKGWGTSVIIGVAASGQEISTRPFQLVTGRVWKGT

SEQ ID NO: 68801 - protein, 167 aa, Gossypium hirsutum
  Clone ID: GOSHI-09MAY01-C18197_1.pep
MTLEIEARDVIKIVLQFCKENSLHQTFQTLQNECQVSLNTVDSIETFVADINSGRWDAILPQVAQLKLPRNKLEDLYEQIVLEMIELRELDTARAILRQTQAMGGMKQEQPERYLRLEHLLVRTYFDPNEAYQDSTKEKRRAQIAQAIAAEVSVVPPSRLMALIGQA

SEQ ID NO: 68802 - protein, 169 aa, Gossypium hirsutum
  Clone ID: GOSHI-09MAY01-C18187_1.pep
DAWALWEIYRIVKIVGSLSAKLYKPWILFSSENPTNFPALVRECSSVWSSSGLEEALQNLTDLTDLKYDVQALLGSIQSIHDPDAHELYKQVFLEQESTCCLSGLTAGAVPGMKMVLWDGRHYFVTIVNLWANLISRNPPNLPLIHARKECCHEKTYIFQEFHSIGRTE

SEQ ID NO: 68803 - protein, 62 aa, Gossypium hirsutum
  Clone ID: LIB3197-053-Q1-M1-B4.pep
KIPSCRFKPLWQSFSVDTHAHDSIDSRIWKSKPDLSNLFFFFSIRQTYCSKLNQIYGTFFFF

SEQ ID NO: 68804 - protein, 58 aa, Gossypium hirsutum
  Clone ID: LIB3145-025-Q1-K1-E11.pep
LEMTTRKTLREIWRDGGMKGLFAGLGPRVGRTGPSVGIVVSFYEVVKFALHYRHEDHE

SEQ ID NO: 68805 - protein, 121 aa, Gossypium hirsutum
  Clone ID: GOSHI-09MAY01-C18087_1.pep
MAAKAEGKAIGIDLGTTYSCVGVWQNDRVEIIANDQGNRTTPSYVAFTDTERLIGDAAKNQVAMNPQNTVFDAKRLIGRRFSDPAVQADMKHWPFKVVAGPGDKPMIVVNYKGEEKQFAPE

SEQ ID NO: 68806 - protein, 195 aa, Gossypium hirsutum
  Clone ID: GOSHI-09MAY01-C18077_1.pep
GKGLSEDAKAQKLAFQHWIEAIDPRHRYGHNLHIYYEEWCKADAGQPFFYWLDLGDGKDINLNECPRSKLRQQCIKYLGPQERVNYEYIVVEGKIIHKQTRNVLDTIEGLKEGKWIFVMSTSKKLYAGKKKKGMFHHSSFLAGGATLAAGRLVVEHGDLKSISAYSGHYRPTDDSLDSFLSFLKENGVNLNEVEI

SEQ ID NO: 68807 - protein, 116 aa, Gossypium hirsutum
  Clone ID: GOSHI-09MAY01-C18337_1.pep
SVYISEKIAEMLGNFEVEQCSFSKLRQFHERVLSFSDRFVKIHCKHCVSESISALIVIGLFLSFLLAMICTYFHVFPIYQPAVRTYTVHESDDLVAKCNVFYGNGSLMKVTLYIML

SEQ ID NO: 68808 - protein, 301 aa, Gossypium hirsutum
  Clone ID: GOSHI-09MAY01-C18327_1.pep
MATYDLTPRIGPNLDRHLVFPLLEFLQERQLYPDEQILKAKIELLNKTNMVDYAMDIHKSLYHTDDVPQDMVERRVEVVARLKALEDAAAPLVTFLQNPNAVQELRADKQYNLQMLNDRYQIGPDQIEALYQYAKFQFECGNYSGAADYLYQYRALCTNSERSLSALWGKLAAEILMQNWDIALEELNRLKEIIDSKSFSSPFDQAQSRIWLMHWSLFIFFNHDHGRTQIIDLFNQDKYLNAIQTSAPLLLRYLATAFIVNKRRRPQFKEFIKVIQQDQCSYKDPITEFLACVYVNYEFDG

SEQ ID NO: 68809 - protein, 149 aa, Gossypium hirsutum
  unsure (1)..(149): unsure at all Xaa locations
  Clone ID: AI055666.1.pep
MATYDLTPRIGPNLDRHLVFPLLEFLQERQLYPDEQILKAKIELLNKTNMVDYAMDIHKSLYHTDDVPQDMVERRVEVVARLKALEDAVAPLVTFLQNPNAVQELRADKQVNLQMLNGPXQIGPXQIEALYQYAKFXFECXNYFGAADN

SEQ ID NO: 68810 - protein, 221 aa, Gossypium hirsutum
  Clone ID: GOSHI-09MAY01-C18257_1.pep
MISFQAPLSPSDMIGKTIPEFDNSSKKRKLEEDSQGDHEETSEKRSKAKSIKSVFDMELHLETPLPLEWQRCLDIQSGQIHFYNTRTHTRTSKDPRRSPEPPSPVHMSLDLELNLPCDSSVRKVDATDHQLFNKHNSIGPTRAGSVDKKINSSGGLTRNLSWLAVEENDQQEQEMVATVCMRCHMLVMLCKSSPACPNCKFMHPPDQGPPKLFKQGLSLLC

SEQ ID NO: 68811 - protein, 68 aa, Gossypium hirsutum
  unsure (1)..(68): unsure at all Xaa locations
  Clone ID: LIB3145-052-Q1-K1-G7.pep
LTKHNSIGPTRVGSVDKKINSLGGLTRNLSWLAVEENDQXEQEMVATVCMRCHMLVMLCKSLPACSNC

SEQ ID NO: 68812 - protein, 162 aa, Gossypium hirsutum
  Clone ID: GOSHI-09MAY01-C18227_1.pep
MACRGCLECLLKLLNFLMTLAGLAMVGYGIYLFVEYKNAADTAMLLSPVGSDRDLIQFGRPMLMAVSLSSSIFDNLPKAWFIYLFIGVGAVLFVISCFGCIGAATRNICCLTCYSVLVILLILVELGCAAFIFFDKNWKDELPTDKTRRFRFDLRTFWKTNW

SEQ ID NO: 68813 - protein, 83 aa, Gossypium hirsutum
  Clone ID: GOSHI-09MAY01-C19967_1.pep
EKSLKIYVFLLNGLVCPSYFNRCALTYADIKLVNVNGGGVLLRGLSPVPPFSNKLVKLGFGNMVVKFLLLLELADLKLTVVIT

SEQ ID NO: 68814 - protein, 194 aa, Gossypium hirsutum
  Clone ID: LIB3828-021-Q1-K6-B6.pep
MAKGGKGRRRTASQQTPFLLHCRRQGISGDLHPKKCSKALDNRDWEDATCSVCMECPHNAVLLLCSSHDKGCRPYMCGTSFRYSNCLDQYKKFHTKVVPFNHEERLHTSIDNSVLAAGSSRPVDKCEVTEISCPLCRGQVKGWTVVEPAREYLNAKKRNCMQDDCTFVGTFKELRKHMKADHPCAQPREADPTI

SEQ ID NO: 68815 - protein, 146 aa, Gossypium hirsutum
  Clone ID: LIB3083-024-Q1-L1-F8.pep
KVVSSSHEESLHGSIDNLVLASSVEKCEVTELACPLCRGQVKGWTVVEPAREYLNAKKRSCMQDDCTFVGTFKELRKHMKANHPCAKPREVDPTLEQKWRRLEREREREDVISTIRSAMPGAMVFGAYVIERNPRGLETEEEDGPD

SEQ ID NO: 68816 - protein, 76 aa, Gossypium hirsutum
  unsure (1)..(76): unsure at all Xaa locations
  Clone ID: LIB3585-004-P1-K1-E3.pep
VDSIMKNRCILLLIIQFWPPVLVGLLRSVNQXIIHVYFARVWLMVTLCSLLSWPINCALFVCFVYLVHFFFLFGFF

SEQ ID NO: 68817 - protein, 102 aa, Gossypium hirsutum
  Clone ID: GOSHI-09MAY01-C19587_1.pep
RSDPPGTTACYTPCILKLRRSASYSFGARGGPLSITVKPEESSARRKAQLSGCRWSRSLPMYSPGKRGNYTSFSFRARKKDFWDRPSDVQSPEMGRWAEDET

SEQ ID NO: 68818 - protein, 194 aa, Gossypium hirsutum
  unsure (1)..(194): unsure at all Xaa locations
  Clone ID: GOSHI-09MAY01-C19557_1.pep
FIYTGLIYNEFFSVPFERXGPSAYGCRDPACRDASTAGLVKVRATYPFGVDPKWHGTRSELPFLNSLKMKMSILLGVAQMNLGIILSYFNAKFSGNELNIRYQFLPQMIFLNSLFGYLSLLIVVKWCIGSQADLYHVMIYMFLSPTDDLGENQLSXGQKFLQMVLLLAALVAVPWMLFSKPFXLKKHHEERHRG

SEQ ID NO: 68819 - protein, 73 aa, Gossypium hirsutum
  Clone ID: GOSHI-09MAY01-C19757_2.pep
MIEVVLNDRLGKKVRVKCKDDDTIGDLKKLVGAQTGTRAAKIGIQKWYTVYKDHITLKDYEIHDGMGLELYYN

SEQ ID NO: 68820 - protein, 90 aa, Gossypium hirsutum
  unsure (1)..(90): unsure at all Xaa locations
  Clone ID: LIB3828-022-Q1-K6-F11.pep
MIEVVLNDRLGKKVRVKCNDDDTIGDLKKLVAAQTGTRADKIRIQKWYTVYKDHITLKDYEIHDGMGLELYYXLKKIYLCNPCGLCLNKL

SEQ ID NO: 68821 - protein, 236 aa, Gossypium hirsutum
  Clone ID: GOSHI-09MAY01-C19707_1.pep
MARIIPQALLQQSKKKKGPARISVITIILYSLIVAVTVFFLYATYRHWSQRSRTQIEYRQSVFKGDTDNSFVDLKKSDLPGYAILDTAKGSITVELFKDNFPEVVDQFLDLCHKGHFNGMLFRHVIKHYVIQAGDSDKLEAAEDWTLKGKHYSQLDTSLKHEAFMLGTSKKKHDNGAFELFITTAPIPDLNEKLIVFGKVVKGEDIVQEIEEVDTDEHYRPKSSIAIRSVTLKQSV

SEQ ID NO: 68822 - protein, 257 aa, Gossypium hirsutum
  Clone ID: GOSHI-09MAY01-C19737_1.pep
MDAPQGGSDGDKTNPSSSPVSVVSNFWKEFDLEKEKSVLDEQGLRIAENQDNSQKNRRKLAESTRDFKKAAPEEKLSLFNSLLKGYQEEVDNLTKRAKFGENAFLNIYQKLYEAPDPYPALASISEQDLKISELESENRKVKVELEEFRTESMHLKNQQATIRRLEERNRQLEQQMEEKVKEIVEMKQRSLAEENQKTLEVLKDREQSLQDQLRQAKESVSNMQKLHELAQSQLFELRAQSEEDWAAKQSEVNLLMD

SEQ ID NO: 68823 - protein, 318 aa, Gossypium hirsutum
  unsure (1)..(318): unsure at all Xaa locations
  Clone ID: GOSHI-09MAY01-C19657_1.pep
PRVRPRVRLYPNVQDLVKITLLEATDHILNMFDKRITNFAEQKFGRDGIDVKLGSMVTGINENEISTKVRGNGEKTSTPYGMALWSTGIGPRPLIKEFMKQIGQGNRRAXLATDEWLRVEGXGNIYALGDCATVNQRKVMEDISEIFREADKDNSGTLTVKEFQEIIDDICERYPQVELYLKNKQVRNMVDLLKEAKGDAAKESMELNIEEFKSALSEVDSQMKNLPATAQVANQQGAYLAKCFNRMEECEKNPERPPRFRGTGRHRFHPFRYRHLGQFAPLGGEQTAAQLPGDWVSIGHSEQWLWYSVYASKQVNWR

SEQ ID NO: 68824 - protein, 218 aa, Gossypium hirsutum
  unsure (1)..(218): unsure at all Xaa locations
  Clone ID: GOSHI-09MAY01-C19677_1.pep
MGEGTGNGVLARAPSARGWLWRAQELVPMALDKARKVKGFPGRWKIIIFKLEQVPSRLSDLSSHPFFSKNALCKEQLQAVSKTLKEAIELADLCLKEKYEGKLKMXSELDALAGKLDLNLRDCGLLIKTGVLGEATLPVSLVGSSSESGTATHGHLKELLARLQIGHLEAKHKALDSLVEIMKEDEKGVLSVMGRSNIAALVELLTATSHRIREKTLT

SEQ ID NO: 68825 - protein, 55 aa, Gossypium hirsutum
  Clone ID: LIB3582-002-P1-K1-B4.pep
ASNFSFTFSLNSPTQKKYASKNQQHTMASKQGNKKTLSFTPTVHPATHNQISLKE

SEQ ID NO: 68826 - protein, 149 aa, Gossypium hirsutum
  Clone ID: GOSHI-09MAY01-C19667_1.pep
SNSLCTTNSSVSYCSLQSESIHYLDKTNSLIKFRYHLFHSIRTFDPFNSQLVMLLFLGLTQTNPPISSNQIYIHLLLGSTLSTAAQIMNSLSLPHVGIANCSNTTSWFLNKQRKKLSYHSSPFVNYNTTRTRGCSRQLSFSFKPSENES

SEQ ID NO: 68827 - protein, 173 aa, Gossypium hirsutum
  Clone ID: GOSHI-09MAY01-C19157_1.pep
FSVVVLEDIDEADMLVRGSIKRAMERGRLADSHGREISLGNVIFILTANWLPGNLNLSSNGIITLDEKKLVGLASGGWQLKLSLSEKTAKRQASWLHDEDRATKPRTETGSLSLDLNEAADVEDDKADGSHNSSDLTGDHEEGQGLTNRLCSISTSSSEPHELLNSVDDAIHF

SEQ ID NO: 68828 - protein, 60 aa, Gossypium hirsutum
  Clone ID: LIB3083-011-Q1-L1-E9.pep
RLACYLLFFILFFFFFFCFYFYFFLFIFFFFFFFFSFYYFFFFLIFFVVLFIYYYFLFIF

SEQ ID NO: 68829 - protein, 227 aa, Gossypium hirsutum
  Clone ID: GOSHI-09MAY01-C19177_1.pep
FLIKKKLLSPEFQPSIEQLIRFLPANRQMVMFSATFPVTVKDFKDKYLKKPYIINLMDELTLKGITQYYAFVEERQKVHCLNTLFSKLQINQSIIFCNSVNRVELLAKKITELGYSCFYIHAKMLQDHRNRVFHDFRNGACRNLVCTDLFTRGIDIQAVNVVINFDFPKNSETYLHRVGRSGRFGHLGLAVNLITYEDRFNLYRIEQELGTEIKQIPSHIDQAIYCR

SEQ ID NO: 68830 - protein, 211 aa, Gossypium hirsutum
  unsure (1)..(211): unsure at all Xaa locations
  Clone ID: GOSHI-09MAY01-C19107_1.pep
AFFLVIYASLLLRPSSSLYFQNAASLVRCSFRECHHKLGKGVKMEKILEPIKKNLTMLEVPSFVDVFGGGLKIGMVNFEGDQDLSQWRKQGETIPVHFDRVPEALKWQDLFPEWIDEEEESEVPKCPEFPMPNFDKYPSMDLMVAKLPCRYPINGWSRDVFRLQVHLITAKMAVKNGKKKNDXVVFTCKCRPMLELSRCNDLVKHEGDWWY

SEQ ID NO: 68831 - protein, 314 aa, Gossypium hirsutum
  Clone ID: GOSHI-09MAY01-C19127_1.pep
SCRHEVLEQNTTMISTRKMKCTGVIATTFNKNITKKLQIEAKVTISACGALHTPLLMYSSGLKNPNGARNLRLHPVLMSWGYFPDSDSDIEGKAVDGGIITSVHKVLGPNNMVQAIIETPSLGPGQYTALCPWVSGLDFKQRMLKFSRTAHLITIVKDRGSGEVHMGGRVTYKFDATDRENLRAGLRRSLRVLVAAGAVEVGTHRSDGQKLKCKGVSKEELEEFLDTVFSVGGPLFWGDKWMVHTTAHQMGSCKMGRNEKDGGVDENGESWEAEGLYVCDASVLPTAIGVNPMSTVMSTAYCLSKRIAAKIQNL

SEQ ID NO: 68832 - protein, 295 aa, Gossypium hirsutum
  unsure (1)..(295): unsure at all Xaa locations
  Clone ID: GOSHI-09MAY01-C19007_1.pep
HASERIFAAEPTVLQLRAPIKIFGGLHGQFGDLMRLFDEYGSPSTAGDIAYIDYLFLGDYVDRGQHSLETISLLLALKIEYPNNVHLIRGNHEAADINALFGFRIECIERMGERDGIWAWHRINRLFNWLPLAALIEKKIICMHGGIGRSINHVEQIESLQRPITMEAGSIVLMDLLWSDPTENDSVEGLRPNARGPGLVTXFGPDRVMEFCNNNDLQLIVRAHECVMDGFERFAQGHLITLFSATNYCGTANNAGAILVLGRDLVVVPKLIHPLPPAMSSPGASPERHIEDTWM

SEQ ID NO: 68833 - protein, 211 aa, Gossypium hirsutum
  unsure (1)..(211): unsure at all Xaa locations
  Clone ID: GOSHI-09MAY01-C19347_1.pep
MGLVDANNNGSKSERSQSVPCAAKVEICSSRSRNLEEKIIHATNTSSATNEACKGLETEVPKVASEKVRSTSPFRRFSFSMGKIGKSSGLKEGSSMPQMSSTCSSAKTKPENLVASGVDTSCGDKLNAKSRARSKPXLRRLIEPLLKPKAVNCRSFTNQLQESIVTEGGLKSSERTGHSTMTMQPAKVKSDTTSTTVNDSALNKKCGSSAV

SEQ ID NO: 68834 - protein, 101 aa, Gossypium hirsutum
  Clone ID: GOSHI-09MAY01-C19367_1.pep
VGISPRGAGYTFGQDIFGQFNHTNGLTLISRAHQLVMEGYNWSQEKNVVTVFSAPNYCYRCGNMAAILEIGENMEQSFLQFDPAPRQIEPETTRRTPDYFL

SEQ ID NO: 68835 - protein, 59 aa, Gossypium hirsutum
  Clone ID: LIB3829-035-Q1-N6-B4.pep
SQDKNVVTVFSAPNYCYRCGNMAAILEIGENMEQSFLQFDPAPRQIEPETTRRTPDYFL

SEQ ID NO: 68836 - protein, 155 aa, Gossypium hirsutum
  Clone ID: GOSHI-09MAY01-C19327_1.pep
KQLSSRKISPSARISGQATHLKASDEMMMSFPVPRKARSASVKRSHENWVAGNGGFVDEQNHLRGSVSPARRSVESDRVSPSSSNGSVRKKMKTNRPKTRLPKATKSSSSAQEDIEIEIAEVLYGLMKQSHSSKKEDSAGNPSSKLESEDANVFS

SEQ ID NO: 68837 - protein, 178 aa, Gossypium hirsutum
  Clone ID: GOSHI-09MAY01-C19257_1.pep
MGEDARRGLECPKLMDGKVNSGNGSEKVIPSCWLKARASAPELEAKCHSTVVSGWFSESQSSTDDAGKMVYFNNPMWPGEAHSLKVESILYKARSDYQEVLVFESSSYGKVLVLDGIVQLTEKDECAYQEMITHLPLCSIPSPKTVLVVGSGDGGVLAEISRHSSVELIDICEIDTMV

SEQ ID NO: 68838 - protein, 106 aa, Gossypium hirsutum
  unsure (1)..(106): unsure at all Xaa locations
  Clone ID: GOSHI-09MAY01-C19237_1.pep
MDGIMNKIRNLDAYXPKINEDFCSRTLSGGVITVVSSVAMFLLFFSELRLYLHAATETKLVVDTSRGETLRINFDGTFPALACSIVSVDAMDISGEQHLDVKHDII

SEQ ID NO: 68839 - protein, 152 aa, Gossypium hirsutum
  unsure (1)..(152): unsure at all Xaa locations
  Clone ID: GOSHI-09MAY01-C14997_1.pep
MEQSLPKQPQGVIIAIDVVDEGTEQQEGNLTGNEEQEDSNRHGSSSSLELDLESGVVSETKSHLAKELERDCRICHLTLDPTNHESGVPIKLGCSCKDDLAAAHKHCAEAWFKXKGNRTCEICGSTAQNVVAAANETDTMEPWNETNDSATT

SEQ ID NO: 68840 - protein, 125 aa, Gossypium hirsutum
  Clone ID: GOSHI-09MAY01-C14957_1.pep
MAKEFTVPPVVCPSGSGVNPSVGNINQRRVPTAPFQPSRPPSSSSALPFMSFDMGSATSSSVSLGGSISSSAATGSASFEDEEPLLDELGIHPDQIWYKTRSILNPLRGNSTAHKDSDLSGPIFL

SEQ ID NO: 68841 - protein, 93 aa, Gossypium hirsutum
  unsure (1)..(93): unsure at all Xaa locations
  Clone ID: LIB3189-048-P1-K1-F5.pep
RPPSCWYALPFMSLDMGSATSASASLGGSICSSAATGSDSFEDEEPLLDELCIHPDQIXRNTRFILNPLRVNSTAHKDSDLSGPIFXFLSLCL

SEQ ID NO: 68842 - protein, 164 aa, Gossypium hirsutum
  unsure (1)..(164): unsure at all Xaa locations
  Clone ID: GOSHI-09MAY01-C14887_1.pep
MEEASKQQIYLHGDLDLTIVEARRLPNMDFMVNHLRSCLTCEPCKSPAQTAAKEGDSKIRGHRKIITSDPYVTVCLPQATVARTRVLKNSQNPKWNEHFIIPLAHPVTELDINVKDNDLFGADAIGTAKIPASRIATGEHITGWFPLIGPXGKPPKPDSAIYLD

SEQ ID NO: 68843 - protein, 144 aa, Gossypium hirsutum
  Clone ID: GOSHI-09MAY01-C14807_1.pep
MATNNNNSKLEKLASIDAQLRALVPAKVSEDDKLVEYDALLLDRFLDILQDLHGEDLRETVQECYELSAEYEGKSTPKKLEELGNVLTSLDPGDSIVIAKAFSHMLNLANLAEEVQIAYRRRIKLKKGDFADENSATTESDIEE

SEQ ID NO: 68844 - protein, 147 aa, Gossypium hirsutum
  Clone ID: GOSHI-09MAY01-C14557_1.pep
PVSAYDYVKLIRPRVRLAASQWQAVEEFYYLKMRKAGFHSYMMDLILRTSDLSPARDLVTYDDGSVVVVTEADLDGYDQSLESGATGSTIWADLSMVYRVRVVGQAALARISCLWLTCQAHQKISAKKLATESRCLGSTISVDIHVY

SEQ ID NO: 68845 - protein, 224 aa, Gossypium hirsutum
  unsure (1)..(224): unsure at all Xaa locations
  Clone ID: GOSHI-09MAY01-C14577_1.pep
MDFSHLNRGQMTLMGSAFCVVLSLHFTLQLVSQHLFYWKNPKEQKAILIIILMAPIYAAVSFVGLSDIRGSKAFFMFLESVKECYEAFVIAKFMALMYSYLNISISKNIVPDEIKGREIHHSFPMTLFQPRTVRLNHHTLKLLKYWTWQFVVIRPVCSVLMITLQLLQFYPSWLSWTFTIILNVSGSLALYSLVAFYHVFAKELEPHKPLAKFLCIXGIVFFCF

SEQ ID NO: 68846 - protein, 185 aa, Gossypium hirsutum
  Clone ID: uC-gsronu33B077h03b1.pep
PTSLPTRPPTRPPTRPSTRSRTVRLNHHTLKLLKYWTWQFVVIRPVCSVLMITLQLLQFYPSWLSWTFTIILNVSVSLALYSLVAFYHVFAKELEPHKPLAKFLCIKGIAFFCFWQGVVLDILVAVGIIRANHFWLDVEHLEEALQNVLVCLEMVVFAVLQQYAYHVYPYSGETEAKLKLGKKLE

SEQ ID NO: 68847 - protein, 61 aa, Gossypium hirsutum
  Clone ID: uC-gsronu33B055a09b1.pep
FSDHVFAKELEPHKPLAKFLCIKGIVFFCFWQGVALDILVAVGIIRANHFWLDVEHLEDVN

SEQ ID NO: 68848 - protein, 268 aa, Gossypium hirsutum
  Clone ID: GOSHI-09MAY01-C14517_1.pep
MGFSRKEYEFLSEIGLSSGNLGCFVNGTWKGSGPVVSTLNPAHNQKIAEVSEASIQDYEEGMQACSEAAKIWMQVPAPKRGDIVRQIGDALRSKLQQLGRLVSLEMGKILPEGIGEVQEIIDMCDFAVGLSRQLNGSVIPSERPNHMMLEMWNPLGIVGVITAFNFPCAVLGWNACIALVCGNCVVWKGAPTTPLVTIATTKLVAEVLEKNNLPGAIFTSFCGGAEIGEAIAKDRRINLVSFTGSSKVGVKVQQTVNERFGKCLLDLN

SEQ ID NO: 68849 - protein, 131 aa, Gossypium hirsutum
  unsure (1)..(131): unsure at all Xaa locations
  Clone ID: LIB3048-001-Q1-L1-B10.pep
MDWAGIPLEPSKDFKVEKGESLGNGGVNTGFKFPXPVLEWNACLELWCENWVVGKGAPTILLVPIAPPKLVAEVLEKNNLPGAIFTSFCGGAEIGEAIAKDRRINLVSFTGSSKVGVKVQQTVNERFGKCL

SEQ ID NO: 68850 - protein, 78 aa, Gossypium hirsutum
  Clone ID: GOSHI-09MAY01-C14507_1.pep
SPFLFTLFFTRKRGKAIEMKAWINLLILCKKDQLFSFIKYKRRESARGRRTVVVVLLVERLGAKPKINKGERERGDGG

SEQ ID NO: 68851 - protein, 202 aa, Gossypium hirsutum
  Clone ID: GOSHI-09MAY01-C14497_1.pep
KQYRCIHSSSCQCTKGHLSEDVIFLVFQQLNWNPKLIATLSCVCKWFDDLAKRVLWKEFCITRAPKMMLDLQSSGSHSVDGNWRALGKLLIYCSGCSGGRLFNSVQIPGHFVYRTRFSRTSGKSFLLPQCRTDILYVSDPCEHLDQGDEGDVGFFRGVFKSFLVSKVRKMLIDRAAKLHPTAVCPYCKAKLWDMLQAKMIPQ

SEQ ID NO: 68852 - protein, 140 aa, Gossypium hirsutum
  Clone ID: GOSHI-09MAY01-C14487_1.pep
MDTGGNSLPSGPDGVKRKVSYFYDPEVGNYYYGQGHPMKPHRIRMTHALLAHYGLLQNMQVYKPLPARERDLCRFHADDYVNFLRSITPETQQDQLRQLKRFNVGEDCPVFDGLFSFCQTYAGGSVGGAVKLNHNICDIA

SEQ ID NO: 68853 - protein, 254 aa, Gossypium hirsutum
  Clone ID: GOSHI-09MAY01-C14477_2.pep
DCYVRRPDQAERVIGTLLGSVLPDGTVDIRNSYAVPHTESAEQVALDIEYHHNMVVSHQKVNPKEVIVGWYSTGLGVTGGSALIHDFYSREVPNPVHLTVDTGFRNGEGTIKAYVSVNLALGDRQLAAQFQEIPLDLRMVEAERLGFDILKTTAVDKLPNDLEGMEVTMRRLSALIDDVYKYVDDVVEGRVPADNNIGRFIAETVASLPKLSPPAFDKLMNDSLQDQLLLLYLSSIARTQLGLAEKLNTAAQIL

SEQ ID NO: 68854 - protein, 163 aa, Gossypium hirsutum
  Clone ID: GOSHI-09MAY01-C14477_1.pep
MAAGDRTVLQFNSPSSAILSAKVHPLVIFNICDCYVRRPDQAERVIGTLLGSVLPDGTVDIRNSYAVPHTESAEQVALDIEYHHNMLVSHQKVNPKEVIVGWYSTGLGVTGGSALIQDFYSREVPNPIHLTVDTGFRNGEGTVKAFVSVNYSGDDNCAHFGIL

SEQ ID NO: 68855 - protein, 76 aa, Gossypium hirsutum
  Clone ID: GOSHI-09MAY01-C14467_1.pep
MAKRVGMSRDNGRGRKGWTLTAAVTNIFEFVRLAEFEILFILFLIIAFIIFKDLTSRPEYNQLLVKKPGGVDWWPY

SEQ ID NO: 68856 - protein, 102 aa, Gossypium hirsutum
  Clone ID: LIB3083-031-Q1-L1-E10.pep
QQSRQVKQKEGTSLFTSMKPVGGSSIEYRPQQQSTKKQPSGSERGREKKQNNPKEWNYAGHNSHRIHFPFLVRPPIYTAGFFHEQLIVFRPRCLQPNSTRDL

SEQ ID NO: 68857 - protein, 242 aa, Gossypium hirsutum
  Clone ID: GOSHI-09MAY01-C14797_1.pep
MAQTLTRAATSTLTRHLTLSFILPKRLLSSKSITHPPPIPSLRFSRRPLTPLSHAVRCLPLAPTRFTSIRCRVNRSGNSAYSPLNSGSNFSDRPPTEMAPLFPGCDYEHWLIVMDKPGGEGATKQEMIDCYIKTLAKVVGSEEEAKKKIYNVSCERYFGFGCEIDEETSNKLEGLPGVLFVLPDSYVDPEYKDYGAELFVNGEIVQRSPERQRRVEPQPQRAQDRPRYNDRTRYVRRRENMR

SEQ ID NO: 68858 - protein, 105 aa, Gossypium hirsutum
  Clone ID: GOSHI-09MAY01-C14767_2.pep
FTGSNFCWVFYRVKSEMELFTGGREAFPQHVAPFPDLTAIMEPAEDLMMSDHRPTLPPRKLRPIRYNGRSPASSQAEDHSEFAEAVELVGDEVCAINGSSFDYLT

SEQ ID NO: 68859 - protein, 152 aa, Gossypium hirsutum
  Clone ID: GOSHI-09MAY01-C14767_1.pep
LKSVAMLRVFSTCFSIQLLRAISWARVKSEMELFTGGREAFPQHVAPFPDLTAIMEPAEDLMMSDHRPTLPPRKLRPIRYNGRSPASSQAEDHSEFAEAVELVGDEVCAINGSSFDYLTPPIKAEVGDVTATVGGGGNGVEGPPSSEQRGEP

SEQ ID NO: 68860 - protein, 95 aa, Gossypium hirsutum
  Clone ID: AI054572.1.pep
PVIIESKNMLRRPAALLSFSITARNLWSLLGFRFAPKLASCTTLQLSSSSTAGYRTRTRFRAMSTSVNSTPVNEKDEQVFQDFKLLNAVDDSLEE

SEQ ID NO: 68861 - protein, 91 aa, Gossypium hirsutum
  Clone ID: LIB3189-045-P1-K1-A8.pep
PVIIESKNMLRRPAALLCFSITARNLWSLLGFRFAPNLASCTTLQLSASSTAGYRTRTRFRAMSTSVNSTPCNEKDEQVFQDLKYLMQSMI

SEQ ID NO: 68862 - protein, 61 aa, Gossypium hirsutum
  Clone ID: LIB3189-045-P1-K1-A2.pep
ARRVGRNSSVLYTLLPRLLSFHVSHDHRPVHKHPICNQNKTPLKQYLCFILLKCQLITRNN

SEQ ID NO: 68863 - protein, 92 aa, Gossypium hirsutum
  unsure (1)..(92): unsure at all Xaa locations
  Clone ID: LIB3189-045-P1-K1-A3.pep
LNSIAMLRVFSACFSIQFRRVISWPFSDINQVYSFHGVFFWFHACGGVCPSAPRHMPPLPMVIEVGSYSKLAFYXXPRVLGRVARPGFPXPV

SEQ ID NO: 68864 - protein, 196 aa, Gossypium hirsutum
  Clone ID: GOSHI-09MAY01-C14707_1.pep
MVSESRGCTSLIFTYGTLKRGFSNHVLLQDLTRTGDAVFKGSYQTGEKYPLVCGPYRVPFLLNMPGSGHRVTGELYAVSSRGLARVDELEGTSRGHYERLPILLIPAGYGYESGNNKENEEDQAVLTRAAAGGITCAAEAYYAHKSFEKEMWMKNGGEGFGIYSHKEAKGYVKRKDRPQDLRFLDHVRIFISSPSD

SEQ ID NO: 68865 - protein, 117 aa, Gossypium hirsutum
  Clone ID: GOSHI-09MAY01-C14697_2.pep
ILFPLSASLIIPLLLANLFPSSPCFHLYHVIISSLHLKLSRGSFAFQEYKETDLTLCENLTFLQTYHAFLRLINQIVAWGSLYFFRVKGKQSIYLQRDWVVFAIASDDYDPRTVFAE

SEQ ID NO: 68866 - protein, 72 aa, Gossypium hirsutum
  Clone ID: GOSHI-09MAY01-C14697_1.pep
YPLCGSSLLSSHFSSCFPLYLGFSFDYSSSRFHKILLFSHSESIYDLGNSSVFAVNIIQNQFHQLCFYCLLR

SEQ ID NO: 68867 - protein, 61 aa, Gossypium hirsutum
  Clone ID: GOSHI-09MAY01-C14687_1.pep
LLVFLRFRSIIAVHAAFVEENQPLWKLTICEDYYRFFPFLFFFERKDILSFFILAMIKCHT

SEQ ID NO: 68868 - protein, 95 aa, Gossypium hirsutum
  Clone ID: GOSHI-09MAY01-C14677_1.pep
ILVAKRISLDILEGELAKHKSYAEYLLQQLFRAKNIHLREGETFKGVVENHLVFEEPLKEQIDGLYQICCDLILNGANSSYFLKIVEFYGSTLGM

SEQ ID NO: 68869 - protein, 81 aa, Gossypium hirsutum
  Clone ID: uC-gsflnu33B112b05b1.pep
LTRPPTRPVEYLLEQLFCAKNIHLREGETFKGVVENHLVIEESLHEHIDGLYQICGDLTVNGANSSYFLKIVELYGSTLGM

SEQ ID NO: 68870 - protein, 61 aa, Gossypium hirsutum
  Clone ID: LIB3189-043-P1-K1-F11.pep
QPFFLRSFKVFFHVFPCCLFVMDSLSILPLVPFFLGLATYQAWIHKIPQFLESSYCWPHLE

SEQ ID NO: 68871 - protein, 105 aa, Gossypium hirsutum
  Clone ID: GOSHI-09MAY01-C14197_1.pep
TRPRHKLSKRNRFEYNLKIEKLVAGVAEKMKNTGKSSKGTGKSSDVRKDRRSGTGMIGSPKKGGHGGKFTWAGDGFSPAEIGVEKQVFDVKDPNFEDPDEIVNDN

SEQ ID NO: 68872 - protein, 85 aa, Gossypium hirsutum
  Clone ID: GOSHI-09MAY01-C14187_1.pep
RFLYAYIIIREKEWCYELMACFHSMNLRTPCLWTSLPCIRRHFSRNLKDGNKLLSFNRLYVIRPSPFQTLNYCSLSGNLSSTCNW

SEQ ID NO: 68873 - protein, 166 aa, Gossypium hirsutum
  Clone ID: GOSHI-09MAY01-C14147_1.pep
MPPKFDPTQVVDVFVRVTGGEVGAASSLAPKIGPLGLSPKKIGEDIAKETAKEWKGLRVTVKLTVQNRQAKVMVVPSAAALVIKALKEPERDRKKTKNIKHNGNIGLDDVIEIAKVMRPRSMAKDLRGTVKEILGTCVSVGCTVDGKDPKGLQQEIDDGDVDVPLE

SEQ ID NO: 68874 - protein, 346 aa, Gossypium hirsutum
  unsure (1)..(346): unsure at all Xaa locations
  Clone ID: GOSHI-09MAY01-C14167_1.pep
METFNIPATPSLMKEFLRQMGGTAVIDGGLATELELHGADLNDPLWSAKCLLTSPHLIRSVHLDYLEAGADIIITASYQATIQGFEAKGFSREQSENLLKKSVDIALEARRMYYERWSKSSSGGTGDGRILKNRPILVAASVGSYGAYVADGSEYSGCYGEAMTVNALKEFHRRRVQVLAEAGPDIIAFETVPNKIEAQAFAELLEEEHIKIPAWLTFNXSKDGVNVVSGDSLLQCASIAESCKQAVAVGINCTPPRFIHDLILAIKKVTXKPIVIYPNSGERYDADRKEWVENTGVSDEDFVSYVNKWCEIGASLVGGCCRTTPNTIKAIYRALSDRSPAAPGQK

SEQ ID NO: 68875 - protein, 51 aa, Gossypium hirsutum
  Clone ID: LIB3189-028-P1-K1-D6.pep
VTDGGLPTELELHGADLNDPLWSAKCLLTSPHLIRSVSFSPSFKITFFFEP

SEQ ID NO: 68876 - protein, 100 aa, Gossypium hirsutum
  Clone ID: LIB3135-041-Q1-K1-D9.pep
VPPEPGTDIIAFETAPIKIKAHAFGELLHEEHTKLPAWLTLNTKDVVNVLSRDSLLFCAYKAKSCTLRCAVSMNCTPPKFIHDLILAIKKVTTKPIVIYP

SEQ ID NO: 68877 - protein, 169 aa, Gossypium hirsutum
  Clone ID: uC-gsronu33B167f12b1.pep
MAEESGTASSSSSSQPRSSPNTSKISQVPPGYSGLPTFQNGDFQMFPVMYPAFVPGLTSLQNQEQMNRGAGIYAVPVLPFMGHVSGIPSNNLIPLTYNIPTRSVTEAGAAAEDQGQGAQQPQHQQQQVGPQRQVVVRRFQIAFQLDLLLILKLAAVIFLVNQDGSRQRL

SEQ ID NO: 68878 - protein, 107 aa, Gossypium hirsutum
  Clone ID: LIB3189-030-P1-K1-G10.pep
FGSATISSISQPRSYPNTLKISQVPPGYSGLPTFQNGDFQMFPVMYPAIVPGLTSLQNQEQMNRGAGIYAVPVLPFMGHVSGIPSNNLIPLTYNIPTQSVTDAGAAA

SEQ ID NO: 68879 - protein, 62 aa, Gossypium hirsutum
  unsure (1)..(62): unsure at all Xaa locations
  Clone ID: LIB3189-025-P1-K1-H10.pep
KYPRSLLYTLVSQLXLMAIFRFFPVCNFSILFFFNFLSFFFHFIFLSFFILFSLFFYSLFYL

SEQ ID NO: 68880 - protein, 205 aa, Gossypium hirsutum
  Clone ID: GOSHI-09MAY01-C14107_1.pep
MALNPQLFPNGMPIPFTNEMFVLVRHGVEFEVDKIPGARGGRVKAWGIIYLSNIRMVFVASRPVGNFFAFDMPLLYVHDEKFNQPIFHCNNISGQVEPVVPENEHRALYSTHSFKILFKEGGCGTFVPLFLNLIASVRRYNQQVNHEPQPRVDPLQAAQTPVDEMMRHAYVDPNDPTKNLLTSSQLRSLKLRRRTYQSQPVEGSM

SEQ ID NO: 68881 - protein, 150 aa, Gossypium hirsutum
  Clone ID: GOSHI-09MAY01-C14137_1.pep
MQRQSLGSPSSKLRIHGGEESSVSEDQKRQVIIDDDDSKDIRPRRLSFSPTSSLTSPPKPEKFIHLIPLLTLLCFLILYLNSHSPSQSDLAEFNGFKHPSKHSDSTAIGHVDHFIDSRRGDVLGIRSLKNLQELDKNVSKSRPHRKIADV

SEQ ID NO: 68882 - protein, 162 aa, Gossypium hirsutum
  unsure (1)..(162): unsure at all Xaa locations
  Clone ID: GOSHI-09MAY01-C14127_3.pep
MEGGGPPQAADTEMAEQPNPQNHQQQPPQMAIGLENIPATLSHGGRFIQYNIFGNIFEVTAKYKPPIMPIGKGAYGIVCSALNSETNEQVALKKIANAFDNKIDAKRTLREIKLLRHMDHENVVAIRDIIXPPKRECVNDVYIAYELMDTDLHQIIRSNQAL

SEQ ID NO: 68883 - protein, 358 aa, Gossypium hirsutum
  unsure (1)..(358): unsure at all Xaa locations
  Clone ID: GOSHI-09MAY01-C14127_1.pep
MEGGGPPQAADTEGAEAAQQQPQHHQQRPPQVAAGLENIPATLSHGGRFIQYNIFGNIFEVTAKYKPPIMPIGKGAYGIVCSALNSETNEHVALKKIANAFDNKIDAKRTLREIKLLRHMDHENVVAIRDIIPPPQRECFNDVYIAYELMDTGLHQIIRSNQALSEEHCQYFLYQILRGLKYIHSANVLHRDLKPXNLLLNANCDLKICDFGLARVTSESDFMTEYVVTRWYRPPELLLNSSDYTAAIDVWSVGCIFMELMDRKPLFPGRDHVHQLRLLMELIGTPSKAELEFLNENAERYIRQLPLYRRESFTEKFPNVHPXTIDLVEKXLTFDSRTRITVDDALAHPYLTSLADIS

SEQ ID NO: 68884 - protein, 127 aa, Gossypium hirsutum
  unsure (1)..(127): unsure at all Xaa locations
  Clone ID: AI054813.1.pep
MEGGGPPQAADTEMAEAAQQQPQHHQQRPPQVAAGLENIPATLSHGGRFIQYNIFGNIFEVTAKYKPPIMPIGKGAYGIICSNLIPETIEHXVVKMIXSALDIKIGAKRTFREINLLNSMGSCITCV

SEQ ID NO: 68885 - protein, 108 aa, Gossypium hirsutum
  Clone ID: GOSHI-09MAY01-C14047_1.pep
MSAFNKGKASVPVAWSPNLYITLVRGIPGTRRLHRRTLEALRLRKCNRTVMRWNTPTVRGMLQQVKRLVGVETEEMFKARKENEAKHRALRPPIGINHLLASATDSTK

SEQ ID NO: 68886 - protein, 72 aa, Gossypium hirsutum
  Clone ID: GOSHI-09MAY01-C14017_1.pep
MASRVSLKTKGKGGKGSKGSDDKSTTQCLKEWSTWAMKKAKVVTHYGFIPLVIIIGMNSEPKPQLYQLLSPV

SEQ ID NO: 68887 - protein, 114 aa, Gossypium hirsutum
  Clone ID: GOSHI-09MAY01-C14007_1.pep
PFCFLPFDKRKETKSCNFLIKIFISSQSKDPKIHTVQKPQQHNNTAKNQKTKNPSSQLPPLPPKNLLNQILPFDPTPLHSKARPKKAANKNIYTKKKNREKPSQKFLFFLTPFF

SEQ ID NO: 68888 - protein, 133 aa, Gossypium hirsutum
  Clone ID: GOSHI-09MAY01-C14027_2.pep
MEGKCEEQPWLNGEKKEPKYSHGFCSAEIQTLASVAEVFFPSLPPDSGFQRKDTQPSKAVQSFLKASASQPPFPDEVAELLGKRAFIGSVIVVRIVLVVLGTRVGSLLLCGKQCLGKEWPFINDFGSMGLEKR

SEQ ID NO: 68889 - protein, 118 aa, Gossypium hirsutum
  Clone ID: GOSHI-09MAY01-C14027_1.pep
MFVSTLQVAQLLGKRAFIESVIVVRIVLMLLWTRVRSLLLCGRQCLGKEWPIINDFGSMGLEKREKVMQNWLKHGFLFTPIRAAFIYLKVFCLFVYFSRVIIQCYLFPLIFFLLSSFP

SEQ ID NO: 68890 - protein, 116 aa, Gossypium hirsutum
  unsure (1)..(116): unsure at all Xaa locations
  Clone ID: GOSHI-09MAY01-C14317_1.pep
MNYPPEKVVRFQDWNSEKTCEVHYTNNNGINSGKFTFAINSFSEKFQRGVESGSERIKAIRKSFKSSSFNHVVAKGFGSSKKVLXDPQGPFLQRWNKIFVLSCIIAVSIDPLFFYV

SEQ ID NO: 68891 - protein, 112 aa, Gossypium hirsutum
  Clone ID: GOSHI-09MAY01-C14247_1.pep
VSERERSLLFAKVQFGVVFIMERGARMLLISVMVLLVLASNAEGRRLKEEAYHPQNFLGAFGTSGGLVPTPGGGVGLNLGPSVFCSYPGTGCVRVQPTIPGSTGTIGAGTPP

SEQ ID NO: 68892 - protein, 229 aa, Gossypium hirsutum
  unsure (1)..(229): unsure at all Xaa locations
  Clone ID: GOSHI-09MAY01-C15977_1.pep
MSSLKNAISRRAHKERAQPSSRKKFGLLEKHKDYVVRAKAFHKKEEMLRKLKEKAAFRNPDEFYFQMIKTRTVDGVHKPESQANKYTQEELMLMKTQDIGYILQKLQSERKKIEKLTAVLHSVDNHPSNRHIYYAEDREEARELQSQASESRVTPPSGDIPDLIKRKAGASYRELEARKSRVNQLEKLYMEMSLKKEFQIKGRKRKLREDELVCPTSXPAYPWRSERKW

SEQ ID NO: 68893 - protein, 53 aa, Gossypium hirsutum
  unsure (1)..(53): unsure at all Xaa locations
  Clone ID: LIB3197-017-P1-M1-E10.pep
MSSLRNAISRRAHKERAQPSSRKNIGFLEKXDYVVRTKAFHKKEETLRTSLFV

SEQ ID NO: 68894 - protein, 66 aa, Gossypium hirsutum
  Clone ID: LIB3197-016-P1-M1-A2.pep
SVSSSHAFAFLLLTYFIIANSLVLLQYCTHLTVCVYIYACSYVFMLMISANIAINGIFRKKSILER

SEQ ID NO: 68895 - protein, 82 aa, Gossypium hirsutum
  Clone ID: LIB3148-041-Q1-K1-H4.pep
AFCYTNNHMHLSGEGGRESCLSISYAEAILQLLRILPRSVRLRTKRRKMMRIWCLRCLQQLSLEYSLLKNKLQILFQIVKLS

SEQ ID NO: 68896 - protein, 97 aa, Gossypium hirsutum
  Clone ID: GOSHI-09MAY01-C15857_1.pep
LRGKFINFFALSFRLSLHANLYLGGEKYQERANLEISAKIWAIPEILRFKRRPASDWFHFDDVSFWCLCNCPMIWDFAGTRYTRQNLRLYLEGGSWV

SEQ ID NO: 68897 - protein, 235 aa, Gossypium hirsutum
  unsure (1)..(235): unsure at all Xaa locations
  Clone ID: GOSHI-09MAY01-C15807_1.pep
LRVLITDQDRALKSVVAEIFPNPLHCFFLWHVLGKVSENLGHVIKQHGNLRVRFEKCIYRSWTDEEFGKRWWKILDRFELKDDEWIXSLYEDRKKWVPTYIMNVLLAGMSTVQRAESVNSFFDKYVHKKTTVQDFLKHYEAILQDRYEEEAKANSDSWSKVPALKSPSPFEKSVVGVYTHTLFKKFQIEVVGAIACHPKPENHDSTCSIFRVQDLEQTQDSIXTLNEMKGEVSCI

SEQ ID NO: 68898 - protein, 115 aa, Gossypium hirsutum
  Clone ID: GOSHI-09MAY01-C15507_4.pep
GTTEEAVTREYTINLHKRLHGCTFKKKAPKAIKEIRKFAEKAMGTKDVRVDVKLNKHIWSRGIRSVPRRIRVRIARKRNDDEDAKEELYSLVTVAEIPAEGLKGLGTKVIDDDEE

SEQ ID NO: 68899 - protein, 121 aa, Gossypium hirsutum
  Clone ID: GOSHI-09MAY01-C15507_3.pep
MVEKTRGRKEEVVTREYTINLHKRLHGCTFKKKAPKAIKEIRKFAEKAMGTKDVRVDVKLNKHIWSRGIRSVPRRIRVRIARRRNDDEDAKEELYSLVTVAEIPAEGLKGLGTKVIDDDDE

SEQ ID NO: 68900 - protein, 121 aa, Gossypium hirsutum
  Clone ID: GOSHI-09MAY01-C15507_2.pep
MVEGAWGRKEEVVSREYTINLHKRLHGCTFKKKAPKALKEIRRFAEKAMGTKDVRVDVKLNKHIWSRGIRSVPRRIRVRIARKRNDDEDAKEELYSLVSVAEIPAEGLKGLGTKVIDDDDE

SEQ ID NO: 68901 - protein, 121 aa, Gossypium hirsutum
  Clone ID: GOSHI-09MAY01-C15507_1.pep
MVEKTRGRKEEVVTREYTINLHKRLHGCTFKKKAPKAIKEIRKFAEKAMGTKDVRVDVKLNKHIWSRGIRSVPRRIRVRIARKRNDDEDAKEELYSLVTVAEIPAEGLKGLGTKVIDDDDE

SEQ ID NO: 68902 - protein, 70 aa, Gossypium hirsutum
  unsure (1)..(70): unsure at all Xaa locations
  Clone ID: LIB3149-017-Q1-K1-D5.pep
NSPPFFYCGCGLVWVLVFFYFFXWXGLFVFFFFFIFFFFFFFFFFFFFFFFFFFCKKNLIPPLKHKLHRA

SEQ ID NO: 68903 - protein, 92 aa, Gossypium hirsutum
  unsure (1)..(92): unsure at all Xaa locations
  Clone ID: LIB3149-037-Q1-K1-H9.pep
MAEKASGRKEEVATRDYTINLHKRLHGCTFKKKAPNAINEIRKFAEKAMGTKDVRSDVKLDQXFWTRGIQKGSKKIKVPIGPLKNYYEKAKE

SEQ ID NO: 68904 - protein, 365 aa, Gossypium hirsutum
  Clone ID: GOSHI-09MAY01-C15527_1.pep
MATTRRSLPLLRTLIAGKTQTRNVTYMPRPGDGAPRPVTLIPGDGIGPLVTNAVEQVMEVMHAPVYFEKYDVHGDMKRVPQEVLDSIKKNKVCLKGGLRTPMGGGVSSLNMQLRKELDLYASLVNCCNLPGLPTRHENVDIVVIRENTEGEYSGLEHEVVPGVVESLKVITKFCSERIAKYAFEYAYLNNRKKVTAVHKANIMKLADGLFLESCREVATKYPSIKYNEIIVDNCCMQLVSKPEQFDVMVTPNLYGNLVANTAAGIAGGTGVMPGGNVGAEYAVFEQGASAGNVGKEKIVEQKTANPVALLLSSAMMLRHLQFPSFADRLESAVKRVISEGQYRTKDLGGQSSTQEVVDAVIAKLD

SEQ ID NO: 68905 - protein, 138 aa, Gossypium hirsutum
  Clone ID: GOSHI-09MAY01-C15777_1.pep
MSSYQEKQTFTPPPQLQQQQVKQPSQPPPQEPFVPITKEPCHPKVPQPGNTKIPEPDCTKVPKPGYTKDPEPGSTKVPDKGCTKVPEPGSTKVPDKGCTKVPEPGSTKVPEPGSTNVPDPGAIKILERGYTKVPEPGY

SEQ ID NO: 68906 - protein, 109 aa, Gossypium hirsutum
  Clone ID: GOSHI-09MAY01-C15767_1.pep
RDLVSFSRHGTSVLLVKLLPFPSVFLPRSTRLAVPCPWRFSFGFLCQLHLVLSLLLTLNTGAGMLVFSEIGVGFLAHFRNELMTKHPDEDFGKMLFRSDSIDRQFKVAC

SEQ ID NO: 68907 - protein, 100 aa, Gossypium hirsutum
  Clone ID: LIB3825-027-Q6-K6-H2.pep
RNSGFHLFPSSATVLMPLGFKIAPGLDLKGFSFLFKTWNKCASGQIATFSGCFHSKKYLTGGLSSMEIFSWFHLSIALSAQSLFNTQSRKRNASFFRDTC

SEQ ID NO: 68908 - protein, 74 aa, Gossypium hirsutum
  Clone ID: GOSHI-09MAY01-C15647_1.pep
MAGRWATAAFRWVFSDLISVRRWPMRWGHVEWPQLSGFSFSIVDDVVWSLITAFESVALVSMLCFFFLVCGCTF

SEQ ID NO: 68909 - protein, 161 aa, Gossypium hirsutum
  Clone ID: GOSHI-09MAY01-C15667_1.pep
MHSSFQGLYLVCVFLAFSIVGFCVLGLKAFEKRFFLSSSTMPALVNYSGDDDFYNGGSFYTNSTDLGRLCSISSQVDVYCPPRKRTRISAPFHFGEAEVEQNKQPSIDVLPDECLVEIFKRISGGKERSSCACVSKHWLMLLTSIRKGEYESSKVVKENFG

SEQ ID NO: 68910 - protein, 115 aa, Gossypium hirsutum
  Clone ID: GOSHI-09MAY01-C15117_1.pep
TELNDGKPRKIKNAKPYSFTLEEDTTQFGTYRKGGIGTRVKQPKVLNFKPLRDAIKDPGDFLLSDFSKFDRPPLLHLAFQALDKFVSDLGRFPVAGSEGDANKLISIAGNMNESL

SEQ ID NO: 68911 - protein, 190 aa, Gossypium hirsutum
  unsure (1)..(190): unsure at all Xaa locations
  Clone ID: GOSHI-09MAY01-C15097_1.pep
MNKGSSSMAKDQSISVSEAVHKIQLHLLDGIRDDKQLISSGSLISRSDYEDVITERSISNTCGYPLCRNPLPSEPRRRGRYRISLKEHRVYDLQETSRFCSADCLINSRAFAGSLQEERCSVLNHAKLNAILSLFDDVDLNDKDLGKNGDLGFSNLKIXENEEIKAGEVSSVGPSNAIEGYVPQRELVSK

SEQ ID NO: 68912 - protein, 192 aa, Gossypium hirsutum
  Clone ID: GOSHI-09MAY01-C15047_1.pep
SKIWESRLTSKTSGETLSGKLRRLKVSSNVFFVYHDQDGFGNAIARALSPTPHPCSKAFELVDLELGDAKLNASITQFMDGENLKATMVMLDHLEPPLLSQAINSVLTKIADAEHIPSTVPTIIAPFLVPASKLKLEGRLFTTNSGKLPLYSIQVGPETDVSRAIAAKTQKPPSSLQIHYEPLACFLHLVRA

SEQ ID NO: 68913 - protein, 76 aa, Gossypium hirsutum
  Clone ID: GOSHI-09MAY01-C15307_1.pep
FAILLLWDFKKNMLLNVLALLGSYFIIMVMLFIPTLYDLSTSVRNPWMWENLEKKLNILISDMPSYPYLTCLYTDT

SEQ ID NO: 68914 - protein, 92 aa, Gossypium hirsutum
  unsure (1)..(92): unsure at all Xaa locations
  Clone ID: LIB3146-016-Q1-K1-D10.pep
IIKSRNKXHXPIIIKVRTLKEQGYIQPTYFFLEISHRXSKIXQXXCXTTFLFHIKXXKRXTNRGSLKLXKDXAKXAKVGTIKNPQKTKIKXH

SEQ ID NO: 68915 - protein, 201 aa, Gossypium hirsutum
  unsure (1)..(201): unsure at all Xaa locations
  Clone ID: GOSHI-09MAY01-C15337_1.pep
MASYSKFPICFHLSKPFLSPSKPSKFSFFHNTSISFQNIPTKSPPPLQSSSSSSTQLQPIEELPPKLQEIIKLFQSVEEPKAKYEQLMFYGKNLNPLDTQFKTKENKVEGCVSQVWVRAYLDKNKNVVYQADSDSVLTKGLAALLVNGLSGRPVQKVLRVXPDFAVLLGLQQSLTPSKNNGFLNMLKLMQRKALELLIEAE

SEQ ID NO: 68916 - protein, 83 aa, Gossypium hirsutum
  Clone ID: GOSHI-09MAY01-C15267_1.pep
APHPALSKTQLRRENSPKRSKSLVPMLLALNLSKRTAETTNHSGDYYSKRKGAWKREYRTRRGTANHRQLVVGRQRECKGRKG

SEQ ID NO: 68917 - protein, 122 aa, Gossypium hirsutum
  Clone ID: GOSHI-09MAY01-C15207_1.pep
VIHSIFKFRTEFAFQSCLCVVFFFSFSFGFDDLDLPSRLLKKKNQLQPFHQLHQLLLTSIPHHCCLFLSALTIPSFFFTLISPIRTLSYSGYLSVSSPKSSFLFLASFDVGMRVILLLKRSI

SEQ ID NO: 68918 - protein, 206 aa, Gossypium hirsutum
  Clone ID: GOSHI-09MAY01-C15237_1.pep
MGLLSNRIDKKSLNPGDHVYSWRTAYIYAHHGIYVGNNTVIHFTRRGQQVGTGTVLDLILVSSGPAQSQLHCPTCTPPEEGNGVASSCLDCFLAGGILYRFEYAVTPALFIAKARGGTCTLAVSDSDDLVVHRAKYLLENGFGCYNVFKNNCEDFAIYCKTGLLVLDHSVGRSGQAISIVGGPLAAVLSTPLRLVTTNIYGMAATA

SEQ ID NO: 68919 - protein, 96 aa, Gossypium hirsutum
  Clone ID: GOSHI-09MAY01-C15227_2.pep
MDMYHPSSRLSSQEEMLNNLNRKGIGEPYLVLTSDPKPRLRWTADLHDRFVDAVTQLGGPNKATPKAIMRTMNVKGLTLFHLKSHLQVSSFFSIFT

SEQ ID NO: 68920 - protein, 298 aa, Gossypium hirsutum
  Clone ID: GOSHI-09MAY01-C15227_1.pep
MDMYHPSSRLSSQEEMLNNLNRKGIGEPYLVLTSDPKPRLRWTADLHDRFVDAVTQLGGPNKATPKAIMRTMNVKGLTLFHLKSHLQKYRLGKQSGKDMGEGPNDGISASYLLEGPGTNNSTINLSTADVNEGYEVREALRAQMEVQSKLHLQLEAEKHLQIRQDAERKYMAMLERACKMLADHFIGSGAVTETDNLEFGCKMLRNYSVDPLGFYSSQSAEVENACDQEEEMPSGLHSQRGDGSTESCLTSQESPGGLTMEGSPVEGKKKMVNMEATTGSVIWGDTRVNPQGLTGYGM

SEQ ID NO: 68921 - protein, 81 aa, Gossypium hirsutum
  unsure (1)..(81): unsure at all Xaa locations
  Clone ID: GOSHI-09MAY01-C16967_3.pep
MSFTGTQQKCKACQKTVYPVELLSADGIPYHKSCFKCSHCKGTLKLGNYSSMEGVVYCKPHFXQLFKSRGNSTDFSHCQVS

SEQ ID NO: 68922 - protein, 188 aa, Gossypium hirsutum
  Clone ID: GOSHI-09MAY01-C16967_2.pep
MSFIGTQQKCKACEKTVYPVELVSVDGVPFHKSCFKCSHCKGTLKWGNYSSMEGVLYCKPHFEQLFKEAGNYNKNFQSPAKSAEKLTQLTRSPSKAAGMFSGTQDKCATCGKTAYPLEKVTVEGQSYHKSCFKCSHGGCPLSPSNYAALEGILYCKHHFSQLFKEKGSYNHLIKSASIKRAAASVPEA

SEQ ID NO: 68923 - protein, 189 aa, Gossypium hirsutum
  Clone ID: GOSHI-09MAY01-C16967_1.pep
MSFIGTQQKCKACEKTVYPVELLSADGVPYHKSCFKCSHCKGTLKLANYSSMEGVLYCKPHFEQLFKESGNFNKNFQSPARSAEKLTPELTRSPSKAASMFSGTQEKCATCGKTAYPLEKVTVEGQSYHKSCFKCSHGGCPITPSNYAALEGILYCKHHFSQLFKEKGSYNHLIKSASIKRAAASVPEA

SEQ ID NO: 68924 - protein, 38 aa, Gossypium hirsutum
  Clone ID: LIB3584-047-P1-K2-G8.pep
FQTRSPSKAASMFSGTQEKCATCGKTAYPLEKVAFEIH

SEQ ID NO: 68925 - protein, 153 aa, Gossypium hirsutum
  Clone ID: AI731610.1.pep
MSFTGTQQKCKACQKTVYPVELLSADGIPYHKSCFKCSHCKGTLKLGNYSSMEGVVYCKPHFEQLFKESGNFNKNFQSPAKSAEKLTPELTRSPSKAASMFSGTQEKCATCGKTAYPLEKVTVEGQSYHKSCFKCSHGGCPITPSNYAALEGI

SEQ ID NO: 68926 - protein, 53 aa, Gossypium hirsutum
  Clone ID: LIB3585-010-P1-K1-B2.pep
IMRKYWEIIQRNKRIIYIYTYKEYYIIWFDGWNKSLVSTKLNYGGFDYFGRVG

SEQ ID NO: 68927 - protein, 98 aa, Gossypium hirsutum
  unsure (1)..(98): unsure at all Xaa locations
  Clone ID: GOSHI-09MAY01-C16907_1.pep
EEEDLVNAHRKQVETMNIVKEEVNLLVEADRPGKQQDGYISRLNAIFSQKADDVVQLQTQFAHFEKXLQEQNILVSCSGYWCSGMKSSKPEWCNHGFA

SEQ ID NO: 68928 - protein, 165 aa, Gossypium hirsutum
  unsure (1)..(165): unsure at all Xaa locations
  Clone ID: GOSHI-09MAY01-C16937_1.pep
NLLLIISKKKERHHRSGSGIRGGNYTAMPCSSIETSNNFCGGGDGGDVNGRIHNFKLNEHTFLASLMPKKEIGADRFIEAHPHYDGRGAVIAIFDSGVDPAASGLQLTSDGKPKILDVIDCTRSGDVDTSKVVKADKDGRIQGASGXSLVVNSSWKNLLVSACGL

SEQ ID NO: 68929 - protein, 291 aa, Gossypium hirsutum
  Clone ID: GOSHI-09MAY01-C16847_1.pep
MSSRPELQAPPEIFYDDVEARKYTSSSRIAEIQTKLSERALELLALPDDGVPRLLLDIGCGSGLSGETITENSHQWIGFDISESMLNVALQNEVEGDLLLGDMGQGLGLRPGVIDGAISISAVQWLCNADKSSHEPRLRLKAFFGSLYRCLARGARAVLQVYPENLAQHELILSYAMRSGFAGGVVVDYPHSTKKRKEYLVLTCGPPSLSSVVPSGKGEDGESCSDDESSGDEENQTVCISDRHRPQKKQKVNKKGKGREWVLRKKDQMRRKGNVVPPDTKYTARKPKARF

SEQ ID NO: 68930 - protein, 155 aa, Gossypium hirsutum
  unsure (1)..(155): unsure at all Xaa locations
  Clone ID: LIB3828-024-Q6-K6-F5.pep
MXSRPELQAPPVIFYDDVXFFLSTSSSRVGGGRTKLSERALELLAVPDDGVPRLLLDIGCGSGLSGETLTGNSHQWIGFALSESMLNVALPNEVAGDLLLGDLGQGLRLRPGVIDGAISFSAVQWFCNADLSSHEPTLRLKAFFRSLFSCFARGA

SEQ ID NO: 68931 - protein, 202 aa, Gossypium hirsutum
  unsure (1)..(202): unsure at all Xaa locations
  Clone ID: GOSHI-09MAY01-C16817_1.pep
FLFHDKSLANEDTYEPFLRLLWKGNWFIQEKSCKILALIVSARPKTQNGVVANGEASNSKTKLTTIDAVLRGLVEWLCTQLKKPYHPSRGIPTAINCLAALLKEPVVRSSFVQADGVKMLIPLICPASTQQSIQLLYETCLCVWLXSYYEPVIEDLATSRALPRLVDVVRSSTKEKVHXGAQMVDLGLPQIIQSLKAQAWSD

SEQ ID NO: 68932 - protein, 192 aa, Gossypium hirsutum
  Clone ID: GOSHI-09MAY01-C16837_1.pep
MSVVGFDFGNESCIVAVARQRGIDVVLNDESKRETPAIVCFGEKQRFIGTAGAASSMMNPKNSISQIKRLIGRQFSDPELQRDIKSLPFNVTEGPDGYPLIHARYLGEMRTFTPTQVLGMVFSNLKSIAEQNLKAAVVDCCIGIPVYFTELQRRAVLDAATIASLHPLRLIHETTATALAYGIYKTDLPEND

SEQ ID NO: 68933 - protein, 366 aa, Gossypium hirsutum
  Clone ID: GOSHI-09MAY01-C16507_1.pep
VNGEDLASGDRLMFLPCGLKAGSSITVVGTPRYAHQEYVPQLAKTRGGNGLVMVSQFMVELQGLQPGVREAPPKILHLNPRLKGDWSRKPVIEHNTCYRMHWGTAQRCDGLPSKDDEDMLVDGYRRCEKWIRNDVVDSKESKTTSWFGRFIGRAQKPEVTWPFPFAEGRLFILTLRAGVDGYHIIVGGRHVTPLPPRTGFSLEDATGLAIKGDVDIHSVYATSLPTSHPSFSPQRVLEMSPKWKASPLPKRSIRLFIGILSATNHFAERMAVRQTWMQSSAIKSLDVAVRFFVALNPKKEVNGVLKKEAAYFGDIVILPFMDRYELVALKTIAICEFGVQNVTAAYIMKCDDDTFVRADRVLKQID

SEQ ID NO: 68934 - protein, 95 aa, Gossypium hirsutum
  Clone ID: GOSHI-09MAY01-C16527_1.pep
SPSNFKTKQQELLIRVSILCLVYILAFITRLFSVLRYESMIHEFDPYFNYRTTLYLTENGFYDFWNWSDYESWYPLGPIVGGTLYPGLMVTAVLI

SEQ ID NO: 68935 - protein, 304 aa, Gossypium hirsutum
  Clone ID: GOSHI-09MAY01-C16497_1.pep
PRPPSVRPASEADTLIEQMTRDQDPIIRYGGMYALALAYRGTANNKAIRQLLHFAVSDVSDDVRRTAVLALGFVLYSEPEQTPRIVSLLSESYNPHVRYGAALAVGISCAGTGLSEAISLLEPLTSDVVDFVRQGALIAMAMVMIQINEASDSRVGTFRRQLEKIILDKHEDTMSKMGAILASGILDAGGRNVTIRLLSKTKHDKVTAVVGLAVFSQFWYWYPLIYFVSLSFSPTAFIGLNYDLKVPKFEFLSHAKPSLFEYPKPTTVPTTTSAVKLPTAVLSTSAKAKARAKKEAEQKANAEK

SEQ ID NO: 68936 - protein, 218 aa, Gossypium hirsutum
  Clone ID: GOSHI-09MAY01-C16797_1.pep
PRVRLKLSSRFPSCSERIKDIILQNKRSFVLELQQRSIEFNCILQKHQNIRSALVERMPVLDEATFSGRRAGSLPTSVSTSTGTARNLPNGIAKPAAAPVADLLDLSSDDAPAPNSSGGDFLQDLLGVDLSPASAPPGTSQPPKAGTDVLLDLLSIGTSPPAQSSSSASNILSSIQDDKTSLVNLNGLASLTSLSPNATSASPAPMMDLLDGFGPTPQ

SEQ ID NO: 68937 - protein, 136 aa, Gossypium hirsutum
  unsure (1)..(136): unsure at all Xaa locations
  Clone ID: GOSHI-09MAY01-C16747_1.pep
MKNCERLANLALAGLTLAPLVVKVDPNLNVILTACLAVYVGCYRSVKPTPPLETMSKEHAMRFPFIGSAMLLSLFLLFKFLSKDLVNAVLTCYFFVLGXVALSATILPAMKRFLPKHWNEDLIIWRFPYFDLWRSS

SEQ ID NO: 68938 - protein, 98 aa, Gossypium hirsutum
  unsure (1)..(98): unsure at all Xaa locations
  Clone ID: LIB3582-020-P1-K1-E10.pep
RLANLPLAGLTFAPLRCEEGPYLRILFLLHAVXVYVGCYGSVNPTPPLXTMSKEHAMRFPFIGSAMLLSLFLLDKFLSNDSANAVLTCSFFVLRTVAL

SEQ ID NO: 68939 - protein, 243 aa, Gossypium hirsutum
  Clone ID: GOSHI-09MAY01-C16707_1.pep
AFGMMAAVLVSLIESTGAYKAASRLASATPPPAHVLSRGIGWQGIGILLNGLFGTLSGSTVSVENVGLLGSTRVGSRRVIQISAGFMIFFSILGKFGALFASIPFTIFAAVYCVLFGLVASVGLSFLQFTNMNSMRNLFIVGVALFLGLSVPEYFREYTAKALHGPAHTRGGWFNDFLNTIFFSSPTVALLVAVFLNHTLDYQDRARDRGMPWWVKFRTFKGDSRNEEFYTLPFNLNRFFPPS

SEQ ID NO: 68940 - protein, 135 aa, Gossypium hirsutum
  Clone ID: GOSHI-09MAY01-C16657_1.pep
MCHKTLAYILHRHCRLLSASMDIEAEIRALQLDSAEDNNATLIPEDAKPEEVEMTDKVEEEGMTDEVDTKSQPVQAEPKVKDKEVADMDCAEVPDEMESQKKRHLNVVFIGHVDAGKSTTGGQILFLSGQVDDRT

SEQ ID NO: 68941 - protein, 117 aa, Gossypium hirsutum
  unsure (1)..(117): unsure at all Xaa locations
  Clone ID: LIB3197-028-Q1-M1-F9.pep
MDIEAEIRALQLDSAEDNNDVGNPEDAKLEKVEKEDXVEVEVEVEGMKDEVHGRSQPGQAEPKVKNKEVVALEDAEAQEEMETNKKRHLNVGFIGHGDDWKATTGGQILFLSGXVDD

SEQ ID NO: 68942 - protein, 91 aa, Gossypium hirsutum
  Clone ID: LIB3083-109-Q1-L1-A1.pep
MDIEAEIRALQLDSAEDNNATLIPEDAKPEEVEMTDKVEEGMTDEVDTKSQPVEAEPKVKDKEVADMDCAEVPDEMESQKKRHLNVVFIGH

SEQ ID NO: 68943 - protein, 86 aa, Gossypium hirsutum
  Clone ID: GOSHI-09MAY01-C16607_3.pep
LSHTVSPTPLSLSLSLPVSVSAPSSLLQRQKEKKQVFFWGGGGGVEVPQVVFPQSLYPLMVCLKLYTKDSVGSGIIHFSPIVEVED

SEQ ID NO: 68944 - protein, 147 aa, Gossypium hirsutum
  Clone ID: GOSHI-09MAY01-C16607_2.pep
MGTLAIDTECVDSDIYRALGFKELGKGVVGTPRILSLLSSLLEESVQRNEMESETVNFKDNVAMFHGLRAPTISIQHYIDRIFKYAGCSPSCFLVAYIYVDRFVQQTDVHLTSLNVHRLLITSVLVAAKFIDDASFNNAYYARVAGV

SEQ ID NO: 68945 - protein, 178 aa, Gossypium hirsutum
  Clone ID: GOSHI-09MAY01-C16607_1.pep
MGTLAIDTECVDSDIYRALGFKELGKGVVGTPRILSLLSSLLEESVQRNEMESETVNFKDNVAMFHGLRAPTISIQHYIDRIFKYAGCSPLCFLVAYIYVDRFVQQTDVHLTSLNVHRLLITSVLVAAKFIDDAFFNNAYYARVGGVSTAELNRLEMSFLFGLDFKLQVTVNTFQRYC

SEQ ID NO: 68946 - protein, 181 aa, Gossypium hirsutum
  Clone ID: GOSHI-09MAY01-C16637_2.pep
MESKHGSWRLSLMLLLVMLGLAKADINQDKTECSNELVGLAPCLPYVGGDAKTPTIDCCSGLKQVLDKSRKCLCVLLKDRDDPSLGLNINATLAATLPITCRAPVNMTDCISLLHLTPDSQEAKLFQGYQKLTHTGNSNSTTTAAAAADKSDGGKAKKWVGVEIAFGVSLWIFTINRNLGV

SEQ ID NO: 68947 - protein, 79 aa, Gossypium hirsutum
  Clone ID: LIB3829-024-Q6-N6-E7.pep
IQNVTSARENRISKKGRRAAEHFTPSKASGAALDLMKLFSFRSSVVRKRKEWDYYKPVLDLLSNEEVDALEAKEERSGR

SEQ ID NO: 68948 - protein, 106 aa, Gossypium hirsutum
  Clone ID: LIB3083-094-Q1-L1-F1.pep
VTSARENRISKKGGRAAEHFTPSKASGAALDLMKLFSFRSSVVRKRKEWDYYKPVLDLLSNEEVDALEAKEERSGRNNNSTNHGVQTWELETLINVASGYAWVGKS

SEQ ID NO: 68949 - protein, 68 aa, Gossypium hirsutum
  Clone ID: uC-gsronu33B104a08b1.pep
PTRPGYHNLTGFPWWITIVTSTMAMRFALFPVVVIHLQKLKKIGELAPKCMFLLSLFKVITSLAWSMN

SEQ ID NO: 68950 - protein, 130 aa, Gossypium hirsutum
  Clone ID: LIB3197-021-Q1-M1-G11.pep
PNLPARVSPIPYPATRSFFTSSNNVEESILPVRAIVSLLDGYHNLTGFPWWITIVTSTMAMRFALFPVVVIHLQKLKKIGELAPKLPSPLPPPMSGRSYKDHFIHFEKERKANGCPSYFWVFSFFLLSHA

SEQ ID NO: 68951 - protein, 92 aa, Gossypium hirsutum
  unsure (1)..(92): unsure at all Xaa locations
  Clone ID: GOSHI-09MAY01-C16147_1.pep
LFDLIIRNSASNVMMEIESNKPAGNGMVIGGLSPLSETLWREKTNTEFVGDVSARLTLEXNLTVMVTLNNGETQKVLEGLTGYAEPGTLTAL

SEQ ID NO: 68952 - protein, 167 aa, Gossypium hirsutum
  unsure (1)..(167): unsure at all Xaa locations
  Clone ID: GOSHI-09MAY01-C16167_1.pep
LSFSVPDPTFESWLRDSGYLDVIDNQQTAAAAAPTTGTSTISDPTITIPISSFLFRYLVSFFSHLWTLLSLLTFNPFAKLTTNDFSGETPSWTKGFFADFLSYSFPASASQARXRVQENVKRYARNXASLFILFFAXSLDQLPLALVGLISSLALWDSFRFFSDKWV

SEQ ID NO: 68953 - protein, 107 aa, Gossypium hirsutum
  Clone ID: GOSHI-09MAY01-C16117_1.pep
MNSGSKQGLFCLKWPWDVNKQSKSSNLCTFEGPWLFKSMQNLGSFVLNSFNSVSGLRFSNLNPTQIAFGVSQNENLKFKRKPLSPDEQGEAEQRAFASALASGKSAT

SEQ ID NO: 68954 - protein, 185 aa, Gossypium hirsutum
  unsure (1)..(185): unsure at all Xaa locations
  Clone ID: GOSHI-09MAY01-C16107_1.pep
SVLGSFGLMIMMGRFALLVFLAFASMQLLCIAADHDAAIFYDSFEEPFNGRWIVSDKDDYKGIWEHSKSEGHDDFGLLVTEKARKYAIVKELEEPVNLRDGTTVLQYEARFQNGLECGGAXYLKYLRPQESXGWKPKEFDNGSPYSIMFGPDICGLTNKVHFILKQKNPKSGEYVEHHLIDPPAR

SEQ ID NO: 68955 - protein, 141 aa, Gossypium hirsutum
  Clone ID: GOSHI-09MAY01-C16127_1.pep
MVGASSLHPRLLSSFVGDRLAQSRQPLAQLFHYNPGRKHISMQLSRTFSGLTNILFNRRNNLDEVPDGKRKRLRPGKLSPRRPVPNHIKRPPYVKTRMAPGIASGPEVHDLKGIEHMRASGRLAAQVLNYAGTLVKPGITT

SEQ ID NO: 68956 - protein, 183 aa, Gossypium hirsutum
  Clone ID: GOSHI-09MAY01-C16057_1.pep
MTELKLSESRDLTRIERIGAHSHIRGLGLDSSLEPRDVSEGMVGQAQARKAAGVILQMIKDGKIAGRAILLAGQPGTGKTAIAMGMAKSLGLETPFSMLSGSEIFSLEMSKTEALMQAFRKSIGVRIKEETEIIEGEVVEIQIDRPAVSGAASKTGKLTLKTTDMETVYDLRAKMIDALRKDT

SEQ ID NO: 68957 - protein, 102 aa, Gossypium hirsutum
  Clone ID: GOSHI-09MAY01-C16067_1.pep
MSATGNVGGGGPEEDKKPADQANHINLKVKGQDGNEVFFRIKRSTQMRKLMNAYCDRQSVDLNSIAFLFDGRRLRGEQTPDELEMEDGDEIDAMLHQTGGAE

SEQ ID NO: 68958 - protein, 64 aa, Gossypium hirsutum
  Clone ID: LIB3197-019-Q1-M1-G5.pep
DGNEVFFRIKRSTQMRKLMNAYCDRQSVDLNSIAFLFDGRRLRGEQTPDEVNFLTCSRCSEMIY

SEQ ID NO: 68959 - protein, 125 aa, Gossypium hirsutum
  Clone ID: GOSHI-09MAY01-C16007_1.pep
QALDCATALGLKRHTYIITKNANSLCHIHLKDLSLQVESQVSGCLLPSLPSDATFNKFSGISFIGDLNDNIPAPWPNPSLLPASSCNKTVRIPALPAATNAQSRLYNEYAAVYLLIASSLTMMIL

SEQ ID NO: 68960 - protein, 119 aa, Gossypium hirsutum
  Clone ID: LIB3197-019-Q1-M1-C8.pep
RGGMHITEALRMQMEVQKQLHEQLELQRSLQLRIEEHARYLQKMLEEQQKAGNALVPNPNSELPSRIASETEPCESKTESPTSLPSKYKAPNVEDCKLKSSPKRLRMDEAEAEVENPEQ

SEQ ID NO: 68961 - protein, 105 aa, Gossypium hirsutum
  Clone ID: LIB3135-038-Q1-K1-D2.pep
PRVRLMNVEGLTIYHVKSHLQKYRLAKYMPEKKEERKTSSSSEEKKPASSSNESDGKKRGGMHITEALRMQMEVQKQLHEQLELQRSLQLRIEEHARYLLHLVFK

SEQ ID NO: 68962 - protein, 373 aa, Gossypium hirsutum
  Clone ID: GOSHI-09MAY01-C16297_1.pep
KNLGSDQYKFLLRTMVNAGIGEETYGPRNVIDGTEETPNLPGSLSEVDDIVFGTLDKLFDNNGVSPSEIDILVITISMITSVPSLPARVINRYKMRDDVKVFNLSGMGCSASVIAVDLVHHLFKTYTNSFAVIGSSESLIPNWYRGNERSMMLPNILFRLGGCSLLLTNKSSMKHKSLMKLKLSVRFHGGASDEAYQSCTRVEDSQGYCGFSLSKSLPQAAAKAVTMNFRVLLPKTLPLRELVRYATVSFLHSKTNNNKGLTPSLNMKSGFQHFCIHPGGRAVIDAMGRSLGLNEYDLEPTRMALHRFGNTSAAGIWYVLSYMEAKKRLKKGDRILMISLGAGFKCNNCVWEVMKDATDDVNVWKDCIGRYPV

SEQ ID NO: 68963 - protein, 159 aa, Gossypium hirsutum
  Clone ID: GOSHI-09MAY01-C16207_1.pep
MYRFASSLASKARAARNTTYQIGSRLSWNRNYAAKDIKFGVEARALMLKGVEELADAVRVTMGPKGRNVVIEQSYGAPKVTKDGVTVAKSIEFKDKVKNVGASLVKQVANATNDVAGDGTTCATVLTRAIFTEGCKSVAAGMNAMDLRRGITMAVDAIV

SEQ ID NO: 68964 - protein, 127 aa, Gossypium hirsutum
  unsure (1)..(127): unsure at all Xaa locations
  Clone ID: GOSHI-09MAY01-C16237_4.pep
FRLQGSAGNKFRMSLGLPVAATVNCADNTGAKNLYIISVKGIKGRLNRLPSACVGDMVMATVKKGKPDLRKKVLPAVIGRQRKPWRRKDGVYMYFEDNAGVICQSXGEMKGSAITGPIGKECADLWP

SEQ ID NO: 68965 - protein, 219 aa, Gossypium hirsutum
  Clone ID: GOSHI-09MAY01-C16237_2.pep
MAGELVLLDFWPSPFGMRSRIALAEKGIPYEYREEDLRNKSDLLLQMNPVHKKIPVLIHNGKPVCESVIQVQYIDEVWHDKAPLIPSDPYQRAVARFWVDFVDKKIYDLGSKIWKTKGEEQANAKKEFIECLKLLEGELGDKTYFGGESLGYVDVALVPFYTWFYAYEKCGDFSIEAECPKMIAWVKRCMQKESVAKSLPDQEKVYEFILQLKKVFGIE

SEQ ID NO: 68966 - protein, 140 aa, Gossypium hirsutum; identical to SEQ ID NO: 60618
  Clone ID: GOSHI-09MAY01-C16237_1.pep

SEQ ID NO: 68967 - protein, 140 aa, Gossypium hirsutum
  unsure (1)..(140): unsure at all Xaa locations
  Clone ID: LIB3828-009-Q1-K6-D9.pep
MSKRGRGGSAGNKFRMSLGLPVAATVNCADNTGAKNLYIISVKGIKGRLNRLPSACVGDMVMATVKKGKPDLRKKVLPAVIVRQRKPWRRKDGVYMYFEDNAGVIVNPKGXMKGSAITGPIGKECADLWPRIASAANAIV

SEQ ID NO: 68968 - protein, 179 aa, Gossypium hirsutum
  unsure (1)..(179): unsure at all Xaa locations
  Clone ID: AI055055.1.pep
MAGELVLLDFWPSPFGMRSRIALAEKGIPYEYREEDLRNKSDLLLQMNPVHKKIPVLIHNGKPVCESVIQVQYIDEVWHDKAPLIPSDPYQRAVARFWVDFIDKKIYELGSKIWKTKGEEQAXAXKEXIECLKLLEGELXDXTYXGGXSSGYVNVALVPFIAGFRLRKRWGLSFKKNCR

SEQ ID NO: 68969 - protein, 125 aa, Gossypium hirsutum
  unsure (1)..(125): unsure at all Xaa locations
  Clone ID: uC-gsronu33B087b11b1.pep
MAGELVLLDFWPSPFGMRSRIALAEKGIPYEYREEDLRNKSDLLLQMNPVHKKIPVLIHNGKPVCESVIQVQYIDEVWHDXAPLIPSDPYXRAVARFWVDFVDRKIYDLGSNMAAYYVRYRSPVG

SEQ ID NO: 68970 - protein, 242 aa, Gossypium hirsutum
  unsure (1)..(242): unsure at all Xaa locations
  Clone ID: GOSHI-09MAY01-C16227_1.pep
TLWSNHVLPCRPSGITLDIKKSSHKKLSKWLRALSSSGLITVKEDKYKKEAMLISVNRGHPEYLQFKPEKRPVEKVVQAGDSAASESRSQKALEVVEVYKSSVHVNPIFASVGADTGKLYSASEATDIVFKYIEKENLVKQTNKATVVLDATLCDALFKGAIKKGSTYPTEIHKKDLGATFINRMQAHHMVTRGGESVVRKGVLKTVHIMTERXRQGTMRVTKVSGLETFLIDPEALASELQ

SEQ ID NO: 68971 - protein, 95 aa, Gossypium hirsutum
  Clone ID: GOSHI-09MAY01-C17957_1.pep
NLFSSFLLPFSRVFFFQKFPSILDFLAILRTVTPSWWNNLISYQSPLIVADRRPSEIPNLTACGQAKASVRGREMTLWNEGTALKLSSLPYYYVQ

SEQ ID NO: 68972 - protein, 225 aa, Gossypium hirsutum
  Clone ID: GOSHI-09MAY01-C17547_1.pep
RTRGRTRGIGVADGVGGWAEVGIDAGGFARGLMSNSVKAIRDEPKGSVDPARVLEKAHSSTKSQGSSTACVIALHKEGLHAINLGDSGFIVVRDGSTVFHSPVQQHGFNFTYQLESGNNGDLPSSGQVFRIPILPGDVIVAGTDGLFDNLYNNEVAAVVVHALRAGFSPESTAKEIVALARERAVDKNKQTPFAKAAQDAGYRYNGGKLDDITVVVSFITISADM

SEQ ID NO: 68973 - protein, 142 aa, Gossypium hirsutum
  Clone ID: GOSHI-09MAY01-C17487_2.pep
MSGPLDRFARPCFEGFYGSDERRERKSDFENSEDERRTRIGSLKKKAISASARFKHSLKKKSNRRKSDGRVSSVSIEDVRNAEELRAVDQFRQALIMEELLPEKHDDYHMMLRFLEARKFDIDKAKHMWADMLQWRNEFGAD

SEQ ID NO: 68974 - protein, 144 aa, Gossypium hirsutum
  Clone ID: GOSHI-09MAY01-C17487_1.pep
MSGPLDRFARPCFEGISGSDEKRERKSDFENSEDERRTKMGSLKKKALNASTRFKHSLKKKSSKRKSDGRVSSVSIEDIRDVEELQAVDQFRQALIMEELLPEKHDDYHMMLRFLKARKFDIDKAKHMWADMLQWRKEFGSDHH

SEQ ID NO: 68975 - protein, 182 aa, Gossypium hirsutum
  Clone ID: GOSHI-09MAY01-C17447_2.pep
MADGEDIQPLVCDNGTGMVKAGFAGDDAPRAVFPSIVGRPRHTGVMVGMGQKDAYVGDEAQSKRGILTLKYPIEHGIVNNWDDMEKIWHHTFYNELRVAPEEHPVLLTEAPLNPKANREKMTQIMFETFNAPAMYVAIQAVLSLYASGRTTGIVLDSGDGVSHTVPIYEGYALPHAILRLDL

SEQ ID NO: 68976 - protein, 192 aa, Gossypium hirsutum
  Clone ID: LIB3582-055-P1-K1-E9.pep
MADGEDIQPLVCDNGTGMVKAGFAGDDAPRAVFPSIVGRPRHTGVMVGMGQKDAYVGDEAQSKRGILTLKYPIEHGIVNNWDDMEKIWHHTFYNELRVAPEEHPVLLTEAPLNPKANREKMTQIMFETFNTPAMYVAIQAVLSLYASGRTTGIVLDSGDGVSHTVPIYEGYALPHAILRLDLAGRDLTDALM

SEQ ID NO: 68977 - protein, 184 aa, Gossypium hirsutum
  unsure (1)..(184): unsure at all Xaa locations
  Clone ID: LIB3828-015-Q1-K6-C11.pep
MADGEDIQPLVCDNGTGMVKAGFAGDDAPRXVFPSIVGRPRHTGVMVGMGQKDAYVGDEAQSKRGILTLKYPIEHGIVNNWDDMEKIWHHTFYNELRVAPEEHPILLTEAPLNPKANREKMTQIMFETFNAPAMYVAIQAVLSLYASGRTTGIVLDSGDGVSHTVPIYERYALSHAILRLDLAG

SEQ ID NO: 68978 - protein, 167 aa, Gossypium hirsutum
  unsure (1)..(167): unsure at all Xaa locations
  Clone ID: LIB3828-024-Q6-K6-A11.pep
MADGEDIQPLVCDNGTGMVKAGFAGXYAPRAVFPRGGGRPRHTGVMVGMGQKDAYVGDEAQSKRGILTLKYPIEHGIVNNWDDMEKIWHHTFYNELRVAPEEHPVLLTEAPLNPKANREKMTQIMFXETFNTPAMYFFIQAVLSLYASGSNNXGLFLDSGDGVSHTV

SEQ ID NO: 68979 - protein, 72 aa, Gossypium hirsutum
  Clone ID: GOSHI-09MAY01-C17427_1.pep
MMEKLNFVKNGVLRLPPGFRFHPTDEELVVQHLRRKVLSWPLPASIIPEVDVCTADPWDLPCDLEQERYFFS

SEQ ID NO: 68980 - protein, 296 aa, Gossypium hirsutum
  unsure (1)..(296): unsure at all Xaa locations
  Clone ID: GOSHI-09MAY01-C17767_1.pep
VMALKCRGEHVLGGLHTGINTRHIVMASKMVEEYTGLHVQPHSPTRPPTPPAHESGIHQDGMLKHKGTYEIISPEDIGLERSNEAGIVLGKLSGRHALSDRLKELGYELDDVQLGNIFWRFKEVAEQKKRVTDADLVALVSDEVFQPDVVWKLLDLQVTCGTLGLSTATVKLIDADGRKHVACSVGTGPVDSAYKAVDLIIKESVSLLEYSMNAVTEGIVAIATTRVXLIRVEKSHLSTHALTGELGHRTFSGTGAGMDIVVSSVKAYVSALNKMLGFKEQYPAKASSIERTPASS

SEQ ID NO: 68981 - protein, 301 aa, Gossypium hirsutum
  unsure (1)..(301): unsure at all Xaa locations
  Clone ID: GOSHI-09MAY01-C17617_1.pep
PRVRLKGSLSDNLNCGRNLEFVDISNNRLMGSRPPGLNSETRDNRVIKFSGNCXLSIAGHHQHPESYCREFKVHVYKSSNGGKGIGVLVGLIVGIAVLIVLVAIGFLIVCRRYCPRVRSEQHLLQKSVPENSTAGLSSEILTNPRHVFESSKSEVQILPRCRSFSLEELKEATNNFDSSAFLGEGSYGKIFKGLLKNGTQVAIRCLPTSKKYSIRNLKLRLDMLAKIRHPHLVCILGHCIEVEQDDNCSINRVFFVLEYIPNGNFRSHLSDNSPGEXSHWPERLAVLICVCKAXHFLHTGV

SEQ ID NO: 68982 - protein, 104 aa, Gossypium hirsutum
  unsure (1)..(104): unsure at all Xaa locations
  Clone ID: LIB3197-045-Q1-M1-G9.pep
CFEQPANKKVTRHQASIICAISCPXNNIFVLFSIKLVIQQEQISKSKTAQSMRKVRTNKAKPSQRPKEFFAQTHNFQEKDNKMEIEVPSKELTKTFMLQTSTVL

SEQ ID NO: 68983 - protein, 40 aa, Gossypium hirsutum
  Clone ID: LIB3148-012-Q1-K1-D8.pep
VSFIAFLFYNVFCIKPVQYSDNDFICQMIFNNLKLLLQLH

SEQ ID NO: 68984 - protein, 210 aa, Gossypium hirsutum
  Clone ID: GOSHI-09MAY01-C17637_2.pep
MAEKPQPVKVLYCPICSLPAEYCEFGPDFEKCKPWLISNAPDLYPHLLKEANEKEGEKVSEQLQSVGISSAAEGAASSAPPGSTVSSKQEDVKRLPGGKLRRKEKQEVVIEKVVRNRRKCITIVKGLDLFGIKLSDASKKLGKKFATGASVVKGPTDKEQIDVQGDISYDIVEYITETWPAVPETAIFFIEDGKKFPLLDARTWCQSRDW

SEQ ID NO: 68985 - protein, 90 aa, Gossypium hirsutum
  unsure (1)..(90): unsure at all Xaa locations
  Clone ID: AW187271.1.pep
YCGIYYRDLACCNVFNXSLYILFNMKMLHMRNMEQCLFIFFAFTIRKDITLVLHMEIHFNMKLSNSELCFFITLKVRFYCSLLMLKLDEI

SEQ ID NO: 68986 - protein, 191 aa, Gossypium hirsutum
  Clone ID: GOSHI-09MAY01-C17197_1.pep
FPLLLSILFIISPVFCDNDEEDDLLKGINSYRASLNLTSLTTNENAECLADELAEEFKNQPCTNSTGANTVPGTEPQFANYPNILAKCHLNVSVTRDGAVMPACVPNLAPSLVLTNFTQSQYSENLNETKYTGIGIGSEGDWIVVVLTTSTTEGNYATATTAATTSAANSVSEITIIHHLLLLLMAAFYML

SEQ ID NO: 68987 - protein, 96 aa, Gossypium hirsutum
  Clone ID: LIB3829-029-Q6-N6-G1.pep
KDGAETPATRPAPGSQSGPTNSTQSQNTQNPNETKQTGNGTGSEGDRIAVVPTTNTAEGNYATATTTATTRAANSVSEIIIIYPPLLLLKAAFYKL

SEQ ID NO: 68988 - protein, 127 aa, Gossypium hirsutum
  Clone ID: LIB3197-039-Q1-M1-B11.pep
MAQIEVQRQPAISVPNAVAPQTGGVQFIPTSLYVGDLDVTVTDEQLFQLFGQVARVASVRICRDLATGRSLGYGYVNYSNPRDAARALDLLNFTPLNNKPIRIMYSQRDPSLRKSGTANIFIKNLDK

SEQ ID NO: 68989 - protein, 128 aa, Gossypium hirsutum
  Clone ID: LIB3083-103-Q1-L1-G12.pep
HIHVQHQAPVSGPNGVAPGASGGAQFMLTSLYVGDLDVTVTDEQLYQLFSQVAPVASVRVCRDLASGRSLGYGYVNYNNLRDAARAMDLLNFTPLNNKPIRIMYSQRDPSLRKTGTANIFIKNLDKSI

SEQ ID NO: 68990 - protein, 229 aa, Gossypium hirsutum
  Clone ID: GOSHI-09MAY01-C17127_1.pep
PTRPGSSQSGYAPPGPQSAYAPQQQYGKPYSYVQSQGPQTYGPPANQPGEVPYQGPAGQSYSPHVPPQQQYAYASGPLQQSYPPYGSAPPGDGYNQPPPVTGPAYSQQGGQSVPGYSQPSAQQATPYAQANTAAGYGQYPPSQQGYSDQAASNNAAYGYQGTQDSGYGSGPVTTYGASPPNGQVTYAQPTATQATYDQSEGYAAAPGTAPVAYGKTVSPQLGYRQYDST

SEQ ID NO: 68991 - protein, 118 aa, Gossypium hirsutum
  Clone ID: GOSHI-09MAY01-C17267_1.pep
IIKTLSSFISLILPFFSPPFPLSSTTFLFLSSSFIVLSNKPLPLLPHTFQRLTSDQASFLPIIRNLNPQIYLSNPLFLISSAILSHPRSLFNVFLSFYFSLGYPQAKKTHAIVGREFS

SEQ ID NO: 68992 - protein, 420 aa, Gossypium hirsutum
  Clone ID: GOSHI-09MAY01-C17217_1.pep
MAATSLNAPNAPLLQKTHQTHVFLKPISTIPCQTSAKRFSISCSATTQDRLSVQSQSQDRVFNFAAGPATLPENVLLKAQSELYNWHGSGMSVMEMSHRGKDFRSIIEKAEADLRSLLNIPENYAVLFLQGGATTQFAAVPLNLCAPGDSVDYLVTGSWGDKAFIEAKKYCNPKVIWSGKSENYVRVPSFDGLELNPNAKYLHICANETIYGVEFKDYPVPRNPNGVLVADMSSNFCSKPVDVTKFGLIYAGAQKNVGPSGVCIVIVRKDLLGNAQESTPVMLDYKIHADNNSLYNTPPCYGIYMCGLVFEDLLKQGGLEEVEKKNHKKAGILYNAIDESKGFYRCPVEKSVRSMMNVPFTLEKSELEAEFLKEAEKEKMVQLKGHRSVGGMRASIYNAMPLAGVEKLVAFMKDFQAKHA

SEQ ID NO: 68993 - protein, 261 aa, Gossypium hirsutum
  Clone ID: GOSHI-09MAY01-C17227_1.pep
VWDTVVAPHLHKFHGILNGIDLDIWDPYNDKFIPVPYTSENVVEGKRAAKEALQQRLGLKKSDHPLVGIITRLTHQKGIHLIKHAIWNTLKRNGQGVLLGSAPDPRIQNDFVNLANQLHSSHSDQARLCLTYDEPLSHLIYAGADFILVPSIFEPCGLTQLTAMRYGSIPVVRKTGGLYDTVFDVDDDKARAEAQGLEPNGFNFDGADGAGVDYALNRAISAWYDGRDWFNSLCKRVMEQDWSWNRPALDYMELYHAAKKY

SEQ ID NO: 68994 - protein, 275 aa, Gossypium hirsutum
  Clone ID: GOSHI-09MAY01-C10987_1.pep
MPIATLSLHSLGYCCQKSPPFSLKSSFLSKPTKTQFSFAFKTTEKRPFSHIVSMSMEAGIGVMGTKLGMMSFFETDGTVVPVTVVGFREGNIVTQVKTSATDGYDAVQVGYRRVRDKKLTKPELGHLGKAAVIPMRHLQEFRLQSVGEFETGQKLAVEEIFKEGDLVDVSGTTIGKGFQGGIKRHNFKRGQMSHGSKSHRALGSIGAGTTPGRVYKGKKMPGRMGGSKRKIRKLKIVKIDNELRVVMIKGALPGKPGNLLRITPAKIVGKNIPKS

SEQ ID NO: 68995 - protein, 97 aa, Gossypium hirsutum
  Clone ID: LIB3120-020-Q1-K1-C10.pep
GKSGASFKDSSLFGVSLSDHIKADFTSSALRCKREFNHRTGAVRAQTTATATPAITRSTVDGKKTLRKGSVIITGASSGLSLATAKALAETGKWHVI

SEQ ID NO: 68996 - protein, 87 aa, Gossypium hirsutum
  unsure (1)..(87): unsure at all Xaa locations
  Clone ID: LIB3166-033-P1-K1-B11.pep
MALQAAALVPATFSVPKEGKSGASFKDSSLFGVSLSDHIKADFTSSALRCKREFNHRTGAVRAQTTATXTPAITRSSXDGKKSLIKG

SEQ ID NO: 68997 - protein, 161 aa, Gossypium hirsutum
  Clone ID: GOSHI-09MAY01-C10817_1.pep
EKDYIKNVLGEQGQHMAVNYYPPCPEPELTYGLPGHTDPNALTILLQDLQVAGLQVLKHGKWLAVNPQPDAFVINIGDQLQALSNGRYKSVWHRAVVNANKERMSVASFLCPFDRALISPAKPLTEDGCEAVYRDFTYEEYYSKFWSRNLDQEHCLELFKN

SEQ ID NO: 68998 - protein, 67 aa, Gossypium hirsutum
  Clone ID: GOSHI-09MAY01-C10597_2.pep
MYKNSKDILYDSWSPAMTVSSICISILSMLSSATVKQRPTDNDRYVKNCRNGRSPKETRWWFHDDKV

SEQ ID NO: 68999 - protein, 184 aa, Gossypium hirsutum
  Clone ID: GOSHI-09MAY01-C10597_1.pep
MAPSFFIFPHASADAWALARAEAMTSSSARSRKALSKIPCNRLQKELVEWQVNPPAGFKHKVTDNLQRWIIEVNGAPGTLYANETYQLQVDFPEHYPMEAPQVIFIPPAPLHPHIYSNGHICLDILYDSWSPAMTVSSICISILSMLSSSTAKQRPADNDRYVKNCRNGRSPKETRWWFHDDKV

SEQ ID NO: 69000 - protein, 113 aa, Gossypium hirsutum
  Clone ID: LIB3145-032-Q1-K1-E10.pep
RVPIIELESPIILCFKESFTTVWKRDRFVLAQCPTQILCFLLLQHKTYIIDSIISVIRLLLLNLTKQANACSNSLSFKAMVKQRPTDNDRYVKNCRNGRSLKETRWWFHDDKV

SEQ ID NO: 69001 - protein, 112 aa, Gossypium hirsutum
  unsure (1)..(112): unsure at all Xaa locations
  Clone ID: LIB3166-027-P1-K1-H7.pep
PRVRSEAISSSSAHSRSALSKIACNRLHKELVEWQVNPPTGFKHKVTDNLQRWIIEVNGAPGTLYANETYQLQVDFPEHYPMEAPXDILYDSWSPAMTVSSICISILFMLSS

SEQ ID NO: 69002 - protein, 75 aa, Gossypium hirsutum
  unsure (1)..(75): unsure at all Xaa locations
  Clone ID: LIB3189-036-P1-K1-H8.pep
PLHPHIYSNGHICLDILYDSWSPAMTVSSICISILSMLSSSTVKQRPTDNDRYDXNCRNGRSSKETRWWFHDDKE

SEQ ID NO: 69003 - protein, 122 aa, Gossypium hirsutum
  Clone ID: GOSHI-09MAY01-C10587_1.pep
PPLSVTFQVWSFLSTSFFFDSCVASLLFFGYGFLGFSISLLVLFNFDSFFLLFFFIYIYVLRQLEVTSNLITKFEALIEFCRVCYYVGVNCLKHFWEALHERVSFDILSGFQGSLLIQSTQP

SEQ ID NO: 69004 - protein, 419 aa, Gossypium hirsutum
  Clone ID: GOSHI-09MAY01-C10547_1.pep
MGKKAVLIGINYPGTKAELKGCINDVKRMYKCLTERYGFSEEDITVLIDTDNSYDQPTGKNIRRALNDLVRSAEPGDFLFVHYSGHGTRLPAETGDDDDTGYDECIVPCDMNLITDDDFRELVDKVPKGSRISIVSDSCHSGGLIDEAKEQIGDSSKPQDSESESGSGGFRSFLHHTVQDAFESRGIHVPSRLRHRDHHHDKEEVDDRGVNEDYDDSGYVKSRSLPLSTLIEMLKQKTGKDDIDVGKLRPTLFDMFGEDASPKVKKFMNIIMTKLQGSGDDGEGGGFMGKVGNLALQFLKQKLDDDEGYGKPALETEVSSKQEAYAGAGKHSLPDSGILISGCQTDQTSADASPSGNASKAYGALSNAIQTIIADSDGSITNKELVLKARQMLKKQGFTQQPGLYCCDHHVRAPFVCEY

SEQ ID NO: 69005 - protein, 127 aa, Gossypium hirsutum
  Clone ID: uC-gsronu33B107e09b1.pep
MISDESHIVWDKALLLSRHMVVSYCCHSGGLIDEAKEQIGDSSKPQGSEPESESGSSGFRSFLHHTVLDAFESRGIHVPSRLRHRDHHHDKEEVDDRGVNADYDDSGYVKSTSLALSTLIGMLKAET

SEQ ID NO: 69006 - protein, 94 aa, Gossypium hirsutum
  Clone ID: GOSHI-09MAY01-C10497_2.pep
GAVPRIKESKLSLLTYGKLNNVPEAVCMQHLMGIDGVIVDFVQEISHAVDDMIVRPLNEGLREGDHETGTKSKLQFSQQELSFLLKLIPELIHH

SEQ ID NO: 69007 - protein, 270 aa, Gossypium hirsutum
  Clone ID: GOSHI-09MAY01-C10497_1.pep
PRVRGTVFEKRVTVLSLEEFLCVGPQREAGKQGKSLLRKTKDGKILNWNVETDDSFCTLAETFQKVDPSLGFNIELKFDDHIVYQQDHLIHVLQVILHVVSEYAKDRPIIFSSFHPDAAQLVRKLQNTYPVFFLTNGGTQVYYDVRRNSLEEAIKVCMEGGLQGIVSEVKGVFGNPGAVPRIKESKLSLLTYGKLNNVPEAVCMQHLMGIDGVIVDFVQEISHAVDDMIIKPLNEGLREGDEETGTKSKLQFSQQELSFLLKLIPELIQH

SEQ ID NO: 69008 - protein, 117 aa, Gossypium hirsutum
  Clone ID: AI054457.1.pep
TAKKSVKIQTLSKIMILHLMRFSYGSQGSTKLHKPVHFPLELVLGRELLVSSSTEGRKYELAATITHHGREPSKGHYTADARYPNGQWLRFDDASVTAIGTSKVLHDQAYVLFYEQT

SEQ ID NO: 69009 - protein, 53 aa, Gossypium hirsutum
  Clone ID: LIB3166-030-P1-K1-D8.pep
RALLYTCIHKNIIVYVLFIVYMHIYSIYLKGQLSYNDSNNNSNNKTKTKNNNH

SEQ ID NO: 69010 - protein, 122 aa, Gossypium hirsutum
  Clone ID: GOSHI-09MAY01-C10737_1.pep
MKKVVLKLDFHDNKCRQKAMKTASGLSGVESVALDKDQKLTLTGDVDPVVAVRKLRKVCYTEIVSVGPAKEPEKKKDEPKKDEPNKPADTSKDPPKGAVVQYFYHPSMPQYYPPVPDYYSYR

SEQ ID NO: 69011 - protein, 231 aa, Gossypium hirsutum
  unsure (1)..(231): unsure at all Xaa locations
  Clone ID: GOSHI-09MAY01-C10627_2.pep
KRGIQKTQAFLPPRLPQSSPSNTLQLELSATMFRSVARSAAGKHLLRRGYATESVPDRKVAVLGAAGGIGQPLALLMKLNPLVSRLALYDIANTPGVAADVSHVNTRSEVAGYVGEDQLKQALEGCDVVIIPAGVPRKPGMTRDDLFNINAGIVKGLCAAIAKYCPNALVNMISNPVNSTVPIAAEVFKKARTYDEKKLFGXVTTLDAVRAKTFYXGKAKLNVANVNVPLS

SEQ ID NO: 69012 - protein, 338 aa, Gossypium hirsutum
  Clone ID: GOSHI-09MAY01-C10627_1.pep
MFRSVARSAAGKNLLRRGYATAVPERKVAVLGAAGGIGQPLALLMKLNPLVSQLALYDIANTPGVAADVSHINSRSEVAGYVGEEQLGKALEGCDVVIIPAGVPRKPGMTRDDLFNINAGIVKGLCSAIAKYCPNALVNMISNPVNSTVPIAAEVFKKAGTYDERKLFGVTTLDVVRAKTFYAGKAKVNVADVNVPVVGGHAGITILPLFSQATPKANLPEEDIKALTKRTQDGGTEVVEAKAGKGSATLSMAYAGAIFADACLKGLNGVPDVVECSFVQSTVTELPFFASKVRLGKNGVEEVLGLGPLSEYEKEGLESLKPELKSSIEKGIKFANQN

SEQ ID NO: 69013 - protein, 118 aa, Gossypium hirsutum
  Clone ID: uC-gsflmaxxa058f09b1.pep
HVLPKALEGCDVVIIPAGVPRKPGMTRDDLFNINAGIVKGLCSAIAKYCPNALVNMISNPVNSTVPIAAEVFKKARTYDERKLFGVTTLDVGRAKTFYAGKAKVNVADVYVPVVGGHA

SEQ ID NO: 69014 - protein, 67 aa, Gossypium hirsutum
  Clone ID: LIB3135-004-Q1-K1-H4.pep
VIVHHSTASPVDNADMLDFDNILFKLKDAYHGHTLKLPISFARRANDTTDAITMILDMLQAELALYN

SEQ ID NO: 69015 - protein, 77 aa, Gossypium hirsutum
  Clone ID: LIB3197-027-Q1-M1-B8.pep
SWKIKCNITILKWFVIKHPPPKQKRVFNHTLPATYHWELLVETYGMAILLTTAKPMLLAARKKTPIAAEVTAKFSLF

SEQ ID NO: 69016 - protein, 90 aa, Gossypium hirsutum
  Clone ID: LIB3083-091-Q1-L1-E6.pep
GGHSTAEGGPSDARSAVDKSLLRLGYATAVPERKVAVLGAAGGIGQPLTLLMKLNPLVSQLALYDIANTPRVAADVSHINSRSVVCRICT

SEQ ID NO: 69017 - protein, 59 aa, Gossypium hirsutum
  Clone ID: uC-gsflmaxxa070b09b1.pep
WKNISNNINLILVGKLDSLLYRCFKLWGWVLSLTMSRQVWRALNQNLIPFSIDALPTSP

SEQ ID NO: 69018 - protein, 65 aa, Gossypium hirsutum
  unsure (1)..(65): unsure at all Xaa locations
  Clone ID: LIB3493-033-P1-M1-H9.pep
KAGKGSATVSSAYAGAIFADACLKGLNGVPDVVECSFVQSTVTELXFFASKVRLGKNGVEEGYFF

SEQ ID NO: 69019 - protein, 341 aa, Gossypium hirsutum
  unsure (1)..(341): unsure at all Xaa locations
  Clone ID: GOSHI-09MAY01-C10197_1.pep
MAVAENDGSKIGSSGQNLVPVDTDTVSDSGKPKTNSDSMTVTKTTEEPRAAAGEAINGDGFNENNHHHQQMATMTDKLNGFTSVQNGGNNGEILKKNITDLVETLSKLNPMAEEFIPPSLINHHQQQHPPSAAPWRENGFGFRAENTNRRKRTYFSQGKRRLNNRTSIAQREDAIRKTVYVSDIDLQVTEELLAGLFLSCGPVVDCRICGDPNSVLRFAFVEFYKEEDAKAALNLSGTILGYYPLKVMPSKTAIAPVNPTFLPRSEDEREMCTRTIYCTNIDKKITQADVKLFFESVCGXVQRLRLLGDYHHSTRIAFVEFTLADSAIAALNCSGAVLGSL

SEQ ID NO: 69020 - protein, 167 aa, Gossypium hirsutum
  Clone ID: GOSHI-09MAY01-C10157_1.pep
MPISRIAVGSPAEAGQADALKAALAEFISVLIFVFAGEGSGMAFNKLTDDGSSTPAGLVAAALAHALALFVAVSIGANISGGHVNPAVTFGAFVGGHITLVRSILYWIAQLLGSVVACLLLKFSTGGMTTSAFSLSSGVGAWNALVFEIVMTFRLVYPVYATAVDPK

SEQ ID NO: 69021 - protein, 189 aa, Gossypium hirsutum
  Clone ID: GOSHI-09MAY01-C10147_1.pep
GIFPTYRDSPLPAAFNRVLQFGDASGIQSPVSFGGFGSLTRHLGRLSNGIYEAIDGDFLDSYSLSLLNPYMPNLSASWLFQRAMSAKKQSNVPPDFINELLDINFKSMERLGDPVLRPFLQDVIQFGPLAKTLSLVMLTKPQILPSIFKQVDIPVLIDWSRHFFMLGYYTFLSTYMDPVIRSWLNGLPS

SEQ ID NO: 69022 - protein, 172 aa, Gossypium hirsutum
  Clone ID: GOSHI-09MAY01-C10137_1.pep
MQIRISSMAVPSCTIKSRPYSTKQHLYSFFFIIIFSFLFLPSSFSSSSPSIHDLLVSRGLPAGLLPKEVKSYTLSDNGTLEVLLDEPCLTKYENRVFFDSVVRANLSYGSLIGVVGLSQEELFLWLPVKDIIVNDPTSGLILFDIGLAHKQLSLSLFEDPSLCQPQGISKIM

SEQ ID NO: 69023 - protein, 207 aa, Gossypium hirsutum
  Clone ID: GOSHI-09MAY01-C10097_1.pep
MSSRKGNGNPFVYGGINNPSSKGKDISGSSSSKVEQLSQGVADMNLGLPQDDGEWEVIQRKPKNRTGSSAARPWGPQNSNSKPRGAMRTNAVSGRASGNDWDTHNTDSRMATGRGNARPQTFNKTIENNNVPPHPVIRPPLQYGWNWQSRTGSNPSGGLQDDHGKNNVSTEGEEVNDIDDVEDDSDDNAIDDSDDELLTDDLIQIQV

SEQ ID NO: 69024 - protein, 85 aa, Gossypium hirsutum
  Clone ID: LIB3166-022-P1-K1-A4.pep
MSSRKGNGNPFVSGGINNPSSKGKDISGSSSSKVEQLSQGVADMNLGLPLDDGEWEVIQRKPKNRTGSSAARPWGPQNSNGKPRG

SEQ ID NO: 69025 - protein, 121 aa, Gossypium hirsutum
  unsure (1)..(121): unsure at all Xaa locations
  Clone ID: GOSHI-09MAY01-C10017_1.pep
MMSINKGKEIAEGSSGPAAVAVGAAVGGVGGGDQRNPPPLSRYESQKRRDWNTFGQYLRNQRPPVALSQCNANHVLEFLRYLDQFGKTNVHLQGCVFFGQPEPHGTXCRVPLRQAWGSLDA

SEQ ID NO: 69026 - protein, 180 aa, Gossypium hirsutum
  Clone ID: GOSHI-09MAY01-C10007_1.pep
ASAAKKRLSKVYLKKLRNLSMPGSRIPDWFTQDMVTFSSHKTRDLTGVIIAVVVSINHHIPDELRYQLPAVPDIQAQIFNGEQAIMTTALNLIGVPRTNQDNVHLCRYPAYRPLVSILKDGFKIKVTRRNPPYVQGVELKKAGIFLVYENDDDYGGDEDSLDENQQSVSEKLAKFFSSLE

SEQ ID NO: 69027 - protein, 399 aa, Gossypium hirsutum
  unsure (1)..(399): unsure at all Xaa locations
  Clone ID: GOSHI-09MAY01-C10357_1.pep
GRVGGRVGGRVGGRVGPTAVMVATGVGASNGVLIXKGGDALERAQKVQYVIFDKTGTLTQGKAKVTTVKVFSEMDRGEFLTLVASAEASSEHPLANPFRPAAPPFHFFDENSLTEDAQYSSKGSPISAWLLDVAEFSAVPGRGIQCFIDGKQVLVGNRKLLTEGGVSISAHVEQFVVDLEEXARTGILAAYDGNVIGVLGVADPXLKREAAVVVEGPRVRPRGPPRVPGDNWRTAQAVAREVGFRDVRAEVMPAGKAEVVRSFQKDGSIVAMVGDGINDSPALAAADVGMAIGAGTDIAIEAADYVLMRNNLEDVITAIDLSRKTFSRIRWNYVFAMAYNVVAIPIAAGVLYPSLGIKLPPWAAGACMALSSVSVVCSSLLLRRYKKPRLTTILEITVE

SEQ ID NO: 69028 - protein, 103 aa, Gossypium hirsutum
  unsure (1)..(103): unsure at all Xaa locations
  Clone ID: LIB3166-025-P1-K1-A5.pep
LIKGGDALERAQKVQYVVCDKTGTLTHGKAKVTTVKVFSEMDRGEFLTLVASAEASSEHPLAKAIVEYARHFHFFYENSLTEDAQYXQQGSXISAWLLDVAEF

SEQ ID NO: 69029 - protein, 119 aa, Gossypium hirsutum
  Clone ID: GOSHI-09MAY01-C10327_1.pep
MDRLPSTTIFPDTTDDLSMQMAVIWGQIKAPLIVPLLKLAVVVCLIMSVILFIERVYMGIVIALVKLFGRKPDKRFKWEAIKDDVKLGNSAYPMVLVQIPMYNEKKVYQLSIGTACGLS

SEQ ID NO: 69030 - protein, 313 aa, Gossypium hirsutum
  Clone ID: GOSHI-09MAY01-C10267_1.pep
MQRVKAVLKARHSFQRLGILSHQRCLSAQPNYALYDDFEDQVLVEGRAKSRAAILNRPSALNALTASMAARLKRLYESWEENPDIGFVLMKGNGRAFCSGVDTVALHRLLNEGKVYECKRFFETLYKFVYLQGTYLKPHVAILDGITMGCGGGISLPGMFRLVTDKTVFSHPETQLGFHPDAGASFYLSRLPGYLGEYLALTGDKLNGVEMIACGLATHYCLNARLAWIEERLGNLMNDDPAAIDSSLAQYGDLVYPDRSSILRRIDTVDKCFSHDTVEEIIDSLENEAAGAYDDWCKTVLGKMKEASPLSLK

SEQ ID NO: 69031 - protein, 140 aa, Gossypium hirsutum
  unsure (1)..(140): unsure at all Xaa locations
  Clone ID: LIB3582-050-P1-K1-F12.pep
KLGIHFKDLGSSSKCFSAXPNYALYGDFEEQVLVEGRAKSRAAILNRPSALNALTASMAARLKRLYESWEENPDIGFVLMKGNGRAFCSGVDTGAPHRLLNEGKVYECKRFFETLYKFGYLQGTYLKPHWAILDGITMGC

SEQ ID NO: 69032 - protein, 101 aa, Gossypium hirsutum
  Clone ID: LIB3146-030-Q1-K1-B8.pep
LGFHPDAGASFYLSRLPGYLGEYLALTGDKLNGVEMIACGLATHYCLNARLAWIEERLGNLMNDDPAAIDSSLAQYGDLVYPDRSSILRRIDTIDKCFSHD

SEQ ID NO: 69033 - protein, 138 aa, Gossypium hirsutum
  Clone ID: GOSHI-09MAY01-C10217_1.pep
MAERIHPGDSPPSSGEHSNPKPAPPSSDKPIPQPGTYVVQIPKDQVYRVPPPENARRYAHLSKRKSSRSTCCRCCCCFLTTILSLLLAAAIAAAVIYFVLKPEAPNYSVGSVAIKGFNLTSPSPLSPEFDVTVRADNG

SEQ ID NO: 69034 - protein, 159 aa, Gossypium hirsutum
  Clone ID: GOSHI-09MAY01-C10237_1.pep
MAISALQKLTSQIHRLPYLSSQILTRSSATLTSSPSSSKKVADRLVKLFAIDPEGQKREVVGLAGQTLLRALTNSGLIDPDSHRLEEIDACSAECEVNIAQEWLEKLPPRTYDEEYVLVRNSRGRILNKHSRLGCQVVLTPHLQGMVVAVPEAKPWDIP

SEQ ID NO: 69035 - protein, 163 aa, Gossypium hirsutum
  unsure (1)..(163): unsure at all Xaa locations
  Clone ID: LIB3828-033-Q6-K6-F11.pep
PVDPAFASTLQKLGGGDDRVPYLSSQILTRSSATLTSSPSSSKKLXDRLVKLFAIDPEGQKREGGGGAGQTLLRALTNSGLIDPDSHRLEEIDACSAECEVNIAQEWLEKLPPRTYDEEYVLVRNSRGRILNKHSRLGCQVVLTPHLQGMVVAVPEAKPWDIP

SEQ ID NO: 69036 - protein, 117 aa, Gossypium hirsutum
  unsure (1)..(117): unsure at all Xaa locations
  Clone ID: uC-gsflnu33B085f02b1.pep
RSKILSSPNSTVNPYCVLPSPHPILHTLTCCPSSSKKVADRLVKLFAIDPEGQKREVVGLAGQTLLRALTNSGPIDPDSHRXEEIDACSAECEVNTDQEWLEKLPPRTYDEEYVLAR

SEQ ID NO: 69037 - protein, 211 aa, Gossypium hirsutum
  unsure (1)..(211): unsure at all Xaa locations
  Clone ID: GOSHI-09MAY01-C11937_2.pep
RGGGADAPSDYHIAPRXSENSTQNPNPAPGSAPPQIPQQPAAQQVPQPVVVPGGPLKKKRGRPRKYGPDGSVTMALSPKPPPAPAPPPVIDFSAAKRGKVKSPTPVSKAKFEVENIGEWVACSVGANFTPHIITVNAGEDVTMKIISFSQQGPRAICILSANGVISSVTLRQPDSSGGTLTYEGRFEILSLSGSFMPNDTGGTRKPIRWGP

SEQ ID NO: 69038 - protein, 123 aa, Gossypium hirsutum
  Clone ID: GOSHI-09MAY01-C11937_1.pep
MGTEVLRPQDCLIERIRFNPSYYHNYNNNNGNGRSNRKPVQRKRIGSEQGISKKYSSADDLKTIKIVDAKSSVTVKSDVYAGSAFSVSPAPSSLPLPTFSKKKQVPVDDSATRDLRRLLRLDL

SEQ ID NO: 69039 - protein, 64 aa, Gossypium hirsutum
  Clone ID: LIB3583-012-P1-K1-E5.pep
LNSHLNTTLLIDFTIKILNYNRRRVLVGDTETVALILVIIITTTITMEMVDLTRNPFIGSGSDW

SEQ ID NO: 69040 - protein, 145 aa, Gossypium hirsutum
  unsure (1)..(145): unsure at all Xaa locations
  Clone ID: GOSHI-09MAY01-C11927_1.pep
YVPLFLSFIVADHFSMAPQKSVETIGKNLRDQYEKWQPKXKVKVDPTVDEVKKLCNTCCRYAKLXRVLFHYNGHGVPMPTANGEIWLFNKIYTQYIPLPISNLDSWLKTPSIYVFDCSAARMVVCFPSLALSVAGMVGNAFIELF

SEQ ID NO: 69041 - protein, 180 aa, Gossypium hirsutum
  Clone ID: GOSHI-09MAY01-C11827_1.pep
MVSTISKIPTHSVFILLVLSSPKPPVSCFISTATATATVTDTAENRTQKLERIVDELLDLTRLERYDYSILFRLKLGLNCYGPAVSGVSSAAASGPGTGSSAAETKTAEKTAFDIKLEKFDAAAKIKIIKEVRTFTELGLKEAKDMVEKVPVVVKKGVTQEEAEAIIKKLQELGATVVLE

SEQ ID NO: 69042 - protein, 80 aa, Gossypium hirsutum
  Clone ID: LIB3166-044-P1-K1-E11.pep
PIANKYREEKTAFDIKLEKFDAAAKIKIIKEVRTFTELGLKEAKDMVEKVPVVVKKGVTKEEAEAIIKKLQELGATVVLE

SEQ ID NO: 69043 - protein, 312 aa, Gossypium hirsutum
  Clone ID: GOSHI-09MAY01-C11597_1.pep
PRVRAAATAALAAEKKEKEKAKEIKLASKSSILANKKKMNNVLTMWKQRSHEGQATRLTLDENHLSTSSEDRPLQSGQHAKTKVKFDVTGLKESSISSSGVNTTAQAALTGGLESPVKARPVSNSSGGTLMGVIRGSARGVVKSDTPYSGASAGISTSAVGGAEVSSTNSDMPTVMTPFRTDASALGSYTPSTVSASGKRRVSETPVTSTTSKEQSQTAYRDRAAERRNLYGSSSSTGDDLPDPELRNSNRDMAFKKFSSDPMPFPPGVGGGRGVVSDDVQSFEVITAEKAFDEKYEGIQMLRNMGWHEGLG

SEQ ID NO: 69044 - protein, 285 aa, Gossypium hirsutum
  Clone ID: GOSHI-09MAY01-C11537_1.pep
PRVRGRVGSAPVLSQHLLDLCKEDVESLCMTLGFEQLRSLCDKMDNKEALERAKLIQDARGYNSNRVQKKIDDTNGSHLNGSVDSNGSILSSSSSEKKEKPWTKEEIELLRKGTQKYPKGTSRRWEVISEYIGTGRSVEEILKATKTVLLQKPDATKAFDSFLEKRKPAATIASPLSTREEVEGVSMPSRTENTTVKTSSPEDSGKAASNPVDVVSGNGVSSSSEQDVWSAVQERALIQALKTFPKETSQRWERVATAVPGKTVNQCKKKFALLKENFRSKKSTA

SEQ ID NO: 69045 - protein, 46 aa, Gossypium hirsutum
  Clone ID: LIB3166-038-P1-K1-E8.pep
HFSCCCLNLSNFSCNAITQDLNLHNSQIPETKKKEKSKLKIRKACQ

SEQ ID NO: 69046 - protein, 55 aa, Gossypium hirsutum
  Clone ID: LIB3828-005-Q1-N6-C10.pep
HFSCCCLNLSNFSCNAITQDLLNLHNSQIPETKRKKNQSLVAGKGFQRAFGFNFR

SEQ ID NO: 69047 - protein, 196 aa, Gossypium hirsutum
  unsure (1)..(196): unsure at all Xaa locations
  Clone ID: GOSHI-09MAY01-C11777_1.pep
KNDAHMAIIDCHNARRIDSSSFRAHYCMAEALQQLGKHKEALDFAVAAQCLSPYDTMAVEKVENIKKHLAAAEAEKSNKASDGSHKGEPPTGRVLSLSDILYRSQANSDALQDGPRSEREDSDXDEELELHFETSISGDEGPVVGSNIFHGSLNLRIYRRGDSTRETGACGISFLFITKWEWLIKFTSLSLVMGLQ

SEQ ID NO: 69048 - protein, 126 aa, Gossypium hirsutum
  unsure (1)..(126): unsure at all Xaa locations
  Clone ID: LIB3166-043-P1-K1-H3.pep
GSLNLRIHRXGDSTRETGACGSPSSSSQNGVAYQPEAVIDMKRRYAGHCNVGTDIKQASFLGQRGEFVASGSDDGRWFIWEKQTGKLIKMLLGDGVVVNCVQSHPFDCFVATSGIDNTIKLWTPSA

SEQ ID NO: 69049 - protein, 232 aa, Gossypium hirsutum
  Clone ID: GOSHI-09MAY01-C11717_1.pep
PSFFINGQFSGSAFGTRKDRGFTFTGPVNLHAGANHIALVSVAVGLPNVGLHFETWKTGIVGVYSNGLDKGKKDLSSHKWSYQVGLKGEAMYLASPEGVSSVEWIQGSLATQSRQSMTWYKAYFDAPTGNEPLALDMRSMGKGQVWINGQSVGRYWMAYGNGECGKCSYSGTYRPTKCQSGCGHPTQRWYHVPRSCLKPKQNLLVVFEELGGDASKISLVRRSVLNRHHHNK

SEQ ID NO: 69050 - protein, 132 aa, Gossypium hirsutum
  Clone ID: LIB3145-008-Q1-K1-F7.pep
ITGPTDASAHASDLASPECFSSVEWIQGSLATQSRQSMTWYKAYFDAPTGNEPLALDMRSMGKGQVWINGQSVGRYWMAYGNGECSKCSYSGTYRPTKCQSGCGHPTQRWYHVPRTWLKPKQNLLVVFEELG

SEQ ID NO: 69051 - protein, 76 aa, Gossypium hirsutum
  Clone ID: GOSHI-09MAY01-C11697_1.pep
SATPFRPRVRSCSVFLSLVEKEGSLLCFDYFSMMMELFVLGCTGVVVFLHGANFFFHVLSQHLAVRSLSFLGFVGW

SEQ ID NO: 69052 - protein, 37 aa, Gossypium hirsutum
  Clone ID: LIB3149-039-Q1-K1-A8.pep
SNIYKSIMIHISICKKINESSPFSPLFGITTQQIPRN

SEQ ID NO: 69053 - protein, 59 aa, Gossypium hirsutum
  Clone ID: LIB3148-019-Q1-K1-D8.pep
NFKNIIILFIINIIFFFIFNFYLVCLFIFSKFIIFFLFLLFIFFFLVYPYFHFFSSFTF

SEQ ID NO: 69054 - protein, 60 aa, Gossypium hirsutum
  Clone ID: GOSHI-09MAY01-C11687_1.pep
MDFLNVRKKKVRRQRMTRMPFQNCPLQCTFYTHVRPVWDFSNALAYPGMILYMVLDMYTV

SEQ ID NO: 69055 - protein, 193 aa, Gossypium hirsutum
  unsure (1)..(193): unsure at all Xaa locations
  Clone ID: GOSHI-09MAY01-C11657_1.pep
KYYTDYKFXPVRTLALSGSTGHGTNIIAGVSLGLESTALPVLVISVSIISAFWLGHTSGLVDETGSPTGGLFGTAVATMGMLSTAAYILTMDMFGPIADNAGGIVEMSQQPDSVREITDVLDAVGNTTKATTKGFAIGSAALASFLLFSAYMDEVSSFAREPFKQVDIAIPEVFIGGLLGSMLIFLFRAWALR

SEQ ID NO: 69056 - protein, 210 aa, Gossypium hirsutum
  Clone ID: GOSHI-09MAY01-C11677_1.pep
MSTESSQRMPWSEVRRVSTDRGSDDKKLKTGFTGIYQYNGARDEGTFSDNTALDRHGLGSGSCVKERCNIACEEKGVPKDMGSGERFFPIGSDRARDIRMDWREELLVKDEDRAGDASPNLELALGAEMRPPNKGILPFFVGTADKSENLDKVTGKEEADDVSASLSLSLSFPFPETEGNVKSVSKTEQLLPESHGVNTSLLLFGGFPNK

SEQ ID NO: 69057 - protein, 123 aa, Gossypium hirsutum
  Clone ID: GOSHI-09MAY01-C11667_1.pep
KWLLDSLFHAPISFFFETNQQTQTHKGFFVSSSNFKFQLQILQAFEELSQCGTKDEGLPLDEFCDACSLVSGLFKLPRSRLQIPGDGVRRQAVDFFNQVNLLYGTLTKFCTPENCPTMTAGLK

SEQ ID NO: 69058 - protein, 124 aa, Gossypium hirsutum
  Clone ID: GOSHI-09MAY01-C11627_1.pep
ETLNSPRIFIGNLPASEMELSEDYTCVISHGSNPRTTHIFDDCIVESCCGVVGFSSPKRNGSSYQSENFLTYCYACKKNLSPGKDIYMYRSEKAFCSKECRYQEMMLEESTNKLESDDIFGTYS

SEQ ID NO: 69059 - protein, 149 aa, Gossypium hirsutum
  Clone ID: GOSHI-09MAY01-C11147_1.pep
GVTEPRIVVQTTSEVDLLDDGYRWRKYGQKVVKGIPYPSSYYKCTTPGCNVRKHVERASTDPKAVITTYEGKHNHDVPAARTSSHNTASSNATQGRTQNIVTVTNHGVNNSVDSTNDRQRPVARLRLIEDRIRNVSELQHGKSVIFQAM

SEQ ID NO: 69060 - protein, 181 aa, Gossypium hirsutum
  Clone ID: GOSHI-09MAY01-C11107_2.pep
RLQDASAHRQLTSILSPFHSKTLHQENLFFDTPANTLSSQLSVLRLRFLNKDARCIVSLKSKPTLVDGVSRVAEDEEELDPCSARACVEDPARLGKIESRILKRVKEEFGVGEEVGFVCLGGFENKREVFNWKNLKLVGDETKFGFGICHELECENDDPDGVHKLLEEFLKDMGLVIPTLT

SEQ ID NO: 69061 - protein, 187 aa, Gossypium hirsutum
  Clone ID: GOSHI-09MAY01-C11107_1.pep
MEGEIKLRLQDASAHRQLTSILSPFHSKTLHQENLFFDTPANTLSSQLSVLRLRFLNKDARCIVSLKSKPTLVDGVSRVAEDEEELDPCSARACVEDPARWGKIESRMVKWGKVGVEERIGENVKWVCVGGCESEREVWRRRSRVRRSERRKGVGEGSEMGELEGESEDQDEVDEGEWTSSLGEDGS

SEQ ID NO: 69062 - protein, 94 aa, Gossypium hirsutum
  Clone ID: LIB3148-049-Q1-K1-A7.pep
ILKRVKEEFGVGEEVGFVCLGGFENKREVFNWKNLKLEVDETKYGFGICYELECESEDPDGVKKLLEEFLKENGIGYSYSKMTKFAVFRSGKLP

SEQ ID NO: 69063 - protein, 55 aa, Gossypium hirsutum
  Clone ID: LIB3147-011-Q1-K1-A2.pep
IAPTLTPLPNFNASAFPPNGSRNQTPPSGRLRPPSINLLFDTPANTLSSQLSVLS

SEQ ID NO: 69064 - protein, 419 aa, Gossypium hirsutum
  unsure (1)..(419): unsure at all Xaa locations
  Clone ID: GOSHI-09MAY01-C11007_1.pep
GEGYPFTPERIQEXKDLEERXAKKEQSIKTILVSRSRDFVVTSDGSKVPVSELEGKTVGIYFSASSFKPSADFTQKLAEVYSKLKENGEKFEVVMISLDDDEESFKQSFGAPWLALPSKDKSCEKLARYFELSTLPTVVIIGPDGKTLHPNAADAIDEHGIVAYPFSPEKFAELKEIEKASEATQTLESVLVSGGLDFVLGKDGAKVKVADLVGKTILLYFSAHWCPPCRAFTPSLVEVYKKIKEKDDAFEVIFISSDRDQSSFDDYYSGMPWLALPFNDARKSSLSRKFKVQGIPMLIALGPTGKTITKEARSLVMAHGADAYPFTEERLKEIEAQIEEMAKGWPEKLKDERHEEHELVLTRRSNYVCNVCDEMGQVWSFYCEECDFDLHPKCALEKETKADAKEGWVCDGEVCTRAS

SEQ ID NO: 69065 - protein, 269 aa, Gossypium hirsutum
  unsure (1)..(269): unsure at all Xaa locations
  Clone ID: GOSHI-09MAY01-C11027_1.pep
MAMMTCRSLLLLLLISLFVSFGFAEIRFTEIRSDVRPIIPFDEFGFTHNGRLELNLSQIDLSDKNKNLDLNKIGFFLCTRDTWFHVLEQLNDHHVTCALDSELVKVVFRFKSLDGKTSINPVFPVNNADQYALLFANCLTQVKVSMTVRSAMYNIEGKQSRDYLSAGKTILPRVYFLLSLVYFSLARIWVYFLYKKRLTVFRIHFFMLAVIVLKAFNLVFEAQDKSYIQRTGSAHGWDVLFYIFSFLKGXMLFTLILLIGXGWSFLKLI

SEQ ID NO: 69066 - protein, 193 aa, Gossypium hirsutum
  unsure (1)..(193): unsure at all Xaa locations
  Clone ID: LIB3829-015-Q1-K6-B5.pep
NRSDVRPIIPFDEFGFTHNGRLELNLSQIDLSDKNXPLDSELVKVVFRFKSXXGKTSINPVFPVNNADQYALLFANCLTQVKVSMTVRSAMYNIEGKQSRDYLSAGKTILPRVYFLLSLVYFSLAGIWVYFLYKKRLTVFRIHFFMLAVIVLKAFNLVFEAEDKSYIKRTGSAHGWXMVLFYIFSFLKGIMLF

SEQ ID NO: 69067 - protein, 91 aa, Gossypium hirsutum
  unsure (1)..(91): unsure at all Xaa locations
  Clone ID: GOSHI-09MAY01-C11317_1.pep
MATKGFVLYLLSGFSIAVLSVLFIQKSNNDNMNQSSNLLESPYNLSTTEKVWPALELNWRLVMATVIGFLGSTCGTVXGGVGGGGIFVPML

SEQ ID NO: 69068 - protein, 121 aa, Gossypium hirsutum
  Clone ID: GOSHI-09MAY01-C11307_1.pep
MPLVHLFIRDMGLQRSAMAMLLLMMFTLSSALDMSIISYDEGHPDKSKSSWRTDDEVMVMYEEWLVKHGKAYNGLGEKERRFKIFKDNLRFIDEHNADESHSFKVGLNRFADLTIDEYRAM

SEQ ID NO: 69069 - protein, 134 aa, Gossypium hirsutum
  Clone ID: GOSHI-09MAY01-C11287_1.pep
SSHEPPTVVKCSPLDLNLGHGAVSGYGSPAVRLPFPQISPVAGFFANGVPAVAAPQVFYFDALVRPGVMKGQQYQQRLRFDHRDYHETFNAGVQSDSDSSSVVDLNHHEIKRRPLLNIDLNQPKKKITRERRKL

SEQ ID NO: 69070 - protein, 67 aa, Gossypium hirsutum
  Clone ID: LIB3147-023-Q1-K1-C4.pep
RDKIENLWVFLFRFLISAILKNHNQATSGAGWLRSILRSGRRLISWWFKSTTEDESESLCTPAPKVS

SEQ ID NO: 69071 - protein, 259 aa, Gossypium hirsutum
  unsure (1)..(259): unsure at all Xaa locations
  Clone ID: GOSHI-09MAY01-C11247_3.pep
NSSPMATAMVEDSSFEEDQLASMTTEDIVRASRLLDNEIRILKEEMQRTNLELDSXKEKVKENQEKIKLNKQLPYLVGNIVEILEMNPEDEAEEDGANIDLDSQSRGRPRVRKTSTRQTIFLPVVGLVDPDKLKPGDLVGVNKDSYLILDTLPSEYDSRVKAMEVDEKPTEDYNDIGGLEKQIQELVEAIVLPMTHKERFQKLGVRPPKGVLLYGPPGTGKTLMARACAAQTNATFLKLAGPQLVQMFIGDGAKLVRDA

SEQ ID NO: 69072 - protein, 172 aa, Gossypium hirsutum
  Clone ID: GOSHI-09MAY01-C11247_2.pep
VRDAFQLAKEKSPCIIFIDEIDAIGTKRFDSEVSGDREVQRTMLELLNQLDGFSSDERIKVIAATNRADILDPALMRSGRLDRKIEFPHPTEEARARILQIHSRKMNVHPDVNFEELARSTDDFNGAQLKAVCVEAGMLALRRDATEVNHEDFNEGIIQVQAKKKASLNYYA

SEQ ID NO: 69073 - protein, 423 aa, Gossypium hirsutum
  Clone ID: GOSHI-09MAY01-C11247_1.pep
MATAMVEDSSFEEDQLASMTTEDIVRASRLLDNEIRILKEEMQRTNLELDSYKEKIKENQEKIKLNKQLPYLVGNIVEILEMNPEDEAEEDGANIDLDSQRKGKCVVLKTSTRQTIFLPVVGLVDPDKLKPGDLVGVNKDSYLILDTLPSEYDSRVKAMEVDEKPTEDYNDIGGLEKQIQELVEAIVLPMTHKERFQKLGIRPPKGVPLAAPPASADAWVARACAAQTNATFLKLAGPQLVQMFIGDGAKLVRDAFQLAKEKSPCIIFIDEIDAIGTKRFDSEVSGDREVQRTMLELLNQLDGFSSDERIKVIAATNRADILDPALMRSGRLDRKIEFPHPTEEARARILQIHSRKMNVHPDVNFEELARSTDDFNGAQLKAVCVEAGMLALRRDATEVNHEDFNEGIIQVQAKKKASLNYYA

SEQ ID NO: 69074 - protein, 84 aa, Gossypium hirsutum
  Clone ID: LIB3145-038-Q1-K1-E5.pep
LRSQSEDYNDIGGLEKQIQELVEAIVLPMTHKERFQKLGIRPPKGVLLYGPPGTGKTLMARACAAQTNATFLKLAGPQLVQMFI

SEQ ID NO: 69075 - protein, 114 aa, Gossypium hirsutum
  Clone ID: LIB3493-051-P1-M1-A1.pep
MATAMVEDSSFEEDQLASMTTEDIVRASRLLDNEIRILKEEMQRTNLELDSYKEKIKENQEKIKLNKQLPYLVGNIVEILEMNPEDEAKEDGANIDLDSQRKGKCVVLKTSTRQ

SEQ ID NO: 69076 - protein, 55 aa, Gossypium hirsutum
  Clone ID: uC-gsronu33B132h05b1.pep
FYIKKTIYKWIVLFKRLPSFYLNKLVQQQIKIEREKKFNLKILYLNRKRKRKKSS

SEQ ID NO: 69077 - protein, 126 aa, Gossypium hirsutum
  Clone ID: GOSHI-09MAY01-C11237_4.pep
MGLLDQLWDDTVAGPRPDNGLGKLRKHSTFTFRSNSSKETDGGSVRSYNDETPEETTKVTRTIMIVKSPRYQSGSPPVSPAESTPPVSPFSGGSRESYRFRRRSTSDAYEKGKEGGGRSLAPPYDV

SEQ ID NO: 69078 - protein, 121 aa, Gossypium hirsutum
  unsure (1)..(121): unsure at all Xaa locations
  Clone ID: GOSHI-09MAY01-C11237_3.pep
MGLLDQLWDDTVAGPRPDNGLGKLRKHSTFTFRSNSSKESDGGSVRSYNDETPEETTKVTRTIMIVKSPRYQSGSPPVSPAESTPPEEAESRXRFRRRSTSDAYEKGKEGGGRSLAPPYDV

SEQ ID NO: 69079 - protein, 111 aa, Gossypium hirsutum
  Clone ID: GOSHI-09MAY01-C11237_2.pep
MGLLDQLWDDTVAGPRPDNGLGKLRKHSTFTFRSNSSKESDGGSVRSYNDETPEETTKVTRTIMIVKSPRYQSGSPPVSPAESTPPVSPFSGNIYTNNFLTDCRICPWFSS

SEQ ID NO: 69080 - protein, 126 aa, Gossypium hirsutum
  Clone ID: GOSHI-09MAY01-C11237_1.pep
MGLLDQLWDDTVAGPRPDNGLGKLRKHSTFTFRPNSAKESDGGSVRSYGDEAPEEATRVTRSIMIVKPPGYQSGSPPVSPAGSTPPVSPFSGGRESYRFRRRSTSDAYEKANEVGPRSPCPPPYDV

SEQ ID NO: 69081 - protein, 93 aa, Gossypium hirsutum
  unsure (1)..(93): unsure at all Xaa locations
  Clone ID: uC-gsflnu33B109d10b1.pep
MSSVPYLATNKIEYDSWLTRKVIKMEKLYEFXERLNXANDKCYKVKDYXGIIGATKTSIKAKHLVAQLIPRFFKFFLNLSSRAFNAHFDLIEE

SEQ ID NO: 69082 - protein, 53 aa, Gossypium hirsutum
  Clone ID: uC-gsflnu33B050d12b1.pep
DRPILRSDGDEAPEEATRVTRSIMIVKPAGYQSGAPKVSAGGSTLPVSPFSEN

SEQ ID NO: 69083 - protein, 103 aa, Gossypium hirsutum
  unsure (1)..(103): unsure at all Xaa locations
  Clone ID: LIB3146-044-Q1-K1-C2.pep
MGLLDQLWDDTVAGPRPDNGLGKLRKHSTFTFRPNSAKESDGGSVRSYGDEAPEEATRVTRSIMIVKPPGYQSGSPPVSPAGSTXSGGRESYRFRKRSTSDAY

SEQ ID NO: 69084 - protein, 115 aa, Gossypium hirsutum
  unsure (1)..(115): unsure at all Xaa locations
  Clone ID: LIB3493-055-P1-M1-E2.pep
FLVFXGLLDQLWDDTVAGPRPDNGLGKLRKHSTFTFRSNSSKESDGGSVRSYNDETPEETTKVTRTIMIVKSPGYQSGSPPVFPAESTPPGSSFSGDIYTNNFLTDWRICPWVSS

SEQ ID NO: 69085 - protein, 78 aa, Gossypium hirsutum
  unsure (1)..(78): unsure at all Xaa locations
  Clone ID: LIB3146-041-Q1-K1-A7.pep
RKKEIPEGSIRPAKPEAIRSGXXXKKTWHIARFSSLKEPNKFKYNIDWMRFHLLTSTYILHLNSSLQNRNKKGKLENN

SEQ ID NO: 69086 - protein, 74 aa, Gossypium hirsutum
  Clone ID: GOSHI-09MAY01-C11227_1.pep
MNLITPLYAFSTILWVLQAESKSGSNESALKVALHHGKASGVIKPHDRVVVCQMLGDASVVKILELEDYKLICG

SEQ ID NO: 69087 - protein, 78 aa, Gossypium hirsutum
  Clone ID: LIB3166-036-P1-K1-D12.pep
WTFSGAFEARQSLIVRGRFPMLADPRHPAESKSGSNESVLKVALDHGKASGVIKPHDRVVVCQKLGDASVVKILELED

SEQ ID NO: 69088 - protein, 106 aa, Gossypium hirsutum
  Clone ID: GOSHI-09MAY01-C12997_1.pep
MWSEIESVWVFPLASKWRTFSQESFAWSIFIILLAWLIMTLVYWAYPGGPAWGKYRFVNRSSLTAANKRRIPGPRGLPLIGSMKLMANSLAHHRIAAAAEACKAKR

SEQ ID NO: 69089 - protein, 252 aa, Gossypium hirsutum
  Clone ID: GOSHI-09MAY01-C12987_1.pep
MSSERVPVELSKGVNGLEKIILRETRGSSAEVYLYGGHVTSWKNEHGEELLFVSSKALFKPPKAIRGGIPICFPQFSNHGPLEPHGFARNRLWSIDTDPPAFPTNSSNKAYIDLILKPSEEDMKIWPHSYEFRLRVALGPGGDLMLTSRIRNTNTDGKPFTFTFAYHTYFSVSDISEVRVEGLETLDYLDNLLNKQRFTEQGDAITFEAEVDKIYLSTPTKIAILDHEKKRTLVLRKDWLPDAVVWNPWDKK

SEQ ID NO: 69090 - protein, 599 aa, Gossypium hirsutum
  unsure (1)..(599): unsure at all Xaa locations
  Clone ID: GOSHI-09MAY01-C12947_1.pep
ELGDNDDDEDDLAALERKMQSAGMPSNIWKHAQRELRRLKKMPPQQPGYNSSRVYLELLADLPWQKASEEQELDLKAAKDRLDCDHYGLSKVKQRIIEYLAVRKLKPDARGPVLCFVGPPGVGKTSLASSIAAALGRKFVRISLGGVKDEADIRGHRRTYIGSIPXPLIDGLKRVAVCNPVMLLDEIDKTGSDVRGDPASALLEVLDPEQNNSFNDHYLNVPYDLSKVIFVATANRVQPIPPPLLDRMEVIELPGYTAEEKLRIAMQHLIPRVLDQHGLNSEYLQIPEAMVKLVIQRYTREAGVRNLERNLAALARAAAVRVAEQDQAVSVSKDVHKLASPLLDNRLAEGAEMEMEVLPMGVNNNEISTAFVIASPLVVDEAMLEKILGPPRFDDREAADRVATPGVSVGLVWTAFGGEVQFVEATSVVGNGELHLTGQLGDVIKESAQIALTWVRARVADLKLAAAEETDLLQGKDIHIHFPAGAVPKDGPSAGVTLVTALVSLFSQKNVRADTAMTGEMTLRGLVLPVGGVKDKVLAAHCYGIKRVILPERNLKDLVDVPAAVLSSLEILVAKRMEDVLEHAFDGGCPWRQHQHSKL

SEQ ID NO: 69091 - protein, 101 aa, Gossypium hirsutum
  Clone ID: LIB3148-058-Q1-K1-E1.pep
RFDDREAADRVATPGVSVGLVWTNFGGEVQFVEATAMIGNGELHLTGQLGDVIKESAKIPLTWVKARPPNFKWPLAKKKMVLQVKNILFLFQLGPDQKNGP

SEQ ID NO: 69092 - protein, 155 aa, Gossypium hirsutum
  Clone ID: GOSHI-09MAY01-C12967_1.pep
NTFPVLGFQSNFALFPVAEDAATLQYVARISHGAPLGSTDLVVDLGGSFLWMDCNSGHVSSSYRLVSSCSVNCSRAKFHDLGSTSCLLNTNCYVSPYNGVTGSTSMGELVEDVIAVDSVDPSDVGQSTTVDHFLFACASTFHLQGLSSGAKGMMG

SEQ ID NO: 69093 - protein, 152 aa, Gossypium hirsutum
  unsure (1)..(152): unsure at all Xaa locations
  Clone ID: GOSHI-09MAY01-C12907_2.pep
MAEHLASIFGTEKDRVNCPFYFKIGACRHGDRCSRLHNRPTISPTLLLSNMYQRPDMITPGVDAQGQPIDPRKIQEHFEDFYEDIFEELSKFGEIESLNVCDNLADHMIGYVYVQFREEDQAAAALQALXGRLYSGRPIIADFXPVTDFREA

SEQ ID NO: 69094 - protein, 208 aa, Gossypium hirsutum
  Clone ID: GOSHI-09MAY01-C12907_1.pep
PGTTDATHACGPRALATAVEIESLNVCDNLAEHMIGNVYVQFREEDQAAAALQALQGRFYSGRPIIADFSPVTDFREATCRQYEENSCNRGGYCNFMHVKVIGRELRRKLFGRHRRYRGSRSRSRSASPRHRREREYREKSRDRDRDDHRDRNGRRPDRDRDRYDRESGSRRKHGSPRRSRSPPPAREGSEERRARIEQWNREREEKV

SEQ ID NO: 69095 - protein, 142 aa, Gossypium hirsutum
  Clone ID: GOSHI-09MAY01-C12927_1.pep
TLLALAGLRRLSMTENVTSVLPIDEMLPAVAQGAIGIACRSNDEKRANYLASLNHEETRLAVTCERAFLETLDGSCRTPIAGYASKDEDGNCIFKGLVASPDGTRVLETSRKGPYAFEDMVMMGKDAGKKLLSRAGPGFFDF

SEQ ID NO: 69096 - protein, 70 aa, Gossypium hirsutum
  Clone ID: GOSHI-09MAY01-C12897_3.pep
MGGGHGGSTTYKGLTLHHPKRWHVVTGKGLCAVMWFWVLYRAKQDGPVVLGWRHPWEGHDGHSHGHGDKH

SEQ ID NO: 69097 - protein, 70 aa, Gossypium hirsutum
  Clone ID: GOSHI-09MAY01-C12897_2.pep
MGGGHGGSTTYKGLTLHHPKRWHVVTGKGLCAVMWFWVLYRAKQDGPGVLGWRHPWEGHDDHSHGHGDKH

SEQ ID NO: 69098 - protein, 70 aa, Gossypium hirsutum
  Clone ID: GOSHI-09MAY01-C12897_1.pep
MGGGHGGSTTYKGVNLHHPKRWHVATGKGLCAVMWFWVLYRAKQDGPVVLGWRHPWEGHDDHSHGHGDKH

SEQ ID NO: 69099 - protein, 85 aa, Gossypium hirsutum
  Clone ID: LIB3149-053-Q1-K1-G11.pep
MGGGHGQSAAYKGLTLHHPKRWHVATGKGSSAVMWLWVLYRAKQDGTVVLGWLHPLVGHDDHSHSHGDKHYDVVPNVFCQFLPLQ

SEQ ID NO: 69100 - protein, 47 aa, Gossypium hirsutum
  Clone ID: LIB3146-027-Q1-K1-D9.pep
LICLWVRGTDADLECLLFIFFGVNKVMVKWDCKHNEMKTETSFMHYS

SEQ ID NO: 69101 - protein, 132 aa, Gossypium hirsutum
  Clone ID: LIB3582-021-P1-K1-B3.pep
PETKLEAKMVEAMQHRASKGTTIKSFNSIILKFPKIDHTLRKCKAIFEQFDEDSNGAIDHEELKKCLHKLQVCFTEEEIEDLFKACDMNEDMGIKFNEFIVLLCLVYLLKDNATEFEAVSFLTFLRFSLSFL

SEQ ID NO: 69102 - protein, 99 aa, Gossypium hirsutum
  Clone ID: LIB3166-058-P1-K1-A2.pep
MVGVVGKSESPETKLEAKMVEAMQQRASKGTTIKSFNSIILKFPKIDHTLRKCKAIFEQFDEDSNGAIDHEELKKCLHKLQVCFTEEEIEDLFKACDMN

SEQ ID NO: 69103 - protein, 186 aa, Gossypium hirsutum
  Clone ID: GOSHI-09MAY01-C12877_2.pep
MASGDLERGGRNGKNRANSYHQSSSPFYVENTDKQWTSWLVPMFVVANVAVFFVVMYINDCPNNNLGFEGSCVAKFLGKLSFQPLKENPLFGPSSHTLDKLGALNWSKVAHGKQGWRLITCIWLHAGVIHLLANMLSLGFIGIRLEQQFGFLRIGLIYLLAGFGGGTLSSLFLRDISSVGASGALF

SEQ ID NO: 69104 - protein, 160 aa, Gossypium hirsutum
  unsure (1)..(160): unsure at all Xaa locations
  Clone ID: GOSHI-09MAY01-C12877_1.pep
MASGDLERGGRNGKNRANSYHQSSSPFYVENTDKQWTSWLVPMFVVANVAVFFVVMYINDCPNNNLGFEGSCVAKFPGXLSFQPLEENPLLGPPPHTWDKWGPLIWTKVAHGKQGWRLITCIWLHAGVIHLLANMLSLVFIGIRLEQQSGFLRLAPFLRV

SEQ ID NO: 69105 - protein, 123 aa, Gossypium hirsutum
  unsure (1)..(123): unsure at all Xaa locations
  Clone ID: GOSHI-09MAY01-C12837_1.pep
RLHQQLCSNETSIILQKFLDFDFCLQPRGDSFTCRSVFNCMIVGSIPVFFXHQTTYPKSYSGFIHRDLVKNGTSSIKTVLQSYCKQEINQMREKVIQYIPKLVYAKPVKGFNHTKDAFRFSID

SEQ ID NO: 69106 - protein, 110 aa, Gossypium hirsutum
  unsure (1)..(110): unsure at all Xaa locations
  Clone ID: LIB3166-057-P1-K1-H6.pep
LXVKNRXTSLHYKPRSSKVTSXNKXXKPNXXEKGXIQYXFPNXSLXXKPEKGFKTIQRDAXRYRXLMEXLKRELKNQEXXLDSNGNDYKHTYVDSFFFIFIFLRTEQGKT

SEQ ID NO: 69107 - protein, 144 aa, Gossypium hirsutum
  Clone ID: GOSHI-09MAY01-C12587_1.pep
MVKSMNPKLVTVVEQDVNTNTSPFFPRFIEAYSYYSAVFDSLDATLPRESQDRMNVERQCLARDIVNIIACEGEERIERYEVAGKWRARMIMAGFKSCPMSSNVIDTIQKLIKEYCDRYKLKEDVGALHFGWEDKSLIVASAWS

SEQ ID NO: 69108 - protein, 137 aa, Gossypium hirsutum
  unsure (1)..(137): unsure at all Xaa locations
  Clone ID: GOSHI-09MAY01-C12547_1.pep
MSGLIEGLPDAVALRCLARVPFYLHPKLEIVSHSWRAAIRSPELFRARQELGSTEELLCVCAFDPENLWQMYDPLRDLWITLAVLPSQVRHLAHLGVVSTGGKPDVLGGVSEDSYPLTXDQEGRLATNEVWAYDPGL

SEQ ID NO: 69109 - protein, 101 aa, Gossypium hirsutum
  Clone ID: GOSHI-09MAY01-C12457_4.pep
FLVVSVSCSTEVTCVEEEAVLSLDAYILLYAKQGIPWFSTAIEVQKPCADPGISDSSPKSVLDDIDFASNLEVEKSANCSANETKDVADRASTQFSCDVFN

SEQ ID NO: 69110 - protein, 90 aa, Gossypium hirsutum
  Clone ID: GOSHI-09MAY01-C12457_3.pep
EELRYQLFAVVKHSGFRPTAGHYVCYIRSSPNIWHKMNDSRVTCVEDEAVLSLEAYIGLYAKQGIPCFSTVIEVQKPCADPGISDSSPKS

SEQ ID NO: 69111 - protein, 156 aa, Gossypium hirsutum
  Clone ID: GOSHI-09MAY01-C12457_1.pep
EEFKGYVFKIKGGCDKQGFPMKQGVLTPGRVRLLLHRGTPCFQGYGRRNGERRRKSVRGCIVSQDLSVLNLVIVKKGENDLPGLTDTEKPRMRGPKRASKIRKLFNLSKEDDVRKYVNTYRRSFTTKSGKKASKAPKIQRLVTPLTLQRKRARIAE

SEQ ID NO: 69112 - protein, 150 aa, Gossypium hirsutum
  unsure (1)..(150): unsure at all Xaa locations
  Clone ID: LIB3828-024-Q6-K6-B11.pep
LRGTRAGGGGXDKQVPMKQECYSWSVRLLLHRGPLASRIGRRTVREEEVCSRGGGVKIFVLNLVIVKXGENDLPGLTDTEKPRMRGPKRASKIRKLFNLSKEDDVRKYVNTYRRSFTTKSGKKASKAPKIQRLVTPLTLXRXRARIADIF

SEQ ID NO: 69113 - protein, 77 aa, Gossypium hirsutum
  Clone ID: GOSHI-09MAY01-C12767_1.pep
MATEQPKPQNEDINMDLFEDDDEFEEFEIDGEWDDKEEGKEEGKEVTQQWEDEWDDDDVSDDFSLQLRKELENNTKN

SEQ ID NO: 69114 - protein, 55 aa, Gossypium hirsutum
  Clone ID: LIB3189-052-P1-K1-H6.pep
KQVSKTCLYCYLKYKFFACFSFNTNYYFFFYFFFFFYLFLIYYFLSLLFYIYLFF

SEQ ID NO: 69115 - protein, 156 aa, Gossypium hirsutum
  unsure (1)..(156): unsure at all Xaa locations
  Clone ID: GOSHI-09MAY01-C12737_3.pep
MLRRALGLLPRPIAAARARSFSTDLPAAHTADATFMEAWNKVMPNTDPPKTPLSFMHPRPPTPSSIPPKLTVNFVLPYASELSTKEVDMVIVPATTGQMGVLPGHVATIAQLKPGVLSVHEXSETSKYFVSSGCVFIHANSFADIIAVEAVPLDQI

SEQ ID NO: 69116 - protein, 201 aa, Gossypium hirsutum
  Clone ID: GOSHI-09MAY01-C12737_1.pep
MLRRASMLLACRSILAARARPFSTDLPAAPSADATFTEAWTKVIPNMDPPKTPLSFMQPRPPTPSSIPSKLTVNFVLPYASELATKEVDMVIVPATTGQMGVLPGHVATIAELKPGVLSVHEGSEMTKYFVSSGFVFIHANSFADIIAVEAVPLDRLDVNLVQKGLAEFTSKLSSATTDLEKAEAQIGIDVHSALNSALTG

SEQ ID NO: 69117 - protein, 122 aa, Gossypium hirsutum
  Clone ID: LIB3825-018-Q1-K6-G11.pep
VLIADIEKNQQNQGIWTSCYDHARCIYGGLTSSSSAEVQHVSFSPTSSNQVDMVIVPATTGQMGVLPGHVATIAELKRGVLSVHEGSETTKYFVSSSFVFIHANSFADIIAIEAVPLDRIDV

SEQ ID NO: 69118 - protein, 150 aa, Gossypium hirsutum
  Clone ID: GOSHI-09MAY01-C12667_1.pep
MIFQPDVAKKILKIPLAETEHKDFQVWRGELTGDFSFRSAYKLLHESTLDPNNLILHIETKDFYSKLWKLQILSKIKMTIWRISWNFIPSFINLKIKRVVVNTQCPRCDREEENSCHIFQQCPRSLLKEPMHGGDFSVVVSEKIWFPTRP

SEQ ID NO: 69119 - protein, 296 aa, Gossypium hirsutum
  Clone ID: GOSHI-09MAY01-C12627_1.pep
WYVRVNVIEAQDLVPADKSRFPDAYVKVQIGNQILKTKPVQTRNMNPIWNEEFMFVAAEPFEDHLTFTVEDHAGPNKDETIGRTVIALNSIDRRADDRFVRTRWYNLEKSLSDAMDSDRAKKDKFHSRLHVCVCLDGGYHVLDESTQYSSDLRPTAKQLWKSSIGVLELGILNADGLQPMKTRDGKGASDTYCVAKYGHKWVRTRTIVNSLNPKYNEQYTWEVYDTATVLTVGVFDNSQIGGSDNTRDNKIGKVRIRISTLETGRVYTHCYPLLVLHPSGVKKLGELHLAIRFSST

SEQ ID NO: 69120 - protein, 291 aa, Gossypium hirsutum
  unsure (1)..(291): unsure at all Xaa locations
  Clone ID: GOSHI-09MAY01-C12107_1.pep
MAGTGVFSDILDGDVYKYYADGEWKKSSSGKTVAIINPTTRKTQYKVQACTQEEVNKVMESAKTAQKSWAKTPLWKRAELLHKAAAILKEHKAPIAECLVKEIAKPAKDAITEVVRSGDLISYTAEEGVRILGEGKFLVSDSFPGNQRTKYCLTSKIPLGVILAIPPFNYPVNLAVSKIAPALIAGNSLVLKPPTQGAVSALHMVHCFHLAGFPKGLISCVTGKGSEIGDFLTMHPGVNCISFTGGDTRIAISKKAGMIPLHMEFGGKDACIELEDAYXDLVAANIIKGGF

SEQ ID NO: 69121 - protein, 191 aa, Gossypium hirsutum
  Clone ID: GOSHI-09MAY01-C12087_1.pep
GVPQCIDKLAQAGLKIWVLTGDKMETAINIGFACSLLRQGMKQICITTISSDTKTLIKENILMQITNASQMIKLEKDPHAAFALIIDGKTLAYALEDDMKQQFLGLAVLCASVICCRVSPKQKALVTRLVKEGTGKTTLAIGDGANDVGMIQEADIGVGISGVEGMQAVMASDFSVAQFCFLERLLVVHGH

SEQ ID NO: 69122 - protein, 198 aa, Gossypium hirsutum
  unsure (1)..(198): unsure at all Xaa locations
  Clone ID: GOSHI-09MAY01-C12007_1.pep
MASFITPAILKIFLIISLFQICLGVRKLSEVVEEQPQLLKYHNGPLLSGPITVNLIWYGKFRPSERAIISDFVTSLSSNPSSPSLKTQPTVAQWWRTTEKYYHLASKKSSLSLSLGKQILDEHYSLGKSLKKKQIVELASKGDQKYAINVVLTASDVAREXGFALTLCGTHGSALSSTMGIWSAKLAYIWVGNAHTHC

SEQ ID NO: 69123 - protein, 107 aa, Gossypium hirsutum
  Clone ID: GOSHI-09MAY01-C12367_1.pep
TIDNRVPNDYLLQTELKEFSKKLWSLQLPSKITFTIWRISWDFILNFANLRYRRVTVNDRCPRCYSTVEESVHVYRECPLGLQEKRQRVNVYFSATLYGCYGTPDLN

SEQ ID NO: 69124 - protein, 119 aa, Gossypium hirsutum
  Clone ID: LIB3166-051-P1-K1-F5.pep
PNDYLLQTELKEFYKKLWSLQLPSKITFTIWRISWDFIPNFANLRYRRVTVNDRCPRCCSAVEESVHVFRECPLGLQGKRQRSVSTFLPCSMDVMVLQKSTSTPEKNGRVGGRVGGRVG

SEQ ID NO: 69125 - protein, 109 aa, Gossypium hirsutum
  Clone ID: LIB3493-022-P1-M1-A4.pep
VPNDYLLQTELKEFYKKLWSLQLPSKITFTIWRISWDFILNFANLRYRRVTVNDRCPRCYSAVEESVHVFRECPLGLQEKRQRSMSTFLLRSMDVMVRVRESILMQRST

SEQ ID NO: 69126 - protein, 160 aa, Gossypium hirsutum
  Clone ID: GOSHI-09MAY01-C12247_1.pep
ALIIAQLVATVIAVYANWGFARIQGIGWGWAGVIWLYSVVFYIPLDLMKFAIRYILSGKAWLNLLENKTAFTTKKDYGKEEREAQWALAQRTLHGLQPPEASNLFNDKSSYRELSEIAEQAKRRAEVARLRELHTLKGHVESVVKLKGLDIDTIQQHYTV

SEQ ID NO: 69127 - protein, 36 aa, Gossypium hirsutum
  Clone ID: LIB3148-002-P1-K1-D2.pep
WLNGRQLFLIIYLQESIGKKVDLQLRIKIEVEDYMA

SEQ ID NO: 69128 - protein, 190 aa, Gossypium hirsutum
  unsure (1)..(190): unsure at all Xaa locations
  Clone ID: GOSHI-09MAY01-C12227_1.pep
MAVEARHLNIFSSQFITNSHSRVFIKSNQGIGDIYNTQMDSCVPLIDSNSMHEGSQLLPLYQPLLCHPNISANKADSGLTTYNMSIPVSAPRKRSRDXSPMALIRIRSLKTSTFLVLPQTLMMMSSPRSNNNMILDRLYSDHPEKLRLEVEERRKRQSRMFITAIQERVMKKLKEKDEEIQEIGKLNWVL

SEQ ID NO: 69129 - protein, 56 aa, Gossypium hirsutum
  Clone ID: LIB3166-049-P1-K1-H5.pep
NRPTRPLSLNLFDILSFIYIYICVCVVMLIYFRCSLLVEIQRLSLSFLQWQLKLGI

SEQ ID NO: 69130 - protein, 67 aa, Gossypium hirsutum
  unsure (1)..(67): unsure at all Xaa locations
  Clone ID: LIB3147-035-Q1-K1-B12.pep
GXPRVXWKTNTLSCFMIHLQLSEXKDPKIMLCPIPTIHVFSRYSFIVVYMDCKYACWVYVTLLDNNV

SEQ ID NO: 69131 - protein, 65 aa, Gossypium hirsutum
  Clone ID: LIB3189-023-P1-K1-C8.pep
LFLFIFFFFFFFIIFFYIFFFYFFFFNKNNRLTRHLPFPYIVINMAYQMFIFMLLYLTLLSSKVT

SEQ ID NO: 69132 - protein, 139 aa, Gossypium hirsutum
  Clone ID: GOSHI-09MAY01-C13967_2.pep
MANAASGMAVHDDCKLKFLELKAKRTYRFIVFKIEEKQKQVVVEKLGEPSQSYDDFTASLPADECRYAVYDFDFVTAENCQKSRIFFIAWSPDTSRVRSKMIYASSKDRFKRELDGIQVELQATDPTEMGLDVIRSRAN

SEQ ID NO: 69133 - protein, 139 aa, Gossypium hirsutum
  Clone ID: GOSHI-09MAY01-C13967_1.pep
MANAASGMAVHDDCKLKFLELKAKRTYRYIVFKIEEKQKQVVVEKLGEPSQSYDDFTSSLPADECRYAVYDFDFVTAENCQKSRIFFIAWSPDTSRVRSKMIYASSKDRFKRELDGIQIELQATDPTEMGLDVIRSRAN

SEQ ID NO: 69134 - protein, 72 aa, Gossypium hirsutum
  unsure (1)..(72): unsure at all Xaa locations
  Clone ID: GOSHI-09MAY01-C13807_12.pep
GCNCGSSCNYATRXPCDLRHDIRSMAKTTSTQTMMXGEAPAKMTFEGPEMSTTASGHGCKCGSNCSCDPCNC

SEQ ID NO: 69135 - protein, 94 aa, Gossypium hirsutum
  Clone ID: GOSHI-09MAY01-C13807_11.pep
HAYGVCLLNSGGCFFKDFGGSPRCNCGSSCSCGDSCSCSRNLNLGYSEKTTSTQTIISGVAPVKMTFEGPEMSTTESGHGCKCGSNCSCDPCNC

SEQ ID NO: 69136 - protein, 115 aa, Gossypium hirsutum
  Clone ID: GOSHI-09MAY01-C13807_8.pep
YKPRAATDIYFYKILTPTDKTINQVTMNEQQKSFGEKDNLLPTKWLIHYFHHKQSFYYTRHRQRHNYRPCRHPSLTIYHYRGLLFLLLSFFHNLGHAGSKTRGRTRGRTRGRKNG

SEQ ID NO: 69137 - protein, 57 aa, Gossypium hirsutum
  Clone ID: GOSHI-09MAY01-C13807_6.pep
MRQNLNLGYSEKTTSTQTIIFGVAPVKMTFEGPEMSTTESGHGCKCGSNCSCDPCNC

SEQ ID NO: 69138 - protein, 93 aa, Gossypium hirsutum
  unsure (1)..(93): unsure at all Xaa locations
  Clone ID: GOSHI-09MAY01-C13807_4.pep
FRVCLLNSFPHLGEKLKCLQGCNCGSSCTCGDSCSCSTNLNLGLLXEKTTSSQTIISGVAPVKMTFEAPQMSTTESRHACKCGSNCSCDPCNC

SEQ ID NO: 69139 - protein, 79 aa, Gossypium hirsutum
  Clone ID: GOSHI-09MAY01-C13807_3.pep
MSSGCNCGSSCSCGSGCNCGENCSMNLNLGYSEKTTSTQTIISGVAPVKMTFEGPEMGTTESGHGCSCGSSCKCNPCTC

SEQ ID NO: 69140 - protein, 75 aa, Gossypium hirsutum
  Clone ID: GOSHI-09MAY01-C13807_2.pep
MSSGCNCGSNCSCGDNCSCSRNLNLGYSEKTTSTQTIISGVAPVKMTFEGPEMSTTESGHGCKCGSNCSCDPCNC

SEQ ID NO: 69141 - protein, 201 aa, Gossypium hirsutum
  unsure (1)..(201): unsure at all Xaa locations
  Clone ID: uC-gsronu33B028b06b1.pep
SYACLLFFVLLYYLIFFFIYFLIFFFFIYFLFFLFSFFFFFYFFFYFFLFYFFFFLFYFLCLNFFIYFLILYFSFYFIFFYSFYFFTFSFFFNFFIVFFLLYYLFYLXIFNLLYFFYFLLLSLMCLSFFYFIFFFAYCFLFINLFLYIFYFYXFLFFCFFYFLLLFYLLFSFLFFYSFXFFFFYFNFISLFNFILYILLLF

SEQ ID NO: 69142 - protein, 49 aa, Gossypium hirsutum
  Clone ID: uC-gsflnu33B055c07b1.pep
MSSGCNCGSNCSCGDICSCSRNLNLGYSEKTTSTQTIIYGVAPVWMILE

SEQ ID NO: 69143 - protein, 89 aa, Gossypium hirsutum
  Clone ID: uC-gsflnu33B050e01b1.pep
KPKTATDISFYKSLSPTNKTISQVTMNEPQILLVIMKICSQPNALYIIVTSTKASITQASQIHNYRPCMHPSLKINHYRGLLFYCFLFS

SEQ ID NO: 69144 - protein, 71 aa, Gossypium hirsutum
  Clone ID: uC-gsronu33B005e01b1.pep
PWILAVVHQFFIPLLFSFILFNDLFEFFFIPHFFNPFFIFSSFSLFFLYLPFFLAFFSSFFSPHFFFSLFF

SEQ ID NO: 69145 - protein, 78 aa, Gossypium hirsutum
  unsure (1)..(78): unsure at all Xaa locations
  Clone ID: uC-gsflnu33B073c08b1.pep
MSPGCTSGSNCSCGDNCSCNMNLNLGYSEKTTSTXPLSSXAAPVKMTYEGPDMSTTESGHGCKCGLNRFCDPLQLLKS

SEQ ID NO: 69146 - protein, 62 aa, Gossypium hirsutum
  Clone ID: uC-gsronu33B164a11b2.pep
MSSKNPLDKRKICSQPNGLYIIFTTNKASITQDRQRHNYGPCAHPSLIINPSRGLLFCCFLF

SEQ ID NO: 69147 - protein, 70 aa, Gossypium hirsutum
  Clone ID: uC-gsronu33B168a02b1.pep
YKPRAATDIYFYKILTTTDKTINQVTMNEQQKSFGEKDNLLPTKWLIHYFHHKQSLYYTRHRQRHNSEEW

SEQ ID NO: 69148 - protein, 96 aa, Gossypium hirsutum
  Clone ID: uC-gsronu33B147g07b1.pep
LFNSCMDRNSGLIHALHPCRDSVVLISGSSKVIFTGADSGDDRLSVGGFFDVTKVKGSWCMSSWHHSSSCFRGAVPETLFYKNHPQVVCSRSRTRG

SEQ ID NO: 69149 - protein, 77 aa, Gossypium hirsutum
  Clone ID: uC-gsronu33B086d12b1.pep
PSRPPTRPPTRSCSCGDSCSCSRNLNLGYSEKTTSTQTIISGVAPVKMTFEGPEMSTTESGHGCKCGSNCSCDPCNC

SEQ ID NO: 69150 - protein, 80 aa, Gossypium hirsutum
  Clone ID: uC-gsronu33B029b08b1.pep
FGLSIEFFPSLSRKKKCLQVAIADLTAAAVTTAHAAGTLTLDIRRRQPVLRPSFSVLFQCRLTFRNHRQVLYYLLKVSLS

SEQ ID NO: 69151 - protein, 325 aa, Gossypium hirsutum
  unsure (1)..(325): unsure at all Xaa locations
  Clone ID: GOSHI-09MAY01-C13577_1.pep
MKAIVITTGGGPEVLQLQQVEDPELKDDEVLIKVEATALNRADTLQRKGSYPPPKGACPYPGLECSGTIQAPGKNVLGWRVGDQVCALLXGGGYAEKVAVPAGQVLPIPLGVSLKEAAGLPEVACTVWSTVFMMSRLSARETFLVHGGSTGAGAFAIQIAKSKGATGFATAGNEEKLAFCKSLGADLCINYKTEDCVACIKEETGGKGVDVILDCIGAAYLQRNLDSLNFDGRLCIIGLQGGAVTEIKLNTPRPRRLTVHGAALRPRNPENKAMVVNEVEKNVWPEIVAGKVKPIIYKSFPLSEAGEAHKLMESNEHIGKILLVP

SEQ ID NO: 69152 - protein, 69 aa, Gossypium hirsutum
  Clone ID: LIB3146-022-Q1-K1-C5.pep
NQWTKQFKQLQCKPASFFERKPQCGDWKNVDHAGTCHLSQQYPTSTREAAHLDHNHAPCPEHVLAKGYG

SEQ ID NO: 69153 - protein, 146 aa, Gossypium hirsutum
  Clone ID: GOSHI-09MAY01-C13537_2.pep
MKLINRLSPKHLFRSNKKGPSTVSKFDPSSYTTSGSASSSSSESVSSVHKGNQYPLAPTVGTGTPTSVLPETSVDWLDFSANFYVELCQAFKTMDKDNDGVITRSEVEALLSKFARQPPSQEEISSMLGEVDGDGDGCISLETLMN

SEQ ID NO: 69154 - protein, 186 aa, Gossypium hirsutum
  unsure (1)..(186): unsure at all Xaa locations
  Clone ID: AI730684.1.pep
MKLINRLSPKHLFRSNKKGPSTVSKFDPSSYTTSGSASSSSSESVSSVHKGNQYPLAPTVGTGTPTSVLPETSVDXSEVEALLXKFARQPPSQEEISSMLGEVDGDGDGCISLETLMNXVAGPACEPELRETSDIFDTDHDGKITAEELMASYNEKLXDEKCTLKDCRLMIXSVDKNGDGFVCFDD

SEQ ID NO: 69155 - protein, 207 aa, Gossypium hirsutum
  unsure (1)..(207): unsure at all Xaa locations
  Clone ID: GOSHI-09MAY01-C13477_1.pep
RLLARARSAPAFPRFVLLSESCIPLHSFDYVYDYLMHANMSFVDCFFDPGPHGHGRYSKHMLPVVXKEWLPIGRQHALVVMADSLYYSRFRDYCKRGFDGKNCIADEHYLPTFFHIIDPGGIANWSVTHVDWSERKWHPKSYRARDVTYELLKNITSIELSVHVTSDEKREEQVQACLWNGVRRPCYLFARKFYPETLHKLMKLHNF

SEQ ID NO: 69156 - protein, 106 aa, Gossypium hirsutum
  Clone ID: LIB3584-042-P1-K1-E7.pep
VTFLSCYFRCIFINSSLVFSWQGHEGKFSVYVHASKEQPVHVSRYFLNQEIHSDKVGWGKISMVDAERRLLAHALKDPDNQQFVLLSESCIPLHSFDYVYDYLMHA

SEQ ID NO: 69157 - protein, 285 aa, Gossypium hirsutum
  unsure (1)..(285): unsure at all Xaa locations
  Clone ID: GOSHI-09MAY01-C13467_1.pep
MQDALGREAREKHERLEREKQQREREEEERQQRRYELEREREEKEREQRRLEKEREQERARQAVQRATREARERAAAEARVRAERAAVEKAAAEARERAERAAVQRAQAEARQRAAAEARERAERAAAEAREREAKEKEAQEKAERAEAKLRAERAAAEKAAAEARERAAASARASQQNNDNDLESFFSMGSRPSSAPRPRTNSSDPLFDGQNKGGPEVARGTSAGSSSSMRKASSSANIGDDLSSIFGAAASSFGEFQEVDGETEEXRRARLDASKDSERAAKH

SEQ ID NO: 69158 - protein, 156 aa, Gossypium hirsutum
  Clone ID: GOSHI-09MAY01-C13797_1.pep
MASTSRKIMLRSSDGETFEVEEAVAVESQTIKHMIEDDCADNEIPLPNVTSKILSKVLEYCKKHVDAAADKEKTPDDELKAWDADFVKVDQNTLFDLILAANYLNIKSLLDLTCQTVADMIKGKTPEEIRKTFNIKNDFTPEEEEEVRRENQWAFE

SEQ ID NO: 69159 - protein, 77 aa, Gossypium hirsutum
  Clone ID: GOSHI-09MAY01-C13787_1.pep
MIRWWISSFQLAELFISSVVHLLYGFYVYSTAGAADLSQALSECVFKSNVSLEVKKQDPSKSTVDDLPLLFWFMAFL

SEQ ID NO: 69160 - protein, 319 aa, Gossypium hirsutum
  unsure (1)..(319): unsure at all Xaa locations
  Clone ID: GOSHI-09MAY01-C13747_1.pep
RTLRQAMARWVTRAIKFRFCPILEEAQAKSEPVDLQDVLLRLTFDNICGLAFGKDPETCAQRLPENGFASAFDRATEASLQRFILPEVLWKLKKWLRLGLEASLSRSLVHMNEYLSDVIVTRKQELLSQQKDGNPHDDLLSRFMRKKESYSEEFLQHVALNFILAGRDTSSVALCWFFWLLTQHPIIEDKILHEICTVLVETRGIDTTTWFDEPLGFEEVDRLIYMRAALSETLRLYPSVPEDSKHVVVDDVFPDGTFVPXGSSVTYSIYSVGRMRSIWGDDCLQFRPERWLTADGKEFIMHDSYKFVAFNAGPRICLG

SEQ ID NO: 69161 - protein, 105 aa, Gossypium hirsutum
  Clone ID: GOSHI-09MAY01-C13767_1.pep
DAWVAEASVLLVTCIVLFSGHGVFAFSYDEAATMECLAAPKRAQYGGGMIGFNQRTNGSTLSSELGVSNDGLHNTTLSLKTVKLEKGNLYTFSALGSKSAMGSEK

SEQ ID NO: 69162 - protein, 204 aa, Gossypium hirsutum
  Clone ID: GOSHI-09MAY01-C13707_1.pep
MECVFGLVGNDFAIVAADTSAVHSILVHKSNEDKIMILDSHKLIAASGESGDRVQFTEYIQKNVALYQFRNGIPLTTAAAANFTRGELATALRKNPYFVNILLAGYDKETGPSLFYIDYIATLHKVDKGAFGYGSYFSLAMMDRHYHSGMTVEEAIDLVDKCIMEIRSRLVVAPPNFVIKIVDKDGAREYAWRESVKDAAVPSA

SEQ ID NO: 69163 - protein, 53 aa, Gossypium hirsutum
  Clone ID: LIB3825-029-Q6-K6-H1.pep
NTKYTKFAFIMPGPNIPIVHLSLHISFISHFDPSIYTFLNLVLNTHFLSKIIN

SEQ ID NO: 69164 - protein, 187 aa, Gossypium hirsutum
  unsure (1)..(187): unsure at all Xaa locations
  Clone ID: LIB3583-007-P1-K1-H9.pep
MDCVFGFVGNGFAVVAADTSAVHSILVHKSNEDKIMVLDSHKLIAASGESGDRVQFTEYIQKNVALYQFRNGIPLTTAAAANFTRGELATALRKNPYFVNILLAGYDKETGPSLYYIDYIATLHKVDKGAFGYGSYFSLSMMDRHYHSGMTVEEAIDLVDKCIMEIRSRLVVXPPNFXIKIVDKDGA

SEQ ID NO: 69165 - protein, 53 aa, Gossypium hirsutum
  unsure (1)..(53): unsure at all Xaa locations
  Clone ID: uC-gsflmaxxa009b05b1.pep
FVNILFSGYDKETGPSLFYIDYIATLHKVDNGAFXYGSYFSLAMMDRHYHSGM

SEQ ID NO: 69166 - protein, 60 aa, Gossypium hirsutum
  Clone ID: LIB3165-032-P1-K1-A11.pep
REKSRMTVEEAIDLVDKCIMEIRSRLVVAPPNFVIKIVDKDGAREYAWRESVKDAAVPSA

SEQ ID NO: 69167 - protein, 69 aa, Gossypium hirsutum
  Clone ID: uC-gsflmaxxa009h08b1.pep
MEGVFCLVGNDFAIVAADTSAVHSILVHKSNEDKIMILDSHKLIAASGEFGDRVQFTEYIQKNVVLYQI

SEQ ID NO: 69168 - protein, 62 aa, Gossypium hirsutum
  Clone ID: LIB3493-018-P1-M1-G10.pep
TADTWTADNIVVNKCNVNTIMITDAEGSFAASGESGDRVQFTEYIQKNVALYQFRNGIPLTT

SEQ ID NO: 69169 - protein, 94 aa, Gossypium hirsutum
  Clone ID: GOSHI-09MAY01-C13727_1.pep
NRRVSASLSPRATTSSGRFGERLSSSPIKAITQGSASLISASSTPPPDFRPPSTLATLPSPDFSREIVRITSESRDFSSSGHRTGWRWWWRVDA

SEQ ID NO: 69170 - protein, 98 aa, Gossypium hirsutum
  Clone ID: GOSHI-09MAY01-C13677_1.pep
NPTGYLPGRMAPLMNFYGFMSLAFVILGIFWFLQYARFWREVLPLQNCITLVITLGMLEMALWYFDYAEFNDSGTRPVAFSLRAVICVLWAPSQNSTR

SEQ ID NO: 69171 - protein, 142 aa, Gossypium hirsutum
  unsure (1)..(142): unsure at all Xaa locations
  Clone ID: LIB3147-006-Q1-K1-G11.pep
RLFLVLPVAILDAFFILWIFTSLSSTLNKLQTRRMVAKLDIYRKFTNALAVAVIVSVGWICYEIYFKANDVYNEQWQNAWIIPAFWQILSFSLLCVICVLWAPSQNSTRYAYSGEANEDFDKDDTNLTLIKPSPTPSKDXRT

SEQ ID NO: 69172 - protein, 76 aa, Gossypium hirsutum
  unsure (1)..(76): unsure at all Xaa locations
  Clone ID: LIB3189-014-P1-K1-E7.pep
PGRMAPLIXFYFFMSLAFVIRRIFWVLEDARFWREVLPLQNCITLVITLGMLEMSLFYFYHSYLNNIIIHSCIISS

SEQ ID NO: 69173 - protein, 134 aa, Gossypium hirsutum
  Clone ID: GOSHI-09MAY01-C13617_1.pep
MDKLREFGRKALFYVRVLSGYEEPRIRNYRLQLEQRLQQAQARKAALRKIPEQTVLQEVRRMVEDMQALNKRLEETEAAIEEYFKPIDKEVETIMKIQLDGEEKTMKEMMATMQRQALLEKMEAEKIANTHQPD

SEQ ID NO: 69174 - protein, 59 aa, Gossypium hirsutum
  Clone ID: GOSHI-09MAY01-C13177_1.pep
KILKIRALPPFDLLSEDLCYRIFDRQDSTKGLSHNINNIKMDCAKIHRSFFITYSSYSS

SEQ ID NO: 69175 - protein, 52 aa, Gossypium hirsutum
  Clone ID: GOSHI-09MAY01-C13127_5.pep
MDQYEKVEKIGEGTYGVGYKARDRVTNETIALKKIRLKQEDEGVPSTAIREI

SEQ ID NO: 69176 - protein, 343 aa, Gossypium hirsutum
  Clone ID: GOSHI-09MAY01-C13127_1.pep
EYIPSRLFLFPFPQLTHHVSLGKSNPDWVTRALICTILILFSSGGSVHEGPVPEKVEKIGEGTYGVVYKARDRVTNETIALKKIRLEQEDEGVPSTAIREISLLKEMQHGNIVRLQDVVHSEKRLYLVFEYLDLDLKKHMDSCPEFGKDPRMIKTFLYQILRGVAYCHSHRVLHRDLKPQNLLIDRRTNALKLADFGLARAFGIPVRTFTHEVVTLWYRAPEILLGSRHYSTPVDVWSVGCIFAEMVNQRPLFPGDSEIDELFKIFRILGTPNEDTWPGVTSLPDFKSSFPKWPAKDLATVVPNLESTGIDLLSKMLCMDPSKRITARSALEHEYLKDIGFVP

SEQ ID NO: 69177 - protein, 106 aa, Gossypium hirsutum
  Clone ID: LIB3829-011-Q6-N6-B1.pep
SVGCIFAEMVNQRPLFPGDSEIDELFKIFRILGTPNEDTWPGVTSLPDFKSAFPKWPAKNLATVVPNLESAGIDLLSKMLCMDPSKRITARSALEHEYLKDIGFVP

SEQ ID NO: 69178 - protein, 184 aa, Gossypium hirsutum
  unsure (1)..(184): unsure at all Xaa locations
  Clone ID: AI726445.1.pep
MLESIISYSKYLNRNKRYIHLVSSSSPLLNLLTLSLEIKSDCHLSLFVHFDSSRLVELHMDQYEKVEKIGEGTYGVVYKARDRVTNETIALKKIRLKQEDEGVPXTAIREISLLKEMQHGNIVRLQDVXHSEKRLYLVFEYLDLDLKKHMDSYPEFGKDPRMIKAFLYQILRGVAYCHSHRVLH

SEQ ID NO: 69179 - protein, 156 aa, Gossypium hirsutum
  Clone ID: LIB3829-011-Q6-K6-B1.pep
MDQYEKVEKIGEGTYGVVYKARDRITNETIALKKIRLEQEDEGVPSTAIREISLLKEMQHGNIVRLQDVVHSEKRLYLVFEYLDLDLKKHMDSCPEFGKDPRIIKTFLYQILRGIAYCHSHRVLHRDLKPQNLLIDPCTNALKLADFGLARTFGIP

SEQ ID NO: 69180 - protein, 148 aa, Gossypium hirsutum
  unsure (1)..(148): unsure at all Xaa locations
  Clone ID: LIB3493-032-P1-M1-E9.pep
MWQSFYSPISLTILLKHLVTYKTIALKKIRLYLXYYGVPNTAIREISLLKEMQHGNIVRLHDVVHSEKPLYLVFEYLDLDLKKHMDSCPKFGKDPRIIKTFLYQILRGLSYCHSYRVLHRDLKPQNLLIDRPSNALKLAYFCLPPHFV

SEQ ID NO: 69181 - protein, 124 aa, Gossypium hirsutum
  unsure (1)..(124): unsure at all Xaa locations
  Clone ID: LIB3493-024-P1-M1-F1.pep
MDQYEKVEKIGEGTYGVVYKARDRITNETIALKKIRLEQEDEGVPSTAIREISLLKEMQHGNIVRLQDVVHSEKRLYXVFEYLDLDXEKHMDSCPEFGKDPRIIKTFXYQILRGIAYCHSHRVL

SEQ ID NO: 69182 - protein, 136 aa, Gossypium hirsutum
  Clone ID: GOSHI-09MAY01-C13087_1.pep
MSGIMHKIEETLHMGGHKKEEEKHKGEAHHEGGHGYGAAEHKGEVHHEGGHGYGYGAAEHKGEVHHEGGHGYGAAAAAGHGHGHGEQQKEGFMDKIKDKIHGEGGHEHGHEGEKKKKKEKKKHEDGHESSSSSDSD

SEQ ID NO: 69183 - protein, 46 aa, Gossypium hirsutum
  Clone ID: LIB3147-038-Q1-K2-C11.pep
KGPPLFLKGPPLFFFFFFLYFFFFFFFFFFFFFFFFFFFFFFFFFF

SEQ ID NO: 69184 - protein, 110 aa, Gossypium hirsutum
  unsure (1)..(110): unsure at all Xaa locations
  Clone ID: GOSHI-09MAY01-C13007_1.pep
PLSISLNSSFSSLIPFQRVKLVGSTSKATTRSFFLTARAMAELVKDKESGVAAAGGGXMDIEHSRTFLEARSEEELLSGIKKEVEARRLPSNVAAGMEEFYRNYKNAVNC

SEQ ID NO: 69185 - protein, 112 aa, Gossypium hirsutum
  unsure (1)..(112): unsure at all Xaa locations
  Clone ID: GOSHI-09MAY01-C13357_1.pep
MDLENGTVRYEDEYITNSRGLKLFTCRWLPVNEEPKALIFLCHGYXMECSITMNSTAIRLVKAGYAVYGIDYEGHGKSSGLQGYISKFSHVVDDCSDYFTDICEKKENKKKM

SEQ ID NO: 69186 - protein, 69 aa, Gossypium hirsutum
  Clone ID: GOSHI-09MAY01-C13337_2.pep
SVRGRLNFLHCVYLVFSLFVCLMGFTSLQVCMDSSDWLQGMTQEVPGMDSSSPCGDILTCSRPLIERRA

SEQ ID NO: 69187 - protein, 123 aa, Gossypium hirsutum
  unsure (1)..(123): unsure at all Xaa locations
  Clone ID: GOSHI-09MAY01-C13337_1.pep
MSIKTNHFHPLFLFLTISFLIATVAYPIDALESRKLDESTVPGDQGIKCTPSCVQSPPPPSPSSPSPPPPSPPALPPPTPKKVXSQYCPPPPSPPSFIYITGPPGNLYPIDQNFGAASRTFEM

SEQ ID NO: 69188 - protein, 86 aa, Gossypium hirsutum
  Clone ID: LIB3272-052-P1-K1-A11.pep
REVEPINQPTKLKTKYTQCIQFNLPLTLLPHIHLFVYMCVGFDRHSDKSHWSDMNKEVNVMLPSYQCIKGFECETGFLLVKLGRPK

SEQ ID NO: 69189 - protein, 68 aa, Gossypium hirsutum
  Clone ID: LIB3189-008-P1-K1-D3.pep
RSSRSRAARSRSIFSKRNPVSHAMALLHLWLGYITSTFLFTVDQSYSPVSQSNPTINILYFYFRPYAI

SEQ ID NO: 69190 - protein, 114 aa, Gossypium hirsutum
  Clone ID: GOSHI-09MAY01-C13287_1.pep
NLYFDFLFFPFGFLSFLFGYKAFVSIVRRGSPFEKILKTYAKAKQGKAIRRKEGDFPFSFFKLSALPVFFIYSSPLLLHHQQEKRKVMKLTCVPKPSSFRLFRHHRNTVAIWGW

SEQ ID NO: 69191 - protein, 444 aa, Gossypium hirsutum
  Clone ID: GOSHI-09MAY01-C13267_1.pep
MREILHVQAGQCGNQIGGKFWEVVCDEHGIDASGNYVGTSPVQLERLNVYYNEASGGRYVPRAVLMDLEPGTMDSLRTGPYGKLFRPDNFVFGQNGAGNNWAKGHYTEGAELIDSVLDVVRKEAENCDCLQGFQVCHSLGGGTGSGMGTLLISKIREEYPDRMMLTFSVFPSPKVSDTVVEPYNATLSVHQLVENADECMVLDNEALYDICFRTLKLTNPSFGDLNHLISTTMSGVTCCLRFPGQLNSDLRKLAVNLIPFPRLHFFMVGFAPLTSRGSQQYRALTIPELTQQMWDSKNMMCAADPRHGRYLTASAMFRGKMSTKEVDEQMINVQNKNSSYFVEWIPNNVKSSVCDIPPTGLTMSSTFMGNSTSIQEMFRRVSEQFTVMFRRKAFLHWYTGEGMDEMEFTEAESNMNDLVSEYQQYQDAVVDEDGEGYEDEAEEN

SEQ ID NO: 69192 - protein, 111 aa, Gossypium hirsutum
  unsure (1)..(111): unsure at all Xaa locations
  Clone ID: GOSHI-09MAY01-C13217_1.pep
MALFSGHQHSIITFFSIILLVFLDGVTAATFTFINKCDYTVWPGILANPGSPKLESTGFEPTKGSSRPFQAPTGWAGRFWXRTGCNFDDSGHGSCATGDCGSGEMECNGAG

SEQ ID NO: 69193 - protein, 126 aa, Gossypium hirsutum
  Clone ID: GOSHI-09MAY01-C8984_1.pep
MSQFSSMFNGLARSFSIRRGKNPGNGDGREAAEVMAKDAKKNDLILRSSGFVNIDGSNNFASVFSKRGRKGVNQDCTIVWEEFGCQADMLFCGIFDGHGPWGHFVAKKVRESMPSSLLCNWQETLA

SEQ ID NO: 69194 - protein, 163 aa, Gossypium hirsutum
  Clone ID: GOSHI-09MAY01-C8974_3.pep
SNPTKNAECTPEEAFSIVGDNIIFASGSPFRDVDLGNRQIGHSNQGNNMYLFPGIGLGTLLSGSRIISDGMLQAAAERLAAYMTEDEVLKGMIFPPISKIRDITKEVAAAVVKEAVEEDLAEGYRDIDARELQKICQNEEEVLEYVENSMWSPEYPTLVYKRG

SEQ ID NO: 69195 - protein, 130 aa, Gossypium hirsutum
  unsure (1)..(130): unsure at all Xaa locations
  Clone ID: GOSHI-09MAY01-C8974_2.pep
KPFFNLAKQVRQVRPDVLLGLSGVGGLFSXEVLEALKGSTSAKPAIFAMSNPTKNAECTPEEAFSIVGDNIIFAXGSPFRDADLGKGQIGHSNXQGNNMYLFPGIGLGTLLSGSRIISDGMLQAAAERCG

SEQ ID NO: 69196 - protein, 319 aa, Gossypium hirsutum
  Clone ID: GOSHI-09MAY01-C8974_1.pep
MDKNLMDKVSAFGELLKTEGAEVGRKMSAGMSSVSFKVKELFQGPNPADKLVDDATSEALDEPDWALNLDICDMINHEKISSVELIRGIKRKIMLKNPRVQYLSLVLLETCVKNCEKAFSEVAAERVLDEMVKLIDDPQTVVNNRNKALMLIEAWGESTSELRYLPVYEETYKSLKSRGIRFPGRDNESLAPIFTPPRSVSAAEVDASLANQFQHDMQLQHDTPPQAFTAEQTKEAFDVARNSIELLSTVLSSSPHQDALEDDLTTTLVQQCRQSQSTILRIIDTAGDNEALLFEALNVNDEIQKALSKFEELNEPSAV

SEQ ID NO: 69197 - protein, 86 aa, Gossypium hirsutum
  Clone ID: LIB3083-078-Q1-L1-D7.pep
MDKNLMDKVSAFGERLKVEGAEVGRKVSAGMSSMSFKIKELFQGPNPTDQLVEDATSDALDEPDWAMNFDICDMINHERVNSVDLI

SEQ ID NO: 69198 - protein, 85 aa, Gossypium hirsutum
  Clone ID: LIB3493-029-P1-M1-F10.pep
MDKNLMDKVSAFGERLKVEGAEVGRKVSAGMSSMSFKMKELFQGPNPADQLVEDATSEALDEPDWAVNLDICDMINHERVNSVDL

SEQ ID NO: 69199 - protein, 149 aa, Gossypium hirsutum
  Clone ID: GOSHI-09MAY01-C8924_1.pep
MTSIMGTEDDKYSTINFEETELRLGLPGANGNDGETTKNNGKRGFSETVNLKLNLSSKETVAEDSDKMKEKSSTDPAKPPAKAQVVGWPPVRSFRKNIMAVQKASSEEEGGSKKAGNSAAAITTTTAAAFVKVSMDGAPYLRKVDLKLY

SEQ ID NO: 69200 - protein, 106 aa, Gossypium hirsutum
  Clone ID: uC-gsflmaxxa046c02b1.pep
MTSIMGTEDDKYSTINFEETELRLGLPGANGNEGETTKNNGKRGFSETVNLKLNLSSKETVAEDSDKMKEKSSTDTAKPPAKAQVVGWPPVRSFRKNIMAVQKASS

SEQ ID NO: 69201 - protein, 207 aa, Gossypium hirsutum
  unsure (1)..(207): unsure at all Xaa locations
  Clone ID: GOSHI-09MAY01-C8894_1.pep
MRKRNMGFSKLFVIILGLLLALTLDQCTAQEFRCSSPSSCRALVGYITVNNTNLGAIQSLFNVTSFQSLLGANDLPLSTPRNRTIAARHLIRVPINCACYNGTGTSSGGPTYTIQPGDGLYHIAAEVFSQLVLFPQIAAANNISNPDXIAAGDTLQIPLPCSCDDIDGQKVVHYAHVVEPYSTLXEAQEFGTNEATLLRLMYHGQIR

SEQ ID NO: 69202 - protein, 174 aa, Gossypium hirsutum
  Clone ID: GOSHI-09MAY01-C8864_1.pep
KGRIISSSSTFYQSPKSPIFKTFSQLFHPLHQIQLILQRNFLPFSFLSIQVSSSFNPNLCFFLFSILFCLRGINKGCKNLDFISLFRETLILLFRSVESFQFFFFRRIWPSGLSGRGNSSGSKGFDFGSDDILCSYEDYWNQESSNGSHAEAALGTSTTSLFTDFHKGRVARSI

SEQ ID NO: 69203 - protein, 257 aa, Gossypium hirsutum
  Clone ID: GOSHI-09MAY01-C8834_1.pep
ALSEELAEIDGQVADIFRALSNGFQKLEKIKDVNRQSRQLEELTDKMRECKRLIKEFDREVKETERRTDANTHKMLNEKKQSMVKELNSYVALKKQHQSNLENNKRVDLFDGPSEGFGEENVWLASSMTNQQLMDSGNHMMDETDQAIDRAKKVVQDTVDVGTETAAALKAQTEQMSRIVNELDSIHFSIKKASKLVKEIGRQVATDKCIMALLFLIVIGVIAIIIVKLVNPNNKDIRDIPGLAPPAMNRRLLWTPN

SEQ ID NO: 69204 - protein, 163 aa, Gossypium hirsutum
  Clone ID: GOSHI-09MAY01-C8824_3.pep
MFWQFITFGFACTPLYFVWEKVIGMHDTRSICLRALARLPVVIPIWFLAIIFPFFGPINSAVGALLVSFTVYIIPALAHMLTYRKASARQNAAEKPPFFMPSWTGMYALNAFIVVWVLVIGFGFGGWASMTNFIRQIDSFGLFAKCYQCKPPTPTSPAAAMHH

SEQ ID NO: 69205 - protein, 372 aa, Gossypium hirsutum
  Clone ID: GOSHI-09MAY01-C8824_2.pep
NVNFKNHVIQWFEVLDGLLGPYWKALGLAFNCTFLLFGSVIQLIGCASNIYYVNDKLDTRTWTYIFGACCATTVFIPSFHNYRIWSFLGLGMTTYTAWYLAIAALVHGQAEGVTHSGPTKLVLYFTGATNILYTFGGHAVTVEIMHAMWKPQKFKYIYLLATLYVFTLTLPSAAAVYWAFGDELLNHSNAFSLLPKNGFRDAAVILMLIHQFITFGFACTPLYFVWEKVIGMHDTKSICLRALARLPVVIPIWFLAIIFPFFGPINSAVGALLVSFTVYIIPALAHMLTYRKASARQNAAEKPPFFLPSWTAMYAFNAVVVVWVLVVGFGFGGWASMTNFIRQIDTFGLFAKCYQCKPPPPTGAAAAAANHH

SEQ ID NO: 69206 - protein, 100 aa, Gossypium hirsutum
  Clone ID: GOSHI-09MAY01-C8824_1.pep
LLWTSSWHYKNKRTNHVKLKYRDQIPNLNIIEGPNRNLTISSLSQRERKKKPANDFHVFLHMLYHILGEIAIFSPTCLVCWIFALCFSYFFLFFSFKFLH

SEQ ID NO: 69207 - protein, 101 aa, Gossypium hirsutum
  Clone ID: GOSHI-09MAY01-C8584_1.pep
MEDRKEKNAPWLSVPQFGDWDQKGQVPDYSLDFSKIREMRKQNKREVSRASLGNEEEFINPTANTVSTTPSDDHHHNYPQNHHSPSTRREFFSYFNCCVKA

SEQ ID NO: 69208 - protein, 163 aa, Gossypium hirsutum
  Clone ID: GOSHI-09MAY01-C8574_1.pep
METKSSGVAGGGSVSESSTMILHNAVVVTMDSDCRVFQNGAVFIDKDKIKAIGQSPDILQQFSHVAHHILDLHGQILLPGFVNTHVHTSQQLGRGIADDVDLMTWLHHRIWPYESNMTEEDSYISTLLCGVELIHSGVTCFAEAGGQHVTGMARAVLWLGLRA

SEQ ID NO: 69209 - protein, 370 aa, Gossypium hirsutum
  Clone ID: GOSHI-09MAY01-C8504_1.pep
RIHQQGGYAANLAPAKLVDKLLNFFDSTAHLVVGSLPPPAPSASNGNFQGNDQFHQQTGPRVSASQSTMAMSSLMPSSSMEPISDWAGRGADGKMTMHNRSVSEPDFGRTPRQVDSSKEAEASTTQVKASGSVGASRFGFGFGSQLLQKTVGLVLRPRSDKQAKLGEKNKFYYDEKLKRWVEEGAEPPAEEPALAPPPTTAAFQNGRSDYNLNSTLNSEVSPSNGSPELKNLTPVEPASGVPPIPTISNQFSARGRMGVRARYVDTFNQGGGGQANLFQSPAVPSVKPAMAANAKFFIPIPASTNEQMMEAIAENAQEENGTSNNPTTSNANEFYESALNIQKFPSVDNITKTANGFPLHSRRTASWSGS

SEQ ID NO: 69210 - protein, 244 aa, Gossypium hirsutum
  Clone ID: GOSHI-09MAY01-C8464_1.pep
MLNLWNLLFLSFVHFSSFSVTLGGVSGNPFTPKSSFIRYWNKELHKEIPNTHFLLSKVSPLTAVDSASFSKLAAHNNLASRLPSFCSSAKLFCFPDLSPSLEKHSKDVNFAVYLDRNFTNYDSDRLAGLDSFKNYSENDNVVIDSFRRYSRDSAGHKDQFSNYASASNVVDQSFNTYGGAATGGSGNFNNYNHEVNVPNLRFTSYSDDSNGHGQTFTHYTVETNAGQQSFSNYGKNCNGVPNDF

SEQ ID NO: 69211 - protein, 217 aa, Gossypium hirsutum
  unsure (1)..(217): unsure at all Xaa locations
  Clone ID: GOSHI-09MAY01-C8774_1.pep
RGRSFGGRYRTIAISTGILMTLEVYSRLILPLXRKSKGKPGLTNLQRLAIGLVLSTLGMAGAALAEKKRLAVARTVGANTTTLPISVFMLIPQFFLVGAGEAFIYTGQLDFFITQSPKGMKTMSTGLFLTTLSLGFFVSSFLVSVVKKVTGSNDGQGWLADNINHGRLDCFYGLLAVLGVINFVLYLVCAVWYKPKNPKPALQMETIVNGSSAENKC

SEQ ID NO: 69212 - protein, 227 aa, Gossypium hirsutum
  Clone ID: GOSHI-09MAY01-C8704_1.pep
MDARFGLLFLFMLGATWACNARQLEVVEVVISDPSVVQVNWRQDEKVIETVARNDNVCTLCEEFTTEAVDYLSQNKTQTEIIEILHKSCSRLRAFEPQCITLVDYYAPLFFLEISSVQPQDFCTKFNLCQKVALISSQFREDSCGMCHRAISEVLMKLQDPDTKLEILELLLKGCNSVQNYVQKCKRLVFEYGPLILANAEHFLETTDVCTILHACDGGKQESVADS

SEQ ID NO: 69213 - protein, 172 aa, Gossypium hirsutum
  Clone ID: LIB3828-012-Q1-K6-F4.pep
MDARFGLLFLFMLGATWACNARQLEVVEIEISDPSVVQVNWRQDEKVIETVARNDNVCTLCEQFTTEAVDYLSQNKMQTEIIEILHKSCSRLRAFEPQCITLVDYYAPLFFLEISSVQPQDFCTKFNLCQKVALISSQFREDSCSMCHRAISEVLMKLQDPDTKLEILELLL

SEQ ID NO: 69214 - protein, 170 aa, Gossypium hirsutum
  Clone ID: GOSHI-09MAY01-C8724_1.pep
MAESSNNVVETINRDCHDFKSLLSSSDRDFLVRNNGDQVKIDSLKGKKVGLYFSASWCGPCRRFTPNLIEVYTELSTKGDFEVIFISADEDEESFNGYFSKMPWLAIPFSDSEARKRLDEPYSVKGIPHLVLLDENGKVLTEEGVVIFREFGEEGYPFAPEKIQELKDLE

SEQ ID NO: 69215 - protein, 119 aa, Gossypium hirsutum
  unsure (1)..(119): unsure at all Xaa locations
  Clone ID: LIB3493-041-P1-M1-G6.pep
LEGDDGWIVIIFHFSICKFFFILFNFFLSCFRLLYLYFVLIFFLFFAIFLLLYLXFFVFLIFFFCLIDYFSLFCIIFKHXFINFLLFFVIFFFFFLFFSCFFEFILLFVILFFFFVLIF

SEQ ID NO: 69216 - protein, 98 aa, Gossypium hirsutum
  Clone ID: LIB3166-023-P1-K1-B9.pep
HTSGSTSLSAAHYFKSLVFFLYRYFLIRNNCDHVKIYSLKGKKVGLYFSSSWCVPCLRFTPNTIEFFTVLSTKGDFKVIFIFSDEDEESFNGYCSKIP

SEQ ID NO: 69217 - protein, 141 aa, Gossypium hirsutum
  Clone ID: GOSHI-09MAY01-C8684_1.pep
MKKVELIFVPTPGAGHLAPTVVFVKRLIHHDDRILVTILSIEWHSSGFADAYTESLATLQSDRIQVIQVSRVDPPPLHLWTLAPEAFVYALIQSYIPHVRNAVTNILSMKSTSDSTRVAGLVLDLFCSPMVDVATELGLSS

SEQ ID NO: 69218 - protein, 123 aa, Gossypium hirsutum
  unsure (1)..(123): unsure at all Xaa locations
  Clone ID: GOSHI-09MAY01-C8664_1.pep
MPPNSSSAAIHSPKKTNSSSTSLHLQPFSFLWLLLFIVSLQVTILFMARAAPFYNRRTHFPNPVSDPCSSGRIFVYNLPPVFNEELLDNCHELDPWNSRCEALSNGGLGRXATGLSGVVPEEL

SEQ ID NO: 69219 - protein, 73 aa, Gossypium hirsutum
  Clone ID: uC-gsflnu33B036a01b1.pep
RGTLWLLLFIVSLHVTILFMARAAPFYNRRTHFPNPVSDPCSSVRIFGYNLPPVYNEQVLDNSHALDRRNFTP

SEQ ID NO: 69220 - protein, 67 aa, Gossypium hirsutum
  Clone ID: GOSHI-09MAY01-C8614_1.pep
MLQGLMNLLSVCWNPFGHEVESHETNGVLGGGDGGGSGGSREGKDGLLWFRDIGKYGSGEFSMAVIQ

SEQ ID NO: 69221 - protein, 144 aa, Gossypium hirsutum
  Clone ID: GOSHI-09MAY01-C8624_1.pep
MASLATLAGVQPTTIKGLGGSSLNGTKLLVKSTRQSFKPKNYRAGAVVAKYGDKSIYFDLEDIGNTTGQWDLYGSDAPSPYNPLQSKFFETFAAPFTKRGLLLKFLILGGGSLGLYLSATASDDLLPIKKGPQLPPKPGPRGKI

SEQ ID NO: 69222 - protein, 96 aa, Gossypium hirsutum
  Clone ID: LIB3148-023-Q1-K1-A6.pep
MASLATLAGVQPTTIKGLGGSSLNGTKLLVKSTRQSFKPKNYRAGAVVAKYGDKSIYFDLEDIGNTTGQWDLYGSDAPSPYNPLQSKCIAYGSVSI

SEQ ID NO: 69223 - protein, 294 aa, Gossypium hirsutum
  Clone ID: GOSHI-09MAY01-C8124_1.pep
MERIRRASHAGSWYTDNPKKLAEELDGWITAAGLPKSSDVRGVIAPHAGYSYSGRAAAYAFGNIDPTNISRVFLLGPSHHYYTPKCALSTATVYKTPIGDLPIDLEVIEELKATGKFELMNLRVDEAEHSMEMHLPYLVKVFEGHSVKVVPILGGALSAENEAMYGKLLAKYVDDPHNFFSVSSDFCHWGSRFNYMHYDKKYGAIHKSIEALDKMGMDIIETGDAVAFKQYLSEYDNTICGRHPISVFLHMLSNSSTRIKIKFLRYEQSSQCKTTRDSSVSYASAAAKVGSWKM

SEQ ID NO: 69224 - protein, 93 aa, Gossypium hirsutum
  unsure (1)..(93): unsure at all Xaa locations
  Clone ID: LIB3165-025-P1-K1-G2.pep
SWYTDNPNKLSXELDGWIRAVVXPKSSEVRGVITLDAGXTSSGRAAANAFGNIDPTNMTWQFLIGPSHQDNTSKCSFWTATGYMTPIGDLTID

SEQ ID NO: 69225 - protein, 184 aa, Gossypium hirsutum
  unsure (1)..(184): unsure at all Xaa locations
  Clone ID: GOSHI-09MAY01-C8094_2.pep
MSTASSLCSSTQINGFGGGLGVLRTHVSQPKTLSFTRRRISTVVKATSRVDKFSKSDIIGSPSILSANFAKLGEQVKAVEVAGCDWIHVDVMDGRFVPNITIGPLVVDALRPVTDLPLDVHLMIVEPEQRVPDFIKAGADIVSVHCEQSSTIHLHRTLNQIKGLGAKAGVXLNPATPLTTIEYV

SEQ ID NO: 69226 - protein, 279 aa, Gossypium hirsutum
  Clone ID: GOSHI-09MAY01-C8094_1.pep
RRAVFDKKRDGKRKLKMSTASSLCSSTQVNGFGGGLRLLRTHLSQPKSFSFTRRRTATVVKATARVDKFSKSDIIVSPSILSANFAKLGEQVKAVEVAGCDWIHVDVMDGRFVPNITIGPLVVDALRPVTDLPLDVHLMIVEPEQRVPDFIKAGADIVSVHCEQSSTIHLHRTLNQIKGLGAKAGVVLNPATPLTTIEYVLDVVDLVLIMSVNPGFGGQSFIESQVKKISDLRRMCAEKGVNPWIEVDGGVGPKNAYKVIEAGANALVAGSAVFGAKDY

SEQ ID NO: 69227 - protein, 135 aa, Gossypium hirsutum
  Clone ID: GOSHI-09MAY01-C8024_1.pep
MDYLKTVVPSQLLAERGSNLVVINPGSANIRVGLAKQDSPFSIPHCIARRSNQLPKLNVQDQLLNSQVTTAQHMEREKAYDVIASLLKIPFLDEEVANNSIPRKMGRVDGYNPQNPRKDGAFTWTDTHVKDLDSS

SEQ ID NO: 69228 - protein, 170 aa, Gossypium hirsutum
  unsure (1)..(170): unsure at all Xaa locations
  Clone ID: GOSHI-09MAY01-C8394_1.pep
MASWNSVFLSWLKNFSNIFKYKMDEVQLGSHTIRSHGLTIARTHMHDWLILVLLVVIWVVILIIHPFYRFVGKDMMDDLRYPLQSNTVPVWAVPMYAVLLPMLIFIFVYIRRRDVYDLHHAVLGXLLFSGLVTAVITDSIKNAVGRPRPDFFWRCFPDGKDVYDKWGNVI

SEQ ID NO: 69229 - protein, 244 aa, Gossypium hirsutum
  Clone ID: GOSHI-09MAY01-C8384_1.pep
TPGIVYQCNLGTETPDMKIFREISVPGFDRSEYEVNQVFVPSKDGTKIPMFIVGRKNINLDGSHPCLLYGYGGFNISLTPTFSVSRIVLTRHLGAFYCVANIRGGGEYGEEWHKAGALSKKQNCFDDFISAAEYLISAGYTRSEKLCIEGGSNGGLLIGACINQRPDLFGCALAHVGVLDMLRFHKFTIGHAWTSDYGCSDKEEEFHWLIKYSPLPNVPRPWEPHPDQPLQYPPTMLLTADHDD

SEQ ID NO: 69230 - protein, 56 aa, Gossypium hirsutum
  Clone ID: LIB3826-002-Q1-N6-F3.pep
MLLLTFAAHQMVMFSATWPATVHRLAQEYMDPNLVKVVIGSEDLAANHDVMQIVED

SEQ ID NO: 69231 - protein, 133 aa, Gossypium hirsutum
  Clone ID: LIB3135-012-Q1-K1-A9.pep
RRPRASDKSLTPSLLFFPQIEDPSSPPPIHHFTSGPPRLHLCSNSASSLVRLLPLNFKAHQMVMFSATWPAAVHRLAQEYMDPNPVKVVIGSEDLAANHDVMQIVDVLDDRAHYERLTAFKISLHWLNRMGSI

SEQ ID NO: 69232 - protein, 137 aa, Gossypium hirsutum
  Clone ID: LIB3166-001-Q1-K1-E12.pep
QMVMFSATWPAAVHRLAQEYMDPNPVKVVIGSEDLAANHDVMQIVEVLDDHARYERLTALLKKYHESQRNRVLVFVLYQAEADRIENMLKRSGWNVVSIHGRKAQNERTKALSLFKKGSCPLMVATDVAARGLDIPD

SEQ ID NO: 69233 - protein, 96 aa, Gossypium hirsutum
  unsure (1)..(96): unsure at all Xaa locations
  Clone ID: LIB3146-030-Q1-K1-C10.pep
DEADRMLDXGFEEDVNFILGKTCSAHQMVMFSATWPAAVHRLAQEYMDPNPVKVLDDRAHYERLTAFKISLHWLNRMGSILKFALWLCVTVCSLTF

SEQ ID NO: 69234 - protein, 174 aa, Gossypium hirsutum
  unsure (1)..(174): unsure at all Xaa locations
  Clone ID: GOSHI-09MAY01-C8344_2.pep
MEGSVFTPSLEGMKHINSXEGEMLSKPSLDVCKLILPVLDKFGSAMSLVKSDVGGNISRLEKKYETDPAKYNHLYSMVKEEVDCKTATDSSSCTNGLLWLTRAMDFLVELFRNLLAHPDWTMTESCTDSYGKTLKKFHDWXVNADMEKFCSTFPPFLEENPKYLAKFGLDDMKA

SEQ ID NO: 69235 - protein, 201 aa, Gossypium hirsutum
  Clone ID: GOSHI-09MAY01-C8344_1.pep
MEGSVFTPSLEGMKHIKSPEGEMLTKPFLDVCKLILPVLDKFGSAMSLVKSDVGGNISRLEKKYETDPAKYNHLYSMVKEEVDCKTATDSSSCTNGLLWLTRAMDFLVELFRNLLAHPDWTMTESCTDSYGKTLKKFHGWIASSAFTVALKLAPDRKKFMEVIAGTGDVNADMEKFCSTFPPFLEENHKYLAKFGLDDMKA

SEQ ID NO: 69236 - protein, 82 aa, Gossypium hirsutum
  unsure (1)..(82): unsure at all Xaa locations
  Clone ID: LIB3147-024-Q1-K1-H4.pep
MLTKPGLEVCLLILPVLDKFGSAMSLVKSDVGGNISRLEKKYETDPAKYNHLYSMVKEEVDCXSATDSSSCTNGLLWLTRSL

SEQ ID NO: 69237 - protein, 133 aa, Gossypium hirsutum
  Clone ID: GOSHI-09MAY01-C8364_3.pep
HLRPNQEDYRSFLHVSSTFSSFIVSTLLQNPAAHAAASFAATSSPAANIESSRDSPCMPLRKVAHLDQFNSAPSMAAIAAATVAAATAWWAAHGLLSVCAPLHTGFTCFPASTAAVPPMENGQPPAAKTEQKG

SEQ ID NO: 69238 - protein, 174 aa, Gossypium hirsutum
  Clone ID: GOSHI-09MAY01-C8364_2.pep
MKAAQNYPRHVAVHVLDGSLRTCVQNPSLAASATTEHPTRPPKSTHQALPPFHIPFIHLRPDQEEYRSFLHVSSTFSNLIVSTLLQNPAAHAAASFAATFWPYANVESSGDSPACDLRGFPSTQTNSAPSMAAIAAATVAAATAWWAPHGLLPVCAPLHTGCTCAPASTAAVTS

SEQ ID NO: 69239 - protein, 304 aa, Gossypium hirsutum
  Clone ID: GOSHI-09MAY01-C8364_1.pep
PSRDEKSSNLKEILDDNCSEVFTLLHEANCSSMSSVNKNFIPTSTALRNSCPLREFVPSLKETINKDTSKPSNLENSCTSYEKPAQVQRKDDMDGATCTDEMQATHNNPQHVAVHVLDGSPGTCAPNPSMDITFQDSIFHPMGDIHGQVNLFANPAASATTAHQNNAPRSTHQAFPTFHTPFMHLHPNQEDYRSFLHVSSTFSSLVVSTLLQNPAAHAAASFAATFWPYANVQNSDDSPACDQEGFPSRQMNSATGMAAIAAATAWWAAHGLLSVCAPLQTGCTCAPVSTATVTSMVNGEAPAA

SEQ ID NO: 69240 - protein, 129 aa, Gossypium hirsutum
  Clone ID: GOSHI-09MAY01-C8314_1.pep
MAMSSTPNILLWLFSIHSLLSLAQINEAKVPAIIVFGDSSVDAGNNNYIPTIARSNFEPYGRDFNGGHPTGRFSNGKIATDFISHAFGLKGAIPAYLDPSYSISDFATGVTFPSAGTRYDNATSNVLSV

SEQ ID NO: 69241 - protein, 63 aa, Gossypium hirsutum
  Clone ID: GOSHI-09MAY01-C8334_1.pep
VFMINTMTIFDKREAISEQNFLVIQEQLKTMLLRLWCDCQMVVSARGVPKEKLAFEELVWSCI

SEQ ID NO: 69242 - protein, 115 aa, Gossypium hirsutum
  Clone ID: GOSHI-09MAY01-C8254_1.pep
MAVQMAIRVSPTARLSLPPPSPSPPSPSVPSSTISTKPSLKPQQPKPISLSLPTSTAISLLALFSPPHEAKAINLSIEQIISSLNEVEKTIDQVQEASSSALDVAQQIFDVVGKV

SEQ ID NO: 69243 - protein, 125 aa, Gossypium hirsutum
  Clone ID: GOSHI-09MAY01-C8204_1.pep
MSSASLSCSLPPTASASAGSRRNPHLRIPKTLFTFHHPHHHHHHHPFLLRVTNETSRTEVSTTDPINERLESDKIVDGMDFGELCNEFECISSPLVESTARQLVRDILELREGNRALGTYAVSVK

SEQ ID NO: 69244 - protein, 180 aa, Gossypium hirsutum
  unsure (1)..(180): unsure at all Xaa locations
  Clone ID: GOSHI-09MAY01-C9974_1.pep
MEAVLQTRCLLSLPPNPTRVRVRSLLNPSQGLKQRLFASKPLGLSDLSLSYKEVPSFVAKPNGLSPKGKNFIRKAEAAAATDDQPLFGETQKPKFLGIELVTLKKIXPLGLMFFCILFNYTILRDTKDVXLVVTAKGSSAEIIPFLKTWVNLPMAIGFMLLYTKLANVLSKKALFYTVIV

SEQ ID NO: 69245 - protein, 67 aa, Gossypium hirsutum
  Clone ID: LIB3166-020-P1-K1-F8.pep
VLKDFRAYPLGISFPSSLNLKRDMEAVLQTRCLLSLPPNPTRVRVRSLLNPSQGLKQRLFCFKTLTP

SEQ ID NO: 69246 - protein, 186 aa, Gossypium hirsutum
  Clone ID: GOSHI-09MAY01-C9964_2.pep
IISGTSMSCPGVSGLAATVAAAHPEWSPAAIKSALMTTAYAADKTGQKIEDVATGGPATPFDYGAGHADPVAALDPGLVYDATIDDYLGFLCALNYTPNQIKSTTHRDFTCQTSKKYTLGDFNYPSFSVPLETASGRRGGADPSSIIKYTRTLTNVGAPATYKVYLHSQTHSLKISVELVILSFKA

SEQ ID NO: 69247 - protein, 366 aa, Gossypium hirsutum
  Clone ID: GOSHI-09MAY01-C9964_1.pep
SDSMVPLVYGCYVSNSSGGAVFMAGSLIPEKVARKIVVCDRGGSARVQKGVVVKDACGIGMILTNTDTFGEELVADAHLLPSAAVGQKTGDAIKKYISSTRNPTAKIGPGTTKLGVQPSPVVAAFSSRGPNPVTPAILKPDIIAPGVNILAGWTAAVGPTGLQSDPRHVNFNIISGTSMSCPHVSGLAAILKAAHPEWSPAAIKSALMTTAYSTYPNGEKIKDVATGGPATPFDYGAGHVDPIAALDPGLVYDTTIDDYLGFLCALNYTPSQIKSTTQTNFTCQKSKKYTLGDFNYPSFSVPFQTGLRSTVKYTRTITNVGVPATYKISLYSQTQAVKMSVVPAILSFSAQYEKQSYTVTFRAISM

SEQ ID NO: 69248 - protein, 86 aa, Gossypium hirsutum
  unsure (1)..(86): unsure at all Xaa locations
  Clone ID: uC-gsronu33B143d05b1.pep
GTPPTPEWSPAAIKCARRTTAHTAYKTDGEIEDVATGGAAXPFDYGAGHADPLAALDPGLVYQATLGDGPRITLCCALHTKLLEDA

SEQ ID NO: 69249 - protein, 185 aa, Gossypium hirsutum
  Clone ID: GOSHI-09MAY01-C9924_1.pep
ANTDLIYSFLLCQARPPAARESLLANYASSDDDEPQQITHPPPPPPPKVSSLPQPKSSSLFTNLPQPKQSLKSFTKHHDEDGNGGGGGEVAVRVPKPAVPHPKNPSNLFSHLPQPKPQQPPNPPVAKRIVQFKPPINPNTHVDSDDDDEEENERPKRGESETLAQGPSVKSFLSSIPAPRNSTTL

SEQ ID NO: 69250 - protein, 69 aa, Gossypium hirsutum
  Clone ID: GOSHI-09MAY01-C9844_2.pep
MADEEPVDQKKYLEDGCKPKCVKQLRSYEACVKRIQGDESGHKHCTGQYFDYWSCVDKCVAPSLFTKLK

SEQ ID NO: 69251 - protein, 69 aa, Gossypium hirsutum
  unsure (1)..(69): unsure at all Xaa locations
  Clone ID: GOSHI-09MAY01-C9844_1.pep
MADEEPVDQKKYLEEGCKPXCVKQLRAYEACVKRIEGDESGHKHCTGQYFDYWACIDKCVAQTLFSKLK

SEQ ID NO: 69252 - protein, 69 aa, Gossypium hirsutum
  Clone ID: AI726200.1.pep
MADEEPVDQKKYLEEGCKPKCVKQLRAYEACVKRIEGDESGHKHCTGQYFDYWACIDKCVAQTLFSKLK

SEQ ID NO: 69253 - protein, 68 aa, Gossypium hirsutum
  Clone ID: LIB3825-029-Q6-N6-E8.pep
DGACCVANLSTGKHFCYCYCYCGNVYSLSINLVPSRHSRGRQSWNDLCLHFPLFIWNRLLMMQWATSA

SEQ ID NO: 69254 - protein, 55 aa, Gossypium hirsutum
  Clone ID: LIB3166-019-P1-K1-B2.pep
ILEFHNASKLFIKFIPFPTSTQSFISAEMLCCLYIMHQFGKSYKTGIFTPLFLVF

SEQ ID NO: 69255 - protein, 348 aa, Gossypium hirsutum
  Clone ID: GOSHI-09MAY01-C9814_1.pep
MGVPETDPLAQLSLPPGFRFYPTDEELLVQYLCRKVAGHHFSLQIIGEIDLYKFNPWDLPSKALFGEKEWYFFSPRDRKYPNGSRPNRVAGSGYWKATGTDKIITTEGRKVGIKKALVFYVGKAPKGTKTNWIMHEYRLIETSRKSGSSKLDDWVLCRIYKKNSSGQKPLSSVSSREQSTNGSSSSSSSQLDDMLDSLPELDDRFFALPRVNSFKTLQNDVKLGFQNLGIGNLDWGSLGGLSSVPELVPSGQTQTQTQTQSQGITSYGNSNVYVSTMPPTLCQMDVSTNKIGNSVEEEVQSGLRTQRADNSGIVQQNSNVLNSHNFSNSIDPYGFRCPTQSGGFGFRQ

SEQ ID NO: 69256 - protein, 141 aa, Gossypium hirsutum
  Clone ID: GOSHI-09MAY01-C9804_1.pep
GRVLFIHLFDVNKNVIVGGTLSPWPETLSNNKKRVIQQLVHGQECATQLQILFHNPSEEGGRLSAEEILVQNILTSFNHTLSALSCIDSSEVSQNQTTCNDDSPWCEDRRSEGCSESSKRPGSKDKRGCYKRKWDAVARPV

SEQ ID NO: 69257 - protein, 201 aa, Gossypium hirsutum
  unsure (1)..(201): unsure at all Xaa locations
  Clone ID: GOSHI-09MAY01-C9594_1.pep
PSALFGLKVAFGKXPPKVSFKKAIGSVSVSGHKFVGCPMPCGVQITRMEHINVLSSIVEYLASRDAAIMRSRNGHAPLFLWYTLNRKGYKGFQKDVQKCLRNAHYLKDRLHEAGISAMLNELSSTVVFERPRDEEFVRRWQLACEGNIAHVVVMPNVTIEKLDFFLNELVEKRSTWYQGNVQPPCIAAEIGKANCVCALHK

SEQ ID NO: 69258 - protein, 67 aa, Gossypium hirsutum
  Clone ID: LIB3585-025-P1-K1-F7.pep
NQMTSCMKIEEFPNHRLIFFFTCAEHKRNSLSLSLLQYKEVEHSLDTKSTVFQLIHSRRHRVFRQSR

SEQ ID NO: 69259 - protein, 138 aa, Gossypium hirsutum
  Clone ID: LIB3149-013-Q1-K1-H5.pep
YRVGTRVRMPFVKRAPNVCFKFPIGSVSVSGDKFVGCPMPCGVQITRMEHINVLSSNVEYLASRDATIMGSRNGHAPLFLWYTLNRKGYKGFQKDVQKCLRNAHYLKDRLHEAGISAMLNELSSTVVFERPRDEEFVR

SEQ ID NO: 69260 - protein, 75 aa, Gossypium hirsutum
  Clone ID: LIB3147-011-Q1-K1-H8.pep
PTRTGIWDGLFTKSSAFKEGDIAHVVVMPNVTIEKLDFFLNELFEKRSTWYQGNVQPPCIAAEIGKANCVCALHK

SEQ ID NO: 69261 - protein, 140 aa, Gossypium hirsutum
  Clone ID: GOSHI-09MAY01-C9544_1.pep
MGGKSTMAALLVILAANLLQSTYGRTYTVGDSTGWGIPANNNDDFYDDWADNKDFLVGDVLVFNFTNGQHNVVEVTEGGYDACNAANPVSTVSTGPARITLNRTGEYYFICGIPGHCSAGQKLNVEVRKWYPTGGVTPST

SEQ ID NO: 69262 - protein, 82 aa, Gossypium hirsutum
  Clone ID: GOSHI-09MAY01-C9514_3.pep
MQNEEGQNMDLYIPRKCSATNRLITSKDHASVQINVGHLDELGRYTGTFSTFALCGFVRAQGDADSALDRLWQKKKAEVRQQ

SEQ ID NO: 69263 - protein, 82 aa, Gossypium hirsutum; identical to SEQ ID NO: 69262
  Clone ID: GOSHI-09MAY01-C9514_2.pep

SEQ ID NO: 69264 - protein, 82 aa, Gossypium hirsutum
  Clone ID: GOSHI-09MAY01-C9514_1.pep
MQNEEGQNMDLYIPRKCSATNRLITSKDHASVQINVGHLDELGRYTGTFSTFALCGFVRAQGDADSALDRLWQKKKAEVKQQ

SEQ ID NO: 69265 - protein, 78 aa, Gossypium hirsutum
  Clone ID: LIB3825-018-Q1-K6-D10.pep
EALYVVRCYCCCSSATNRLITSKDHASVQINVGHLDELGRYTGTFSTFALCGFVRAQGDADSALDRLWQKKKAEVRQQ

SEQ ID NO: 69266 - protein, 73 aa, Gossypium hirsutum
  Clone ID: LIB3147-013-Q1-K1-D6.pep
EALYVVRCCCSSATNRLITSKDHASVQINVGHLDELGRYTGTFSTFALCGFVRAQVRSLFQARVKSMLVDVHY

SEQ ID NO: 69267 - protein, 79 aa, Gossypium hirsutum
  unsure (1)..(79): unsure at all Xaa locations
  Clone ID: uC-gsronu33B108h02b1.pep
GPLRTFLARPTRPCFSTNRLITSKDGGSVQINGGHXDELGRYTGTFSTFALCGFVRAQGDADSALDRLWQKKKAEVRQQ

SEQ ID NO: 69268 - protein, 142 aa, Gossypium hirsutum
  Clone ID: GOSHI-09MAY01-C9534_1.pep
MLRNSKSVTCKNQCRPPGSEALPQGIVVKTSNLQMQPLWCVSVKNVNPATASILLASAVGIKQKEIVDQIGKKFPVSDFVVMLFHYDGIADEWKDFEWSDRAIHVSAVNQTKWWFAKRFLHPDIDSKYTYIFLWDEDLRVDY

SEQ ID NO: 69269 - protein, 144 aa, Gossypium hirsutum
  Clone ID: GOSHI-09MAY01-C9494_1.pep
MDGGRSTKISRPEKILLEIVSESIPAMAQIMQELPEETLESTKEYLRNLIGNPEWKEELVGLQNRLDRRSDLSKETLSKCHKDQLAILVAVKMGLKSFLSGKVGLSMTELLEIFLFMRCRNLTCKSVLPVDDCDCRICSGNKGF

SEQ ID NO: 69270 - protein, 163 aa, Gossypium hirsutum
  Clone ID: GOSHI-09MAY01-C9474_1.pep
SLQGFLGFPRSSTQSTKFPEYQMPSVTWGVVQGKKEKLVNRVRICDYLKTLGIIPDELENLELPSTVKVMSERVQFLQKLGLTIDDINEYPLMLGCSVRKNMIPVLGYLEKVGIPKSKLGEFVKNYPQVLHTSVVDELGPDIKFLKGLDVEKQDIGYGLQKYP

SEQ ID NO: 69271 - protein, 221 aa, Gossypium hirsutum
  Clone ID: GOSHI-09MAY01-C9414_1.pep
HSSAHASAHASASGWSEQIRVCSATSLEGPLDDGYCWRKYGQKDILGSNFPRGYYRCTHRFSQGCLAGKQIQRSDEDPTIFEVKYRGRHTCNQVSHLVATPKEKGNHYREKQQVEEKQKQSEELLLSFETGLKVNTEDLDNRENIFPSFSFPIESEEVQNGLLRNSLMKNISPAFVSPATSESNYFPVSAFHMGSFDFSQNVQTSESELTEIISAPASVTN

SEQ ID NO: 69272 - protein, 418 aa, Gossypium hirsutum
  Clone ID: GOSHI-09MAY01-C9434_1.pep
MESGAKKWGFQGKQGLEAASTTTVRGYLNLLMGNINQDNCLTVVPLGHGDPSHFPSFRITPAAEDAIVDALRSAKHNCYSTTVGILPARRALADYLNRDLPYHSSPDDVYLTNGCTQGIEVVISILSRPGANILLPRPGFPLYEAWCAYNHLEMRHYDLLPEKGWEVDLDAVETLADENTVAMVIINPGNPCGNVFSYEHLNKIAETARKLGILVIADEAYDNLAFGSTPYVPMRVFGLTVPILTLGSISKRWVVPGWRLGWLVTSDPDGILQKSGVINSIAGFLNISSDPATFIQAAIPQILENTKEDFFSKIISTLRECADICYNRIEEIPSLTCPKKPEGSMFVMLKLNLSMLEDINDDVDFCLKVAKEESVFILPGIAMELKNWLRVTFAIEPSLLQEGLARVKAFCQRHAKKQ

SEQ ID NO: 69273 - protein, 99 aa, Gossypium hirsutum
  Clone ID: uC-gsronu33B002c02b1.pep
LSSTKKSAQQGGRVGHGDLSHHPSGRTTPGAEDALVDALRSGQHNSYSTTGGILPARRALADNLNRDLSYHLSPDDVHRTIGWTHGIAVGISILSRPGA

SEQ ID NO: 69274 - protein, 134 aa, Gossypium hirsutum
  unsure (1)..(134): unsure at all Xaa locations
  Clone ID: GOSHI-09MAY01-C9424_1.pep
FEASIGRRSRDXEQESRSGSDNIDGVSGDDQDAANNRPRKKRYHRHTPQQIQELEALFKECPHPDEKQRLELSKRLCLETRQVKFWFQNRRTQMKTQLERHENSLLRQENDKLRAENMSIREAMRNPICTNCGG

SEQ ID NO: 69275 - protein, 207 aa, Gossypium hirsutum
  Clone ID: GOSHI-09MAY01-C9744_1.pep
GPEGPAQATALKDRLKELGYELYDEQLGNIFWRFKAVAEQKKRVIDADLIALVSDEVFQPEVVWKLHDLQVTCGTLGLSTATVKLIGADGEEHVACSVGTGPVDSAYKAIDLITKEPVTLLEYSMNAVTEGIDAIATTRVLIRAEKSRISTNILTGEIVQRTFSGTGAGMDIVVSSVKAYIGALNKMLGFKEQYQTKASIERTPVSA

SEQ ID NO: 69276 - protein, 101 aa, Gossypium hirsutum
  Clone ID: GOSHI-09MAY01-C9764_2.pep
TQWPKSPKPKAISETLAARVSLQRRNRASLPPRTCYARAHVVPPRQSHASEPSHAATRDHAFTRCTAPRHRTVSVPVPAQKTNKDGQKTQQQQRRHENSRE

SEQ ID NO: 69277 - protein, 121 aa, Gossypium hirsutum
  Clone ID: GOSHI-09MAY01-C9764_1.pep
NGNLPFFHIFVLFLLLFSAILVSSLLLLRFLSVFVCFLCRYRYGDRTVTWRGATREGVVPGGGVARLRGVALAPRHYMPPGITPVEGEGWALLRRLEAPPTWLGFPLIGFGALGVLGALGV

SEQ ID NO: 69278 - protein, 184 aa, Gossypium hirsutum
  Clone ID: GOSHI-09MAY01-C9714_1.pep
PRVRKPQAYEGNVSNTPRVRSKFTSTSVTEKQYQAPLARVSSLEDPCTEISEYDKAPPTSMQVAATDSENVRALVADTKNLKLEKIPEVLDKSQVKEPSKGFRRLLKFGKRNHSSARSEHSIDSNNEADELVANGASSSEVQSLKNLISQDETPTADNTPQKSSRTFSLLSPFRSKTSEKKYMA

SEQ ID NO: 69279 - protein, 54 aa, Gossypium hirsutum
  Clone ID: LIB3146-025-Q1-K1-G7.pep
AIYNHVKWKSLLKSQFSSTTLTNECECRTFFYKHILLMVHTYFSGCTDAWADAW

SEQ ID NO: 69280 - protein, 75 aa, Gossypium hirsutum
  Clone ID: GOSHI-09MAY01-C9704_1.pep
MENSSNPDGEDTRNQTIPSTSSTSSSDDYRLFDRQGSLHQFLGGGKAADILLWKRWSVSLGVIVVASVAWLIFEW

SEQ ID NO: 69281 - protein, 98 aa, Gossypium hirsutum
  Clone ID: LIB3149-060-Q1-K1-C11.pep
MRRYSPQYYSPPRRGYGGRERSPPRRGYGGGGGGSGGGGGGGGGYGRRREQNNGSLLVRNIPLDCRPEELRIPFERFGLVRDVYIPKDYYTGGYIGLK

SEQ ID NO: 69282 - protein, 134 aa, Gossypium hirsutum
  unsure (1)..(134): unsure at all Xaa locations
  Clone ID: LIB3166-017-P1-K1-F8.pep
NIPLDCRPEELRIPFERFGLVRDVYIPKDYYTGAPRGFAFVQFVDSYDAAEAQWRMNGKIFGGREISVVVAAESRKRPEEMRHKARQRGPSGYXGRSSYYGRSRSRSASSTRSPXRPSGSRGRYRSRSYSPASR

SEQ ID NO: 69283 - protein, 135 aa, Gossypium hirsutum
  Clone ID: GOSHI-09MAY01-C9684_1.pep
MVKFLKPNKAVVVLQGRYAGRKAVIVKSFDEGTRDRPYGHCLVAGIKKYPSKVIRKDSSKKTAKKSRVKCFLKLVNYQHVMPTRYTLDVDLKDVVTVDSLQSKDKKVSACKATKQKLEERFKTGKNRWFFTKLRF

SEQ ID NO: 69284 - protein, 188 aa, Gossypium hirsutum
  Clone ID: GOSHI-09MAY01-C9644_1.pep
AFRGPVGAVKEFLNEEPYTAQEVEKITQKDLPSILRDNPTSLDVLKAAKHFKLHQRAAHVYSEAKRVYAFKDTVASKLSEEEKLKKLGNLMNESHHSCSVLYECSCPELEEIVKVCRDNGAMGARLTGAGWGGCAVALVKESIVPQFILNLKEQFYKSRIDKGVINQNDLGLYVFASKPSSGAAILKF

SEQ ID NO: 69285 - protein, 137 aa, Gossypium hirsutum
  Clone ID: GOSHI-09MAY01-C9674_1.pep
ENVSIIPIVGLGGLGKTALAQFVYNDEMVKNHFELMMFVCVSDVFDVKIIVENMIKSATGEAPNQKLEMDQLQTQLRGKIGGKKYLLVLDDIWNEEWEEWVSLKELLVGGAKGSRIIVTTRSLRVAKITSKCQPNVL

SEQ ID NO: 69286 - protein, 135 aa, Gossypium hirsutum
  Clone ID: GOSHI-09MAY01-C9624_1.pep
SCLADSKVCTDFHDKYLNTSASEFSQTHLSSVQSGCCKPSNDCQFTYVGPTNWTRGSAESNNPDCNLWNNNLNTLCFDCQSCKAGFIDNLRSSWKKVAIVNIAFLIFLIIGYSVGCCAFRNNRRDNYYQQQTWKP

SEQ ID NO: 69287 - protein, 41 aa, Gossypium hirsutum
  Clone ID: LIB3272-060-P1-N1-G7.pep
KKVAIVNIVFLIFLIIVYSVGCCAFRNNRRANYYQQQTWKP

SEQ ID NO: 69288 - protein, 73 aa, Gossypium hirsutum
  Clone ID: LIB3543-022-Q1-K1-F4.pep
NQAQFLNRRKTTEYTRTTCRAIYIEKSPSNGFQMSFADKGRPGNLELIFVLSFRFWIWAGLLYLLPIVFCIVF

SEQ ID NO: 69289 - protein, 73 aa, Gossypium hirsutum
  Clone ID: LIB3166-016-P1-K1-E2.pep
KPSNDCQFTYVVPTNWTRGSAESNNSDCNLWNNNLNTLCFDCQSCKAGFIDNNRKQIQQPRPNVRVPISKIGN

SEQ ID NO: 69290 - protein, 39 aa, Gossypium hirsutum
  Clone ID: LIB3149-031-Q1-K1-H6.pep
ADLETLSESLFLVSDFGYGYTYVGSGLLYLLPIVFCIEF

SEQ ID NO: 69291 - protein, 120 aa, Gossypium hirsutum
  unsure (1)..(120): unsure at all Xaa locations
  Clone ID: uC-gsronu33B062d01b1.pep
IFALELKKLRIDNSLLDVSQSDLEVNLFKLMERRGSGEAVLDRPMVVAXIHHQKVPLATLVEHTPCVATDTLPSHLAQWLNLXPNVLQTDMVYESLRTATDAPLASTPVWERDFSSSQEF

SEQ ID NO: 69292 - protein, 116 aa, Gossypium hirsutum
  Clone ID: LIB3166-011-P1-K1-C2.pep
TVTKIPNHVAINIALELKKLLIDNSLLDVSQSDLEVNLFKLMERRGYGEEYINRLKMITRFHHQRVPLVILVCGTACAGKPTIATQLAQRLYLPYVSQTAMVYESLCTSTTCNIGI

SEQ ID NO: 69293 - protein, 122 aa, Gossypium hirsutum
  Clone ID: GOSHI-09MAY01-C9144_1.pep
YYLYLIFTFPLSGYRYFNCHLALGLNVLKFLWMMKSFVAIFFAILLFLATMEADGKRMTLEKEREPSNHQLGRKADIGAKDDIDLTGEDGSAIELIASKNRLIDSRHHIYMNDTSPIPRKHP

SEQ ID NO: 69294 - protein, 93 aa, Gossypium hirsutum
  Clone ID: LIB3272-013-P1-K1-E6.pep
RFEAIFFAILLFVATMEADGKRMTLEKEPEPSNHQLGRKVDVGAKDGIDLTAVDGAGEDDSDVALLASQNKVTTESRHHFFPNESNPYRHNRP

SEQ ID NO: 69295 - protein, 72 aa, Gossypium hirsutum
  Clone ID: LIB3166-043-P1-K1-H11.pep
YIATLLFTATGGVHGKQITLKKEREPSNHQLGRKADIRAKDDIHLTGEDGSATFTLFLTLYPPQNSFRTTTA

SEQ ID NO: 69296 - protein, 220 aa, Gossypium hirsutum
  Clone ID: GOSHI-09MAY01-C9124_1.pep
MGLKGFVEGGIASIVAGASTHPLDLIKVRMQLQGESHLPNPSLQLYRPALAVNSAAVGNVSISQPRVGPISIGVRIIQLEGVAALFSGVSATMLRQTLYSTTRMGLYEIIKNKWTDKETGNLPLTSKILAGLIAGGVGAAVGNPADVAMVRMQADGRLPIDQRRNYKSVIDALSQMTKQEGVGSLWRGSALTVNRAMIVTASQLATYDQVKETILEKGVM

SEQ ID NO: 69297 - protein, 174 aa, Gossypium hirsutum
  Clone ID: GOSHI-09MAY01-C9054_1.pep
RVWNSLLEAFMTVVNAPCGAVGVTALHSAVAGGSDSSVEIVKLLLDASADANRVDANGSKPIDLVVPALKSLSSSKRKVIELLLKGVSGCVLNEKAESEKTVLPQLFKEGSEKKEYPIDVSLPDINNGIYGTDDFRMYTFKVKPCSRAYSHDWTECPFVHPGENARRRDPRKYP

SEQ ID NO: 69298 - protein, 150 aa, Gossypium hirsutum
  Clone ID: GOSHI-09MAY01-C9014_1.pep
MHTVMWPELLFFIYISAFVMVKAYAQEHIYKHPWERVTSASWRKFADPENKRTLSHILEVDTLNRKLDPLSGKLYTTRALTIHAPGPWFVRKIIGQDICHCVESTVVDAQSKSMQLATRNVSLQKFIEVEEKIRYDPHPDNPTGWTICRQ

SEQ ID NO: 69299 - protein, 78 aa, Gossypium hirsutum
  Clone ID: LIB3135-041-Q1-K1-E4.pep
MVKAYAQEHIYKHSWERVTSASWRKFADPENKRTLSHILEVDTLNRKLDPLSGDRYTTRALTIHAPRPWFVRKIIGQD

SEQ ID NO: 69300 - protein, 91 aa, Gossypium hirsutum
  Clone ID: LIB3166-009-P1-K1-A8.pep
FPAAFLFPSGLLKAFPQDPLAKLPWERVTSASGRKFADPENKRTWSNILEVDTLNRKLDPFSGKLYTTRPLTIHAPGPWFVRKIFGQDICH

SEQ ID NO: 69301 - protein, 153 aa, Gossypium hirsutum
  Clone ID: GOSHI-09MAY01-C9354_2.pep
MGVLDHVSDLFDCSHSSKHKKRKQLQTVEIKVKMDCEGCERKVKKSVEGMKGVTQVDVERKASKLTVVGYVDPKKVVARVAHRTGKKVELWPYVPYDVVAHPYAPGVYDKKAPAGYVRNAEDPQVSHLARASSTEVRYTTAFSDENPAACSVM

SEQ ID NO: 69302 - protein, 64 aa, Gossypium hirsutum
  Clone ID: GOSHI-09MAY01-C9354_1.pep
GDAPATAYVSCAWNCENSHTDLKHDPEHPNFLFSLLSGFSLKCMGFFLLLLMLFFLLIIEVPKG

SEQ ID NO: 69303 - protein, 343 aa, Gossypium hirsutum
  Clone ID: GOSHI-09MAY01-C9304_1.pep
MGKEKTHINIVVIGHVDSGKSTTTGHLIYKCGGIDKRTIEKFEKEAAEMGKGSFKYAWVLDKLKAERERGITIDISLWKFETSKYYVTIIDAPGHRDFIKNMITGTSQADCAVLIVAAGVGEFEAGISKNGQTREHALLAYTLGVKQLIVGVNKMDSTEPPYSQKRYEEIVKEVSTYIKKIGYNPDTVAFVPISGWNGDNMLEPSANMPWFKGWKVTRKDGNASGTTLLEALDCILPPTRPTDKPLRLPLQDVYKIGGIGTVPVGRVETGVLKPGMVVTFAPVNVTTEVKSVEMHHEALSEALPGDKGGFNVKNVSVKDVRWGTFAGASKNDPPMEAAALTAK

SEQ ID NO: 69304 - protein, 129 aa, Gossypium hirsutum
  unsure (1)..(129): unsure at all Xaa locations
  Clone ID: LIB3196-046-P1-M1-C2.pep
NTLLAGDNKKDSTEPPYSQKRYNGIGXEVSTYIKKTGYNPDTAAFEPISGRNGDNMLEPSANMPWLKGWKVTRXDGNARGTTLLEALDCMLPPTRPTDKSLRLPIADVYKIGGIGTVPAGPVETGVLKP

SEQ ID NO: 69305 - protein, 103 aa, Gossypium hirsutum
  Clone ID: GOSHI-09MAY01-C9334_2.pep
PIHGIIIFKAHHVRVNVQLNKAQKKKMFNLTGHTYLISIQKKLELLNSRYPISGLLLAYELILKHQIRLHLQSWLPFFLPCKALYGASISGGGGELLYCLWGF

SEQ ID NO: 69306 - protein, 243 aa, Gossypium hirsutum
  Clone ID: GOSHI-09MAY01-C9334_1.pep
MVSQTIDVLKNELPLEQELVVLPEDVVTGLVLVDIINGFCTVGAGNLAPREPNRQISRTISESVRLARLFCDKKLPVMAFLDSHHPDKPEDPYPPHCIQGTDESNLVPALQWIQNETNVTIRRKDCYDGYLGSMEADGSNVFADWVKNNHIEAILVVGVCTDICVLDFVCSTLSVRNRGFLAPLKDVIVYSRACATFDVPLHIATNTKGALPHPQELMHHIGLYMAKERGAKIANEVLFGALK

SEQ ID NO: 69307 - protein, 187 aa, Gossypium hirsutum
  unsure (1)..(187): unsure at all Xaa locations
  Clone ID: GOSHI-09MAY01-C9254_1.pep
GPPGPPGPPSCGYDFSFLPEPPXEKSQDGGRYYRADDANVVRDRDLEVDTTLKSLSQQIENIRSPEGSRKYPARTSRDLGMCHSDWKSAESWIDPNQGCNLDAIKVYCNMETGQTCVFPTQPSVPQKNWYISPNPKXEKKHVWFGESMTDGFQFEYGSESSDPADVAIQLTFLRLMSTEASQNITYH

SEQ ID NO: 69308 - protein, 156 aa, Gossypium hirsutum
  unsure (1)..(156): unsure at all Xaa locations
  Clone ID: GOSHI-09MAY01-C4984_3.pep
ITGPTRRVRPRVRLDGFDVLGNIKVLMATNMPDTLDAALLRPGRLDRKVEFGLPDLESRTQIFKIHTRTMNSPTRPRTRGXRSELLARLCPRXSRAADIRSACTEAGMPAIRARKKTVTEKDLLDAVNKVIKGYQKLSASPIYMVYNLTQTLVPPF

SEQ ID NO: 69309 - protein, 131 aa, Gossypium hirsutum
  unsure (1)..(131): unsure at all Xaa locations
  Clone ID: GOSHI-09MAY01-C4984_2.pep
NQLDGFDARGNIKVLMATNRPDTLDPALLRPGRLDRKVEFGLPDLESRTQIFKIHTRTMNCERDIRFELLARLCPNSTGADIRXSVCTEAGMDAIRARRKTGTEKDFLDAVNKVIKGYQKFSATPKYMVYN

SEQ ID NO: 69310 - protein, 439 aa, Gossypium hirsutum
  unsure (1)..(439): unsure at all Xaa locations
  Clone ID: GOSHI-09MAY01-C4984_1.pep
DISAHITKLGSPTTAPEPEDEIKDEKXPRPLDEDDIALLKTYGLRPYSTSIKKVEKDIKEMAKKVNDLCGIKESDTGLAAPSQWDLVSDKQMMQEEQPLQVARCTKIINPNTEDAKYVINVKQIAKFVVGLGDKVSPTDIEEGMRVGVDRNKYQIQIPLPPKIDPSVTMMTVEEKPDVTYNDVGGCKEQIEKMREVVELPMLHPEKFVKLGIDPPKGVLCYGPPGTGKTLLARAVANRTDACFIRVIGSELVQKYVGEGARMVRELFQMARSKKACIVFFDEVDAIGGARFDDGVGGDNEVQRTMLEIVNQLDGFDARGNIKVLMATNRPDTLDPALLRPGRLDRKVEFGLPDLESRTQIFKIHTRTMNCERDIRFELLARLCPNSTGADIRSVCTEAGMYAIRARRKTVTEKDFLDAVNKVIKGYQKFSATPKYMVYN

SEQ ID NO: 69311 - protein, 255 aa, Gossypium hirsutum
  Clone ID: GOSHI-09MAY01-C4954_1.pep
ALSIIPQSPVLFSGAVRLNLDPFNEHNDADLWQALERAHLKDVIWRNSFRLDAEVLEGGENFSVGQRQLLCLARALLRRSKILVLDEATAAVDVKTDAFIQKTIREEFKSCTMLVIAHRLNTIIDCDQILVLDAGQVLEHSTPEELLANEESAFSKMVQSTGPANAEYLRGLIFGGEENRFSGDDARLDGRKRWLASSRWAAAAQFALAVSLTSSQNDLKRFDIGDTSNIVKKTEDAVITLQSVLEGKHDEVIDD

SEQ ID NO: 69312 - protein, 164 aa, Gossypium hirsutum
  unsure (1)..(164): unsure at all Xaa locations
  Clone ID: AI055004.1.pep
QSPVLFSGTVRLNLDPFNEHNDDDLWQALERAHLKDVILRNTFRLDAEVLEGGKNFXSLGREQYWCLARALLRRSKILVLDEATXAXDVKTDAFIQKTXREEFKSCXMLIIAHRLNTIIDCDRILVLXAGQVLEPILQGTAIYREALSQMVMYRLQCDLTSILK

SEQ ID NO: 69313 - protein, 115 aa, Gossypium hirsutum
  Clone ID: LIB3825-003-Q1-K6-B3.pep
NNSAPSLLKVLESGENFSVGQRQLLSLARALLRRSKILVLDEATAAVDVKTDAFIQKTIREEFKSCTMLVIAHRLNTIIDCDQILVLDAGQVCLLTRCYSWIFLVLFLSSIFPPV

SEQ ID NO: 69314 - protein, 345 aa, Gossypium hirsutum
  unsure (1)..(345): unsure at all Xaa locations
  Clone ID: GOSHI-09MAY01-C4964_1.pep
MREEGEDPQKLKRIAAAAYDYENDPRWADYWSNILIPPHLASRSDVVDHFKRKFYQRYIDHDLVVESMPSNKPSQSAKSSASSSTSSSAVNNGVRPRNAGSASISSGASAAAGSNRTSMHWDRQTLQFSVNAWVFIVAVLAIFPLVPRSLSYRAYRLSFVGTACSSLYSLYALYGRPRAWNLQALQVYFQSIIATKDCIYLIYCLTFVTARLFLKFALIPVLCRTLEHIAXFLRRNFNHSTLYRKYLEDPCVWVESNTTTINILSSHAEIGLGFLLIVSLFSWQLNIIQTFMYXQLLKLMYHAPVSAGYHQSVWVKIGRTVNPLVQRYAPFLNPPVSAIQRWWFR

SEQ ID NO: 69315 - protein, 97 aa, Gossypium hirsutum
  Clone ID: LIB3083-105-Q1-L1-D1.pep
RWADYWANVLIPPHMASRSDVVDHFKRKFYQRYIDPDLVVEAMSSSAQTGSAKPTSSSASSSVANGEARAFSAGSTARTSGPSAGSGSNATSLRWDR

SEQ ID NO: 69316 - protein, 354 aa, Gossypium hirsutum
  unsure (1)..(354): unsure at all Xaa locations
  Clone ID: GOSHI-09MAY01-C4904_1.pep
MGSSNDYIHIVMVPFMAHGHLIPFLALAKQIHHQTGFNIAIANTPLNIQYLRSTLRGNPIPGIHFLELQFNSSDHGLPPNTENTENLSLDLIGKFFASSVYLKTPFYNLLQDIGKTQCKPPVCAIADVFFGWAVDVANSLNTINIAFSTGGAYGTLAYVSLWTNLPHRRTDNAEFNVPGFPDXADCHVSQLHXFLRKADGTDLWSKFMQPQILSSLKSFGWLCNTVEEIEPYGLDLLRKYIKSPVWSIGPLLPKSWLINSSASGRQHAGKEPGTSPEKCVQWLDMHSDDSVLYISFGSQNTISPSNMMELATGLEKAGKPFAWVIKPPLGFDLKAEFKPEWLPEGFEDRMNRNN

SEQ ID NO: 69317 - protein, 129 aa, Gossypium hirsutum
  Clone ID: LIB3197-060-Q1-M1-F6.pep
MGSSNDYIHIVMVPFMAHGHLIPFLALAKQIHHQTGFNIAIANTPLNIQYLRSTLRGNPIPGIHFLQLQFNSSDHGLPPNTENTENLSLDLIDNAEFNVPGFPDRCKFHVSQLHDLRKADGTDLWSKFM

SEQ ID NO: 69318 - protein, 188 aa, Gossypium hirsutum
  Clone ID: GOSHI-09MAY01-C4894_1.pep
SWADRHGAVLSLFSLLRHNPSTIFMSPECPSILLRLKSSLKDEKFPLRETSTKALGRLLLYQVQSDPLNSAALLDVLSSVLSALRDDSSEVRRRALSAIKAASKANPSVIMTHLSLIGPALAECLKDSSTPVRLAAERCALHSFQLTKGTENVQAAQKYITGLDARRIAKFPEHSDDRDESEDEQASS

SEQ ID NO: 69319 - protein, 276 aa, Gossypium hirsutum
  Clone ID: GOSHI-09MAY01-C4854_1.pep
MDLHFITILALIIFLITPRGVYGASFTFINRCDYTVWPGILANAGTPSLGTTGFELPKDSSRSFQAPTGWSGRFWGRTGCKFDGSGSGTCLTGDCGSGQVECNGLGAAPPVTLAEFTLGTTGGQDFYDVSLVDGYNMPMIVEGRGGSGLCSSTGCTTDLNRKCPSELRVGNGDACKSACEAFGSPEYCCSGAYGTPATCKPSVYSEMFKAACPRSYSYAYDDATSTFTCTGADYTVTFCPSSPSKKSSKDATPVPAVSEETTPTTGSTPQGSGSES

SEQ ID NO: 69320 - protein, 140 aa, Gossypium hirsutum
  unsure (1)..(140): unsure at all Xaa locations
  Clone ID: uC-gsflnu33B143d01b1.pep
GPEDTMINRSEDTRETALLPNASAANLRTTWFQRPKDNLRXYKAPTDRSNRSRGLSWCKFDGSGSGTCLTGDCGSGQVECNGLGAAPPVTLAEFTLGTTGGQDVYDVSLVDGYNMPMIVEGRGGTSFLSSTGLTTDSTEN

SEQ ID NO: 69321 - protein, 110 aa, Gossypium hirsutum
  Clone ID: GOSHI-09MAY01-C4864_2.pep
PRLRLCYLLLRTERLFSCSIRWSLPKSLLSKVSLLQRIPDHFWDSPLQVKAFSTIESLRCNSISVDVINFWNKRKLNLLVSAFLALNISDYCSYDRSINNRILALLDNRF

SEQ ID NO: 69322 - protein, 173 aa, Gossypium hirsutum
  unsure (1)..(173): unsure at all Xaa locations
  Clone ID: GOSHI-09MAY01-C4864_1.pep
FWVPEVGFHGHIFFSDGICINPSKVSDIANWKAPKNVSDVRSFLGLAGYYCHFIKNFSIVSSPLIRLLLKNVEFVXSDKCQQNFDQLKNILTEAPVLTQPESGKXYVVYSDASLSGLGCVLMQAGKVVAYASXXLKPHERNYXHDLELAAVIFTLKIWPHYLYGERCHVYSDH

SEQ ID NO: 69323 - protein, 102 aa, Gossypium hirsutum
  Clone ID: LIB3148-030-Q1-K1-E7.pep
RNLESLDKEMMSNFEYSVVVSGLFGLIEINLHSSDKCHKVFKRGRATVHFNAAFDQSDVQIGIGTNSMEWGRRNLGVIGSSPLQHRRPISAKGKAGIRRLGR

SEQ ID NO: 69324 - protein, 99 aa, Gossypium hirsutum
  Clone ID: LIB3148-056-Q1-K1-C12.pep
VVMNTQCPRCDCEEENSYHIFQQCLESLDKEILSNFEYSVVVSGLFGSIEINLHSSDKCHQVFKRGRATVHLDAAFDRQTFRSASGLIAWNGEGEILAS

SEQ ID NO: 69325 - protein, 317 aa, Gossypium hirsutum
  unsure (1)..(317): unsure at all Xaa locations
  Clone ID: GOSHI-09MAY01-C4804_1.pep
PASAPRGRPFPFSVDKGFIRSQRRQRKHXRGLSNPRCVHGIELVPSPKRMALSEEDRKKWIERTGRDLNFTIPPEASEFRSWRNLPNTDFELERPQIIKNIPHSHSRKLLNGSGLNLSTQSSSHTYGDGTDLSLVSNKRRKDDDCFLPVISPPDRIPDMEIHPSEPHWLNDFSGVMKSTYGPVTAAKAIYEDEAGYLIIISLPFVDLQRVKVSWRNTLTHGIIKLSCLSTSAMPFIKRHNRTFKLTDPAPEHCPPGEFVREIPLSTRIPEDAHIEAYHDGPGSVLEIMVPKLRMVPEEHEIRVCLRPKHVGNDLMLT

SEQ ID NO: 69326 - protein, 126 aa, Gossypium hirsutum
  Clone ID: LIB3493-054-P1-M1-A9.pep
TIPPEASDFSSWRNLPNTDFELERPPIMKSVLNLSTQSSSHMYSDGTDLSLVSNKRRKDDDCYLPVIPPSDRIPDMEIHPSEPHWVNDLNGVMKNAYRPVTPAKAIYEDEARYLIIISLPFVDLQR

SEQ ID NO: 69327 - protein, 524 aa, Gossypium hirsutum
  Clone ID: GOSHI-09MAY01-C4834_1.pep
MNCSISGEVPEEPVVSTKSGLLYEKRLIERHISDYGKCPVTGEALTMDDIVPVKTGKIVKPRSLTAASIPGMLGMFQNEWDALMLSNFALEQQLHTARQELSHALYQHDAACRVIARLKKERDEARSLLAQAERQAPLPASAATANVSALSNGKRAAESEDMGPAGAWVRPGVSDSIIAELTECNAALSQQRKKRQIPPTLAPIDALERYTQLSSHPLHKTNKPGITSIDINFSKDIVATGGVDSSAVLFDRTSGEILSTLSGHSKKVTSVKFVAQNDVFLSGSADKTVRIWQGSEDGKYDCRHILKDHTAEVQAVTVHATNNYFVTASLDMTWCFYDLSSGLCLTQVEDPSNSMGYTSAAFHPDGLILGTGTTGATVRIWDVKSRGNVANFDGHTGAVTAISFSENGYFLATAAHDGVKLWDLRKLKNFRSFELYDQDTPTNSVDFDHSGSYLAIAGSDIRVFQVGSVKAEWNCIKTLPDLSGTGKSTCVKFGPDAKYLAVGSMDRNLRIFGLPEGDDASTES

SEQ ID NO: 69328 - protein, 202 aa, Gossypium hirsutum
  Clone ID: GOSHI-09MAY01-C4584_1.pep
HASALSYGLSLNGVLFMSIYFSCYVGNRMVSVERIKQFSSIQPEAAWHNKNHLPPPNWPAHGNVELKDLQVRYRPSTPLVLKGITLSINGGEKIGVVGRTGSGKSTLIQVFFRLVEPTAGKIIIDDIDICMLGLHDLRPRFGIIPQEPVLFEGSVRSNIDPAGQFSDEEIWKSLERCQLKDVVASKPNKLDSLVVDNGDNWS

SEQ ID NO: 69329 - protein, 131 aa, Gossypium hirsutum
  Clone ID: GOSHI-09MAY01-C4554_4.pep
MWSLVCGTTPCMICGSGEIEGALLNHLGVKRNEVTSDGLFSGGEMECMGCCVNAPMITVADYSNGSEGYTYNYYEDITPKRVIEIVEMLRRGEKLPPGTQNPKRIKSGPEGGNTTLLTDPKPPPCRDLDAC

SEQ ID NO: 69330 - protein, 251 aa, Gossypium hirsutum
  Clone ID: GOSHI-09MAY01-C4554_2.pep
MLARLASRRFLEIRQAFRQSSQASRSLSTALNYHLDTPDNNPDLPWEFSEANKQKVKEILSHYPSNYKQSAVIPLLDLAQQQHGGWLPVSAMNAVAKVIEVAPIRVYEVATFYSMFNRSKVGKYHLLVCGTTPCMIRGSREIEEALLNHLGVKRNEVTSDGLFSVGEMECMGCCVNAPMITVADYSNGSEGYTYNYYEDITPKRVIEIVEMLRRGEKLPPGTQNPKRIKSGPECDHFGVSETKGKGAARIL

SEQ ID NO: 69331 - protein, 77 aa, Gossypium hirsutum
  Clone ID: AI054525.1.pep
KKKPIPRVATAISHLLVRKASLGDVFFLKIFKMRFNFTGLSSGRETWENRWNGSLMRAENGIEKKNREGIPNQRLSQ

SEQ ID NO: 69332 - protein, 89 aa, Gossypium hirsutum
  unsure (1)..(89): unsure at all Xaa locations
  Clone ID: LIB3584-053-P1-K2-D7.pep
GSEAAARILARQLVRLRQQITNLQGSRAQIXQALYANTSISTGIKGATKAMVAMNKIEMMSEAIDETLDKDEVEKETEKLTNQVRYFIY

SEQ ID NO: 69333 - protein, 79 aa, Gossypium hirsutum
  unsure (1)..(79): unsure at all Xaa locations
  Clone ID: LIB3197-019-Q1-M1-G8.pep
WSLVCGTTPCMICGSGEIEGALLKYLGVERNEVTXDGLFSVGEMECMGCCVNAPMIAVADYTNGFEGYKYNYYEDVTTQ

SEQ ID NO: 69334 - protein, 106 aa, Gossypium hirsutum
  Clone ID: LIB3149-061-Q1-K1-B9.pep
MLKIFKKKTSPKDALRTSKREMAVATRGVEREIASLQLEEKKLVAEIKKTAKTGNEAATRILARQLVRLRQQITNLQGSRAQIRGVATHTQALYASTSISTGMKGA

SEQ ID NO: 69335 - protein, 93 aa, Gossypium hirsutum
  Clone ID: LIB3145-043-Q1-K1-C5.pep
MLSPLASQRLIEVRQAFRLSAQVYRSFSTALNYHIDGPDNNPDLPWEFSEANKAKVKGILSHYPSNYKQSAVIPSVDLAHQQHGGLVSVSTMN

SEQ ID NO: 69336 - protein, 173 aa, Gossypium hirsutum
  unsure (1)..(173): unsure at all Xaa locations
  Clone ID: GOSHI-09MAY01-C4514_1.pep
MSRRSGTCLRLCXVTFALISALAGCGPALYWGFKKTLKLGPSKSSCPPCIWDWPPPLSLGNIAPGLTNLSIADCRSNDPDLKQEMEKQFLDLLTEELKLQETCXAKSHSRHMNITFGEAKRVASQYQKEAEKCIAATETCEEARERAEASLIREKKVTTVWEQRARQXAWEGE

SEQ ID NO: 69337 - protein, 129 aa, Gossypium hirsutum
  Clone ID: AI728429.1.pep
NLLVISVNYLTCFLCLCSSFAGLTNLSIADCGSNDPDLKQEMEKQFLDLLTEELKLQETVAEEHSRHMNITFGEAKRVASQYQKEAEKCFAATETCEEARERAEASLIRERKVTTVWEQRARQMGWEGE

SEQ ID NO: 69338 - protein, 196 aa, Gossypium hirsutum
  Clone ID: GOSHI-09MAY01-C4534_1.pep
YITTFEEYQIQRYEGASTLYGPHTLSAYIQEFQKLTSALIKGQAVEPGPQPPDLLKKQISFLTPVVMDSTPAGVNFGDVSSDVPANSTFKRGSTVTVVFWSACPRNDLMTEGTFALVEILQGKDSWVPTYDDDDFCLRFKWSRPSKLSPRSQATIEWTIPPSASLGVYRIRHFGAAKRLMGSIQHFTGTSSAFVVA

SEQ ID NO: 69339 - protein, 83 aa, Gossypium hirsutum
  unsure (1)..(83): unsure at all Xaa locations
  Clone ID: LIB3148-031-Q1-K1-H9.pep
IRTLYLSRVSIYYTDSILFLFHKHYKKKKKKKKKKKKKKKKKKKKKKKKKKKKKKKKKKKKKRKIKKNKKXXXKKKXKKGGPF

SEQ ID NO: 69340 - protein, 85 aa, Gossypium hirsutum
  unsure (1)..(85): unsure at all Xaa locations
  Clone ID: LIB3584-046-P1-K2-A10.pep
YTIFIPQALLKKYHLSLSFKRNFENYNHWAKRNRCQVNDTLFFKYMIGSDSVLLVTRXDGLSCNTRVFIQALPEGDSLFTFDRSG

SEQ ID NO: 69341 - protein, 148 aa, Gossypium hirsutum
  Clone ID: GOSHI-09MAY01-C4404_3.pep
MASKRILKELKDLQKDPPTSCSAGPVAEDMFHWQATIMGPPDSPYAGGVFQVTIHFPPDYPFKPPKVAFRTKVFHPNINSNGSICLDILKEQWSPALTISKVLLSICSLLTDPNPDDPLVPEIAHMYKTDRNKYETTARSWTQKYAMG

SEQ ID NO: 69342 - protein, 148 aa, Gossypium hirsutum
  Clone ID: GOSHI-09MAY01-C4404_2.pep
MASKRILKELKDLQKDPPTSCSAGPVAEDMFHWQATIMGPPDSPYAGGVFLVTIHFPPDYPFKPPKVAFRTKVFHPNINSNGSICLDILKEQWSPALTISKVLLSICSLLTDPNPDDPLVPEIAHMYKTDKNKYETTARSWTQKYAMG

SEQ ID NO: 69343 - protein, 148 aa, Gossypium hirsutum
  Clone ID: GOSHI-09MAY01-C4404_1.pep
MASKRILKELKDLQKDPPTSCSAGPVAEDMFHWQATIMGPPDSPYSGGVFLVTIHFPPDYPFKPPKVAFRTKVFHPNINSNGSICLDILKEQWSPALTISKVLLSICSLLTDPNPDDPLVPEIAHMYKTDRSKYETTARSWTQKYAMG

SEQ ID NO: 69344 - protein, 141 aa, Gossypium hirsutum
  unsure (1)..(141): unsure at all Xaa locations
  Clone ID: LIB3543-037-Q1-K1-C4.pep
MIEVLQKDPPTSCSAGPAAEDXFHWQASFMGPPDSPSSGGVXLVTIHFPPDYPFEPPKVALMTKVFHPNINSNGSIGLDILXKEQWSPALTIPKVLLSICSLLTDPNPHDPLVPEIAHMYKTDKSMYXTTARSWTQKYAMG

SEQ ID NO: 69345 - protein, 41 aa, Gossypium hirsutum
  Clone ID: LIB3146-041-Q1-K1-D4.pep
SLLRDPNPDDPLVPEIAHMYKTDKNKYETTARSWTQKYAMG

SEQ ID NO: 69346 - protein, 52 aa, Gossypium hirsutum
  Clone ID: LIB3585-048-Q6-K1-H1.pep
LKSYLYKWVLQVAFRTKVFHPNINSNGSICLDILKEQCSPALTITNVVVLPI

SEQ ID NO: 69347 - protein, 89 aa, Gossypium hirsutum
  Clone ID: LIB3828-026-Q6-K6-C3.pep
MASKRILKELKDLQKDPPTSCSAGPVAEDMFHWQATIMGPPDSPYSGGVFLVTIHFPPDYPFKPPKVAFRTKGFPPHFNSIGKLCLDNL

SEQ ID NO: 69348 - protein, 86 aa, Gossypium hirsutum
  Clone ID: uC-gsflmaxxa069f05b1.pep
RTRGCFSPWFFFLIFSFPRSKTSALLPPKEDHLFRFCDGIEADLEGSVGFTEGSFSLSRILFFFHFIFYFSLFFFLFSFIIFFFYL

SEQ ID NO: 69349 - protein, 175 aa, Gossypium hirsutum
  Clone ID: GOSHI-09MAY01-C4434_1.pep
EKEKRKTEKELEDENGGAGVYSASLRKNYILANDEWKEDTMPEILDGHNVYDFIDPDILLRLEELEREEGLRQAEEEGDDFEMDGQELSLEEQEALAEIRKKKSLLIQQHRMKKSTAESRPVVPRKFGTDRKFTTGRMGRQLSSLGLDPSLAINRARSKSRGRKRERSVDKKKGD

SEQ ID NO: 69350 - protein, 65 aa, Gossypium hirsutum
  Clone ID: GOSHI-09MAY01-C4704_1.pep
MCHKTFNFYLLHISDIEPPICSVKDNHGKDRHIHNKRHHLACSVVISTPITLSRSLWPRYSSICP

SEQ ID NO: 69351 - protein, 201 aa, Gossypium hirsutum
  unsure (1)..(201): unsure at all Xaa locations
  Clone ID: GOSHI-09MAY01-C4734_2.pep
MFIFDWFYGILASLGLWQKEAKILFLGLDNAGKTTLLHMLKDERLVQHQPTQHPTSEELSIGKIKFKXFDLGGHQIARRVWKDYYAKVDAVVYLVDAYDKERFAESKRELDALLSDEALANVPFLILGNKIDIPYAASEDELRYHLGLTNFTTGKANAFFGHSFLPPSSDIGFTSSVQACICLMAVKLSYVCQVFKMIELS

SEQ ID NO: 69352 - protein, 193 aa, Gossypium hirsutum
  Clone ID: GOSHI-09MAY01-C4734_1.pep
MFLFDWFYGILASLGLWHKEAKILFLGLDNAGKTTLLHMLKDERLVQHQPTQHPTSEELSIGKIKFKAFDLGGHQIARRVWKDYYAKVDAVVYLVDAYDKERFAESKKELDALLSDESLANVPFLILGNKIDIPYAASEDELRYHLGLTNFTTGKGKVNLGDSNVRPLEVFMCSIVRKMGYGDGFKWVSQYIK

SEQ ID NO: 69353 - protein, 91 aa, Gossypium hirsutum
  Clone ID: LIB3825-028-Q6-N6-C7.pep
FAESKRELDALLSDEALANVPFLILGNKIDIPYAASEDELRYHLGLTNFTTGKGKVNLGDSNVRPLEVFMCSIVRKMGYGDGFKWVSQYIK

SEQ ID NO: 69354 - protein, 75 aa, Gossypium hirsutum
  Clone ID: LIB3585-015-P1-K1-E12.pep
PRVRFNGIWQRLVQHQPTQHATSEELSIGKIKFKAFDLGGHQIARRVWKDYYAKVHFFYLQIHLISCNLICVCVC

SEQ ID NO: 69355 - protein, 61 aa, Gossypium hirsutum
  Clone ID: LIB3083-040-Q1-G1-H6.pep
CYFYTKLNWIKHVEKLLLHVFQPPCYPTFFPHLLPLSFSFLPFLFESVNFVLYQSMNETYK

SEQ ID NO: 69356 - protein, 272 aa, Gossypium hirsutum
  Clone ID: GOSHI-09MAY01-C4694_1.pep
KNLQECLGGSKDAKDNDSYSFYQAVDGQHIILHPLNVKCLLHHYGSYDSLPHRVSGRILELETITQSEAVRRRYRYLSHFSLTTTFQLCEIDLSGVLPPDALHPFMDEIKKREKQRKQLARKEQKEKIKAEVAAAVQVTPMISNFGHCSYNDSPTFSMDDFEALGSSTVISSSPPVTGERKLFSNVTRLGFAAAHDSPSLKIEEGNGMHNNEGATDSTGAAGSRSSGTQSFANVISRAKAPENLQTPKMNEIGKKGKKGGRVLLSTAGGRRY

SEQ ID NO: 69357 - protein, 201 aa, Gossypium hirsutum
  Clone ID: GOSHI-09MAY01-C4614_1.pep
RVRKLKSAMTRLTARVQKVRDELEQLLDDDDDMADLYLSRKLAGTSPVSGSGAANWYLASPTIGSKISRASRASIATARGDENDVEELEMLLEAYFMQIDGTLNKLTTLREYIDDTEDYINIQLDNHRNQLIQLELFLSSGTVCLSIYSLVAAIFGMNIPYTWDTNHGYMFKWVVIVSGIFCATLFILIMSYARLKGLVGS

SEQ ID NO: 69358 - protein, 172 aa, Gossypium hirsutum
  unsure (1)..(172): unsure at all Xaa locations
  Clone ID: GOSHI-09MAY01-C4604_1.pep
PTRPGILTAEENAIEGPEFSSKSPDEMKDIIPNIQVMARSKPSDKLNFVTNLRNMFGEVVAVTGDGTNDASALRQSDIGLAMGIXAGTEVAKGNADAIVMDDNFATIANVAKWGRAVYINIQKFVQFQLTVNVVALIINFVSACISRSAPLTAVQLLWVNMIMDTLGALALA

SEQ ID NO: 69359 - protein, 315 aa, Gossypium hirsutum
  Clone ID: GOSHI-09MAY01-C4634_1.pep
KNKVAACAKHYVGDGGTTKGINENNTVISWNGLLGIHMPAYFPPVPKGVATIMTSYSSWNGKKMHANHDLVTDFLKNKLKFRGFVISDWQGLDRITSPPHANYSYSVEAGVGAGIDMVMVPYNFTEFIDDLTYQVKNNIIPMSRIDDAVKRILRVKFVMGLFENPMADNSLVNQLGSQEHRELAREAVRKSLVLLKNGESADKPLLPLPKKATKILVAGTHADNLGYQCGGWTITWQGLGGNDLTTGTTILQAVKNTVDSSTQVVYSENPDAGFVKSGEFSYAIVVVGEPPYAETYGDSLNLTISEPGPNTIYNV

SEQ ID NO: 69360 - protein, 69 aa, Gossypium hirsutum
  Clone ID: GOSHI-09MAY01-C4124_6.pep
MDAIDSVFDPLREFAKDSGRLVKRCHKPDRKEFTKVAFRTAIGFVVMGFVGFFVKLIFIPINNIIVGSG

SEQ ID NO: 69361 - protein, 69 aa, Gossypium hirsutum
  Clone ID: GOSHI-09MAY01-C4124_5.pep
MDAIDSVFDPLREFAKDSVRLVKRCHKPDRKEFTKVAFRTAIGFVVMGFVGFFVKLIFIPINNIIVGSG

SEQ ID NO: 69362 - protein, 69 aa, Gossypium hirsutum
  Clone ID: GOSHI-09MAY01-C4124_3.pep
MDAIDSVFDPLREFAKDSVRLVKRCHKPDRKEFTKVAVRTAIGFVVMGFVGFFVKLIFIPINNIIVGSG

SEQ ID NO: 69363 - protein, 69 aa, Gossypium hirsutum
  Clone ID: GOSHI-09MAY01-C4124_2.pep
MDAIDSVFDPLREFAKDSVRLVKRCHKPDRKEFTKVALRTAIGFVVMGFVGFFVKLIFIPINNIIVGSG

SEQ ID NO: 69364 - protein, 69 aa, Gossypium hirsutum
  Clone ID: LIB3543-054-Q1-K6-H6.pep
MDAIDSFFDPLREFAKDSVRLVKRCHKPDRKEFTKVAFRTAIGFVVMGFVGFFVKLIFIPINNIIVGSG

SEQ ID NO: 69365 - protein, 69 aa, Gossypium hirsutum
  Clone ID: LIB3148-002-P1-K1-C12.pep
MDAIDSLFGALREFAKDSVRLVKRCHKPDRKEFTKVALRTAIGFVVMGFVGFFVKLIFIPINNIIVASG

SEQ ID NO: 69366 - protein, 57 aa, Gossypium hirsutum
  Clone ID: LIB3148-044-Q1-K1-G3.pep
NNILQIHLILIKEPKGKKKGGEEAMPDVNSGIQVCGLAFMLLTQQHRSRDKLSEISN

SEQ ID NO: 69367 - protein, 302 aa, Gossypium hirsutum
  unsure (1)..(302): unsure at all Xaa locations
  Clone ID: GOSHI-09MAY01-C4004_1.pep
MADASPRTDISTDAETDEKNLRFDSEKLNAAVAASDSSDRSKSNLDQKILRRLAQNREAARKSRLRKKAYVHHLESSRLKLPQLEQELQRARQQGIFISSSGDQSHSLGGNGAMAFDVEYARWLEEHNRQINELRTAVNSHAGDAELRIIVDGVMAHYDEIFRLKSNVAKADVFHSLSGMWKTPAERCFLWLGGFRSSELLKLLVNQLEPLTEQLVGGSXNLQQSSXQAEDALSXQGMEALQQSLAETLSTGSLGSSGSSGNVANYMGQMAMAMGKLGTLEGFIRQADNLRQQTLQQMHRIL

SEQ ID NO: 69368 - protein, 134 aa, Gossypium hirsutum
  unsure (1)..(134): unsure at all Xaa locations
  Clone ID: uC-gsronu33B027e10b1.pep
NFHVFIGFSILLVRFVFFVGAMAFDVEYARWLEEQNRQINELRTAVNSHASDAELRIIVDGVMAHYDEIFRLKSNAAXADVIHLLSGMWKTPAERCFLXLGGFTSSELLKLFVDQLEPLTXQQLVGIGNLQQSS

SEQ ID NO: 69369 - protein, 205 aa, Gossypium hirsutum
  Clone ID: GOSHI-09MAY01-C4374_1.pep
MALCKPYSRLVLALAMALVAATVPVYGQRTINTPCTPSALNIFTPCMNLLTNSSANGTSPTADCCNSLKTLTSSGMDCLCLIVTGSVPFRLPINRTLAISLPRACSMPGVPLQCKASVGAPVPAPGPISLAPTLSPGTSPTLSPKGSIVPEPTGPAEAPESNTIPTATTGSRPVLNPTASAADRSYGFSPSLVLLTLGFAVFKYY

SEQ ID NO: 69370 - protein, 382 aa, Gossypium hirsutum
  Clone ID: GOSHI-09MAY01-C4224_1.pep
RFVIFSKAKENAPCIVFVDEIDAVGRQRGTGIGGGNDEREQTLNQLWTEMDGFEGNTGIIVIAATNRADILDSALLRPGRFDRQVTVDVPDIRGRTEILKVHGSNKKFETDVSFDVIAMRTPGFSGADLANLLNEAAMLAGRRGKTASSSKEIDDSIDRIVAGMEGTGMTDGKSKSLVAYHEVGHAICGTLTPGHDPVQKVTLIPRGQARGLTWFIPSDDPTLISKQQLFARIVGGLGGRAAEEIIFGEPEVTTGAAGDLQQITGLAKQMVVTFGMSEIGPWSLMDSSAQSADVIMRMMARNSMSEKLAEDIDTAVKRLSDSAYEIALQHIRNNREAIDKIVEVLLEKETMSGDEFRAILSEFVEIPAENQVPPSVPTPVSV

SEQ ID NO: 69371 - protein, 216 aa, Gossypium hirsutum
  Clone ID: GOSHI-09MAY01-C5944_1.pep
AHASADAWARIHLWSKARNWLLDALGMSISLGPSSSGPSPLTATRKSLIMEKMGDKDIVKRAFKTFQSNYNQLKPSSQERSPAAKPVPTKGRESRLSTLTTPQKENGGSSKVSSMEKKNAKAAPSYSGLKSDERPERRKELSKKLEGKSNGREAERKNLQTKSKDNRDAEIKKLRQSLNFKATPLPGFYHGQRTSKSPLDKIGSKSDIHWQPGFLG

SEQ ID NO: 69372 - protein, 85 aa, Gossypium hirsutum
  unsure (1)..(85): unsure at all Xaa locations
  Clone ID: LIB3147-019-Q1-K1-C4.pep
YGDKNAKAAPSYSGLKSDERPDRRKELSKKLEXKFNGREAERKNLQTKSKDNRYAYIKKLRHTLNFKATPLSCFYHGQRTSHSLE

SEQ ID NO: 69373 - protein, 215 aa, Gossypium hirsutum
  Clone ID: GOSHI-09MAY01-C5964_1.pep
VGDRLSQFAESYGVSLKFNVISGLKLSDLSRDSLVIEQDEPLAVNFAFKLYRMPDESVSVENPRDELLRRVKGLAPRVVTLVEQEMNTNTAPFALRVGEACGYYGALFDSVESTVLRDNPERAQLEEGLLRKIANSVACEGRDRVERCEVFGKWRARMSMAGFELKPLSQTVAETMRAKLNSCNRVNPGFTVKEENGGVSFGWLGRTLTVASAWR

SEQ ID NO: 69374 - protein, 108 aa, Gossypium hirsutum
  unsure (1)..(108): unsure at all Xaa locations
  Clone ID: GOSHI-09MAY01-C5914_1.pep
YLGERTIKGSLEAYSCIHTGXDKRLSLSLENEILDSLGKSSDTDSSPVEFLLSRSSRKTLIYLVLTLYHMYPDYDLSAVKAHQFFTEEIWDTFKQIFETYMLEASKEW

SEQ ID NO: 69375 - protein, 231 aa, Gossypium hirsutum
  Clone ID: GOSHI-09MAY01-C5854_1.pep
AIFTPRGRYSVELDLSFLRLQGQANDFKIQYSSVVRLFLLPKSNQPHTFVVVTLDPPIRKGQTLYPHIVLQFETDYVVESTLSINEDLLNTKYKDRLEPSYKGLIHEVFTTIMRGLSGAKVTKPGKFRSCQDGYAVKSSLKAEDGVLYPLEKSFFFLPKPPTLILHEEIDYVEFERHAAGGSNMHYFDLLIRLKTEQEHLFRNIQRNEYHNLFDFISSKGLKIMNLGDVRT

SEQ ID NO: 69376 - protein, 212 aa, Gossypium hirsutum
  Clone ID: GOSHI-09MAY01-C5554_1.pep
MEKPATEVIKGDGWGRFPDDLEYHSGFGNHFESEVIAGSLPRGQNSPLICPFGLYAEQISGTSFTSPRKLSQRSWFYRIKPSVTHEPFWPREPSHKKLVSEFDGSNTVANPTQLRWKPVDIPDSPTDFIDGLYTICGAGSSFLRHGFAIHMYIANKSMDNCAFCNADGDFLVVPQQGRLWITTECGRLQVSPGEIVVLPQGFRFVVDLPDGP

SEQ ID NO: 69377 - protein, 145 aa, Gossypium hirsutum
  Clone ID: LIB3583-027-Q6-K1-B11.pep
MRKLCPNIDKEDGLETVLEVPVPEEMFTSMGNNLQARLENMLTWMKAQASDKWSQPMLAGRINELRFLLYLVGSPLIPLQVQLGHSVHKPVKDCSIQASTAKYIVQQYIAATGGQQALNAVHSMCVTGQVKITASEFQQGDVNVK

SEQ ID NO: 69378 - protein, 105 aa, Gossypium hirsutum
  Clone ID: LIB3583-027-Q6-K1-B5.pep
MIPNICSPAMINNVQTRLENMLTWMKTQASDKWYQPMLAGRINELRFLLYLVGSPLIPLQEQLGHSVHKPDKDCSIQALTAKYIVQQYIAATGGQQALNPMHNMC

SEQ ID NO: 69379 - protein, 152 aa, Gossypium hirsutum
  Clone ID: GOSHI-09MAY01-C5564_1.pep
EFPAESGTLDSMASRKKESEGIALLSMYNDEDDEEMGDIEEGDHRQNQQTGEEEEQQQEGQPLEEENDYRESNNNMEEDSRTNDNTPPFPHQNTILSQQQQEPSVSSPQQPQTLVSSKRSGGGRLTIVDYGHHESAMSPEPEERELETVMTS

SEQ ID NO: 69380 - protein, 123 aa, Gossypium hirsutum
  unsure (1)..(123): unsure at all Xaa locations
  Clone ID: GOSHI-09MAY01-C5504_1.pep
MAGAASALFLLDIKGRVLVWRDYRGDVSAAQAERFFTKLIEKEGDPQSQDPVVYDNGVTYMFIQHSNVYLMTATRQNCHAASLLFFLYRVVDVFKHYFEGLEEEXSLRDNFVVVYELLDEIMD

SEQ ID NO: 69381 - protein, 92 aa, Gossypium hirsutum
  unsure (1)..(92): unsure at all Xaa locations
  Clone ID: GOSHI-09MAY01-C5534_2.pep
SLLFLFLPKCLSASHASRVGNFVQSVVPRQLVYGTMVYVRQTIVSDASCALARAVCIXATRYSAVRRQFGSQNGGSKTHVIDYKLIKANSCI

SEQ ID NO: 69382 - protein, 323 aa, Gossypium hirsutum
  Clone ID: GOSHI-09MAY01-C5534_1.pep
RKDNRTMLSRKDLFKDTLRKAGHAWKRIIELRLSEEEASKLKFFVDQTVFTDLHWGMFIPAPRGRGNEEQQQKWLPLAYKMQIMGCYAQTELGHGSNVQGLETTATFDPETDEFVIHSPTLTSSKWWPGGLGKVSTHAVVYARLITDGQDHGVHGFIVQLRSLDDHLPLPGITVGDIGMKFGSGAYNSMDNGVLRFDHVRIPRDQMLMRVSQVTREGKFVQSDVPRQLVYGTMVYVRQTIVSDASCALARAVCIATRYSAVRRQFGSQNGGPETQVIDYKTQQSRLFPLLASAYAFRFVGEWLKWLYADVTRILPANDLFTLP

SEQ ID NO: 69383 - protein, 426 aa, Gossypium hirsutum
  Clone ID: GOSHI-09MAY01-C5484_3.pep
MGKVAVGAAAVCAAAVCAAAALVVHHRMKSSGKWAQAQSILKDFEEKCGTPISKLKQVADAMTVEMHAGLASEGGSKLKMIISYVDNLPTGDEKGLFYALDLGGTNFRVLRVHLGGKEHHVVKQEFEEVSIPPHLMTGSSDALFDYIAEALAKFVATESEGLHFSPDRQRELGVTFSFPVRQTSISSGTLIKWTKGFSIEDAVGQDVVGELTKAMERIGLDMRVTALVNDTIGTLAGGRYNNPDVVAAVILGTGTNAAYVERAHAIPKWHGLLPKSGDMVINMEWGNFRASHLPISEYDQALDTESLNPGEQIFEKLISGMYLGEVVRRVLYKMADEAAFFGDTIPEKLKIPFILRTPHMSAMHQDTTPDLKIVATKLKDILEISNTSLKMRKVIVELCDIVATRGARLSAAGICRILKKIGRDTL

SEQ ID NO: 69384 - protein, 201 aa, Gossypium hirsutum
  Clone ID: GOSHI-09MAY01-C5484_1.pep
FSKRYDVNSINYYFQILDPASARASGGGVARRVLYKMADEAAFFGDTIPEKLKIPFILRTPHMSAMHQDTTPDLKIVATKLKDISEISNTSLKMRKVIVELCDIVATRGARLSAAGIAGILKKIGRDTLKDGEKQKSVVSLDGGLYEHYTKFRTCMESPPPELLGEEVSENIIIEHSTDGSGIGAALLAASHSQYIGIDES

SEQ ID NO: 69385 - protein, 145 aa, Gossypium hirsutum
  Clone ID: LIB3828-010-Q1-K6-A5.pep
FRRTPHMSAMHQDTSPDLKIVATKLKDILEISNTSLKMRKVIVELCDIVATRGARLSAAGIAGILKKIGRDTLKDGEKQKSVVSLDGGLYEHYTKFRTCMESTLTELLGEEVSENIIIEHSNDGSGIGAALLAASHSQYIGIDES

SEQ ID NO: 69386 - protein, 309 aa, Gossypium hirsutum
  Clone ID: GOSHI-09MAY01-C5424_1.pep
MQAAECTWTHFEMLRPFCFKSPSTTPLFFNFSKHFQKGYSDSSFFRSNWRISNYPSFMATISSVSTHKDPVSTHDATPNITHQPVQVAKRLEKFKTTIFTQMSMLAIKHGAINLGQGFPNFDGPDFVKEAAIQAIKDGKNQYARGYGVPDFNNAIAARFKKDTGLVIDPEKEVTVTSGCTEAIAATMLGLIDPGDEVILFAPFYDSYEATLSMAGAKVKCITLRPPDFAVPIDELKSTISKNTRAILINTPHNPTGKMFTREELNTIASLCIENDVLVFTDEVYDKLSFENHISMASLPGMYERTVTMN

SEQ ID NO: 69387 - protein, 267 aa, Gossypium hirsutum
  Clone ID: GOSHI-09MAY01-C5754_1.pep
KVNLQCRSADADLFQRNIADNDIKDIETGLLEPLLHPSVEVPPSSQTITETEHRGTDAGEVREWEILKSIVYGGLIESITSLGVVSSAAGAGAGTLNVLALGVANLIGGLIIICHNLRELKNDQPRASDVEEDRYQVLLGRRQNFKLHAFVAILSFLVFGLVPPVVYGFSFRNSDDKDFKLAAMAGASLICIILLALGKGHVRKPNRAYFPTVFYYLSLGITASGISYVVGQLLKKLAEQLGLFDSSSTVSMPFLETIPMEMGRASY

SEQ ID NO: 69388 - protein, 138 aa, Gossypium hirsutum
  Clone ID: LIB3135-035-Q1-K1-B9.pep
SANPFGQPVGQPVRNLKEPGLGDIFSWTDSSLLGKLKGESTVQKPDADLFQRNIGDNDIKDIETGLLEPLLHPSVEVPPSSQTITETEHRGSDAGEVREWEILKSIVYGGLIESITSLGVVSSAARACADTLNVLALG

SEQ ID NO: 69389 - protein, 93 aa, Gossypium hirsutum
  unsure (1)..(93): unsure at all Xaa locations
  Clone ID: LIB3145-041-Q1-K1-G9.pep
LSSCYSSGAAEGGSFETITDTEYIGTDAGEAPEWEILKSIVYGGLIESITSLGVVSSAAGAGAATXNVLASGAANLIAGLMIIRNNLTELKND

SEQ ID NO: 69390 - protein, 253 aa, Gossypium hirsutum
  unsure (1)..(253): unsure at all Xaa locations
  Clone ID: GOSHI-09MAY01-C5724_1.pep
MASIACSSAAFTGTSASDLLRSSSNGVSGIPXLKTLGKAPFSVKKRDATVVAKLKKGKKHEYPWPADPDPNVKGGVLTHLSHFKPLKEKQKPVTLDFEKPLVEIEKKMIDVRRMANETGLDFSDQIILLENKYQQALKDLYTHLTPIQRVHIARHPNRPTFLDHIFSITDKFVELHGDRSGYDDPAIVTGIGTIDDRRYMFIGQQKGRNTKENIHRNFGMPTPHGYRKALRMMYYADHHGFSIGTFIDTPGAY

SEQ ID NO: 69391 - protein, 135 aa, Gossypium hirsutum
  unsure (1)..(135): unsure at all Xaa locations
  Clone ID: LIB3584-034-P1-K1-E3.pep
MEYEDIYGLSPRPKYDCLLFDLDDTLYPLSSGLAKACGNNIKDYMVEKLGIGKEKIVELSNYLYKNYGTTMAGLRAVGYDFDYDDYHSYVHGGLSYENLKPDPQLRSLLLTXPIRKIIFTXADRVHAIKALSKLG

SEQ ID NO: 69392 - protein, 145 aa, Gossypium hirsutum
  unsure (1)..(145): unsure at all Xaa locations
  Clone ID: LIB3585-038-P1-K1-H6.pep
KKTAYDDIYRLSAKPKYDCLLFDLEDPLYPLSSGLAKACGNNIKDDMTEKLGIGKEKIDELSNYLYKNYGTTMAGLRAVESDWLYEDNHXYVHGGLPYENLQADPQLRSLLLTXPIRKIIFTNADRVHAIKALSKLGLEDCFEGI

SEQ ID NO: 69393 - protein, 160 aa, Gossypium hirsutum
  Clone ID: GOSHI-09MAY01-C5154_2.pep
MAVDPSELRYYEDDDTPTMKTIKGATTGFVAGTIWGTVVATWYDVPRVERSVAIPGLVRTLKMMGNYGMTFAAIGGVYIGVEQLVQNYRMKRDFVNGAVGGFVAGASILGFKGRSISTAISAGSALAFTSAVIDAGGQTTRLDTGKEYYPYTTKKRPVES

SEQ ID NO: 69394 - protein, 160 aa, Gossypium hirsutum
  Clone ID: GOSHI-09MAY01-C5154_1.pep
EAADPSELRYYEDDDTPTMKTIKGATTGLGAGTIWGTVVATWYDVPRVERSVAIPGLVRTLKMMGNYGMTFAAIGGVYIGVEQLLQNYRMKRDFVNGAVGGFVAGASILGFKGRSISTAISAGSALAFTSAVIDAGGQTTRLDTGKEYYPYTTKKRPVES

SEQ ID NO: 69395 - protein, 105 aa, Gossypium hirsutum
  Clone ID: LIB3083-009-Q1-L1-F1.pep
MEPSELMYYEDDDTPTMKTIKGATTGFVAGTIWGTVVATWYDVPRVERSVALPRLVRTLKMMGNYGMTFAGIGWSYIGVEHLLQNFMMKKSFFKLCCLVVYWLGL

SEQ ID NO: 69396 - protein, 169 aa, Gossypium hirsutum
  Clone ID: GOSHI-09MAY01-C5164_2.pep
MATPDESPAAKRWLPLEANPDVMNQFLWGLGLPESEAECCDVYGLDDELLSMVPQPVLAVLFLYPITSQTEEERLQQDNEKRDVSSKVYFMKQTVGNACGTIGLLHSVGNITSEIKLQEGSFLDRFFKSTAIMDPLERAAFLETDGEMEVAHTVAATAGDTEASEMWIL

SEQ ID NO: 69397 - protein, 238 aa, Gossypium hirsutum
  Clone ID: GOSHI-09MAY01-C5164_1.pep
MATPAGSSSAKRWLPLEANPDVMNQAPGGLGLPESEAECCDVYGSQDELLAMVPQPVLAVLFLYPITSQTEEERLQQDNEKRDVSSEVYFMKQTVGNACGTIGLLHSVGNITSEIKLQEGSFLDRFFKSTATMDPLERAAFLEKDGEMEVAHTVAATAGDTEASDDVDTHFICFTCVDGQLYELDGRKSGPISHGSSSRSTLLQDAAKVIKGMIQKNPESLNFHVIALPKMGLGTGAF

SEQ ID NO: 69398 - protein, 75 aa, Gossypium hirsutum
  Clone ID: LIB3146-015-Q1-K1-G3.pep
DASCKVYFMKQTVGNACGTIGLLHGVGNVTSEIKLQEGSYLDRFFKSTASMDPLERAAFLEKEREMEVAHSVTAT

SEQ ID NO: 69399 - protein, 100 aa, Gossypium hirsutum
  Clone ID: GOSHI-09MAY01-C5024_1.pep
MAMASVRSGLLRAALRGGSRPTAPPTRGFASSSHHDDAYETAKWEKITYLGVATCTVLAIYNLSKGHPHHEEPPAYPYLHIRNKEFPWGPDGLFERKEHH

SEQ ID NO: 69400 - protein, 117 aa, Gossypium hirsutum
  Clone ID: LIB3146-044-Q1-K1-D11.pep
PRVRGRVRPRVRPRVRPRVRASVRSGLLRAALRGGSRPTAPPTRGFASSSHHDDAYETAKWEKITYLGVATCTVLAIYNLSKGHPHHEEPPAYPYLHIRNKEFPWGPDGLFEKKEHH

SEQ ID NO: 69401 - protein, 149 aa, Gossypium hirsutum
  unsure (1)..(149): unsure at all Xaa locations
  Clone ID: GOSHI-09MAY01-C5344_2.pep
DSASSVVAGSRNSLAICDDGKLFTWGWNQRGTLGAPPXTKTDNIPSQAMALANVKIVQAAIGGWHCLAVDDEGRAYAWGGNEYGQCGEEPERKDDTGRPLRRDIVIPQRCAPKLVVRQVAAGGTHSVVLTHEGYVWTWGQPWPPGDIKQ

SEQ ID NO: 69402 - protein, 392 aa, Gossypium hirsutum
  Clone ID: GOSHI-09MAY01-C5344_1.pep
MASSSVIAWGSGEDGQLGIGNNEEREWVCVVQALEPHNVRSVVAGSRNSLAICDDGKLFTWGWNQRGTLGHPPETKTENIPSQVKALANVKIVQAAIGGWHCLAVDDEGRAYAWGGNEYGQCGEEPERKDDTGRPLRRDIVIPQRCAPKLVVRQVAAGGTHSVPRAQGGCGGAGGQPWPPGDIKQISVPVRVQGLENVRLITVGAFHNLALQEDGTLWAWGNNEYGQLGTGDTQPRSQPIPVQGLSGLTLVDIAAGGWHSTALTDDGEVYGWGRGEHGRLGFGDNDKSSKMVPQRVQLLAGEDIVQVSCGGTHSVALTRDGRMFSFGRGDHGRLGYGRKATTGQPMEVPINLPAPKSVSGSGAEGYWISKLVACGGRHTLAIVEWKTDESKP

SEQ ID NO: 69403 - protein, 214 aa, Gossypium hirsutum
  unsure (1)..(214): unsure at all Xaa locations
  Clone ID: GOSHI-09MAY01-C5304_4.pep
NQPKNTGGGGGGQKYNTKRVVVDARHHMLGRLASILAKELLNGQKVXVVRCEEICMWGGXGEFFFELHEFLRKRMNTKPSHGPIHFRAPAKILWRTIRGMIPHKTKRGAAALARLKAYEGIPAPYDKTKRMVIPDALKVLRLQKGHKYCLLGKLSSEGGWILPATLRELERKRKERAQVAYERKKQLNKLRVKAEKTAEEKLGSQLDILAPVKY

SEQ ID NO: 69404 - protein, 217 aa, Gossypium hirsutum
  unsure (1)..(217): unsure at all Xaa locations
  Clone ID: GOSHI-09MAY01-C5304_3.pep
EKGSSNKAKTTGAGSGVCATKVVADARHHMLXGRLASIVAKELLYGQKVVVVRCEEICMSGGLVRQKMKYLRFLRIRMNSKPSHGPIHFRAPAKIFWRTVRGMVPHKTKRGXAALARLKAYEGIPSPYDKIKRMVIPDALKVLRLQKGHKYCLLGRLSSEVGWNHYDTIRELERKRKERAQVAYERNKQLTKLRVKAEKVAEEKLGAQVGVIAPITY

SEQ ID NO: 69405 - protein, 206 aa, Gossypium hirsutum
  Clone ID: GOSHI-09MAY01-C5304_2.pep
MVSGSGICAKRVVVDARHHMLGRLASTLAKELLNGQKVVVVRCEEICMSGGLVRQKMKYMRFLRKRMNTKPSHGPIHFRAPAKILWRTIRGMIPHKTKRGAAALARLKAYEGIPAPYDKIKRMVIPDALKVLRLQKGHKYCLLGKLSSEVGWNHYDTIKELERKRKERAQVAYERRKQLTKLRVKAEKVAEEKLGTQLEVISPIEY

SEQ ID NO: 69406 - protein, 206 aa, Gossypium hirsutum
  Clone ID: GOSHI-09MAY01-C5304_1.pep
MVSGSGICAKRVVVDARHHMLGRLASILAKELLNGQKVVVVRCEEICMSGGLVRQKMKYMRFLRKRMNTKPSHGPIHFRAPAKILWRTIRGMIPHKTKRGAAALARLKAYEGIPAPYDKTKRMVIPDALKVLRLQKGHKYCLLGKLSSEVGWNHYDTIKELERKRKERAQVAYERRKQLTKLRVKAEKVAEENLGPQLEVIAPIKY

SEQ ID NO: 69407 - protein, 93 aa, Gossypium hirsutum
  Clone ID: LIB3149-059-Q1-K1-A2.pep
AKIFWRTVRGLIPHKIKVLRLQKGHKYCLLGRLSSEVGWNHYDTIRELEKKRKERAHVAYERKKQLNKLRVKAEKTVEEKLGSQLDILAPVKY

SEQ ID NO: 69408 - protein, 96 aa, Gossypium hirsutum
  unsure (1)..(96): unsure at all Xaa locations
  Clone ID: LIB3272-046-P1-K1-C3.pep
MMVSGSGIYTKRVGVDAXHHMLGRCASILGNELVNGQKGVGGRCEEICMSGGLVRQKMNYMMFLRKQMNTKASHGPIHFRAPAKILWRTIRGMIPH

SEQ ID NO: 69409 - protein, 106 aa, Gossypium hirsutum
  unsure (1)..(106): unsure at all Xaa locations
  Clone ID: uC-gsflmaxxa029g07b1.pep
IKKVVVDARHHMLGRLAYIVAKELLIIHSEENERCXEICMXRGLVRQTMNYMRFLPMRVNGGHXHSPTHCXATAKIFWRTVRGMIPHKTKRGAAVLARLKAYEGIA

SEQ ID NO: 69410 - protein, 49 aa, Gossypium hirsutum
  Clone ID: LIB3149-053-Q1-K1-A12.pep
PLDIQNWNWGKDVELRAEFVLSRTQGFDPQLVKRHLYLISNISHAYAWL

SEQ ID NO: 69411 - protein, 245 aa, Gossypium hirsutum
  Clone ID: GOSHI-09MAY01-C5334_1.pep
FMFDPIRGKLLDWEKRYVVIIGTVEGLVYLHENYETKIIHRDIKASNILLDSKLRAKIADFGLARSFQEDQSHISTAIAGTLGYMAPEYLAHGQLTEKADVYSFGVLLLEIVTGKQNNKSKATEYSDSIVTVTWRHFQLGTVEEIYDPNLMLHNDNHGSNFRNEIFRGVQIGLLCTQEIPSLRPSMSKVLHLLTKKDEDLPAPTNPPFLDEKMEFNETSDNECYPLNRADNDSIATVTHSSFYGR

SEQ ID NO: 69412 - protein, 307 aa, Gossypium hirsutum
  unsure (1)..(307): unsure at all Xaa locations
  Clone ID: GOSHI-09MAY01-C5294_1.pep
YIKIWYKPNKMRGVVWLDDRVKXSAEDKQTLPPVRVSSDTSNFAYTNRQGHRSAIRISRIVTETLRLKMDNVRWFVMGDDDTVFITDNLIRILRKYDHTQYYYIGSLSESHIQNIFFSYGMAYGGGGFAISYPLAKALAKMQDRCIQRYPGLYGSDDRMQACMAELGVPLTKELGFHQYDVYGNLFGLLAAHPVTPLVSLHHLDVVEPIFPNVTRVEALQRLMLPVKLDSAGIMQQSICYDKSKSWTISVSWGFAVQIFRGIFSPREIEMPSRTFLNWYRRADYTAYAFNTRPVSRNPCQKPFCVYM

SEQ ID NO: 69413 - protein, 193 aa, Gossypium hirsutum
  Clone ID: GOSHI-09MAY01-C5284_1.pep
FSSFFIFCCCQHLNKLSQVKPDFKEMYPGVKVKEQDQDDQQVIKDSVLSLKDVLSLSMLDSYFPGKKHEDDVSPMPTARIPKSYHAPEVDKHSDSTSEEAEQYKTKAEEEETRPNIRVSSTPRPRSVISSSDNDALFRNKNKIEGRQRTVSKNHNTVQNRLTTRTHIFVKSSVKTNKSNDGGGDNCIVEIIGK

SEQ ID NO: 69414 - protein, 151 aa, Gossypium hirsutum
  Clone ID: LIB3585-053-P1-K1-G7.pep
QDKPDFKEMYPRVKVKEQDQDDQQVIKDSVLSLKDVLFLSMLDSYFPGKRHEDDVSPMPTARIPKSYHAPEVDKHSDSTSEGRFFLFMVRCLDSGVSVRYGMLDFYKLFHIFGGSNNIILYALPNSFNLSKCLVRSRLTLFTYYFGSSEDD

SEQ ID NO: 69415 - protein, 247 aa, Gossypium hirsutum
  Clone ID: GOSHI-09MAY01-C5274_1.pep
SRGNDFSLLSLDENPFAQETRRASFGGATEISPCLHAKRIVIAGIPVKKEMELTSSESSDQRNWLDRAPQLNRFKVPIVAERLMDYDLVLEQYLPPSSPLLAGFRLDAFNAIKPRITHSPSSDTDIWDTSETFLEDRHISPAVLYIQVSALQEGIGSNMVTIAEYRLPEAKPGTVMYFDFPRQLQTERISFKLLGDVAAFTDKPAEQDDSSFRAPAVAAGLSLSNRIKLYYCADPYDLGKWASLSAV

SEQ ID NO: 69416 - protein, 115 aa, Gossypium hirsutum
  Clone ID: LIB3543-011-Q1-K6-G2.pep
KNDYLSHWSFLFKYLDFQEGIGNQPWGTLLAEFKLAGGQPGAGMDFDFPWQFPTPRNSFKLLGDVGAFTGKPAGPEDFSFRDPGVAVGLSLSNRIKLYYRADPYDLGKWASLSAV

SEQ ID NO: 69417 - protein, 56 aa, Gossypium hirsutum
  Clone ID: LIB3048-039-Q1-L1-B1.pep
QCKLHLFFHRVPASSIRLAYRQVLISVGPPKEARPVSCQPRLFIKRLSTKVDPSIW

SEQ ID NO: 69418 - protein, 85 aa, Gossypium hirsutum
  Clone ID: GOSHI-09MAY01-C5264_1.pep
NNVFGFIFFLSFFLFFFFFYRKLWKLYIPSKVTLTVWRISWNFIPSLVNLKQKKVVENALCHRCRQNEEDNYHIFQQCPGFLVRE

SEQ ID NO: 69419 - protein, 143 aa, Gossypium hirsutum
  Clone ID: GOSHI-09MAY01-C5204_1.pep
MNTNLVQSSGLHSGGMGIVGLPSPASHISPDVISKNSVDTTLSPVPYVLGRGRKRSAALEKVVERRQRRMIKNRESAARSRARKQAYTSELEAEVAKLKEMNEELLRKQEEVMGMQKNQMLETLNPAWGGKRQCLRRTLTGPW

SEQ ID NO: 69420 - protein, 163 aa, Gossypium hirsutum
  Clone ID: uC-gsflmaxxa029b10b1.pep
HLINTTLLASPGAKGSVVGIGDPSMNNNLVQTTGLQGGGMGIVGLGSPASQISSDVVSKNSTDTTSPSPVPYIFGRRRKWGANLEKVFERRQRRMIKNRESAARSRACKQAYTLELEAKVAKLKEMTPRIVEETGSYYLLTKILCVLFEKTSGRPPVLTILWL

SEQ ID NO: 69421 - protein, 111 aa, Gossypium hirsutum
  Clone ID: LIB3146-055-Q1-K1-H3.pep
PRVRGRVGSPSPVPYIFGRGGECSANLEKVVERRQRRMIKNRESAARSRARKQAYTLELEAEVAKLKEMNQELLKKQEEMMEMQKNQMLEKANRPWGRKKQCVRRTITCPW

SEQ ID NO: 69422 - protein, 255 aa, Gossypium hirsutum
  Clone ID: GOSHI-09MAY01-C6984_1.pep
MATEMALVKPISKFSTSSPIFSNSRYGKFTTVRMSSTSQSTAKAAAKGGKKAAKTAIKETLLTPRFYTTDFDEMEALFNTEINKNLNQSEFEALLQEFKTDYNQTHFVRNKEFKEAADKIDGPLRQIFVEFLERSCTAEFSGFLLYKELGRRLKKTNPVVAEIFSLMSRDEARHAGFLNKGLSDFNLALDLGFLTKARKYTFFKPKFIFYATYLSEKIGYWRYITIYRHLKENPEYQCYPIFKYFENWCQDENRH

SEQ ID NO: 69423 - protein, 44 aa, Gossypium hirsutum
  Clone ID: GOSHI-09MAY01-C6924_1.pep
ANFQIIHLIYFTIKKKTLKITTPKQMHQDMRYNDAVLIFTCFIL

SEQ ID NO: 69424 - protein, 74 aa, Gossypium hirsutum
  Clone ID: GOSHI-09MAY01-C6894_1.pep
KLLPLVIVVKRESKKIAWVMAGRRPGDVETVYASTKKAELGLNWKAKYGIEEMCRDQWNWASKNPYGYASPNLN

SEQ ID NO: 69425 - protein, 63 aa, Gossypium hirsutum
  Clone ID: GOSHI-09MAY01-C6594_5.pep
CIVPCCVKRNIVTHRKACSDVVSMLYRLANALEFVVYVVRYYGLGSQIINSKIHERANHKFVS

SEQ ID NO: 69426 - protein, 82 aa, Gossypium hirsutum
  Clone ID: GOSHI-09MAY01-C6594_2.pep
PTRPVKVPIAILGAEQDHISPPELLKQFDEILKASEVDSFVKIFPKVAHGWSVRYDVNDPAAVSSANEAQQDMLAWFAKYVK

SEQ ID NO: 69427 - protein, 238 aa, Gossypium hirsutum
  Clone ID: GOSHI-09MAY01-C6594_1.pep
MSGPQCCSNPPTLDSASGAGHVENLAGLNTYVSGSLQSKLAVFLISDIFGYEAPNFRKLADKVAAAGFYVVAPDFFYGEPYDPNNPDRPLSVWIKDHGPDKGYEDAKLVIDALKSKGVSSIGAAGFCWGAKVVAGLAKDPLIQAAVMLHPSFVTVDDIKSVKVPIAILGAEHDHISPPELLKQFDEILKASEVDSFVKIFPKVAHGWSVRYDVNDPTAVSCANEAHQDMLEWFAKYVK

SEQ ID NO: 69428 - protein, 69 aa, Gossypium hirsutum
  Clone ID: LIB3196-003-P1-M1-A10.pep
RWSQHLYSWKTTTLSLHCLLYSECGTSGCRTLERSQARVHTLCTMCCTQAKVQENPMTLRTLIDLYLKG

SEQ ID NO: 69429 - protein, 118 aa, Gossypium hirsutum
  unsure (1)..(118): unsure at all Xaa locations
  Clone ID: LIB3196-003-P1-M1-D7.pep
MRKEKKTMSGPQSCSNPPTLDSASGAEYVENLRXVNTYVCGDLQSKLVRPVISRIYXLTAANFIKLAVKVAVVGYYVVDTDIPYGEPYDPNNPGRPLSVWIKDHGPDKGYEDAELVID

SEQ ID NO: 69430 - protein, 116 aa, Gossypium hirsutum
  Clone ID: GOSHI-09MAY01-C6564_1.pep
YHHRYCPSPTHCPSSSTITKNPNNQDNQNKNKSKNTTHLLKGDASGKGESGYGHRGLTGTPATVTETGPDTFRSSKILKRNKEKEKTRERRKEKRREERKGETKKEERRRREEKEH

SEQ ID NO: 69431 - protein, 100 aa, Gossypium hirsutum
  Clone ID: GOSHI-09MAY01-C6524_1.pep
IPPLHPPLNPQFYTGEIYHNHEARPQSSPTQPRPLFSPRRSFYRKGQGLGRRSRPNKTVGWMSFWRVWVTRPKLQTWLEGLKKLEQLEEVMCNVQDDGIS

SEQ ID NO: 69432 - protein, 135 aa, Gossypium hirsutum
  Clone ID: GOSHI-09MAY01-C6484_1.pep
MSNSEAAAKNGATMDTQRQQAPGNGALAVKKPPSKDRHSKVDGRGRRIRMPIICAARVFQLTRELGHKSDGQTIEWLLRQAEPSIIAATGTGTTPASFSTVSVSVRGGANSTSLPSTTSSSLDYKPLLGSTPFLL

SEQ ID NO: 69433 - protein, 240 aa, Gossypium hirsutum
  Clone ID: GOSHI-09MAY01-C6454_1.pep
MSCSNLTMWVSSKPSLSDTSSLSFRSFISPFQLPSQSSTPGNPSRSSSVTPVHCGLRELRDRIDSVKNTQKITEAMKLVAAAKVRRAQEAVVNGRPFSESLVEVLYNINEQLQTEDIDAPLTNVRPVKKVALVVVTGDRGLCGGFNNAILKKAEARIAELKQLGLDYTIISVGKKGNSYFIRRPYIPVDRFLDGSSLPTAKEAQAIADDVFSLFVSEEVDKVELLYTKFVSLVKSDPVIH

SEQ ID NO: 69434 - protein, 48 aa, Gossypium hirsutum
  Clone ID: LIB3165-037-P1-K1-G5.pep
GLRDRIDSVKNTQKITEAMKLVAAAKVRRAQEAVVNGRPFSESLVEVL

SEQ ID NO: 69435 - protein, 63 aa, Gossypium hirsutum
  Clone ID: LIB3120-028-Q1-K1-E8.pep
FLQSPQNLAAAKVMRAQEAVVNGRPFYESLAEVLYNINEQLQTEDIHAPFTNAKPVKKVALGV

SEQ ID NO: 69436 - protein, 99 aa, Gossypium hirsutum
  Clone ID: GOSHI-09MAY01-C6434_1.pep
SKKKKTKIRYTMQIYNTPKHIITPYKFRIHRKGAWLTPMVRPTWFHALAFHSANDNPQMHIRPSSAIPRQWIDVQWGPRSGPIFIRIVGKSLQIRTVQF

SEQ ID NO: 69437 - protein, 226 aa, Gossypium hirsutum
  Clone ID: GOSHI-09MAY01-C6424_1.pep
MLGKRGRPMIGNLSELLVPTHKSGLSDPSRSPKSPLDLFKTPSSSSRRGSMKRCYDVFGDGVGLGIIASMEKSTVDHHPSCKLQHTICRFKGRFQENSEEDYTFVTRHGESSTKVYFNGGDEEEEQRLVGKIKEITSLKPRFVQDFNYPTSDFLSSCHLCKKKLHGKDIYMYRGEKAFCSAECRSSQIMMDERKEQCKSKASKSGKNQSLGYDKTEQIFSTGILAI

SEQ ID NO: 69438 - protein, 36 aa, Gossypium hirsutum
  Clone ID: GOSHI-09MAY01-C6604_2.pep
QEKIEGKYNLVIVEPKLMSLILVHIFINPHLKTRNE

SEQ ID NO: 69439 - protein, 125 aa, Gossypium hirsutum
  Clone ID: GOSHI-09MAY01-C6604_1.pep
FPGVIGGLGPHAYTGSKHAVLGLTRNVASELGKYGIRVNCVSPYAVATELAFAHLHEDERTSDVRTGFRAFIGKNANLDGVDLTVEHVANAVLFLASDDAGYISGDNLMVDGGFTSSNHSLRVFR

SEQ ID NO: 69440 - protein, 130 aa, Gossypium hirsutum
  unsure (1)..(130): unsure at all Xaa locations
  Clone ID: GOSHI-09MAY01-C6634_1.pep
MSQRGDQPCSGPHIKAQPPLTLTGPYEKPQFRCGLRELRDRLDSLKITQTITEAMNLVADAQAWRASXAAVYGRPFCEXLVVALSSLNEQFQTADIDASLTNDRLAKKVDTVAVTADRGLWGGPNKAITR

SEQ ID NO: 69441 - protein, 534 aa, Gossypium hirsutum
  Clone ID: GOSHI-09MAY01-C6144_1.pep
RRLNTSKLIENSEYFQNKLVDTIHFMEILSLKDSVEKDTFFRKLPNLAEQLPRPIVLKKLLPLLASALEFGSAAAPALTALLKMGSRLPAEEFSLKVLPTIVKLFPSGDRAVRVALLHHIDQFGESLSAQVVDEQVYPHVATGFADTSAFLRELTLKSMLILAPKLSQRTLSGSLLKYLSKLHLDEEPAIRTNTTILLGNIASYLNEGTRKRVLINAFTVRALRDTFSPARGAGVMALCATSSYYHMTEIATRILPNIVVLIIDPVGDVRSKAFQAVDQFLQIVKQYNEKGNAEDTSGAGSLGISSMPGNASLLGWAMSSLTLKGKASDQAPVATANSVTPATTTASTASSGLIETPSTAPVHRVSSSTDFADQLMPPSPTSTDGWGEIENGIHEEHDSDKDGWDDIEPLDEPKPSSALANIQAAQKRPVSQPVSQPKPQASTSLRPKSTVKAAKDEDDDLWGSIAAPPPKSASRPLNVKTAGAVDDDDPWAAIAAPPPTTKAKPLSAGRGRGNRAAAPKLGAQRINRTSSTGM

SEQ ID NO: 69442 - protein, 174 aa, Gossypium hirsutum
  unsure (1)..(174): unsure at all Xaa locations
  Clone ID: AI055594.1.pep
LTLKSMLILAPKLSQRTLSGSLLKYLSKLQVDEEPAIRTNTTILLGNIASYLNEGTRKRVLINAFTVRALRDTFSPARGQXVMAXCATSSYYDXTEIATRILPIXVVLIIDLDSDIRSKAFKXXINFYXIVKQYNEKGNAEDLSGPRSXGISSMPGNASLXGWAWSSLTLKAKL

SEQ ID NO: 69443 - protein, 222 aa, Gossypium hirsutum
  Clone ID: GOSHI-09MAY01-C6174_1.pep
MAPQDKNASKILKKANGTGSTSSQEVHFRGVRKRPWGRYAAEIRDPGKKSRVWLGTFDTAEEAARAYDAAAREFRGPKAKTNFPLPDETNCYKGQNQQSPSQSSTVEESGSPTVERGVNTVTGAVGRFPFACHQQLALGGGVANGGISGVTRSRPVLFFEALGGAGVVGQVYPVRFDPVGVQLGMGFASVVRSEPDSSSAIHCKARRPGLALDLNLPPPVDA

SEQ ID NO: 69444 - protein, 55 aa, Gossypium hirsutum
  Clone ID: LIB3147-040-Q1-K1-H1.pep
PTRPPTRPRTLGTNFPLPDETNCYKGQNQHIPSQSSTVEESGSPTVESIMVGLAE

SEQ ID NO: 69445 - protein, 194 aa, Gossypium hirsutum
  Clone ID: GOSHI-09MAY01-C6084_5.pep
QIDDGDVAVGKDIQDNQTQIDQQYPLYYLSSRQPQAYNMPVQQPSINEAPTGIPSSRPQTPSNPTMAPTHVAYNPMRNAPLAKPEMTAAAGVYRTTNTGNPQLVQVQNSQHQQQYAGYSQIHHASQSVAPTSSTAAPYAYEFTDPTHAQMYYTQPMAPNMPPQYQTMTAVVLPDAPTQLPTDNIKPQIRTSQPI

SEQ ID NO: 69446 - protein, 151 aa, Gossypium hirsutum
  Clone ID: GOSHI-09MAY01-C6084_2.pep
MAPVAATSSDSIKPRDVCVVGVARTPMGGFLGSLSSLSATKLGSIAIEAALKRANVDPSLVQEVFFGNVLSANLGQAPARQAALGAGIPNSVICTTVNKVCASGMKATMLAAQSIQLGINDGAVAGGMESMSNVPKYLGEARKGSRLGHDT

SEQ ID NO: 69447 - protein, 432 aa, Gossypium hirsutum
  Clone ID: GOSHI-09MAY01-C6084_1.pep
PPIRVHVEDQKEHKVGIEEQFAQFTVTATSAAATGGAGGAVKQQDEVFAAMSMPPPMPAGIAASGGGVGLNPGVVPGEYLNRGLSDDERSDHGVPVGYRKTQTPVIQPQGLPLQNQQKYSSGQDLASPDSISSDGSFTNPLSRQKPVIYQDPVVQIPSGVNRIPANAVDPKLNISDPNSIGRVQIQQQVQDSGYVLQQPQFDQQQQPQQQQQQQQQQFLHAAGAPHYIHHHQSGAVPISAYYPVYPSQQQLHHHQTQIDQQYPLYYVSARQPQAYNMPVQQPSINEAPTGIPSSRPQTPSNPTMAPTHVAYNPMRNAPLAKPEMPAPAGVYRTTNTGNPQLVQVQNSQPDAWADAWAQIHHASQSVAPTSSTAAPYAYEFTDPTHAQMYYTQPMAPNMPPQYQTMTAVVLPDAPTQLPTDNIKPQIRTSQPI

SEQ ID NO: 69448 - protein, 157 aa, Gossypium hirsutum
  Clone ID: uC-gsflnu33B055e08b1.pep
PSRPPTRPLVQEVFFGNVLSANLGQAPARQAALGAGIPNSVICTTVNKVCASGMKATMLAAQSIQLVQVQNSQHQQQYAGYSQIHHASQSVAPTSSTAAPYAYEFTDPTHAQMYYTQPMAPNMPPQYQTMTAVVLPDAPTQLPTDNIKPQIRTSQPI

SEQ ID NO: 69449 - protein, 88 aa, Gossypium hirsutum
  unsure (1)..(88): unsure at all Xaa locations
  Clone ID: LIB3135-047-Q1-K1-H4.pep
VCVVGVARTPMGGFLGSLSSWXCVTKLGSIAIXAALKRANVDSLLVQKGFICCVHKKIIGASLKRRGLSLFIRNLIISLLTLFSIGFL

SEQ ID NO: 69450 - protein, 179 aa, Gossypium hirsutum
  Clone ID: GOSHI-09MAY01-C6054_1.pep
LSKLFGDKNLRNDLNVRSSDATNLAEHSEDVFECRKGEDIEQYGRRIYDHVFGHNIEVALSNEETWKNRNRPRPIYSKDVFPDKLTKENGKTEKGSATDDVSAMASLGLKNPQDIWSLAENSRVFYESLRLFFLKRQKEIGNLTFDKDDQLAVEFVTAAANIRASSFGIPLHSLFEAKG

SEQ ID NO: 69451 - protein, 287 aa, Gossypium hirsutum
  unsure (1)..(287): unsure at all Xaa locations
  Clone ID: GOSHI-09MAY01-C6014_1.pep
GRVGGRVGGRVGSMRLTAEYLGLGPEERQFPNQQNLNDPDLYHYAVLSDNVLAASVVVNSTISSAXEPEKIGFHVVTDSLNLPAISMWRLXNPPGKATIHVXSVENFDWGSTXIIRHLNEQKSYDPRYSSALNHXLRFYLPDIFPALNKIVLFDHDVGVHRDLTEIWSIDMKGKANGAVETCLESEAXFRSMRMFMNFSDPFLARRFNANVCTWAFGMNLFDLHEWRRKNLTMLYRNYLQLGLKRSLWKGGSLPIGWITFYNQTVALEKRWHTLGLGYNSDVPRGDI

SEQ ID NO: 69452 - protein, 204 aa, Gossypium hirsutum
  Clone ID: GOSHI-09MAY01-C6394_1.pep
MASTSLLSPAAIATAAGATSITHLSLHPSSKLPVRNLLFKSISGNNRPSSRLHVSSPTDQPAASTTPAQPSSKSPKEETIFFDGGAHYGDLLANLLLGFTLLWLPLTLAAVSRAFFLRYRFTNLRVTVISGLTGQDRSDFSYKVIKDVQVVPRFIGEWGDVIITLKDETKVDLRSVPRFREIAKYCLAMAEKPVVLKETGPKGF

SEQ ID NO: 69453 - protein, 201 aa, Gossypium hirsutum
  Clone ID: GOSHI-09MAY01-C6344_1.pep
MSNEYDYLFKLLLIGDSSVGKSCLLLRFADDSYVDSYISTIGVDFKIRTVELDGKTIKLQIWDTAGQERFRTITSSYYRGAHGIIVVYDVTEMESFNNVKQWLNEIDRYANDSVCKLLVGNKCDLVENKVVDTQTAKAFADEIGIPFLETSAKDSINVEQAFLTMAAEIKKKMGNQPTGNKSAGTVQMKGQPIEQKNNCCG

SEQ ID NO: 69454 - protein, 122 aa, Gossypium hirsutum
  unsure (1)..(122): unsure at all Xaa locations
  Clone ID: GOSHI-09MAY01-C6364_3.pep
MATSAIQQSAFAGQTAVXQSNELVCXIGAVGGGRVPMRRTVKSAPTSIWYGPDRPKYLGPFSDQIPSYLTGEFPGDXYGWDTAGLSADPDTFAKNRELDVIHCRWAMLGALGCVFPEILSKN

SEQ ID NO: 69455 - protein, 105 aa, Gossypium hirsutum
  Clone ID: GOSHI-09MAY01-C6364_2.pep
DAWADAWVGFVEGYRVGGGPLGEGLDPIYPGGAFDPLGLADDPDAFAELKVKEIKNGRLAMFSMFGFFVQAIVTGKGPIENLFDHLADPVANNAWAYATNFVPGK

SEQ ID NO: 69456 - protein, 219 aa, Gossypium hirsutum
  Clone ID: GOSHI-09MAY01-C6364_1.pep
MATSAIQQSAFVGQTALKQSNELLRKVGAFDGGRVTMRRTVKSAPTSIWYGPDRPKYLGPFSDQIPSYLTGEFPGDYGWDTAGLSADPETFAKNRELEVIHCRWAMLGALGCVFPEILSKNGVKFGEAVWFKAGSQIFSEGGLDYLGNPNLIHAQSILAIWACQVVLMGFVEGYRVGGGPLGDGLDPIYPGGAFDPLGLADDPDAFPELGYETDWRLMF

SEQ ID NO: 69457 - protein, 110 aa, Gossypium hirsutum
  unsure (1)..(110): unsure at all Xaa locations
  Clone ID: LIB3120-002-Q1-K1-E4.pep
LTRAGLKQSNEALXKVRAFDGGRVTMRRTVKSAPTSIWYGPDRPKYLGPFSDQIPSYLTGEFPGDYGWDTAGLSADPETFAKNRELEVIHCRWAMLGALGCVFPEILLKN

SEQ ID NO: 69458 - protein, 39 aa, Gossypium hirsutum
  Clone ID: LIB3120-012-P1-K1-C11.pep
MPMVIVVSGKGPIENLFDHLADPVANNAWAYATNFVPGK

SEQ ID NO: 69459 - protein, 211 aa, Gossypium hirsutum
  Clone ID: GOSHI-09MAY01-C6304_1.pep
MHPMRPEPRLHVFLVSFPGQGHVNPLLRFGKRLASKGLLVTLSTPKGFGKQMAKANNITDDQLIPVGDGFLRFESFQDGWDDDDPRRAHLDQYMHQLELAGKPAISAMIKRYAEQNRPVSCFINNPFIPWASDVAESLGIPSAMLWVQSCACFAAYYHYNHGLVTFPTETDPEFDVQLPSMPLLKHDEVPSFLHPSTPFAYLRTAILGGKI

SEQ ID NO: 69460 - protein, 72 aa, Gossypium hirsutum
  Clone ID: GOSHI-09MAY01-C6324_1.pep
VELSYSFLFPFFSSLSLCLQTVKCQLPISLIFLFLFLHFVSSSNRHLSPLLTRENRNPNSNAEHQAAPAAQP

SEQ ID NO: 69461 - protein, 218 aa, Gossypium hirsutum
  unsure (1)..(218): unsure at all Xaa locations
  Clone ID: GOSHI-09MAY01-C6294_1.pep
PTRPKDINVLVVGSTGYIGKFVVKELINRGFNVIVIARERSGIRGKNSKEDTLSDLNGANVCFSDVTNLDILENSAKNLGFPIDVAVSCLASRTGGVXDSWKIDYEAAKNSLVAGKNFGASHFVLLSAICVRKPLLEFQRAKLKFEAELMKEAEGDDGFTYSIVRPTAFFKSLGGQVDLVXKDGRPFVMVGGGKLCAXKPICEQDLASLIGNWGLEED

SEQ ID NO: 69462 - protein, 146 aa, Gossypium hirsutum
  Clone ID: GOSHI-09MAY01-C6284_2.pep
MAVCSAYTTQSLHSTCSISTPAKTHLGFHQKEVVFYRRSSKRGGSGSGSSSGPCVITCSAGDSQTVVIGLAADSGCGKSTFMRRLTSVFGGAAEPPKGGNPDSNTLISDMTTVICLDDYHSLDRTGRKEKGVTALDPRANDYYLMY

SEQ ID NO: 69463 - protein, 467 aa, Gossypium hirsutum
  Clone ID: GOSHI-09MAY01-C6284_1.pep
MAVCPVYTTQSLNSTCSISTPSKTHFSSHHNHLVFYRTSKRTSKRGGSSSCVITCSAGDSQTVVIGLAADSGCGKSTFMRRLTSVFGGAAEPPKGGNPDSNTLISDMTTVICLDDYHSLDRTGRKEKGVTALDPRANDFDLMYEQVKALKSGIAVDKPIYNHVTGLLDPPELIKPPKILVIEGLHPMFDERVRDLLDFSIYLDISNEVKFAWKIQRDMAERGHSLESIKASIEARKPDFDAFIDPQKQYADAVIEVLPTQLIPDDNEGKVLRVRLIMKEGVEHFSPVYLFDEGSTISWIPCGRKLTCSYPGIKFSYGPDTYFGNEVSILEMDGQFDRLDELIYVESHLSNISTKFYGEVTQQMLKHADFPGSNNGTGLFQTIVGLKIRDLYEQITSSKTAASLEAPAAAHASGFFIHWTRPWVHNKLSSFQLSSIKGLFECLAVVAFIRIEYDPMQFILCSLFSGDM

SEQ ID NO: 69464 - protein, 214 aa, Gossypium hirsutum
  Clone ID: GOSHI-09MAY01-C6224_1.pep
LIPSFFFTNPRPWFFLQVPHSFPFLNTNFHHPSSFSSMASLQQASISLQPKLLSSSQHPRSLPSLNLSFSATFPSLKLCTTRPLHGGAKMSASAASSYATALADVAKSNNTLDATSSDVEKVETIFSDPQVLQFFTNPTIDVLKKRQVLDEIVSSSELQPHTANFLNILVDAKRIDLIKEIVKEFELVYNQLTDTELAGGSSVVKLESQHLAQI

SEQ ID NO: 69465 - protein, 60 aa, Gossypium hirsutum
  Clone ID: LIB3165-018-P1-K1-H4.pep
MAGAKMSSLRPLPATPLALADVSKSNNTLDATSSHIEKVEKIFSDPQVLQFFTNPTIDVL

SEQ ID NO: 69466 - protein, 126 aa, Gossypium hirsutum
  Clone ID: LIB3120-048-P1-K1-H7.pep
PTRATTRPPTRPQAFHQWLGCEQASISLQPKLLSSSQHPRSLASLNLSVSATVPSLKLCTTRPLHGGAKMSASAAFSYATALADVAKFNNTLGGTSFDVEKGREIFFDPQGLPVFTHPTIGVPKKR

SEQ ID NO: 69467 - protein, 384 aa, Gossypium hirsutum
  Clone ID: GOSHI-09MAY01-C7974_1.pep
MPSLFGANPSSSDPANDTVPSPSSSCSSSSSPDMWNYFFIPILLCLTKELSLAKAQTSTGLLLPNQRGDGSADDSLISFSSCANADPKLYYRPVIGILSHPGDGASGRLNNDTNASYIAASYVKFVEAAGARVIPLIYNEPEEILFQKLELVNGVLFTGGWSKYGLYYDIAKKIFKKVIEKNDRGDHFPLYAVCLGFELLTMIISEDKNILEPFSASNQASSLQFVENVNIEGTVFQRFPPNLLQKLGTDCLVMQNHRYGISPEKLQNTPNLSRFFKILTTSTDKNNKVYVSTAQAHGYPVTAFQWHPEKNAFEWGLPMIPHSDDAIEVTQHVANFLIREARRSLNRPAAQKVLDNLIYNYSPTFCGKAGRGFDEVYIFTQRQA

SEQ ID NO: 69468 - protein, 77 aa, Gossypium hirsutum
  Clone ID: GOSHI-09MAY01-C7874_3.pep
LHTLVPLLPVFQNRFVTTGASPCIALRNVHRIVNTSAVSGRTTTVFRYPLIFLLVLHYKRIVLYQATVWLGFNIFFN

SEQ ID NO: 69469 - protein, 178 aa, Gossypium hirsutum
  Clone ID: GOSHI-09MAY01-C7874_1.pep
MATIRIALRNVHRIVNTSAVAGRTTTVFRPQYGWVSTYFSTNISNTQPLNIDLSNEESKRRLYNRLLYRSKQRGFLELDLVLGKWVEEHIHSMDENGIKALVNVLDLENPDLWKWLTGQEQPPEAVTVNPVFSAVQQKVLKNLNNHSSPETRATPGRPWVRGWDDIKKGRDSPITGNQ

SEQ ID NO: 69470 - protein, 64 aa, Gossypium hirsutum
  unsure (1)..(64): unsure at all Xaa locations
  Clone ID: LIB3147-058-Q1-K1-C12.pep
LFVTSTASLIPPPFPAVQRPFSESKRRLYNRLLYKSKXRRFLELDLVLGKWVEEHIHSMDENGI

SEQ ID NO: 69471 - protein, 126 aa, Gossypium hirsutum
  Clone ID: GOSHI-09MAY01-C7804_1.pep
PGILSGGRWKSMGNFKYALVVPGAIYSTYSFIMCKDENERNWFMFLVLPFLVFRLIHYQLWISYSRYRTAKGNNRILDKSIDFDQVDRERSWDDQIILNGILFYGAGIVLKDQFNMPFFKADGTLI

SEQ ID NO: 69472 - protein, 105 aa, Gossypium hirsutum
  Clone ID: GOSHI-09MAY01-C7834_1.pep
MASITMTTSFLSTTNLTKGSPRITQRRLVVANAAKGAQVESVQMSGERKTEGNNGRREMMFAAAAAAICSVAGVATAEPKRGSAEAKKAYAPVCVTMPTARICRN

SEQ ID NO: 69473 - protein, 105 aa, Gossypium hirsutum
  Clone ID: LIB3829-026-Q6-K6-H4.pep
SPTSPSAPHCTLLTHNYKGSPKITQRRLVVANAAKGAQVESVQMSSERKTEGNNGRREMMFAAAAAAICSVAGVATAEPKRGSAEAKKAYAPVCVTMPTARICRN

SEQ ID NO: 69474 - protein, 99 aa, Gossypium hirsutum
  unsure (1)..(99): unsure at all Xaa locations
  Clone ID: LIB3165-025-P1-K1-D10.pep
MASFSCTPQSLTTVXLTKGSSRITQPRLLGGKASXGAQVESVQMSGERKTXGNTGMREMMFSAAAAAICSVAGVATAEPKRGSAEAKKAYASFCVSMPT

SEQ ID NO: 69475 - protein, 268 aa, Gossypium hirsutum
  Clone ID: GOSHI-09MAY01-C7594_1.pep
DLSPAPAVREGVCVLLEIIDTYNSMMVPASGKKPPFDPVISALLDPIIQMCEQAAEAHKSKGAGHSSRRSRMSSDSGQLSKSAVDAILSNNNSATFSQNTEAPSKIFLINCLCAMQQPLLGHEVAAEYAKKLGTTIDNHVNVLVEKEVDTILRRCDLSTKMHHFHNWFNKDTTAGTPLAELEDTTPASLSECLKAFFGFILGSDSSLPEFEQMQVPKLRSDACIQVAKSLADTYELIYNAIMDPKNKYPDPKSLARHPPDQIRTILGI

SEQ ID NO: 69476 - protein, 113 aa, Gossypium hirsutum
  Clone ID: LIB3165-043-Q1-K1-A9.pep
MRGSLWHLGQSITRRVAQADKKAAARRFFASEADLKKTVLYNFHIAHGGKMVPFAGWSMPIQYKDSIMDSTVNCRQNGSLFDVSHMCGLSLKGKDCVPFLEKLVIADVAGLAP

SEQ ID NO: 69477 - protein, 117 aa, Gossypium hirsutum
  Clone ID: LIB3165-017-P1-K1-D7.pep
MRGSLWHLGQSITRRVAQADKKAAARRFFASEADLKKTVLYDFHVAHGGKMVPFAGWSMPIQYKDSIMDSTVNCRQNGSLFDVSHMCGLSLKGKDCVPFLEKLVIADVAGLAPGTGT

SEQ ID NO: 69478 - protein, 101 aa, Gossypium hirsutum
  Clone ID: GOSHI-09MAY01-C7494_2.pep
MLENPTPTAADAAPAIKRYAPPNQRNRSLGRRKSGEKNQGATSRNINPVGDAGSSAILNEDNPRHALIPLEGCSRSDASRLLSNRWAAVLHRYHDTSIDLS

SEQ ID NO: 69479 - protein, 155 aa, Gossypium hirsutum
  unsure (1)..(155): unsure at all Xaa locations
  Clone ID: GOSHI-09MAY01-C7494_1.pep
MLENPTPTAADAAPAIKRYAPPNQRNRSLGRRKSGDRFDWTNNVYGNDSEKNQGATSRNINPVGDAGSSAILNEDNPRHALIPLEGCSRSDASRLLSNRWAAVLHRYHDTSIDLSERPVLYSGISDSAWRNFRLPHQXCPQQTKPGLHLAHRWIS

SEQ ID NO: 69480 - protein, 61 aa, Gossypium hirsutum
  Clone ID: LIB3148-007-Q1-K1-G6.pep
MLENPTPTSADAFSAIKRYASPNQRNRSLGRRKSRDRFDWTNNVYGNDSQKNLCATFRYIY

SEQ ID NO: 69481 - protein, 202 aa, Gossypium hirsutum
  Clone ID: GOSHI-09MAY01-C7484_1.pep
WQPWAALQSSMTALSLSSNSFLGQRLSIPPSLSPLHIKPRENPCLIVVKLKRWERKECKPNSLPVLHKMHVKVGDTIKVISGRDKGKIGEISKIFKHNSTIVVKDINLKTKHMKSRGEDQPGQIIKIEAPIHSSNVMLYSKEKEVTSRVGHKVLDDGKKVRYLIKTGEILDSDENWKKLKEAAKEKTEVAAAAPAADTGAAS

SEQ ID NO: 69482 - protein, 272 aa, Gossypium hirsutum
  Clone ID: GOSHI-09MAY01-C7444_1.pep
SKAKHAAIMADDEVKDEVPEITSFDPSKKKKKKKVVIQDPADESVDKLAEKTEALSVSEGLDFSNLKKKKKKPVEANTFTDESGDAGDDFDGHIDGDEEGEGIVLQQRYPWDGTDRDYIYDELLGRVFNILRENNPELAGDRRRTVMRPPQVLREGTKKTVFVNFMDLCKTMHRQPDHVMAFLLAELGTSGSLDGQQRLVVKGRFAPKKPEGILRRYINEYVICLGCKSPDTILSKENRLFFLRCEKCGSGRSVAPIKAGFVARVGRRNAGT

SEQ ID NO: 69483 - protein, 57 aa, Gossypium hirsutum
  Clone ID: uC-gsflnu33B126a03b1.pep
SQALQKMMMPPFSLPTCQQIHRQGLESQPSSSSSFKWGRNNVVSRPPRTIHLHHTSV

SEQ ID NO: 69484 - protein, 134 aa, Gossypium hirsutum
  Clone ID: GOSHI-09MAY01-C7434_1.pep
MAATFASPSTVVGLGGTATSMSSPPMKTRLSSGFLKSGVTARNPLRLAGACGGKFTCFERDWLRRDFNVIGFGLIGWIAPSSIPAIDGKSLTGLFFESIGTELAHFPTPPPLTSQFWLWLVLWHLGLFITLTFG

SEQ ID NO: 69485 - protein, 139 aa, Gossypium hirsutum
  Clone ID: GOSHI-09MAY01-C7764_1.pep
MKPQSLCIFFLLHFFALLCTAASEYEDPSNGGTIVFTTLGRSNYAWDIYTLPTSDPPSPSNELRVTDGESVNFNGQFPSTSPSSVLSLLHNRSLIRTPGPQAPPPLQLVYVTERNGMPNIYYDALYYSAPGSTRSRSAL

SEQ ID NO: 69486 - protein, 238 aa, Gossypium hirsutum
  Clone ID: GOSHI-09MAY01-C7724_1.pep
MNQKGLIYSFVAKGTVVLAEHTSYSGNFSTIAVQCLQKLPSNSSKFTYSCDGHTFNLLIDNGFVFLVVADESVGRSVPFVFLERVLDDFKQRYGASIRNEGPHPLADDDDDDDLFEDQFSIAYNLDREFGPRLKEHMQYCMNHPEEMSKLSKLKAQITEVKGIMMDNIEKVLDRGEKIELLVDKTENLQFQADSFQRQGRQLRRRMWLQNLQMKLMVGGAILVLIILLWVFACGGFKC

SEQ ID NO: 69487 - protein, 137 aa, Gossypium hirsutum
  unsure (1)..(137): unsure at all Xaa locations
  Clone ID: GOSHI-09MAY01-C7664_1.pep
MSLLFSLVFATSIFWLTWMYLLXRRGMPPPPPGPLGLPLVGNLPFLRTDLHSYFSELAHIYGPVVILQLGGMLAILITSPSTAREVLKDLDIAFANRDVPVVAKVVTGGRDIVWNPYGPEWKMLRKVCVIKMLSNAT

SEQ ID NO: 69488 - protein, 116 aa, Gossypium hirsutum
  Clone ID: GOSHI-09MAY01-C7194_1.pep
MAKSPEEEHPVKTFGWAARDPSGHLSPFTFSRRVTGEEDVRFKVLYCGICHSDLHSIKSEWGSSNYPMVPGHEIVGEVTEVGSKVEKVKVGDKVGVGCMVGACHSCDSCANDLENY

SEQ ID NO: 69489 - protein, 163 aa, Gossypium hirsutum
  Clone ID: GOSHI-09MAY01-C7164_1.pep
MTLALSSATSASYFITRHNAKPSPVIKTTFMTLKPASFPSPLTAVIVSAGARRIVSCQAVSTASLDKDEKNASASGSAEADEEAKVGAKVKVKVPLKVYHVVREPELDLIGMEGVIKQYVGIWKGKPISANLPYKVEFLKEIEGRGPVKFFVHLKEEELEFLD

SEQ ID NO: 69490 - protein, 209 aa, Gossypium hirsutum
  unsure (1)..(209): unsure at all Xaa locations
  Clone ID: GOSHI-09MAY01-C7124_1.pep
MASSLALKRLLSCNILPSSLRVVRPMAIAPSSSRLFNTNAMREFDDDGDERDLSDERQRSLSRRGDGFFTDXVLDPFAPTRSLSQVLNMMDQFMESPFLSASRGMGGGLRRSWDAKETDDSMNLRIDMPGLGKEEVKVSVEQNTLVIKGEAKESKEEENGGRYTSRIHLPEKVYKTDQIKAEMKNGVLKVVVPKMKEEERNDVIQVQID

SEQ ID NO: 69491 - protein, 134 aa, Gossypium hirsutum
  Clone ID: GOSHI-09MAY01-C7394_1.pep
MSSFLANGISSFSPQPTSDSTKFLKGFFPKLDSVKPITPKLQSSRLLKVRADVGFDPQTLTSDPSSSSGKSYDDKIQEILRNRDYDKKFGFTMDIDSFAIPKGLSTETIRLISSLKEEPDWMVELKLYSYYYII

SEQ ID NO: 69492 - protein, 58 aa, Gossypium hirsutum
  Clone ID: LIB3189-033-P1-K1-C4.pep
PCLSVVANCISSFSPQPTFYSTKFLKGFFPKLDSVKSITPKLQSSRLFKVIAYVCFYS

SEQ ID NO: 69493 - protein, 200 aa, Gossypium hirsutum
  Clone ID: GOSHI-09MAY01-C7324_1.pep
MAMTVNAAVSLPSSKSSTLSFKNSVTVPERINFNKSVLYPKNVSLGGNVVSIRAQVTTEAPAKAPKISKKDDEGIVVNKFKPKEPYIGKCLLNTKITGDDAPGETWHMVFSTEGEVPYREGQSIGVIPDGIDKNGKPHKLRLYSIASSALGDFGNSQTVSLCVKRLVYTNEQGEIVKGVCSNFLCDLKPGAEVKITGPVG

SEQ ID NO: 69494 - protein, 93 aa, Gossypium hirsutum
  Clone ID: GOSHI-09MAY01-C7284_1.pep
MISWNDLYTVLTAVIPLYVAMILAYGSVRWWKIFTPDQCSGINRFVAIFAVPLLSFHFISTNDPYAMNFRFVAADTLQKLIMLFALGLGTNLT

SEQ ID NO: 69495 - protein, 120 aa, Gossypium hirsutum
  Clone ID: GOSHI-09MAY01-C7244_5.pep
EALEAHPRVRRVYYPGCPSHPEHEIAKQQMTGFGGVVSFEVDGDLMTTIKFVDALKIPYIAPSFGGCESMVDQPAIMSYWDLSQAERRKYGIEDNLVRFSFGVEDFEDLKADVLQALETI

SEQ ID NO: 69496 - protein, 252 aa, Gossypium hirsutum
  Clone ID: GOSHI-09MAY01-C7244_2.pep
MAVSSCSFPPRVFNAYSSFECRSDPDFSGTPTGEKPRIGSNRRVTASLFCTGGGGLSSLIFRFPPNFVRQLSVKARRNCSNIGVAQVVAASWSNGPTSGYPSSAAAAASQAAAASVPVSDDVAVVEGCIDNDSVQIGDSYDSKTSFLISDGSITVHAGERLGRGIVTDAITTPVVNTSAYFFKKTQELIDFKEKRHTSFEYGRYGNPTKFIGGHNDVLAGCISGSEKLVTEIRTLHHILGGTLNPNAAYLII

SEQ ID NO: 69497 - protein, 550 aa, Gossypium hirsutum
  unsure (1)..(550): unsure at all Xaa locations
  Clone ID: GOSHI-09MAY01-C7244_1.pep
MAVSSCSFTLSPRVCNPYSSFECRPDPDFSSAPIGDKPRLASSRRVTASSLYAGGISSRGLSSLIFRFPPNFVRQLSIKARRNFSNIGVAQIVAASWSNGPAPDSPSLAAAASAQAAAAAAAVTVTVTNDGAAVESCIDNGSVQIGGSDNSTTTFLSSDGSITVHAGERLGRGIVTDAITTPVVNTSAYFFKKTQELIDFKEKRHHSFEYGRYGNPTTVVAEEKISALEGAESTLIMASGMCASTVMLMALVPAGGHIVTTTDCYRKTRIFIETILPKMGILATXVIDPADVDGLGVCTXNKNKVSLFFTESPTNPFLRCVDIERVSKLCHSKGALVCIDGTFATPLNQKALALGADLVLHSATKFIGGHNDVLAGCISGPEKLITEIRTLHHILGGTLNPNAAYLIIRGMKTLHLRVQQQNSTALRMAEALEAHPRVRRVYYPGLPSHPEHEIAKRQMTGFGGVVSFEVDGDLMTTIKFVDALKIPYIAPSFGGCESIVDQPAIMSYWDLSQAERSKYGILDNLIRFSFGVEDFEDLKADILQALETIA

SEQ ID NO: 69498 - protein, 190 aa, Gossypium hirsutum
  unsure (1)..(190): unsure at all Xaa locations
  Clone ID: AI055231.1.pep
AVNATATNDGAAVEGCIDNGSVQIGGSDNSTTTFLSSDGSITVHAGERLGRGIVADAITTPVVNTATYFFKLXEKRRQSFKYGRYGNPTTVVAEEKISALEGAESTLIMASGMCASIVMLMTLVPAGGHXVSTTDCYRKTXMFIENXSAXMGNLVTGIDPAXVDGLXAALNXNKVSLFFTESXTNPXLNV

SEQ ID NO: 69499 - protein, 92 aa, Gossypium hirsutum
  Clone ID: LIB3543-007-Q1-K6-B4.pep
ELFHIKGALVCIDGTFATTINQKALTLGADLVLHSATKFIGGHNDVFAGCISGPEKFITEISTLDHIFGDTVNLNAVYLIIIGIKTMYIRVQ

SEQ ID NO: 69500 - protein, 97 aa, Gossypium hirsutum
  Clone ID: GOSHI-09MAY01-C7274_1.pep
PNYIKSNNFNPFLITQDPISPKTRGPIHPKLSQQHWELLERARIGQKLGLPRVAPRAASFARLLCTAKSDFFVWSLRWRDLVTAHALLATKLRMVTR

SEQ ID NO: 69501 - protein, 74 aa, Gossypium hirsutum
  Clone ID: LIB3146-011-Q1-K1-A8.pep
KLQERARIGQRVRAHTSGSSHGLLRTSPRFSVQPSFANSPWILLCFVEIEVRGGILGLQIDFMTQILLLSAAAC

SEQ ID NO: 69502 - protein, 70 aa, Gossypium hirsutum
  Clone ID: LIB3196-006-P1-M1-E5.pep
NPRPNTPKIISAALEASGTCQNRPENWDSHEWLLARPPSHASSILYGRALNLIDVGPSPFTKQNGGFGKH

SEQ ID NO: 69503 - protein, 52 aa, Gossypium hirsutum
  Clone ID: LIB3272-057-P1-N1-H8.pep
LQGMEKRPYGGDVRRRLREEPLVGVPISGLFWHVPEAASAAEIILDVLGLGF

SEQ ID NO: 69504 - protein, 158 aa, Gossypium hirsutum
  Clone ID: GOSHI-09MAY01-C7214_1.pep
AGVNPLAGCFPTLATIPVWIGLYQALSNVANEGLLTEGFFWIPSLGGPTTIAARQSGSGISWLIPFVDGHPPLGGRDTAAYLGLPVLLVVSQYVSMELMKPPQTDDPAQKNTLLVFKFLPLMIGYFSLSVPSGFFIYWFTNNDLSSVQQVWLFKFCGA

SEQ ID NO: 69505 - protein, 97 aa, Gossypium hirsutum
  Clone ID: GOSHI-09MAY01-C1984_1.pep
IRKTPPYNRFSPKALEPIVLFTFRYCFSAISFVVCTWFLSFCVFFSCLFAGFEGCQTRGGEGHAWGGQWWKRVLVGGAAAEEEARVWVATEKVKIVG

SEQ ID NO: 69506 - protein, 72 aa, Gossypium hirsutum
  Clone ID: uC-gsflnu33B114b06b1.pep
WADLGFRVSGYWAYSVFIYLAYWACNSVMGLRIGLFGFWAPVNIWALHLNLDKIITREKVVKTFKSLNHRSD

SEQ ID NO: 69507 - protein, 153 aa, Gossypium hirsutum
  Clone ID: GOSHI-09MAY01-C1944_1.pep
KRSAGEILLRLTYKAYVEDEEDDTTVAGSVDTDASDDELSDSDELNVTNVQGVKQFTDETDKESFMDVLAALIVSEEFQGIVSSEPGSKSFDDISRTGSLKTRFSGVNGESLPSDSDKGSESSGGSILLWFAGITSGSVLIALRIGGSSFFNP

SEQ ID NO: 69508 - protein, 50 aa, Gossypium hirsutum
  Clone ID: LIB3166-046-P1-K1-H3.pep
SSNYSLSNMITVARSCIFIYFYISFELPLAANSFNCILAGLKPAIILQIR

SEQ ID NO: 69509 - protein, 108 aa, Gossypium hirsutum
  Clone ID: GOSHI-09MAY01-C1904_2.pep
DQTGHLTTSKTGLRQAKSRGRKKQGSNWSRAFTWSKLRSHRPTSRLFVFQKSKSMCPKHRQKRISPWKSEIGSAVPRLGIFVHQNLMHATRGLSYQEVFYVVSSGPEF

SEQ ID NO: 69510 - protein, 168 aa, Gossypium hirsutum
  Clone ID: GOSHI-09MAY01-C1904_1.pep
MRLEKCWFCSSTVYPGHGIQFVRNDAKIFRFCRSKCHKNFKMKRNPRKVKWTKAYRRLHGKDMTQDSTFEFERKRNRPERYDRNLAENTLKAIKKIDKIRSDRASDHIKNRLKTGKVQRQKEARKQLEQGIHLVKAPLALAQDSSLRLPKIKVNVSQAQTEENQPMEE

SEQ ID NO: 69511 - protein, 243 aa, Gossypium hirsutum
  Clone ID: GOSHI-09MAY01-C1934_1.pep
MGRELTDVDMDGKPNGVVNSNGNLTVSEGSESNNYEVKECTAKNSVVDNGHEKQEALGVKSINFGTDIPEDQKCMDNDELSATASKPIGAGQAHHATSKTGANGTANVNSALSPATTKGSEPNSPITPLILRKPLQPYDRKHPDDEDNWSLTSSAASVRTARSRVTIGSAPTFRSAERAEKRREFYQKLEEKHRALEAERSQFEARTKEEQEAALKQLRKNMVVKANPVPDFYYEGPPRKVEL

SEQ ID NO: 69512 - protein, 132 aa, Gossypium hirsutum
  Clone ID: GOSHI-09MAY01-C1844_2.pep
MSRSWGIPVKLLREAAGHIGTVELKSGELYRGSMVECEDNWNCQLENITFTAKDGKVSQLEHVFIRGSKVRFMVIPDMLKNAPMFKRLDAKIKGKSSSLGVGRGRAVAMRAKAQAAGRGTTAGRGVVPSIRR

SEQ ID NO: 69513 - protein, 132 aa, Gossypium hirsutum
  unsure (1)..(132): unsure at all Xaa locations
  Clone ID: GOSHI-09MAY01-C1844_1.pep
MSRSLGIPVKLLHEASGHVVTVELKSGELYRGSMVECEDNWNCQLENITYTAKDGKISQLEHVFIRGSKVRFMVIPDMLKNAPMFKRLDAKIKGKSSSLGVGRGRAVAMRAKAQAARAXTTGGRGVVPSVRR

SEQ ID NO: 69514 - protein, 87 aa, Gossypium hirsutum
  Clone ID: uC-gsflnu33B140f10b1.pep
LGIVKCFVISSVRSISHHCRPLEMQKRIDSFRIVLFIIDVKGLTRFISLRKKKLDKGEVTLPESKMTAQFQCECLKCFNDLAVLFGK

SEQ ID NO: 69515 - protein, 133 aa, Gossypium hirsutum
  Clone ID: GOSHI-09MAY01-C1824_1.pep
HSLQPGILRGIQSIWGGDATGGDPGSPRPTKLLSPRGPESNPTQITTHFTKRLWPPRSTFLKLKITNWRLFCKLFANFLLTYTPRDSWDPQIAIGVIPRMESKEHVFRECLTSESVSYVSMGCSDGTVVKNQL

SEQ ID NO: 69516 - protein, 176 aa, Gossypium hirsutum
  unsure (1)..(176): unsure at all Xaa locations
  Clone ID: GOSHI-09MAY01-C1594_2.pep
PRVRVQQLGGARDQILTHDALNENGRWKKKLTERSLKLFEFLPQAIQEQSMLERDPHGNVQVAKIETEKMLTQMVETELEKRKQEGSYKAIFKGQSHFFGYEGRCGLPTNFDASYCYALGYGAGALLXHSGKTGLISSVGXLCAPLEEWTVARTALTXMMDVEKQILVSKLNFILL

SEQ ID NO: 69517 - protein, 353 aa, Gossypium hirsutum
  Clone ID: GOSHI-09MAY01-C1594_1.pep
KNLKTRVVGCPKTIDGDLKCKEVPTSFGFDTACKIYAEMIGNVMIDARSTGKYYHFVRLMGRAASHITLECALQTHPNITIIGEEVAAKKLTLKNVTDYMVDVICKRAELGYNYGVILIPEGLIDFIPEVQQLIAELNEILAHDVVDENGLWKKKLTDQSLKLFEFLPQAIQEQLMLERDPHGNVQVAKIETEKMLIQMVETELEKRKQEGSYKANFKGQSHFFGYEGRCGLPTNFDASYCYALGYGAGALLHSGKTGLISSVGNLCAPVEEWTVGGTALTSMMDVERRHGKFKPVIKKAMVELDGAPFKKFASLREEWAIKNCYISPGPIQFVGPSSNAVSHTLLLELGAQA

SEQ ID NO: 69518 - protein, 55 aa, Gossypium hirsutum
  Clone ID: uC-gsronu33B076c02b1.pep
LLYICRYEGRCGLPTNFDASYCYALGYGAAALLHSGKTGLISSVRFRFLTIVLLR

SEQ ID NO: 69519 - protein, 89 aa, Gossypium hirsutum
  Clone ID: GOSHI-09MAY01-C1584_1.pep
IIIAISMEQFHERGHQRKTSSYMEDVQLNTNWDDVICPICLDFPHNGVLLQCSSYEKGCRPFVCDTDHMHSNCLDRFKNAHGMSSLLTS

SEQ ID NO: 69520 - protein, 53 aa, Gossypium hirsutum
  Clone ID: LIB3272-026-P1-K1-C12.pep
RTNHIVPICIQLNILHIRRCFALVPSFMKLFHRDCNNNLQAHGMHLPHTTNLD

SEQ ID NO: 69521 - protein, 158 aa, Gossypium hirsutum
  unsure (1)..(158): unsure at all Xaa locations
  Clone ID: GOSHI-09MAY01-C1554_1.pep
MAAENSSSKSASTADSYIGSLISLTSKSEIRYEGVLYNINPDESSIGLRNVRSFGTEGRKKDGPQVPPSDKVYEYILFRGSDIKDLQVKSSPPTQPTPPINNDPAIIQSHFPHSVSTTTSMPSAASGPLTDLTSHNTQMGXAGFNFQAALPLYQPGGN

SEQ ID NO: 69522 - protein, 225 aa, Gossypium hirsutum
  Clone ID: GOSHI-09MAY01-C1564_2.pep
PRVRESIINGSPISDDLKIPESSGKRKYLMVVGINTAFSSRKRRDSVRATWMPQGEERKKLEEEKGVVMRFVIGHSATLGGILDRAIEAEDRKHGDILRLEHVEGSLELSAKTKTYFATAAALWDADFYVKVDDDVHVNIATLGATLARHRSKPRVHIGCMKSEPHLAHNGGRYHEPEYGKYRDEGNKYSRHATEHLYAISKDMASYISINQSAPACSEKQYHTI

SEQ ID NO: 69523 - protein, 216 aa, Gossypium hirsutum
  Clone ID: LIB3582-036-P1-K1-B10.pep
PRVRPRVRPRVREKPGEERKKLEEEKGVVMRFVIGHSATSGGILDRAIEAEDRKHGDILRLEHVEGYLELSAKTKTYFATAAALWDADFYVKVDDDVHVNIATLGATLARHRSKPRVYIGCMKSGPVLAQKGVRYHEPEYWKFGEEGNKYFRHATGQLYAISKDLASYISINQHVLHKYANEDVSLGSWFIGLDVDHIDDRRLCCGTTDCEWKLKR

SEQ ID NO: 69524 - protein, 135 aa, Gossypium hirsutum
  Clone ID: GOSHI-09MAY01-C1514_4.pep
MGTIVQTTVVTVFLCLLFPIVFSTSNDGLFRIGLKKRKFDRNNLLAAQLDSKEGEALRGSFRKYLHGNLQESKDIDIVALKNYMDAQYFGEIGIGTPPQNFTVIFDTGSSNLWVPSSKCYFSIACYFHSRYKSSH

SEQ ID NO: 69525 - protein, 206 aa, Gossypium hirsutum
  unsure (1)..(206): unsure at all Xaa locations
  Clone ID: GOSHI-09MAY01-C1514_2.pep
FQINHAIGXSGGVSQECKAVVSEXGEKILDMLLAKDEPKKICSQIGLCLFDGTQGVSMGIESIVNENAGKASGSLRDAMCSTCEMAVIWMQNQLKQNQTQDHIIDYVNELCDRLPSPMGESSIDCKSLSSMPSVSFTIAGKLFELRPEQYVMKVGEGDGAQCISGFTALDVPPPRGPLWILGDVFMGQFHTVFDYGNMQIGFAEAA

SEQ ID NO: 69526 - protein, 514 aa, Gossypium hirsutum
  Clone ID: GOSHI-09MAY01-C1514_1.pep
MGTIGKTTTAALFLCLLLFPIVFSTPNDRLVRIGLKKRKIDRNNRMAAHLESKEGKASEAFLRKYRLHGNLGESEDIDIVALKNYMDAQYFGEIGIGTPTQNFTVIFDTGSSNLWVPSSKCYFSIACYFHPKYKSSRSRTYKANGKPADIQYGTGAISGFFSEDHVTVGDLVVKHQEFIEATKESSLTFLIAKFDGILGLGFKEISVGNAVPVWYNMVNQGLVNEPVFSFWLNRNPEDDVGGEVVFGGMDPKHYKGEHTYVPVTQKGYWQFDMGDVLIGDQTTGLCASGCSAIVDSGTSLLTGPTAIIAQVNHAIGATGVVSQECKTVVSEYGEMIIDLLLSKDQPLKVCSQIGLCSFDGTRDVSMGIESVVNENAGKASGNVHDAMCSVCEMAVIWVQSQLKQNQTQERILDYVNELCDRLPSPMGESVVDCNSLSAMPSVAFTIGGKILELTPEQYILKVGDGELAQCISGFGALDVPPPRGPLWILGDVFMGKFHTVFDYGNMQIGFAEAT

SEQ ID NO: 69527 - protein, 204 aa, Gossypium hirsutum
  unsure (1)..(204): unsure at all Xaa locations
  Clone ID: LIB3543-066-Q6-K6-G12.pep
AQRPETLGGVGGVQNIVDSGTSLLTGPTAVIAQVNHAIGATGVVSQECKTVVSEYLEGGGGGLLSXDQPLKVCSQIGLCSFDGTRDVSMGIESVVNENAGKASGNVHDAMCSVCEMAVIWVQSQLKQNQTQERILDYVNELCDRLPSPMGESVVDCNSLSAMPSVAFTIGGKILELTPEQYILKVGDGELAQCISGFGALDVPP

SEQ ID NO: 69528 - protein, 163 aa, Gossypium hirsutum
  unsure (1)..(163): unsure at all Xaa locations
  Clone ID: LIB3584-006-P1-K1-H12.pep
RVRRIPGGTGGXTGFFSEDHVTVGDLVVKHQEFIEATKESSLTFLIAKFDGILGLGGGGISLXFAXPVWYNMVNQGLVNEPVFSFWLNRNPEDDVGGEVVFGGMDPKHYKGEHTYVPXKQKGYWQFDMGDVLIGVQTTGLCASGCXAIVDSGSFLLPGPTAVF

SEQ ID NO: 69529 - protein, 121 aa, Gossypium hirsutum
  unsure (1)..(121): unsure at all Xaa locations
  Clone ID: LIB3165-038-Q1-K1-E9.pep
MGTIGKTTTATIFLCLLLFPIVFSTPNDRFVRIGLKKRKIDRNNRMAAHLESKEEKASEAFLRKYRLHGNLGESEDIDIVALXKNYMDAQYFGEIGIGTPTQKLTVIFDTGSSNLWVPSSK

SEQ ID NO: 69530 - protein, 97 aa, Gossypium hirsutum
  Clone ID: LIB3083-002-Q1-L1-A3.pep
MGTIGKTTTATIFLCLLLFPIVFSTPNDRFVRIGLKKRKIDRNNRMAAHLESKEEKASEAFLRKYRLHGNLGESEDIDIVALKNYMDAQYFGEDGIG

SEQ ID NO: 69531 - protein, 292 aa, Gossypium hirsutum
  unsure (1)..(292): unsure at all Xaa locations
  Clone ID: GOSHI-09MAY01-C1504_1.pep
VQEKLNISNSTLESEHQSDATGASVEELQVHDDSLAASDNKVKDKEENVLIKNLQSGLTSLQNLLTTYPNLASIFSTKERLLPLFECFSVPVAAESNIPQLCLNVLSLLTTYAPCLEAMVADGSSLLLLLQMLHFAPACREGALHVLYALASTPELAWAAAKHGGVVYILELLLPLXQKKFPLQQRPAAASLLGKLVAQPRHGPRVAITLARFLPDGLVSVIRDGPGEAVVSALEQNTETPELVWTPAMAASLSAQXATMVSDLYREQVKGRIVDWDVPEQASAQEEMRDEP

SEQ ID NO: 69532 - protein, 74 aa, Gossypium hirsutum
  Clone ID: GOSHI-09MAY01-C1494_1.pep
TMRCFNMGPYSPRISRATELFPLLRKLRFSNIQTAISYVLPVSAEQVNLLQTMAKLHSFECLPLTASSLDIASR

SEQ ID NO: 69533 - protein, 459 aa, Gossypium hirsutum
  Clone ID: GOSHI-09MAY01-C1484_1.pep
MAIAAQAPDILGERQSGQDVRTQNVMACQAVANIVKSSLGPVGLDKMLVDDIGDVTITNDGATILKMLEVEHPAAKVLVELAELQDREVGDGTTSVVIVAAEFLKRANDLVRNKIHPTSIISGFRLAMREACKYVEEKLAVKVEKLGKDSLVNCAKTSMSSKLIAGDSDFFANLVVEAVLAVKMTNARGEVRYPIKGINVLKAHGKSARDSYLLNGYALNTGRAAQGMPLKVSPAKIACLDFNLQKTKMQLGVQVLVTDPRELEKIRQREADMTKERIEKLLKAGANVVLTTKGIDDMALKYFVEAGAIAVRRVRKVDMRHVAKATGATMVSTFADMEGEETFDSSLLGFADEVVEERIADDDVVMIKGTKSTSAVSMILRGANDYMLDEMERALHDALSIVKRTLESNTVVAGGGAVEAALSVYLEYLATTLGSREQLAIAEFAEALLIIPKVLAVNA

SEQ ID NO: 69534 - protein, 57 aa, Gossypium hirsutum
  Clone ID: GOSHI-09MAY01-C1454_2.pep
VKAEPGAFVRVWFHLVNILEIAAIYCCHEIAGHTNVLAWCSVNLENSLFSSCSYNFG

SEQ ID NO: 69535 - protein, 173 aa, Gossypium hirsutum
  Clone ID: GOSHI-09MAY01-C1454_1.pep
MRIPFLSLFPALFLTFFLTAHSPPSSIYDHLKHNGLPIGLLPKGISDFSIDPNTNRFHVNLTQPCNSEFEIQLHYDFNISGVLSFGKIANLSGVSQQELFLWFPVINIRVDDPTSGLINFDVGVVDKQFSLSLFEIPRDCTAFDPKGSLSISQKPSELLGTEIVEEHMLRAIS

SEQ ID NO: 69536 - protein, 243 aa, Gossypium hirsutum
  Clone ID: GOSHI-09MAY01-C1444_1.pep
VTMTTVGYGDLVPHSYNAQLVCIFFITVGMCLFGIAVKIAAKYLVVKQQMVMVNALRMSRKMGPVEALKEIESVKIDYNKLKISLIAMAGHYVIGIFVLLTVEGMDFTDAIYCAFTTMTTTGFGDETFQEPFGRMFAVFWISTGTSCVGQLFLYIAEIYTDIETKKLAKQVISNNIIAKTDLEAADDIKDGKVYGAADMILYKLKEKGKIKQDDISVAMKDLNDVIKDVDVDDVTPPKSAQEK

SEQ ID NO: 69537 - protein, 53 aa, Gossypium hirsutum
  Clone ID: LIB3585-024-P1-K1-B2.pep
FIFDRAADMILYKLKEKGKIKQDDISVAMKDLNDVIKDVDVDDVTPPKSAQEK

SEQ ID NO: 69538 - protein, 279 aa, Gossypium hirsutum
  Clone ID: GOSHI-09MAY01-C1424_3.pep
MFRNQYDTDVTTWSPAGRLFQVEYAMEAVKQGSAAIGLRSKTHVVLGCVNKANSELSSHQKKIFKVDDHIGVAIAGLTADGRVLSRYMRNECINYNFTYESPLPVGRLVVQLADKAQVCTQRSWKRPYGVGLLVAGLDESGAHLYYNCPSGNYFEYQAFAIGSRSQAAKTYLERRFENFTGSSRDDLVKDAIMAIRETLQGETLKSSICTIAVVGAGEPFHVLDQGTVQQIIDTFETAAEQEDPATEPDAATGQEAAAEQGTAADHGGSTDEGAAPMDI

SEQ ID NO: 69539 - protein, 277 aa, Gossypium hirsutum
  Clone ID: GOSHI-09MAY01-C1424_1.pep
MFRNQYDTDVTTWSPAGRLFQVEYAMEAVKQGSAAIGLRSKTHVVLGCVNKANSELSSHQKKIFKVDDHIGVAIAGLTADGRVLSRYMRNECINYSFTYESPLPVGRLVVQLADKAQVCTQRSWKRPYGVGLLVAGLDESGAHLYYNCPSGNYFEYQAFAIGSRSQAAKTYLERRFENFTDSSRDDLVKDALMAIRETLQGETLKSSICTVAVVGVGEPFHILDQGTVQQMIDAFEIVAEQEGPAAEPDADAGQEASAEPEPEQGAAAGEGVAPMDI

SEQ ID NO: 69540 - protein, 200 aa, Gossypium hirsutum
  Clone ID: LIB3825-016-Q1-K6-F10.pep
VGNAEDENGYVPVICGLSRCNENDIKAAWEAVKYAKRPRIHTFIATSGIHLEYKLRKSKEEVLDIARSMVRFARSLGCNDVEFSPEDAGRSDREFLYEILGEVIKAGATTLNIPDTVGITMPSEFGQLIADIKANTPGIENVIISTHCQNDLGLSTANTLAGACAGARQVEVTINGIGERAGNASLEEVVMAIKCRGEHV

SEQ ID NO: 69541 - protein, 94 aa, Gossypium hirsutum
  unsure (1)..(94): unsure at all Xaa locations
  Clone ID: LIB3196-010-P1-M1-E11.pep
MRVKQGSPAIGLRSKTHVVLGCVNKANSELSFYYKKIFXKFDDHICVAIXAGFTAYGRVLSRYMRNECINYNFTYESPLSVGRLVVQLADKKQV

SEQ ID NO: 69542 - protein, 30 aa, Gossypium hirsutum
  Clone ID: uC-gsflnu33B081g10b1.pep
SCYFFFYKSKTSMTTILSINVNVVSSFSSG

SEQ ID NO: 69543 - protein, 131 aa, Gossypium hirsutum
  unsure (1)..(131): unsure at all Xaa locations
  Clone ID: GOSHI-09MAY01-C1794_1.pep
MSGGDIHAAARSGDLSKLQSILASNPLAVNSRDKHSRTPLHLAVWARQAQVVSYLCKQKADVGAAAMDGMGAIHFVAQKGHLEVVXTLLSSGVSVRATNRKGFTPLHYAVQGSHLEGIKVLLKERCKWLAI

SEQ ID NO: 69544 - protein, 157 aa, Gossypium hirsutum
  Clone ID: GOSHI-09MAY01-C1694_2.pep
MGRGKFKGKPTGHRHFSTPEELRAGTSARPRTFKKEEAEVEEEEEESEEEVEEEPEKRKGTQGLIEIENPNLAKQKNVKAKDVDMGRTTELSRREREEIEKQKAHERYMKLQEQGKTEQARKDLERLALIRQQRAEAAKKREEEKTAREQKKTEARK

SEQ ID NO: 69545 - protein, 159 aa, Gossypium hirsutum
  Clone ID: GOSHI-09MAY01-C1694_1.pep
MGRGKFKGKPTGHRHFSTPEELRAGTSARPRTFRKEEAEVEEEEEREESEEEIEEEPEKRKGTQGLIEIENPNLAKQKNVKAKDVDMGKTTELSRREREEIEKQKAHERYMKLQEQGKTEQSRKDLERLAMIRQQRAEAAKKREEEKAAKEQKKVEARK

SEQ ID NO: 69546 - protein, 103 aa, Gossypium hirsutum
  Clone ID: LIB3582-044-P1-K1-B7.pep
PQRSKPVPLKGHKKPCLSTMIFSRAIATPWQLNKHSIRVTLQFKLDPRDKNNSRIISISYLNLFLLVQFSLVPAASYIVHVLFAFLFPLFHALIVQLFFPSGT

SEQ ID NO: 69547 - protein, 101 aa, Gossypium hirsutum
  unsure (1)..(101): unsure at all Xaa locations
  Clone ID: uC-gsflnu33B070g01b1.pep
MGRGKFKGKPTGHRHFSTPEELRAGTSARPRTFRKEEAEVEEEEEREESEEEIEEEPEKRKGTQGLIEIENPNLAKQKNVKAKDVDMGKTTXLSRRERVPH

SEQ ID NO: 69548 - protein, 275 aa, Gossypium hirsutum
  Clone ID: GOSHI-09MAY01-C1664_1.pep
TFLNSPSWNGHPVYSSNRVAQRPTIIAPITSPNTDGINPDSCTNVRIEDSYIVSGDDCIAVKSGWDEYGISFGMPTKQLVIRRLTCISPYSAAIALGSEMSGGIEDVRAEDITAIHTESGVRIKTARGRGGFVKDIYVKGMTLHTPKWVFWMTGNYKAHADNHYDPNALPVIQGINYRDIMADNVSMAARLEGIEGDPFTQICISNVTIGMAAKAKKVPWTCTDVEGISSGVSPRPCDQLPDQGPEKITACDFPAEPLSIDRVVLKSCTYRMKYT

SEQ ID NO: 69549 - protein, 222 aa, Gossypium hirsutum
  unsure (1)..(222): unsure at all Xaa locations
  Clone ID: GOSHI-09MAY01-C1614_1.pep
LHSKSDEEEKNLVSKLTVVKGVLFQQLLQAAVAILLFTVTGGHAGASSQQPSSFIVLASQFVTAMLVMDTWQYFLHRYFHENKFLYRHLHSRHHCLVVPYAFGALYNHPLEGLLLDTVGGALSFMLSGMSPRTSIFFFSFATIKTVDDHCGLMLPGNPLHIFFRNNSAYHDVHHQLYGTKYNFSQPFFVMWDRILGTYMPYSLEKRAEGGFXARPTKEFKDD

SEQ ID NO: 69550 - protein, 197 aa, Gossypium hirsutum
  Clone ID: GOSHI-09MAY01-C1194_1.pep
VDDTDVKESWEDEDEDEPPQQPVAKAPEEKAPKKPASKATEKKGKSIEVAKQEPLDPVAEKLRQQRLVEEADYKSTAELFAKKGDEKTLDNFIPKSESDFLEYAELISHKLCPYEKSFHYIALLKAVIRLSVTSLKAADTKDIASSITAIANEKLKAEKETTSKKKTGGKKKQLHVDKPDDDLVVNAYDDIDEYDFM

SEQ ID NO: 69551 - protein, 150 aa, Gossypium hirsutum
  Clone ID: GOSHI-09MAY01-C1184_6.pep
TSSLHDPSTRTCSGHRLPRASTSSSSSFCTSNATNGSTGNRTSRSRLLHQRTENSIRSLPGATRLQHGGTTFTDTTTFTIDCAKPVEDKIMDIASLEKFLQERIKVGGKAGALGDSVTVTRDKTRITVTSDSNFSKRYLKYLTKKYLKKH

SEQ ID NO: 69552 - protein, 128 aa, Gossypium hirsutum
  unsure (1)..(128): unsure at all Xaa locations
  Clone ID: GOSHI-09MAY01-C1184_5.pep
MSRGAAAGPHGKKKGASFTIHCAKPVEDKIMDIASLEKFLQERIKVXGAKLGALGDSVTXTRDKTPITVPFASTFLRGPKTSLKSXLKEHNXRPWLGDWLRVTASNKDRIVYELRYFNIAENEGEEEE

SEQ ID NO: 69553 - protein, 437 aa, Gossypium hirsutum
  Clone ID: GOSHI-09MAY01-C1184_4.pep
QLSYIGGETKILAADRNRGFSAMISKLSALCGGGDGDFSFKYQLPGEDLDALISVTNDDDLEHMMLEYDRLYRASAKPARMRLFVFPATGSVNYGSEGAKLDRERFVEALNSGTTPGGEKTAAIPQSNVDFLFGLEKGMAPPPLVKIRDPVAEPVIQPPPPPVPEVVGTDHALSPGEIQRQIQELQRLQIRDQEHLLELQRLQIRDQEQLAMYRKKTEEAASFPYTGEYYAQKLPEKPQPVTVQQHVPATAGIWPDKQISSGGFPATVTAAPGPPPPADHPVYMIPAPVPGSAPANLYHAPPPVPAPAPAPASASAAPQMVRPVTGQAGQGYYTNVQRMPHEVYREQPVYNMVAQPQPPPTQHQPISTMAQQVVRPPSSGVTDAGYGHVAAYDRQAYYTAQGGVVPSQYQGVGVAVSGDKRGNVDGKVVYKVSQGSV

SEQ ID NO: 69554 - protein, 124 aa, Gossypium hirsutum
  Clone ID: GOSHI-09MAY01-C1184_3.pep
MSRGAAPGPQGKKKGASFTIDCSKPVEDKIMDIASLEKFLQERIKVGGKAGALGDSVTVTRDKSKITVSSDSNFSKRYLKYLTKKYLKKHNVRDWLPVISSNKDRTVYELRYFNIAENEGEEEE

SEQ ID NO: 69555 - protein, 124 aa, Gossypium hirsutum
  Clone ID: GOSHI-09MAY01-C1184_2.pep
MSRGAAAGAKGKKKGASFTIDCAKPVEDKIMDIASLEKFLQERIKVGGKAGALGDSVTVTRDKTRITVTSDSNFSKRYLKYLTKKYLKKHNVRDWLRVIASNKDRNVYELRYFNIAENEGEEEE

SEQ ID NO: 69556 - protein, 124 aa, Gossypium hirsutum
  Clone ID: GOSHI-09MAY01-C1184_1.pep
MSRGAAAGPKGKKKGATFTIDCAKPVEDKIMDIASLEKFLQERIKVGGKAGALGDSVTVTRDKTKITVTSDSNFSKRYLKYLTKKYLKKHNVRDWLRVIASNKDRSVYELRYFNIAENEGEEEE

SEQ ID NO: 69557 - protein, 114 aa, Gossypium hirsutum
  Clone ID: LIB3166-036-P1-K1-B12.pep
PVTGQAGQGYYTNVERMGSEVYREQPVYNMVAQPPPTQHPPISGMTQQMVRPQSGGVPDSSYAHMAAYDRRVYYTAPGGVMVPPQYQGVGVAVSGEMRGSAGAGGEIKVGNIGS

SEQ ID NO: 69558 - protein, 830 aa, Gossypium hirsutum
  unsure (1)..(830): unsure at all Xaa locations
  Clone ID: GOSHI-09MAY01-C1154_1.pep
GRALLNAIGNLGLTGAYAEALSKLGHNLENIASQEPDAALGNGGLGRLASCFLDSLATLNYPAWGYGLRYRYGLFKQRITKDGQEEVAENWLEMSNPWEIVRNDVVYPIKFYGKVLTDSDGKKHWTGGEDIQAVAYDVPIPGYETKTTINLRLWSTKAPSGDFDLSVFNSGKHTQAAEALYTAEKICYVLYPGDESLEGKILRLKQQYTLCSASLQDIIARFERRSGAKVKWDEFPDKVAVQMNDTHPTLCIPELMRILIDVKGLSWKEAWNITQRTVAYTNHTVLPEALEKWSLELMQKLLPRXMEIIEMIDEELIRTIAPRPGNADSNLLEKKLKQMRILENVELPAAFSDLLVKPKKSPVAVPSDEFGESEEEEEEEEEAEAEAEAEEEKEEEKLKPAGGKIKSVKEGTQGKKKKIPEPVPEPPKLVRMANLCVVGGHAVNGVAAIHSEIVKDEVFNDFFQLWPEKFRNKTNGVTPRRWIRFCNPELSKIITSWTGSEDWVLNTEKLSELRKFADNEDLQIQWRAAKRSNKLKVASLIKERTGYIVSPDSMFDIQVKRIHEYKRQLLNILGIVYRYKKMKEMSASERKKKFVPRVCIFGGKAFATYVQAKRIVKFITDVGATVNHDPDIGDLLKVIFVPDYNVNVAELLIPASELSQHISTAGMEASGTSNMKFAMNGCILIGTLDGANVEIREEVGEENFFLFGAKAHEIAGLRKERAEGKFVPDPRFEEVKKFIKSGVFGSSNYNELLGSLEGNEGFGRADYFLVGKDFPSYIECQEKVDETYKDQKVWTRMSIMNTAGSYNFSSDRTIHEYAREIWNIKPVELP

SEQ ID NO: 69559 - protein, 69 aa, Gossypium hirsutum
  Clone ID: uC-gsflmaxxa015f04b1.pep
IVLSWKEAWNITQRTVAYTNHTVLPEALEKWSLELMQKLLPRHMEIIELLDEVSICLIFPESCYIIFFF

SEQ ID NO: 69560 - protein, 127 aa, Gossypium hirsutum
  Clone ID: GOSHI-09MAY01-C1144_1.pep
MECVLEELPRVAPQKGYFLRNSCSDEECRVCQQEKEEGLIDLGCQCKGGLAKAHRSCIDTWFRTKGSNKCKICQAVTVNVSAPESQPSTNYWVLRADPSFTPHERQRGCFSPLWVAFSILIGGLLVD

SEQ ID NO: 69561 - protein, 253 aa, Gossypium hirsutum
  unsure (1)..(253): unsure at all Xaa locations
  Clone ID: GOSHI-09MAY01-C1174_1.pep
AAKWIQQXPPARGALLYFEGTRYGHLSSNIEEFNRWILDARELPIIQVVEQIHNKLMSEFEDRRTRSHSWFSVLAPSAETRMREVISRASTYQVLRSDEVEFEVISAERSDIVNIGKHACSCRDWQLYGIPCAHAAAAIMSCRKDVYAFAEKCFTVASYCEAYSEEIYPIPQKIDWNKFGEAPSTLNEDAQVVRPPKFRRPPGRPEKKRICVEELNREKHTVHCSRCNQTGHYKTTCKADIMKGIEQFEPCRI

SEQ ID NO: 69562 - protein, 182 aa, Gossypium hirsutum
  Clone ID: GOSHI-09MAY01-C1164_2.pep
MVEPTRPPARPGHLSLKQVQGILQMPSNYDELSKLTYLHAALCDTLTLYPPIPFEFRTCTKHDFLPSGHRVDQNTRIIIGIHAMGTMESSWGEDCYEFKPERWISGDGKIKRESPTKCSAFLVGPRICPGKEVSFLLMEATAPAIIHNYNVHVVEGQTIGPKYSAFYQMKKGLMVRVKKRWS

SEQ ID NO: 69563 - protein, 511 aa, Gossypium hirsutum
  Clone ID: GOSHI-09MAY01-C1164_1.pep
MMAVLFVYLGFMVFGIIALRFLYRFIDNNGLPRNWLFVGMIPTLLLNIRRPHDKVAQILRRSNGTFFYRGLWFTNTSFLATSDPENVRYILSSNSSVYLKGPEWLKQFDIFGEALFNSDGEAWKCHRRVFHAFLNHPQYRQSLSKVLHQRIEEALVKVLEYVSGREMVVNLQDLLVGHAFDIGCITGVGFNPGLLSIEFPENRFQKAMSDTLEAAFYRYVVPDSLWKLQSWLQIGKEKKRSDAWKALDDLLTQFISTQRHKSTKSVASSGSNEEHDFNFLNCYLTGHEITGPTPKESLIRDNLIHFLFASDGTYSLTLTWFFYLISKAPVVENKIREEIKRHLSMKQVEGSLQIPSNYDELSKLTYLHAALCETLRLYPPIPFDFRTCTKQEYLPSGHRVDQNTRIIIGIHAMGRMESLWGEDCYAFKPERWIGEDGKIKRESPTKFSAFLAGPRICPGKEVSFLLMKATATAIIHNYNVHVVEGQNIGPKNSVVYQMKKGLMVRIKKRWS

SEQ ID NO: 69564 - protein, 347 aa, Gossypium hirsutum
  Clone ID: GOSHI-09MAY01-C1114_2.pep
MQGGRGGRDPFCNFGGDPFGGFGDFGGFGGPRNLFSNFFGGRNPFDDPFFTRPFGSMFDSSFFGPGQSPFMDMHPTGFIEHQAPEPKRPRGPIIEELNSDDEKEEADTGMKGNPRKHGRSNAEPYVEVPDDEAGQSERRNRHLQYMNGYNGSYQNQQQQQQQPQTSSFVFQSSTVTYGGADGAYYTSSKTRRTGSDGITFVEGKEADTTAGQASHRVSRGLHNKGHSVMRKLNSDGRVDTMQTLHNLNEDELPGFEESWKGKAQKRLPGWSGSFIGHDNIGTGSSGQNGQAGRGGWALPSTESSQPKGRMMVDARDRSGPLRSQHTRMKGSADFKDKSSHSQGKRRD

SEQ ID NO: 69565 - protein, 204 aa, Gossypium hirsutum
  Clone ID: GOSHI-09MAY01-C1114_1.pep
FPLSIEEFRGIQKMQGGRGGRDPFFNFGGDPFGGDLFGGDPFGGSGGFGGFGGPRNLFSNFFGGRNPFDDPFITRPFGSMFDSSFFGPGQSPFMDMHPTGFIERQAPEPKRPRGLIIEELNSDDEKEEADTGMKGNPRKHGRSNAEPYVEVPDDEAGQSERRNRHLQYMNGYNGLYQNQQQQQPQTSSFVFQAPTVPDELPYLL

SEQ ID NO: 69566 - protein, 194 aa, Gossypium hirsutum
  Clone ID: GOSHI-09MAY01-C1094_1.pep
MLVGGDGIIGDKLSKTSKSPSIHNILNQLSRFAKDVKVLLVDKVYVVNVFGYIAYNFVIGAYSYWGPKAGYNIYHMKSADMLFGGVTIVCGILGTISGGFILDRMGATISNAFILLSGATFLGAISCFSAFCLRSLYGFIVLFAVGELLVFATQAPVNYVCLHCVRPSLRPLSMAISTVSIHIFGDVPSSPLVG

SEQ ID NO: 69567 - protein, 209 aa, Gossypium hirsutum
  Clone ID: GOSHI-09MAY01-C1054_1.pep
MKMEASAPSLTPHQNSLLLLSIARFLQRNSFSKTLKKFLSEAQIQKDVLAGSSLDLEEMCCKYLAKSDGQDCIASTVEVAPKKKKKRGNESSMDIIGGQSEVDDKSVNSKKFEEQVFKDAAKESATDKTKDKKKKKSKSTSDSLIESVGQHGSEDTQHAAVTLNASDISVEDKTSKSKKKKKKDDSEDVEKEKSTEENKISKVDSTITD

SEQ ID NO: 69568 - protein, 509 aa, Gossypium hirsutum
  Clone ID: GOSHI-09MAY01-C1044_1.pep
MSLPLILTVSIIAFFLTYKLYQWLRFKLPPGPRPWPVVGNLYDIKPIRFRCFAEWAQVYGPIISVWFGSTLNVIVSNSELAREVLKEHDQQLADRHRSRSAAKFSRDGQDLIWADYGPHYVKVRKVCTLELFSPKRLEALRPIREDEVSAMVESIFLYCTSPESLGKTLQVRKYLGAVAFNNIPRLPFGKRFVNSDGIMDEQGHEFKAGVANGLKLGASLAMAEHIPWLRWMFPLEEEAFAKHGARRDRLTRAIMEEHTLARQKSGGAKEHFVDALLTLQDKYDLSEDTIIGLLWDMITAGMDTTAISVEWAMAELIRNPRVQKKAQEELDRVIGFERVMSEPDFSNLPYLQSVAKEALRLHPPTPLMLPHRANANVKIGGYDIPKGSNVHVNVWAVARDPAVWKDPEEFRPERFLEEDVDMKGHDFRLLPFGAGRRVCPGAQLGINLVTSMLGHLLHHFCWTTAEGVKAEEIDLLENPGLVAHMRTPLQAIATPRLPSHLYKRVAADI

SEQ ID NO: 69569 - protein, 535 aa, Gossypium hirsutum
  unsure (1)..(535): unsure at all Xaa locations
  Clone ID: GOSHI-09MAY01-C1074_1.pep
MSLRVLNPNAEVLNKSAALHMNINAAKGLQDVLKTNLGPKGTIKMLVGGAGDIKLTKDGNTLLKEMQIQNPTAIMIARTAVAQDDISGDGTTSTVLFIGELMKQSERYIDEGMHPRVLXDGFEIAKRATLQFLEKFKTPVVMGSEPDKEILKMVARTTLRTNLYEGLADPLTDIVGNAVLCVRKPDEPIDLFMVEIMHMRHKFDVDTRLVEGLVLDHGSRHPDMKRRAENCYILTCNVSLEYEKSEINAGFFYSNAEQREAMVAAERRSVDERVKKIIELKNKVCAGNDSNFVVINQKGIDPPSLHLLQQAGIVALRRAKRRNMERLVLACGGEAVNSVDDLTPACLGWAGLVYEHVLGEDKYTFVENVRHPHSCTILIKGPNDHTIAQIKDAVRDGLRAVKNTIEDEAVILGAGAFEVAARQHLINEVKKTVQGRAQLGVEAFADALLVVPKTLAENSGLDTQDVIIGLTGEHDRGNIVGLNQQTGEPMDPQMEGIFDNYSVKRQIINSGPVIASQLLLVDEVIRAGRNMRKPT

SEQ ID NO: 69570 - protein, 193 aa, Gossypium hirsutum
  unsure (1)..(193): unsure at all Xaa locations
  Clone ID: GOSHI-09MAY01-C1354_1.pep
MAQSTVSQVSVAVPVGNDISLRRSVANRNIISFGNKSWASTLAFDLKSRNAQKNKPYIVCLSVQQASKSKIAVSPLELEIAKEPPLNTFKPKEPYTATIVSVERLVGPKAPGETCHIVIDHGGNVPYWEGQSYGVIPPGENPKKPGSPHNVRLYSIASSTYGDSXFDGKTTKLCVRRAVYYDTETGKEDPSKS

SEQ ID NO: 69571 - protein, 248 aa, Gossypium hirsutum
  unsure (1)..(248): unsure at all Xaa locations
  Clone ID: GOSHI-09MAY01-C1344_3.pep
TKGFWVFVWEALQDMTLMILGACAIVSLVVGIAMEGWPAGAHDGLGIVASILLVVFVTATSDYRQSLQFKDLDKEKKKITIQVTRNDCRQKLSIYDLLPGDIVHLNIGDQSPCXMGLFVSGFSXLIDESSLTGESEPVVVNDKNPFMLSGTKLQDGSCKMLVTTVGMRTQWGKLMATLSEGGDDETPLQVKLNGVATIIGKVGLFFAVVTFAVMVQGLLRSKLQEGTIWSWSGDEALKLLEFFAQVNS

SEQ ID NO: 69572 - protein, 119 aa, Gossypium hirsutum
  Clone ID: GOSHI-09MAY01-C1344_2.pep
DYRQSLQFKDLDKEKKKITIQPTRPDGSCKMLVTTVGMRTQWGKLMATLSEGGDDETPLQVKLNGVATIIGKVGLFFAVVTFAVMVQGLLRSKLQEGTIWSWSGDEALKLLEFFAQVNS

SEQ ID NO: 69573 - protein, 171 aa, Gossypium hirsutum
  Clone ID: GOSHI-09MAY01-C1344_1.pep
FIPQFSFCPCGPPSAPLLKLTPVAKESADVIILDDNFSTILTVAKWGRSVYINIQKFVQFQLTVNIVALIVNFSSACLTGSAPLTAVQLLWVNMIMDTLGALALATEPPTDRVLQHADRCCFEAGPSMKPICLDFVKNIKEALMSLFVMYREEFLPAPGIYMSLASTLFIV

SEQ ID NO: 69574 - protein, 183 aa, Gossypium hirsutum
  unsure (1)..(183): unsure at all Xaa locations
  Clone ID: GOSHI-09MAY01-C1304_1.pep
MEAGNKIGASAHPTSLHPPVRGHASTGTLGRHLARRLVEIGVKDVFSVPGDFNLTLLDHLIAEPELNLVGCCNELNAGYAADGYARAKGVGACVVTFTVGGLSVLNAIAGAYSENLPVICIVGGPNSNDYGTNRILHHTIGLPDSSLELXFQTITCAQAVVNNLDDAHELLDTAISTALKESK

SEQ ID NO: 69575 - protein, 130 aa, Gossypium hirsutum
  unsure (1)..(130): unsure at all Xaa locations
  Clone ID: GOSHI-09MAY01-C1334_1.pep
RAKSRTSRDFVRSRRRTWLKELRASFAAGKTKSYEWRLTQLNAMVKMMEEKEPQIVAALHEDLSKPELESSIYEXAMLKNSCGLAVKNMKHWMMPEKAKTSLVTFPSFAEIVSEPLGVVLXILTWKYPFL

SEQ ID NO: 69576 - protein, 83 aa, Gossypium hirsutum
  Clone ID: GOSHI-09MAY01-C1294_3.pep
FVAAHNDEKKTVFSKIEQEVEKLKGSSERYGKIYLKAAKSCLEKGADYPKKEIERLQRILDKSISPAKADEFTLKKNILSTFM

SEQ ID NO: 69577 - protein, 77 aa, Gossypium hirsutum
  Clone ID: GOSHI-09MAY01-C1294_2.pep
IRSSLLQIEEEVEKLKGSTARHGKIYLKAAKSCLEKGADYPNKEIERLQRMLDKSLSPAKADEFTIKKNILSTFASS

SEQ ID NO: 69578 - protein, 359 aa, Gossypium hirsutum
  Clone ID: GOSHI-09MAY01-C1294_1.pep
MKSQICLAFGTLALLLASALADDVVVLTEANFDKEVGQDRGALIEFYAPWCGHCKKLAPEYEKLGASFKKAKSVLIGKVDCDEHKSLCSKYGVQGYPTVQWFPKGSLEPKKYEGPRTAEALAEFVNTEGGTNVKIATLPSSVVVLNADNFDEVVLDETKDVLVEFYAPWCGHCKNLAPTYEKVALAFKMEEDVVIANLDADKHKDLAEKYGISGFPTLKFFPKGNKAGEDYDGGRDLDDFVSFINEKCGTSRDAKGQLTSTAGILSSLDALVKEFVAASADEKKAVFSKIEEEVEKLKGSTARHGKIYLKAAKSCLEKGADYPKKEIERLQRMLDKSISPAKADEFTLKKNILSTFASS

SEQ ID NO: 69579 - protein, 81 aa, Gossypium hirsutum
  unsure (1)..(81): unsure at all Xaa locations
  Clone ID: LIB3196-014-P1-M1-E6.pep
VIVHEKGAFSEFYAPWGGHCKKLAPEYEKLGASFXLAKSFLIVRVVCVEHNXLCSKYGVQGYPTVQWFPKGSLDPKKFEGP

SEQ ID NO: 69580 - protein, 86 aa, Gossypium hirsutum
  unsure (1)..(86): unsure at all Xaa locations
  Clone ID: LIB3135-008-Q1-K1-G3.pep
SSLKPTKYEGPRTDYALAEFVNTERGTNVKIATLAYNVEKLNADNYDEIELDXTKDMWVELYTPWRGHCKNLAPTYXKVATAFKFE

SEQ ID NO: 69581 - protein, 191 aa, Gossypium hirsutum
  Clone ID: GOSHI-09MAY01-C1284_1.pep
MEKVMNMIKPKPNPQQLLRDWQRRLRQECRNIERQIRDIQREEKNVQKAIKDAAKRNDMVSAKSLAMEIVRSRRTVNRLYENKAQLNSISMHLGESVAIARTVGHLSKSAEVMKLVNNLMKAPEVAVTMQEFSKEMTKAGVIEEFVNDALDNALDSEDIEEETEEEVDKVLTAIAGETAAQLSEAVPEEKM

SEQ ID NO: 69582 - protein, 150 aa, Gossypium hirsutum
  Clone ID: GOSHI-09MAY01-C1244_1.pep
DSSTVVKLQSAIKFNGGGHINHSIFWKNLAPIREGGGEPPHGSLGWAIDTNFGSLESLIQKMNAEGAALQGSGWVWLGLDKELKKLVVETTANQDPLVTNGPNLVPLLGIDVWEHAYYLQYKNVRPDYLKNVWKVINWKYASEVYEKESA

SEQ ID NO: 69583 - protein, 151 aa, Gossypium hirsutum
  Clone ID: LIB3583-010-P1-K1-H11.pep
PRVRPRVRPRVRGRVGGGGHINHSIFWKNLAPISEGGGEPPHGSLGWAIDTNFGSLESLIQKMNAEGAALQGSGWVWLGLDKELKKLVVETTTNQDPLVTNGPNLVPLLGIDVWEHAYYLQYKNVRPDYLKNVWKVINWKYASEVYEKESA

SEQ ID NO: 69584 - protein, 166 aa, Gossypium hirsutum
  unsure (1)..(166): unsure at all Xaa locations
  Clone ID: GOSHI-09MAY01-C1204_1.pep
HASVLTISGIVQEAAQDRNSIVANLTTKIDLTNENLDELQYKYNETTMSLSRMLEEKDRLHLAFIEETRKMQRLARDNVRRILEEQEKLNHELETKKRKIDNWTRELNKRETLTERERQKLDEEKKKNNERNNSLQLASMEQKKADENVLRLVEEXKREKEEALKK

SEQ ID NO: 69585 - protein, 150 aa, Gossypium hirsutum
  unsure (1)..(150): unsure at all Xaa locations
  Clone ID: GOSHI-09MAY01-C1224_1.pep
PKGKLICSKMEQSKATFEIFTKLEQKWLSHCEPTKKIRILSIDGGGTTGIVAAAALIHLEDQIRLKTGDPYAQIADFFDMISGTGVGAILAAMLSADDGTGHPLFTAREAVKFITLNNSRLFRVNKLAGFFXRRKKFSGKSMDKVLKEMF

SEQ ID NO: 69586 - protein, 168 aa, Gossypium hirsutum
  Clone ID: GOSHI-09MAY01-C2954_1.pep
TLFQMLKPAIWLLLEKGVKILVLTIGSDGVLLCTKGESISWRICLEKTQQHGFSRQLFENMTSSCPSNLYSDSKVLERSPNFLAVHFPALPASVVRLTGAGDCLVGGMIASLSTGLDVMQSVAIGIAAAKASVEVDSNVPSQFSLPTITGDARIVYSTAKLLQHQSKL

SEQ ID NO: 69587 - protein, 109 aa, Gossypium hirsutum
  Clone ID: GOSHI-09MAY01-C2944_1.pep
MEVDSFSPVEKSIWVCSVMEALLAETLVLAGKSLACLLMLTGSMLNDKNASLNLTAVDERFPFDELLKMERPGPENKDASDTEDDDDDEDEDEDNADDQDDDGGDEDFS

SEQ ID NO: 69588 - protein, 57 aa, Gossypium hirsutum
  unsure (1)..(57): unsure at all Xaa locations
  Clone ID: uC-gsronu33B143e04b1.pep
MAAANGIELFYLCLVLWSNQTSNGDVFEKNHDELDIEFLGNIEGKPWRFXTYVYGNG

SEQ ID NO: 69589 - protein, 54 aa, Gossypium hirsutum
  Clone ID: LIB3584-014-P1-K1-D8.pep
NSGSGIISSRMYQHGFFSAKIKLPSDYTAGIGVAFYTSNGDVFEKNHDEFTSSF

SEQ ID NO: 69590 - protein, 149 aa, Gossypium hirsutum
  Clone ID: GOSHI-09MAY01-C2914_3.pep
PTRPIFSKSAKYSLFDPCKEMACVPLDEDTKVKGKAAIDVVCNPLGKSGGALIQQFMILTFGSLANSTPYLGGILMVIVFAWLSAARSLDVQFTALRREEELEKEMERAAVKIPIVSESGSVSPSGSSVDSVAGDSPGSSSETSTPSNI

SEQ ID NO: 69591 - protein, 168 aa, Gossypium hirsutum
  Clone ID: GOSHI-09MAY01-C2914_2.pep
PTLAKFGMTPLLAAVYVGAMQDSFSKSAKYSLFDPCKEMAYIPLDEDTKVKGKAAIDVVCNPLGKSGGALIQQFMILTFGSLASSTPYLGGILLVIVLAWLAAAKSLDTQFTALRQEEELEKEMERAAIKIPVVSETRNGTFAGGSLLNQSAGDSTGSTSKTSTPSNI

SEQ ID NO: 69592 - protein, 170 aa, Gossypium hirsutum
  unsure (1)..(170): unsure at all Xaa locations
  Clone ID: GOSHI-09MAY01-C2914_1.pep
LILFGDPLGPTLAKFGMTARLAAGYGGAMQNIFSKSAKYSLFDPCKEMAYIPLDEDTKVKGKAALXVVCNPLGKSGGALIQQFMILTFGSLASSTPYLGGILLVIVLAWLSAAKSLDTQFTELRREEELEKEMERATVKIPVMSESGNGSLASGSAETAETSETSTSSNI

SEQ ID NO: 69593 - protein, 219 aa, Gossypium hirsutum
  Clone ID: GOSHI-09MAY01-C2924_1.pep
RVRPTPFAGRVGGRVGGRVGFPLAFAVVDEENDDNWMWFLAELHYLLEINAENMPRLTILSDRQKGVVDAVEANFPTAFHGFCMHHLVDCFQKEFNSSVLTNLFWEAAYAVTRTEFEKKLIDIQAISPEATTWIQNIPPHLWATSHFEGTRMGLLAAHIGEWLSAWIAEASSLPIIQMMECIRRQLMTCFNERRETSMQWTGNLVPSAERIVLEAYDRA

SEQ ID NO: 69594 - protein, 89 aa, Gossypium hirsutum
  Clone ID: GOSHI-09MAY01-C2844_13.pep
MWVYQDLISGDELLSDSFPYKEIENGMLWEVEGKWVVQGAIDVDIGANPSAEDADEDEGVADQSVEGCPHLLTLSSFLSRLFVDTNTIF

SEQ ID NO: 69595 - protein, 73 aa, Gossypium hirsutum
  Clone ID: GOSHI-09MAY01-C2844_11.pep
MVSLEAKSKSPFCKKNIEGASKFLLSKLKDLQFFVGESMHDDGCLVFAYYKDGAVDPTFLYFKPQHLTSRTRG

SEQ ID NO: 69596 - protein, 61 aa, Gossypium hirsutum
  Clone ID: GOSHI-09MAY01-C2844_9.pep
MLVYQDLISGDELLSDSFPYKEIENGMLWEVEGKWVVQGAIDVGIGANPSFADNDEVYRAL

SEQ ID NO: 69597 - protein, 150 aa, Gossypium hirsutum
  unsure (1)..(150): unsure at all Xaa locations
  Clone ID: GOSHI-09MAY01-C2844_5.pep
PVASRETVGVYQERSSGDELLSDSFPXGGECENGMLWEVEGKWVAQGAVDGDIGANPSAEGADEDEGVDDQAGKGVDIGDTFRLQEQPPFDKKQFVVVIKKFIKNLTPKLDAEKQESFKKNIEGATKFLLSKLKDLQFFVGESMPDDGCL

SEQ ID NO: 69598 - protein, 325 aa, Gossypium hirsutum
  unsure (1)..(325): unsure at all Xaa locations
  Clone ID: GOSHI-09MAY01-C2844_2.pep
MASFYSLTLILISIFAFSISIANSKTLKRDVKALNEIKASLGWRVVYAWIGDDPCGDGDLPPWSGVTCSTQGDYRVVTELEVYAVSIIGPFPIAVTNLLDLTRLDLHNNKLTGPIPPQIGRLRRLRMLNLRWNKLQDVLPPEIGELKKLAHLSLSFNNFKGEIPKELANLPELRYLYLQENRFTGRIPPELGTLQNLRHLDVGNNHLVGTIRELIRIEGCFPVLRNLYLNNNYLTGGVPAQLANVTNLEILYLSYNKMSGVIPTALADIPKLTYLYLDHNQFSGRIPDAFYKHPFLKELYIXGNAFRWRNPFVHQVLTFDQILVK

SEQ ID NO: 69599 - protein, 168 aa, Gossypium hirsutum
  Clone ID: GOSHI-09MAY01-C2844_1.pep
MLVYQDLISGDELLSDSFPYKEIENGMLWEVEGKWVVQGAVDVDIGANPSAEGADEDEGVDDQAVKVVDIVDTFRLQEQPPFDKKQFVVFIKKFIKNLTPKLDAEKQESFKKNIEGATKFLLSKLKDLQFFVGESMHDDGCLVFAYYKDGAVDPTFLYFAYALKEVKC

SEQ ID NO: 69600 - protein, 108 aa, Gossypium hirsutum
  unsure (1)..(108): unsure at all Xaa locations
  Clone ID: uC-gsronu33B121b08b1.pep
MLKFIMNLVSLFCLPVMLVLLLRNYIVCSFHFFLFYFLSRPISLFLIFALVFMFLFLFLSFFXTIFIFFYSSTFLLTLLIFSILFYLFIILFLFLYSHFLIHFFSFLT

SEQ ID NO: 69601 - protein, 141 aa, Gossypium hirsutum
  Clone ID: LIB3584-012-P1-K1-G8.pep
MLVYQDLISGDELLSDSFPYKEIENGMLWEVEGKWVVQGAVDVDIGANPSAEGADEDEGVDDQAVKVVDIVDTFRLQEQPPFDKKQFVVFIKKFIKNLTPKLDAEKQESFKKNIEGATKFLLSKLKDLQFFVGESMHDDGC

SEQ ID NO: 69602 - protein, 54 aa, Gossypium hirsutum
  Clone ID: LIB3272-043-P1-K1-D2.pep
MLLRWYHTPPLLWRHHSRSMPLRRMHHVHHHVRGLCLRTRIPRRSLSIPLLISL

SEQ ID NO: 69603 - protein, 38 aa, Gossypium hirsutum
  Clone ID: uC-gsflnu33B064d01b1.pep
MLVYQDLICGDELLSDSFPYKEIENGMLWEVEGKRATF

SEQ ID NO: 69604 - protein, 151 aa, Gossypium hirsutum
  unsure (1)..(151): unsure at all Xaa locations
  Clone ID: LIB3825-027-Q6-K6-E6.pep
MLVYQDLISGDELLSDSFPYKEIENGMLWEVEGKWVVQGAIDVDIGANPSAEDADEDEGVDDQSVKVVDIVDTFRLQEQPPFDKKQFVVFMKKFIKNLTPKLDAEKQESFKKNIEGATKFLLSKLKDLQFFIGESMHDDXXLVFAYYKXGC

SEQ ID NO: 69605 - protein, 129 aa, Gossypium hirsutum
  Clone ID: LIB3197-034-Q1-M1-F9.pep
MSIFAFSIAIANSKTLKRDKALNEIKASLGWRVVYAWIGEYPLLRGDEAKWVVQGAVDVDIGANPSAESADEDEGVDDQAVKVVDIVDTFRLQEQPPFDKKQFVVFIKKFIKNLTPKLDAEKQESLKKN

SEQ ID NO: 69606 - protein, 114 aa, Gossypium hirsutum
  unsure (1)..(114): unsure at all Xaa locations
  Clone ID: uC-gsflnu33B012f06b1.pep
MLVYQDLIYRDELLSDSFPYTEIENGMLWEVEGXWVVQGAVDADIGGNSDSEGADEDERVEDELENLDTFVEQPPFDMNQFVAFIRKYIKNLTPKLYAEKQECFTKNIEGATKF

SEQ ID NO: 69607 - protein, 167 aa, Gossypium hirsutum
  unsure (1)..(167): unsure at all Xaa locations
  Clone ID: uC-gsflmaxxa045h10b1.pep
VSRVRPRVRPRVRLVYQDLISGDELLSDSFPYKEIENGMLWEVEGKWVVQGAVDVDIGANPSAEGADEDEGVDDQAVKVVDIVDTFRLQEQPPFDKKQFVVFIKKFIKNLTPKLDAEKQESFKKTLREQPSFCFKIEDLQFFXGESMHDDGCWVFXYYRXGAVDPHF

SEQ ID NO: 69608 - protein, 53 aa, Gossypium hirsutum
  Clone ID: LIB3148-051-Q1-K1-F2.pep
LFVLLLLDFIGKKKDIKAMYRMKNNSQILLPTLLVMHVSSIYHGYFIFDNCTI

SEQ ID NO: 69609 - protein, 49 aa, Gossypium hirsutum
  Clone ID: uC-gsflnu33B143f10b1.pep
MLVYQDLISGDELLSDSFPYKEIENGMLWEVEGKWVVLGAVDGYLLAND

SEQ ID NO: 69610 - protein, 80 aa, Gossypium hirsutum
  unsure (1)..(80): unsure at all Xaa locations
  Clone ID: LIB3272-047-P1-K1-H12.pep
MYHCMFEQKGLWLLASRETMLFYQDLMXGDELLFDSFPYKETENGMLGEVEGKCVVQGAVDVDIGANPLPEGADEDEGVD

SEQ ID NO: 69611 - protein, 33 aa, Gossypium hirsutum
  Clone ID: uC-gsflnu33B037b12b1.pep
NGTSVAALRDIFCPKGVHPIKSSSNRTKSSIIV

SEQ ID NO: 69612 - protein, 235 aa, Gossypium hirsutum
  unsure (1)..(235): unsure at all Xaa locations
  Clone ID: GOSHI-09MAY01-C2874_1.pep
DFGRLRPDQGSLVXDVVMPYSHRVSTYTGDFGVKDRTTLLFFMGNRYRKEGGKIRDWLFQILENEEDVVIKHGTQSRENRRAASRGMHTSKFCLNPAGDTPSACRLFDSIVSLCVPVIVSDSIELPFEDIIDYKKFSVFVETTTALKPGYLASLLRKVPEQKIIEYQKAMKEVMRYYDYTHPNGTVNEIWRQVSQKLPLIKLMINRDKRLVKRELSEPNCSCLCSNQTGIIDSLG

SEQ ID NO: 69613 - protein, 269 aa, Gossypium hirsutum
  unsure (1)..(269): unsure at all Xaa locations
  Clone ID: GOSHI-09MAY01-C2864_1.pep
EVRYLMQTHQKNQVKDTIDVDEPEGGDPLTAEELEEKERLLEEGFSSWSRRDFNTSIRACEKYGRNDIKSIASEMEGKTEQEVQRYAKVFKERYKELNDYDRIIKNIERGEARISRKDEIKKAIGKKLDRYKNPWLEMKIQYGQNKGKLYNEECDRFMVCMVHKLGYGNWEELKAAFRMSPLFRFDWFVKSRTTQELARRCDTLIRLVEKENPKXDERERQARKEXKKLAKNMTPSNRGGRHPTESPTQQKKRKQLSMDDYANSRKKRK

SEQ ID NO: 69614 - protein, 75 aa, Gossypium hirsutum
  Clone ID: GOSHI-09MAY01-C2804_1.pep
IHINSIGSIHPYIPRDIPEKLKWLPLKNSPKIFSLTLNFQQIQSQPIYPSPDPTIYCIAVNSTICYDTVALLCCN

SEQ ID NO: 69615 - protein, 143 aa, Gossypium hirsutum
  Clone ID: GOSHI-09MAY01-C2824_1.pep
MGKDSKSKEAKGKGKQAGGGSDESASKGKGKAGKGDGLGTCTYVKARHILCEKQGKINEAYKKLQDGWLSNGDKVPPAEFAKVAQEYSECPSGKKGGDLGWFPRGKMAGPFQEVAFNTVIGATSAPFKSTHGYHIILCEGRKN

SEQ ID NO: 69616 - protein, 141 aa, Gossypium hirsutum
  Clone ID: GOSHI-09MAY01-C2594_1.pep
MRSQNLMATFRRSKGGRRSKAIEGCKKHPKHKQSPGVCSLCLQQKLSQLSFEYSVPRCRIPVTVDSSICSSSSSSSSSSSLSSYYSSASTSASSSPTHSYHLVREGKGNSFPLLLFSGMKRNCGFFSKLLHHHSNTTTMVH

SEQ ID NO: 69617 - protein, 64 aa, Gossypium hirsutum
  Clone ID: LIB3135-026-Q1-K1-F1.pep
FVSLVTVQWNEKELWVLLKVASSSQQHYHHGSLMVVFFYGFSVFFFFFFPYIYISCDQFSLIIF

SEQ ID NO: 69618 - protein, 202 aa, Gossypium hirsutum
  unsure (1)..(202): unsure at all Xaa locations
  Clone ID: GOSHI-09MAY01-C2584_1.pep
TRAGCGRVRLPMFIRLFHYYAGWADKIHGLTVPADGPHHVQLLHEPIGVAGRIIPWDGRVLMFAWKVGPALACGNTIVLKTAEQTPLTALYVAKLFHEAGLPPRVLNVVSGYGPTAGAALASHMDGDKVAFTGSTDTGKIVLELAAKCXLKPVTLELGGKSPFIICEDADVDKAVELAHFALFXFNPGPCCCAGSRTFCSRT

SEQ ID NO: 69619 - protein, 72 aa, Gossypium hirsutum
  Clone ID: GOSHI-09MAY01-C2554_1.pep
LNIKCFDKKTRQQYTEGPRVEKYKNMLKRKAEEQGAEFLSYDPIKGEWRFKVNGFSTYKLEDGDDDGEDKEH

SEQ ID NO: 69620 - protein, 260 aa, Gossypium hirsutum
  unsure (1)..(260): unsure at all Xaa locations
  Clone ID: GOSHI-09MAY01-C2564_1.pep
SCVLKNWPERXIQVIVVTDGERILGLGDLGCQGMGIPVGKLSLYTALGGVRPSACLPVTIDVGTNNEQLLKDEFYIGLRQRRATGQEYADLLHEFMSAVKQNYGEKVLIQFEDFANHNAFTLLAKYGTTHLVFNDDIQGTASVVLAGVVAALKLIGGTLADHKFLFLGAGEAGTGIAELIALEMSKQTKIPVEETRKKIWLVDSKGLIVNSRRESLQHFKKPWAHDHEPVKDLLGAVXAIKPTVLDGSSGGGRTSTTEIF

SEQ ID NO: 69621 - protein, 206 aa, Gossypium hirsutum
  Clone ID: GOSHI-09MAY01-C2514_1.pep
MGLHSDVFQKYVKNWIAIAAPFRGAPGYIASTFLNGMSFVDGWEQNFFISKWSMHQLLIECPSIYELMACPHFHWQHIPLLEIWREKEGCDGYPRTILESYRPGNCIDIFKEALSGNTVDYNGEMIPLPFNLEILKWVKETQKVLSHAKVPSGVKFYNIYGINLETPHSVCYGSEEAPVTNIQDLRFFQPQYICVDGDGTIPAEIT

SEQ ID NO: 69622 - protein, 200 aa, Gossypium hirsutum
  unsure (1)..(200): unsure at all Xaa locations
  Clone ID: GOSHI-09MAY01-C2494_2.pep
MVSSPVVNTYPLSSYTFGTKEPKMEKDTSVADRLARMKVNYMKEGMRTSVEAILLVQEHNHPHILLLQIGNTFCKLPGGRLKPGENEIEGLKRKLTSKLGANSPALVPDWQIGESVAIWWRPNFETMMYPYCPPHITKPKECTKPPLXHLSEKEYFAEPKNLKLLAVPLLELYDNVQRYGPVISTIPQQLSRFQFNMISI

SEQ ID NO: 69623 - protein, 198 aa, Gossypium hirsutum
  Clone ID: GOSHI-09MAY01-C2494_1.pep
MVMSPVVNTYPLSSYTFGTKEPKMEKDTSVADRLARMKVNYMKEGMRTSVEAILLVQEHNHPHILLLQIGNTFCKLPGGRLKPGENEIEGLKRKLTSKLGANSPALVPDWQIGESVAIWWRPNFETMMYPYCPPHITKPKECKKLFLVHLSEKEYFAVPKNLKLLAVPLFELYDNVQGYGPVIGSNLILVHSSTDLSF

SEQ ID NO: 69624 - protein, 62 aa, Gossypium hirsutum
  Clone ID: LIB3272-044-P1-K1-G4.pep
FYPRIKKGFDNFIELPFRKILGEEKDGILTCREHVSTCQLHLLLQSSPIWIKTPPLPISLLS

SEQ ID NO: 69625 - protein, 192 aa, Gossypium hirsutum
  Clone ID: GOSHI-09MAY01-C2484_1.pep
SPETDAKLAKRYVDHPFVLKLLDLFDSDDQREREYLKTILHRIYGKFMVHRPFIRKAINNIFYRFIFETEKHNGIAELLEILGSIINGFALPLKEEHKLFLVRALIPLHKPKCVSMYHQQLSYCITQFVEKDFKLADTVIRGLLKYWPVTNSSKEVMFLGELEEVLEATQTAEFQRCMVPLFRQIGRCLNSL

SEQ ID NO: 69626 - protein, 185 aa, Gossypium hirsutum
  Clone ID: GOSHI-09MAY01-C2454_1.pep
KNFETQFTQFLRRCGPPIYVTCGGWYDKLEALEPSIKQVSDSIKRLAADTSGFLPHQEKNEGKNAKRPHEASGDDSNVDSAINMSRDEAMKERTSASNEISDSAYNMFRNDALKDSFETSLVFFIGQLKSFAEASVKMYTELDRDIRQAKHNYEISVKGVEVANEENNAESNNQSGSDQQPKPQV

SEQ ID NO: 69627 - protein, 373 aa, Gossypium hirsutum
  Clone ID: GOSHI-09MAY01-C2444_1.pep
MRESYLLFTLLVLLPSTLHFQAHAAPAGPLVKHLSSLLKWTRSTTKAPQSDGNVLQFENGYLVETVVEGNEIGVVPYKIRVSEDGELFAVDEVNSNIVKITPPLSQYSCGRLVAGSFQGYTGHVDGKPSDARFNHPKGVTMDDKGNVYVADTMNLAIRKIGDAGVTTIAGGKSNIAGYRDGPSEDAKFSNDFDVIYVQPTCSLLVIDRGNAALRQISLNQDDCDYQYSSVSPTGTGLLADILMVLGAILAGYATCLLQQGFGPSFFPRMQPSDREFKEQPSKEKLTPIVDSTKEVPGWPSFGQLVADLSKLALEAMGSIFLYFVPSRFQPNSSKKGLTPMKDSLIMPEDEVPPPLVQRQATPAPISETRQTHT

SEQ ID NO: 69628 - protein, 188 aa, Gossypium hirsutum
  unsure (1)..(188): unsure at all Xaa locations
  Clone ID: LIB3543-033-Q1-K1-G1.pep
DYQYSSVSPTXILMVLGAILAGYATCLLQQGFGPSFFPXMQPSDREFKEQPSKEKLTPIVDSTKEVPGWPSFGQLVADLSKLALEAMGSIFLYFVPSRFQPNSSKKGLTPMKDSLIMPEDEVPPPLVQRQATPAPISETRQIHTTNTADKYSEMKPPKIKSSSFRDPSLSSKHRSSKKQEYAEFYGPG

SEQ ID NO: 69629 - protein, 214 aa, Gossypium hirsutum
  Clone ID: GOSHI-09MAY01-C2464_1.pep
HAALEIEECRPHNNWPEVGTICFGNLEIRYAEHLPSVLKNISCTFPGRKKIGVVGRTGSGKSTLIQAIFRIVEPREGSIIIDNVDICKIGLHDLRSRLSIIPQDPTMFEGTVRGNLDPLVQYSDNEVWEALDKCQLGEIVRAKEEKLDATVIENGENWSVGQRQLFCLGRALLKKSSILVLDEATASVDSATDGVIQKIIDQEIKDRTVVTIAH

SEQ ID NO: 69630 - protein, 126 aa, Gossypium hirsutum
  unsure (1)..(126): unsure at all Xaa locations
  Clone ID: GOSHI-09MAY01-C2744_3.pep
MDVTSTPDRKEMDRIKGPWSPEEDELLQQLVQKHGPRNWSSISKSIPGRSGKSCRLRWCNQLSPQVEHRAFTPEEDETIIRAHARXFGNKWATIARLLNGRTDNAIKNHWNSTLKRKCLPVGEECN

SEQ ID NO: 69631 - protein, 100 aa, Gossypium hirsutum
  Clone ID: GOSHI-09MAY01-C2744_2.pep
FPYQEKTQPSFFSSFTLIFNLSLDLTHPDSVHSHKIPEPPIQTHPHSRSSRNCAVLLLLLLLHLGHVIPDARAYNLLHHRHKLHTEPHHPTSPFFTPILS

SEQ ID NO: 69632 - protein, 325 aa, Gossypium hirsutum
  Clone ID: GOSHI-09MAY01-C2744_1.pep
MSPCPSLLHAFQFDFMDVTSTPNRKEMDRIKGPWSPEEDDLLQQLVQKHGPRNWSSISKSIPGRSGKSCRLRWCNQLSPQVEHRAFTPEEDETIIRAHARFGNKWATIARLLNGRTDNAIKNHWNSTLKRKCLPVGEECNFVANGGYDGNLGGEERQPLKRSVSAGLYMSPGSPSGADVSDSSVPVLSSSHVYKPIPRTGGVNVDVNVTPPARGAASSSNDPPTSLSLSLPGVESCEVVSTQPITESTQNRSEERGGGVMGFSAEFMAVMQEMIRVEGRNYMTQMQQQQQQQNGAVPGGAGMGMCLDGGFRNLMAGNRVAVSKIQ

SEQ ID NO: 69633 - protein, 59 aa, Gossypium hirsutum
  Clone ID: LIB3145-021-Q1-K1-H3.pep
QKYSPHNSHSKKEHSPVFSHLLLSFLAFHSIIVIPTRLTAMTFLNPPFKHIPISDLSRK

SEQ ID NO: 69634 - protein, 134 aa, Gossypium hirsutum
  unsure (1)..(134): unsure at all Xaa locations
  Clone ID: GOSHI-09MAY01-C2764_1.pep
YLPAIYPVCSKLTSLNLSYATIPKVXLIKLVSHCPNLQRLLVMVHRYLDYIEDSGLXEVLASSCKDLQELRVFPSDPFGAEPNVSLSEQGLVAVSLGCPKLHSVLFFCRPLSFAALVPLARSRPNFTRFLLCLF

SEQ ID NO: 69635 - protein, 61 aa, Gossypium hirsutum
  Clone ID: GOSHI-09MAY01-C2714_2.pep
KDEIPEAAGEAEEDHQCIRISRKVPSHIQEENATKLAKLLQEFEFFKKESDRLESESQHQK

SEQ ID NO: 69636 - protein, 382 aa, Gossypium hirsutum
  Clone ID: GOSHI-09MAY01-C2714_1.pep
GNLDPNELATAKEGQPSALPSGIAGCGADALRFALVSYTAQSDKINLDILRVVGYRQWCNKLWNAVRFAMSKLPDDYTPPSTINPETMPFSCRWILSVLNKAISKTVLSLNSYEFSDATTCVYSWWQYQFCDIFIEAIKPYFAGDNPAFSSERKFAQDALWACLEIGLRLLHPFMPFVTEELWQRLPGVKSHTKKESIMMCDYPSPIESWTNERVEYEMDLVESTVRSLRSLRAELLAKQKNERLPAFALCQNDEVAKIIRSCELEILTLATLSSFKVLLSGVDDAPAGCAFENVNENLKVYLKVHGTLNAEAERAKIKNKMDEILKQQEKLKKIISASGYQEKVPSHIQEENATKLAKLLQEFEFFKKESDRLESESQHQK

SEQ ID NO: 69637 - protein, 166 aa, Gossypium hirsutum
  Clone ID: GOSHI-09MAY01-C2704_3.pep
MGRGKIEIKRIENTTNRQVTFCKRRNGLLKKAYELSVLCDAEVALIVFSTRGRLYEYSNNNIRSTIERYKKACSGTSNTNTVTEINAQYYQQESAKLRQQIQMLQNSSRHLMGDSLSSLTVKELKQLENRLERGITRIRSKKHEMLLAEIEYFQKREVELENESVC

SEQ ID NO: 69638 - protein, 224 aa, Gossypium hirsutum
  Clone ID: GOSHI-09MAY01-C2704_2.pep
MGRGKIEIKRIENTTNRQVTFCKRRNGLLKKAYELSVLCDAEVALIVFSSRGRLYEYSNNNIRSTIDRYDKACSGTSNTNTVTEINAQYYQQESAKLRQQIQMLQNSSRHLMGDSLSSLTVKELKQLENRLERGITRIRSKKHEMLLAEIEYFQKREVELENESVCLRAKIAEIERVEEANMVTGAELNAIQALASRNFFTPNVIERGTPTPYSHHDKKILHLG

SEQ ID NO: 69639 - protein, 223 aa, Gossypium hirsutum
  unsure (1)..(223): unsure at all Xaa locations
  Clone ID: GOSHI-09MAY01-C2704_1.pep
MGRGKIEIKRIENTTNRQVTFCKRRNGLLKKAYELSVLCDAEVALIVFSSRGRLYEYSNNNIRSTIDRYKKACSDTSNTNTVTEINAQYYQQESAKLRQQIQMLQNSNRHLMGDSLSSLTVKELKQVENRLERGITRIRSKKHEMLLAEIEFLQKREIELENESVCLRTKIAEIERLQQANMVTGPELNAIQALASRNFFSPNVIEHPSAYSHLSDXKILHLG

SEQ ID NO: 69640 - protein, 148 aa, Gossypium hirsutum
  unsure (1)..(148): unsure at all Xaa locations
  Clone ID: GOSHI-09MAY01-C2654_1.pep
LWFRVSLRGGEGGSYESRVYAVLLLKSMVEMAGPMQLVNLRPELFVELVKVLCDQISQRAPXAALKLLVYTCPLGRNKIKAAAAGVVPVLINMLLDSSEKRACEMILTVLDAVCXCAEGRLELISHGTWLAIVXKKILKIFHVSSEMA

SEQ ID NO: 69641 - protein, 433 aa, Gossypium hirsutum
  Clone ID: GOSHI-09MAY01-C2674_1.pep
MAGRDIAGMENTILIIGAIVANRLAHSSARRSSSDFEKLGNQPLAPLASNEVQEIKSVKSSSSLDSQALDTPISISLRPPPIDRHKSFDDEEFSKKPVVVKKAVPAPTNVTSYSIADLQIATGSFSVENLLGEGSFGRVYRAQFADGKVLAVKKIDSSALPSNMSDNFMEMVSNISQLHHTNVTELVGYCSEHGQHLLVYEFHKNGSLHDFLHISDEYSKPLIWNSRVKIALGTARALEYLHEVCSPSVVHKNIKSANILLDAELNPHLSDSGLATFIPNADQVLNRDDVGSGYCAPEVTMSGQYSLKSDVYSFGVVMLELLTGRKPFDSTRPRLEQSLVRWATPQLHDIDALSKMVDPALKGLYPVKSLSRFADVIALCVQPEPEFRPPMSEVVEALVRLVQRANMSKRTTGTDQGASPRIGNPDDTHDYMS

SEQ ID NO: 69642 - protein, 111 aa, Gossypium hirsutum
  unsure (1)..(111): unsure at all Xaa locations
  Clone ID: AI727535.1.pep
CKPFDSTRPRLEQFLVRWATLQLHDIDALFKMVDPALEGLYPVKSLSRFADVIALCVQPEPEFRLXMSEVVQALVRLVQRANMSKRTIGTDQGASQRTDNVVADDAHDYVS

SEQ ID NO: 69643 - protein, 126 aa, Gossypium hirsutum
  unsure (1)..(126): unsure at all Xaa locations
  Clone ID: LIB3585-051-P1-K1-C6.pep
VDVQSIIQPVVVKKAVPAPTNVTSYSIAGLQIYTVNFIVRNILRDSSFIRVYKAXYVDGMDIAVTKINLSSLTINMSDNIMVMAANIFQMHHTHVTLSNSYXIXHGHHLLVYEFHKNRSLYDLLHI

SEQ ID NO: 69644 - protein, 176 aa, Gossypium hirsutum
  unsure (1)..(176): unsure at all Xaa locations
  Clone ID: AI055521.1.pep
MPGPGPHLMYAMSSGLALTHLTRGRFSPHHTLTYTLNAFFGPDIGSFSEWLTSVLFLDSSVLAFLADSIHHPVYDVLILGLPLCLFYSWASGVLVKRSLLDSVSGVPLSRKQCLLLISAGSFSHFFLDHLFETLYKDXHXENGKSSMYTWILSTCWWINRAPVNQMLWCSWILCTC

SEQ ID NO: 69645 - protein, 187 aa, Gossypium hirsutum
  Clone ID: LIB3584-006-P1-K1-B5.pep
HAFFGPGTGSFSEWLTSVLFLDSSVLAFLADSIHHPVYYVLILGLPLCLFYSWASGVLVKRSLLDSVSGVPLSRKQCLLLISAGSFSHFFLDHLFEENGKSSMYTWILSTGWWINRAPVNPDAVVVVGFLCTCLIGGFIYINRVGLPKSTRKQSYHSMKLIMIIASLYSFWWASQLYWANPRRPAVW

SEQ ID NO: 69646 - protein, 77 aa, Gossypium hirsutum
  unsure (1)..(77): unsure at all Xaa locations
  Clone ID: GOSHI-09MAY01-C2604_3.pep
GRVGGRVGGRVGFSGTREYKLLADIASAIDEEDVSKFTEVVKEFDSMTPLDSWKTTLLLRVLSKAVXSNELEEDDLT

SEQ ID NO: 69647 - protein, 109 aa, Gossypium hirsutum
  Clone ID: GOSHI-09MAY01-C2604_2.pep
PGTKGKLGGWGSFGSKHEDAPELFDKAANCFKLAKSWDKAGSTYVKLANCHLKPDSKHEAAQAYVDAAHCYKKTNVKEAISCLKEAVNMFCDIGRLSMAAKYYKVFFIH

SEQ ID NO: 69648 - protein, 289 aa, Gossypium hirsutum
  Clone ID: GOSHI-09MAY01-C2604_1.pep
MGDQLAKGEEFVKKAEKKLNGWGLFSSKYEDAADLFDKAANCFKLAKSWDKAGSTYVKLANCHLKSDSKHETAQAYVDAAHCYKKTATKEAISCLQQAVNLFCDIGRLSMAARYYKEIAELYESEQNIEQAMDYFEKAADFFQNEDVSSSANQCKQKVAQFAAQIEQYQKAIEIYEEIARQSLTNNLLKYGVKGHLLNAGICQLCKGDVVAITNALERYQDLDPTFSGTREYKLLADIASALDEEDVSKFTEVVKEFDSMTPLDSWKTTLLLRVKEKLKAKELEEDDLT

SEQ ID NO: 69649 - protein, 100 aa, Gossypium hirsutum
  unsure (1)..(100): unsure at all Xaa locations
  Clone ID: LIB3189-006-P1-K1-A3.pep
MAAADDRVTKPNVKDAISYLIEAANMFCDIGRLNMAAKYYKEIAELYESEQNTXHSIDYYEKAADFFQNEEISTSVNQFVAXVAQLVVQXEQYQKAVEIY

SEQ ID NO: 69650 - protein, 79 aa, Gossypium hirsutum
  unsure (1)..(79): unsure at all Xaa locations
  Clone ID: uC-gsflmaxxa040c02b1.pep
QSCFSFFYVAFMFFDFLSYLFFYFMFFYLFIFFFSILSIFCLFFFHSYFFLLFFFSFVLLFLYLLIFFXQFFLLFFLLF

SEQ ID NO: 69651 - protein, 97 aa, Gossypium hirsutum
  unsure (1)..(97): unsure at all Xaa locations
  Clone ID: LIB3135-005-Q1-K1-A12.pep
EKERPTRAPTRPFSSKYEYAAEGKDKNVCCVXLSKSWDKXGSTYVKMANCHLKSDSKHETAQAYVDAAHCYKKTATKEAISCLHQAMNLFCDIGKLN

SEQ ID NO: 69652 - protein, 130 aa, Gossypium hirsutum
  Clone ID: GOSHI-09MAY01-C2184_5.pep
MAEHEEKKHEESLMERIAEKIQGHDSSSSDSDNDKPSESSIKAKVFRLFGREKPVHHVLGGGKPADIFLWRNKKISAGALGVATVIWILFEMLEYHLLTLVCHLLILALALLFLWSNAATFINMSAPSIP

SEQ ID NO: 69653 - protein, 97 aa, Gossypium hirsutum
  Clone ID: GOSHI-09MAY01-C2184_3.pep
FEINRGFAVLRDIASRRDLKKFLSVIRGLGVSSIVGSWRNFLTLVYIVFVLLHTVPVLYEKYEDKVDPLAEKAWHEIKKQDAVFDAKVLSQIPRGPL

SEQ ID NO: 69654 - protein, 283 aa, Gossypium hirsutum
  Clone ID: GOSHI-09MAY01-C2184_2.pep
MFCITQGHSTQAHRVWGRREYHEKVTKGPCILFCPTYLGIPDDLQCHQQSSMKAKVFRLFGRERPVHDVFGGGKQADIFLWRNKKISAGALGVATVIWVLFELLEYHLLTLVCHLLILALALLFLWSNAAPFIHKSPPRIPEVQIPKDPVLEFALALRFEINRAFAVLRDIASGRDLKMFLSVIAGLWVLSIVGSWCNFLTLFYIVFVLLHTVPVLYEKYEDKVDPFAEKAMHEIKKQYAVFDAKVLSKIPRGPLKQKKDYFPRVRLMLLGSEVRNTSGSCMA

SEQ ID NO: 69655 - protein, 252 aa, Gossypium hirsutum
  Clone ID: GOSHI-09MAY01-C2184_1.pep
MAEHEEKKHEESLMEKIAEKIHGHDSSSSSSDSDDDKQSESSIKDKVFRLFGREKPVHHVFGGGKPADILLWRNKKISAGALGVATVIWVLFELLEYHLLTLVCHLLILALALLFLWSNATQFINKSTPHIPEVQIPKDPVLEFAQALRFEINRAFAVLRDIASGRDLKKFLSVIAGLWVLSIVGSWCNFLTLFYIVFVLLHTVPVLYEKYEDKVDPFAEKAMHEIKKQYAVFDAKVLSKIPRGPLKEKKKD

SEQ ID NO: 69656 - protein, 49 aa, Gossypium hirsutum
  Clone ID: uC-gsronu33B167a05b1.pep
LPSVKMCYLLYILYQLEPCFNLFPVLVHNGFKKFDEFGIFFSKSCLVGF

SEQ ID NO: 69657 - protein, 348 aa, Gossypium hirsutum
  unsure (1)..(348): unsure at all Xaa locations
  Clone ID: GOSHI-09MAY01-C2154_1.pep
MAAYRLLIFSLFLALVFTKIGADASTEPLIESDAADSSALKMELDQLKSKIRLLESNVEEKIRELKTKDEMIKQKDKIIEEKSDTMASLHSELSSLQKKGTPDAEERVGKAHAKALELQKQVDRLKTELEAKLKEKDYLESRATKAENKLNELNLQLENLQKINKEQENKLAKTERALNIAEEELVKAKFDATSKANELMEVHSAWLPPWLATQLIRGQAFIQTHWNQHGKPNMDMVIQKALEKKALAKKWAEPHMEAIKTKWVPAAKDQWVAVTTYAEPHVQSLTAKTVEIYEVSKATITPHIIKVQETVDPYFQDAKKFTKPYIDQVATXAKPHVDKISVEMKPYT

SEQ ID NO: 69658 - protein, 103 aa, Gossypium hirsutum
  unsure (1)..(103): unsure at all Xaa locations
  Clone ID: AI055154.1.pep
MAAYRLLIFSLFLALVFTKIGADASTEPLLEPDAADSSALKMELDQLKSKIRLLESNVEEKIRELKTKDEMIKQKEXIIEEKSDSMASLRSEYHLFRXRNLRC

SEQ ID NO: 69659 - protein, 98 aa, Gossypium hirsutum
  unsure (1)..(98): unsure at all Xaa locations
  Clone ID: LIB3828-017-Q1-K6-C12.pep
SRKIKLLEEKSDTMASLHSELSSLQKKGTPDAEERXXKAHAKALELQKQVDRLKTELEAKLKEKDYLESRATKAENKLNELNLQLENVSFFISFSSLF

SEQ ID NO: 69660 - protein, 154 aa, Gossypium hirsutum
  unsure (1)..(154): unsure at all Xaa locations
  Clone ID: LIB3583-022-P1-K1-D4.pep
CDMVIVARLLNLTLVVPKLDKTSFWADPSDLGDIFDVSHFIDSLMDEVRIIKRLPKKFNRKYGFQAFQMSPVSWSNEKYYLXRYAYPWWREKEIMSEERRQQGLCPLTPEEATLVLQALGFDKETQIYIASGEICGSERRLASLRAAFPHTVRF

SEQ ID NO: 69661 - protein, 124 aa, Gossypium hirsutum
  Clone ID: LIB3083-054-Q1-L1-G1.pep
ANNGIQLDLQKLRCRVNFQGLKFTPEIETLGYKLVRILQDKGPFVALHLRYEMDMLAFSGCTHGCTVEEAEELKRLRYAYPWWREKEIMSEERRQQGLCPLTPEEATLVLQALGFDKETQIYIA

SEQ ID NO: 69662 - protein, 331 aa, Gossypium hirsutum
  unsure (1)..(331): unsure at all Xaa locations
  Clone ID: GOSHI-09MAY01-C2074_1.pep
HASAGLPEFSRLGWGHWFTLRDLRLQLNRFSKDNIMGDGGYGVVNRGNLINGTPVAVKKLLNNPGQADKDFRVEVEAIGHVRHKNRARRLGYCIEGTQRLLVYEYVNNGNLEQWLRGDMSDKGYLTWEARIKILLGTAKALAYLHEAIEPKVVHRDIKSSNILIDDXFDAKISDFGLAKLLGDGKSFITTRVMGTFGYVAPEYANSGILNEKSDVYSFGVVLLEAITGRYPIDYGRPQPEVNMVEWLKMMVQLRRSEEVVDPNIETRPSASALKRALLTALRCVDPDADKRPKMSQVARMLEAEEYPLPREDRRRRRNQSVNSDADTQRKN

SEQ ID NO: 69663 - protein, 284 aa, Gossypium hirsutum
  unsure (1)..(284): unsure at all Xaa locations
  Clone ID: GOSHI-09MAY01-C2064_3.pep
FFLSIKSSSWRSLMYHHGCSYAPCGPYSPAASPVPTLGNDGQLYGPQHYQCPPCFQPMTLTSGPFTPNPAAPSHGELLTSAAADQKPLPVETPNSNSNGGANGGSVKGNNGPGAIKPSYPSTFNTNNSYGRGPPPGSGYQDPRYGFDGFRSPIPWLDGSMFSDGQHRPVSSPAMNSLVSKANGFPSSRNQNFRSNSNYMGLHHPGPMSGMGTTHGYVNRMYPNKPYGQYGTTFRSGMGFGSNGYDLRTNERGWLADNTYRPRXRGNGYFGSGNDIMDGFNELNR

SEQ ID NO: 69664 - protein, 224 aa, Gossypium hirsutum
  Clone ID: GOSHI-09MAY01-C2064_2.pep
RSRRVGGRVGGRVGGRVGADARESIKYNVWASTPNGNKKLDAAYQEAQQKSGHCPIFLFFSVNTSGQFVGIAEMVGAVDFQKNVEFWQQDKWTGCFPVRWLIIKDVPNNSLKHITLENNENKPVTNSRDTQEIKLDQGLKLLKIFKDHSSKTCILDDFEFYEIRQKAIQEKKAKHQLQKQVWEEKPGDEKKDIATTNGDLIKEANPIPHSNGLLSEDGSGYPKQ

SEQ ID NO: 69665 - protein, 430 aa, Gossypium hirsutum
  Clone ID: GOSHI-09MAY01-C2064_1.pep
GPPPGSVPTSGYQDPRYSFAGARAPIPWLDGSMFSDGQHRPVSSPAMNSLVSKANGFPSSRNQNFRSNSNYMGLHHPGTMSGMGTAHGYVNRMYPNKPYGQYGTTFRSGMGFGSNGYDLRTNERGWLADNKYRPRGRGNGYFGSGNDIMDGFNELNRGPRAKGPKNQKGATPITASTKGQNIPSDGTKHEEKAYVVPDREQYNLEEFLVDYDDAKFFVIKSYSEDDVHKSIKYNVWASTPNGNKKLDAAYQEAQQKSGHCPIFLFFSVNTSGQFVGIAEMVGAVDFQKNVEFWQQDKWTGCFPVRWLIIKDVPNNSLKHITLENNENKPVTNSRDTQEIKLDQGLKLLKIFKEHSSKTCILDDFEFYEIRQKAIQEKKAKHQLQKQVWEEKPGDEKKDITTTNGDLIKEANPIPHSNGLLSEDGSGYPKQ

SEQ ID NO: 69666 - protein, 197 aa, Gossypium hirsutum
  Clone ID: LIB3825-016-Q1-K6-G1.pep
FLSVVNGAYVAPPADQTAELLQKLTIDSQAKPFDIPEPTKKSSVYQYGSVDSGNTGNTQIPTFDRSTTPLLQDFMDPTMCYIPSGYPSAYYYGGFDGTGNEWDEYSQYLNPDGVDMTSGVYGDNGSLMYHHGYSYAPYGPYSPAASPVPTLGNDGQLYGPQHYQYPPFFQPMTLNSGPFTPNPAAPSHGELLTSAAA

SEQ ID NO: 69667 - protein, 60 aa, Gossypium hirsutum
  unsure (1)..(60): unsure at all Xaa locations
  Clone ID: uC-gsflnu33B025c12b1.pep
GKXNFLLNFLNFKGKILFFFYTPNGFFIPPQFLGGGGIKPPPNLFPLFFFPKKKGGGGGG

SEQ ID NO: 69668 - protein, 73 aa, Gossypium hirsutum
  Clone ID: LIB3120-048-P1-K1-G2.pep
TPTPPTQPRLGLFIYIPLKMVPWYCKIYNKILKPVKNHQAFIIFYKTTNTSLRGSIENVSNRLIKSSSLFRVS

SEQ ID NO: 69669 - protein, 73 aa, Gossypium hirsutum
  Clone ID: uC-gsflnu33B111e07b1.pep
PAAPPPNPALDYSLYIPLKMVPWYRKIYNKILKPVKNHQAFIIFYKTTNTSPRGFIENVSNRLTKSSSLFWVS

SEQ ID NO: 69670 - protein, 127 aa, Gossypium hirsutum
  Clone ID: GOSHI-09MAY01-C2004_1.pep
ESLEESQSKIEKSQVALADLQIELEKERFSKKRIEEELEVARRKVSRLQTEMEGSSTVERLQQELREYKEILKCGICLDRPKEVVITKCYHLFCNPCVQKNITESRQRKCPVCAASFGANDVKPIYI

SEQ ID NO: 69671 - protein, 201 aa, Gossypium hirsutum
  Clone ID: GOSHI-09MAY01-C2034_3.pep
LLVRSKPHKLESVDSLTEKVDSDLSLSAPKEVQNHVGSGLSQIGEQEKKALEHGSNSASAKSSDGATGVVKVSGGAKVGDRPDFFESGKSCVCRGSTSSGVSDESTCSSLSSSINKPHKANDIRWEAIQAVRAKDGVLGLNHFRLLKRLGCGDIGGVYLAELSGTKCYFAMKVMDKASLASCKKLLRAQTEREILQSLDHP

SEQ ID NO: 69672 - protein, 170 aa, Gossypium hirsutum
  Clone ID: GOSHI-09MAY01-C2034_2.pep
GADQGVRVSPPLIKSPLPAADPWRRRSAYGVQPACIEPSCIQPSCLAPTTCFSPRFFSSKSKKDRKPKNDMGNQVSPLPELIAEPTNARSMSFVGTHESLAPEIIKGQGHGSAVDWWTFGIFLYELLFGKTPFKGSGNRATLFNVVGQPLRFPESPVVSFAARDLIGVCW

SEQ ID NO: 69673 - protein, 322 aa, Gossypium hirsutum
  Clone ID: GOSHI-09MAY01-C2034_1.pep
TDKFSCLVMEFCPGGDLHTLRQRQPGKHFSARPPTRPVAEVLLALEYLHMLGIVYRDLKPENVLVREDGHIMLSDFDLSLRCAFNPTLVKLSTPESEPLRKNSAYCVQPACIEPSCIQPSCVAPTTCFSPRFFSSKSKKDRKPKNEMGNQVSPLPELIAEPTNARSMSFVGTHEYLAPEIIKGEGHGSAVDWWTFGIFLYELLFGKTPFKGSGNRATLFNVVGQPLRFPESPVVSFSARDLIRGLLVKEPQQRLAYKRGATEIKQHPFFEGVNWALIRCASPPEVPKPVEVERIPAPTSSAGNKPAVPATKDQNNYLEFDFF

SEQ ID NO: 69674 - protein, 139 aa, Gossypium hirsutum
  unsure (1)..(139): unsure at all Xaa locations
  Clone ID: LIB3148-002-P1-K1-A5.pep
MVGILGGVYPSKIKGTXCYFAMKVMDKASLASRKKLLRAQTEREILQSLDHPFLPTLYTHFETDKFSCLVMEFXCPGGDLHTLRQRQPGKHFTEQAVKFYVAEVLLALEYLHMLGIGYRDLKPENVLVREDGHIMLSDF

SEQ ID NO: 69675 - protein, 122 aa, Gossypium hirsutum
  Clone ID: GOSHI-09MAY01-C2024_5.pep
MAVGKNKRISKGKKGGKKKAADPFAKKDWYDIKAPSVFTSRNVGKTLVTRTQGTKIASEGLKHRVFEVSLGDLQGGDEDHAYRKIRLRAEDVQGKNVLTNFWGMNFTTDKLRSLVRKWQTLI

SEQ ID NO: 69676 - protein, 262 aa, Gossypium hirsutum
  Clone ID: GOSHI-09MAY01-C2024_4.pep
MAVGKNKRISKGKKGGKKKAADPFAKKDWYDIKAPSVFTSRNVGKTLVTRTQGTKIASEGLKHRVFEVSLADLQGGDEDHAYRKIRLRAEDVQGKNVLTNFWGMNFTTDKLRSLVRKWQTLIEAHVDVKTTDNYTLRMFCIGFTKRRPYQVKRTCYAQSSQIRQIRRKMREIMTAQATSCDLKELVQKFIPALAAEEIEKATSSIYPLQNVFIRKGKILKAPKFDLGKLMEVHGDYSEDVGVKIERPADETMAEAAPEVIGA

SEQ ID NO: 69677 - protein, 264 aa, Gossypium hirsutum
  unsure (1)..(264): unsure at all Xaa locations
  Clone ID: GOSHI-09MAY01-C2024_2.pep
MAVGKNKRISKGKKGGKKKAADPFAKKDWYDIKAPSVFTTRNVGKTLVTRTQGTKIASEGLKHRVFEVSLADLQGGDEDHAYRKXIRLRAEDVQXGKNVLTNFWGMNFTTDKLRSLVRKWQTLIEAHVDVKTTDSYTLRMFCPARPKRRPNQVKRTCYAQSSQIRQIRRKMREIMTAQATSCDLKELVQKFIPEMIGKEIEKATSSIYPLQNVFIRKVKILKAPKFDLGKLMEVHGDYSEDVGVKLERPADETMAEAPAEVVGA

SEQ ID NO: 69678 - protein, 263 aa, Gossypium hirsutum
  unsure (1)..(263): unsure at all Xaa locations
  Clone ID: GOSHI-09MAY01-C2024_1.pep
MAVGKNKRISKGKKGGKKKAADPFAKKDWYDIKAPSVFTTRNVGKTLVTRTQGTKIASEGLKHRVFEVSLADLQGGDEDHAYRKIRLRAEDVQGKNVLTNFWGMNFTTDKLRSLVRKWQTLIEAHVDVKTTDNYTLRMFCIGFTKRRPNQVKRTCYAQSSQIRQIRRKMREIMTAQATSCDLKELVQKFIPEMIGKEIEKATSSIYPLQNVFIRKVKILKAPKFDLGKLMEVHGDYSXEDVGVKLERPADETMAESTPEVVGA

SEQ ID NO: 69679 - protein, 88 aa, Gossypium hirsutum
  Clone ID: LIB3583-004-P1-K1-H9.pep
MAVGKNKRISKGKKGGKKKAAYPFAKKDWYDIKAPSVFTSRNVGKTLVTRTQGTKVGFFKKNFFTLLKLLLYVRFFWMFEPMGKLGFI

SEQ ID NO: 69680 - protein, 99 aa, Gossypium hirsutum
  unsure (1)..(99): unsure at all Xaa locations
  Clone ID: LIB3048-005-Q1-L1-G3.pep
TEKAVDPFAKKDRYDIKAPSIFTTRNVGKTLVNRTQGTKNASERLKHRVXKVFLADLXAENEDHCLQKDFVEKLNKVQGKXNVLTXNFWGMNFTTDKLR

SEQ ID NO: 69681 - protein, 81 aa, Gossypium hirsutum
  Clone ID: LIB3147-033-Q1-K1-C2.pep
MAVGKNKRISKGKKGGKKKAADPFAKKDWYDIKAPSVFTTRNVGKTLVTRTQGTKIASERLKHRVFEVSLADLQGGDEDHA

SEQ ID NO: 69682 - protein, 63 aa, Gossypium hirsutum
  Clone ID: LIB3147-024-Q1-K1-B1.pep
KATSSIYPLQNVFIRKVKILKAPKFDLGKLMEVHGDYSEDVGVKIERPADETMAEAAPEVIGA

SEQ ID NO: 69683 - protein, 39 aa, Gossypium hirsutum
  unsure (1)..(39): unsure at all Xaa locations
  Clone ID: LIB3197-053-Q1-M1-F6.pep
FDLGKLMEVHGDDSEDVGVKIXRPADETMAEAAPEVIGA

SEQ ID NO: 69684 - protein, 72 aa, Gossypium hirsutum
  unsure (1)..(72): unsure at all Xaa locations
  Clone ID: LIB3083-057-Q1-L1-A12.pep
PEMIGKEIEKATSSIXPLQNVFIRKVKILKAPKFDLVKLMEVHGDYSEDVGVKIERPADETMAEPTPEVIGA

SEQ ID NO: 69685 - protein, 44 aa, Gossypium hirsutum
  Clone ID: LIB3147-032-Q1-K1-H5.pep
RPTRTPGGHWSLYESLFEFACVVFFLIPTDLMILFKTRRNFPWF

SEQ ID NO: 69686 - protein, 38 aa, Gossypium hirsutum
  Clone ID: uC-gsronu33B090c07b1.pep
IRKRVTKNKFNSSFQQNENDRQKFLVRKNKDKIQEILI

SEQ ID NO: 69687 - protein, 131 aa, Gossypium hirsutum
  Clone ID: GOSHI-09MAY01-C2394_2.pep
SLSIDALKKELIHGDDLLPHVYELPLELFNSLVECLPPLALQKLQSEMPFKNYDDYGPSSDDLKMGRIRGRYGNFDTAWKALFKFRWPDLGECVKPVDWQQIYWETHVQNCLDEAAEIALLPSFIGCLENI

SEQ ID NO: 69688 - protein, 74 aa, Gossypium hirsutum
  Clone ID: LIB3543-060-Q6-K6-E5.pep
KSSKAFLFHSISSEPEPEANSSNVNYSPIDPKLSGDDLLPHVYELPLELFNSLVECLPPLALQKLQSEMPFKNY

SEQ ID NO: 69689 - protein, 126 aa, Gossypium hirsutum
  Clone ID: GOSHI-09MAY01-C2384_1.pep
CCSKIMHFNPHSLSKSRVLLTDPMSHNLDSILPFNHRHHRFLYRDSPVFPPHVEPSPSSIGNFHIVVLLSPSREPFCWLPLEFTLHIMVNASPSTQMSWKPISSAIVIACKHALASAITRSGIFSH

SEQ ID NO: 69690 - protein, 157 aa, Gossypium hirsutum
  Clone ID: GOSHI-09MAY01-C2354_1.pep
HASALEVLFNILNDHGHTFSQTFWLGVVSSVVLPIFDGVCEKRDTALQTEQDSPTTESPHCDATTWDTETSAVALHCLVDLFISFYDVLRPRLSDVACILTRYLRSSIHGPASTGVAASSHLTGELGSRLSEDEWLEILLAFIDAAMSTLPGFKKLL

SEQ ID NO: 69691 - protein, 258 aa, Gossypium hirsutum
  Clone ID: GOSHI-09MAY01-C2374_1.pep
PTRPGISNVAPTDAPLRSIPIPKTESSLQLETANNIIEARIHDCISNLRFSISPTAFFQVNTLAAEKLYSLAGEWAGLGPDTLLFDICCGTGTIGLTLAHRVGMVIGIEMNASAVQDAYINAVFHGIKNRRFMGSKAEDVIRSLLKEYLNVSEKQGQLSSALESSEKGTLTGEEIDTCATNAHNDGESSRQEPEKCSSENDGKEIQNQLQESSTSKDGNSSVPQFKNVVAIVDPPRMGLHPTVIKVLRTHAPLRRLVY

SEQ ID NO: 69692 - protein, 257 aa, Gossypium hirsutum
  unsure (1)..(257): unsure at all Xaa locations
  Clone ID: GOSHI-09MAY01-C2314_2.pep
MSIFDWLRKSEMDEKVSAVESKIESLQEELNAVIHKKNKAYETMQHLFKQRDXANAHFYQSLSLLNKAKELAAKKDIKALEELSTVEAEKFMALWSSKKAVWDVYEKRILPSLDQRQLSRDGRIRNPDEKPLVVQETPVPSETVTIPKPSIRQPKEEAKPSPEPDSKPPKKVQKDVESKAKISKSSPGGGIVEEKEISGLGMLQKKKTAVKEVDEAKLKEMKREEEXKKKKDKVEEAEELEEGKKEKKKDKEAKEKK

SEQ ID NO: 69693 - protein, 500 aa, Gossypium hirsutum
  unsure (1)..(500): unsure at all Xaa locations
  Clone ID: GOSHI-09MAY01-C2314_1.pep
MGVEVVGSEMAKVSVDKATEVEKSLVHDKENGKLDKDPVHSEPIKFGSNVEESNKGEEKNASDANFPSDAVVEWPAPKQIHSFYFVRYRPYDDPKIKAKIDQADKEVQKWNKARFQLTDEIKAYKSDRAELLSQVKALNIDFEQFKTMLGEKKKELEPLQQALGKLRNNNNEGGRGGICSSEEELNDFIYSLQYRIQHESIPLSEEKQLLREIKQLEGTREKVIANAAMRAKIQESLGQKEAIQDQVKLMGVDLDGVRKEQNAIWSKKKQIKEKVNAIESKIESLQEELNAVIQKKNKAYETMQQLWKQRDEANAHFYQSRSLLNKAKELAAKKDIKALEELSTVEVEKFMALWSSKKAVRDDYEKRILPSLDQRQLSRDGRIRNPDEKPLVVQETPVPSETVTIPKPSVRQPKEEAKPSPEPDTKPPKKVLKDVESKAKVSKSSPENGIVEEKEVSGLGMLQKDTTAVKEVDXTKLKEMKREEEYSQASHGKEKEKAED

SEQ ID NO: 69694 - protein, 177 aa, Gossypium hirsutum
  Clone ID: GOSHI-09MAY01-C2244_2.pep
MVCMVSRTGRHLQRYDNLGRRQVVGCIPYRYKSSSDGTMTDDLEVLVISSQKCQKMMFPKGGWELDESREEAALRESLEEAGVLGNVECELGKWDFISKSHGTFYEGYMFPLLVKEELDFWPEQNLRQRTWMNVKEARDVCQHWWMKEALDILVERLNSLKQQNEQNYPNICSDLVA

SEQ ID NO: 69695 - protein, 107 aa, Gossypium hirsutum
  Clone ID: GOSHI-09MAY01-C2244_1.pep
QQFKVPSMKFLTKNVRPQFRKDQNFQQEPRKIKDNGTNKISLDENKYKKKDEANQTLFIMKILTRQLGGGIGYRIAASAFQCEKPCKPSSTKLKINDRPRTKNTQNQ

SEQ ID NO: 69696 - protein, 152 aa, Gossypium hirsutum
  Clone ID: GOSHI-09MAY01-C2224_2.pep
MVKAVAVLSSNEGVSGTVFFSQEGDGPTTVTGNLSGLKAGLHGFHVHALGDITNGCMSTGPHFNPAGKEHGAPEDENRHAGDLGNVTVGDDGCASFSIADKQIPLTGPNSIIGRAVVVHADPDDLGKGGHELIKSTGNAGGRVACGIIGLQG

SEQ ID NO: 69697 - protein, 152 aa, Gossypium hirsutum
  Clone ID: GOSHI-09MAY01-C2224_1.pep
MVKAVAVLGSNEGVSGTVFFSQEGDGPTTVTGNLSGLKPGLHGFHVHALGDTTNGCMSTGPHFNPAGKEHGAPEDENRHAGDLGNVTVGDDGCASFSITDKQIPLTGPNSIIGRAVVVHADPDDLGKGGHELSKSTGNAGGRVACGIIGLQG

SEQ ID NO: 69698 - protein, 66 aa, Gossypium hirsutum
  Clone ID: uC-gsflmaxxa048h08b1.pep
MVKAVAVLSSNEGVSGTVFFSQEGDGPTTVTGNLSGLKAGLHGFHVHALGDITNRCMSTGPHCNTD

SEQ ID NO: 69699 - protein, 112 aa, Gossypium hirsutum
  unsure (1)..(112): unsure at all Xaa locations
  Clone ID: LIB3584-050-P1-K2-A8.pep
YFTDTIQFSKESNNTTTITTNISYINTGLHDSHVHTLGDITNGCMSTXPHCNPAHKEHVPPEDENHHAYDLRNDTVGDDCCASFSITDKQIPLTGPNSIIXRAVVVHTDPND

SEQ ID NO: 69700 - protein, 133 aa, Gossypium hirsutum
  Clone ID: GOSHI-09MAY01-C3974_1.pep
RGGRYRDRRRSTPRYSRSPRYSRSPPRHGRYRSRSRDYSPSNDRHYSRSVTPHEGHYSRDRYSRSPAYNVSRSCSRSLQRGQGPSQGRSRSPRRSRSHSPGEAASPIRSRSRSRSPYHEEYKRELNGERSPSQ

SEQ ID NO: 69701 - protein, 50 aa, Gossypium hirsutum
  Clone ID: GOSHI-09MAY01-C3964_4.pep
HASAQIYHIVSKKAMETSEEGNASAVPSKGEKIDVGKDVSAMKKGGSCSS

SEQ ID NO: 69702 - protein, 218 aa, Gossypium hirsutum
  Clone ID: GOSHI-09MAY01-C3964_1.pep
MAGYRAEDDYDFLFKVVLIGDSGVGKSNLLSRFTRNEFSLESKSTIGVEFATRSLNVDGKVIKAQIWDTAGQERYRAITSAYYRGAVGALLVYDVTRHSTFENVERWLRELRDHTDPNIVVMLIGNKSDLRHLVAVPTEDAKSFAEKESLYFMETSALEATNVENAFAEVLTQIYHIVSKKAMETSDEGAASAVPSKGEKIDVSKDVSAMKKGGCCSS

SEQ ID NO: 69703 - protein, 82 aa, Gossypium hirsutum
  Clone ID: AI054474.1.pep
MAGYRAEDDYDFLFKVVLIGDSGVGKSNLLSRFTRNEFSLESKSTIGVEFATRSLNVDGKVIKAQIWDTAGQERKERGRRMR

SEQ ID NO: 69704 - protein, 114 aa, Gossypium hirsutum
  Clone ID: uC-gsronu33B144a06b1.pep
RHYISQPKMLLNRWFYCSSGFIIASSFPFLPANPRMMSITCIFISKMNESHYKTYDNLVALYHNRTRYTDNEEHALAVGSKGLFVLKTFHIRKIKINKTIDKSMLFSKAPPPKL

SEQ ID NO: 69705 - protein, 109 aa, Gossypium hirsutum
  unsure (1)..(109): unsure at all Xaa locations
  Clone ID: LIB3189-051-P1-K1-D4.pep
MAGYRAEDDYDFLFKVVLIGDSGVGKSNLLSRFTRNEFSLESKSTIGVEFATRSLNVDGKVIKAQIRDTAGQERYRAITSAYYRGADCALLVLDGTRLXTCENGERWLN

SEQ ID NO: 69706 - protein, 110 aa, Gossypium hirsutum
  Clone ID: LIB3145-024-Q1-K1-H12.pep
MAGDRGEDDYDYVFKVVLIGDSGVGKSNLLSRFTRNEFSLESKSTIGVEFATRSLNVDGKVIKAQIWDTAGQERYRAITSAYYRGAVGALLVYDVTRHSTFENVERWLKS

SEQ ID NO: 69707 - protein, 61 aa, Gossypium hirsutum
  Clone ID: LIB3148-014-Q1-K1-G4.pep
HASDLIFHSFFSLMTVIVSRQEDYEEEGLTLLHLNMCLEHLFTYNNLCPNIKKNNNIIKNK

SEQ ID NO: 69708 - protein, 152 aa, Gossypium hirsutum
  unsure (1)..(152): unsure at all Xaa locations
  Clone ID: GOSHI-09MAY01-C3914_2.pep
HASAHASAHASAHASAHASAQLEQIHGEIRDLFRALSNGFQRLDKMKDSNRQSIQLEELTGKMRECKRLIKEFDREIKDEESKNPPEVNKQLNDEKQSMIKELNSYVAMRKTYMNTLGNKKIELFDMGAGVXSEPTADENVKMASSMSNQEL

SEQ ID NO: 69709 - protein, 256 aa, Gossypium hirsutum
  unsure (1)..(256): unsure at all Xaa locations
  Clone ID: GOSHI-09MAY01-C3914_1.pep
MATTELQMSPQLEQIHGEIRDLFRALSNGFQRLDKMKDSNRQSKQLEELTGKMRECKRLIKEFDREIKDEESKNPPEVNKQLNDEKQSMIKELNSYVAMRKTYMNTLGNKKIELFDMGAGVSEPTADENVKMASSMSNQELVDHGMKTMDETDQAIERSKKVVEQTIEVGTQTAGTLKGQTDQMGRIVNELDTIQFSIKKAFQLVKEIGRQGATDKCIMLFLFLIVCGVIAIIVVKIVNPNXKDFRDIPXLAPPAP

SEQ ID NO: 69710 - protein, 115 aa, Gossypium hirsutum
  Clone ID: GOSHI-09MAY01-C3854_1.pep
VIFYIDDYDELFIVDRLKELFKYKGLQVAPAELEAMLIAHPEIIDAAVVAMKDEAAGEVPVAFVVRSDKSQISEDEIKQYIAKQVVFYKRISRVFFMEAIPKAPSGKILRKELES

SEQ ID NO: 69711 - protein, 199 aa, Gossypium hirsutum
  unsure (1)..(199): unsure at all Xaa locations
  Clone ID: GOSHI-09MAY01-C3844_3.pep
MEIDYYALSLKWPGTICHKTRHSCSSKACCLSSNSPTRIVPFHXMLKDEHVTNTIAVYRHLSTNVTNPIVILESKSSTCSSGKXGLFRAHESDKHGTSSSTVITDEYSYFITTLNVYLXKYNVSKILNDAGYVPSNSERYPLAGIVSAIENSFRATPQVICSKQAVEKIRLCFFKDFKPRNCLASKTSCPKYVSLPAYV

SEQ ID NO: 69712 - protein, 287 aa, Gossypium hirsutum
  unsure (1)..(287): unsure at all Xaa locations
  Clone ID: GOSHI-09MAY01-C3844_1.pep
MTTRSDPPVPTHSIDFYGEKKRKRKTKKMASLSAQIPLCLALMMAACLMIGINGSIDGAQREFDYFALSLQWPGTICHKTRHCCSSNACCRGSNSPTEFTIHGLWPDYNDGTWPSCCYRSQFDVKEISTLLDALEKYWPSLYCGKSSTCFSGKGLFWAHEWEKHGTCSSPVIRDEYSYFITTLNVYFKYNVTKILNEAGYVPSNSERYPLGGIVSAIENSFRATPEMICSKEAVXEIPLCLXRDFQPSDLFGFQRPHVPTYVEPCPPNVFKGKGKPLEFLNMGLVYP

SEQ ID NO: 69713 - protein, 171 aa, Gossypium hirsutum
  Clone ID: AI729648.1.pep
SDFVSVLFSSPLCSVSLLCWVSCLFHSLVLLLRFFGFLDGALREFDYFALSLQWPGTICHKTRHCCSSNACCRGSNSPTEFTIHGLWPDYNVGTCPSCSSRVSPCPVSICVRLACFFLPYGAMCLYLPVAALLASCLSSVVGLCVLHFAARIVPVFPLGRVCCVVPACISG

SEQ ID NO: 69714 - protein, 391 aa, Gossypium hirsutum
  Clone ID: GOSHI-09MAY01-C3874_1.pep
MTPIGFLGLLFLLLALYCGIDPFKHSAISEFPDFESYKVDLPPWELVPTDRDKDNLLQKSEIKFLNQVQGPESMAFDPLGRGPYTGVADGRVLFWDGQNWKDFAYASSNRSEICNPKPSPQSYLPNEHICGRPLGLRFDKNTGDLYIADAYLGLFKVGPEGGLATPLVTEVDGVPLRFTNDLDIDDEGNIYFTDSSSKFQRRNFMQLVFSSENSGRLLKYNLYTKETAVLVRNLQFPNGVSVSKDGSFLVSCEGCPGRLLKYWLKGEKAGSTEVFAILPGFPDNVRTNKEGEFWVAIHCRRFTYAHIMGLYPKLRKFILKLPISAKIQYLLQIGGKLHGIVVKYSPDGKLLQVLEDSEGKVVKAVSEVEERDGKLWLGSVLMPFVAVYNLA

SEQ ID NO: 69715 - protein, 86 aa, Gossypium hirsutum
  Clone ID: AI054687.1.pep
RLLVIGTDNVAFRNFMQLVFSSENSGRLLKYNLYTKETAVLVRNLQFPNGVSLSKDGSLLVFCEGCPGRFACFYMYSNAVLDLHVL

SEQ ID NO: 69716 - protein, 110 aa, Gossypium hirsutum
  unsure (1)..(110): unsure at all Xaa locations
  Clone ID: uC-gsflmaxxa069a06b1.pep
RGGGTEKTRVYPSQTKPKKKRLFLTGNKGEKKKENKRRKKEGREKKEGKKGRKKKEGKEKGKKKEKEKRGRRKKRKEKKEREEKKEEKKRKKKRKKGRKKXKEKRKRDTV

SEQ ID NO: 69717 - protein, 181 aa, Gossypium hirsutum
  unsure (1)..(181): unsure at all Xaa locations
  Clone ID: GOSHI-09MAY01-C3814_7.pep
PKPPVVKPLYHPKPPKPPGVXPPYHPKPPKHPPDHPKPPVVKPPYIPKPPIVKPPPYTPKPPVVKPPXYIPKPPVVKPPPYTPKPPVVKPPPYTPKPPYYPIPPVISPPILPPKPPVHPSPPIVNPPTPPILPPPSPPIVKPPTPPIVKPPSPETPCSXTTSAQQTCPIDTLKLGACVDVL

SEQ ID NO: 69718 - protein, 431 aa, Gossypium hirsutum
  unsure (1)..(431): unsure at all Xaa locations
  Clone ID: GOSHI-09MAY01-C3814_5.pep
MQAISHVQNLNSYLIIRRSKPRFDKPVRLAVPVRCVYHSDSVPFPNGVRSSRVDWQSSCAILSSKVFSQDQDSGEKSNTSSASDHLAAAVNGHKTSLDLNLVPLDKKNKPQPPAKQPPQKPLTITDLSPAPKHGSQLRVAYQGVPGAYSEAAAGKAYPNCEAIPCDQFEVAFQAVELWIADRAVLPVENSLGGSIHRNYDLLLRHRLHIVGEVQLPVHHCLLALPGVRKEYLTRVISHPQALSQCENTVTKLGLNVTREAVDDTAGAAEYIATNNLRDTAAIASARAAELYGLNVLADGIQDDSSNVTRFVMLARDPIIPRTDRPFKTSIVFAHEEGTSVLXFKVLSAIAFRNMRLAKIESRPHRNRPIRLVDDANVGTAKHFEYMFYVDFEASMAEVRAQNALAEVQEFTSFLRVLGSYPMDMTPWCPSR

SEQ ID NO: 69719 - protein, 397 aa, Gossypium hirsutum
  Clone ID: GOSHI-09MAY01-C3814_4.pep
AALRCYHHPSPPPKCPPPHYPPKHHHPPIVKPPYHPKPPKHHPPKPPKPPVVNPPYHPKPPKPPVVKPPYHPKPPKPPMVKPPYHPKPPKHPPHPPKPPVVKPPYVPKPPIVKPPPYTPKPPVVKPPPYTPKPPVVKPPPYTPKPPVVKPPPYTPKPPVVKPPPYAPKLPVVKPPPYTPKPPYYPIPPVISPPTLPPKPPVYPSPPIVNPPPYTPKPPVVKPPPYTPKPPYYPIPPVISPPTLPPKPPVYPSPPIVNPPTPPILPPPIVNPPTPPILPPPSPPIVNPPTPPIVKPPSPGTPCPPPPPPAQQTCPIDTLKLGACVDVLGGLVHIGIGSSAKDTCCPVLQGLLDLDAAICLCTTIKANLLNINIIIPIALQVLIDCGKTSPPGFQCPAQ

SEQ ID NO: 69720 - protein, 181 aa, Gossypium hirsutum
  Clone ID: GOSHI-09MAY01-C3814_3.pep
MGMHSLPYLIVLFLNLGALLTSLGCPECYRHPSPPPKCPPPDYPPKHHHPPIVKPPYHPKPPKHHPPKPPKPPVVNPPYHPKPPKPPVVKPPYHPKPPPAQQTCPIDTLKLGACVDVLGGLVHIGIGSSAKDTCCPVLQGLLDLDAAICLCTTIKAKTLNINIIIPIALQVLIDCGKTPPQ

SEQ ID NO: 69721 - protein, 390 aa, Gossypium hirsutum
  Clone ID: GOSHI-09MAY01-C3814_2.pep
MGMHSLPYLIVLFLNLGALLTSLGCPECYRHPSPPPKCPPPDYPPKHHHPPIVKPPYHPKPPKHHPPKPPKPPVVNPPYHPKPPKPPVVKPPYHPKPPKPPVVKPPYHPKPPKHPPHHPKPPVVKPPYIPKPPIVKPPPYTPKPPVVKPPYIPKPPVVKPPPYTPKPPVVKPPPYTPKPPVVKPPPYTPKPPYYPIPPVISPPTLPPKPPVYPSPPIVNPPTPPVVKPPPYTPKPPYYPIPPVISPPILPPKPPVHPSPPIVNPPTPPILPPPSPPIVNPPTPPIVKPPSPGTPCPPPPPPAQQTCPIDTLKLGACVDVLGGLVHIGIGSSAKDTCCPVLQGLLDLDAAICLCTTIKANLLNINIIIPIALQVLIDCGKTPPPGFQCPAQ

SEQ ID NO: 69722 - protein, 204 aa, Gossypium hirsutum
  Clone ID: GOSHI-09MAY01-C3814_1.pep
HASAHASYFLGVHSLPYLIVLFLNLGALLTSLGCPECYRHPSPPPKCPPPDYPPKHHHPPIVKPPYHPKPPKHHPPKPPKPPVVNPPYHPKPPKPPPRPVKPPSPGTPCPPPPPPAQQTCPIDTLKLGACVDVLGGLVHIGIGSSAKDTCCPVLQGLLDLDAAICLCTTIKANLLNINIIIPIALQVLIDCGKTPPPGFQCPAQ

SEQ ID NO: 69723 - protein, 128 aa, Gossypium hirsutum
  Clone ID: uC-gsronu33B029b10b1.pep
SLRHIHPNRRLSAFAFRNISLTKIESRPHRNRPIRLVDDANVGTAKHFEYMFYVDFEASMVEVRVQIALVVVHEFTSFLRCFRSFLMDLTSSYYLLCCFLIFFFFFIIFYYFFLLHFLFFYIIFFFFF

SEQ ID NO: 69724 - protein, 53 aa, Gossypium hirsutum
  Clone ID: uC-gsronu33B108g09b1.pep
PTRPPTRPPTRAICLCTTIKAKLLNINIIIPIALQVLIDCGKTPPPGFQCPAQ

SEQ ID NO: 69725 - protein, 116 aa, Gossypium hirsutum
  unsure (1)..(116): unsure at all Xaa locations
  Clone ID: uC-gsflnu33B079e08b1.pep
AAIENLRTPAIVTPHTPGTAHSAPPHRAQQTCTRDTAKLGAXADVSGGXTHTDVVACARWHLMPXYKRLLDLDAAICLCTTNKANLLNINNIIPIAFQVLIDCGKTSPAGFQCPAQ

SEQ ID NO: 69726 - protein, 136 aa, Gossypium hirsutum
  unsure (1)..(136): unsure at all Xaa locations
  Clone ID: uC-gsronu33B036b06b1.pep
MCPVKSPAYTPKPSVEKPAPYTPKPSDVKPPPYTPKPPYYPIPAVIXPPTLPTKTPVYQSPPLVNPPTPPVEKPPPYTPKPPYYTIPAVISPPILPPKPPVHPRPPIVNPPTAAILPPPLPPIGKSPTPTIVKPPS

SEQ ID NO: 69727 - protein, 131 aa, Gossypium hirsutum
  unsure (1)..(131): unsure at all Xaa locations
  Clone ID: LIB3583-059-P1-K1-E1.pep
APKPPVVNPPYHPKPPIPPVVKPPDEAKLPKPPMDKPPYHPKPPKHPPHPPKPPVVKPAYVPKPPIVKPSTYTPKPPVVKPSPYTPKPSVVKPSSYTPKPPVCNPPSYTPKPXVVKPSPYAPKLSYLKTSS

SEQ ID NO: 69728 - protein, 48 aa, Gossypium hirsutum
  Clone ID: uC-gsflnu33B126f05b1.pep
SIRPPTRPPTRPPTRPNIFMSYYMFLLIIYGVLLVHEDHKDVSEVRLF

SEQ ID NO: 69729 - protein, 67 aa, Gossypium hirsutum
  Clone ID: LIB3583-052-P1-K6-C1.pep
MLPTVSKTRSTPSTSRPNSMFPQYLRRIVKWQQMDIEYTFWQMLHLCTAPKVVYQHTKYHKRKFVSV

SEQ ID NO: 69730 - protein, 142 aa, Gossypium hirsutum
  Clone ID: AI730151.1.pep
MSPTVSKTRSSISISRPNAMFPQYLRRIVKWQQMDIEYTFWQMLHLCTAPKIAYQHTKYHKQTKNQWARDDPAFVVICSLLLALATVAYCAAYDHSAAHAVSVVISVLLFHFLLAGILLATCCWFLTNAYLREEAPNTCVVD

SEQ ID NO: 69731 - protein, 117 aa, Gossypium hirsutum
  Clone ID: LIB3189-042-P1-K1-D4.pep
MLPTVSKTRSTPSTSRPNSMFPQYLRRIVKWQQMDIEYTFWQMLHLCTAPKVVYQHTKYHKQTKNQWARDDPAFVVICSLLLAVATIAYCAAYDHSAAHAVFVVFQYCFSIFNLLEY

SEQ ID NO: 69732 - protein, 278 aa, Gossypium hirsutum
  unsure (1)..(278): unsure at all Xaa locations
  Clone ID: GOSHI-09MAY01-C3564_1.pep
ADERCGXYSLSADVSESESCSSFSYRRFDGEGCSSSMTSSSPXLPAAGRFGFQVPLMLPVIGGKDVVIWDDEKPEKRDTNLSEIEMMKERFAKLLLGEDMSGGGHGVCSALAISNAITKLSATVFGQLWRLEPLAPQKKAMWRREMDWLLCVSDSIVDLVPSIQQFPGGRTYEVMVTRPRLDLYVNLPALKKLDAMLITILDGFCETEFWYADRGIVVDDDGDCEACEEKWWLPCPKVPPNGLSEDARKKLQQCRDCTNQVLKAAMAINSNVLAEMEI

SEQ ID NO: 69733 - protein, 374 aa, Gossypium hirsutum
  unsure (1)..(374): unsure at all Xaa locations
  Clone ID: GOSHI-09MAY01-C3514_1.pep
VFSSCSRRAVVKPVLEEASDARAWXLTAFQRLDFTCDDVLDCLKEDNIIGKGGAGIVYKGSMPSGDQVAVKRLPAMSRGSSHDHGFNAEIQTLGRIRHRHIVRLLGFCSNHETNLLVYEYMPNGSLGEVLHGKKGGHLHWDTRYKIAVEAAKGLCYLHHDCSPLIVHRDVKSNNILLDSEFEAHVADFGLAKFLQDSGTSECMSAIAGSYGYIAPEYAYTLKVDEKSDVYSFGVVLLELVCGRKPVGEFGDGVDIVQWVRKMTDSNKESVLKVLDPRLPSVPLQEVMHVFYVAMLCVEEQAVERPTMREVVQILTELPKPPNSKQGDTTINESPTSPSPDTTLDSPTTTITKDPKDQQQQPPAPKSTPPDLLSI

SEQ ID NO: 69734 - protein, 186 aa, Gossypium hirsutum
  unsure (1)..(186): unsure at all Xaa locations
  Clone ID: LIB3582-051-P1-K1-G10.pep
PTLPGGSNWAVGISLRISCNSSVLFFAEYAYTLKVDEKSDVYSFGVVLLELVCGRKPVGWWGDXXYIXQWVXKMTDSSKESVLKVLDPRFPSVPLQEVMHVFYVAMLCVEEQAVERPTMREVVQILTQLPKPPNSKQGDTTINEPXTSPSPDTTLDSPTTTITKDPKDKQQPPPTPKSTPPDLLNI

SEQ ID NO: 69735 - protein, 52 aa, Gossypium hirsutum
  Clone ID: LIB3148-010-Q1-K1-B12.pep
TQNRKGRKLAVQHDERQASSFFITKYPHQSYYTQKKKKNKRLNTLKLEQKEH

SEQ ID NO: 69736 - protein, 53 aa, Gossypium hirsutum
  Clone ID: LIB3543-043-Q6-K6-D7.pep
PSVRSNKMAGEAAKGLCYLHHDCSPLIVHRDVKSNNILLDSDFEAHVADFGLA

SEQ ID NO: 69737 - protein, 175 aa, Gossypium hirsutum
  unsure (1)..(175): unsure at all Xaa locations
  Clone ID: GOSHI-09MAY01-C3534_1.pep
ESLTQDYDAKYWRRRYSLKKDIPSFLANIAGTILTTGKYLNVMRECGYNVQVPVSENSKLMTFGSNHQYLECVKAAYEFASGELLSLIKEKYDLIGKLRSIKHYLLLDQGDFLVHFMDIAREELLKKHDEISVEKLHSLLDLALRTTXAAAADPCHEDLTCRVERASFLKGSSTL

SEQ ID NO: 69738 - protein, 241 aa, Gossypium hirsutum
  Clone ID: GOSHI-09MAY01-C3524_1.pep
MQNPRFLFSLLFSILISILFFNNIIAESTFGPETMATTTTLGGVHPSQGSQNSVELENLARFAVDEHNKKENAMVEFVRVVKASEQVVAGTLHHLTVEAVDAGKKKLYEAKVWVKPWMNFKELQEFKHAGDADSSASFTACDLGAKKDVHGPMLQAVATNDPVVQDAADHAVKTIQQRSNSLLPYELKEIVHANAEVLEDFAKLNMVLKVKRGDKEEKFKVEVHHKNEGTYHVNHMEQDQS

SEQ ID NO: 69739 - protein, 133 aa, Gossypium hirsutum
  unsure (1)..(133): unsure at all Xaa locations
  Clone ID: LIB3585-026-P1-K1-H5.pep
MQNPWSVFMRALTISSPTVFFNKIITESTVGPETMATTTTLGGVHPCQGSQNRGELDNLSRCDVVEHNKKENAKVESVKAGKASEQVVAGTLDHLTVEAVDAGKKKLYEAKVXVKPWMNVKEWQESKHAGDAD

SEQ ID NO: 69740 - protein, 100 aa, Gossypium hirsutum
  Clone ID: LIB3272-002-P1-K1-B12.pep
TKGTTTSLGGVHPFQSFQNRVGLENLTRFGVGEHNKKENAMVEFVRVVKTSEQVVAGTLHHLTVEAVDTRKKKLYEAKVWVKPCVNFKELQECKHAGDAD

SEQ ID NO: 69741 - protein, 127 aa, Gossypium hirsutum
  Clone ID: GOSHI-09MAY01-C3494_1.pep
GFLNTVTPQTFLKASGSVCQSPNRGHRLMSCPKGLQCSSTPRSSVVPWSGPKLRHECHDRHQGSISAVISARVYTSMVTAGSLARLPSQKGSRQQIAKNTEQRMARKSQHIRRHRIERNLRFLSLNM

SEQ ID NO: 69742 - protein, 87 aa, Gossypium hirsutum
  Clone ID: LIB3543-040-Q1-K6-F11.pep
SVHASTPAWSLPDPSLKCLQEKETNSRYAKKQSRKWQGNHSTSVKDTGNQRILSLCNKSVGYKKSLCNPYNEDTDTEIKNEYKQFQR

SEQ ID NO: 69743 - protein, 155 aa, Gossypium hirsutum
  Clone ID: GOSHI-09MAY01-C3484_1.pep
MALTISNVFHCPKPRISPLNSIPNSSISKLSSSYLGFPRRFSFPKNRIVICAASSAAGSSNPDSDLNPYEVLGVSPVEGFEKAKQVYTRKRKEADKRGDEATAALLEKAYDKLMMAQLMNRKKGVTYGSFKGSKDVKYADKQPIVSWGPRFRNYL

SEQ ID NO: 69744 - protein, 293 aa, Gossypium hirsutum
  unsure (1)..(293): unsure at all Xaa locations
  Clone ID: GOSHI-09MAY01-C3454_1.pep
LDALYKSLAEQYTWSSAVKRIPLDFLQGDKFREAPISYIKPLLTKGVPSLFSDLSPLYDHPGKADMLEQLILELEHSISGDGRYPDRTEKEPPSTLLWILFFLAQHYDRRGQYDIALSKIDEAIQHTPTVIDLYSVKSRILKHAGDLVAAASLADEARCMDLADRYINSESVKRMLQADQVALAEKTAVLFTKDGDQHNNLHDMQCMWYELASGESYFRQGDLGRALKKFLAVEKHYADITEDQFDFHSYCLRKMTLRAYVDMLRFQDRLHSHAYFHKXAVGAIRCYLKLYDS

SEQ ID NO: 69745 - protein, 111 aa, Gossypium hirsutum
  unsure (1)..(111): unsure at all Xaa locations
  Clone ID: LIB3189-030-P1-K1-G6.pep
HDHPGKAHMLEQLILELEHGVRINGRYPDXDIEGAPXTVLWLYSLLDTLNDIGXRVDDALSKSDEAILHTPTVIDLYSVKSRILKHAGDSVAASSLADEARCMDLAYRYII

SEQ ID NO: 69746 - protein, 213 aa, Gossypium hirsutum
  Clone ID: GOSHI-09MAY01-C3444_1.pep
MGGQIFRVLYPGKVVSMATPSHHQNPTPSTKKKKTHKNPEANFLYELNSCSKARDLKAAISLYDSALSSNTRLNQSHFNTLLYLCSTFATDPDSKDLALRYGFRVFDHMMALNIHPNEASITSIARLSAAKGDGDYAFEMVKKLGDYQVSPRLRTYEPALFCFCQKLEAEKAYEVEEDIDKMGLSLEEPQIAALLKLMRILGEGREFIITCIS

SEQ ID NO: 69747 - protein, 64 aa, Gossypium hirsutum
  Clone ID: LIB3583-051-P1-K6-D5.pep
NQATYLAWCKKAAEQRIEAMKAKIPNPIIREIPASIKSINDCMLNPIKNIFHSSFSPPLRDFPR

SEQ ID NO: 69748 - protein, 69 aa, Gossypium hirsutum
  Clone ID: LIB3146-039-Q1-K1-F2.pep
NQATYLAWCKKAAEQRIEAMKAKIPNPIIREIPASIKSINDCMLNPIKNIFPSLFFSSTQRFSKIKKKR

SEQ ID NO: 69749 - protein, 205 aa, Gossypium hirsutum
  unsure (1)..(205): unsure at all Xaa locations
  Clone ID: GOSHI-09MAY01-C3744_2.pep
AFEILGPVLKGGGGAWVCDQDAYACSGQKXCSAQSILFMHENWSTSSLISKTKDLAERRKLGGGGVGPVLTVTTEAMLEHKKKLLQISGSKLLFGGEPLENHSIPAIYGAIKPTAIYIPLEEILKPTNYELVTKEIFGPFQIITDYKKDQLPMVLDALERMPAHLTAAVVSNDPFFLQDVIGKTVNGTTYAGLRARTTGAPQNHW

SEQ ID NO: 69750 - protein, 253 aa, Gossypium hirsutum
  Clone ID: GOSHI-09MAY01-C3744_1.pep
AGFDWKTLGPDVEEVDYVAWVCDQDAYACSGQKCSAQSILFMHENWSTSSLISKTKDLAERRKLADLTVGPVLTVTTEAMLEHKKKLLQISGSKLLFGGEPLENHSIPAIYGAIKPTAIYIPLEEILKPANYELVTKEIFGPFQIITDYKKDQLPMVLDALERMHAHLTAAVVSNDPFFLQDVIGKTVNGTTYAGLRARTTGAPQNHWFGPAGDPRGAGIGTPEAIKLVWSCHREIIYDFGPVPRGWEIPPST

SEQ ID NO: 69751 - protein, 132 aa, Gossypium hirsutum
  unsure (1)..(132): unsure at all Xaa locations
  Clone ID: LIB3145-010-Q1-K1-H5.pep
RPRRAWVCDQDAYACSGQKGXAQSILFMHENWSTSSLISKTKDLAERRKLADLTVGPVLTVTTEAMLEHKKKLLQISEIFGPFQIITDYKKDQLPMVLDALERMHAHLTAACVSNDPFFLQDVIRKTVNGTT

SEQ ID NO: 69752 - protein, 120 aa, Gossypium hirsutum
  Clone ID: GOSHI-09MAY01-C3714_1.pep
KGTKVIYAIYAMGRMEAIWGKDCREYKPERWLRDGRYMSESAYKFTAFNGGPRLCLGKDFAYYQMKFVAASILYRYRVEVVKGHVVVPKLALTMYMKHGLKVNLIKRHESELQVYLKNNV

SEQ ID NO: 69753 - protein, 201 aa, Gossypium hirsutum
  Clone ID: GOSHI-09MAY01-C3704_2.pep
MALFSCQADRELQPWIAKNDDQGQKMWRINQRIVKLIVELMRNHDIPESLVIVASASDLLLRATDGMLVDGEACTLPQLELLEATARAVQPVLEWGESGLAVVDGLSNLLKCRLPATTRCLSHPSAHVRALSISVLRNILQSNPKLEINGTHGPYFSISVIDWHTDIEKCLTWEAHSQLARGMPIHFLDTAAKELGCKISI

SEQ ID NO: 69754 - protein, 426 aa, Gossypium hirsutum
  Clone ID: GOSHI-09MAY01-C3704_1.pep
AAAMVAAHVSELFRQSKACMHALSVLMRCKWDNEIYTRASSLYNLIDIHSKAVASIVDKAEPLEAQLIYAPVCFDSRTRCKRTNTACWDPPRVSSSEYEDSIHSANNLRCQMVLTSDERLGNPTRPSVESFPLDASDLANFLTKDRHLGFHCSAQILLRSVLVEKQELCFSVVSLLWHKLIAAPETQPSAESTSAQQGWRQVVDALCNVVSASPAKAATAVVLQADRELQPWIAKNDDQGQKMWRINQRIVKLIVELMRNHDIPESLVIVASASDLLLRATDGMLVDGEACTLPQLELLEATARAVQPVLEWGESGLAVADGLSNLLKCRLPATTRCLSHPSAHVRALSTSVLRNILHIGSINSHASVEIYGIRGPSYQFFNIGAINWQNDIEKCLTWEVYSQLARGMTIQFLDTAAKELGCNISI

SEQ ID NO: 69755 - protein, 274 aa, Gossypium hirsutum
  Clone ID: GOSHI-09MAY01-C3734_2.pep
MSAAVCGSKRSFFEDIPSPPSASSSKKLRRCSPSSPSSVRLSPSPSALNHLQSIFPHMDPQLLEQALLECGNDIDTAIKKLEDLCLGAAEARGGKTCTVEELGTTTEQGILTNNGEAAAAAAAVTIQNPSASENMPADGAEWVDLFVREMMSATSVDDAKSHVSKLLAVLENSISKCVAEETVQNFQKENLMLKGQIEAMIQENTVLKRAVAIQHERQKEYQDKNQELEHLKQLVSQYQEQMRTLEVNNYALMMHLRQAQESNSIPGRFNPDVF

SEQ ID NO: 69756 - protein, 145 aa, Gossypium hirsutum
  Clone ID: GOSHI-09MAY01-C3734_1.pep
MSAAACGSKRSFFEDIPSSPSASVSKKLRRCSPSAPSSVRVAPPPSLLDHLQALFPHMDPELLERALLECGNNIDTTIKRLQELHLGAADATGEKMGPVEELGTTAEQGTVTNNGEAADTTAQIPSAPETLPVDGAEWVDLVVGE

SEQ ID NO: 69757 - protein, 176 aa, Gossypium hirsutum
  Clone ID: GOSHI-09MAY01-C3724_3.pep
MRGQCGGLDMETENPVNYKYMGRSFNDLSINDDSTAFSDCNSDRSGEFPSASSQNRRLLLACANSENSDDLIRQLVSDLDSCSIDEQKQAALELRLLAKNKPENRIKIAKAGAIRPLISVISSSDPYLQENGVTAILNLSLCDENKELIAFSGAIMPLVRALRTGTSTAKENAACA

SEQ ID NO: 69758 - protein, 360 aa, Gossypium hirsutum
  unsure (1)..(360): unsure at all Xaa locations
  Clone ID: GOSHI-09MAY01-C3724_1.pep
CSDGVLVLDMETENAVNYKFMGRSFTDLSINDDSSAFSDCNSDRSGEFSTASSQSRRLFLACTNSDNSDEFIRQLVSDLGSCSIDEQKNAAFELRLLAKNKPENRIKIAKAGAIKPLISLITSTDPNLQENGVTAILNLSLCDENKELIASSGAIKPLVRALRTGTSTANENAACALLRLSQVEENKVAIGRSGAIPLLVNLLENGGFRGKKDASTALYSLCTVKENKIRAVEAGIMKPLVELMADFGSNMVDKSAFVLSVLVPVPEAKTALVDEGGIPVLVEIIEVGSQRQKEIAAAILLQICEDSVXYRTMVAREGAIPPLVALSQSGTNRAKQKAEKLIELLRQPRSANAAASPSDL

SEQ ID NO: 69759 - protein, 133 aa, Gossypium hirsutum
  Clone ID: LIB3585-014-P1-K1-F8.pep
RAVEAGIMRPLVELMADFGSNMVDKSAFVMSVLVPVPEAKTALVEEGGIPVLVEIIEVGSQRQKEIAVAILLQICEDSVLFRTMVAREGAIPPLVALSQSGTNRAKQKAETLIELLRQPRSGNAAARHSDVSV

SEQ ID NO: 69760 - protein, 317 aa, Gossypium hirsutum
  Clone ID: GOSHI-09MAY01-C3644_1.pep
MDESHTGHAGRSSGNKGDNSLMVQYNVAKDDEILQTRNKDQNQSTIATNTSHKIVNISVNVNTWKPPHYQEPREVSELDSRKPLPESEAVANKANHRLMENGNPVNVGNGNVKGAAYNQELSQKAVQPSSASYAAARPLEDADSRTIFVSNVHFAATKDSLSRHWNKFGDVLKVIIVTDAATGQPKGSAYVEFMRKEAADNALSLDGTSFMSRILKVVKKSSAPQEAAAPVMTWPRVARGSPFVAARFGRASFARGMPGAFRPHLPIKPGARSFQWKRDAQTTTTRTDAVTGTNVSSPTFRSLTYVRTEPKSAGNTS

SEQ ID NO: 69761 - protein, 246 aa, Gossypium hirsutum
  Clone ID: GOSHI-09MAY01-C3154_1.pep
MIHSSKIRVQVKAMNNIELGFLIFLLLFNLLLPFSYGEAGGLCVSQGGRFPPFSSEGKPPKRVGKGHKDLTLCRVFRKKTCCDAAQTHPALLSIRRLALTGEASEECLHLWELLECSICDPRVGVQPGPPLICTFFCDRVFQACSNAYFSMDAKTQVLAPCGANDFVCGRASEWASNGTELCLAAGFRVEQSVGMHGGIEEISCYGGKASLDSIADSWGASRSEKPHKTGNSGLLEDFQQWLQDMP

SEQ ID NO: 69762 - protein, 140 aa, Gossypium hirsutum
  unsure (1)..(140): unsure at all Xaa locations
  Clone ID: GOSHI-09MAY01-C3164_2.pep
MATENNSSRVGSGSGSHSVNGDAAPDRKIALITGITGQDGSYLTEFLLNKGYEVHGLIRRSSNFNTQRINHIYIDPHNAHKARMKLHYADLTDASSLSRWLDTIRPDEVYNLAAQSHVAVXFEIPXYTADVVVIGALRLL

SEQ ID NO: 69763 - protein, 305 aa, Gossypium hirsutum
  unsure (1)..(305): unsure at all Xaa locations
  Clone ID: GOSHI-09MAY01-C3164_1.pep
MASENESSRGDAISGRRIALITGITGQDGSYLTEFLLNKGYEVHGLIRRSSNFNTQRINHIYIDPHNAHKARMKLHYADLTDASSLRRWLDTIRPDEVYNLAAQSHVAVSFEIPDYTADVVATGALRLLEAVRSHIADTGRTHIKYYQAGSSEMFGSTPPPQSEASPFHPRSPYAASKCAAHWYTVNYREAYGLFACNGILVNHESPRRGENFVTRKITRAVGRIKIGLQXLFLGKLQASKDWGFAGDYLEAMWMMLXEKPDDYVVATEESHTVEDFCIXFGYVGLNWKDHVVIDKTXFKPAQVD

SEQ ID NO: 69764 - protein, 261 aa, Gossypium hirsutum
  unsure (1)..(261): unsure at all Xaa locations
  Clone ID: GOSHI-09MAY01-C3104_2.pep
LNYVLIVFHLKAEGIFRIDAENSQEEYVRDKLNKGILPHGIDVHCLAGLIKAWFRELPSGVLDCLTPEQVIHCNXEDDGVDLVKLLPSTEAALLGWAXINLMADXVVEFDHSTKLNARNIAMVFAPNMTQMADPLTALIHAVQVMNCLKTLILKTIRERDESATKDRLLPSCSDCPTGITDTCASKEPATAKFLRVDTLSRLESDPEEKQWSSQDSNREEEVESISGNNILNEWEMGNVETECISGYDNGDRLSLRKGVRR

SEQ ID NO: 69765 - protein, 412 aa, Gossypium hirsutum
  unsure (1)..(412): unsure at all Xaa locations
  Clone ID: GOSHI-09MAY01-C3104_1.pep
MNPIATTPLISSKSRFGCSHGGRRDNNQFPFMDILAALLRKSLVTCSVDTDDISSLDISLPTDVKHVSHVTFDCFNGFLGLPTELQPDVPSKVPSASASVFGVSPKSMQCSYDGKGNSLPTILLMMQSRFYDEGGLKAEGIFRINAENXQEEYVRDKLNKGVVPHGIDVHCLAGLIKAWFRELPSGVLDCLTPEQVMHCNTEDDCVELVKLLPSTEAALLDWAINLMADVVEYEQYNKMNARNIAMVFAPNMTQXLIHAVQVMNFLKTLILKTIRERDESATKDRLLPSCSHCPTGITDTCASKEPATAKFLRVDTLSRLESDPEEKQGSSQDSNREEEVESISGNNILNEWEMGNVETECRGGYDNGDRLRLRKGVRRLCMHSIFQLSKPTKKTRNFEIVNTRGRGCEDWV

SEQ ID NO: 69766 - protein, 209 aa, Gossypium hirsutum
  Clone ID: GOSHI-09MAY01-C3054_1.pep
MTAKDCGNHGKGRRQLIRRLFGCLLVFLLIVLITILIIWAILRPTKPRFILQDTTVYAFNASSPNFLTSNFQVTVSTRNPNDRIGIYYDRLVIYATYRNQQTTLRTALPPTYQGHNEINVWSPFIYGNMVPIAPDFSVALKSEQAAGTIFMVIKIDGRVRWKVGTFVSGRYHLNVRCPAYITFGSKNNGVSVGENAVKYQLVTRCSVSV

SEQ ID NO: 69767 - protein, 114 aa, Gossypium hirsutum
  unsure (1)..(114): unsure at all Xaa locations
  Clone ID: LIB3584-010-P1-K1-D12.pep
YFLLGGGGIFFFIXXXLXPAKPRFILQDTTXYAFNASTPNFLTSNFQVTVSTRNPNDRIGIYYGGLVIYATYRNQQTTLRTALPPTYQGHNEINVWSPFIYGDMVPIAPDFSVP

SEQ ID NO: 69768 - protein, 151 aa, Gossypium hirsutum
  unsure (1)..(151): unsure at all Xaa locations
  Clone ID: LIB3585-043-P1-K1-F7.pep
MIQKKTDLIIGRTGFAALRYTELSLTFTFCLPSHYKNCMTHVKGRLKVMLKLLGSRILFLLMLLITVIIMSAMLLPTKPGLMLXETIDYAFNAYSPNFLTSNXQVTVSTQNPNDRIGMHYDRLFIYATYRNQHTTLRTALHPTYHGHNEIN

SEQ ID NO: 69769 - protein, 166 aa, Gossypium hirsutum
  Clone ID: GOSHI-09MAY01-C3044_1.pep
MPPKFDPSQVVDVFVRVTGGEVGAASSLAPKIGPLGLSPKKIGEDIAKETAKEWKGLRVTVKLTVQNRQAKVMVVPSAAALVIKALKEPERDRKKTKNIKHNGNIGLDDVIEIAKVMRPRSMAKDLRGTVKEILGTCVSVGCTVDGKDPKDLQQEIDDGDVDVPLE

SEQ ID NO: 69770 - protein, 133 aa, Gossypium hirsutum
  unsure (1)..(133): unsure at all Xaa locations
  Clone ID: LIB3828-025-Q6-K6-E3.pep
PPVAARIGSSPVVDVWARVTGGEVGAXASXLAPKNGPLGLSRRKIGIXCRXETAKEWKGLRVTDKLAVXQNRRAEVMVVPSAAALVIMALKEPERDRIDTVTFLLVGPFGLDVVXEIAGVGGRGPWLSLCEGR

SEQ ID NO: 69771 - protein, 136 aa, Gossypium hirsutum
  Clone ID: GOSHI-09MAY01-C3074_1.pep
MASSTGFSLNFSPLSTSLKHNQVPLHGISNVNLLSLPSLRIRPGPMRLRVSCAAKPETVDKVCSIVRKQLALPEDSSVTGESKFAALGADSLDTVEIVMGLEEEFGISVEEESAQSIVTVQDAADLIEKLVEKKDA

SEQ ID NO: 69772 - protein, 461 aa, Gossypium hirsutum
  Clone ID: GOSHI-09MAY01-C3014_1.pep
MSPDASAALAVRQKVQTFLNAACTGNLDLLKKIASQLDEGKGLAKTVADIKDANKRGAIHFAAREGKTEVCKYLLEELKLDVNTKDEDGDTPLLHAARKGHTLTAKYLLEHGADPAIPSNLDATALHHAAGIGDVELLKYILDKGVKVDSQSDAGTPLVWAAGHGQREAVKVLLDYHANPNAENEDNITPLLSSVAAGSLACTDLLIQAGAKVNITAGGTTPLHIAADHGSPELINSLLKAGADPNATDEDGLKPVQVAAARGHRGAVEILFPLTSRIDTIPEWTVDGILKYMQSETDKQLEQMKKLTEAKSTRDTALPANDLPEVTPEAKKKAAEAKSRGDEAFKGKDFHMAVDAYTQAIDLDPTDAALHSNRSLCWIRLGQAEHALTDARACRALRPDWPKACYREGAALRLLQKYDEAANAFYEGVQLDPENKELVNAFREAVEAGRKFHGTDQEKSS

SEQ ID NO: 69773 - protein, 132 aa, Gossypium hirsutum
  Clone ID: GOSHI-09MAY01-C3034_2.pep
SFSVSSTTYVDSSPGGRFCLPPVHSQLLRPAGAVPSLYPRPYVVSLPDGSHSSGAENGRHWGRQGLDLNAGPGGPDIEGRDESAPLPSRQLSVAGSHAQAEEQARIHQVPGGILKRKEPEGGWNGYKQSSWQ

SEQ ID NO: 69774 - protein, 324 aa, Gossypium hirsutum
  Clone ID: GOSHI-09MAY01-C3034_1.pep
VGSPPTLSSGGLDLDLNRVDEPADLGNHSTGYSRRLDVPMQPIKSLSGILNSEVTVHRDFDLNNGPAVDEVSTEPSLFSHNARSRNAPSQPSASSLRMNSTEVANFSSWFPTENTYSSIALQSILPDREQPFPIVATGGPHRVLGPPIGATPFNPDVYREPMLSSSPAVPFPSTPFQYPVFPFGTTFPLPSTSFSVSSTTYADSSSGGRFCFPPVHSQLLRPAGAVPSHYPRPYVVSLPDGSYSSGAESGRQWGRQGLDLNAGPGGPDIEGRDESAPLASRHLSVASSQSLAEEQARMYQVPGGVLKRKEPEGGWDGYKQSSWQ

SEQ ID NO: 69775 - protein, 58 aa, Gossypium hirsutum
  Clone ID: LIB3166-004-P1-K1-H6.pep
EDGCSFATVVISANFDVNVFITRWHISSVLFLMLHSHPYLALLDAPENWATYGYINFI

SEQ ID NO: 69776 - protein, 106 aa, Gossypium hirsutum
  Clone ID: GOSHI-09MAY01-C3024_6.pep
TKKGQAPPPSSKPAKSGGGKQKKKKWSKGKQKEKVNNMVLFDQATYDKLLSEAPKYKLITPSILSDRMRINGSLARKAIRELMARGSIRLVSAHSSQQIYTRATNT

SEQ ID NO: 69777 - protein, 108 aa, Gossypium hirsutum
  unsure (1)..(108): unsure at all Xaa locations
  Clone ID: GOSHI-09MAY01-C3024_5.pep
MAPKKDKAPPPSSKPATSGGGKHNRGKWSKGKQKEKVNNMVLFDQATYDKLLSXAPKYKLITPSILSDRMRINGSLARKAIRELMARGLIRLVSAHSSQQIYTRATNT

SEQ ID NO: 69778 - protein, 109 aa, Gossypium hirsutum
  unsure (1)..(109): unsure at all Xaa locations
  Clone ID: GOSHI-09MAY01-C3024_4.pep
MAPKKDKAPPPSSMPAKSGGGKQKKKKWSKGKQKEKVNNMVLFDQATYDKLLSEAPKYKLITPSILSDRMRINGSLARKAIRELMARGSIRVVXAHSSQQXIYTRATNT

SEQ ID NO: 69779 - protein, 108 aa, Gossypium hirsutum
  Clone ID: GOSHI-09MAY01-C3024_3.pep
MAPKKDKAPPPSSKPAKSGGGKQKKKKWSKGKQKEKVNNMVLFDQATYDKLLSEAPKYKLITPSILSDRMRINGSLARKAIRELMARGLIRLVSAHSSQQIYTRATNT

SEQ ID NO: 69780 - protein, 108 aa, Gossypium hirsutum
  Clone ID: GOSHI-09MAY01-C3024_2.pep
MAPKKDKAPPPSSKPAKSGGGKQKKKKWSKGKQKEKVNNMVLFDQATYDKLLSEAPKYKLITPSILSDRMRINGSLARKAIRDLMARGLIRLVSAHSSQQIYTRATNN

SEQ ID NO: 69781 - protein, 108 aa, Gossypium hirsutum
  Clone ID: GOSHI-09MAY01-C3024_1.pep
MAPKKDKAPPPSSKPAKSGGGKQKKKKWSKGKQKEKVNNMVLFDQATYDKLLSEAPKYKLITPSILSDRMRINGSLARKAIRELMARGSIRLVSAHSSQQIYTRATNT

SEQ ID NO: 69782 - protein, 89 aa, Gossypium hirsutum
  Clone ID: GOSHI-09MAY01-C3394_3.pep
MAANGNGVSTTPKSSLARIQTQKNGGICHDDSGKPVKAQTIDELHSLQKKRSAPTTPLDGVQGTFATISEDERQRQQLQSISASLASLT

SEQ ID NO: 69783 - protein, 169 aa, Gossypium hirsutum
  unsure (1)..(169): unsure at all Xaa locations
  Clone ID: GOSHI-09MAY01-C3394_2.pep
TGIHRTESKVGWRLRVLTIQCSCITGTGKTTLSTDHNRYLIGDDEHCWSDNGVSNIEGGCYAKCIDLSREKEPDIWNAIKFGTVLENVVFDEHTREVVYGDKSVTENTRAAYPIEYIPNAKIPCVGPHPKNVILLACDAFGVLPPVSKLSLAXTMYHFIRGNTRLVAGT

SEQ ID NO: 69784 - protein, 663 aa, Gossypium hirsutum
  unsure (1)..(663): unsure at all Xaa locations
  Clone ID: GOSHI-09MAY01-C3394_1.pep
LFESPTRPPAPPGNGVSTTPKSPLARIQTQKNGGICHDDSGKPVKAQTIDELHSLQKKRSAPTTPLDGVQGTFATISEDERQRQQLQSISASLASLTRGTGPKVVRGDPAGKVQSVSHVAHHHHIEAPTISVSDSSLKFTHVLYNLSPAELYEQAIKYEKGSFITSTGALATLSGAKTGRSPRDKRVVIDDTTQDELWWGKGSPNIEMDEHTFMVNRERAVDYLNSLDKVFVNDQFLNWDPQNRIKVRIVSARAYHSLFMHNMCIRPTPEELENFGTXPDFTIYNAGQFPCNRYTHYMTSSTSIDLNLARREMVILGTQYAGEMKKGLFSVMHYLPPRPQILSLHSGCNMGKDGDVALFFGLSGTGKTTLSTDHNRYLIGDDEHCWSDNGVSNIEGGCYAKCIDLSREKEPDIWNAIKFGTVLENVVFDEHTREVVYGDKSVTENTRAAYPIEYIPNAKIPCVGPHPKNVILLACDAFGVLPPVSKLSLAQTMYHFISGYTALVAGTEDGIKEPTATFSACFGAAFIMLHPTKYAAMLAEKMQKHGATGWLVNTGWSGGSYGSGNRIKLPYTRKIIDAIHSGSLLNATYHKTEVFGLDIPTEIEGVPSEILHPENTWADKKAYKETLLKLAGLFKKNFETFTNYKIGKDNKLTEEILAAGPNF

SEQ ID NO: 69785 - protein, 119 aa, Gossypium hirsutum
  Clone ID: LIB3166-050-P1-K1-A2.pep
LYSRYVDTRLCIVSNEFTCKTGTGKTTLSTDHNRYLIGDDEHCWSDNGVSNIEGGCYAKCIDLSREKEPDIWNAIKFGTVLENVVFDEHTREVDYGDKSVTENTRAAYPIEYIPNAKIP

SEQ ID NO: 69786 - protein, 75 aa, Gossypium hirsutum
  unsure (1)..(75): unsure at all Xaa locations
  Clone ID: LIB3146-016-Q1-K1-C2.pep
KVKLSVQLDNWVGDRCIRPTPEELENFGTPDFTIYNAGQFPCNRYTXYMTSFTSIDLNLARREMVILCTQYAREN

SEQ ID NO: 69787 - protein, 119 aa, Gossypium hirsutum
  Clone ID: AI054653.1.pep
KVQSVSHVAHHHHIEAPTISVSDSSLKFTHVLYNLSPAELYEQSIKYEKGSFITSTGALATLSGAKTGRSPRDKRVVIDDTTQDELWWGKGSPNIEMDEHTFVVNRERAVDYLNSLDKV

SEQ ID NO: 69788 - protein, 86 aa, Gossypium hirsutum
  unsure (1)..(86): unsure at all Xaa locations
  Clone ID: LIB3166-037-P1-K1-A3.pep
FKGADQRVRGDWCIRPTFXELENFGTREFSIYNAGQFPCNRYTHYMTSSTSIDLNLARREMVILGTQYAGEMKKGLHSVMHHLMPM

SEQ ID NO: 69789 - protein, 139 aa, Gossypium hirsutum
  Clone ID: GOSHI-09MAY01-C3384_1.pep
LFFCRLWFIWFSRNQLIHSTGNIQQVFKRGRATVHFDAAFDRQSFRSASGLIVWIEEKEILATQVVIHSGIANPFTAEAYAGLQGGRGGTRGGGGEIGVVGDSKTVIKKCQRSNTDKSVIGAIISDIQNQKKNDSRRLS

SEQ ID NO: 69790 - protein, 114 aa, Gossypium hirsutum
  unsure (1)..(114): unsure at all Xaa locations
  Clone ID: LIB3146-018-Q1-K1-E1.pep
NSGGKKFFFLKRAPRPXXXNFFFFLKGALKPNPFTPPPFFFFFPKRGGNFPLSPPPFFFFFSRTKNFHRDLWKFLFPSKIQMTVWRISWNFIPSFVNLKIKRVVVNGSSLRPPI

SEQ ID NO: 69791 - protein, 181 aa, Gossypium hirsutum
  Clone ID: GOSHI-09MAY01-C3344_1.pep
MGKLSFKDSLKALEADIQHANTLAFDYPREKDGARLQMRLSYSPAAQFFLFLVQWTDCQLAGALGLLRILIYMTYADGKTTMSVYERKASIREFYAVIFPSLLQLQKGITSLEDRKQKEVCTMRYRKKDESERGKLSEIDLEREEECGICLEMSSMVVLPNCSHSLCLKCYRDWHGPSQSC

SEQ ID NO: 69792 - protein, 79 aa, Gossypium hirsutum
  Clone ID: GOSHI-09MAY01-C3314_3.pep
DQEGYQELYNLKQKARLLRAEKSHLSLALDDFNPLTSSELPHCHSTELLPSKQSGNSKPVLIDSRYSVFIPPRVRPRVR

SEQ ID NO: 69793 - protein, 180 aa, Gossypium hirsutum
  unsure (1)..(180): unsure at all Xaa locations
  Clone ID: GOSHI-09MAY01-C3314_2.pep
MLEQIPLASALASENLSISALHCAFSVEFISFFFSFHFVVQEMGSGEKVFVYEDLVKHKDRNDCWLLISGKVYNVTQFLEDHPGGDEVLLAASGKDATDDFEDVRHSDDAXEQMQKYYIGEVDATTIPARRTYKAQTSTAATQQDEPGFLFKIIQFLVPLLILGFAFGLQFLGKKEKTET

SEQ ID NO: 69794 - protein, 138 aa, Gossypium hirsutum
  Clone ID: GOSHI-09MAY01-C3314_1.pep
MGSGEKVFVYEDLVKHKDRNDCWLLISGKVYNVTQFLEDHPGGDEVLLAASGKDATNDFEDVGHSDDAREQMQKYYIGEVDATTIPARRMYKAQTSTAATQQEEPGFLFKIIQFLVPLLILGFAFGLQFLGKKEKTET

SEQ ID NO: 69795 - protein, 63 aa, Gossypium hirsutum
  Clone ID: GOSHI-09MAY01-C3294_2.pep
LTYGGRIPFAELFARIDAVDPSTVKRVANRFIYDRDIAIAAMGPIQDLGDYNWFRRRTYWNRY

SEQ ID NO: 69796 - protein, 528 aa, Gossypium hirsutum
  Clone ID: GOSHI-09MAY01-C3294_1.pep
MATKQLLSLARRSRKPSYSFTAARSSSSAASPLAAAESKEISPPPPTAMIYDRLALAVKSKLQKLENPDPRFLKYGSPHPTVTSPPLRLSSPETKITTLPNGLRVATESTLSSRTATVGVWIDAGSRFETEETNGTAHFLEHMIFKGTEKRSARELEEEIENMGGHLNAYTSREQTTYYAKVMDRDVFKALDIFADILQNSKFEEHRISRERDVILREMEEVEGQTEEVIFDHLHSTAFQYTPLGRTILGPADNIRTITKEHLQSYIQTHYTAPRMVIAASGAVKHEEIVDQVKKLFTKLSSDPTTGSQLVMNEPATFTGSEVRMINDDVPLAQFAVAFEGASWTDPDSIALMVMQAMLGSWSKNAGGGKHMGSELAQRVGINEIAESMMAFNTNYKDTGLFGVYAVAKPDCLDDLAYAIMYETTKLAYRVSEADVIRARNQLKSSLMLHIDGTSPVAEDIGRQLLTYGRRIPFAELFARIDAVDPSTVKRVANRFIYDRDIAIAAMGPIQDLRDYNWFRRRTYWNRY

SEQ ID NO: 69797 - protein, 69 aa, Gossypium hirsutum
  Clone ID: LIB3166-025-P1-K1-F3.pep
HASAHASVHSSGIPFAEVGARIDAVDPSTIKRVADRFIYDKDIAIAAMGPVQRLPDYNWFRRRTYWNRY

SEQ ID NO: 69798 - protein, 194 aa, Gossypium hirsutum
  unsure (1)..(194): unsure at all Xaa locations
  Clone ID: uC-gsronu33B021c01b1.pep
FHSSVDILAESGRNSKMEEFRIRRERDVILREMXEVEGQTEEAIFDHLHSTALQYTTLGRTILGPADNVKTITKWHLLNYIQTHYTGPRMVIAATGAGKHEEIVEQVEKLFTKVSSDPATASXLGVKEPATFTGSEVRMINEDISLAQFAVAFEGSTWTDPDSIALMAMQAMLSXEQNAGGGKHKGLSCSRVGS

SEQ ID NO: 69799 - protein, 64 aa, Gossypium hirsutum
  Clone ID: LIB3828-003-Q1-K6-A12.pep
NFPSLHQFRTHLRWPFYSLCRVLSFINSVISIAVFSICCENQETWMSLMLSWDRFKAKSDQFLS

SEQ ID NO: 69800 - protein, 73 aa, Gossypium hirsutum
  Clone ID: LIB3166-031-P1-K1-D10.pep
PRVRRILLSISHLFRRIPFAELFARIDAVDPSTIKRVADRFIYDKDIAIAAMGPVQGLPDYNWFRRRTYWNLF

SEQ ID NO: 69801 - protein, 192 aa, Gossypium hirsutum
  Clone ID: GOSHI-09MAY01-C3244_1.pep
MVQVMRAGKRVSVKLEVEESLEEELASLHKKRSKLDPCLQEGNVESGKFPISPSLYNPLDEPSPLGLRLKKSPSFLDLIQMKLSQQNGDKLTAHNMKDSKGVSVSGVRDKLKASNFPAAILRIGSWEYKSRYEGDLVAKCYFAKRRLVWEVLDGGLKNKIEIQWSDIVAIKANYPDDVPGTLDVVVIIKLMP

SEQ ID NO: 69802 - protein, 371 aa, Gossypium hirsutum
  unsure (1)..(371): unsure at all Xaa locations
  Clone ID: GOSHI-09MAY01-C3274_1.pep
MAAKKACESFSKSLIEDVHKWGCMKQTGVSLRHMMEFGSKPTDRNLLISGQFLHKELPIRIARRAIELDTLPYGLSEKRAILKVRDWYLDSFRDLRSFPEIKDINDEKEFTQMIKAIKVRHNNVVPTMALGVQQLKKGIDPKIVYEDLDEIHQFLDRFYLSRIGIRMLIGQHVELHKPNPAPHVVGYIHTKMSPVEVAKNASEAARAICLREYGSAPDINIYGDPSFTFPYVPTHLQLMVFELVKNSLRAVQERFMYSVKVAXPPVRINSCRGESKDVTIKISDEGGGIKRSGLPKIFTYLYSTAKNPLDEHTDLGTDDRITMAGYGYGIPISRLYAKXFGGDLQVISMEGYGTDAYLHLSRLGDSQEPLP

SEQ ID NO: 69803 - protein, 386 aa, Gossypium hirsutum
  unsure (1)..(386): unsure at all Xaa locations
  Clone ID: GOSHI-09MAY01-C3264_1.pep
AAWARQDKIVDFTQPYMESGLVVVAPVKEAKSNPWAFLKPFTXRMWLVTAMFFLFVGAVVWILEPRAYGEFRGPPRRQLITICWGSFSTMFFSHRENTVSTLGRMVVIIWLFVVLTINSSYTASLTSILTVQQLTSGIQGIDSSISSTEPIGIQDGSFALNYLVDELNIAQSRIVKLKNPEAYLRALKLGPKKGGVAAIVDELPYVELFLSNTNCLYRIVGPEFTKSGWGWAFQRDSPLAVDMSTAILQLSENGDLQKIHNKWLTHSDCSSQVNQVDENQLSLNSFWGLFLICGIACVLALTIFCCRVFTQYRRFSPEDEESEIETIEPSRSSRRSIRSTSFKQIIDFVDKKEEEIKEMLKRKNSNSNKQQTSIHSFSDGQASSPS

SEQ ID NO: 69804 - protein, 48 aa, Gossypium hirsutum
  Clone ID: LIB3083-095-Q1-L1-B3.pep
MSSTFSGDETAPFFSFLVFSCMGAAYGTANSGAGVASTGVIRPELVMK

SEQ ID NO: 69805 - protein, 104 aa, Gossypium hirsutum
  Clone ID: LIB3197-019-Q1-M1-B9.pep
MATAEVVSAQTAIHEEKPEEVVKVGEIATEEVPAVAPAAEPVAEEPKEAVPEAASGEPQAPETEATVETESKEVVKEPKAVTEEPEVEKAQSLQKQQQQQQQQQ

SEQ ID NO: 69806 - protein, 120 aa, Gossypium hirsutum
  Clone ID: LIB3145-026-Q1-K1-A5.pep
NPARPTRPLNMLVLVDFVDKTSWEYLFKVYWDLLKEKLALSLHELTNATNPWKELREASANIEPKHQIDVAYLINSYKSLYPKWVFDLRGSVLSKRRRLHLLRLQLRFLLSLKHLLPINA

SEQ ID NO: 69807 - protein, 111 aa, Gossypium hirsutum
  unsure (1)..(111): unsure at all Xaa locations
  Clone ID: LIB3146-041-Q1-K1-G12.pep
TEPKQNMKPIELKTSPEQMQTITXVDDTWERVKEVGLRGLTSKRHMKIVLRWMRERQKIRLICNVVGPHKQFLYTTWFSKPSISHTRAVHNSSTSTPSFSVDTSSPKLSSG

SEQ ID NO: 69808 - protein, 66 aa, Gossypium hirsutum
  Clone ID: LIB3196-053-P1-M1-A1.pep
VEAATVIQNSDLDPSCNCTYIKIGVLVHEVIVLRFKIHGLHVTARHPVICTRVYLFVSLLECVNFR

SEQ ID NO: 69809 - protein, 51 aa, Gossypium hirsutum
  unsure (1)..(51): unsure at all Xaa locations
  Clone ID: LIB3272-034-P1-K1-A4.pep
VAIRKPGLIALFDVDGTLTASRKAATPKMSELMKELXKVGTDGEVGGSDLT

SEQ ID NO: 69810 - protein, 114 aa, Gossypium hirsutum
  Clone ID: LIB3272-039-P1-K1-B12.pep
DIPVKTLLTVIEGAESDGDVLVFPEMIKYKGLADSDVDGFVEDVLVNGKPWASGVQETLTGSYIFVCAHGNRDKRCGVCGPALIQKLNVEIELRGLKDQVFVSACSHIGGHKYA

SEQ ID NO: 69811 - protein, 52 aa, Gossypium hirsutum
  Clone ID: LIB3196-039-P1-M1-D3.pep
LFSFSFNNLYLDENKSLILKIVESQNSGKLSECAENQARLQRNLMYLAAIAD

SEQ ID NO: 69812 - protein, 71 aa, Gossypium hirsutum
  Clone ID: LIB3149-042-Q1-K1-C1.pep
LDITCWLTVHCSIFYSPGYLSKYCLFHNKAKHGGVLHRHDHKPKAPVAPKKAPKFYPAGNVKKPVLNKRKP

SEQ ID NO: 69813 - protein, 49 aa, Gossypium hirsutum
  Clone ID: LIB3149-039-Q1-K1-B3.pep
VGDNVITEDDIIALIKGSEGVASLLKLIYWLILNPATRILVALNSDSWF

SEQ ID NO: 69814 - protein, 74 aa, Gossypium hirsutum
  unsure (1)..(74): unsure at all Xaa locations
  Clone ID: LIB3165-037-P1-K1-C2.pep
FPHRDFLVLVELQSLGHXXVILFNRLVPPPAKPSPPDNLSFRPDRGPGRKAGPLGHKKEXXXCPALRFTEFKLK

SEQ ID NO: 69815 - protein, 115 aa, Gossypium hirsutum
  unsure (1)..(115): unsure at all Xaa locations
  Clone ID: LIB3083-102-Q1-L1-H10.pep
MSQGTVSECRQSLTSGERKSAFFGVLLNQMGLACVQLFKIDEAXSXFEEARAILEQECGXCHQDTLGIYSNLAATYDAMGRVEDAIEILEYVLKLREEKLGITNPDFEDEKDRLA

SEQ ID NO: 69816 - protein, 88 aa, Gossypium hirsutum
  Clone ID: uC-gsronu33B178d02b1.pep
VLVSLILVHRRTLLTDVPPQPNSPPDNVYRVYRPSVVGLGSTKSEVLTPTIPSVSKITFIVVFIYLPLNALANRPPLRSSHRARLQLC

SEQ ID NO: 69817 - protein, 145 aa, Gossypium hirsutum
  Clone ID: LIB3825-012-Q1-K6-B10.pep
LRYRLKKEESFQSKHYTRDCVDFVGWKVYGEESCFLEATLSGFSANMALMVALRNLASLIAAGNVPVKDEKIAIFSDELNHASIIDGIRLAERQRSVEFFVYKHCDMSHLRELLSNCKMKKKVVVTDRLVMFLQMFITLSFLYPI

SEQ ID NO: 69818 - protein, 125 aa, Gossypium hirsutum
  Clone ID: uC-gsronu33B143d09b1.pep
PDWSGLYQHGDCYLAHQRLAIIDPASGDQPLFNEDKSIVVTVNGEIYNHEELRKKLAHHKFRTGSDCDVISHLYEEYGEDFEDMLDGIFSFALLDTRDNSYLVARDAIGVTSLYIGWGLDGSVWI

SEQ ID NO: 69819 - protein, 86 aa, Gossypium hirsutum
  unsure (1)..(86): unsure at all Xaa locations
  Clone ID: uC-gsronu33B125c04b1.pep
HSSGNSSYSYDLIEGGPLGDKLEKISYENRFAASAGGGSICKSXMKFYTIGDHVITVDQIKGVIKGSEGDYKPGEAYLLGNAEACN

SEQ ID NO: 69820 - protein, 128 aa, Gossypium hirsutum
  Clone ID: uC-gsronu33B079e02b1.pep
MAVKKSCLIAIFDVDGTLTATRKVATPEMLEFMKELRKWVTVGVVGGSELVKRSEQLVKAVINDYDYVFSENGLVADKDGKLIGTQSLKSCLGEDKLKEFINFRLHYIADMDIPIKRGTSIEFRSGML

SEQ ID NO: 69821 - protein, 84 aa, Gossypium hirsutum
  unsure (1)..(84): unsure at all Xaa locations
  Clone ID: uC-gsflmaxxa014b07b1.pep
MIANEQENEVXASIDVSIGNIYMSLCRSDEAIFSYQTALTVFKSSKGDNHPSVAFVSVRLADLYHRTGKLRESKCYCENCRLEF

SEQ ID NO: 69822 - protein, 148 aa, Gossypium hirsutum
  unsure (1)..(148): unsure at all Xaa locations
  Clone ID: LIB3493-030-P1-M1-A7.pep
VKTSLVGQYHIVAVRNEALXMEAWIQKPEAFMETAVVLVTERIQGTPWEVAVDRVKTDPGQRNGGDAGGDAGGDAGGIIIVLEVEKFGGFKVGFLAGEKDGGFGVGFGFGFFGGDIMLGFRCDEAGVREGEEHPSKGAATVQVSAHAS

SEQ ID NO: 69823 - protein, 94 aa, Gossypium hirsutum
  Clone ID: uC-gsronu33B076e09b1.pep
LNPGDTLLIILSGSMRRLSFLHVYHHSMVVIMCYICLDSAQSSVPMVLVTNCVVHGVMNTYYLLCTLGMHPKWKKMVTDFQLVQFWLSFLIMAM

SEQ ID NO: 69824 - protein, 118 aa, Gossypium hirsutum
  Clone ID: uC-gsflnu33B008c10b1.pep
PLNSRFVQLPNGKHSPITHSGSFILSPHITFTDVLCVPTFHYNLISVSKSAHDLHCAVVFNPDFCLLQDLSNGRMKEIGRHSNGLYLFESSSSLVRSFGSHLSLSTSFLPTSTSCMAS

SEQ ID NO: 69825 - protein, 115 aa, Gossypium hirsutum
  unsure (1)..(115): unsure at all Xaa locations
  Clone ID: uC-gsflnu33B057f06b1.pep
GCADIYTVFGIIARLAIIDPASGDQPLFNEHKSIVVTANGXIYNHEELRKKMAHHMFRTGRDCYVVAHLSEEYGENSGDTQHGISSLELLDTRGSRFVEARDAIGVTYLYIGWGH

SEQ ID NO: 69826 - protein, 42 aa, Gossypium hirsutum
  Clone ID: uC-gsflmaxxa069f11b1.pep
PSASAHASAHACGDAWVRLKMVSVLREKFAHLNLTFSIGGQI

SEQ ID NO: 69827 - protein, 82 aa, Gossypium hirsutum
  Clone ID: LIB3149-057-Q1-K1-C5.pep
MPPAKVVSPQTAFHEEKPEEVVKVGEIATEKVPAVAPAAKPVAEEPKEAMPEAASGEPQAPETEATVETESKEVVKEPIAVT

SEQ ID NO: 69828 - protein, 108 aa, Gossypium hirsutum
  Clone ID: uC-gsronu33B168c07b1.pep
VLLAFLFTLTWGLFTFSQACFNTSESQHDVTPEKSRTDFSRIDPESAIPSPSEKPHFEPPKLLDFKHDDDAFGDAFVPLTKNRFNPGNRHFPRRSLIPFRHKDNWRFH

SEQ ID NO: 69829 - protein, 72 aa, Gossypium hirsutum
  Clone ID: LIB3189-037-P1-K1-B5.pep
KKVLSILSELLTSMTCGLFLLYLLCGLQPIISNNKTTTTVLRPRSLSLLLYLIKGNMLPFLDKIKRSIQAFI

SEQ ID NO: 69830 - protein, 63 aa, Gossypium hirsutum
  Clone ID: uC-gsflnu33B093a04b1.pep
HEIAVLVPLIVAPLRYLLTDVPPQPNSPPDNVFRPDRPAEAGRRSVNKDRDPHSIHSIGKHTL

SEQ ID NO: 69831 - protein, 152 aa, Gossypium hirsutum
  Clone ID: LIB3189-043-P1-K1-C7.pep
KYEKNCQREFDFNNQKTKKGMGNMMKRAEKNKIKPKHKFAILLPSEKPHFEPPKLLDFKHEDDTYGGNSNILKKNSFNPVNRHIPRRPLNPFRHKHNCRFHKRFRLLNPRFHQKRFISYGNDMILSNERSFDPESRGVVRQIEGSWGSFDDD

SEQ ID NO: 69832 - protein, 67 aa, Gossypium hirsutum
  Clone ID: LIB3189-040-P1-K1-H11.pep
YTYMYICNLKLVRPKKSSHGKSPFLIAGAPIIAESIFLPPHIDPPLFHYLILGRLVLVIIIRHFASH

SEQ ID NO: 69833 - protein, 73 aa, Gossypium hirsutum
  Clone ID: LIB3189-007-P1-K1-A7.pep
HCVAINRTQRNAMFKLNSRIPLVSNSSESTVSRPRKATEGAVPSPSTARHAANRSRRGSSSSSAKAADEFWDW

SEQ ID NO: 69834 - protein, 157 aa, Gossypium hirsutum
  unsure (1)..(157): unsure at all Xaa locations
  Clone ID: AI055357.1.pep
MGVVTYDYENTSPVAPARLFKAFTVEAPKVWPTAAPNAVKSLEVEANPSSGSIVKINFVEGLPFQYMKHQIGGHDKSNFXYSYDLSKGGPXGDKLEKIXFEPRFEALQGRGSICKSSLEIYTXGINVITEDEFKLFIGXGIYSPVGAYPLGYPEALH

SEQ ID NO: 69835 - protein, 90 aa, Gossypium hirsutum
  Clone ID: LIB3120-008-Q1-K1-G9.pep
ASASKSGGNGEGTPRRACQTLCKKNHLGLQKVAVPSLETMTISMLSNVKMIFHTDLSPNSFQSLRKLSVSRCEILKNLFPASIAKHLLQR

SEQ ID NO: 69836 - protein, 98 aa, Gossypium hirsutum
  unsure (1)..(98): unsure at all Xaa locations
  Clone ID: GOSHI-09MAY01-C44_33.pep
EDLGKALEIVAENNPCFQPTAQEVDLDIYTQSELTLWRLKVFVQDKLKLAGMCSEAVVCYNIYNNENTIKXNSKRRREISDALTKNAIKRNRKLSPNS

SEQ ID NO: 69837 - protein, 91 aa, Gossypium hirsutum
  Clone ID: GOSHI-09MAY01-C44_34.pep
PYNENESHPQMIHFISQTNSHPQQKWDNYKKKKEGKKTTNGKKKCKQFTPKSSLYHLFGGSKPINNLPLAPYNSLYEAYALPLQHMFLYFP

SEQ ID NO: 69838 - protein, 66 aa, Gossypium hirsutum
  unsure (1)..(66): unsure at all Xaa locations
  Clone ID: GOSHI-09MAY01-C44_35.pep
MCRPIITPHLTMSSARIDRQKPTLGPKRXGRAPPPIHGISQITLQVVVFQFRPRAPTYPTPLKTLP

SEQ ID NO: 69839 - protein, 171 aa, Gossypium hirsutum
  unsure (1)..(171): unsure at all Xaa locations
  Clone ID: GOSHI-09MAY01-C44_36.pep
RQDRLYHELQKVCSSNKVKEENFSQIRYLDAVFHETLRKHSPAPLVPLRYVHEDTQIGGYHIPSGSEIAVNIYGCNMDKNYWENPEEWNPERFLDEKYDPLDLQKTMAFGAGKRACAGSLQAMLLXCGAIGRLVQEFEWQLKDGEEEKVDTVGLTSQKLXHPLHAVLKPRD

SEQ ID NO: 69840 - protein, 125 aa, Gossypium hirsutum
  unsure (1)..(125): unsure at all Xaa locations
  Clone ID: GOSHI-09MAY01-C44_37.pep
CLRCLNCFHWVFWFVFFYLYXSFFYLIFFLFIIGYFFIXVFFFFIEYFYFLFILFLLYLFFYLFFIFYSFFCFYLLFFIFIVLFIGLIYSVLFNSFFFYFFFYFLIIFFFFXLFFCLLIYFLIFF

SEQ ID NO: 69841 - protein, 77 aa, Gossypium hirsutum
  unsure (1)..(77): unsure at all Xaa locations
  Clone ID: GOSHI-09MAY01-C44_38.pep
PGKAPEGXVPSRSPGGHGRTAFAAGTSSSKXPATDGVGTGTPXVPSPQSQSFSRGYGSILRTSLAHSVPFTRGWSSW

SEQ ID NO: 69842 - protein, 159 aa, Gossypium hirsutum
  Clone ID: GOSHI-09MAY01-C44_39.pep
MGVVTYDYENTSPVAPARLFKAFTVEAPKVWPTAAPNTVKSVEVEANPSSGSIVKINFVEGLPFQYMKHQIGGHDENNFSYSYSLIEGGPLGDKLEKISYENKFEAAASGGSICKSSMKFYTVGDNVITEDEIKALIKGSEGVYKPVEAYLLANPEACN

SEQ ID NO: 69843 - protein, 131 aa, Gossypium hirsutum
  unsure (1)..(131): unsure at all Xaa locations
  Clone ID: GOSHI-09MAY01-C44_40.pep
MAATSPSSREEFVYMAKLAEQAERYDEMVELMEKVSSSSESEELSVEERNLLSVAYKNVIGARRASWRIVSSIEQKEESRGNEDHVTLIRDYRAKIESELSLXGGILKLLDPGYPFAAAKIQVFILDEGDI

SEQ ID NO: 69844 - protein, 162 aa, Gossypium hirsutum
  Clone ID: GOSHI-09MAY01-C44_41.pep
KLVDSRDITELQLKQSDCELVIRKKEALQQLESASPIVMQQYMPQPTFQTPAPAAPVAAPAPANPAPPAAAPSSPPPAKAVGSSHPPLKCPMAGTFYRSPAPGEPPFVKVGDKVQKGQVVCIIEAMKLMNEIEADQSGTVTEILVEDGKPVSVDMPLFVIVA

SEQ ID NO: 69845 - protein, 188 aa, Gossypium hirsutum
  unsure (1)..(188): unsure at all Xaa locations
  Clone ID: GOSHI-09MAY01-C44_42.pep
MVKHNNVIPNGHFKKHWQNYVKTWFNQPARKARRRIARQKKAVRIFPRPTAGPLRPVVHGQTLKYNMKLRAGNGFTLGELKAAGISKKLAPTIGIAVDHRRKNRYLESLQANVQRLKTYKXAKLVVLPRCAXKFKAGDSTAKELATETQXQGSYMPISRXKPSVDLVKVTKEIKSFKAYNKLRVERIY

SEQ ID NO: 69846 - protein, 176 aa, Gossypium hirsutum
  Clone ID: GOSHI-09MAY01-C44_43.pep
MVKYSREPDNPTKSCKARGSDLRVHFKNTRETAFAIRKLPLTKAKRYLEDVIAHKQAIPFRRFCGGVGRTAQAKNRHSNGQGRWPVKSAKFILDLLKNAESNAEVKGLDVDSLIISHIQVNQAQKQRRRTYRAHGRINPYMSSPCHIELILSEKEEPVKKEPETQLAPRKSKGASS

SEQ ID NO: 69847 - protein, 209 aa, Gossypium hirsutum
  unsure (1)..(209): unsure at all Xaa locations
  Clone ID: GOSHI-09MAY01-C44_44.pep
KKSEREHELKSRFEQTVKEAADKLKGMNLYVKNLDDSIDDEKLKELFSEYGKIISCKVMRDPSGVSKGSGFVAFSTPEEASRALAEMNHKLVVSKPLYVALAQKQEERRARLQAQFSQMRPLAIPSVAPHMPMYPAGAPGLGQQFLYGQXPPAIIPQAGFGYQQQLVPGMRPGGPPVPNFFVPMVQQGQGPRGRLGASPFQQAQTPNVA

SEQ ID NO: 69848 - protein, 240 aa, Gossypium hirsutum
  Clone ID: GOSHI-09MAY01-C44_45.pep
VFCEKLLKQLSFFVPNFFWACSNINGFFLFLIEIQLGSTAIGLKTKDGVVLAVEKRITSPLLEPSSVEKIMEIDEHIGCAMSGLIADARTLVEHARVETQNHRFSYGEPMTVESTTQALCDLALRFGEGDEESMSRPFGVSLLIAGHDENGTSLYYTDPSGTFWQCNAKAIGSGSEGADSSLQEQYNKDLTLQEAETIALSILKQVMEEKVTPNNVDIARVAPTYHLYTPSEVEAVITRL

SEQ ID NO: 69849 - protein, 61 aa, Gossypium hirsutum
  Clone ID: GOSHI-09MAY01-C44_46.pep
MAKSKNHTAHNQSYKAHKNGIKKPKSQRHTSTKGMDPKFLRNQRYARKHNKKNGESAAEEE

SEQ ID NO: 69850 - protein, 76 aa, Gossypium hirsutum
  Clone ID: GOSHI-09MAY01-C44_47.pep
MASTFSGDETAPFFGFLGAAAALVFSCMGAAYGTAKSGVGVASMGVMRPELVMKSIVPVVMAGVLGIYVSYSSSYF

SEQ ID NO: 69851 - protein, 217 aa, Gossypium hirsutum
  Clone ID: GOSHI-09MAY01-C44_48.pep
MALKKPGLIALFDVDGTLTAPRKVATPEMLEFMKELRKVVTVGVVGGSDLIKISEQLGKSVINDYDYVFSENGLVAHKDGKLIGTQSLKSFLGEDKLKEFINFTLHYIADLDIPIKRGTFIEFRSGMLNVSPIGRNCSQEERDEFEKYDKVHNIRLKMVSVLREKFAHLNLTFSIGGQISFDVFPEGWDKTYCLRYLEEFQEIHFFGDKTYKGGNDH

SEQ ID NO: 69852 - protein, 139 aa, Gossypium hirsutum
  Clone ID: GOSHI-09MAY01-C44_49.pep
SGNTTPPFHSIFVSWVSAQNDSREDKMFGSMIRYFSTKPKPKMKPIELKTSLEQTQTITRVIFDILKEHGPLTVGDTWERVKEVALRGLTSKRHMKIVLRWMRERQKIRLICNHVGPHKQFLYTTWFTKPSISHTWESA

SEQ ID NO: 69853 - protein, 277 aa, Gossypium hirsutum
  Clone ID: GOSHI-09MAY01-C44_50.pep
VFIPRENPRSLVIRPTKSWPSRASAEKASPLKDASTPPHENGKFSNDGSNAEDKDENPAENGLVKERIHIIRSNQKANGVHDDYSTEKEDLYMTISGHRAGEAAIVYEHGADVEALMPKLRRSDYYTEPRIQELAAKERAEPGYCRRVKDFVVGRHGYGSIKFLGETDVRCLDLESLVQFNNREVIVYMDDSKKPPVGQGLNKPAEVTLLNIKCFDKRTREQYTEGPKVEKYKEMLKKKAEDQGADFLSYDPIKGEWRFRVNHFSKYQLEDEEEDVL

SEQ ID NO: 69854 - protein, 167 aa, Gossypium hirsutum
  unsure (1)..(167): unsure at all Xaa locations
  Clone ID: GOSHI-09MAY01-C44_51.pep
MASTFSGDETAPFFGFLGAAAALVFSCMGAAYGTAKSGVGVASMGVMRPELVMKSIVPVVMAGVLGIYGLIIAVIISTGINPKXAKSYYLFDGYAHLSSGLACGLAGLSAGMAIGIVGDAGVRANAQQPKLFXVGMILILIFAEALALYGLIVGIILSSKAGQSRSE

SEQ ID NO: 69855 - protein, 165 aa, Gossypium hirsutum
  Clone ID: GOSHI-09MAY01-C44_52.pep
MASTFSGDETAPFFGFLGAAAALVFSCMGAAYGTAKSGVGVASMGVMRPELVMKSIVPVVMAGVLGIYGLIIAVIISTGINPKAKSYYLFDGYAHLSSGLACGLAGLSAGMAIGIVGDAGVRANAQQPKLFVGMILILIFAEALALYGLIVGIILSSRAGQSRAE

SEQ ID NO: 69856 - protein, 89 aa, Gossypium hirsutum
  unsure (1)..(89): unsure at all Xaa locations
  Clone ID: GOSHI-09MAY01-C44_53.pep
KDNLETLLQEKDIQADLVCXQHLQLRFETEDKASRLLSNVSFLLKSGGYFFGITPEKVIAKNCCFWICVFFFFFCSCGYCCTCFWEVIV

SEQ ID NO: 69857 - protein, 97 aa, Gossypium hirsutum
  Clone ID: GOSHI-09MAY01-C44_54.pep
LRHFCSPLVRTSSESTVRRPGKAPEGAVPSPSPGRHAATRSRRGSSSSSAPAADGFGTGTPVASPQKQSFFRGYGSILPTSLAYIGPLNKGWSPWKP

SEQ ID NO: 69858 - protein, 62 aa, Gossypium hirsutum
  unsure (1)..(62): unsure at all Xaa locations
  Clone ID: GOSHI-09MAY01-C44_55.pep
MAKSKNHTAHNQSDKAHKNGIXKKPKRHRHTSTKGMDPKFLRNQRYARKHNKKNGESANEEE

SEQ ID NO: 69859 - protein, 370 aa, Gossypium hirsutum
  unsure (1)..(370): unsure at all Xaa locations
  Clone ID: GOSHI-09MAY01-C44_56.pep
KIKIPQNIACHFLWRGGHEIAIWLCVLRLSNCQWDDHPAIMAVGVVDGTSEAIFQTLMSLGPLRSEWDFCFYKGSVVEHLDGHTDIVHKQLYSDWLPWATKRRDLLLQRYXRIEDDGTYVILYHSVFHKTCPPQKSYVRACLKSGGYVISPVNEGKQSVVKHMLAIDWKFWKSYLRTSAARPITIRMLERVAALRELFRAKQVKYPSDDLSSGELTRKVRLHQSVEDGSIDMCTQIEAGKSKETTSXSNGKGSFRHSSLLGLNDAADEFFDVPEPTDYEQSEDGWTSDFGPEVSQDTRHPKLSTAAVFVKKLHGLAVQKRGYMDLQDMTREDGICCSYGNTLTKDPTCTLPCSWTAAEPSTFVIRGENYL

SEQ ID NO: 69860 - protein, 237 aa, Gossypium hirsutum
  Clone ID: GOSHI-09MAY01-C44_57.pep
MFLTRTEYDRGVNTFSPEGRLFQVEYAIEAIKLGSTAIGLKTKEGVVLAVEKRITSPLLEPSSVEKIMEIDEHIGCAMSGLIADARTLVEHARVETQNHRFSYGEPMTVESTTQALCDLALRFGEGDEESMSRPFGVSLLIAGHDENGPSLYYTDPSGTFWQCNAKAIGSGSEGADSSLQEQYNKDLTLQEAETIALSILKQVMEEKVTPNNVDIAKVAPIYHLYTPSEVEAVISRL

SEQ ID NO: 69861 - protein, 88 aa, Gossypium hirsutum
  unsure (1)..(88): unsure at all Xaa locations
  Clone ID: GOSHI-09MAY01-C44_58.pep
KQDVWEYDSVLSTKPKPKMKPIELKTSPEQTQTISRVXTFDILKEHGPLTVGDTWERIKEVGLRGLTSKRHMKIVLRWMRGRQNLQGR

SEQ ID NO: 69862 - protein, 74 aa, Gossypium hirsutum
  Clone ID: GOSHI-09MAY01-C44_59.pep
MERGITSIKTCKEDYPNGFQMPVHYPRYSKADYEKMEEWKIDMLVKEYGFSFKWGTVDEKRAFAMGAFLWPDQL

SEQ ID NO: 69863 - protein, 317 aa, Gossypium hirsutum
  Clone ID: GOSHI-09MAY01-C44_60.pep
KRHFGEITSAVVMRDADGKSKCFGFVNFENADDAAKAVGALNGKKFDDKEWYVGKAQKKSEREHELKAQFEQSMKEAADKSQGANLYIKNLDDSIGDETLKELFSEFGNITSCKVMRDPNGISKGSGFVAFSTPEEASRALAEMNGKMVVSKPLYVAVAQRKEERRARLQAQFSQMRPIIPSVAPRMPMFPPGAPGLGQQFLYGQAPPAMLPPQASFGYQQQLLPGMRPGGPPVPNFFVPMVQQGQQGQRPGGRGGAGAVQQTQQPMPMMQQQMMPRGHAYRYPPGRNMPEVPLSNVGGGMLSVPYDMGGMPLRDAG

SEQ ID NO: 69864 - protein, 166 aa, Gossypium hirsutum
  Clone ID: GOSHI-09MAY01-C44_61.pep
FHASAVTDFPESDPESAILLPSEKPHFEPPKLLDFKHDDDASGVASVPLTKISFNPVNRQGERVRLYVRGTILGYKRSKSNQYPNTSLIQIEGVNTKEEVAWYAGKRMAYIYKAKVKKNGSHYRCIWGKVTKPHGNSGVVRAKFKSNLPPKSMGDRVRVFMYPSNI

SEQ ID NO: 69865 - protein, 189 aa, Gossypium hirsutum
  Clone ID: GOSHI-09MAY01-C44_62.pep
MSRNPEVKWAERADKVYITVLLPDSKNAKVNLEPEGVFTLSANAGADNNLYELKLDLYDKVNVEESKISIGVRNIVCVLEKAEKVWWKKLLRGEGKAPHYIKVDWDKWVDEDEENGPGDIDLGGMDFSSFGNMGGMDGSGMDDFEDSSDDEEQEVTKPSEQDMNKADGNAKQAEQGAGTMEKKETDVST

SEQ ID NO: 69866 - protein, 286 aa, Gossypium hirsutum
  unsure (1)..(286): unsure at all Xaa locations
  Clone ID: GOSHI-09MAY01-C44_63.pep
MEVPFFPTLFSCIKDLVVQQALFSTLEDWLVKHPKILQFSWESGQTPASSHRFLTLTVLSYISFTFVLSQLSRPSLSRPLLKSIAAVHNIFLLTLSFIMALGCLVSIFSQVPNFNILVCFSRGTSPSGPLFFWAXIFYLSKIVEFMDTLLIILSGSMKRLSFLHVYHHSMVVIMCYICLDSAQSSVPMVLVTNCVVHVVMYFPITLLCTLGMHPKWKKMVTDFQLVQFRLSFLIMAMLVFYHFTASGCSGILSWCFNGAFNVSLLYLFSDFHAKSYSTNAKVFKGN

SEQ ID NO: 69867 - protein, 166 aa, Gossypium hirsutum
  unsure (1)..(166): unsure at all Xaa locations
  Clone ID: GOSHI-09MAY01-C44_64.pep
MSSTFSGDETAPFFGFLGAAAALVFSCMGAAYGTAKSGVGVASMGVMRPELVMKSIVPVVMAGVLGIYGLIIAVIISTGINPKAKSYYLFDGYAHLSSGLACGLAGLSAGMAIXGIVGDAGVRANAQQPKLFVGMILILIFAEALALYGLIVGIILSSRAGQSRAE

SEQ ID NO: 69868 - protein, 207 aa, Gossypium hirsutum
  Clone ID: GOSHI-09MAY01-C44_65.pep
MVKHNNVVPNGHFKKHWQNYVKTWFNQPARKARRRIARQKKAGRIFPRPTSGPLRPIVHGQTLKYNMKLRAGKGFTLEELKAAGISKKLAPTIGIAVDHRRKNKSLEGLQANVQRLKTYKAKLVVFPRRARKFKAGDSIAEELATATQVQGSYMPISREKPSVELVKVTEEMKSFKAYNKLRVERTNERHIGARLKKAAEAEKEDKK

SEQ ID NO: 69869 - protein, 207 aa, Gossypium hirsutum
  Clone ID: GOSHI-09MAY01-C44_66.pep
MVKHNNVVPNGHFKKHWQNYVKTWFNQPARKARRRIARQKKAVRIFPRPTAGPLRPIVHGQTLKYNMKLRAGKGFTLEELKAAGISKKLAPTIGISVDHRRKNRSLEGLQANVQRLKTYKAKLVVFPRRARKSKAGDSTAEELATATQVQGPYMPISHEKPSVELVKVTEEMKSFKAYNKLRVERTNARYIGARLKKAAEAEKEDKK

SEQ ID NO: 69870 - protein, 347 aa, Gossypium hirsutum
  Clone ID: GOSHI-09MAY01-C44_67.pep
MADPSNWSTVSAEDEAKYGFTREEMYSSNLAGTVNPYDRHLFLRHRSYTDWASRVEEDSLPKLFSSTLKSRKNDIPVKTLLTVIEGEQSDGDVLIFPEMIKYKGLTEGDVDGFVEDVLVNGKPWASGVQETFTGSYVFVCAHGNRDKRCGVCGPILIEKLNEEIALRGLKDQVFVNACSHIGGHKYAGNLIIFSPDSKGKITGHWYGYVTPEDVPELLDQHIANGKIIERLWRGQMGVSTESGDGTGEQKLPNGTEVKKNEKPEEPGKMFGGCCQGANGSSCCMTASSEVSETKKTEETTKAHGKKGLCGLTSWVGSWDQRDVLTAAAVVGAVATVAVAYSYYRRSG

SEQ ID NO: 69871 - protein, 177 aa, Gossypium hirsutum
  unsure (1)..(177): unsure at all Xaa locations
  Clone ID: GOSHI-09MAY01-C44_68.pep
VKYSREPDNPTKSCKARGSDLRVHFKNTRETAFAIRKLPLTKAKRYLEDVIAHKQAIPFRRFCGGVXGRTAQAKNRHSNGQXGRWPMKSAKFILDLLKNAESNAEVKGLDVDSLIISHIQVNQAQKQRRRTYRAHGRINPYMSSPCHIELILSEKEEAVKKEPETQLAPRKSKGASS

SEQ ID NO: 69872 - protein, 239 aa, Gossypium hirsutum
  unsure (1)..(239): unsure at all Xaa locations
  Clone ID: GOSHI-09MAY01-C44_69.pep
MFLTRTDYDTXGVNTFSPEXGRLFQVEYAIEAIKLGSTAIGLKTKEGVVLAVDKRITSPLLEPSTVEKIMXLMIHIGCAMSGLIADARTLVEHARFETHNHRFXYGEPMTVXSTTQALCDLALRFGEGDEESMSRPFGVSLLIAGHDENGPSLYYTDPSGTFWQCNAKAIGSGSEGADSSLQEQYNKDLTLLEAETIALSILKQVMEEKVTPNNVDIAKVAPTYHLYTPSEVEAVITRL

SEQ ID NO: 69873 - protein, 165 aa, Gossypium hirsutum
  Clone ID: GOSHI-09MAY01-C44_70.pep
MSSTFSGDETAPFFGFLGAAAALVFSCMGAAYGTAKSGVGVASMGVMRPELVMKSIVPVVMAGVLGIYGLIIAVIISTGINPKAKSYYLFDGYAHLSSGLACGLAGLSAGMAIGIVGDAGVRANAQQPKLFVGMILILIFAEALALYGLIVGIILSSRAGQSRAE

SEQ ID NO: 69874 - protein, 197 aa, Gossypium hirsutum
  unsure (1)..(197): unsure at all Xaa locations
  Clone ID: GOSHI-09MAY01-C44_71.pep
HASADAWARVPFLDKEFINVAMSIDPEAKMIKKDEGRREKWVLRRAFDDEEHPYLPKHILYRQKEQFSDGVGYSWIDGLKAHAARHVTDKMMFNASFIFPHNTPTTKEAYYXRMIFERFFPQNSARLTVPGGASVACSTAKAVEWDAAWKNNLDPSGRAALGVHLSAYDAETPLSNKPSKVIDSIPRMDFPGVAIQS

SEQ ID NO: 69875 - protein, 113 aa, Gossypium hirsutum
  unsure (1)..(113): unsure at all Xaa locations
  Clone ID: GOSHI-09MAY01-C44_72.pep
MEVEIRQGERVRLYVRGTILGYKRSKSNQYPNTSLIQIEGVNTKEEVAWYAGKRMADIYKAKVKKNGSHYRCIWGXVTRPHGNSGVVRAKFKSNLPPKSMGDRVRVFMYPSNI

SEQ ID NO: 69876 - protein, 553 aa, Gossypium hirsutum
  unsure (1)..(553): unsure at all Xaa locations
  Clone ID: GOSHI-09MAY01-C44_73.pep
MCGILAVLGCSDSQAKRVRVLELSRRLKHRGPDWSGLYQHGDCYLAHQRLAIIDPASGDQPLFNEDKSVAVTVNGEIYNHEELRKNLVNHKFRTGSDCDVIAHLYEEYGEDFVDMLDGIFSXVLLDTRDNSYIVARDAIGVTSLYIGWGLDGSVWIASELKGLNDDCEHFESFPPGHLYSSKSGGFRRWYNPPWFSEVTPSVPYDPLVLRRAFENAVIKRLMTDVPFGVLLSGGLDSSLVASITARYLAGTKAAKQWGSQLHSFCVGLEGSPDLKAAREVADYLGTVHHEFHFTVQDGIDAIEDVIYHIETYDVTTIRASTPMFLXMSRKIKSLGVKMVISGEGSDEIFGGYLYFHKAPNKDEFHQETCRKIKALHLYDCLRANKATSAWGLEARVPFLDKEFINVAMAIDPESKMINKDEGRIEKWVLRRAFDDENHPYLPKHILYXQKEQFSDGVGYSWIDGLKAHAAANVTDKMMLNASNIFPHNTPTTKEAYYYRMIFERFFPQNSARLTVPGGASVACSTAKAVEWDATWKNNLDPSGRAALGVHLSA

SEQ ID NO: 69877 - protein, 165 aa, Gossypium hirsutum; identical to SEQ ID NO: 69855
  Clone ID: GOSHI-09MAY01-C44_74.pep

SEQ ID NO: 69878 - protein, 342 aa, Gossypium hirsutum
  unsure (1)..(342): unsure at all Xaa locations
  Clone ID: GOSHI-09MAY01-C44_75.pep
AADRMLMARVCEAKGDYEAALEHLVLASMAMIANGQENEVASIDVSIGNIYMSLCRFDEAVFSYQKALTVFKSSKGDNHPSVASVFVRLADLYHRTGKLRESKSYCENALRIFAKPVPGATAXEIAGGLTEISAIYESVDEPEEALKLLQKAMKLLEDKRGQQSTRAGIEARIGVMFYILGRYDESRNSFESAVTKLRASGERKSAFFGVVLNQMGLACVQLFKIDEAAELFEEARAILEQECGPCHQDTLGVXYSNLAATYDAMGRVEDAIEILEYVLKLREEKLGIANPDFEDEKNRLAELLKEAGRPRNRKAKSLENLIDPNSKRTAKKEGTKKWGFRI

SEQ ID NO: 69879 - protein, 159 aa, Gossypium hirsutum
  unsure (1)..(159): unsure at all Xaa locations
  Clone ID: GOSHI-09MAY01-C44_76.pep
MGVVTYNYDSTSPVAPARLFKAFVLEAXRVWPIAAPHAIKSIEVEANPGPGSIVKINFVEGLPFQYMKHQIGGHDENKFSYSYSLIEGGPLGDKLEKINYENKFEAAVGGGSVCKSSMKFYTFGDYVITEDEIKALIKGSEGVYKAIEAYLLANPDACN

SEQ ID NO: 69880 - protein, 199 aa, Gossypium hirsutum
  unsure (1)..(199): unsure at all Xaa locations
  Clone ID: GOSHI-09MAY01-C44_77.pep
MQQHLMQMHPMMAAYYPNNVTTDHIQQYLDENKSLILKIVESQNSXGKFSECAENQTRLEGNLMYLAAIADSXPQPLTMHAQFPFGGIMQXELGHYMQQQQQTQQMTPQSLMAARSSMLYGQQPFSAHQQQQALHGPLGMSSGGSTGLHMLQSEASTTGGNGALGAGVFPGFRHGSSGEGKQDIGSAGSAEARGVLGCD

SEQ ID NO: 69881 - protein, 192 aa, Gossypium hirsutum
  unsure (1)..(192): unsure at all Xaa locations
  Clone ID: GOSHI-09MAY01-C44_78.pep
HASAHASDFSSLLLLLLSLDTKPLCVGLESWVHVRYEFEVTYPIATAXRLIKAFVFEAAKVCTTDGRYAVXSVELECDTSAGRIVKITFDEGXLPYQYMKHQIGGHDENNFXSYSYSMIEGGPLGDKLEKISYENQFVAAADGGSICKSSIKYYTVGDYVISEYEIQTLIKGSXVVYKAIEAYLLANPDACN

SEQ ID NO: 69882 - protein, 165 aa, Gossypium hirsutum
  Clone ID: GOSHI-09MAY01-C44_79.pep
MSTTFSGDETAPFFGFLGAAAALVFSCMGAAYGTAKSGVGVASMGVMRPELVMKSIVPVVMAGVLGIYGLIIAVIISTGINPKAKSYYLFDGYAHLSSGLACGLAGLSAGMAIGIVGDAGVRANAQQPKLFVGMILILIFAEALALYGLIVGIILSSRAGQSRAE

SEQ ID NO: 69883 - protein, 200 aa, Gossypium hirsutum
  Clone ID: GOSHI-09MAY01-C44_80.pep
MASADVEAVDFEPEDDDLMDEDAVSGDASPQVSMPKLKSAITGGASVSLSGPKKTKGRGFRQDDADRHSHLASRDFDSLGSDGGPGPQRSIEGWIILVTGVHEEAQEDDLHNTFGEFGEIKNLHLNLDRRTGFVKGYALIEYEKFEEAKNAISAMDGAELLTQTMNVDWAFSNGPSVGASKRKNMRAGRTHRSRSPRRRY

SEQ ID NO: 69884 - protein, 149 aa, Gossypium hirsutum
  unsure (1)..(149): unsure at all Xaa locations
  Clone ID: GOSHI-09MAY01-C44_81.pep
MPLNPRFHQKRFISYGNDMILSDERSFDPESRGVVRQIEAGWGSFDDDGTESKHHVGFMKPDHHDHEHHDEDHDHEHHDEDHDQEHHEGRPXHEHHDEEDHEEEHHHHHHHHHHHHHHRHHHHGEEERDETEEHEGGFMEKFRKYFIHF

SEQ ID NO: 69885 - protein, 311 aa, Gossypium hirsutum
  unsure (1)..(311): unsure at all Xaa locations
  Clone ID: GOSHI-09MAY01-C44_82.pep
TALAHGLVDPKRRGKPVRQRVQRELRKGIGLKFLNRDAAADGNVRESGDVAAATSSPREENVYMAKLAEQAERYEEMXEFMEKVSASAADNEGLTIEERYLLSVAYKNVIGARRASWRIISSIEQKEESRGNEDHVAVIRDYRAKIESELSSICGGILKLLDTTLIPSASGGDSKVFYLKMKGDYHRYLAEFKTSAERKEAAESTLTAYKSAQEIANAELAPTHPIRLGLALNFSVFYYEILNSPDRACELAKQAFDEAIAELDTLGEESYKDSTLIMQLLRDNLTLWTSDMQGDDEIKEAAKRDEEEEQQ

SEQ ID NO: 69886 - protein, 198 aa, Gossypium hirsutum
  Clone ID: GOSHI-09MAY01-C44_83.pep
CGTIKKHWQNYVKTWFSQPARKARRRISRHKKAVRIFPRPTAGPLRPIVHGQTLKYNMKLRAGKGFTLEELKAAGISKKLAPTIGIAVDHRRKNKSLEGLQANVQRLKTYKAKLVVFPRRARKFKAGDSTAEELATATQVQGPYMPISREKPSVELVKVTEDMKSFKAYNKLRVERANERHIGARLKKAAEAEKEDKK

SEQ ID NO: 69887 - protein, 585 aa, Gossypium hirsutum
  unsure (1)..(585): unsure at all Xaa locations
  Clone ID: GOSHI-09MAY01-C44_84.pep
MCGILAVLGCSDDSQTKRARVLELSRRLKHRGPDWSGLYQHGDCYLAHQRLAIVDPNSGDQPLFNEDKSVAVTVNGEIYNHEQLRKKLVNHKFRSGSDCDVIAHLYEEYGEDFVDMLDGIFSFVLLDARDNSLIVARDAIGITSLYIGWGLDGSIWVSSELKGLNDACEQFESFPPGHMYTSKSRGLRRWYNPPWFSDSIPSVPYDPFVLRHALENAVIKRLMTDFPFGVLLSGGLDSSLITSITARYLAATKAAKQWGAQLHSFCIGLEGSPDLKGGGEAADYLGTVHHEFHFTVEDGIDAIEDVIYHIETYDVTTIRASTPMFLMSRKIKSLGVKMVISGEGSDEIFGGYLYFHKAPNKDEFHHETCRKIKALHQYDCLRANKATSAWGLEARVPFLDKQFINVAMSIDPESKMIKRDEGRIEKWILRRAFDDEEHPYLPKHILYRQKEQFSDWCGYSXKNGLKAHAVAHVTDKMMLNASNIFPHNTPTTKXEAYYYRMIFERFFPQNSARLTVPGGASVACSTAKAVEWDATWKNNLDPSGRAALGVHLSAYDAETPFDNKPSKIVESIPLMMEIPGVAIHG

SEQ ID NO: 69888 - protein, 173 aa, Gossypium hirsutum
  unsure (1)..(173): unsure at all Xaa locations
  Clone ID: GOSHI-09MAY01-C44_85.pep
MATAEVVTAQTAIHEEKPEEVVKVEEIATEEVVAVAPATEXVAEEPKEAVPEAASEEPQAPETEATVETESKEVVEEPKAVTEEPEVEKKEEETPEETVAEPVAEESKETTEPTVEETKESTESTEAAVAAAAEEEVKAEAEAEAAPVEAPKEEAAKEEEEPAEAQAEKTTTE

SEQ ID NO: 69889 - protein, 159 aa, Gossypium hirsutum
  Clone ID: GOSHI-09MAY01-C44_86.pep
MGVVTYNYESTSPVAPARLFKAFSLEADKVWPKAAPQAVKSVEVEANPGPGSIRKINFAEGLPFQYMKHQIGGHDDKNLSYSYSLIEGGPLGDKLEKISYDNKFEAAAGGGSLCKSSMKFYTVGDYVITEDEIKAQIKGSEGVYKAVEAYLLANPDACN

SEQ ID NO: 69890 - protein, 171 aa, Gossypium hirsutum
  unsure (1)..(171): unsure at all Xaa locations
  Clone ID: GOSHI-09MAY01-C44_87.pep
TQKTALTIKSHGVFSSCDYETTSPVAPXARLFKAFTVEAPKVWPAAAPNAVKSIEVEANPSSGSIVKINFVEGFPFQYMKHQIGRHDENNFSYSYSLIEGGPLGDKLEKISYENKFEAAAGGGSICKSSMKFYTVGDNVITEDEIKARIKGSETVYKPLEAYLLANPEACN

SEQ ID NO: 69891 - protein, 161 aa, Gossypium hirsutum
  unsure (1)..(161): unsure at all Xaa locations
  Clone ID: GOSHI-09MAY01-C44_88.pep
MGVGAYDYENTCPVAPARLFKAFTXKATKVWPTAAPNAVKSLEVEANPSSGSIVKINFVEGLPFQYMKHQIGGHDESNFSYSYDLIESGPLGXISLKKISYENRFEAAAVEGSICKSSMKXFYTIGDNVITEDEIKALIKGSEGVYKPVEAYLLANPEACN

SEQ ID NO: 69892 - protein, 163 aa, Gossypium hirsutum
  unsure (1)..(163): unsure at all Xaa locations
  Clone ID: GOSHI-09MAY01-C44_89.pep
IVTKVYTQNGFLISAGLTPGTVLILXAGRFMGKRVVFLKQLTSGLLLVTGXPFKINGVPLRRVNXQSYVIATSTKVDISGVNVDKFDDKYFAKEVEKRKKKTEGEFFEAEKEDKKKLPEDKKEDQKAVDASLIKSIEGVPDLKAYLAARFSLKSGMKPHELVF

SEQ ID NO: 69893 - protein, 251 aa, Gossypium hirsutum
  unsure (1)..(251): unsure at all Xaa locations
  Clone ID: GOSHI-09MAY01-C44_90.pep
MPIRNIAVGRPEEATHPDALKAALAEFISTLIFVFAGSGSGMAFNKLTDNGATTPAGLVAAALAHGFGLFVAVSVGANISGGHVNPAVTFGAFVGGNITLLRGILYWIAQLLGSTVACLLLKFATGDLAVPAFGLSSGVGVSNALVFEIVMTFXLVYTVYATARDPKKGSLGTIAPLAIGFIVGANILAGGAFDGASMNPAVSFGPALVSWTWDNHWIYWVGPLIGGGLAGLIYEFIFISNTHEQLPTTDY

SEQ ID NO: 69894 - protein, 300 aa, Gossypium hirsutum
  unsure (1)..(300): unsure at all Xaa locations
  Clone ID: GOSHI-09MAY01-C44_91.pep
RHVPLGAQRPLLRVGNRATGACVASSPDSDLEAFSHNPAHGSFAPLAYQPSAMTNCANQRFLSYXVELLLRRGHQXGKSNLSHDGLIPAHVPYWWVNNPTLGEFCFTMIGRADIEGSKXSNVAMNAWLPQASYPCGNFSDTSSFKFRRSKGSXATLSRFVFVLEIRIKRAFTLLFHTRFLFSLSSXLGHLRYLLTDVPPQPNSPPDNVFRPDRPAEAGXWVQKEGPCPASDSRNKXNNVKSSGISISPESSHLSYTSLVISQSRTRVKLNRVFFPXADSAKPVPLAVVSLDSRQGQWESR

SEQ ID NO: 69895 - protein, 107 aa, Gossypium hirsutum
  Clone ID: GOSHI-09MAY01-C4_31.pep
CMPARSFLFWSRSSSLLFLYLLTLSFSSFLVAQFFFLNNISKTSAAQNFPPPYQNSKTKHIRLCLNIHWNIKSRTLLIMKCKSIRYNQQNKGLYLEIFVPQCGLTLN

SEQ ID NO: 69896 - protein, 73 aa, Gossypium hirsutum
  Clone ID: GOSHI-09MAY01-C4_27.pep
MKLKWYLLSDTRFSARPKYYYDVKSENSYYPNQLDNSRGVAYRNEFDENRYNNMGRYHQNQEEFEESEEEFEP

SEQ ID NO: 69897 - protein, 125 aa, Gossypium hirsutum
  Clone ID: GOSHI-09MAY01-C4_20.pep
MQIFVKTLTGKTITLEVESSDTIDNVKAKIQDKEGIPPAQQRLIFAGKQLEDGRTLADYNIQKESTLHLVLRLRGGIIEPSLMALARKYNQDKMICRKCAARLHARCRRAGPGCDRTHALVTNFS

SEQ ID NO: 69898 - protein, 248 aa, Gossypium hirsutum
  Clone ID: GOSHI-09MAY01-C4_19.pep
MISFSSFKFTLLLPLMVGCLMAAAASNFNNDFDITWGDGRGKIGNNGEVLTLSLDKSSGSGFQSKNEYLFGKIDMQLKLVPGNSAGTVTAYYLSSKGSTWDEIDFEFLGNLSGDPYILHTNVFSQGKGNREQQFYLWFDPTADFHTYSILWSPQSIIFSVDGTPIREFKNMESIGVPFPKNQPMRIYSSLWNSDDWATRGGLVKTDWTLAPFTASYRNFNADACVWSNGASSCKSTATSTNSAWLSQE

SEQ ID NO: 69899 - protein, 113 aa, Gossypium hirsutum
  unsure (1)..(113): unsure at all Xaa locations
  Clone ID: GOSHI-09MAY01-C4_18.pep
PRVRPRVRPRVRAVPAIVFLSGGQSEEEATLNLNAMNKLQTKKPWSLSFSFGRALQQSTLEXWAGKEENVKKAQDAFLVRCKANSEATLGTYKGDAKISEGAAESLHVKDYKY

SEQ ID NO: 69900 - protein, 158 aa, Gossypium hirsutum
  Clone ID: GOSHI-09MAY01-C4_17.pep
MSYSSSSEVPLLMPLMVACLIMAASGSNFHNDFDITWGDGRGKIVNNGEVLTLSLDKQSGSGFQSKNEYLFGKIDMQLKLVPGNSAGTVTAYYLSSKGTTWDEIDFEFLGNLSGDPYILHTNAFSQGKGNREQQFYLWFDPTADFHTYSILWNPQRIM

SEQ ID NO: 69901 - protein, 193 aa, Gossypium hirsutum
  Clone ID: GOSHI-09MAY01-C4_16.pep
MSSSGFKFTLLVPLMVACLMASSASNFHNDFDITWGDGRGKIVNNGEVLTLSLDKASGSGFQSKNEYLFGKIDMQLKLVPGNSAGTVTAYYLSSKGSTWDEIDFEFLGNLSGDPYILHTNVFSQGKGNREQQFYLWFDPTADFHTYSILWNPQRIIFSVDGTPIREFKNMESFGVPFPKNQPMRIYSSLWNAD

SEQ ID NO: 69902 - protein, 128 aa, Gossypium hirsutum
  Clone ID: GOSHI-09MAY01-C4_15.pep
MQIFVKTLTGKTITLEVESSDTIDNVKAKIQDREGIPPDQQRLIFAGKQLEDGRRLADYNIQKESTLHLVLRLRGGIIEPSLMALARKYNQDKMICRKCYARMHPRAVNCRKKKCGHSNQLRPKKKIK

SEQ ID NO: 69903 - protein, 58 aa, Gossypium hirsutum
  Clone ID: GOSHI-09MAY01-C4_12.pep
MALHKRCQKYYEAGARFAKWRAVLKISANEPTPLAMQENSNRLAMYAVICQECRLVPI

SEQ ID NO: 69904 - protein, 202 aa, Gossypium hirsutum
  Clone ID: GOSHI-09MAY01-C4_11.pep
MNFFSFSGFLFLSLLEMNGEGKESKEVKMEEAANKERVAFMWGYLPGALPQRTPLLSPVNVRIPASAGCSWTDVCGGGCGFAMAISDSGKLITWGSTDDLGQSYVTSGKHGEIPEPIPLPTEVSVVKAAAGWAHCAAVTETAEVYTWGWKECIPSGKVFGDLPMGTSLEKDVFERQNSLLAEQVSPRSQGSRSSRLDILMEF

SEQ ID NO: 69905 - protein, 128 aa, Gossypium hirsutum
  Clone ID: GOSHI-09MAY01-C4_10.pep
MQIFVKTLTGKTITLEVESSDTIDNVKAKIQDKEGIPPDQQRLIFAGKQLEDGRTLADYNIQKESTLHLVLRLRGGIIEPSLMALARKYNQDKMICRKCYARLHPRAVNCRKKKCGHSNQLRPKKKIK

SEQ ID NO: 69906 - protein, 287 aa, Gossypium hirsutum
  Clone ID: GOSHI-09MAY01-C4_9.pep
MSSSGLKFTFLMPLMVACLMAASASIFHNDFDITWGDGRGKIVNNREVLTLSLDKASGSGFQSKNEYLFGKIDMQLKLVPGNSAGTVTAYYVRSTWDEIDFEFLGNLSGDPYILHTNVFSQGKGNREQQFYLWFDPTADFHTYSILWNPQRIIFSVDGTPIREFKNMESLGVPFPKNQPMRIYSSLWNADDWATRGGLVKTDWTQAPFTASYRNFNADACVWSNGASSCKSNASPSSASTNSAWFSQEMDSAKQQRLQWVQKNYMIYNYCNDAKRFPQGLPPECNMS

SEQ ID NO: 69907 - protein, 195 aa, Gossypium hirsutum
  unsure (1)..(195): unsure at all Xaa locations
  Clone ID: GOSHI-09MAY01-C4_8.pep
FSRTPTRPPTRAATLTPTRADESTGTIGKRLSSINVENVEDNRRALRELLFTTPGALQHLSGVILFEETLYQKTASGKPFVDVLKEGGVLPGIKVDKGTVELNGTHGETFTQGLDGLAQRCQKYYGAGARFAKWRAVLKISANEPTELXAIQENANGLAMYAAICQQCGLVPIVEPEILADGSHDIQKCAWGSIC

SEQ ID NO: 69908 - protein, 134 aa, Gossypium hirsutum
  Clone ID: GOSHI-09MAY01-C4_7.pep
KPNMVTPGAGSPKVAPEVIAEYTVRALQRTVPAAVPAIVFLSGGQSEEEATLNLNAMNKLQTKKPWSLSFSFGRALQQSTLKAWAGKEENVKKAQDAFLVRCKANSEATLGTYKGDAKISEGAAESLHVKDYKY

SEQ ID NO: 69909 - protein, 128 aa, Gossypium hirsutum; identical to SEQ ID NO: 69905
  Clone ID: GOSHI-09MAY01-C4_6.pep

SEQ ID NO: 69910 - protein, 128 aa, Gossypium hirsutum; identical to SEQ ID NO: 69905
  Clone ID: GOSHI-09MAY01-C4_5.pep

SEQ ID NO: 69911 - protein, 233 aa, Gossypium hirsutum
  Clone ID: GOSHI-09MAY01-C4_4.pep
MASSPKLFSMSILFLFALFSMQIHAREYFSKFPRVNTNEKETTTREQEHETFVPQTTQKPEEQEPRFIPETQNGYGLYGHESGSGSGSGSSRPSFTTKETYEPYVTPVRFHPDEPYNSIPESSNNKDTYYYNKNAYKSTKQQNLGEAIFTEKGWSTKENQNNNYYNGNINGEKQGMSDTRYLENGKYYYDVKSENSYYPNQLDNSRGVASRNEFDENRYHNMGRVHQNKRVRG

SEQ ID NO: 69912 - protein, 358 aa, Gossypium hirsutum
  Clone ID: GOSHI-09MAY01-C4_3.pep
MSCFISKYADELAKNAAYIGTPGKGILAADESTGTIGKRLSSINVVNIEENRRALRELLFTAPGALQYLSGVILFEETLYQKTASGKPFVDVLKEGGVLPGIKVDKGTVELNGTNGETFTQGLDGLAQRCQKYYEAGARFAKWRAVLKISANEPTELAIQENANGLAMYAAICQQCGLVPIVEPEILVDGSHDIKKCAAVTERVLAACYKALNDHHVMLEGTLLKPNMVTPGSDSPKVAPEVIAEYTVRALQRTVPAAVPAIVFLSGGQSEEEATLNLNAMNKLQTKKPWSLSFSFGRALQQSTLKAWAGKEENVKKAQDAFLVRCKANSEATLGTYKGDAKISEGAAESLHVKDYKY

SEQ ID NO: 69913 - protein, 358 aa, Gossypium hirsutum
  Clone ID: GOSHI-09MAY01-C4_2.pep
MSCFISKYADELAKNAAYIGTPGKGILAADESTGTIGKRLSSINVENVEDNRRALRELLFTTPGALQYLSGVILFEETLYQKTASGKPFVDVLKEGGVLPGIKVDKGTVELNGTNGETFTQGLDGLAQRCQKYYEAGARFAKWRAVLKISANEPTELAIQENANGLAMYAAICQQCGLVPIVEPEILVDGSHDIQKCAAVTERVLATCYKALNDHHVMLEGTLLKPNMVTPGSDSPKVAPDVIAEYTVRALQRTVPAAVPAIVFLSGGQSEEEATLNLNAMNKLQTKKPWSLSFSFGRALQQSTLKTWAGKEENVKKAQDALLVRCKANSEATLGTYKGDAELCEGAAESLHVKDYKY

SEQ ID NO: 69914 - protein, 238 aa, Gossypium hirsutum
  unsure (1)..(238): unsure at all Xaa locations
  Clone ID: GOSHI-09MAY01-C4_1.pep
MASSPKLFSMSILFLFALFSMQIHAREYFSKFPRVNINEKETTTREQKHETFVPQTTQKPEEQEPRFIPETQNGYGLYGHESGSSRPSFTTKETYEPYVTPVRFHPDEPYNSIPESSNNKDTYYYNKNAYESTKQQNLGEAIFTEKGWSTKENQNNNYYNGNNGYNNGEXQGMSDTRYLENGKYYYDVKSENNYYPNRFDNSRGVASRNEFNENRYNNMGRYHQNQEEFEESEEEFEP

SEQ ID NO: 69915 - protein, 140 aa, Gossypium hirsutum
  Clone ID: uC-gsronu33B007h03b1.pep
KYKPKKKNGVFFKSRGVKTIHACFISKYADELAKNAAYIGTPGKGILAADESTGTIGKRLSSINVENVEDNRRALRELLFTTPGALQYLSGVILFEETLYQKTASGKPFVDVLKEGGVLPGIKVDKGTVELNRTNGETFT

SEQ ID NO: 69916 - protein, 133 aa, Gossypium hirsutum
  Clone ID: LIB3583-058-P1-K1-H6.pep
PTRPPTRPPTRPVFPGIKVDKGTGELNGTNGETFTQGLDGLAQRCQKYYEAGARFAKWRAVLKISANEPTELAIQENANGLAMYAAICQQCGLVPICEPEILVDGSHDIKKCAAVTERVLAACYKALNDHHVM

SEQ ID NO: 69917 - protein, 106 aa, Gossypium hirsutum
  unsure (1)..(106): unsure at all Xaa locations
  Clone ID: LIB3197-035-Q1-M1-G7.pep
MIHLLFMHFSYYSFFLVLSYLIIYIVHGQWKHILFFFIFIIISLFFLLLFLIFVFLIXFIFFFIXFLFFFLLLLYLIYFNYFFYFSFFYTFFFTLFSFFISFFLFF

SEQ ID NO: 69918 - protein, 51 aa, Gossypium hirsutum
  Clone ID: LIB3147-019-Q1-K1-G10.pep
IERSLMALARKYNQDKMICRKCYARVDPRAVNCRKKKCGHSNQLRPKKKIK

SEQ ID NO: 69919 - protein, 145 aa, Gossypium hirsutum
  unsure (1)..(145): unsure at all Xaa locations
  Clone ID: AI729788.1.pep
MASSPKLFSMSILFLFALFSMQIHAREYFSKFPRVNTNEKETTTREQEHEXFVXYFLLSYYLYPLSSPDSLGLGLLCPHFLFLFRLLLLSALSSPLLCLLFPLFSLFCSSLLSLFSCFFLLSPRLALLFLPFLLCSFVASLSSPC

SEQ ID NO: 69920 - protein, 95 aa, Gossypium hirsutum
  unsure (1)..(95): unsure at all Xaa locations
  Clone ID: LIB3083-118-Q1-L1-E6.pep
CLVPIVEPEIGVDXSHDMKKCAAVTERVFAACYKVFNDYFFMLVCFFFYFYQCFLFYLLLIFYVCLYLLLFFFFNIFYIYYIYIFFFFFYYLFVS

SEQ ID NO: 69921 - protein, 60 aa, Gossypium hirsutum
  unsure (1)..(60): unsure at all Xaa locations
  Clone ID: LIB3189-015-P1-K1-A3.pep
PDHASALKTWAGKEENVNIVQDALLVMCKANSEGGLGTYKGDAELCEGAAXSLHVKDYKY

SEQ ID NO: 69922 - protein, 58 aa, Gossypium hirsutum
  Clone ID: LIB3147-015-Q1-K1-G3.pep
MGLQVEPSFELKNEKEGILVPKIQISILNFVNWSKLYLAVDFLVWYMMINSLFRTYVA

SEQ ID NO: 69923 - protein, 134 aa, Gossypium hirsutum
  Clone ID: uC-gsronu33B146b09b1.pep
STTRHHRAGTCRTDPRDRFIKPKKNQNGEGKKNGPGRRNTPRQESKTEEGRTPADYNIQKESTLHLAPRLRGGNIEPPLMALARKYNQDKMICRKCYARLHPRAANCRKKKCGHSNQLRPKKKTKKTGYLDGDL

SEQ ID NO: 69924 - protein, 108 aa, Gossypium hirsutum
  Clone ID: LIB3166-044-P1-K1-D10.pep
MGYSSSSKWRLLMPLMVACLIMAASGSNFHNDFDITWGDGRGKIANNGEVLTLSLDKQSGSGFQSKNEYLFGKIDMQLKLVPGNSAGTVTAYYVSYLLSFPLIFTETQ

SEQ ID NO: 69925 - protein, 130 aa, Gossypium hirsutum
  Clone ID: LIB3147-024-Q1-K1-H10.pep
PPTRPFVKTLTVKTITLEVESSDTGDNVKAKIQDREGIPPDQQRLIFAGKQLEDGRRLADYNIQKESTLHLVLRLRGGIIEPSLMALARKYNQDKMICRKCYARLHPRAVNCRKKKCGHSNQLRPKKKIK

SEQ ID NO: 69926 - protein, 71 aa, Gossypium hirsutum
  Clone ID: AI729903.1.pep
NSIPESSNNKDTYYYNKNAYESTKQQNLGEAIFTEKGWSTKENQNNNYYNGNNGYNNGEKQGMSDNSCSHS

SEQ ID NO: 69927 - protein, 90 aa, Gossypium hirsutum
  Clone ID: LIB3148-034-Q1-K1-B1.pep
EIRLVVKYVMFSRVNSGIEMRVLECVAAPFEFLPLLIDFSLWNQLILQLRSRCLCACIVHTYYLFFLFLLFILYDLSFFYCWLFVFFNYL

SEQ ID NO: 69928 - protein, 94 aa, Gossypium hirsutum
  unsure (1)..(94): unsure at all Xaa locations
  Clone ID: LIB3197-016-P1-M1-F4.pep
FLPKLYSMSIGVXLFALFWMQIHAIXYFNKFPRVNINEKETTTREHMLETFFPHTTXSHXDHEPRFIPETQNGYGLYSHFSSSSPPHFTTKKTY

SEQ ID NO: 69929 - protein, 159 aa, Gossypium hirsutum
  Clone ID: GOSHI-09MAY01-C54_2.pep
FPGVPPRARFFVRAYFFGVFQGLLKVLAGVDTNFTVTAKAADDTEFGELYLFKWTTLLIPPTTLIILNMVGVVAGVSDAINNGYGSWGPLFGKLFFAFWVILHLYPFLKGLMGRQNRTPTIVVLWSILLASIFSLVWVRIDPFLPKQTGPVLKQCGVEC

SEQ ID NO: 69930 - protein, 866 aa, Gossypium hirsutum
  Clone ID: GOSHI-09MAY01-C54_1.pep
KVGLVSNDNGGSVPPEEDDYLLAEARQPLWRKVPISSSLISPYRIVIVLRFFILAFFLRFRILTPAYDAYPLWLISVICEVWFAFSWILDQFPKWFPITRETYLDRLSLRFEREGEPNQLGAVDVFVSTVDPLKEPPIITANTVLSILAVDYPVEKVCCYVSDDGASMLLFDSLSETAEFARRWVPFCKKHNVEPRAPEFYFNEKIDYLKDKVHPSFVKERRAMKREYEEFKVRINALVAKAQKKPEEGWVMQDGTPWPGNNTRDHPGMIQVYLGSAGALDVDGKELPRLVYVSREKRPGYQHHKKAGAENALVRVSAVLTNAPFILNLDCDHYINNSKAMREAMCFLMDPQFGKKLCYVQFPQRFDGIDRHDRYANRNVVFFDINMLGLDGLQGPVYVGTGCVFNRQALYGYDPPVSEKRPKMTCDCWPSWCCCCCGGSRKKSKKKGEKKGLLGGLLYGKKKKMMGKNYVKKGSAPVFDLEEIEEGLEGYEELEKSTLMSQKNFEKRFGQSPVFIASTLMENGGLPEGTNSTSLIKEAIHVISCGYEEKTEWGKEIGWIYGSVTEDILTGFKMHCRGWKSVYCVPKRPAFKGSAPINLSDRLHQVLRWALGSVEIFLSRHCPLWYGYGGKLKWLERLAYINTIVYPFTSIPLLAYCTIPAVCLLTGKFIIPTLSNLTSVWFLALFLSIIATGVLELRWSGVSIQDWWRNEQFWVIGGVSAHLFAVFQGLLKVLAGVDTNFTVTAKAAEDTEFGELYLFKWTTLLIPPTTLIILNMVGVVAGVSDAINNGYGSWGPLFGKLFFAFWVILHLYPFLKGLMGRQNRTPTIVVLWSILLASIFSLVWVRIDPFLPKQTGPVLKQCGVEC

SEQ ID NO: 69931 - protein, 179 aa, Gossypium hirsutum
  unsure (1)..(179): unsure at all Xaa locations
  Clone ID: LIB3585-050-P1-K1-D3.pep
EKRFGQSPVFIASTLMENGGLPEGTECTSLIKEAIHVISCGYEEKTEWGKEASNIIYFNGLLQWTNAICNCYVSIHFIXSGVNLCINEPVLLALQIGWIYGSETEDILTGFKMHRRGWKSVYCVPKRPAFKGSAPINLSNRLHQVLRWALGSVQIFLSPHCPLWYGYGGKLTWLERLAY

SEQ ID NO: 69932 - protein, 161 aa, Gossypium hirsutum
  unsure (1)..(161): unsure at all Xaa locations
  Clone ID: uC-gsronu33B124e06b1.pep
LSRGRTRGRTRGRTRGGMSQVYLGSAGALDVDGKELPRLVYVSREKRPGYQHHKKAGAENALVRVSAVLTNAPFILNLDCDHYINNSKAMREAMCFLMDPQFGKKLCYVQFPQRFDGIDRHDRYANRNVVFFDINMLGLDGLQGPVYVGTGCVFXRQALYG

SEQ ID NO: 69933 - protein, 109 aa, Gossypium hirsutum
  unsure (1)..(109): unsure at all Xaa locations
  Clone ID: LIB3083-021-Q1-L1-F7.pep
EKWKVRHEKRGLVSNDKCGNDPPEEDDYLLAEARQPLWRKVPISXSLISPYRIGRLGXLALFLPVRVLTPAYDAYPIWLICVICXACFAFFWTLDQLTNWLPMTMLTYL

SEQ ID NO: 69934 - protein, 66 aa, Gossypium hirsutum
  unsure (1)..(66): unsure at all Xaa locations
  Clone ID: LIB3146-007-Q1-K1-A1.pep
TDPSGCRYSARAHYICWFDRHDRYANQIVVFFDINMLGLDVLQGPVYVGTGCVFNRQALXYGYDPP

SEQ ID NO: 69935 - protein, 42 aa, Gossypium hirsutum
  Clone ID: GOSHI-09MAY01-C74_11.pep
REYLGGGMFKFMGLNLLTCLKERLNQVGYENVSLGKVGCVFF

SEQ ID NO: 69936 - protein, 44 aa, Gossypium hirsutum
  Clone ID: GOSHI-09MAY01-C74_10.pep
ASCFLGAFPTSRLTGCLLGTGHLCKDMNNFRRQLKNIKQVTFSH

SEQ ID NO: 69937 - protein, 152 aa, Gossypium hirsutum
  unsure (1)..(152): unsure at all Xaa locations
  Clone ID: GOSHI-09MAY01-C74_9.pep
MARTKQTARKSTGGXKAPRKQLATKAARKSAPTTGGVKKPHRYRPGTVALREIRKYQKSTELLIRKLPFQRLVREIAQDFKTDLRFQCHACLALNIAVFAFFLFFFNYLYFSLYFLLPFFYKFFYFFFYPFFISYFIPLLSLLFFIISSLFL

SEQ ID NO: 69938 - protein, 136 aa, Gossypium hirsutum
  Clone ID: GOSHI-09MAY01-C74_3.pep
MARTKQTARKSTGGKAPRKQLATKAARKSAPTTGGVKKPHRYRPGTVALREIRKYQKSTELLIRKLPFQRLVREIPPRPPTRPRFQSHAVLALQEAAEAYLVGLFEDTNLCAIHAKRVTIMPKDIQLARRIRGERA

SEQ ID NO: 69939 - protein, 136 aa, Gossypium hirsutum; identical to SEQ ID NO: 61413
  Clone ID: GOSHI-09MAY01-C74_2.pep

SEQ ID NO: 69940 - protein, 136 aa, Gossypium hirsutum; identical to SEQ ID NO: 61413
  Clone ID: GOSHI-09MAY01-C74_1.pep

SEQ ID NO: 69941 - protein, 143 aa, Gossypium hirsutum
  Clone ID: LIB3829-024-Q6-K6-H12.pep
TFVSELKRRRGKQTARKSTGGKAPRKQLATKAARKSAPTTGGVKKPHRYRPGTVALREMGKYQKSTELLIRKLPFQRLVREIAQDFKTDLRFQSHAVLALQEAAEAYLVGLFEDTNLCAIHAKRVTIMPKDIQLARRIRGERA

SEQ ID NO: 69942 - protein, 61 aa, Gossypium hirsutum
  Clone ID: LIB3828-016-Q1-N6-B5.pep
KKKKRGAPPPFFFFFFFFFFFFFFFFFFFFFFFFFFFFFFFFFFFFFASKTCLIVSVLDLA

SEQ ID NO: 69943 - protein, 208 aa, Gossypium hirsutum
  unsure (1)..(208): unsure at all Xaa locations
  Clone ID: LIB3828-016-Q1-K6-G5.pep
VESKEXXGVSHTVXISECDDVEVYVETVVLMYSDDLKKRLIGENVNKVLALLQVSAAIMFDAGISSCLEYLEAVPWSEDEEEKVLSLLCQLELHGSMTEVLQRVLSEPSTSVRTDDIFLKLLSGVLQAKDDKARREMKTLISRLLREDSFDYNSRVDVSKDILYHLCHRCLCSLVLCLSEAMCMDSSKQDRRVLMAEIAREADNLQWL

SEQ ID NO: 69944 - protein, 117 aa, Gossypium hirsutum
  Clone ID: uC-gsronu33B019d05b1.pep
PLVRHKRVLSEKSRFFAEKLSQRKEKGVSHTVEISECDDVEVYVETVVLMYSDDLKKRLIGENVNKVLALLQVSAAIMFDAGISSCLISRSVDQSLRRNYCLFLGKCIGFLFFLIIF

SEQ ID NO: 69945 - protein, 102 aa, Gossypium hirsutum
  unsure (1)..(102): unsure at all Xaa locations
  Clone ID: uC-gsronu33B007b06b1.pep
LVSVKKKKQTGRVDLKERGEYQKSTELLIRKLPFQRLARQXAQDFKTDLRFQSHAVLALQEAAEAYLVGLFEDTNLCAIHAKRVTIMPKDIQLARRIRGERA

SEQ ID NO: 69946 - protein, 74 aa, Gossypium hirsutum
  Clone ID: LIB3829-018-Q6-K6-C5.pep
SKKKKKKKKKKKKKKKKKKKKKKKKKKKKKKKKKKKKKKKKKKKKKKKKKKKKKGACFKIIQILIPGQPRFYLF

SEQ ID NO: 69947 - protein, 63 aa, Gossypium hirsutum
  Clone ID: LIB3146-021-Q1-K1-H6.pep
GAPTRTFHEAAKAYLVGLFEDTNLCAIHAKRVTIIGKDIKLARKVMSALSLMARVKITLMAET

SEQ ID NO: 69948 - protein, 78 aa, Gossypium hirsutum
  unsure (1)..(78): unsure at all Xaa locations
  Clone ID: LIB3583-032-Q6-K7-F3.pep
RVRPASDVCLRLGPYQATARKSTGGKAPRKQLATKAARKSAPTTGGVYFFFRYRPXTVGGGGVXNYXNITVLCRGGVL

SEQ ID NO: 69949 - protein, 44 aa, Gossypium hirsutum
  Clone ID: LIB3148-017-Q1-K1-F8.pep
KQPKATTVWQSNFRLSKNTFKQTIPDMSYCPLTYQTPHFIITSH

SEQ ID NO: 69950 - protein, 53 aa, Gossypium hirsutum
  Clone ID: LIB3197-020-Q1-M1-E4.pep
YRPKGTAHRWTGGKAPRKQLATKAARKSAPTTGGVKKPHRYRPGTVAFREIRK

SEQ ID NO: 69951 - protein, 66 aa, Gossypium hirsutum
  Clone ID: GOSHI-09MAY01-C64_13.pep
RSVHRVRVCPPSFPISFLSFFICEVCEIMHVIGLGSFHAINGINPRVRLHVIFVRNACLLLLKDAS

SEQ ID NO: 69952 - protein, 118 aa, Gossypium hirsutum
  Clone ID: GOSHI-09MAY01-C64_9.pep
PTTLPVRIAATWAVRCPRRLEKSTEPYHLEEEEALEKVVEFFQSKYFKKDSVGAYHFPANSATAEIAFTTEGKEEAKIKVENANVVEMIKKWYLGGTRGVSATTISSLANTLSAELCK

SEQ ID NO: 69953 - protein, 230 aa, Gossypium hirsutum
  Clone ID: GOSHI-09MAY01-C64_4.pep
YGEQNIRRAVPLALGLLCISNPKVNVMDTLSRLSHDSDSEVAMAAVISLGLIGAGTNNARIAGMLRNLSSYYYKDASLLFCVRIAQGLVHLGKGLLTLNPYHSDRFLLSPTALAGLVTMLHACLDMKAMVLGKYHYVLYFIVLAMQPRMLMTVDENLKPLSVPVRVGQAVDVVGQAGRPKTITGFQTHSTPVLLAAGDRAELATEKYIPLSPILEGHVILKENPDYREDS

SEQ ID NO: 69954 - protein, 183 aa, Gossypium hirsutum
  Clone ID: GOSHI-09MAY01-C64_3.pep
MDFSQPPVENYANPKTCFFHVLFKAAALAFYILSALFFNSFVIIFVVTVLLSALDFWVVKNVSGRILVGLRWWNEINDLGESVWRFECLDQESLARMNKKDSWLFWWTLYLSAVAWIVLGIFSLIRFQADYLLVIGVCLTLNIANIVGFTKCRKDAKKQIQQFATQTIASRFSSTLQSAFSVV

SEQ ID NO: 69955 - protein, 209 aa, Gossypium hirsutum
  Clone ID: GOSHI-09MAY01-C64_2.pep
MTTEMVMVDEVPFPPQITTTKPLSLLGHGITDIEIHFLQIKFTAIGVYLEPEVVGHLQQWKGKPGNVLAEDDDFFEALINAPVEKFLRVVVIKEIKGSQYGVQLESAVRDRLAADDKYEEEEEEALEKVVEFFQSKYFKKDSVITYHFPANSATAEIAFTTEGKEEAKIKVENSNVVEMIKKWYLGGTRGVSATTISSLANTLSAELCK

SEQ ID NO: 69956 - protein, 326 aa, Gossypium hirsutum
  Clone ID: GOSHI-09MAY01-C64_1.pep
MSTASINGWCLTSSSSSTTTSSFSARRRPTLRPSVVASLNSSPSPPTLIQDRPVFAAPVPLLTPREEMGNKSYDEAIEALKKLLSEKGELKAEAAARVDQITAELNTTSADGKPSDSSVERLKEGFVYFKKEKYEKNPALYGELAKGQSPKYMIVACSDSRVCPSHVLDMQPGEAFVVRNVANMVPPYDQIKYAGIGSAIEYAVLHLKVQEIVVIGHSACGGIKGLMSFPFDGNNSTDFIEDWVKIGIPAKTKVLAEHGGEPLGVQCTHCEKEAVNVSLGNLLSYPFVRDGLVKKTLGIKGGYYDFVKGSFELWSLQFQLSSSLSV

SEQ ID NO: 69957 - protein, 44 aa, Gossypium hirsutum
  Clone ID: LIB3120-001-Q1-K1-D8.pep
LSYPFVRDGLVKKTLGIKGGYYDFVKGSFELWSLQFQLSSSLSV

SEQ ID NO: 69958 - protein, 148 aa, Gossypium hirsutum
  unsure (1)..(148): unsure at all Xaa locations
  Clone ID: LIB3120-004-Q1-K1-C8.pep
PRVRTACINGWCLTSCLFTGARSNFGGRRRPTLRPSVVASLNSSPSTPTLIQDRPVFAAPIPLLTPREEMGNKCYDEAIEALKKLLSEKGELKAEAAARVDQITAELNTASADGKPSDSSVERLKEGFVYFKKEKYXEKNSALYGELA

SEQ ID NO: 69959 - protein, 140 aa, Gossypium hirsutum
  Clone ID: LIB3120-053-P1-K1-H6.pep
RHCVRDPRVRGRVGGRVGGRVGGRVGASINGWCLTSSSSSTTTSSFSARRRPTLRPSVVASLNSSPSPPTLIQDRPVFAAPVPLLTPREEMGNKSYDEAIEALKILLSEKGELKAEAACRVDQITAEVNTTSADGKPSDS

SEQ ID NO: 69960 - protein, 120 aa, Gossypium hirsutum
  Clone ID: LIB3147-020-Q1-K1-H7.pep
RKGLLTLNPYHSDRFLLSPTALAGLVTMLHACLDMKAMVLGKYHYVLYFIVLAMQPRMLMTVDENLKPLSVPVRVGQAVDVVGQAGRPKTITGFQTHSTPVLLAAGDRAELATEKYISLS

SEQ ID NO: 69961 - protein, 120 aa, Gossypium hirsutum
  Clone ID: LIB3120-053-P1-K1-H8.pep
RTRGRTRGKSVIIPLFAIPISTSVSCSCATFYGTSTTTSCFAARQRPTLRPSCVSGLNCPSSAATLIQDRPAFAVPVPLLTPREEMGNKFYDEAIETFKKLLSEKGELKAASAARVDQIT

SEQ ID NO: 69962 - protein, 111 aa, Gossypium hirsutum
  unsure (1)..(111): unsure at all Xaa locations
  Clone ID: LIB3120-011-Q1-K1-E11.pep
MKGWRLTYFHYYNTTCYFCDRRLPTLLASIASNTIYYTCPATVIQNPPIFPCPVPLLNPREEMGNKSXNXSIEALKKLLTVEGELKAEAAARVDQITAELNTTSADGKPSD

SEQ ID NO: 69963 - protein, 145 aa, Gossypium hirsutum
  Clone ID: LIB3120-003-Q1-K1-H3.pep
VRIAATWAVRCPRRREKSTEPYHLEKGELKAEAAARVDQITAELNTASADGKPSDSSVERLKEGFVYFKKEKYEKNPALYGELAKGQSPKYMIVACSDSRVCPSHVLDMQPGEAFVVRNVANMVPPYDQIKYAGIGSAIEYAVLH

SEQ ID NO: 69964 - protein, 114 aa, Gossypium hirsutum
  Clone ID: LIB3585-017-P1-K1-E3.pep
MTTEMVMVDEVPLPAQITTTKPLSLLGHGITDIEIHFLQIKFTAIGVYLEPEVVGHLQQWKGKPENVLAEDDDFFEALINAPLEKFLRVVVIKEIKGSQYGVQLESAVRDRIGK

SEQ ID NO: 69965 - protein, 157 aa, Gossypium hirsutum
  unsure (1)..(157): unsure at all Xaa locations
  Clone ID: AI725530.1.pep
ITDMDIHFLQIKFTAIGVYLEPEVVXHLQQWKGKPGDVLSEYDDFFEALINAPVEKFLRVVVIKEIKGSQYGVQLESAVRDRLAADDXYYYEYEETLEKVVEFFQSKYFNKDAVITYNFPSNSSTAEIAFLTDGNDDTIIVFYNDILGNMMITCYWL

SEQ ID NO: 69966 - protein, 99 aa, Gossypium hirsutum
  Clone ID: LIB3120-013-Q1-K1-F7.pep
KACPSNVLFIFSDEAELDRNVANMVPPYDHIKYAGIGSAIEYAVLHLKAQEIVVIVHRAMGGNKGLMSLPFDGNNSTDFIQDWVKIGIPAKTKVLAEHG

SEQ ID NO: 69967 - protein, 49 aa, Gossypium hirsutum
  Clone ID: LIB3135-021-Q1-K1-E10.pep
PAPKLFLPLREYINRWVCMRILEEKLDDYYRKIRHYYMICLISYPIFHV

SEQ ID NO: 69968 - protein, 54 aa, Gossypium hirsutum
  Clone ID: LIB3145-054-Q1-K1-C10.pep
VRIAATWAVRCPRRREKSTEPYHLEETECLHQSSVQYGHSIFYPQIRILVSIAR

SEQ ID NO: 69969 - protein, 90 aa, Gossypium hirsutum
  unsure (1)..(90): unsure at all Xaa locations
  Clone ID: LIB3829-018-Q6-K6-B10.pep
ASGEFLRVVVIKEIKGSQYGVQLESAVRDRLAADDKYEEEEEEALEKVVEFFQSKYFKKDXVITYHFPANSATAEVYFESIRKTIHSFMF

SEQ ID NO: 69970 - protein, 31 aa, Gossypium hirsutum
  Clone ID: LIB3196-042-P1-M1-H5.pep
NPLREDNELWIFKSFWRIYRDLVKNIDFLFP

SEQ ID NO: 69971 - protein, 281 aa, Gossypium hirsutum
  unsure (1)..(281): unsure at all Xaa locations
  Clone ID: GOSHI-09MAY01-C14_2.pep
MGRSPCCEKAHTNKGAWTKEEDQRLIDYIRLRGEGCWRSLPKAAGLLRCGKSCRLRWINYLRPDLKRGNFSEAEDELIIKLHSLLGNKWSLIAARLPGRTDNEIKNYWNTHIKRKLISRGIDPQTHGPLNQPTNTNKSTELDFRNVPKASKSNFAPNPSRDFNFNEFQVKAKAESIEEGNSSSSGMTTDVXQQQHHHLEDKFAGYSQELDLELSIAISSSGKYYNSTGVSTANSAQSKPPLDKSNFQFLGLAMAAKAVCLCWQLGFGTNEICRNCQKYKWV

SEQ ID NO: 69972 - protein, 294 aa, Gossypium hirsutum
  Clone ID: GOSHI-09MAY01-C14_1.pep
MGRSPCCEKAHTNKGAWTKEEDQRLINYIRVHGEGCWRSLPKAAGLLRCGKSCRLRWINYLRPDLKRGNFTEEEDELIIKLHSLLGNKWSLIAGRLPGRTDNEIKNYWNTHIKRKLISRGIDPQTHRPLNQTANTNTVTAPTELGFRNSPTSVSKSSSLLNPSLDFNYNEFQFKSNTDSLEEPNCTASSGMTTDEEQQEQLHKQQQYGPSNGQDLNLELSIGIVSADSSRVSSANSAESKPKVDNNNFQFLEQAMVAKAVCLCWQLGFGTSEICRNCQNSNSNGFYSYCRPLDS

SEQ ID NO: 69973 - protein, 59 aa, Gossypium hirsutum
  Clone ID: GOSHI-09MAY01-C34_3.pep
MTGPILLEDYHLVEKLANFDRERIPERVVHARGASAKGFFEVTHDISQLTCADFLRAPG

SEQ ID NO: 69974 - protein, 492 aa, Gossypium hirsutum
  Clone ID: GOSHI-09MAY01-C34_1.pep
MDPYKFRPSSSFDSPFWTTNSGAPVWNNNSSLTVGARGPILLEDYHLVEKLANFDRERIPERVVHARGASAKGFFEVTHDISQLTCADFLRAPGVQTPLIVRFSTVIHERGSPETLRDPRGFAVKFYTREGNFDLVGNNFPVFFIRDGMKFPDMVHALKPNPKSHIQENWRILDFFSHHPESLHMFTFLFDDIGVPQDYRHMDGSGVHTYTLINKAGKSHYVKFHWKPTCGVKSLLEDEAIRVGGANHSHATQDLYDSIAAGNYPEWKLFIQIMDPLHEDRFDFDPLDVTKTWPEDIFPLQPMGRMVLNKNIDFFFAENEQLACCPSLIVPGIYYSDDKLLQTRIFSYSDTQRHRLGPNYLQLPANAPKCAHHNNHHEGFMNFMHRDEEVNYFPSRYDPVRHAEKHPIPSTVLSGKREKCIIGKENNFKQPGERYRSFSADRQERFINRWIDALSDPRVTHEIRSIWISYWSQADKSLGQKIASRLNVRPSI

SEQ ID NO: 69975 - protein, 88 aa, Gossypium hirsutum
  unsure (1)..(88): unsure at all Xaa locations
  Clone ID: LIB3165-037-P1-K1-A2.pep
PVTERAGATRCDNRITMKGFMFFYAXEMXEVELAFSFEVPDPRSPRPEKXPXIPSTVYQWQKEEKCIIGKGEPTLSXPGEPIXRSFSS

SEQ ID NO: 69976 - protein, 59 aa, Gossypium hirsutum
  Clone ID: LIB3120-054-P1-K1-B9.pep
MDPYKVRASSSFDSPFWTTNSGAPVWNNNSSLTVGARGPILLEDYHLVEKLANFDRKRI

SEQ ID NO: 69977 - protein, 140 aa, Gossypium hirsutum
  Clone ID: GOSHI-09MAY01-C24_2.pep
VDQMKQEPFNEKEMARERKEERQEDAELRKQEARHHNATAGHAGGGGIGGTGYTTAGYNRGDTGGYGGTGGHDNRGYPTAGSGYDTGRQDDLSSMGFGGDTGGAYGTTGNQDFPSAAPNNAGTRRSTRGGTQDDPYYRSY

SEQ ID NO: 69978 - protein, 165 aa, Gossypium hirsutum
  Clone ID: GOSHI-09MAY01-C24_1.pep
MQSMKDAAASAKAGMEKAKASMQEKVDQMKTRDPNEKEMARERKEERQEDAELRKQEARHHNATAGHAGGGGIGGTGYTTAGYNIGDTGGYGGTGGHDNRGYPTAGSGYDTGRQDDLSSMGFGGDTEGAYGTTGNQDFPNAASNNAGTRRNTRGGTQDDPYYRSY

SEQ ID NO: 69979 - protein, 183 aa, Gossypium hirsutum
  unsure (1)..(183): unsure at all Xaa locations
  Clone ID: GOSHI-09MAY01-C994_2.pep
MAGSPDHLFNLRNNFYLGSYQAAINNSDLPNLSPDDAVERDCLVYHSYIALGSYQLVINEIDSSAATPLQAVKLLALYLSNPHDKESTISSLKEWLADPAIGNNPILRLIAGIIFTHEEDYNEALKHTNAGGTMELHALNVQIFIKMHPSDYAERQLRXMQQIDEDHTLTQLANAWLKPAVGG

SEQ ID NO: 69980 - protein, 315 aa, Gossypium hirsutum
  Clone ID: GOSHI-09MAY01-C994_1.pep
MEKSICNCNCKLFRDLCVYRQSQMAAAAAPDHLFHLRNNFYLGSFQAAINNSDLPNLSPDDAVERDCLVYRSYIALGSYQLVINEIDSAATTPLQAVKLLALYLSNPHDKESTIASLKEWLADPAIGSNAILRLIAGIVFMHEEDYIEALKHTNAGGTMELHALNVQIFIKTHRSDYAERQLRVMQQIDEDHTLTQLANAWLNLAVGGSKIQEAYLIFQDFSEKYPMTGLILNGKAVCCMHMGNFDKAETLLLEALNKDAKDPETLANLVVCGLHLGKSSSRYLSQLKLTHPEHILVKRASSAEDSFERAVQSVA

SEQ ID NO: 69981 - protein, 152 aa, Gossypium hirsutum
  unsure (1)..(152): unsure at all Xaa locations
  Clone ID: LIB3543-012-Q1-K6-E1.pep
MAVAAAPDHLFHLRNNFYLGSFQAAINNSDLPNLSPDDAVERDCLVYRSYIALGSYQLVINEIDSAAATPLQAVKLLALYLSNPHDKESTIASLKEWLADPAIGSNALLRLIAGIVFMHEEDYIEALKHTNAGGTMXLHALNVQIFIKMHRS

SEQ ID NO: 69982 - protein, 84 aa, Gossypium hirsutum
  Clone ID: LIB3166-040-P1-K1-A9.pep
RSQDRVEGVKKEKSICNCNCFEISVCIDSLKWQLLQHQITCSICGTISTWVPFMLPSTTSFFPSSSSTTPFSSSVFFFRFYIIS

SEQ ID NO: 69983 - protein, 279 aa, Gossypium hirsutum
  Clone ID: GOSHI-09MAY01-C944_2.pep
SHPKAQKKKKKRKEEKRSLPRNPPLLQMATTAPDNLSRDQYVYLAKLSEQAERYEEMVQFMQKLVLGSTPAAELTVEERNLLSVAYKNVIGSLRAAWRIVSSIEQKEEGRKNEEHVVLVKEYKSKIESELSEVCASILTLLESNLIPSATASESKVFYLKMKGDYHRYLPEFKVGDERKAAAEDTMLSYKAAQDIALADLAPTHPIRLGLALNFSVFYYEILNQSDKACSMAKQAFEEPIAELDTLGEESYKDSTLIMQLLRDNLTLWTSDVQDQLDEP

SEQ ID NO: 69984 - protein, 304 aa, Gossypium hirsutum
  Clone ID: GOSHI-09MAY01-C944_1.pep
RTRGDVITSLPSTSLSLKKTLFNLGAHLTRPTTRKKNIPLFLTFGSSPISAKMATMVPDNLSRDQYVYLAKLAEQAERYEEMVQFMQKLVLGSTPASELTVEERNLLSVAYKNVIGSLRAAWRIVSSIEQKEEGRKNEEHVVLVKEYRSKVESELSDVCASILTLLDSNLIPSAAASESKVFYLKMKGDYHRYLAEFKVGDERKAAAEDTMLSYKAAQDIALTDLAPTHPIRLGLALNYSVFYYEILNQSDKACSMAKQAFEEAIAELDTLGEESYKDSTLIMQLLRDNLTLWTSDVQDQLHEP

SEQ ID NO: 69985 - protein, 156 aa, Gossypium hirsutum
  Clone ID: LIB3584-061-P1-K1-A9.pep
NWDADQSLLHGGAAVNGNLSRDQYVYLAKLSEQAERYEEMLQFMQKLVLGSTPAAELTVEERNLLSVAYKNVIGSLRAAWRIVSSIEQKEEGRKNEEHVVLVKEYRSKIESELSEVCASILTLLESNLILSATASESKVFYLKMKGDYHRYLAEFK

SEQ ID NO: 69986 - protein, 71 aa, Gossypium hirsutum
  Clone ID: uC-gsronu33b023e04b1.pep
LRVPRVRGGGYEILNQADKACSMAKQAFEEAIAELDTLGEESYKDSTLIMQLLRDNLTLWTSDVQDQLDEP

SEQ ID NO: 69987 - protein, 120 aa, Gossypium hirsutum
  Clone ID: LIB3585-003-P1-K1-F4.pep
GPPRKRKPPRKKNFPLFLPFGSSPISAKMATMVPDNLSRDQYVYLAKLAEQAERYEEMVQFMQKLVLGSTPASELTVEERNLLSVAYKNVIGSLRAAWRIVSSIEQKEEGRKNEEHGVLV

SEQ ID NO: 69988 - protein, 274 aa, Gossypium hirsutum
  unsure (1)..(274): unsure at all Xaa locations
  Clone ID: GOSHI-09MAY01-C904_1.pep
KEKTEELLKEKDEMLKMKDEEIENKGKEQEKLQMELKKLQKMKEFKPNMKFAISMNKGGGFEKKRPSPPYILWCKDQWKEIKKENPEADFKEVSNILGAKWKTITAEEKKPYEEVYRAEKEVYLQAIAKEKRETEAMKLFEDEHKQKTAMELLEQYLQFKEEAEKETKKKTKKERDPLKPKQPMSAFXLFSNERRAALLADTRSMNVLEAAKIAGEEWKNMTAEQKKPYEEIAKKNKEKYMEEMEVYKQKMEEEALNVKKHEEEMLKLLIQEAL

SEQ ID NO: 69989 - protein, 226 aa, Gossypium hirsutum
  Clone ID: GOSHI-09MAY01-C894_1.pep
MATVENRQVVLERYIKGVPKVTDMAMKIGKKELKAPKGSGAFLVKNLYLSCDPYMRGRMRDFHGSYIPTFVPSQPIEGFGVGKVLDSDNPDFKPGDFISGITGWEEYSLIHNTSQLRKIQPDDAIPLSYHLGLLGMPGFTAYVGFYEICSPKKGEYVFVSAASGAVGQLVGQLAKLHGCYAVGSAGSRQKVDLLKNKLGFDEAFNYKEEADLDAALKRYFPKASIF

SEQ ID NO: 69990 - protein, 139 aa, Gossypium hirsutum
  Clone ID: GOSHI-09MAY01-C844_1.pep
MEILSQRPSSFSTLNPNAPLFVPLAYRTVEDFSDEWWALVQSSPCFRDYWLQERFHDPQNDDADLLFPDDLDAVFDDYDDFFVDPTCEGKEEDTQKELVPVGAFKWRKGRVVSESPRFLEKAPKIVNVKVSPRNIHQPR

SEQ ID NO: 69991 - protein, 61 aa, Gossypium hirsutum
  Clone ID: LIB3145-053-Q1-K1-D5.pep
GQRKSRRNRQRRHQDRRGKEDRRRRFGDRGNVLSSRSLAIPCSIGCFKVRTPLFAWAAWHA

SEQ ID NO: 69992 - protein, 67 aa, Gossypium hirsutum
  Clone ID: LIB3148-039-Q1-K1-C3.pep
SKGTAMGGDVNTNERTTSTIYLDMYQLMTLLTITTTLTLTLPSGGRKKILKKNWYPLEHSNGGRGEL

SEQ ID NO: 69993 - protein, 125 aa, Gossypium hirsutum
  Clone ID: GOSHI-09MAY01-C874_1.pep
MQASQQHRSSVMASRLFPRVKEEVEPCSFPQFPAIDRSFCYTDSSHGSHFSVKNSHEPYCTLESSSARGSYTVYNSSSNGSPMSQQESQSNMSDLHHSPDNTYSSPISGSCITDDVSDLKVAERA

SEQ ID NO: 69994 - protein, 181 aa, Gossypium hirsutum
  Clone ID: GOSHI-09MAY01-C864_3.pep
YHEPDPPIHNLRAKDLPKYGESPSTTAPSSICPHAWRFQLLPLHISLPALLASNSPGHLSFLDQLHNLPSFDRNFAFGSSRVSNKSGASTIGDSASRVPKFQSSNGLGKSLSGCSICLCHCRRQGSEGAKIPIQAHDLNINYYFIPFGLFFKGGMLVQNNCWVILEPQKFMGLISWLKALK

SEQ ID NO: 69995 - protein, 137 aa, Gossypium hirsutum
  Clone ID: GOSHI-09MAY01-C864_2.pep
DISCAIVLAIIFDRSYRERKNTGCAFALFRLFGFFPTISTVRTLFKENLTGKVVLITGASSGIGEHLAYEYARRGARLALVARRNQRLQEVADVCEIIGSPETVHILGDVSNNDDCKRLIDATVNHFGQCKKHCTTS

SEQ ID NO: 69996 - protein, 343 aa, Gossypium hirsutum
  unsure (1)..(343): unsure at all Xaa locations
  Clone ID: GOSHI-09MAY01-C864_1.pep
KNLDLADKLMNVIVITISLLALFFLHQYRFLNSLISTARTLFKENXRKVVLITGASSGIGEHLAYEYARRGARLALVARRKRRLQEVADVCEIIGSPESVYILGDVSNIDDCKRFIDATVNHFGQLDHLVANAGVAPVCLFEDYEDVTXLGTKYXTLSQDINFWGSVYSSYFAQQHLKKSKGKIIVISSCAGWVFAPRTAFYNASKAALISFYETLRIEFGTQIGVTIVTPGFIDTEMTEGKFLSKEGRLEVDREMRDVQVSLMPVESVEKCAKAIVESARRGDRCLTVPSWMETTILWKVFCPEIMDGWNRFMILGPGSSYRDSPSKKILHVVNEIKQLLLP

SEQ ID NO: 69997 - protein, 400 aa, Gossypium hirsutum
  Clone ID: GOSHI-09MAY01-C804_3.pep
MQAITRRLGHQSLRPTASISSIKSICALSDHYYGGDHPRYGSTLASHKGMGHLVRKGTGGRSSVSGIIATVFGATGFLGRYLVQQLAKMGSQVLVPFRGSEDNPRHLKLMGDLGQIVPMKYDPRDENSIKAVMAKANVVINLIGREYETRNFSFEEVNHFMAEQLAVIAKEHGGIMRFIQVSCLGSSLTSPSRFLRAKAAGEEAVLKELPEATVMKPAVMIGTEDRIMNRWAHFAKKYSFLPLIGGGSTKIQPVYVVDVASAIVAALKDDGSSMGNVYELGGPEIYTVHELAELMYETVREWPRYVNVPLPVAKAIAMPREVLLKKVPFPLPNPDIFNLDQIHAFATDTVVSENALTFMDLGIVPHKLKGYPVEYLIQYRKGGPQFGSTVSEKVNPDSYP

SEQ ID NO: 69998 - protein, 194 aa, Gossypium hirsutum
  unsure (1)..(194): unsure at all Xaa locations
  Clone ID: GOSHI-09MAY01-C804_2.pep
ELKPGLSYYAKDPQAAANSLTSLLDKAESVVPLDLRSKTVVRVGATDGLRALGGEAFDKIXQSVRELLKSRSTLKSEANRVKILDGSEEGSYEWVTINYLLGNLGRTYQDTVGIVDLGGRSVQMAYAISKNAASRAPSLPAGQDNYVNEMYLKGSKYYLYVHSYLHYGLLAARAEILKATEDSGNPCILEGFDG

SEQ ID NO: 69999 - protein, 450 aa, Gossypium hirsutum
  unsure (1)..(450): unsure at all Xaa locations
  Clone ID: GOSHI-09MAY01-C804_1.pep
PRVRSIPIVLITFFLYVMPGKSASDAAVLEEIEINSRKVGANSRGNRNYAVIFDAGSSGSRVHVYCFDQNLDLVPIGSDLELFEQLKPGLSYYAKDPQAAANSLTSLLDKAESVVPLDLRSKTPVRVGATAGLRALGGEASDKILQSVRELLKSRSTLKSEANGVKILDGSQEGSYEWVTINYLLGNLGRTYHDTVGIVDLGGGSVQMAYAISENAASRAPSVPAGQDNYVNEMYLKGSKYYLYVHSYLHYGLLAARAEILKATEDSGNPCILEGFDGTYKYGGEEYKASAPSSGSSMEECRRVTLKALKVNDSCTHMKCTFGGIWNGGGGDGQKNLFVASFFFDRAAEAGFIKASDPVAKVQPHSFADAAKRACQTKYADAKAIYKDLGESNLAYICMDLVYQYTLLVDGFGLDPYQDVTXVKKVKYRNSLVEAAWPLGSAIEAVSSMK

SEQ ID NO: 70000 - protein, 187 aa, Gossypium hirsutum
  unsure (1)..(187): unsure at all Xaa locations
  Clone ID: LIB3543-013-Q1-K6-B6.pep
WLPTRHGHLVRRAPMADLPGIIATVFGATGFLGCYLVQXLAKMGSQVLVPFRGSEDNPLHLKLMGDLRQIVPMKYDPRDENSIKAVIAKANVVIKLIGREYETRNFSFEEVNHFMAEQLAVVKIVKCTVNDIPVDIPFNQTAGLSALCFLEKVDQLIGKDHLFKRSIIFDQGLVLLREPDPWCTPWL

SEQ ID NO: 70001 - protein, 91 aa, Gossypium hirsutum
  unsure (1)..(91): unsure at all Xaa locations
  Clone ID: LIB3829-021-Q6-K6-G11.pep
GGEGWRRQDILNSIPXRGGXXQFGFYQSVXKKLXPXILXXLXXYLXISFSLVCXFSXFDPFLLGGREXXASXMLXKSLIXLVFVXCXXIXS

SEQ ID NO: 70002 - protein, 145 aa, Gossypium hirsutum
  unsure (1)..(145): unsure at all Xaa locations
  Clone ID: uC-gsronu33B106h02b2.pep
ASDDSGNPCMLEGFDGTYTYGGNQYKASAPSSGASMEECRRVTHKALKINDTCMHMKCTFGGIWNGGGGDGQKNLFIASFFFDRAAEAGFIKAADPVATVQPHSFAEAAKRACGTKYTDIKATYPAVDVGNQAYLCXDLVYQYTL

SEQ ID NO: 70003 - protein, 53 aa, Gossypium hirsutum
  unsure (1)..(53): unsure at all Xaa locations
  Clone ID: LIB3493-001-P1-M1-F5.pep
YWHLLIEYTVICRTTQKLDFLVRNNRKRKQFDLIFFIGNLQFSPPDFYNFXES

SEQ ID NO: 70004 - protein, 250 aa, Gossypium hirsutum
  Clone ID: GOSHI-09MAY01-C594_1.pep
SVFQERSIFSSTGSLFEACETLTSQHRAYSEFLLDIAWLLREPTLENFKETMASSQILRFNRLLSFLIQNESTFFSWKILQNLKIVVEMIRFDGTNDSDVRLLQKYMNHARDILSNELQKGEIPVFRSEYIEQERNQVSQSSFDNNELSIVPNISQVLEERTSKLQTIMAAPTPSETVPLLNKEIIMNVNLSKDYSRKSCGFATMRLRSHAAVLIIAATAICLGMCAVIFHPNRVGEFAVTMRRCLFDRV

SEQ ID NO: 70005 - protein, 154 aa, Gossypium hirsutum
  unsure (1)..(154): unsure at all Xaa locations
  Clone ID: GOSHI-09MAY01-C494_1.pep
MDCKKFIQLVEEKKKRALEKKEAPLKWEQKLEAAAKARAVAEAKERSSKKAKHKRCVFDTDSESDSTDGEIKRRRRIHKKHKKNAHCDSGDHERKKDKKSKKKSKRHSPGSSDDSSNYYXSSSEEERRKKRSCLRWKHHDSKSDSESLVPQMMM

SEQ ID NO: 70006 - protein, 181 aa, Gossypium hirsutum
  unsure (1)..(181): unsure at all Xaa locations
  Clone ID: GOSHI-09MAY01-C474_2.pep
LSIHNCPGFGDASLFASGKLCPQLQHVELCGLHGITDAGVLLLLESGEAGLLKVNLSGCVNLSDKVVQTISNLHGWTLELLNLDGCKISDASLVAIAKNCQLLTDLDISKCTITDSGIAALAYFNPINLQILSVSGCSXGFRQKLAFTWENWVRPSWXKPTAMQSNQQPCRGATYGAAMEV

SEQ ID NO: 70007 - protein, 426 aa, Gossypium hirsutum
  Clone ID: GOSHI-09MAY01-C474_1.pep
GYLSRSLGGEKATDIRLASIAVGTASRGGLGKLFIRGSKSRHGVTTVGLRAISRGCPSLRVLSLWNLSSVGDEGLCEIANGCHQLEKLDLCHCPSITDKSLLAVAKGCPNLTDLTIEGCANIGNEGLQAIARSCPNLKSVSIKDCPLVGDQGVASLLSSASYSLTKVKLQALNITDVSLAVIGHYGKAVTDLSLTSLPNVSEKGFWVMGNGHGLQKLKSFTVTSCRGATDSGLEAVGKGCPNLKQLCLSKCPFLSDKGLSSLAKAAGSLECLQLEECHRISQFGFFCSLINCGAKLKVISFANCLGIKDLNSGLPPLSPCESLRSLSIHNCPGFGDASLFALGKLCPQLQHVELCGLHGITDAGVLLLLESCEAGLLKVNLSGCVNLSDKVVQTISNLHGWTLELLNLDGCKISDASLVPCKWSVY

SEQ ID NO: 70008 - protein, 243 aa, Gossypium hirsutum
  unsure (1)..(243): unsure at all Xaa locations
  Clone ID: GOSHI-09MAY01-C464_1.pep
RSLAEQAFRQQAEVILADGQLTKARMEQLNELQKNVGLPGPYAQKIIKSITTTKMAAAIEAAIGQGRLNIKQIRELKESGVDLDNMISESLRENLFKKTVDEIFSSGTGEFDEEEVYDKIPADLKINPQKAKGVVHDLARTRLSNSLIQAVALLXRRRNRQGAVSSLNDLLACDKAVPSEPLSWEVPEELADLFGVYAQSNPVPEKLSRLQYLLNISDSVAAAAKEMGHGSVSVGAEEEKFVF

SEQ ID NO: 70009 - protein, 264 aa, Gossypium hirsutum
  Clone ID: GOSHI-09MAY01-C414_4.pep
MSSDSGSRSRSRSRSPMGRKIRSDRFSYRNAPYRRESRRGFSQSNLCKNCKRPGHYARECPNVAICHNCNLPGHIASECTTKSLCWNCREPGHTANNCPNEGICHTCGKAGHRARECTAPPMPPGDVRLCNNCYKSGHIAADCTNDKACNNCRRPGHLARECTNDPICNLCNVAGHVARHCPKGNMIGERGSFGGGGGGSGSRGGGYRDHHHRDVVCRNCHQFGHISRDCMGPLMICHNCGGRGHMAYECPSGRYLDRYPPRRY

SEQ ID NO: 70010 - protein, 95 aa, Gossypium hirsutum
  Clone ID: GOSHI-09MAY01-C414_2.pep
AISNLSLFPPKHKHQIPRVKHTEQSTSNPSYINYKPQNSAPTTEYLMTPPTLQPNSSLKVQPSLANSHHASIHQARKLMNRHTNAIHSHPSFLDR

SEQ ID NO: 70011 - protein, 209 aa, Gossypium hirsutum
  unsure (1)..(209): unsure at all Xaa locations
  Clone ID: GOSHI-09MAY01-C414_1.pep
MHPRRNHPRGMALMTRSTLFTVELVGLWGGTLEAIVTLTHAASASPEGPMGEPLSFEVFVAQRSHVIHRAISQAVGDLRLMNPSMMHPVALVENHPSCPRDGNGEILLPNGQSWMSQLLLLCYSXKILSEASSLSKPREQFDHQKLFGFRLRSPPLAYLLSSLLQSRSHFILPNNEGSDGXDLDTELGRLTYSDEEXYDYYDQLSPFSS

SEQ ID NO: 70012 - protein, 150 aa, Gossypium hirsutum
  Clone ID: LIB3583-023-P1-K1-F1.pep
MCNLRVLLFVFVLLTVHACHARNVPGNNGLNGSKKEQIMEANAPKAESPMGNGIDDKKHFVYGGVGGFAGVGGYAGVAGGLPLVGSGSRGGGYRDHHHRDVVCRNCHQFGHMSRDCMGPLMICHNCGGRGHMAYECPSGRYLDRYPPRRY

SEQ ID NO: 70013 - protein, 121 aa, Gossypium hirsutum
  Clone ID: LIB3165-036-P1-K1-A1.pep
KRFIRKFPPDVVLYVDRLDAHDRDHTDFLLLKSLTDSLGSSIWQNAFVTLTHAASASPEGPMGEPLSFEVFVAQRSHVIHRAISQAVGDLRLMNPSMMHPVALVENHPSCPRDGNGENLLS

SEQ ID NO: 70014 - protein, 81 aa, Gossypium hirsutum
  Clone ID: LIB3196-027-P1-M1-G8.pep
MEANAPKAESPKGNGIDDKKHFVYGGVGGFAGVGSYAGVAGGLPLVGGLGGIGKFGGIGGAAGIGGYKSIGGLGGLGGGIG

SEQ ID NO: 70015 - protein, 135 aa, Gossypium hirsutum
  Clone ID: GOSHI-09MAY01-C404_1.pep
MASTFLALPKTFTSNKPTFPSLSTHKLLGTRRNSLRINAVATKWEPTKVVPQADRVLIRLQELPEKSAGGVLLPKSAVKFERYLMGEIVSVGAEVGNVETGKKVLFSDINAYEVDLGTDTRHVFCKESDLLAEVD

SEQ ID NO: 70016 - protein, 52 aa, Gossypium hirsutum
  Clone ID: LIB3166-007-P1-K1-H10.pep
FQLQLVSVGAEVGKVELGKKVLFSDINAYEVDLGIDTRHVFCKEFDLLIEVD

SEQ ID NO: 70017 - protein, 95 aa, Gossypium hirsutum
  unsure (1)..(95): unsure at all Xaa locations
  Clone ID: GOSHI-09MAY01-C434_4.pep
AHASAHASADAWALIISSRATNMKCLTPVSALEXECGSLAPDLYAKXFGVDALVNLSAEKQADGNLSGYIWIRCMTQGLALSLGDKITLKQIGGG

SEQ ID NO: 70018 - protein, 259 aa, Gossypium hirsutum
  unsure (1)..(259): unsure at all Xaa locations
  Clone ID: GOSHI-09MAY01-C434_3.pep
YDVHHDLYHPCGESVQGADHSHNLNGILQLTELSDPVYAEAYVTVHYYDIRLDDTDINQTNETLHNLRLDLSTMCDLXKLVERTHNYTVAPASSELINANINVSSTETGVIFGNIVYETSHVLERTVVVLNDIHLDILDYISPAVCSDTAFRTMWAEFEWENKVAVNTVIQDEKEFLNHIIKSINMKCLTAPSALDGECGFLAANLYAKSVFGEDALVNLSIEKQADGKLSGYIRIRSKTQGIALSLGDKITLNQKGGS

SEQ ID NO: 70019 - protein, 576 aa, Gossypium hirsutum
  Clone ID: GOSHI-09MAY01-C434_1.pep
EYRQMLIQAIHSCAIKFPGGASTVVHLLMDFLGDSNVASAIDVVVFVREIIETNPKLRVSIITRLLDTFYQIRAARVCSCALWIIGEYCLSLSEVESGMATIKQCLGELPFYSVSEEGEATDASKKTPQANSITVSSRRPAVLADGTYATQSAASETAFSAPTVVQGSLASGNLRSLLLTGDFFLGAVVACTLTKLVLRLQEVQPSKVEVNKATTQALLIFVSMLQLGQSPVLPHPIDNDSNDRIVLCMRLLCDTGDGIRKIWLQSCRQSFVKMLSEKQLRETEELKAKAQVSHAQPDDLIDFYHLKSRKGMSQLELEDEVQDDLKRATGEFVKDPDDANKLNRILQLTGFSDPVYAEAYVTVHHYDIVLDITVINRTKETLQNLCLELATMGDLKLVERPQNYTLAPESSKQIKANIKVSSTETGVIFGNIVYETSNVLERTVVVLNDIHIDIMDYISPAVCTDAAFRTMWAEFEWENKVAVNTVIQDEKEFLNHIIKSTNMKCLTPVSALDDECGFLAANLYAKSVFGEDALVNLSVEKQADGKLSGYIRIRSKTQGIALSLGDKITLKQKGGS

SEQ ID NO: 70020 - protein, 138 aa, Gossypium hirsutum
  unsure (1)..(138): unsure at all Xaa locations
  Clone ID: AI054750.1.pep
IFFSMLQLGQSPVLPHPIDNDSNDRIVLCIRLLCDTGDGIRKIWLQSCRQSFVKMLSEKQXRETEXLKVKGFRFSHAQPVCTLLYFYHLKSRKXMSHCDWRMYVQDDLKLHGRVCHDNDDANKLTAFFTYWIIDPVYA

SEQ ID NO: 70021 - protein, 132 aa, Gossypium hirsutum
  Clone ID: LIB3048-042-Q1-L1-A9.pep
GPPGLKNIRPRDLKAKAQVFNGQRVDLIDFYHLKSQRGLSHLELKDEVQNDLKRATGKFVKDPDDANKLNRILKLTGFSDPVYAEAYVTVHHYDNVLDITVINRTRETLQNLCLELATMGDLKLVERPQNYT

SEQ ID NO: 70022 - protein, 101 aa, Gossypium hirsutum
  unsure (1)..(101): unsure at all Xaa locations
  Clone ID: LIB3585-044-P1-K1-B7.pep
HASGGIATIKQCLGELPGXGVSEEGEATDASKKTPQANSITVSSRRPAVLADGTYATQSAASETAFSAPTVVQGSLVSGNIRSLFLTGDYILGGRTRMRIG

SEQ ID NO: 70023 - protein, 38 aa, Gossypium hirsutum
  Clone ID: LIB3048-010-Q1-L1-B1.pep
ALAHVSHAQAYGLIDFYHLKSRKGMSQLELEDEVQDYL

SEQ ID NO: 70024 - protein, 79 aa, Gossypium hirsutum
  Clone ID: GOSHI-09MAY01-C424_30.pep
LVANGTGKTNYTGLRSKNNLHKAHNGWLLPLRMLVGGIAAANKNDIDQHAVDTVCALNPIELVLYRCIELVEENLKHLA

SEQ ID NO: 70025 - protein, 89 aa, Gossypium hirsutum
  Clone ID: GOSHI-09MAY01-C424_24.pep
MLEKSVEGIASDPKVHTFEEVANHNKTKDCWLIISGKVYDVTPFMDDHPGGDEVLLSATGYYHCLAAVFLFLAIVLVPGDIHSGFKHGD

SEQ ID NO: 70026 - protein, 96 aa, Gossypium hirsutum
  Clone ID: GOSHI-09MAY01-C424_23.pep
IYQAAVLAMDDTVLDVDQVENLIKFCPTKEEMELLKNYTGDKESLEKREQVSEFKRSLNTVNSTSNEAKKLASQYQKEADKCNSGMEHVRRSKGES

SEQ ID NO: 70027 - protein, 78 aa, Gossypium hirsutum
  unsure (1)..(78): unsure at all Xaa locations
  Clone ID: GOSHI-09MAY01-C424_20.pep
YLNSTAHPGIDLTVTVLTTGFWPSYKSVRLISLXGVKCVEVFKGFYETKTKHRKLTWIYSQRKNQLHFAVQEQFVGGT

SEQ ID NO: 70028 - protein, 105 aa, Gossypium hirsutum
  Clone ID: GOSHI-09MAY01-C424_19.pep
VYDVTPFMDDHPGGDEVLLSATGKDATNDFEDVGHSDSAREMMEKYYIGEIDPKTVPAKRTYIPPQQTPYNPDKTPEFVIKILQFLVPLLILGLAIAVRHYTKKE

SEQ ID NO: 70029 - protein, 115 aa, Gossypium hirsutum
  Clone ID: GOSHI-09MAY01-C424_17.pep
FDRFYCQSTLFWSTSILELVESVLRPDTGGPPILPDNSDAVLSALNLYRFVLMTEAAGKTNYTGLRSKNNLQKAYNEWLLPLRMLVGGIAAANKNDIDQHAVDTVCALNPIEFGF

SEQ ID NO: 70030 - protein, 291 aa, Gossypium hirsutum
  unsure (1)..(291): unsure at all Xaa locations
  Clone ID: GOSHI-09MAY01-C424_15.pep
FYTFQVYQEVHXKIRDAVIALIDKEREGEQIDRALLKNVLGIFVEIGMGHMDRYEDDFEEAMLQDTGAYYSRKASSWIEEDSCPDYMLKSEECLKTRSARRPHYLHSSSEXKLSEKVQHELLVVYANXLLEKEHSGCRALLRDDKVEDLSRMYRLYCKILRGLDPVANIFKQHITAEGTTLVQQVEDAASNQASSSSGVQEQVLIRKIIELHDKYMAYVSDCFQNHTLFHKALKEAFEVFCNKTVTGSSSAELLATFCDNILKKGGSEKLSDEAIEETLEKVVKLLAYISD

SEQ ID NO: 70031 - protein, 125 aa, Gossypium hirsutum
  Clone ID: GOSHI-09MAY01-C424_14.pep
MDDTVLDVDQVENLIKFCPTKEEMELLKSYTGDKESLEKCEQVSEFKRSLNTVNSACNEAKKLASQYQKEADKCNSGMETCEEVREKAEEALSAQMKLTAMWEIRARQKGWREKVAKSNAFPYFI

SEQ ID NO: 70032 - protein, 168 aa, Gossypium hirsutum
  unsure (1)..(168): unsure at all Xaa locations
  Clone ID: GOSHI-09MAY01-C424_12.pep
MPSMENEGSEVSRAEEIKNQANEAFKAHRYGQAIDLYTQAIELNSQNAVYWANRSXCSHTKLEEYGSAIQDATKAIEVDPKYSKGYYRRGAAYLAMGKFKEALKDFQQVKRICPNDPDATKKLKECEKAVMKLKFEEAISVPESERRSVADSIDYRTIKVEPQYLGAK

SEQ ID NO: 70033 - protein, 85 aa, Gossypium hirsutum
  Clone ID: GOSHI-09MAY01-C424_11.pep
DTLILFLHIKYLKITPEFGFIAHTVSTACYHPYSLLQCLPQAFVEVGASHYVPPANCSWTAKCSWFFLFHLVHQSKHKRAIATQK

SEQ ID NO: 70034 - protein, 92 aa, Gossypium hirsutum
  Clone ID: GOSHI-09MAY01-C424_10.pep
NISNVHKIVKARKRKHVTGISNALSFCCTHGRSAHLAIDLYTQAIELNSQNVVYWANRSLAHTKLEEYGSAIQDATKAIEVDPKYSKVVDKH

SEQ ID NO: 70035 - protein, 172 aa, Gossypium hirsutum
  Clone ID: GOSHI-09MAY01-C424_9.pep
MDDTVLDVDQVENLIKFCPTKEEMELLKSYTGDKESLEKCEQVSEFKRSLNTVNSACNEAMLLASQYQKEADKCNSGMETCEEVREKAEEALSAQMKLTAMWEIRSRQKGWRDKVAKSNAQTQGKTNYTRLRSKNNLQKAHNGWLLPLQMHVGGIAAANKNDIDQHAVDTVL

SEQ ID NO: 70036 - protein, 77 aa, Gossypium hirsutum
  Clone ID: GOSHI-09MAY01-C424_8.pep
AEKATGKRREAAGITLQKAKKLASQYQKEADKCNSSMDTCEEVREKAQEALSAQMKLTAMGRNKSSSESMYRKGRQI

SEQ ID NO: 70037 - protein, 430 aa, Gossypium hirsutum
  unsure (1)..(430): unsure at all Xaa locations
  Clone ID: GOSHI-09MAY01-C424_7.pep
LKSEECLRKERERVSHYLHSSSETKLLEKVQHELLVTYANRLLEKEHSGCRALLRDDKVEDLSRMYRLYCKIPRGLEPVTNVFKQHVTAEGTALVQQAEDAASNAPGVQEQVLIRKIIKLHDKYMAYVTDCFQNHTLFHKALKEAFEVFCNKTVTGSSSAELLATFCDNILKKGGSEKLSDEAIEETLEKVVKLLAYISDKDLFAEFYRKKLARRLLFDRSANDDHERSISDQXLKQQCGGQFTSKMEGMVTDLTLARENQTNFEEYLSNNPNVNPGIDLTVTVLTTGFWPSYKSFDLNLPAEMVKCVEVFRDFYQTKTKHRKLTWIYSLGTCNLIGKFEPKTMELIVTTYQASALLLFNSSDRLSYSEIMTQLNLTDDDVVRLLAFRCHVLKYKILNKEPSTKTISSTDQFEFNSKFTDKMRRIKFGEY

SEQ ID NO: 70038 - protein, 155 aa, Gossypium hirsutum
  Clone ID: GOSHI-09MAY01-C424_6.pep
MKEKQLKLRVRLSLLLQMVLNATGMHLSCLILFLLLTLTLKTTLHYFHYIPFHLKSSHMKLSRSIGAMDVGEFIIPVPYVKQVKELLELGESVGTQSRGLTQELISLLPVSKYKCSLFSRKKSRTERYCLCFIFVSLKCDLLLSAAAFGLPQILN

SEQ ID NO: 70039 - protein, 156 aa, Gossypium hirsutum
  Clone ID: GOSHI-09MAY01-C424_5.pep
PIVNAVIDGDDIIYRDYIDISIAVGTSKGLVVPVVRDADKMNFAEIEKTINNLAKKANDGPISIDEMAGGSFTISNGGVYGSLLSTPIINPPQSAILGMHSIVSRPMVVGGTVLPRPMMYIALTYDHRLIDGREAVFFLRRIKDVVEDPCRLLLDV

SEQ ID NO: 70040 - protein, 490 aa, Gossypium hirsutum
  unsure (1)..(490): unsure at all Xaa locations
  Clone ID: GOSHI-09MAY01-C424_4.pep
QRQSVIPSMDNESSNVSQAEEIKVQAXRRWKAHKYGQAIDLYTQAIELNSQNAVYWANRAFAHTKLEEYGSAIQDATKAIEVDPKYSKGYYRRGAAYLAMGKFKEALKDFQQVKKICPNDPDATKKLKECEKAVMKLKFEEAISVPESERRFVADSIDYHSIEVEPQYSGAKIEGDVVTLDFVKKMMDDFKNQKCLHKRYAFQIVLQMRKMLRSQPSLVDINVPDGSLFTVCGDVHGQFYDLINIFELNGLPSEENPYLFNGDFVDRGSFSVEVILTLFAFKCMCPSAIYLARGNHESKSMNKIYGFEGEVRSKLSETFVELFAEVFCYLPLAHVINQKVFVVHGGLFSVDGVKLSDIRAIDRFCEPPEEGLMCELLWSDPQPYPGRGPSKRGVGLSFGADVTRRFLQDNNLDLVVRSHEVKDEGYEIEHDGKLITVFSAPNYCDQMGNKGAFIRFEAPDLKPNIVTFSAVPHPDVKPMAYANNFLRMFQ

SEQ ID NO: 70041 - protein, 134 aa, Gossypium hirsutum
  Clone ID: GOSHI-09MAY01-C424_3.pep
MASDPKVHIFEEVANHNKTKDCWLIISGKVYDVTPFMDDHPGGDEVLLSATGKDATNDFEDVGHSDSAREMMEKYYIGEIDPKTVPAKRTYIPPQQTPYNPDKTPEFVIKILQFLVPLLILGLAIAVRHYTKKE

SEQ ID NO: 70042 - protein, 473 aa, Gossypium hirsutum
  Clone ID: GOSHI-09MAY01-C424_2.pep
MLGALRRKVASGRSSASILGKSLQAIRPGVSASRVSSNAGKEMLSVQLRGIAHVRNFSHLVLPGCSAGLTKTRDAICIIQPEAIMQTSCRAFSSGDGDLVDAVVPFMGESISDGTLATFLKKPGDRVKADEPIAQIETDKVTIDVVSPQDGVIQEYVAKEGETVEPGTRVAVISKSAEGVAAAAPTEKKSEKAASEPSPAEAVKEDKPKAKVEASAAAAKPKAPSPPPPKRTASEPVLPPKERERKVPMTRLRKRVATRLKDSQNTFAMLTTFNEVAITNLMKLRSDYKDAFVEKHGVKLGFMSGFVKATVSALQHQPIVNAVIDGDDIIYRDYVDISIAVGTPKGLVVPVVRDADKMNFAEIEKTINNLAKKANDGTISIDEMAGGSFTISNGGVYGSLLSTPIINPPQSAILGMHSIVSRPMVVGGNVVPRPMMYIALTYDHRLIDGREAVFFLRRIKDVVEDPRRLLLDV

SEQ ID NO: 70043 - protein, 302 aa, Gossypium hirsutum
  unsure (1)..(302): unsure at all Xaa locations
  Clone ID: GOSHI-09MAY01-C424_1.pep
ALKEAFEVFCNKGVVGGSRAELLATFCDNILKKGGSEKLSDEAIEETLEKVVKLLAYISDKDLFAEFYRKKLARRLLFDRSANDDHERSILTKLKQQCGGQFTSKMEGMVTDLTLARENQASFEDYLRSNSAAHPGIDLTVTVLTTGFWPSYKSFDLNLPAEMVKCVEVFKGFYETKTKHRKLTWIYSLGTCHINGKFEHKTIELIVSTYQAAVLLLFNASDRLSYSEIMAQLNLTHDDLVRLLHSLSCAKYKILSKEPNTKTIFHSDYFEFNSKFTDKMRRIKIPLPPVDEXRKKVVEDVD

SEQ ID NO: 70044 - protein, 54 aa, Gossypium hirsutum
  Clone ID: uC-gsflnu33B015f10b1.pep
LLPLRMLVGGIAAANKDDIDQHAVETVCALNLNSDVTFRYFMCKKVLECLMFVC

SEQ ID NO: 70045 - protein, 44 aa, Gossypium hirsutum
  Clone ID: LIB3583-054-P1-K1-E2.pep
SPCILKKFNFFQVLEKAIRPGISASRVSINVGEEVNIRVIHASS

SEQ ID NO: 70046 - protein, 84 aa, Gossypium hirsutum
  Clone ID: LIB3145-016-Q1-K1-G12.pep
QSRGLTQELISLLPVSKYKCSLFSRKKSRKERCVICQMEYKRGERQITLPCKHVYHAGCGTRWLSINKACPICYTEVFGNGSKH

SEQ ID NO: 70047 - protein, 72 aa, Gossypium hirsutum
  unsure (1)..(72): unsure at all Xaa locations
  Clone ID: LIB3582-025-P1-K1-B10.pep
MFFLLEAKKLAXQYQKEADKCNSGMDTCEEVREKAKEALSAQMKLTAMWXIRARQKGWREKVAKSNAFPYFI

SEQ ID NO: 70048 - protein, 104 aa, Gossypium hirsutum
  Clone ID: LIB3825-005-Q1-N6-C11.pep
SFWFWVISSIPFYGATWEHYFTNALILPVVNGPTEGLALIYGLHFMTTIVGAQWWAQPFQQSIPFLSWIPYVNELPTYKAAVYLLTPIAILPTVACNTQIWSGY

SEQ ID NO: 70049 - protein, 181 aa, Gossypium hirsutum
  Clone ID: LIB3584-050-P1-K2-B10.pep
PTRPPTRPPTRPPTRPVPDGCLLTVCGDVHGQFYDLINIFELNGLPSEENPYLFNGDFVDRGSFSVEVILTLFAFKCMCPSAIYLARGNHESKSMNKIYGFEGEVRSKLSETFVELFAEVFCYLPLAHVINQKVFVVHGGLFSVDGVKLSDIRAIDRFCEPSEEGLMCELLWSDPQPYPGR

SEQ ID NO: 70050 - protein, 59 aa, Gossypium hirsutum
  Clone ID: LIB3827-002-Q1-K6-E7.pep
HDGNLYCFSAPNYCIRWEQGCIIRFEAPDLKPNIVTFSAVPHPDVKPMAYANNFLRMFQ

SEQ ID NO: 70051 - protein, 93 aa, Gossypium hirsutum
  Clone ID: LIB3828-023-Q6-N6-D1.pep
YLNSAAHPGIDLTVTVLTTGFWPSYKSFTSPLHLLSSSYDGKVMLWDLRTAEKSTTLDCGPRTICRRHIMTSSYLYECLWEALQQRIRMITCS

SEQ ID NO: 70052 - protein, 86 aa, Gossypium hirsutum
  Clone ID: LIB3583-024-P1-K1-E12.pep
RKGIGIAHGISAPVFQFSSHSHWISACKWHNTSPLHLLSSSYDGEVMLWDLRTAEKPTTLDCGPRTICRRHIMTSSYLYECLWEAL

SEQ ID NO: 70053 - protein, 68 aa, Gossypium hirsutum
  Clone ID: LIB3585-013-P1-K1-C9.pep
MDNESSNVSQAEEIKVQANEAFKAHKYGQAIDLYTQAIELNSQNAVYWANRAFAHTKLEEYGSAIQDA

SEQ ID NO: 70054 - protein, 104 aa, Gossypium hirsutum
  Clone ID: LIB3146-037-P1-K1-E9.pep
LQVEWNIMEVMKFSFEGQGKKQEKYKAAQMHSSSIQDHLQQQAESHSQLQLFFFHSLAHQFASRNMTSKPWFVAVENTEIEEENYQKSVLVLIDYLLSLRQENF

SEQ ID NO: 70055 - protein, 88 aa, Gossypium hirsutum
  Clone ID: LIB3197-019-Q1-M1-C6.pep
ISVMLGALRRKVAIGGSSASVLRKAIRPGISASRVSVNVGEEILLLQPRGIAHVRNFSHLILPGWSGGLAKTRDVFSSIQLETIMQKS

SEQ ID NO: 70056 - protein, 41 aa, Gossypium hirsutum
  Clone ID: LIB3585-019-P1-K1-G7.pep
HASGSSGVQEQVLIRKIIELHDKYMAYVTDCFQNHTLFHKP

SEQ ID NO: 70057 - protein, 88 aa, Gossypium hirsutum
  unsure (1)..(88): unsure at all Xaa locations
  Clone ID: LIB3584-031-P1-K1-A5.pep
PTLTLTHRTLLTIYPDLHXHFYELMEIFKLNGLPSXYNPYLFNNDFIDRGSFSMEVILTLFPFNYMCPSTIYLPKLNHDTNIINKIYF

SEQ ID NO: 70058 - protein, 299 aa, Gossypium hirsutum
  Clone ID: GOSHI-09MAY01-C794_1.pep
TLKLLSFLLHSIKYHLKKKPLFFGSFPPLFSLSKMATLQVTSPKELISITASSSLFSSRLRSSSKISLKKSFLRTRHRFGGIACSFAPMETAKIKVVGVGGGGNNAVNRMIGSGLQGVDFYAINTDSQALLQSAAENPLQIGELLTRGLGTGGNPLLGEQAAEESRDAIANALKGSDLVFITAGMGGGTGSGAAPVVAQIAKEAGYLTVGVVTYPFSFEGRKRTVQALEAIEKLQKNVDTLIVIPNDRLLDIADEQTPLQDAFLLADDVLRQGVQGISDIITVSDSLICKLDILRLDPF

SEQ ID NO: 70059 - protein, 227 aa, Gossypium hirsutum
  unsure (1)..(227): unsure at all Xaa locations
  Clone ID: GOSHI-09MAY01-C784_1.pep
AYATRAATRPPTRPETEDKDVVSEGLGSIVVYDKWISPPVIGQRPKARYQHGAAVVQDKMYIYGGNHNGRYLNDLHVLDLRSWTWSKVEAKVVPKSVESPSPVNIAPCAGHSLIPWENKLLSIAGHTKVPSETIQGKAFDLQTGTWSVLSTYGKAPVSRAGQSVTLVGTTLVIFGGQDAKRTLLNDLHILNLETMTWNEIDAVGXSSSPRADHAAAIHAERYLLGFG

SEQ ID NO: 70060 - protein, 543 aa, Gossypium hirsutum
  Clone ID: GOSHI-09MAY01-C754_1.pep
MSSESEEQQLSKKAAKKEAAKLEKIRRRQEAAALASAASSLSVEEEDPYSSNYGDVTLPELKSCSKPDAGNWSMAISSMDWTRVGALTQELKEKEVLIRGRVHTTRPVSKNMAFVVVRERGFTVQCLVATHEAGVSRQMVKFVAALNRESIIDAIGMVSVPGNPIKGTTQQVEIHVRKLYCVNKAMPTLPINVEDAARSDAEIEAALQAGDKLPRVNQDTRLNFRVLDIRTPANQGIFRIQCQVGTIFRQFLLSEGFVEIHTPKLIAGSSEGGSAVFKLDYKGQPACLAQSPQLHKQMAICGDFGRVFEVGPVFRAEDSYTHRHLCEFTGLDVEMEIKKHYSEVMDIPDRPSRPTSVGLTDKCRKELEAVGKQYPFEPLKYKPKTLRLTFEEGIQMLKDAGVEVDPLGDLNTEAERKLGQLVLENYDTEFYLLHRYPLAVRPFYTMPCYDNALYSNSFDVFIRGEEIISGAQRVHVPEFLAERAQACGIDVNTISTYVDSFRYGAPPHGGFGVGLERVVMLFCALGNIRKTSLYPRDPQRIAP

SEQ ID NO: 70061 - protein, 111 aa, Gossypium hirsutum
  Clone ID: LIB3166-039-P1-K1-F2.pep
GIFRIQCRGGTIFRQFLLSEGFVEIHTPKLIAGSSEGLDVEMEIKKHYSEVMDIVDRLFVTMFDSLNEKCRKELEAVGKQYPFEPLKYKPKTLRLTFEEGVQMLKDAGVEV

SEQ ID NO: 70062 - protein, 64 aa, Gossypium hirsutum
  unsure (1)..(64): unsure at all Xaa locations
  Clone ID: LIB3147-017-Q1-K1-H4.pep
RVRPRLRHYHXSAEXLPMQLSDRLLSSMWDLDRIKRILFLLFIFKNRLVCFPSTLFLCLLIVMF

SEQ ID NO: 70063 - protein, 219 aa, Gossypium hirsutum
  Clone ID: GOSHI-09MAY01-C714_1.pep
QAQKEAPTDMQCKDKFLLQSVVASPGATPKDIMAEMFNKESGHNVEECKLRVVYVAPPRPPSPVREGSEEGSSPRASVSDNGSFNAAELTSVSRAHVERHETQDNSCDARTLISKLTEEKNSAIQQNSKLQQELELLRREAKRNQSGIPFIYVFLVGLIGIILGYLLKRTWPPPCYTFFVFFDATSMAGKRKEIWKIGKVTGILFCRNVVHCLLICMED

SEQ ID NO: 70064 - protein, 175 aa, Gossypium hirsutum
  unsure (1)..(175): unsure at all Xaa locations
  Clone ID: LIB3584-011-P1-K1-F6.pep
FVAPTDMQCKGKCLLQSVVASPGATPKXIMAEMFNKESGHNVEECKLRVVYVAPPRPPSPVGEGSEEGSSPRASVSDNGSFNAAELTSARTLISKLTEEKNSAIQQNSKLQQELELLRREAKRNQSGIPFIYVFLVGLIGIILGYLLKRTWPPPCYTFFVFFDATSMAGEKKRNL

SEQ ID NO: 70065 - protein, 63 aa, Gossypium hirsutum
  Clone ID: LIB3147-005-Q1-K1-G9.pep
NSAIIQKGGKRALKNIEALLWHCYSEKNFLLQARTLISKLTEEKNSAIQQNSKLQQELELLRR

SEQ ID NO: 70066 - protein, 96 aa, Gossypium hirsutum
  Clone ID: GOSHI-09MAY01-C684_4.pep
FKLLTFIICLCLNCIFNNFFFFFLFFFIFYFDFICFFRTRKAAAHRINTIKVRGLQIMSGVFQHTKHTHDESSRNNALYKLKKGLGPAIRSETLKH

SEQ ID NO: 70067 - protein, 151 aa, Gossypium hirsutum
  Clone ID: GOSHI-09MAY01-C684_3.pep
MSPPLLGVEEGGQNNVTLLGSSGSIDSVCQNNAELKERNYMGLSDCSSIDCSVVTLGSDDSNVSLNLKATELRLGLPGSQSPERNPELCLLSSAQLDEKPLFPLHPSSDGHCFPSQKTVVSGNKRGFSDAMDGFSEGNFLSNSKVDVMLTP

SEQ ID NO: 70068 - protein, 367 aa, Gossypium hirsutum
  Clone ID: GOSHI-09MAY01-C684_2.pep
MSPPLLGVEEGGQNNVTLLGSSGSIDSVCQNNAELKERNYMGLSDCSSIDCSVVTPGSDDGNVSSNLKATELRLGLPGSQSPERNPELCLLSSAQLDEKPLFPLHPSSDGHCFPSQKTVVSGNKRGFSDAMDGFSEGNFLSNSKVDVMLTPRPSSNLGLKSGSMLENLGVQPTRAKEVTNQKVVKDSSHAANETRPNHNASANNNSGAPASKAQVVGWPPIRSFRKNSLATSSKNTDEVDGKTGPDALFVKVSMDGAPYLRKVDLKNYSKYQDLSSALEKMFSCFTIGQCGSHGTLGRELLSESKLNDLLHGSEYVLTYEDKDGDWMLVGDVPWEMFTDTCKRLRIMKSSDAIGLAPRAVEKCRNRN

SEQ ID NO: 70069 - protein, 357 aa, Gossypium hirsutum
  Clone ID: GOSHI-09MAY01-C684_1.pep
MSPPLLGVEEEGIQSNVTLLGSSGSMESVCQNSADLKERNYMGLSDCSSVDSSVFSPPSEERKASLNLKATELRLGLPGLQSPERNPELCLLSSSQLDEKPFFPLHPSSDGHCFASQKSVVSGNKRGFSDAMDGFSEGKFLSDSKVDVMLSPRPSSNFGAQPMKAKEITSQNVVHDRPHAADKTRPNPNASANNNSGAPANKAQVVGWPPIRSFRKNSLASASKNTDEVDGKAGPGALFVKVSMDGAPYLRKVDLKNYTKYQELSSALEKMFSCFTIGQYGSHGTSGRELLSESKLKDLLHGSEYVLTYEDKDGDWMLVGDVPWEMFTDTCKRLRIMKSSDAIGLAPRAMEKCRNRN

SEQ ID NO: 70070 - protein, 144 aa, Gossypium hirsutum
  Clone ID: LIB3829-024-Q6-K6-B8.pep
MSPPLLGVEEEGIQSNVTLLGSSGSMESVCQNSADLKERNYMGLSDCSSVDSSVFSPPSEERKASLNLKATELRLGLPGLQSPERNPELCLLSSSQLDEKPFFPLHPSSDGHCFASQKSVVSGNKRGFSDAMDGFSEGKFLSDS

SEQ ID NO: 70071 - protein, 86 aa, Gossypium hirsutum
  unsure (1)..(86): unsure at all Xaa locations
  Clone ID: LIB3585-007-P1-K1-G9.pep
MSPPLLGVEEEGIQSNVTLLGSSGSMESVCQNSADLKERNYMGLSDCSSVDSSVFSPPSEERKASLNLKATELRLGLXGLQSPERN

SEQ ID NO: 70072 - protein, 60 aa, Gossypium hirsutum
  Clone ID: LIB3493-011-P1-M1-A10.pep
EDVGAGRRSQGIFFHMVLLFIFYLHGNLYHVRLFLSTKIIKPSRSSVLESLNESLFPILF

SEQ ID NO: 70073 - protein, 80 aa, Gossypium hirsutum
  unsure (1)..(80): unsure at all Xaa locations
  Clone ID: LIB3585-046-Q6-K1-H7.pep
MSPPLLGVEEGGQNIVTLLGSSGSMDSVCQINAELKERHYMGLSDXTSIDSSVVTPGSDNGNVSTNLKATXLKLGLPGSH

SEQ ID NO: 70074 - protein, 116 aa, Gossypium hirsutum
  unsure (1)..(116): unsure at all Xaa locations
  Clone ID: uC-gsronu33B143g05b1.pep
MSPPLLGVEEERXQSNVTLLGSSGSMESVCQNSADLKERNYMGLSDCSSVDSSVFSPPSEERKASLNLKATELRLGLPGLQSPERNPELCLLSSSQLDEKPXFPLHPSSDGHCFAS

SEQ ID NO: 70075 - protein, 64 aa, Gossypium hirsutum
  Clone ID: LIB3582-044-P1-K1-F12.pep
MSPPLLGVEEGGQNNVTLLGSSGSMDSVCQNNAELKERNYMGLSDCSSIDSSVVTPGSDDGNVS

SEQ ID NO: 70076 - protein, 71 aa, Gossypium hirsutum
  Clone ID: uC-gsflmaxxa090f03b1.pep
CLSPLLGEEEAGVQSNVTLLGSSGSMESVCQSSAELKERDYMGSSDCSSVDSIWFFPPYEERKASLNLKAT

SEQ ID NO: 70077 - protein, 122 aa, Gossypium hirsutum
  Clone ID: uC-gsflmaxxa039f09b1.pep
MSPPLLGVEEGGQNNVTLLGSSGSMDSVCQNNAELKERNYMGLSDCSSIDSSVVTPGSDDGNVSTNLKATELRLGLPGSQSPERNPELCLLSSAQLDEKPLFPLHPSSDGHCFPSQKTVVSG

SEQ ID NO: 70078 - protein, 112 aa, Gossypium hirsutum
  unsure (1)..(112): unsure at all Xaa locations
  Clone ID: LIB3165-052-Q1-K1-H3.pep
LLRSPPLLGVEEEGVQSNVTLLGSSGSMESVCQNSAELKERNYMGLSDCSSVDSSVFSPPSDERKASLNLKATELRLXLPGLQSPDRNPELCLLRSSQLDEKPLFPLHPSSD

SEQ ID NO: 70079 - protein, 52 aa, Gossypium hirsutum
  unsure (1)..(52): unsure at all Xaa locations
  Clone ID: LIB3148-022-Q1-K1-G6.pep
YITLKNNKFYFKRKYVEVFHHSNTHHKSSTSNALYKLKXQALKQGLVRTQGC

SEQ ID NO: 70080 - protein, 540 aa, Gossypium hirsutum
  Clone ID: GOSHI-09MAY01-C644_1.pep
NLLRSTLEYGVGYLHEGLSSLDQEVVSQLFEAGWIQVCVMSSALCWGVPLSAHLVVVMGTQYYDGRENAHTDYPVTDLLQMMGHASRPLLDNSGKCVILCHAPRKEYYKKFLYEAFPVESHLHHFLHDNFNAEIVATVIENKQDAVDYLTWTFMYRRLTQNPNYYNLQGVSHRHLSDHLSELVENTLNDLEASKCITIEDDMDLSPLNLGMIASYYYISYTTIERFSSSLTSKTKMKGLLEILASASEYANLPIRPGEEEVLRRLINHQRFSFDNPRCTDPHVKANALLQAHFSRQHVGGNLSLDQREVLLFATRLLQAMVDVISSNGWLSLALLAMEVSQMVTQGMWERDSMLLQLPYFTKELAKRCQENPGKNIETIFDLVEMEDDERRELLQMSDLQLLDIAKFCNRFPNIDLSYEVIDSDNVRAGEYVTLQVTLERDLEGKTEVGPVDAPRYPKAKDEGWWLVVGDTISNQLLAIKRVSLQRKAKVKLEFAAPTEATEKAYTLYFMCDSYLGCDQEYSFTVDVKEAAGPGEDSGSE

SEQ ID NO: 70081 - protein, 132 aa, Gossypium hirsutum
  Clone ID: LIB3146-014-Q1-K1-B2.pep
PSANASAHASAHASGQMVTQGMWERDSMLLQLPYFTKELAKRCQENPGKNIETIFDLVEMEDDERRELLQMSDLQLLDIAKFCNRFPNIDLSYEVIDSDNVRAGEYVTLQVTLERDLEGKTEVGPVDAPKYP

SEQ ID NO: 70082 - protein, 100 aa, Gossypium hirsutum
  Clone ID: GOSHI-09MAY01-C664_1.pep
LPFAETLSTKPPQNGKDDSWNDAWETAWLPDDISPKNRAPWEADVNFPSNEESAKMALSSDVDAETKAFVEDMNENCDERRKSRGGSRKRKHKRRGKERV

SEQ ID NO: 70083 - protein, 175 aa, Gossypium hirsutum
  unsure (1)..(175): unsure at all Xaa locations
  Clone ID: GOSHI-09MAY01-C614_2.pep
PRVRVESLFDAAGRDTWAGIRKLLRRETETAALEFSTAISSFELDQPTIESMLQGLRDYARYLVVKKAGEDAXKVLILMKDRFSTVFSHDNELMPRVWPGKEDIKTITKDARAASLRLLAVMAAIRLDEKPDKIENILLSSLMEATVTSPDPLASSTWEEVPPENTLITPVQCKS

SEQ ID NO: 70084 - protein, 242 aa, Gossypium hirsutum
  Clone ID: GOSHI-09MAY01-C614_1.pep
SLRLLAVMAAIRVDESPARPPTRPLSSLMEGTVTSPDPLASSTWEEVPPENTLITPVQCKSLWRQFKSETEYTVTQAISAQEAYKRSNNWLPPPWAIVAMVVLGFNEFMLLLRNPLYLMFLFVAFLLSKAMWVQMDVPGQFQHGTLAGLISISSRFLPTVMNLLKRLAEEAQGHRTPESPRQQESSVAFQSFRNQSQLNPTSSIAQSSVSSNVSVSDSSVEYSSPNLMQRRSTKVQEAELSQ

SEQ ID NO: 70085 - protein, 175 aa, Gossypium hirsutum
  unsure (1)..(175): unsure at all Xaa locations
  Clone ID: LIB3583-003-P1-K1-A6.pep
HASAHASADAWVENILFSSLMEGXVTAVSSVDRSITTSDPLASSSWEEVSPKSILITPVQCKSLWRQFKAETEYTVTQAISAQAYKQSNNWLPTPWAIVAMVVLGFNEFMLLLRNPLYLMGLFVVYLLSKVMWVQMDILGQFQHGTLAGLIFIWSRFLSTIMNFLRRLAEEASGA

SEQ ID NO: 70086 - protein, 137 aa, Gossypium hirsutum
  Clone ID: GOSHI-09MAY01-C634_1.pep
ATEFALSGIYTVKSDVYSFGVVMLELLTGRKPLDSSRVRSEQSLVRWATPQLHDIDALAKMVDPTLNGMYPAKSLSRFADIIALCVQPEPEFRPPMSEVVQALVRLVQRASVVKRRPSDESGFGYKTPDHEAGDFSF

SEQ ID NO: 70087 - protein, 201 aa, Gossypium hirsutum
  Clone ID: GOSHI-09MAY01-C194_4.pep
IKKLPLYKHIANLAGNSKLVLPVPAFNVINGGSHAGNKLAMQEFMILPVGASSFKEAMKMGVEVYHHLKSVIKKKYGQDATNVGDEGGFAPNIQENKEGLELLKTAIAKAGYTGKVVIGMDVAASEFYGSADKTYDLNFKEEVICDTRYSQSLQLYEILFIYDYHIILDIYSSCCVYVGLYSIVRHVQKNDGSQKISGDAL

SEQ ID NO: 70088 - protein, 145 aa, Gossypium hirsutum
  unsure (1)..(145): unsure at all Xaa locations
  Clone ID: GOSHI-09MAY01-C194_3.pep
SYPFDQDDWEHCSELTNEMGTKVQIVGDDLLVTTPXRVEKAIKEKTCNALLLKANQIGSVTESIEAVKMPKKAGWGVMASHRSGETEDTFIADLSVGLATGQIKTGAPCRSERLAKYNQLLRIEEELGSDAIYAGASFRAPVEPY

SEQ ID NO: 70089 - protein, 192 aa, Gossypium hirsutum
  Clone ID: GOSHI-09MAY01-C194_2.pep
MAATIVSIKARQIFDSRGNPTVEVDVETSNGKKARAAVPSGASTGIYEALELRDGGSDYLGKGVSKAVANVNTIIGPALIGKDPTQQTAIDNFMVQQLDGTQNEWGWCKQKLGANAILAVSLAVCKAGAEVLNIPLYKHIANLAGNKKLVLPVPAFNVINGGSHAGNKLAMQEFMILPTGASSFKEAMKMGV

SEQ ID NO: 70090 - protein, 445 aa, Gossypium hirsutum
  Clone ID: GOSHI-09MAY01-C194_1.pep
MAATIVSVKARQIFDSRGNPTVEVDVETSNGIKARAAVPSGASTGIYEALELRDGGSDYLGKGVSKAVANVNTIIGPALIGKDPTEQTAIDNFMVQQLDGTQNEWGWCKQKLGANAILAVSLAVCKAGAEVKKLPLYKHIANLAGNSKLVLPVPAFNVINGGSHAGNKLAMQEFMILPVGASSFKEAMKMGVEVYHHLKSVIKKKYGQDATNVGDEGGFAPNIQENKEGLELLNTAIAKAGYTGKVVIGMDVAASEFYGTDKTYDLNFKEENNDGKQKISGDALKDLYKSFVAEYPIVSIEDPFDQDDWEHYSKLTNEIGEKVQIVGDDLLVTNPKRVAKAIAEKTCNALLLKVNQIGSVTESIEAVKMSKQAGWGVMASHRSGETEDTFIADLSVGLATGQIKTGAPCRSERLAKYNQLLRIEEELGAEAVYAGASFRAPVAPY

SEQ ID NO: 70091 - protein, 151 aa, Gossypium hirsutum
  Clone ID: LIB3585-009-P1-K1-C6.pep
MFVTYFPICLLLDSTTRRVESVEQLNILIIFRCLHKINAIPVDVETSNGKKARAAVPSGASTGIYEALELRDGGSDYLGKGVSKAVANVNTIIGPALIGKDPTQQTAIDNFMVQQLDGTQNEWGWCKQKLGANAILAVSLAVCKAGAEVLN

SEQ ID NO: 70092 - protein, 50 aa, Gossypium hirsutum
  Clone ID: LIB3583-044-Q6-K1-F7.pep
GSSDLIMKRSYLSLHRVIEHSISEYKSLVNSSVCPARNCGPSLYTVRCFR

SEQ ID NO: 70093 - protein, 220 aa, Gossypium hirsutum
  Clone ID: GOSHI-09MAY01-C174_1.pep
TGQPRRHLLTTGWSTFVTSKRLVAGDSFVFLRGENGELRVGVRRVAHQQSSMPTSVISSQSMHLGVLATASHAVSTQTLFVVYYKPRTSQFIIGLNKYLEALSNKFTVGMRFKMRFEGEDSPERRFSGTIVGVEDFSPYWKDSKWRSLKVQWDEPASIPRPDRVSPWEIEPFAAPIPPTLGQPVAAKNKRPRPTAEIPALDLSFTALASWNSGVMHTHDL

SEQ ID NO: 70094 - protein, 206 aa, Gossypium hirsutum
  unsure (1)..(206): unsure at all Xaa locations
  Clone ID: GOSHI-09MAY01-C164_2.pep
PTRSPTRPPTRPPTRPALIEFSAEEDAQKVLEQSLVYAGAELELKPKKDFDAIREEEAEEYEDNHPVTGSNGDNRLNAEDKYPKGLVVAFALKNISGGDAAEKNGSDEPAKDGATEKNEEKTAENDEDNKDQGDDKQPGVXDETENKKSCPEVMRGTGRRNTASVFKDDMNVVLREDLKEAFQKFGTVKFVDFKAVEEKGYIRFDE

SEQ ID NO: 70095 - protein, 244 aa, Gossypium hirsutum
  unsure (1)..(244): unsure at all Xaa locations
  Clone ID: GOSHI-09MAY01-C164_1.pep
MASPSLSEDTAKAVLRQVEFYFSDSNIPRDNFLKKKINEDDDGXMVSLALICSFSKMRSHLNLRDVKAEEVPEATLNVVAETLRTSSSLRVSEDGKKVGRSTALLEPEELLEQLDSRTIAASPFEFNVKMEAVEAFFGQYAKVNSVRLPRHVANKKYFCGTALIEFSAEEDAQKVLEPSLVYAXAEWELKPKKXFDAIREEEAEEYEDNLPATGSNGDNRLNAEDKYPKGWGVAFALKNISVGR

SEQ ID NO: 70096 - protein, 51 aa, Gossypium hirsutum
  Clone ID: LIB3145-040-Q1-K1-F8.pep
HASASPSLSEDTAKAVLRQVEFYFSDSNIPRDNFLKKKINEDDDGSILCLF

SEQ ID NO: 70097 - protein, 111 aa, Gossypium hirsutum
  Clone ID: GOSHI-09MAY01-C114_29.pep
SLIFVFLCWFPALNTNLNDFKVADLINQSTGTWKKELIISTFPEDVAEKIIGIPLAEEPHDDFRVWSVEASGEFTVRRAYKLLQSIEAHPSAHASQDDYKEFYKKLWGQLS

SEQ ID NO: 70098 - protein, 142 aa, Gossypium hirsutum
  unsure (1)..(142): unsure at all Xaa locations
  Clone ID: GOSHI-09MAY01-C114_25.pep
LFVRPRVRPRVRFTSALSVALAVVFLVITVGIAIIKLISGTVMMPRLLPDVTDLTSFWKLFTTVPVLVTAYICHYNVHSIDNELEDSTQIRPVVRTALALCSTGYIMTCFFGFLLFXGTATMDDVLANFDTNLGIPYSSQLS

SEQ ID NO: 70099 - protein, 111 aa, Gossypium hirsutum
  Clone ID: GOSHI-09MAY01-C114_16.pep
SEFFFFFFFFFFFWVFFTKAFFIYINYLNKIHIHFYQRWGPIPKQEINIPHSINGVPGIKLKALINLFIEKTMNWKYHPKLPKPKKKKNIENPKQHHIRRERLLVYILSLF

SEQ ID NO: 70100 - protein, 72 aa, Gossypium hirsutum
  Clone ID: GOSHI-09MAY01-C114_15.pep
MDSDQGKLFIGGISWETSEDRLKEYFGQYGDILQTVVMRDKVTGRPRGFGFVVFSDPYVIDTVLQEKHTIDG

SEQ ID NO: 70101 - protein, 88 aa, Gossypium hirsutum
  Clone ID: GOSHI-09MAY01-C114_13.pep
FGGNKNLGFGAIPAIDDKLGRRVCELCRVAEISTQDQVLQVNPEATRLKTQMSSFLKVLRGFSFCEMPGTPLIECGMLISCLGMGFQL

SEQ ID NO: 70102 - protein, 93 aa, Gossypium hirsutum
  unsure (1)..(93): unsure at all Xaa locations
  Clone ID: GOSHI-09MAY01-C114_12.pep
PTRPPTRPSTRPVQRAVCMISNSTSVAEVFSRIDHKFDLMYAKRAFAHCXGVGEGMEEGEFSEAREDLAALEKDYEEVGAESGEGDEGDEEEY

SEQ ID NO: 70103 - protein, 156 aa, Gossypium hirsutum
  Clone ID: GOSHI-09MAY01-C114_11.pep
MWKNGARDNRLHSNNTFPEDVAEKIIGIPLAEEPHDDFRVWSAEASGEFTVRSAYKLLQSIEDDPRAYALQDGYKEFYKKLWLLNLPSKIKITIWKISWNFLAIRVNMLQKKLTNIIVCPRCGVGSENMDHLFRECPGYLRRTQHHNVRYSAVHYG

SEQ ID NO: 70104 - protein, 178 aa, Gossypium hirsutum
  Clone ID: GOSHI-09MAY01-C114_9.pep
GKIVSSARGNPKGCFDMTIGGQPAGRIVMELFADCTPRTAENFRALCTGEKGVGRSGKPLHYQGSTFHRVIPNFMCQGGDFTAGNGTGGESIYGAKFEDENFIKKHTGPGILSMANAGPGTNGSQFFICTTKTEWLDGKHVVFGQVVEGMDVVRDIEKVGSSGGRTSKPVVIADCGQL

SEQ ID NO: 70105 - protein, 300 aa, Gossypium hirsutum
  Clone ID: GOSHI-09MAY01-C114_8.pep
GEHWWNGRTFVLIVTTLGIFSPLACFKRIDSLRFTSALSVALAVVFLVITVGIAIIKLISGTVMMPRLLPDVTDLTSFWKLFTVVPVLVTAYICHYNVHSIDNELEDSTQIRPVVRTALALCSTVYIMTSFFGFLLFGDATMDDVLANFDTNLGIPYSSLLNDAVRVSYAAHLMLVFPIVFYPLRLNMDGLLFPYSRPLAQSNTRFACITAGLVAVIFLGANFIPSIWDAFQFTGATAAVCLGFIFPAAVTLRNHHFIATKKDKMLALFMMGLAVFSNAVAIYSDAYALFKKNSGAGPKA

SEQ ID NO: 70106 - protein, 148 aa, Gossypium hirsutum
  unsure (1)..(148): unsure at all Xaa locations
  Clone ID: GOSHI-09MAY01-C114_7.pep
MAFCGKDSFDMTIGGQPAGRIVMELFADCTPRTAENFRALCTGEKGVGRSGKPLHYKGSSFHRVIPNFMCQGGDFTAGNGTGGESIYGSKFADENFIKKHTGPGILSMANAGPGTNGSQFFICTAKTEWLDGQHVVXFGQVVEGMDVV

SEQ ID NO: 70107 - protein, 309 aa, Gossypium hirsutum
  unsure (1)..(309): unsure at all Xaa locations
  Clone ID: GOSHI-09MAY01-C114_6.pep
MRECISVHIGQAGIQVGNACWELYCLEHGIQPDGQMPSDKTVGGGDDAFNTFFSEXGAGKHVPRAIFVDLEPTVIDEVRTGTYRQLFHPEQLISGKEDAANNFARGHYTIGKEIVDLCLDRIRKLADNCTGLQGFLVFNAVGGGTGSGLGSLLLERLSADYGKKSKLGFTVYPSPQVXTSVGEPHNSAQATHSLFFYSVFFFRRVIEAFSDICWRSLVFVRPSSSVLYRLVSLVFSSLPPPLRFDGALNVDVTEFQTNLVPYPRIHFMLSSYAPVISAEKAYHEQLSWAVITNTPCAPLLMLAGPDAAL

SEQ ID NO: 70108 - protein, 421 aa, Gossypium hirsutum
  Clone ID: GOSHI-09MAY01-C114_5.pep
MRECISIHIGQAGIQVGNACWELYCLEHGIQPDGQMPSDKTVGGGDDAFNTFFSETGAGKHVPRAIFVDLEPTVIDEVRTGTYRQLFHPEQLISGKEDAANNFARGHYTIGKEIVDLCLDRIRKLADNCTGLQGFLVFSAVGGGTGSGLGSLLLERLSVDYGKKSKLGFTVYPSPQVSTSVVEPYNSVLSTHSLLEHTDVSVLLDNEAIYDICRRSLDIERPTYTNLNRLVSQVISSLTASLRFDGALNVDVTEFQTNLVPYPRIHFMLSSYAPVISAAKAYHEQLSVAEITNTAFEPSSMMAKCDPRHGKYMACCLMYRGDVVPKDVNAAVATIKTKRTIQFVDWCPTGFKCGINYQPPTVVPGGDLAEVQRAVCMISNSTSVAEVFSRIDHKFDLMYAKRAFVHWYVGEGMEKKILKGS

SEQ ID NO: 70109 - protein, 191 aa, Gossypium hirsutum
  Clone ID: GOSHI-09MAY01-C114_4.pep
IYPEPRVRPPARAPVGSAAKAYHEQLSVAEITNTAFEPSSMMAKCDPRHGKYMACCLMYRGDVVPKDVNAAVATIKTKRTIQFVDWCPTGFKCGINYQPPTVVPGGDLAEVQRAVCMISNSTSVAEVFSRIDHKFDLMYAKRAFVHWYVGEGMEEGEFSEAREDLAALEKDYEEVGADSAEGDEEDEGDEY

SEQ ID NO: 70110 - protein, 199 aa, Gossypium hirsutum
  Clone ID: GOSHI-09MAY01-C114_3.pep
MTVGGQPAGSPRVRSNPCFTQKDPSPTMASNPKVFFDMTVGGQPAGRIVMELFADCTPRTAENFRALCTGEKGVGRSGKPLHYKGSSFHRVIPNFMCQGGDFTAGNGTGGESIYGAKFADENFIKKHTGPGILSMANAGPGTNGSQFFICTTKTEWLDGKHVVFGQVVEGMDVVKAIEKVGSSGGRTSKPVVIADCGQL

SEQ ID NO: 70111 - protein, 173 aa, Gossypium hirsutum
  Clone ID: GOSHI-09MAY01-C114_2.pep
MASNPKVFFDMTIGGQPAGRIVMELFADCTPRTAENFRALCTGEKGVGRSGKPLHYKGSSFHRVIPNFMCQGGDFTAGNGTGGESIYGSKFADENFIKKHTGPGILSMANAGPGTNGSQFFICTAKTEWLDGKHVVFGQVVEGMDVVKAIEKVGSSSGRTSKPVVVADCGQLS

SEQ ID NO: 70112 - protein, 450 aa, Gossypium hirsutum
  Clone ID: GOSHI-09MAY01-C114_1.pep
MRECISVHIGQAGIQVGNACWELYCLEHGIQPDGQMPSDKTVGGGDDAFNTFFSETGAGKHVPRAIFVDLEPTVIDEVRTGTYRQLFHPEQLISGKEDAANNFARGHYTIGKEIVDLCLDRIRKLADNCTGLQGFLVFNAVGGGTGSGLGSLLLERLSVDYGKKSKLGFTVYPSPQVSTSVVEPYNSVLSTHSLLEHTDVAVLLDNEAIYDICRRSLDIERPTYTNLNRLVSQVISSLTASLRFDGALNVDVTEFQTNLVPYPRIHFMLSSYAPVISAEKAYHEQLSVAEITNSAFEPSSMMAKCDPRHGKYMACCLMYRGDVVPKDVNAAVATIKTKRTIQFVDWCPTGFKCGINYQPPTVVPGGDLAKVQRAVCMISNSTSVAEVFSRIDHKFDLMYAKRAFVHWYVGEGMEEGEFSEAREDLAALEKDYEEVGAESGEGDEGDEEEY

SEQ ID NO: 70113 - protein, 144 aa, Gossypium hirsutum
  unsure (1)..(144): unsure at all Xaa locations
  Clone ID: LIB3585-062-P1-K2-H1.pep
PVDLDPTVIDEVRTGPYRQLFHPGQLISGKEDAANNFARGHYTIGKEIVDLCLDRIRKLADNCTGLQGFLVFNAVGGGTGSGLGSLLLERLSVDYGKKSKLGFTVYGGXEVSTSVVEPYNIVLSTHSLLEHTDVVIFFDNESII

SEQ ID NO: 70114 - protein, 62 aa, Gossypium hirsutum
  Clone ID: LIB3189-006-P1-K1-E1.pep
MACCLMYRGDVVPKDVNAAVAAIKTKRTIQFVDWCPTGFKCGINYFPPTVCSGDLSLPIFFF

SEQ ID NO: 70115 - protein, 56 aa, Gossypium hirsutum
  Clone ID: LIB3083-100-Q1-L1-E8.pep
FDLMYAKRAFVHWYVGEGMEEGEFSEAREDLAALEKDYEEVGAESGEGDEGDEEEY

SEQ ID NO: 70116 - protein, 169 aa, Gossypium hirsutum
  unsure (1)..(169): unsure at all Xaa locations
  Clone ID: LIB3583-013-P1-K1-H11.pep
KHLPRAIFEDLAPTVLNQCRTRTGXQGFHPXQLINGKEDAANNYPRGHYTIGKQIVDLCLDRIRKLPYNCTGLQGLFFFNAVDEGTGSAHGSLFLERFSVDYXKKSKLGFTVYPSPYICTSVCXPYNITLSTHSLIEHTEGTELFDYESIYDIFRRSFDIERPTYTNLN

SEQ ID NO: 70117 - protein, 102 aa, Gossypium hirsutum
  Clone ID: uC-gsflnu33B028b08b1.pep
NGQGTTCLITICIRLYVHRVIPNFMCQGGDFTAGNGTGGESIYGAKFADENFIKKHTGPGILSMANAGPGTNGSQFFICTTKTEWLDGKHVVFGQVVEGMDV

SEQ ID NO: 70118 - protein, 43 aa, Gossypium hirsutum
  Clone ID: uC-gsronu33B178f02b1.pep
AESTGCLAMALKAWTWGKPLKKSGASSGRTSKPVAVTLCRQLS

SEQ ID NO: 70119 - protein, 139 aa, Gossypium hirsutum
  unsure (1)..(139): unsure at all Xaa locations
  Clone ID: LIB3828-024-Q6-K6-E12.pep
RPHLFIGGGDCRGFSLISSEQNLQKCVSVHIGQAGLHVGNACWELYCLLXGXQPDGRGRXGGLTVGGGDDAFSTFFSETGAGKHVPRAFFFDLEPTVFDDVRPGSFRRXFHPVLLISGFYDAALIFCFVALFLSPLEIV

SEQ ID NO: 70120 - protein, 134 aa, Gossypium hirsutum
  Clone ID: LIB3829-011-Q6-N6-C8.pep
TSYTSLHNLTFIHWKQSYILLYSLSNLLFPYSRPLAQSNTRFACITAGLVAVIFLGANFIPSIWDAFQFTGATAAVCLGFIFPAAVTLRNHHFIATKKDKMLALFMIVLAVFSNAVAIYSDAYALFKKNSGARP

SEQ ID NO: 70121 - protein, 71 aa, Gossypium hirsutum
  Clone ID: uC-gsflnu33B037b06b1.pep
TSYTSPHNLTFIHWKQSYILLYSLSNLLRTPGFSNWISKDNSRCLQGYGDIKSHFVQPRELLDGSCPGSCS

SEQ ID NO: 70122 - protein, 121 aa, Gossypium hirsutum
  unsure (1)..(121): unsure at all Xaa locations
  Clone ID: uC-gsflmaxxa006c12b1.pep
MSAARGRIVMELFADCTPRTAENFRALCTGEKGVGRSGKPLHYKGSSFHRVIPNFMCQGGDFTAGNGTGGESIYGSKFADENFIKKHTGPGILSMANAGPGTNGSXFFICTAKTAWFDGKH

SEQ ID NO: 70123 - protein, 70 aa, Gossypium hirsutum
  Clone ID: LIB3148-050-Q1-K1-B9.pep
PTMLSIANTGPETNIPHECICTTNTKCLEQKHIMFEQLVESLDVVRDIEKVGSSGGRTSKPVVIAVCGQL

SEQ ID NO: 70124 - protein, 127 aa, Gossypium hirsutum
  Clone ID: LIB3166-015-P1-K1-G10.pep
HASAHASAHSFCHYNVHSRDDELEDSTQIRPVVRTALALCSTVYIMTSFFGFLLFGDATMDDVLANFDTNLGIPYSSLLNDAVRVSYAAHLMLVFPIVFYPLRLNMDGLLFPYSSPLAQSNTRVACI

SEQ ID NO: 70125 - protein, 86 aa, Gossypium hirsutum
  unsure (1)..(86): unsure at all Xaa locations
  Clone ID: uC-gsflmaxxa006e12b1.pep
MASNPKVFFDMTIGGQPAGRLVMEPCADSTPRTAENXHALCTVVKGARPGSSSVFYGVWCCYKVGRKLVYPTGEFSIDKAAIHYTR

SEQ ID NO: 70126 - protein, 118 aa, Gossypium hirsutum
  Clone ID: uC-gsronu33B146f05b1.pep
EFIYGSKFADENLIKKHTGPGILSMANAGPGTNGSQFFICTAKTEWLDGKHVVFGQVVEGMDVVKAIEKVGSSSGRTSKPVVVCMISNSTSVAEVFSRIDHKFDLMYAKRAFVHWYCW

SEQ ID NO: 70127 - protein, 103 aa, Gossypium hirsutum
  Clone ID: uC-gsflmaxxa058c04b1.pep
MRECISIHIGQAGIQVGNACWELYCLEHGIQPDGQMPSDKTVGGGDDAFNTFFSETGAGKHVPRAIFVDLEPTVIDEVRTGTYRQLFHPEQLISGKEDAANNF

SEQ ID NO: 70128 - protein, 53 aa, Gossypium hirsutum
  Clone ID: uC-gsflnu33B137a05b1.pep
LVLKKPRFVSKKRLRSYNFTVHFIHRKYQKLVHYPRYSTLKTHIQNQQENTSQ

SEQ ID NO: 70129 - protein, 52 aa, Gossypium hirsutum
  Clone ID: uC-gsflmaxxa060b07b1.pep
HDDRWSARWSDCVRAFLRLTSLHFLNLSFFSLSYFIFFFLSLLSPFLLHFLS

SEQ ID NO: 70130 - protein, 47 aa, Gossypium hirsutum
  Clone ID: uC-gsflnu33B058c02b1.pep
TSYTSLHNLTFIHWKQSYILLYSLSNLLRTPGFSNWISKDNSRCLQG

SEQ ID NO: 70131 - protein, 34 aa, Gossypium hirsutum
  Clone ID: uC-gsronu33B029c07b1.pep
CLSFRLFYGAVFIDTGLVANFRLHLLSIFIIYLY

SEQ ID NO: 70132 - protein, 211 aa, Gossypium hirsutum
  unsure (1)..(211): unsure at all Xaa locations
  Clone ID: GOSHI-09MAY01-C104_2.pep
LLRPSGVYFEPQYSLGRKMLTKVIAMASIVDDTYDSYATYEELIPYTNAIERWDIKCIDELPEYMKPSYKALLDVYEEMVQLVPEHGRQYRVEYAKNAMIRLAQSYLVEARWTLQNYKPSFEEFKANALPXCGYAMLAITSFVXMGDIVTPENLXWAASDPKIIQRHNYLRFMDXCAEHKFKHRERRLLAIDVHEEMRTDKSLEFQQPVEA

SEQ ID NO: 70133 - protein, 554 aa, Gossypium hirsutum
  Clone ID: GOSHI-09MAY01-C104_1.pep
MASQVSQMPSSSPLSSNKDEMRPKADFQPSIWGDFFLNCPDKNIDAETEKRHQQLKEEVRKMIVAPMANSTQKLAFIDSVQRLGVSYHFTKEIEDELENIYHNNNDAENDLYTTSLRFRLLREHGYNVSCDVFNKFKDEQGNFKSSVTSDVRGLLELYQASYLRVHGEDILDEAISFTSNHLSLAVASLDHPLSEEVSHALKQSIRRGLPRVEARHYLSVYQDIESHNKVLLEFAKIDFNMVQLLHRKELSEISRWWKDLDFQRKLPYARDRVVEGYFWISGVYFEPQYSLGRKMLTKVIAMASIVDDTYDSYATYEELIPYTNAIERWDIKCIDELPEYMKPSYKALLDVYEEMEQLVAEHGRQYRVEYAKNAMIRLAQSYLVEARWTLQNYKPSFEEFKANALPTCGYAMLAITSFVGMGDIVTPETFKWAANDPKIIQASTIICRFMDDVAEHKFKHRREDDCSAIECYMEEYGVTAQEAYDVFNKHVESAWKDVNQEFLKPTEMPTEVLNRSLNLARVMDVLYREGDGYTYVGKAAKGGITSLLIEPIAL

SEQ ID NO: 70134 - protein, 87 aa, Gossypium hirsutum
  unsure (1)..(87): unsure at all Xaa locations
  Clone ID: LIB3147-023-Q1-K1-C9.pep
GPGASDAYAHASAHASDDVFNKHVESASPDFNGELGKPTXMPTEVLNRSLNLARVMDVLYREGDGYTYVGKAAKGGITSLLIEPIAL

SEQ ID NO: 70135 - protein, 46 aa, Gossypium hirsutum
  Clone ID: uC-gsronu33B121a02b1.pep
GFVGVCLDRFQHVINSAYYRSYFVLFLFIYYNSSFIYFFYFIFFLI

SEQ ID NO: 70136 - protein, 407 aa, Gossypium hirsutum
  Clone ID: GOSHI-09MAY01-C134_1.pep
PRPGGEPIVFTYEVAFEESDIKWPSRWDAYLKMEGSKVHWFSILNSLMVITFLAGIVLVIFLRTVRRDLTRYEELDKEAQAQMNEELSGWKLVVGDVFRAPSHPALLCIMVGDGVQILGMGVVTILFAALGFMSPASRGTLITGMLFFYMILGIAAGYVAVRLWRTIGCGDHKGWASVAWKAACFFPGIAFLILTILNFLLWGSHSTGAIPFSLFVILLLLWFCISVPLTLVGGYFGAKAPHIEYPVRTNQIPREIPAQKYPSWLLVLGAGTLPFGTLFIELFFIMSSIWMGRVYYVFGFLLIVMVLLVVVCAEVSLVLTYMHLCVEDWKWWWKSFFASGSVAIYIFLYSVNYLIFDLKSLSGPVSATLYLGYSLFMVLAIMLATGTIGFLSSFWFVHYLFSSVKLD

SEQ ID NO: 70137 - protein, 92 aa, Gossypium hirsutum
  unsure (1)..(92): unsure at all Xaa locations
  Clone ID: uC-gsronu33B060b11b1.pep
CILAPAPEMEDPVLTMQKLQEMLPQRFXSWLLALGAGTLPFGTLWIELFFIMLSIWMGRVYYVFGFVLIAMVLLVVVCARRVSGLTHMHLCV

SEQ ID NO: 70138 - protein, 72 aa, Gossypium hirsutum
  Clone ID: LIB3083-047-Q1-G1-F1.pep
LDLLHHFIIYYRCYIELIYFVRGTLVKCNNNSMAQFHLNSLVVVTIMHGTAGFYVVFVTFLGATLYHLLGDL

SEQ ID NO: 70139 - protein, 206 aa, Gossypium hirsutum
  Clone ID: GOSHI-09MAY01-C124_1.pep
MFLPIFFIFSFLFSSTNAADFCVGDLNGPVGPAGYSCKKTATEDDFSFSGLLRTAGNTSNLVKAAITPAFSTQFPGVNGLGISIARLDLAVGGVIPMHTHPRASELILVMDGTLFAGFISSDNKVYSKSLNEGDIMIFPQGLLHFQINTGKTQSVAFVSFNSADPGVQILDFALFTNDLPTDIIEGTTFLDAAQIKKLKGVLGGTG

SEQ ID NO: 70140 - protein, 86 aa, Gossypium hirsutum
  Clone ID: LIB3189-008-P1-K1-A10.pep
LNGPVGPAGYSCKKTATEDDWSFSGLLRAASNTSNLVKAAITPAFSTQFPGVNGLGISIPRLDLAVGGVIPMHTHPRASELILVYK

SEQ ID NO: 70141 - protein, 56 aa, Gossypium hirsutum
  Clone ID: GOSHI-09MAY01-C394_6.pep
GKFKIFNTNNLWVNLNAIKRLVEADALKMEIIPNPKEVNGIKVLQLEIAAGAAIRV

SEQ ID NO: 70142 - protein, 73 aa, Gossypium hirsutum
  Clone ID: GOSHI-09MAY01-C394_5.pep
TWAMSSLTLKGKASDQAPALANIQTAQKRPVSQPVSQPKPQASLNLRYFFTFGLGSNIWIENLSESLLRFFLV

SEQ ID NO: 70143 - protein, 465 aa, Gossypium hirsutum
  Clone ID: GOSHI-09MAY01-C394_1.pep
MEKLEHLKSAVAALSEISENEKNGFINLVSRYLSGEAQHIEWSKIQTPTDEVVVPYDTLSPSPDDPAETKKLLDKLVVLKLNGGLGTTMGCTGPKSVIEVRNGLTFLDLIVIQIENLNSKYGCNVPLVLMNSFNTHDDTLKIVDKYSNSNIEIHTFNQSQYPRLVVEDFAPLPSKGQHGKDGWYPPGHGDVFPSLMNSGKLDAFLSQGKEYVFVANSDNLGAIVDLKILNHLVQNKNEYCMEVTPKTLADVKGGTLISYEGKVQLLEIAQVPDEHVNEFKSIEKFKIFNTNNLWVNLNAIKRLVEADALKMEIIPNPKEVNGIKVLQLETAAGAAIRFFDHAIGINVPRSRFLPVKATSDLLLVQSDLYTLVDGFVIRNKDRANPTNPSIELGPEFKKVGNFLSRFKSIPSIIELDSLKVTGDVWFGAGIVLKGKVSIAAKPGVKLEIPDGAVIENKEINGPEDI

SEQ ID NO: 70144 - protein, 75 aa, Gossypium hirsutum
  Clone ID: uC-gsronu33B130b01b1.pep
NSRLSLKFHNMVVFVLIAGSSSTSRKGMSSATDKGGSTSLFPASESERKGDGKNQRSLLKGRKKIREKERRGGRN

SEQ ID NO: 70145 - protein, 139 aa, Gossypium hirsutum
  Clone ID: LIB3583-054-P1-K1-B2.pep
MEKLEHLKSAVAALSEISENEKNGFINLVSRYLSGEAQHIEWSKIQTPTDEVVVPYDTLSPSPDDPAETKKLLDKLVVLKLNGGLGTTMGCTGPKSVIEVRNGLTFLDLIVIQIENLNSKYGCNVPLVLMNSFNTHDDT

SEQ ID NO: 70146 - protein, 127 aa, Gossypium hirsutum
  unsure (1)..(127): unsure at all Xaa locations
  Clone ID: LIB3083-004-Q1-L1-D2.pep
RNHQPNPIFEINPLNKTQLPLLVVENFAPLPSKGQHGKDGWYPPGHGDVFPSLMNSGKLDAFLSQGKEYVFVANSDNLGAIVDLKILNHLVQNKNEYCMEVTPKTLADVKGGTLIXNKGKVQLLEIA

SEQ ID NO: 70147 - protein, 67 aa, Gossypium hirsutum
  unsure (1)..(67): unsure at all Xaa locations
  Clone ID: LIB3135-032-Q1-K1-G6.pep
PVHLSSTDGVIQVKDLANPTNPYIELGPEFKNVGLLLYRFKXKPSIIELDSLKATGDVXYGAGIVLK

SEQ ID NO: 70148 - protein, 137 aa, Gossypium hirsutum
  Clone ID: GOSHI-09MAY01-C384_1.pep
DLLIGRCLSLFYQNSRLESTRRKLIAQASMGLASAVHQGGGIRISLNFHLRVASVSPTVQLPRWTGFRFSNHRVSLVHSVSHKRRTICFPVARSKGMDRRIICLEKRRGELQILMLIPRRNFRKVKLMHHLVKTVAF

SEQ ID NO: 70149 - protein, 599 aa, Gossypium hirsutum
  Clone ID: GOSHI-09MAY01-C354_1.pep
EGDGDEDEGKSEDPNAISRFRISEALREKLKSKGIEALFPIQAMTFDVILDGTDLVGRARTGQGKTLAFVLPILESLTNGPGKSSRTSGYGRAPSVLVLLPTRELAKQVFEDFEVYGEAVGLTSCCLYGGAPYHTQEMKLKRGVDIVVGTPGRVKDHIERGNIHLGSLTFRVLDEADEMLRMGFVDDVELILGKVADASKVQTVLFSATLPDWVKGIASRFLKPSKKTVDLVGNEKMKASTNVRHIVLPCSKSARSQLIPDIIRCYSSGGRTIIFTETKDSASELAGLLPGSRALHGDIQQAQREVTLNGFRSGKFMTLVATNVAARGLDINDVQLIIQCEPPRDVEAYIHRSGRTGRAGNTGVAVMLYDPKRSSVSKIERESGVKFEHISAPQPVDIAKSAGVEAAKIITQVSDSVIPAFKDVAQELLETSGLSAQDLLAKALAKAAGYSEIKSRSLLTSMENHVTLLLPAGKPIYTLSFVFGVLKRFLPEEKVQSVQGLTLTADGMGAVFDVAEDDVEAFLTGAENAANVNLEVLKNALPPLQQRDMSRGRFGGGRGGFGDRNGGGSRFSGGRGGGRGGFSDRRNGGGRGHYNSKRW

SEQ ID NO: 70150 - protein, 139 aa, Gossypium hirsutum
  Clone ID: GOSHI-09MAY01-C314_2.pep
MANAASGMAVHDDCKLKFLELKAKRTHRFIVFKIEEKQKQVIVEKLGEPTESYEDFTKCLPADECRYAVYDFDFLTAENVPKSRIFFIAWSPDTSRIRSKMIYASSKDRFKRELDGIQVELQATDPTEMGLDVFKSRAN

SEQ ID NO: 70151 - protein, 139 aa, Gossypium hirsutum; identical to SEQ ID NO: 70150
  Clone ID: GOSHI-09MAY01-C314_1.pep

SEQ ID NO: 70152 - protein, 114 aa, Gossypium hirsutum
  Clone ID: LIB3272-019-P1-K1-E6.pep
MANAASGMAVHDDCKLKFLELKTKRTHRFIVFKIEEKQKQVIVEKLGEPTESYEDFTKCLPADECRYAVYDFDFLTAENVPKSRIFFIAWSPDTSRIRSKMIYASSKDRFKREL

SEQ ID NO: 70153 - protein, 118 aa, Gossypium hirsutum
  unsure (1)..(118): unsure at all Xaa locations
  Clone ID: uC-gsronu33B081h01b1.pep
SQVEVLELKTKRTQRFNGFKIEEKQKQGIVEKLGEPTESYEDFTKCLPADECRYAVYDFDFLTVENVPKSRIFFIAXWSPDSXRIRSQMIYASFKDRFMRELDGFKWNLQQQSHLNGF

SEQ ID NO: 70154 - protein, 58 aa, Gossypium hirsutum
  unsure (1)..(58): unsure at all Xaa locations
  Clone ID: LIB3148-039-Q1-K1-G4.pep
GSACLPADECRYAVYEFDFLTAENVPKSRIFFIAWSPDTSRIXSKMIYPSSKNRFKRE

SEQ ID NO: 70155 - protein, 98 aa, Gossypium hirsutum
  Clone ID: LIB3147-023-Q1-K1-E7.pep
FLELKTKRTHRFIVFKIEEKQKQVIVEKLGEPTESYEDFTKCLPADECRYAVYDFDFLTAENVPKSRIFFIAWSPDTSRIRSKMIYASSKDRFKRELD

SEQ ID NO: 70156 - protein, 48 aa, Gossypium hirsutum
  Clone ID: LIB3149-055-Q1-K1-B5.pep
MANAASGMAVHDDCKLKFLELKAKRTHRFIVSKLGEQNKYWESWEHQS

SEQ ID NO: 70157 - protein, 67 aa, Gossypium hirsutum
  unsure (1)..(67): unsure at all Xaa locations
  Clone ID: LIB3166-043-P1-K1-E12.pep
LKAKRTHRFIVFKIEEKQKQVIVHKLGXPTKSYEDTTKCLSTDAIQKVYLXFDYLTADNVPKSIIFF

SEQ ID NO: 70158 - protein, 82 aa, Gossypium hirsutum
  Clone ID: GOSHI-09MAY01-C304_1.pep
PRVRGPGNSSSLSFELCISYSKRSIITQNQIFEALFLVKITSSLGRKNVAKSGLYFSIYPSSPSLLLARFTSPSTAYRTSSI

SEQ ID NO: 70159 - protein, 265 aa, Gossypium hirsutum
  Clone ID: GOSHI-09MAY01-C334_1.pep
MACSATSSAAALISSKPRAFSSNSKPFSQSLSLPNPFTGLPAPLLSRPASFSLSRTSPSRKSFVVKATSELPLVGNPAPDFEAEAVFDQEFIKVKLSEYIGKKYVILFFYPLDFTFVCPTEITAFSDRYEEFEKLNTEILGVSIDSVFSHLAWVQTDRKSGGLGDLKYPLISDVTKTIAKAYGVLIPDQGIALRGLFIIDKEGIIQHSTINNLAIGRSVDETMRTLQALQYVQENPDEVCPAGWKPGEKSMKPDPKLSKDYFAAI

SEQ ID NO: 70160 - protein, 165 aa, Gossypium hirsutum
  Clone ID: GOSHI-09MAY01-C294_2.pep
MQNPVAKVAVVGSGISGSVCAATLARNGISVTLFDSARGPGGRMSQRREISEDGRELLFDHGAPYFTVTNPDVLSVVTEWESRGLVAEWKSNFGSFDCFTNKFVNTEHQERESKKYVGVPGMNSICKALCHEPGVDSKFNMGIGKFEWLEHENLWSLIGLDGQHL

SEQ ID NO: 70161 - protein, 394 aa, Gossypium hirsutum
  Clone ID: GOSHI-09MAY01-C294_1.pep
SPSSGGHSIPAHCCIRSTLPDRCKTCRQVAVVGSGISGSVCAATLARNGISVILFDSARGPGGRMSQRREISEDGRELLFDHGAPYFTVTNPDVLSVVTEWESRGLVAEWKSNFGSFDCFTNKFVNTEHQERESKKYVGVPGMNSICKALCHEPGVDSKFNMGIGKFEWLEHENLWSLIGLDGQHLGHFKGVVASDKNIALPRFTAITGQPPPLDLSLAPELVKLHDIPIYPCFALMLAFNEPLSLVPAKGLSFANSKVLSRAQCESSKPGRSSTSERWVLHSTTEYAKDVIAQSGLEKPSKETLSKVGNEMLQEFLSTGLSIPHPRVRKAHRWGSAFPAASIAKEEKCVWSEKKKLAICGDFCLSPNVEGAILSGLAAASKLKGLISTLYYNL

SEQ ID NO: 70162 - protein, 134 aa, Gossypium hirsutum
  Clone ID: LIB3582-024-P1-K1-A11.pep
MEYAIDKLLSSPSSAVFHTDLSLAPELVKLHDIPIDPCFALMLGFNEPLSLVPANGLSFTNSKVLSRAHCESSKPGRSSTSERWVLHSTTEYAKDVIAQSGLEKPSKETLSKVGNEMLQEFLGTGLTISQPFFM

SEQ ID NO: 70163 - protein, 218 aa, Gossypium hirsutum
  Clone ID: GOSHI-09MAY01-C284_1.pep
MGFERYLASVLIVIMLSFITSSQGYKFYVGGRDGWVVSPSENYNHWAERNRFQVNDTLFFKYKKGSDSVLLVTREDYFSCNTKNPIQSLTEGDSLFTFDRSGPFFFITGNADNCKKGQKLIVVVMAVRHKPQQQPPSPSPSSAVTTAPVSPPTLPIPETNPPVESPKSSEAPSDAVEPSPPEHGSGSFKLVCSTWLVLGFGIWVSMALGLENVVCFWC

SEQ ID NO: 70164 - protein, 174 aa, Gossypium hirsutum
  Clone ID: LIB3582-023-P1-K1-H10.pep
NDAVLFLVILVLNFAVFKYKKGSDSVLLVTREDYFSCNTKNPIQSLTEGDSLFTFDRSGPFFFITGNADNCKKGQKLIVVVMAVRHKPQQQPPSPSPSSAVTTAPVSPPTLPIPETNPPVESPKSSEAPSHDAVEPAPPEHRSGSFKLVCSTWLVLGFGIVSMALIENVVCFWC

SEQ ID NO: 70165 - protein, 203 aa, Gossypium hirsutum
  unsure (1)..(203): unsure at all Xaa locations
  Clone ID: GOSHI-09MAY01-C254_1.pep
MALFASESVAYGGIKAASPSQAPRSPQQQQQRQELTRDQSVSSLNKQGSIFSLTLDEIQLKSGKAFGSMNMDEFLANLWNVEENQAPPQLDQNEARDDKDKGNGGQPTLARQGSFSIPTPLCKKTVDEVWFEIQKELPQQRKANNIADHEPLXRQQTFGEMTLEDFLIKAGVVQEPSSASSQQRKVAATRPNGTSLEATYGMG

SEQ ID NO: 70166 - protein, 120 aa, Gossypium hirsutum
  Clone ID: LIB3582-041-P1-K1-A9.pep
ESVAYGGIKAASPSQAPRSPQQQQQRQELTRDQSVSSLNKQGSIFSLTLDEIQLKSGKAFGSMNMDEFLANLWNVEENQAPPQLDQNEARDDKDKGNGGQPTLARQGSFSIPTPLCKKTV

SEQ ID NO: 70167 - protein, 261 aa, Gossypium hirsutum
  Clone ID: GOSHI-09MAY01-C244_1.pep
RPRVRPRVREKELEEMNNMTRQEFAAYLRRKSSGFSRGASIYRGVTRHHQHARAPARIGRVAGNKDLYLGTFSTQEEAAEAYDIAAIKFRGLNAVTNFDMSRYDVNSIANSNLPIGGLNNKSKNCNDSTSDRSTDEERDHSGSSGMTFTSQPAASSTVGFAINIKQDPSDYWSNVLGYNDTGASLSSAKNPIFHHSPNGSGFQSPSGFCTGNGGNSAVNGSINNGLFNRGGYVGQEQQESSAATNSHPLATPIVLNNSDNY

SEQ ID NO: 70168 - protein, 145 aa, Gossypium hirsutum
  Clone ID: LIB3582-023-P1-K1-C6.pep
HASAHASGHVHDNDYLLKFFIVVLPVYLGGYDKEDKAARAYDLAALKYWGPTTTTNFPISNYEKELEEMKNMTRQEFVASLRRKSSGFSRGASIYRGVTRHHQHGRWQARIGRVAGNKDLYLGTFSGFFFSHLIHFQIKIAKQVH

SEQ ID NO: 70169 - protein, 416 aa, Gossypium hirsutum
  unsure (1)..(416): unsure at all Xaa locations
  Clone ID: GOSHI-09MAY01-C264_1.pep
MGISDEKVVAVIMVGGPTKGTRFRPLSLNIPKPLFPLAGQPMVHHPISACKRIPNLAQIYLVGFYEEREFAMYVSSISTELRVPVRYLREDKPHGSAGGLYNFRDLIMEDNPSHIFLLNCDVCCSFPLPEMLEAHKRYGGMGTILVIKVSAESASEFGELVADPVTNELLHYTEKPETFVSDRINCGVYVFTPDIFTAIQGVSSRRKDRANLRRLSSFEALQSATSDPPSDFVRLDQDILTPFAGKKKLYTYETMDFWEQIKTPGKSLKCSGLHLAQFRFTSPNLLASGDGTKTATIIGEVNIHPSAKVHPSAKIGPNVSISANARIGAGVRLISCIILDGVEIMENAVVFHAIVGWKSSIGKWSRVQAEGDYKAKLGITILGEAVTVEDEVVVTNSIVLXPHRTLNVSVQDEILL

SEQ ID NO: 70170 - protein, 67 aa, Gossypium hirsutum
  Clone ID: LIB3582-023-P1-K1-E6.pep
LLALPPAIFTLNSNRLDSLQAEGDYKAKLGITILGEAVTVEDEVVVTNSIVLPHKTLNVSVQDEILL

SEQ ID NO: 70171 - protein, 138 aa, Gossypium hirsutum
  Clone ID: GOSHI-09MAY01-C204_1.pep
MFCFRSNPYALFFLFFFSLFLFGHETGSQALNVQTLNISGYCRSFVFGEREQSEVLAWRKTERRNLAEGSEGDNNSSLILAEKRTYRRDPLNDFHKYTGGWNISNEHYWASVGFTAAPFFVIAAVWFVIFALCLSSYA

SEQ ID NO: 70172 - protein, 221 aa, Gossypium hirsutum
  unsure (1)..(221): unsure at all Xaa locations
  Clone ID: GOSHI-09MAY01-C224_2.pep
GQKGLGIKGXMIAKKNYAGKGLIKKTLALPEESSTMRKVDDEVRDGAIPAYLMDREXTTRAKVVSNTIKQKRKEKAGKWEVPIPKVRPVAEDEMFKVLRTGQRKTKQWKRMVTKCTFVXTWFSRKPXKYEXFIRPSXLRFLKLCSHPELXCTFNLDIIGVKKNPNGPMYTSLGVMTKGTIIEVNVSELGLVTPAGKVVWGKYAQVTNNPXNDGCINAVLLV

SEQ ID NO: 70173 - protein, 260 aa, Gossypium hirsutum
  Clone ID: GOSHI-09MAY01-C224_1.pep
MPQGDYIELHRKRHGYRHDFFEKKRKKEARQVHERSAKAQKALGIKGKMIAKKNYAEKALMKKTLAMHEESSTRRKVDDEVQDGAIPAYLMDRENTTRAKVLSNTIKQKRKEKAGKWEVPIPKVRPVAEDEMFKVLRTGKRKTKQWKRMVTKCTFVGPGFTRKPPKYERFIRPSGLRFTKADVTHPELKCTFNLDIIGVKKNPNGPMYTSLGVMTKGTIIEVNVSELGLVTPAGKVVWGKYAQVTNNPENDGCINAVLLV

SEQ ID NO: 70174 - protein, 64 aa, Gossypium hirsutum
  Clone ID: GOSHI-09MAY01-C38757_1.pep
HASAHASAHASAHASALSSTPPDWIGSHPLLYTISFFLLLISFMNLCAAPRRCLTQHSCTFITQ

SEQ ID NO: 70175 - protein, 115 aa, Gossypium hirsutum
  Clone ID: GOSHI-09MAY01-C38647_1.pep
MNGMLQHFTVSMSCGGFSSSSSSDEEYSSSSMAAQVSPFPRPGRISRSMSYSARMVRRSEAIVCHPKSSLVAVMIQAIAHRVNYVWVIEEDCSLVGIVTFSDMLKVVRESFETMA

SEQ ID NO: 70176 - protein, 69 aa, Gossypium hirsutum
  Clone ID: GOSHI-09MAY01-C38627_1.pep
RNIDRIASFKIKLDYLDLCLIFLLFLFNLLIRFFFHLALMVKRLRNRSPFAVQNHSCSVLLRRLAGRVG

SEQ ID NO: 70177 - protein, 440 aa, Gossypium hirsutum
  unsure (1)..(440): unsure at all Xaa locations
  Clone ID: GOSHI-09MAY01-C38197_1.pep
MDAAGNRSCKLLLFFFAAIIPALQGHIGEYDEYWKQRELEAKENTEQAYNPNPEEVTQHVNHLVSRSLMRLNSTRRHLRARKKGGPCDPTSPIDQCWRCDRNWEKNRQRLADCAIGFARGTIGGKYGRIYVVTDPSDDDFLNPKPGTLRHAVIQKEPLWIIFARAMIIRLKEELIMSGNKTIDARGANVHVAYGAGITIQYVRNVIIHGLHIHHIVPGNGGMIRDSVNHYGFRTKSDGDGISLFGATNVWLDHLSMYKCRDGLIDAXQGSTAITISNCHFTHHDQVMLFGANDNHKMDEKMQITLAFNHFGKGLVQRMPRCRWGFIHVVNNDYTHWLMYAIGGSSHPTVISQGNRYIARPHVASKEVTKRDYAPPEVWKTWNWRSEGDLLLNGAFFSQSGDPKASSKFKGDTKVSAKPAYKVDLLTKDSGTLICIRGRAC

SEQ ID NO: 70178 - protein, 212 aa, Gossypium hirsutum
  Clone ID: GOSHI-09MAY01-C38117_1.pep
ADFVRGYPFSLREGVPTAGAHGLWLNIPDYDAPTQLVKPLERNTRFVDAVLTIPKGTLFPMCGMNLAFDRDLIGPAMYFGLMGDGQPIGRYDDMWAGWCIKVICDHLGLGVKTGLPYIYHSKASNPFVNLTKEYKGIFWQEEIIPFFQQAVLPKDCTTVQKCYVELAKQVKEKLSKVDPYFDKLADAMVTWIKAWDELNPPTAGSVPNGKAA

SEQ ID NO: 70179 - protein, 56 aa, Gossypium hirsutum
  Clone ID: LIB3135-042-Q1-K1-A9.pep
KTGLPYIYHSKASNPFVNLRKEYQGISWHDEIMPFFQQAVLAKDCTTVQKCYVEQA

SEQ ID NO: 70180 - protein, 260 aa, Gossypium hirsutum
  Clone ID: GOSHI-09MAY01-C38027_1.pep
FGMLIEFLFEKFPNFEDATETAIGDLQAFYKASKQRFDSDPAFKERAQQAVVRLQGGEEKYRRAWAQICEISRTEFHKVYQRLGVHLEEKGESFYNPYIPGVIEGLTKQGLVEESQGARVIFIEGINIPLTLASGDGGFNYASTDLAALRYRLNEEKAEWIIYVTDVGQQQHFDMVFKAAKRAGWLPQGDNYPKASHVGFGLVLGEDGKRFRTRNTEVVRLVDLLDEAKNRSKAALIERGKGEEWTEEEIESTADAVGYG

SEQ ID NO: 70181 - protein, 64 aa, Gossypium hirsutum
  Clone ID: uC-gsronu33B099e05b1.pep
GCLCYHWLAMFLFYIINEKLELNSLLDGSRSINDLEFILEEKGESFYNPYIPGVIEGVDQTRFS

SEQ ID NO: 70182 - protein, 61 aa, Gossypium hirsutum
  Clone ID: GOSHI-09MAY01-C38357_1.pep
SVRFQILNISLQVFLFCIMRFGGWFPISLRRWGSFLYFTVNVYGNLGFVPPRACTSLWYYL

SEQ ID NO: 70183 - protein, 124 aa, Gossypium hirsutum
  Clone ID: GOSHI-09MAY01-C38207_1.pep
MCVNKIDQITLEELEILDKLPHYCPISAHLEWNLDGLLDKIWEYLDLTRIYTKPKGMNPDYEDPVILSSKRRTVEDFCTRIHKDMLKQFKYALVWGSSVKHKPQRVGKDHELEDEDVVQIIKKV

SEQ ID NO: 70184 - protein, 119 aa, Gossypium hirsutum
  Clone ID: GOSHI-09MAY01-C39957_1.pep
MVQRLTYRTRHSYATKSNQHRVVKTPGGKLVYQTTKKRASGPKCPVTGKRIQGIPHLRPAEYKRSRLPRNRRTVNRAYGGVLSGSAVRERIIRAFLVEEQKIVKKVLKIQKTKEKQSSK

SEQ ID NO: 70185 - protein, 97 aa, Gossypium hirsutum
  unsure (1)..(97): unsure at all Xaa locations
  Clone ID: uC-gsronu33B164e10b2.pep
EINYRTRNRYNTKYNQHRVGGTPGGKLVYQTTKIXVGGPNCPVTGKRFKGIPYLKPGEYKRSRLPRNRLTVNRAYGGGLSGSAVPERIIRVLWVVEL

SEQ ID NO: 70186 - protein, 213 aa, Gossypium hirsutum
  unsure (1)..(213): unsure at all Xaa locations
  Clone ID: GOSHI-09MAY01-C39947_1.pep
VLLQQVAADLLKQYKDKFQGGALSVTWNYLRESMNTYLSQPNPVTARWESEDHLRDPKFQLDAFRYRTSRLLQSVAARLQKHTKTLGSFGAWNRCLNHLLTLAESHIESXILAKFIEAVQNCPDASSQAALKLLCDLYALDRIWKDIRTYRNVDYVAPNKAKAINKLTQYLSFQVRNIAGEFIDAFDLPPYILRAPIAMQSEAYSQYTQLVGF

SEQ ID NO: 70187 - protein, 88 aa, Gossypium hirsutum
  Clone ID: GOSHI-09MAY01-C39887_1.pep
GAMKNIKQEKKTLLERTKESMKVKILKNHDPQPKKAGLHFAFLSPSGSEVKWRQERLHQWKHRWWRRQREEGLGRQWARRLEQVHLMG

SEQ ID NO: 70188 - protein, 200 aa, Gossypium hirsutum
  Clone ID: GOSHI-09MAY01-C39867_1.pep
ICLCRRKSGKKMEERDVAPPKQSVVEIPRDKPAGESDNRSSGLSGVVNKEAKSSGTKNLVFFGKASMAFDLEDLLRASAEVSGKGTFGTTYKATLEMGVVVAVKRLKDVTASEKEFKEKMEVVGSMDHQNLVPLRAYYFSADEKLLVYDYMPVGSLSSLLHGNRRSGRTPLNWDTRSGIALGAAKSIAYLHSKGPGISHG

SEQ ID NO: 70189 - protein, 96 aa, Gossypium hirsutum
  Clone ID: GOSHI-09MAY01-C39837_1.pep
KKKILESVQKGPFTNWPKPVTKIIQRPEIQTKPNITSPNQPSPDPITIGWEALALAPTSAATDIPSHVAPLARASYACLRLRTCHIRNLCTQYLPR

SEQ ID NO: 70190 - protein, 129 aa, Gossypium hirsutum
  Clone ID: GOSHI-09MAY01-C39537_1.pep
MSNPRLEGKVALITGGASGIGEETARFFVQHGALVVIVDVQDDLGNQVAASIGLDKVSYRHCDVREEKQVEEAVSFTVEKYGKLDILFSNAGTLGSLTGILEIDLDDFDNTIATNVRGVAATIKHAARA

SEQ ID NO: 70191 - protein, 80 aa, Gossypium hirsutum
  Clone ID: GOSHI-09MAY01-C39747_1.pep
PRVRSNLNDFLLYCPSAGSDALSPWETIGSQGARNFMLCKKPRTEKVKDDGKAAESINRKASGNWKAWFNKSLNLKISSH

SEQ ID NO: 70192 - protein, 75 aa, Gossypium hirsutum
  Clone ID: LIB3825-016-Q1-N6-G10.pep
PMPLTSLIITWMPLLITGFLPISRVIISCPRSRTCSCTCRSHFRGEKNEIKRGILLEVKTMMVSCVSGLQETESQ

SEQ ID NO: 70193 - protein, 105 aa, Gossypium hirsutum
  Clone ID: LIB3147-015-Q1-K1-F11.pep
TRDHRLSVHMPILISTFLDCIRSNFHRPSIPICKNPTAPPTLVQYYQFQFFNSLFNLCATFLSYTHRLSVSCNLETQFTITVLTSNNITPFYFIFSPSKMASAGT

SEQ ID NO: 70194 - protein, 77 aa, Gossypium hirsutum
  Clone ID: GOSHI-09MAY01-C39707_1.pep
PHPITLPTLFPSPVPPHRRQIYFPLTAPEPNHINSNSTSGGWNFQFRESGSIQRHIPRVQTSDRLSLLIRQKGKGRD

SEQ ID NO: 70195 - protein, 42 aa, Gossypium hirsutum
  Clone ID: LIB3147-013-Q1-K1-H7.pep
PNYINSNSTSRRWNFQLRESGSIQRHIPRVQTSDRLSLLIKQ

SEQ ID NO: 70196 - protein, 106 aa, Gossypium hirsutum
  Clone ID: GOSHI-09MAY01-C39697_1.pep
STKGSNQKMLPKYCINHIFKCMFLFFTTMLMQILIAQPRQTPNIVTNNGKNVSNEYPVAERFVSIERDAFMFVVELQVAMNHNRPSRRGKAEPRVAVQLENITPSS

SEQ ID NO: 70197 - protein, 69 aa, Gossypium hirsutum
  Clone ID: GOSHI-09MAY01-C39657_1.pep
YGRGDYFLVVHDFPDYMDARARVDEAYKDRKKWLKMSILSTAGSGKFSSDRTIAQYAKEIWNIEECRVP

SEQ ID NO: 70198 - protein, 93 aa, Gossypium hirsutum
  Clone ID: GOSHI-09MAY01-C39117_1.pep
ELKIEQVAVTRDEMEMYVDLHPLTNTTPFTVVESLSVAKALVLFRQVGLRHLLIVPKYQGAGVAPVVGILTRQDLRAYNILSAFPHLERPKLS

SEQ ID NO: 70199 - protein, 225 aa, Gossypium hirsutum
  unsure (1)..(225): unsure at all Xaa locations
  Clone ID: GOSHI-09MAY01-C39077_1.pep
ILLGCGETERNELLRRISQDVPEAAATDLLFRAASEEAAIFDVDIDHNLVAGLMTHIYRTDPVKKELLERTKRPKFGPDASKAVVAKLIDGYLAEMARDPYLPGANXLTLLKYVSSVSRPCHDGLYRGIDMYLKEHPGISISERKRICRLMDCKKLSAEACMHAAQNERLPLRVVVQVLFFEQARATTSXGSSTPDLPGSIRALPPGRSHRSSRSTTTNTEEDWD

SEQ ID NO: 70200 - protein, 71 aa, Gossypium hirsutum
  Clone ID: GOSHI-09MAY01-C39347_1.pep
VVTENFQTSKCSPASYEKQYVVYLHKNWDSIIKMCKSMVYHLLVESVANDCSSISPSERISPPFVACSRGP

SEQ ID NO: 70201 - protein, 181 aa, Gossypium hirsutum
  Clone ID: GOSHI-09MAY01-C39297_1.pep
MLCQKRYPLTCNMPVPDTVARHHTHPVGPNQCCSAVVQQIAVPVSTVWSVVQRFDNAQAYKHFVKSCHVIVGDGEVGTLREVSVISGLPAARSTERLEILDDERHVISFSVVGGDHRLANYRSVTTLHPSTSGNGTVVVESYLVDVPLGNTKDDTCVFVDTIVRCNLQSLAQIAENLSRRK

SEQ ID NO: 70202 - protein, 117 aa, Gossypium hirsutum
  Clone ID: LIB3147-039-Q1-K1-C12.pep
LFFTKKKRKNSVKMATSSHWLRSQRISPGANSKQRNQVIFVSRFRTLHQNRLISLSLSLSLVIRRRFCEYPMFGLPMEHLITAKFMFIISPVYVYQLLLVILFLFFFTCLICEILLY

SEQ ID NO: 70203 - protein, 130 aa, Gossypium hirsutum
  Clone ID: GOSHI-09MAY01-C39247_1.pep
DVLCLELTPLTFLLHGDGSGTEEMADDLISKGTSVLRLHSMDHDRQTEDDGTTVQSRVDPLSHMDHMDLSVMVFLTLKDLKVGNSMPIYFRKKDSSKSPRFLPKQEADFIGFSLKELPNLLRLFLFSRDS

SEQ ID NO: 70204 - protein, 175 aa, Gossypium hirsutum
  Clone ID: GOSHI-09MAY01-C39217_1.pep
NDLLQIRELQAKHSGESTETESNVSVKEEVIVSENTDNKTLEQSEPAADLNYGSVVLGATLFPDMKDGSSDSDSSAILNEDIILNTNTNKDNSPNNAAFSSSGVLELDSQHHLLISSSSSPTSSMDCFNFTKTSYQPHQYVKMEEHNFFTADEACNFFSDEQAPSLHWYSPEQWN

SEQ ID NO: 70205 - protein, 85 aa, Gossypium hirsutum
  Clone ID: GOSHI-09MAY01-C34927_4.pep
NTGPKINPNKAQTNRNLKLLLEPSRRTPLTSVPLHHPPYLRDVRYQQSLFVTPHASEISATTPGFRWSPMSAEGRGSAAMMGVAP

SEQ ID NO: 70206 - protein, 138 aa, Gossypium hirsutum
  Clone ID: GOSHI-09MAY01-C34927_2.pep
ENTVPTGEIKPVKGTPLGLTAEKKAGLQVHEVGLGYDHNYVLGGGEEKLGLKRAAKLKDPSSSRVLNVWTDAPGMQFYTGNHVNGVVGKGGAVYNKHAGLCLETQGFPNAINQPNFPSVVVQPGSKYQHTMLFEFSVE

SEQ ID NO: 70207 - protein, 127 aa, Gossypium hirsutum
  Clone ID: GOSHI-09MAY01-C34927_1.pep
ALAPHASHQRPTPPSTAPPRRALPAVPLCHASCFRDIRNNTWFPTVADEHAGEGKRYDDGRCALAERERGPNPLVVGKGGAVYNKHAGLCLETQGFPNAINQSNFPSVVVQPGSKYQHTMLFEFSVE

SEQ ID NO: 70208 - protein, 88 aa, Gossypium hirsutum
  Clone ID: LIB3825-026-Q6-K6-E4.pep
PSRRTPLTSVPLHHPPHLRDVRYQQSLFVTPRASEISATTPVTGTKQIATNRRFYLLFYAIKAILNNVKRSVFFYYKNQREIYENSKF

SEQ ID NO: 70209 - protein, 158 aa, Gossypium hirsutum
  Clone ID: GOSHI-09MAY01-C34817_1.pep
RPEFPVAPPSGESNLLFKPSPIPISKLILDGESSEEAMAALSNLLSEKADLGSVAAEKINQIPPALEAPGSCDTANRIKTGFLHFKSEKFEKYPDLYGPLAKGQCPKYLIFACSDSRVCPSHILDFQPGEAFMVRNIASMVPPYDKNKYCGVGAAIEY

SEQ ID NO: 70210 - protein, 134 aa, Gossypium hirsutum
  Clone ID: GOSHI-09MAY01-C34517_1.pep
IFVAWLDVVTYLHHHGYEQKLPWYRGKEWSYLRGGLTTIDRDYGIFNGIHHDIGTHVIHHLFPQIPHYHLVEATKAAKPVIGKYYREPKKSGPIPFHLIENLVSSMKQDHYVSNSGEIVFYQTDPNLFSPPKSA

SEQ ID NO: 70211 - protein, 69 aa, Gossypium hirsutum
  unsure (1)..(69): unsure at all Xaa locations
  Clone ID: LIB3135-022-Q1-K1-E2.pep
KRRVVQTKAAKPVIGKYYREPKKSGPIPFHLIENLVSSMXHDHYVSNSGEXVXYQTDPNLFLLQSDDHL

SEQ ID NO: 70212 - protein, 97 aa, Gossypium hirsutum
  unsure (1)..(97): unsure at all Xaa locations
  Clone ID: LIB3135-022-Q1-K1-E6.pep
PRVRTIDRDYGIFNGIHHDIGTHVIHHLFPQIPHYHLVEATKAAKPVIGKYYREPKKSGPIPFHLIENLVSSMKXDHYVSNSGEIVFYQTESQPVFS

SEQ ID NO: 70213 - protein, 229 aa, Gossypium hirsutum
  Clone ID: GOSHI-09MAY01-C34507_1.pep
SGFSHGSQKFSSSCQIQTLWVGLYKLCLAQPEHWERVLGYPSDHTRPLENDLTHRLHLLQQSFQTDTLGYHLSVLKPIYPGGLTMLSVFSGIGGAAISLHRLGIHLKGVVAVETSEAKQKILLNWWQNTGQTGELVIIEDIQKLTSKRLESLIDKLGSIDFVICQNSNMKSTEEDTLPGFDFSLFNEFVRVLQRVRSMMQRRGQLSSCLIPCTCFFVQWFRVLVIILIC

SEQ ID NO: 70214 - protein, 143 aa, Gossypium hirsutum
  Clone ID: GOSHI-09MAY01-C34457_1.pep
YRIARSAHAYAHAFVEISTDNSQQYLSSENHNGINNSNAEHSEVATEILSDCSGDGGNREKILCDLAVEEVKDISTKIEEHVQGRASTETGNSVDAEGSIDVAGDDVPHKESSHNTVVTALVLDTLPHVGLSDTEHNMDQEQH

SEQ ID NO: 70215 - protein, 73 aa, Gossypium hirsutum
  Clone ID: LIB3146-046-Q1-K1-B1.pep
GVQCDFKPFYGYQQLSLSLSLLSKHTKLHEEKKKTYLPIINVPPRLSMLFLIHIMFSFLFGFSFGKPYMRQSI

SEQ ID NO: 70216 - protein, 123 aa, Gossypium hirsutum
  Clone ID: LIB3146-046-Q1-K1-H10.pep
DAFQSFPATINAAETDSVVERTVKESDHDESISSALEISTDNSQQYLSSENHNSINNSNAEHSEVATEILSDCSGDGGNREKILCDLAVEEVKEISTKIEEHVQRRASTETGNSEDAERSIDV

SEQ ID NO: 70217 - protein, 147 aa, Gossypium hirsutum
  unsure (1)..(147): unsure at all Xaa locations
  Clone ID: GOSHI-09MAY01-C34417_1.pep
STDLVALSGVHTFGRARCAAFMDRLYNFNNITGKTDPTLNATYANTLKQRCPKGGDTKSLIDLDEQSSLTFDNKYFSNLQNRRGLLQTDQELFSNXNGLKQVAIVNRFASSQSQFFSSFAKAMIKMGNLNPLTGTNGEIRLDCKKVN

SEQ ID NO: 70218 - protein, 334 aa, Gossypium hirsutum
  Clone ID: GOSHI-09MAY01-C34777_1.pep
SLSFLPKFSQTQSQSQSHFLSFPSKSLPFYPPSLFPNKSPFLALPPFKTPTISLPTKSMISSSKLSNHIDPLLLNDTQLDRFAEVGNKLADAAGEVIRGYFRKKFEILDKEDLSPVTIADQAAEESMVSIILENFPSHAVYGEEKGWRCKEESADYVWVLDPIDGTKSFITGKPVFGTLIALLKKGKPILGIIDQPVLRERWIGISGRISTLNGQEVATRACTELSRPYLYTTSPHLFSGDANEAFARVRDKVKVPLYGCDCYAYALLASGYVDLVVESGLRPYDFLALIPVIEGAGGVVTDWKGNHLHWEASSTSRATSFNVVAAGDKQIHQQ

SEQ ID NO: 70219 - protein, 70 aa, Gossypium hirsutum
  Clone ID: GOSHI-09MAY01-C34647_1.pep
LSEMPKVCFSKDIMIMFVALVLSVATIVSAQDSAMAPAPSMDTGSAFSTPITGVAVTLSLIISLLALLKH

SEQ ID NO: 70220 - protein, 75 aa, Gossypium hirsutum
  Clone ID: LIB3147-028-Q1-K1-D7.pep
FSEMAKGCFSKDILIMFMAVVLSVATIVSAQDSAMAPAPSMDTGSAFSMPVTGVTVTLSLIISLLALLKSVSYII

SEQ ID NO: 70221 - protein, 141 aa, Gossypium hirsutum
  Clone ID: GOSHI-09MAY01-C34617_2.pep
HASAFRPSSTDPSSRPASIDPNYRADPSSRSASIDPRPASIDPNYRADPGSRAAPIDPNYRVDPSSRVASIDPNYRADPSARGASIEPNYRADPSARGAPIDPNYRAAPELKYRGPTLESAGFSKRRESLFVNSQVVDDNS

SEQ ID NO: 70222 - protein, 343 aa, Gossypium hirsutum
  Clone ID: GOSHI-09MAY01-C34617_1.pep
ERSKAYGFTSDGDLIHVLLLGDSMNFKCRVRSKKKLEMNEPLAFLAIKGYLLIVDLEKIFVYNVSTLHYVRAGAPRFLFSAGLDEIRSSFLTHQVVDTNKERRHVTPLIASDREKLTVLGLGGDYIGMYRSNLPVLKGESNTMLWTSPVLFFILFLFGAWQFFAKRKEALTSWGPDDPFSSTSATNSAPLGSNTGDRSFIDSSSRGADMADLRSSALRSRRYGSPSRYQGGATGSFRPSSTDPSSRPASIDPNYRADPSSRSASIDPRPASIDPNYRADPGSRAAPIDPNYRVDPSSRVASIDPNYRADPSARAAPIEPNYRAAPGLKYRGPTLESGGFSKRR

SEQ ID NO: 70223 - protein, 167 aa, Gossypium hirsutum
  unsure (1)..(167): unsure at all Xaa locations
  Clone ID: GOSHI-09MAY01-C34107_1.pep
MNGEKNSSNNRVLKLKYVKLGYHYLITHLLKLCLVPLMAAIIVQASRLSLNDIHQTWLHLEHNLVYVVVLSAFVLVGSTAYFMTRKRSAYLGDYACYLPPSKLKVEHDRFMKHCKLMGCFDETSLVFLDKILGRSGLEKKHVXKAMHCLPPKPSMEAAXETEQVMFG

SEQ ID NO: 70224 - protein, 169 aa, Gossypium hirsutum
  Clone ID: GOSHI-09MAY01-C34127_1.pep
PLKVKISVWKITWNYIPTRVTLNCRRLLNNVTCVGCGSAAESANHIFRECPGFLNRIPPIGDGSFVVLFGQYGEKGIGEVHEKTNRSVQFVKVNFDAAFDGNSRQSAAGIVARDSDGNTLLSCTEIHHHVASAFAAEAIACRTATQIGRDMQWSNIIIEGDAFPIIKKC

SEQ ID NO: 70225 - protein, 323 aa, Gossypium hirsutum
  unsure (1)..(323): unsure at all Xaa locations
  Clone ID: GOSHI-09MAY01-C34397_1.pep
WPINSVPSPPVRPPSARAPAIPVIDLAELHGDKRSKTMTSLHEACEKWGFFQVDNHGVDKKLMEKVKEMVNDYYDENLKEKFYESEMTKSLNKNEKISDMDWESTFFIWHRPNSNINQIPNITKQLCETMEEYIAQLIKLAETLSELICENLGLDHNHIKQTFCGTKGPSIGTKVAIYPQCPNPDLVRGXLREHTDAGGIILLLQDDQVPGLEFLKDGQWFRIPPSKNNTIFVNTGDQIEVISNGKYKSVLHRVMAEKQGNRLSIATFYNPGNDAVISPAPELLYPGNYQFGDYLKLYSTTKFLEKGPRFESMKTTMVNGHHG

SEQ ID NO: 70226 - protein, 120 aa, Gossypium hirsutum
  Clone ID: LIB3828-014-Q1-N6-G8.pep
EGKVYSCKHCKIHLALVDDILSKSFQSRHGKAYLFSKVVNVSVGEKEDRLMITGLHTVADIFCIGCGSIVGWKYEFAHEKSQKYKEGKSVLERFKVSGPDGSHYWVSHETHVGGSDADDV

SEQ ID NO: 70227 - protein, 97 aa, Gossypium hirsutum
  Clone ID: LIB3146-053-Q1-K1-C11.pep
PTRPPTRPILSLFRRVNVSGGEKEDRLMITGLHTVADIFCIGCGSIVGWKYEFAHEKSQKYKEGKSVLERFKVSGPDGSHYWVSHETHVGGSDADDV

SEQ ID NO: 70228 - protein, 81 aa, Gossypium hirsutum
  unsure (1)..(81): unsure at all Xaa locations
  Clone ID: LIB3135-019-Q1-K1-D3.pep
MGRLFVVNLEGKVYSCKHCKIHLALVDDILSKXNVSVGEKEDRLMITGLHTVADIFCIGCGSIVGWKYEFAHEKSQKYKKG

SEQ ID NO: 70229 - protein, 54 aa, Gossypium hirsutum
  Clone ID: GOSHI-09MAY01-C34337_1.pep
MGGNSPCASCKLLRRRCAKDCIFAPYFPSDDPHKFAIVHKVFGASNVSKTLQVH

SEQ ID NO: 70230 - protein, 59 aa, Gossypium hirsutum
  Clone ID: GOSHI-09MAY01-C34277_1.pep
VHGSLARAGKVRGQTPKVAKQDKKKKPRGRAYKRMQYNRRFVTAVVGFGKKRGPNSSEK

SEQ ID NO: 70231 - protein, 76 aa, Gossypium hirsutum
  Clone ID: GOSHI-09MAY01-C34207_1.pep
PSPINPSKNPLRISATAASSLPSAAHVLPPAVITSHNPHSPTPTPGVAGASSEAKGRPGGGGSLTAATWGVLGLKP

SEQ ID NO: 70232 - protein, 155 aa, Gossypium hirsutum
  Clone ID: GOSHI-09MAY01-C34237_1.pep
FVAEIVSIGRLRHRNLVQLLGYCRRKDELLGVYDYMPNGSLDKYLHDQPKVTLNWRQRFRVIKGVASGLFYLHGEWDQGVVHRDVKASNGLLDGELNGRLGDFGLARLYDHGTDPQTTHVVGTLGYLAPEHTRTGKATPSTDVFAFGAFLLEVAC

SEQ ID NO: 70233 - protein, 110 aa, Gossypium hirsutum
  Clone ID: GOSHI-09MAY01-C35957_1.pep
VEAGCAVLLSGPHMPPSMISVVSIAIFESVGVSGGKASAPSLAATCSPDAFSRCPILSCWAAASEHNRILHRLPDDANNCTNISLHIWVFRFQQSAQLASRYRHLLGRVG

SEQ ID NO: 70234 - protein, 240 aa, Gossypium hirsutum
  Clone ID: GOSHI-09MAY01-C35967_1.pep
MEAVKVEGFGPDSGVEDLGRCVDEISTTVSRLEQRVNDVEQFYLTTDNMELTITKSASAFKEKVKEKQLTGLEKQQQEASQREAAALKRMQELMRQFATILRQITQHKWAHPFMHPVDVEGLGLHDYYEIVQKPMDFGTIKSKMEAKDGTGYKNVREIYSDVRLVFKNAMKYNDERHDVHIMAKTLLEKFEEKWLQLLPKVAEEEKRQPEEEAKAELDVKLAQEAVHANMAKELSNELCD

SEQ ID NO: 70235 - protein, 162 aa, Gossypium hirsutum
  Clone ID: LIB3825-028-Q6-K6-E6.pep
MQMESQMEAVKVEGFGPDSEVEDLGRCVDEISTTVSRLEQRVNDVEQFYLTTDNMELTIAKSASAFKEKVKEKQLTGLEKQQQEASQREAAALKRMQELMRQFATILRQITQHKWAHPFMHPVDVEGLGLHDYYEIVQKPMDFGTIKSKMEAKDGTGYKNVR

SEQ ID NO: 70236 - protein, 63 aa, Gossypium hirsutum
  Clone ID: GOSHI-09MAY01-C35917_1.pep
MAGGGNFMHRVISYVVNELVVDRLANSPAFQRFAVRTSKRIEDISSMAEKKRQELAEQMKEIS

SEQ ID NO: 70237 - protein, 190 aa, Gossypium hirsutum
  unsure (1)..(190): unsure at all Xaa locations
  Clone ID: GOSHI-09MAY01-C35937_2.pep
RGLITGLKQLGADVDCILGTNCPPVRIEGKGGLPGGKVKLSGSIXSQYLTALLMAAPLALGDVEIEIIDKLISIPYVEMTADPRVRFGVTVEHTDCWDRFFIRGGQKYMSPCNXAYVEGDASSASYFLAGAAVTGGTVTVEGCGTSGLHGDVKFAEVLEMMGAKVTCTENSVTVTGPPINFLVEETLACY

SEQ ID NO: 70238 - protein, 230 aa, Gossypium hirsutum
  unsure (1)..(230): unsure at all Xaa locations
  Clone ID: GOSHI-09MAY01-C35937_1.pep
FFVRFGVTVEHTPSGRPRVRRGGQKYMSPXGNAYVEGDASSASYFLAGAAVTGGTVTVEGCGTSSLQGDVKFAEVLEMMGAKVTWTKNSVTVTGPPRNPSGRKHLRAIDVNMNKMPDVAMTLAVVALYADGPTAIRDVASWRVKETERMIAICTELRKLGATVEEGPDFCVITPPEKLNVTAIDTYDDHRMAMAFSLAACAEVPVTIKDPGCTRKTFPDYFEVLARVTKH

SEQ ID NO: 70239 - protein, 53 aa, Gossypium hirsutum
  Clone ID: LIB3146-044-Q1-K1-E2.pep
TIFAQLRIDSFLVKKNQSLIGRILFYSNRLHDSDQSTYYSPITSSINILSRKW

SEQ ID NO: 70240 - protein, 127 aa, Gossypium hirsutum
  Clone ID: GOSHI-09MAY01-C35847_3.pep
WLTVHEWRSDLAEESLTHEDPCAWRVEVHGVQRCWRLERRWRLGLRHSLLLGFGYLAKLSLGFGPLGPIVNGYLGLIFCYGPPARPAHYRAVFSISSRAGHTPMCAARVDFATCFLNTWKNPIFRLS

SEQ ID NO: 70241 - protein, 96 aa, Gossypium hirsutum
  Clone ID: GOSHI-09MAY01-C35847_2.pep
FGLGLVFLFFFVGSRLGIDRIVQDFKVFFLKKKGERSTLTGSSWARPSSARSDLHSCTVSHQIDGGLGGCLMNPKRMKGSVSFFKPQATDAWADAW

SEQ ID NO: 70242 - protein, 69 aa, Gossypium hirsutum
  Clone ID: GOSHI-09MAY01-C35847_1.pep
KEDLMEHVEKIEEITRSTLSEPTQKQISFKIEYLILTFFEVYLNFFMSYSFSDFEMFFFSNYELNSLDT

SEQ ID NO: 70243 - protein, 80 aa, Gossypium hirsutum
  Clone ID: LIB3829-010-Q6-N6-G2.pep
RSHTFSMVIAFNGYAEGNKVDQLFVPSVHLAAGMMTLINFAYGGCVIGIPLLFLMAILTVMHCGRMVWRRLSESQRQVDS

SEQ ID NO: 70244 - protein, 53 aa, Gossypium hirsutum
  Clone ID: LIB3145-016-Q1-K1-B4.pep
FLLTSFLQTLINFAYGGCVIGIPLLFLMAILTVMHCGKMVWKKFSESQRQVDL

SEQ ID NO: 70245 - protein, 190 aa, Gossypium hirsutum
  unsure (1)..(190): unsure at all Xaa locations
  Clone ID: GOSHI-09MAY01-C35527_1.pep
MQEHKVALIAEELCFLDVIPAIRKFLKDTIEPWLDGTFNGNGFLCESKWGGIVTKQGSTDSGADFGFGVYNDHHYHIGYFLYGIAVLTKIDPAWGRRYKPQAYSLVADFMNFGRRSNSNYPRVRXCFDFYKLHSWAGGLTEFADGKNQESTSEAVNAYYAAALMGLAYGDTHLVATGSTLTALEIQAAQT

SEQ ID NO: 70246 - protein, 102 aa, Gossypium hirsutum
  Clone ID: LIB3582-013-P1-K1-G5.pep
ALLLLLSRILLPVIKAVGSDCWRPPQEPWVKLNFDAAHHGNVSDAFMAEAVACFQGLLFAKETGFTTVEVEGDSRTVIEKINQEGFGRAYLDSFGWRIPRRQ

SEQ ID NO: 70247 - protein, 121 aa, Gossypium hirsutum
  Clone ID: LIB3145-015-Q1-K1-D3.pep
VSDAFMAEAVACFQGLLFAKETGFTTVEVEGDSRTVIEKINQEGFGRADLDSVILDIKSMGRFFHQLRFKHVRREANRVAHFIARKGSCRSENTFWMEDSPSAVRDMVVAEEMREASQTDD

SEQ ID NO: 70248 - protein, 100 aa, Gossypium hirsutum
  Clone ID: GOSHI-09MAY01-C35757_1.pep
MAATIASRSSFLRPILRTATTSTKARTKIPFSAPSSSLRSNFSLHQTRISPPSLSRFVRRELSTLQPLHSAVASACLVSKLPSDANSCAEGRFANYISPI

SEQ ID NO: 70249 - protein, 194 aa, Gossypium hirsutum
  unsure (1)..(194): unsure at all Xaa locations
  Clone ID: GOSHI-09MAY01-C35747_1.pep
MGLHILKTTPFSSSYSKALLLATAAKPSALAAAVLPCNPRLRFPFSSPKAITSSGYGSFLHLRKRGFRGSVVLTMAASGSVHKSEEEWSAILSPEQXFRILRQKGTEYPRTGEYDKFFEEGIYKCAGCGTSLYKSTTKFNSGCGWPAFYEGLPGAINRHPDPDGMRTEITCAXACGGHLGHVXFKGEGFPTPTD

SEQ ID NO: 70250 - protein, 136 aa, Gossypium hirsutum
  Clone ID: GOSHI-09MAY01-C35707_1.pep
ILVSFLFAQLLKALDSFVVMEREGQIIACAALFPFFKEKCGEVACIAVSPDCRGQGQGDKLLDYVEKKASSLGLDMLFLLTTRTADWFVRRGFTECTINMIPEERRKKINLSRKSKYYMKKLIPDRSGITADKAFK

SEQ ID NO: 70251 - protein, 206 aa, Gossypium hirsutum
  unsure (1)..(206): unsure at all Xaa locations
  Clone ID: LIB3583-046-P1-K1-E8.pep
PRPIEALQQSILEKDQMLEDLQGLLQLADEKXQASLAEAAAKHQKNIESLEAQLADALSDRSKATETISSMQVLLAEKESKIAEMDAASTGEAARLRAIVESIKGELAHLKHEHEKEKESWEAASLAFKTKLEVAESNCIRAEIEAAKMRSQLELEASLQTQMLSTREAELAAAKEEVSRLEREFSXYKIRAHAXLXKXDAELAAA

SEQ ID NO: 70252 - protein, 58 aa, Gossypium hirsutum
  Clone ID: LIB3145-018-Q1-K1-C3.pep
DLEARLREVNETLEQASSQQSGLQQELERTHQQANEALKAMDAERQQLRSANNKYNHC

SEQ ID NO: 70253 - protein, 342 aa, Gossypium hirsutum
  Clone ID: GOSHI-09MAY01-C35617_1.pep
FMNKDLAVLLDKVVGKELAGVGPAVIRTITPAIEKTVTSVINESFQRGVGDKAVNQLETPASAKLEAIVARQIQAQFQTSGKQALQEALRTSVEALVVPAFEISCKALFEQVDSAFQKGMVEHTNAAQQQLESASSSLAITLRDAINSASSIAKALSGEFAEGQRKLLAIAAAGANSNAATSFSSQLSNGPLGGLHDKVVVPMDPTKELSKLLSEGKYEEAFTIALQRSDLSIVSWLCSQVDLRTILSTAPFPLSQGVLLSLLQQLACDINKDTPRKLTWMVDVATAINPGDHPRARHVRPIFQEVYKRVHEISSSPLLTGADHASIRALIYVINYVLMTCK

SEQ ID NO: 70254 - protein, 203 aa, Gossypium hirsutum
  Clone ID: GOSHI-09MAY01-C35127_1.pep
MPNEDESKQKNRAGEVKYQNARDRREGKGFKSSFLKEMSDGDDLRKPGKAYADGLKENLNPIVDDSVSDLSQKETKEPLVFACANPEFYDFDNDKKESCFSVGQIWALYDTLDAMPRFYARIRKIFSSGFKLKITWLEPDPDDANEIEWVGEGLPVSCGKFKHGASENTEDRLMFSHLLYWEKGTCRDTYKIFPRKGETWAPF

SEQ ID NO: 70255 - protein, 154 aa, Gossypium hirsutum
  unsure (1)..(154): unsure at all Xaa locations
  Clone ID: GOSHI-09MAY01-C35007_1.pep
LVKTFSADIAKNIIQIPLARSIHDGFQAWGGEPSGIFSAQSAYNLLHKSTRIPNDEIIHAENKNFYRKLWNLHIPSKIKITVWKISWNNIPTFANLKLKRVITEAGXPRCNQPEEDSTHVFRQCHGSLLRGQMSMSPFLLLALASLVKQKQIYL

SEQ ID NO: 70256 - protein, 60 aa, Gossypium hirsutum
  Clone ID: LIB3145-044-Q1-K1-B12.pep
QPCFSTVSWVFTQGTNEYVAFSAVGSSFLCICESGRLHNHDDRRTNVSIHFNTAFDQYSS

SEQ ID NO: 70257 - protein, 67 aa, Gossypium hirsutum
  Clone ID: uC-gsronu33B157c12b1.pep
MKRKDTVKLISAEEMEFIIDKDAAMVSQTIGGFAEMELGEVTFPEISAVILEKICQYFYWALQYSSY

SEQ ID NO: 70258 - protein, 57 aa, Gossypium hirsutum
  unsure (1)..(57): unsure at all Xaa locations
  Clone ID: LIB3145-009-Q1-K1-E3.pep
XXFFFFFFXKETNPILHTLQLVYIQSSFTIVLLLFYYIAAIIHSVVTAFIYLYKSAF

SEQ ID NO: 70259 - protein, 115 aa, Gossypium hirsutum
  Clone ID: LIB3145-009-Q1-K1-D12.pep
DDKKDKKDKKDKKDKDHKKGKDHKEDKDEGMMDKIKDMITGDKDDDKHKKDDHKHKDRKEHKDEGMMDKIKDMITGDKDDDKHKKDDHKHKERKEHKDEGMLDKIKDKIHGDDDR

SEQ ID NO: 70260 - protein, 85 aa, Gossypium hirsutum
  Clone ID: LIB3148-041-Q1-K1-H12.pep
MMDKIKDMITGDKDDDRGRDRRRDNSRGRDSSRDREHHRDRNRDSDRESDRDSDGGSDDEKKKKKKKGKKKKHDGSGSDDDPLHV

SEQ ID NO: 70261 - protein, 185 aa, Gossypium hirsutum
  Clone ID: GOSHI-09MAY01-C35357_1.pep
MRGTLTLTWILMVCLSQVAVQSQYYSESLPYDPRPVKVTNLYFFLHETLRGKNPTVVMVAQANNTSNDNYSSVPFGTLYAIDDPLKIGPGDNSEVIGNALGLGILSGKNSTTVVMYLDFGFTAGKFKGSSISIFSRNPLIKMERELSVVGGRGEFRMAEGYARLKNYFFDGTTVIIEYNVTVIHY

SEQ ID NO: 70262 - protein, 163 aa, Gossypium hirsutum
  Clone ID: LIB3828-023-Q6-K6-C2.pep
QYYSESLPYDPRPVKVTNLYFFLHETLRGKNLSFFMVAQANRGGGDNYSSVPFGTLYAIDDPLKIGPGDNSEVIGNALGLGILSGKNSTTVVMYLDFGFTAGKFKGSSISIFSRNPLIKMERELSVVGGRGEFRMAEGYARLKNYFFDGTTVIIEYNVTVIHY

SEQ ID NO: 70263 - protein, 102 aa, Gossypium hirsutum
  unsure (1)..(102): unsure at all Xaa locations
  Clone ID: LIB3493-003-P1-M1-E8.pep
RTRGRTRGRTRGRTRGLGLXILCGKNSTTVVMYLDFGFTAGKFKGSSISIFSRNPLIKMERELSVVGGRGEFMMAEGYARLKNYFFDGTTVIIEYNVSAIHY

SEQ ID NO: 70264 - protein, 210 aa, Gossypium hirsutum
  Clone ID: GOSHI-09MAY01-C35337_1.pep
IYVPVPVVPQNERFFFRRVCPKSYHLFRCIARYGYKDVRKENHQAFEQLLIESLEKLIRREAQQRQLESDGDEDADSEEDTSFSRVLIDPNGGVYSLGVPLLAEFRGSSNSISEASISEELNPNSPASPSISDAEHSLERELSFIRQAKESGVVYLLGHGDIRARKDSWFIKKLVINYFYAFLRKNCRRGIANLSVPHSHLIQVGMTYMV

SEQ ID NO: 70265 - protein, 45 aa, Gossypium hirsutum
  Clone ID: LIB3145-013-Q1-K1-D1.pep
EPMCTEIKEEWLRKARAQIACYKRCKFTIVLSKAGRLNQQILESC

SEQ ID NO: 70266 - protein, 103 aa, Gossypium hirsutum
  Clone ID: GOSHI-09MAY01-C35297_1.pep
IQSSQVDYCSIIEELGEEKREDSIGNQDETNKGEEPAQIVLKVDMHCEACARKVARALKGFQGVEDVATDSMANKVVVKGKSVDPITVCERLRKKSGRIVELI

SEQ ID NO: 70267 - protein, 152 aa, Gossypium hirsutum
  Clone ID: GOSHI-09MAY01-C35237_2.pep
MGDAENALPPSKKRAAGREISRDNPGLDDEEDSSEQETGTFKRASEEVLANRRIVKVRRNQTTSTASANPFSGIRLVPLTEPTATPAAPSSAPESGTITTQVTADAPISSEKEISEDGKNNVNESEKSEEGNDLEPEKNSDETEPDNAKSES

SEQ ID NO: 70268 - protein, 398 aa, Gossypium hirsutum
  Clone ID: GOSHI-09MAY01-C35237_1.pep
PRPPRVRPRVRPRVRRNQTTSTASANPFSGIRLVPLTEPTATPAAPSSAPESGTITTQVTADAPISSEKEISEDGKNNVNESEKSEEGNALAPEKNSDETEPDNAKSESENIKQSESKKDEPVSDAVADKESAEHKSSVAVNEETQKEANDEKLAGVEAKDEDKKGDETANADNKDKSSENADSTAEGASLSSFQQLSSSQNAFTGLAGTGFSTSSFSFGSATKDGPTGAFGFGLSTNGNSSLFNTSGTSIVSKSEGSGFPALQEVPVETGEENEKVVFSADSVLFEFIDGGWKERGKGELKVNVSTAGAERARLLMRARGNYRLILNASLYPDMKLTNMDKRGITFVCMNSTGEDKEGLSTLALKFKDASIVEEFRVAVMAHKGNTATVLKTPEHSP

SEQ ID NO: 70269 - protein, 81 aa, Gossypium hirsutum
  Clone ID: LIB3148-021-Q1-K1-H10.pep
PRPVQSVFDCYKSCMLESRSIETDQIFYRFVINYVACGRMFQPLLFFMVPVMELNNFMSCQAIKICYLLFKKKKQDLNQKK

SEQ ID NO: 70270 - protein, 268 aa, Gossypium hirsutum
  Clone ID: GOSHI-09MAY01-C35227_1.pep
MCPIRGENVQTQAPARSTPDKSHKPEDGLSKDIEINFFENKDTTTSFQDEAFNTFVAEFDSNKISSGIINKNTGKEKALEAEIVRLKEQLKQSNLEKAEMTSKFEKLSAICRFQRQEIQELKQTLAARTPSPNKSTSRYHNSPGSLGEKVEGTFSEFAQEKAGNWKTASPEAKPWQAFPEDAKPQQQQPLSKDNVQSVRTRNGHSNMHAAQATFGMETWGFGADNFTAAPTASSQRLKSMINEGSSSQRESKIKESNPVSQPAGWAGF

SEQ ID NO: 70271 - protein, 294 aa, Gossypium hirsutum
  Clone ID: GOSHI-09MAY01-C36997_1.pep
NGYAEFTEPKVVSANAKFEVEFAKDGLVHIRSCTNNKYLKRTHNPYITEKPNEEYWITVTADKPEEDQSKESCTLFKPILVRPRVRNFRFVHAQSGCYLCLWPLAKSELGRGVLANNKNVADNGNDIFKVIDWESLVILPRYVAFKGNNDMFLRLTQVEGHPYLEFSSADVGAGSVPMEVFYMKNGDIRFKPVSSDKFWRRSPNWIWVDSNDTKGTDKDTRFRAFKVDNKTIALLNLGNNKFCKRLTIEGKTNCLNAAVPSITREAFLMVQEPVLSSQIYNLRYDIEYARVYNK

SEQ ID NO: 70272 - protein, 141 aa, Gossypium hirsutum
  unsure (1)..(141): unsure at all Xaa locations
  Clone ID: LIB3828-018-Q1-K6-D1.pep
ERTHNPSITRKPXEEYWITXTADKSEEDRSKESCTLFEPILNDSVYKNFRFVHVQSGCYLCFWPLAKSELSRGVLANNKNVADNGNDIFKVIDWESLVILPRYVAFKGNNDMFLRLTQVDGHPYLKFSSADVDAGSVPMEV

SEQ ID NO: 70273 - protein, 268 aa, Gossypium hirsutum
  Clone ID: GOSHI-09MAY01-C36957_1.pep
MSGNALRDLNTLPTPERKNDSSSKGNFSKPCNGKTIDNVEERLKKSLSSVQINGRETLNVQHNKSSASVQINGGETVNVGVEVANSEVEYIESENLSDLEDVDTCLKKLLPGLDSKDWILVVETLNNVRRLSVFHNERMHSMLGDSIPLVVKSLKNPRSAVCKTAIVTSANIFSAYNDDLIDSLDPLLVQLLLKASQDKRFVCEAAERALEAMTTSVSPMLLLPKLQPYLKNRNPRIRARASMCFSHSVPRLGVEGIKEYGIDKLIQV

SEQ ID NO: 70274 - protein, 113 aa, Gossypium hirsutum
  Clone ID: GOSHI-09MAY01-C36807_1.pep
AYIIKKKTKEKERRKMARSFSNVKVFSTFVVDGISNAISRRGYAATSQGVASNGVKEAARNAAVLKKTGEDMATATKDKVNWVPDPVTGFYRPENTVNEICPAELRATLLKKN

SEQ ID NO: 70275 - protein, 77 aa, Gossypium hirsutum
  Clone ID: GOSHI-09MAY01-C36837_1.pep
ARVSVKDIGLPEKPKVETGFKENMVPLKEEVHNWTATAECNPLLGSENNEPKPPITIEGDHPFNNNGNQASSPMLRC

SEQ ID NO: 70276 - protein, 141 aa, Gossypium hirsutum
  Clone ID: GOSHI-09MAY01-C36587_1.pep
MAPKAEKKPAEKKPAEDKKAEKAPTEKKPRAEKKLPKEAGDKKKKRPKKSVETYKIYIFKVLKQVHPDIGISSKAMGIMNSFINDIFEKLAQEASRLARYNKKPTITSREIQTAVRLVLPGELAKHAVSEGTKAVTKFTSS

SEQ ID NO: 70277 - protein, 81 aa, Gossypium hirsutum
  unsure (1)..(81): unsure at all Xaa locations
  Clone ID: GOSHI-09MAY01-C36517_1.pep
MQEFLDRRVPANAYPVDGVFSFXVLIDRGTSLLSRIYTPTTAEEPQPNIAELEKPVTAAVVPVIIFFHGGSFAHSSAYSAI

SEQ ID NO: 70278 - protein, 238 aa, Gossypium hirsutum
  unsure (1)..(238): unsure at all Xaa locations
  Clone ID: GOSHI-09MAY01-C36527_1.pep
QPCNRRFSSSYYHPSNPNTSNPSQFHQSPYASAPPFSPSDYQNPDPSYAPPPPTTLNSQPSFNQHPIAPKSAPAAPSFPPYDSPVSQPPYYQPYDQYPSYVPPPPDSNPNPIPPYYSTPYNQIGSSQSSVPPAYDNPYDNSMKLDQSSSSYFDDKFGARYNQSRYDMGSDLYGKRYDSYSHFGDDGGYGDGVYAYEGGKVEPYGASGTSPKXDLGQFDDYGRAINFPSGKDSSGSSSG

SEQ ID NO: 70279 - protein, 62 aa, Gossypium hirsutum
  Clone ID: GOSHI-09MAY01-C36457_1.pep
LINSQKMSSYCGQQRKEQSIILSNYYPDKKKATTEEVIQVKNLYRIKNSLQLNKKIESMMSK

SEQ ID NO: 70280 - protein, 265 aa, Gossypium hirsutum
  Clone ID: GOSHI-09MAY01-C36447_1.pep
TVGLKADRPLLSSSTLAPRNQGLASECFSGNACIIVSSPTPQIKNSESQSISSATLENLADNAGNGAAIENYNISPTPQIKNSESQSISSATLENLADNAGNGAAIENCNMFSETPLKRSIPPPPAWKSPWFINSFVPGPRIDTEITIEDIGYLMSPPDRSYDAIGLMKQLSEHTAATYADALEVLGNETPESIVKGRRSNNSKMDKENNQMETQSHLASDILVERRILDFSECGTPGKGTENRKSSTAVSFSSPTSSYLLKGCR

SEQ ID NO: 70281 - protein, 141 aa, Gossypium hirsutum
  unsure (1)..(141): unsure at all Xaa locations
  Clone ID: GOSHI-09MAY01-C36477_1.pep
MDREGGSHGGSCYYTILGIRKDASFSDIRTAYRKLALKWHPDRYVTNPAVAGEAKLRFQQIQEAYSVLSNGSKRSMYDASLYDPSADDDQEFCDFMQXMISMMNNVKDEGDSFEDLQDVRRYGRQWRLYELQRHTDPTENK

SEQ ID NO: 70282 - protein, 66 aa, Gossypium hirsutum
  Clone ID: GOSHI-09MAY01-C36407_1.pep
KTWERRGGVSFRLVSSYENNKQLINLFYQCLQHILKFTTSCLSEQRSLNYLYLELRNSELSSVNFP

SEQ ID NO: 70283 - protein, 225 aa, Gossypium hirsutum
  Clone ID: GOSHI-09MAY01-C36747_1.pep
MAIRDTVKRAEQLVETSMKGNDASHDASHVWRVRDLALSLAREEGLSSNPDSMEIVELAALLHDVGDYKYLRDPSEEKLVENFLEEEGIAESKKIKILSIIKGMGFKDELAGVGNQEFPPEFGVVQDADRLDAIGAIGIARCFTFGGNRNRVLHDPAIQSRLDLSKEHYMKKEEQTTVNHFHEKLLKLKDLMKTKAGLRRAEKRHKVMEEFLKQFYPEWDGEGLK

SEQ ID NO: 70284 - protein, 194 aa, Gossypium hirsutum
  Clone ID: GOSHI-09MAY01-C36707_1.pep
LFSHGNLLRPCKGILLFGPPGTGKTLLAKALATEAGANFISITGSALTSKWFGDAEKLTKALFSFASKLAPVIIFVDEVDSLLGARGGGFEHEATRRMRNEFMAAWDGLRSKDSQRILILGATNRPFDLDDAVIRRLPRRIYVDLPDAGNRMKILKIFLAQENIGCNFSFEELANATEGYSGSDLKNLCIAAAY

SEQ ID NO: 70285 - protein, 322 aa, Gossypium hirsutum
  unsure (1)..(322): unsure at all Xaa locations
  Clone ID: GOSHI-09MAY01-C36197_1.pep
GRVGCDPXGRWYQADAGLAPGDMLLITGKALSHATAGLRPAATYRAAPEYLSGINNGGRTSLAFRLMPQGNAILDCSPVAAAGHVIPQSYVPISVSQFMDELSAEEDVVCNRSDNTCVARNNLNKQPSLRSVLSDPLSGAFLEDAVVVSCGHSFGGLMLRRVLDMSRCTLCSADIDSGSLIPNKALRAAALAVKQEDNRRLFHNAALRKRRXEMGDQIDLSKRSSRENGEDGAEDGLHRGVQYPFSVNEKVLIKGNRRTPEKSVGKEAVITSQCLNGWXLLKIIGSGENVRLQYRSLCKIMNPQSTIEEDRCPSQPIQNSSS

SEQ ID NO: 70286 - protein, 159 aa, Gossypium hirsutum
  Clone ID: GOSHI-09MAY01-C36067_1.pep
TPLSKPPPPPLLSLSLIGGKGANSASGMAVNDECKTKFLELKAKRNYRFIVFKIEENLQQIVVEKVGAPKDSYEKLCSSLPSDECRYAVYDFDFTTDENCQKSKIFFIAWSPDTSRVRSKMLYASSKDRFRRELDGVQVELQATDPSEMSFDIVKERAF

SEQ ID NO: 70287 - protein, 101 aa, Gossypium hirsutum
  Clone ID: LIB3828-027-Q6-N6-A11.pep
QQIVVEKVGAPKDSYEKLCSSLPSDECRYAVYDFDFTTDENCQKSKIFFIAWSPDTSRVRSKMLYASSKDRFRRELDGVQVELQATDPSEMSFDIVKERAF

SEQ ID NO: 70288 - protein, 117 aa, Gossypium hirsutum
  Clone ID: GOSHI-09MAY01-C36357_1.pep
MGKRRCVVAALAAIMLMMELAALTVAEHRRSMLSNGLGMTPPMGWNSWNHFGCNIDEKMIKETADALVSTGLSKLGYEYVNIDDCWAEISRDDKGNLVPKKSTFPSGIKALADYVNK

SEQ ID NO: 70289 - protein, 78 aa, Gossypium hirsutum
  Clone ID: GOSHI-09MAY01-C36307_1.pep
MCPMRFLLVFFSAILAGYFAWRTAVGSSVDADDGVSEVSRTIVAKNEQDFSFKMMVKNGFWVLVDMASGRYLGRNLRH

SEQ ID NO: 70290 - protein, 122 aa, Gossypium hirsutum
  Clone ID: GOSHI-09MAY01-C36277_1.pep
MALLINEVDSLTNQIFSILENKFLFGDHENNAAAKTHEEDHLKSGNQISGKVRILSIDSGSFSDGILAAQSLLTLQTFLRQKSGNPNAVIAQYFDVVAGSGAGAILAALLFTRAENGAPIFT

SEQ ID NO: 70291 - protein, 157 aa, Gossypium hirsutum
  Clone ID: GOSHI-09MAY01-C36227_1.pep
GSSVSGVGVPSGNFEVNIERVGSKKKNLQSTAKNSGSLDTVVEVFHEADTDYQLSRPKRKNLEPDHDFLVETQLTMETPADDPPDMMTENIKKHMKTHFETPGAPQVESLQNLAAGLNKKGAAQLFYRTCVLASQGFLKVQQKVAFGDIFISKGAKM

SEQ ID NO: 70292 - protein, 129 aa, Gossypium hirsutum
  Clone ID: GOSHI-09MAY01-C37907_1.pep
RFYSLRKSLGIAEEWIYVIKRDRDGKISWHAFDPVYQLWQPLPPVPKEYSEAFGFGCAVLSGCHLYLFGGKDPLKGSMRRVIFYSARTNKWHRAPDMLRRRHFFGSCVINNCLYVAGGENEGVHRSLRS

SEQ ID NO: 70293 - protein, 124 aa, Gossypium hirsutum
  Clone ID: GOSHI-09MAY01-C37937_1.pep
SKLLESSNYITRRQAIKLLGDILLDRSNAAVMTRYVSSKDNLRILMNLLRESSKSIQIEAFHVFKLFAAKQNKPPDIVSILVANKSKLLRLFADFKTNKEDEQFEADKAQVVREIAALELRDGP

SEQ ID NO: 70294 - protein, 70 aa, Gossypium hirsutum
  Clone ID: GOSHI-09MAY01-C37897_1.pep
IIQLPPFFFFSEKFKNTMMAPVLYIFISSVIQHSQSFFFFQKKERKKIVAVFPTLLFYNINIVINIVNSL

SEQ ID NO: 70295 - protein, 113 aa, Gossypium hirsutum
  Clone ID: LIB3585-010-P1-K1-C8.pep
DAWGSMKKRKALLIEHDKSSNVNASDAQRSVPRDLPFTVSLVKHSNLYATTNMLNANVHLLHKDDGDAEVDAKFLNHKKNDVRGSAEQLGAEETRGSAFLIQVKCIFFFQNFL

SEQ ID NO: 70296 - protein, 115 aa, Gossypium hirsutum
  Clone ID: LIB3145-047-Q1-K1-D1.pep
KLKRSNGPMSKEKKLLITGRGKMQYQNHDVIGLTGHLPSDKQQSKEQQLCSMKKRKALLIEHDKSSNVNASDPQRSVPRDLPFTDDGSAEVDAKFLNHKKNYVCGSAEQLGAEET

SEQ ID NO: 70297 - protein, 190 aa, Gossypium hirsutum
  unsure (1)..(190): unsure at all Xaa locations
  Clone ID: GOSHI-09MAY01-C37867_1.pep
MSTLEIRGPSLRGYRRRKAVLDLNVPPSEIREQEGTSQQAGYEDQTNQSVQTGPPATIDVEAIDDDVIESSARAFAEAQNNSRRSRGRTVVDVDSGWSARSSNNNQNRHRRLPPSSSIINLEISPXVNSGSGITKPQPPPKEPTFNCPICMGPLTEEMXTRCGHXFCKACIKAAIATQAKCPTCRKRVTV

SEQ ID NO: 70298 - protein, 196 aa, Gossypium hirsutum
  unsure (1)..(196): unsure at all Xaa locations
  Clone ID: AW561915.1.pep
MSTLEIRGPSLRGYRRRKAVLDLNAPPSEIREQEGTSQQAGYEDQTNQSVQSGPPATIDVEAIDDDVIESSARAFAEAQNNSRRSRGRTVVDVDSAHISALPGWSARSSNNNQNMHRRLPPSSSIINLEISPQSIQVEEITKPQPPPKEPTFNCPICMGPLTEEMSTXCGHIFCKACIKXAITTQAKCPTCRKRVT

SEQ ID NO: 70299 - protein, 155 aa, Gossypium hirsutum
  Clone ID: GOSHI-09MAY01-C37807_1.pep
MRFSRALKVAPILLLLLILFTFANAKKSADVTQLQIGVKHKPKSCEFQAHKGDRIKVHYRGKLTDGTVFDSSFERGDPIEFELGSGQVIKGWDQGLLGMCVGEKRKLKIPAKLGYGDHGSPPKIPGGATLVFDTELVAVNGKPSSGGDNTSEDEL

SEQ ID NO: 70300 - protein, 49 aa, Gossypium hirsutum
  Clone ID: uC-gsflnu33B002h12b1.pep
GLPLLAFLKENKRSKRIKLLRQVPIISYYSSSSLVLSPPLDGFPLTATS

SEQ ID NO: 70301 - protein, 258 aa, Gossypium hirsutum
  unsure (1)..(258): unsure at all Xaa locations
  Clone ID: GOSHI-09MAY01-C37827_2.pep
LKKDRERDSERIIVDRDDSANFVSRSDRIDRIGGVSGFVSNPNVPPPQMHLQAPARVPSPVRPPPVKSLKQPKPKAKDPNKREMSMEEKQKLGIGLQSLPQEKMDNVVQIIRKRNGHLRQDGDEIELDIEAMDTETLWELDRFVTNYKKMVSKIKRQALMANNAVSNDSHREEATVEKIEVSNXMKKPKKGDAGEEDVDIGDEMPMSSFPPVEIDGDNDRASSSSSSSSSSSSDSSSSSDSDSGSSSGSDSDADDARS

SEQ ID NO: 70302 - protein, 207 aa, Gossypium hirsutum
  Clone ID: GOSHI-09MAY01-C37827_1.pep
RPRGDGSGHWKRVSKNFYGSPLEFAADVRLTFNNAMLYNPKGHEVYVLAEQFLAKFEELFRPLSLKLEEQDEPPERGYYEEELQASSWDHGEPDRLKKDRERDSERIIVDRDDSGNFVSRSDRIDRIGGVSGFVSNPNVPPPQMHLQAPARVPSPVRPPPVKSLKQPKPKAKDPNKREMSMEEKQKLGIGLQSLPQEKMDNVVQIEG

SEQ ID NO: 70303 - protein, 201 aa, Gossypium hirsutum
  unsure (1)..(201): unsure at all Xaa locations
  Clone ID: GOSHI-09MAY01-C37517_1.pep
ASIFEREMKGKAKGGETAMRTEFVRMYGYEELGQRLKELRPPEKEGGFSLQELNERLKKLRAIEEKETDVQISGVNFAAIRDGLTALKTSDEEKQKNKLAQKVDILDLFGRTPEFMLHPPKEHLVEKYFHPDNMSSAEKMKIELAKVRDEFKMSESDCGSARVQVAQLTTKXIKHLSSVLHKKDKHSRKGPLAMGPKRKSC

SEQ ID NO: 70304 - protein, 156 aa, Gossypium hirsutum
  unsure (1)..(156): unsure at all Xaa locations
  Clone ID: GOSHI-09MAY01-C37467_1.pep
LFDHEEKQKGKVKEKLDKYNKEKLLEFCDVLDIPVIKATTRKEDIIIKLMDCLMAPHATTTVLLAEQEKSSKGKKRKRATMSGTTVKRSTKSPRKSEDTPKSTTKSVPDSEDESEQEEQEVEEDXEDDEEDEEQNEEEKNENGVAEKSEDEMPEDS

SEQ ID NO: 70305 - protein, 150 aa, Gossypium hirsutum
  unsure (1)..(150): unsure at all Xaa locations
  Clone ID: GOSHI-09MAY01-C37797_1.pep
GYVIPTPVIQHFIQDYEKNEAYTGFPILGIEWQKMENPDLRKAMGMKPEQKGVRIRRVDPTAPESGVLKSSDIVLSFDGVDIANDGTXYGKDYEYEAPVKLLDKLLHSMLQSPDEQLVVVSQVLVSDINIGYEDIVNTQVLALNGKPVKN

SEQ ID NO: 70306 - protein, 299 aa, Gossypium hirsutum
  Clone ID: GOSHI-09MAY01-C37787_1.pep
MDQLQERNCSSSFSPASLDPPSSGQKFVSPMAKVCICCSKELPKTQSHDPVPPSHVEMDQLRDRNCSSSLSPASLDPTSSGQKFVSPIAKENHDQESLQSNHSPLPSSHQFAHAHDSPGKQAVQHYSSDMSSSSIMEPSGNKNELYALRPREAPGTFTNVLDALKQARMSLQQKIHTLPLIEGASGGKAIEPSVHGRQIGERVEIPVGCSGLFRVPTDFSAEASKVNFRGSGLQVSLANYFPEAVVAPSSSNHLLTTSYMNTQSSSSSNYQPVSSDRFYSNPYRMLDQVILQSQLHLVT

SEQ ID NO: 70307 - protein, 196 aa, Gossypium hirsutum
  Clone ID: GOSHI-09MAY01-C37747_1.pep
MRPISSVNTVETAAMPSMSPPAMVHPRSPWHSPVPYLFGGLAAMLGLIAFALLILACSYWRLSGRLDNNSEGGDVERDVESGENEGDSTKQVKVYEEKILVIMAGEEKPTFLATPVIVCTKASSFGGNINGKVDDDKEGSKKDESGEKVKGEMSGDDDDDDDDDQQFPTVTDNSENHDNHDSQPTPDQNQTSELSS

SEQ ID NO: 70308 - protein, 128 aa, Gossypium hirsutum
  Clone ID: LIB3145-046-Q1-K1-A11.pep
ILACSNWRLYGRLDTNSEGGDVERDVESGENEGDSTKQVKVYEEKILVIMAGEEKPTFLATPVIVCTKASSFGDNKNGKVDDVKDGSKKDESGEKVKGEMSGDDDDDDADDQPDAWADAWNGRVGGRV

SEQ ID NO: 70309 - protein, 203 aa, Gossypium hirsutum
  Clone ID: GOSHI-09MAY01-C37777_2.pep
MECKIDPKLPYTDLSTMIRRQRQAIDEKIRELSNCQIVYPGLDFQKKEAGIPKKVVKVEDIHGLKEAGWTPDQWGHTRFRALIVFADNATYHKHLTGFMRSLLKSMHDHVDAWPFKEPVDARDVPDYDDIIKDPMDLKTMSKRVESEQYYVTLEMFVADVKRMFANARTYNSPDTIYYKCATRLEAHFQSKVQSGLQSNTKIQ

SEQ ID NO: 70310 - protein, 115 aa, Gossypium hirsutum
  Clone ID: uC-gsronu33B099h09b1.pep
QVIDEKIRELSNCQIVYPGIDFQKEAGIPKKVVKVEDIPGLKEAGWTPDQWGHTRFRALIVSADNATNQKHLTGFMRSLLKACKKSMLVPLFSQSNTLSKMQGKLISTFRILAMA

SEQ ID NO: 70311 - protein, 73 aa, Gossypium hirsutum
  Clone ID: uC-gsronu33B156h11b1.pep
LAYAHASDLTGFMRSLLKSMHDHVDAWPFKVPVDVREFLVYYTLSSSSCFFFSISIFCCICSIFIFLFYYSSI

SEQ ID NO: 70312 - protein, 140 aa, Gossypium hirsutum
  unsure (1)..(140): unsure at all Xaa locations
  Clone ID: GOSHI-09MAY01-C37767_1.pep
MAVSFYHVLAFFISCLILFFSCKSKAKRRFNLPPGPPGWPVVGNLFQVARSGKPFFEYVDDLRHQYGPIFTLKMGTRTMIILGDAKLCHEAFIEKGVVFASRPXENPTRXIFSCNKFTVNAAVYGPVWRSLRRNMVQNML

SEQ ID NO: 70313 - protein, 76 aa, Gossypium hirsutum
  Clone ID: GOSHI-09MAY01-C37677_1.pep
RRRNSDDIPTILVSPYPLSSSFLFIVDAKMKAKKQRKKLKYNKSPSNNIDFLIILVFHLVSVLYFCKKKDPFTLDF

SEQ ID NO: 70314 - protein, 118 aa, Gossypium hirsutum
  Clone ID: GOSHI-09MAY01-C37127_1.pep
FSNKPYVCPKSYNVADLNYPSITVPELNGTTIITRKVKNVGTPGTYKAHVRSPVGVMVTVHPSTLKFTKIGEEKKFEVRLRPSSKKVDAEGGVGYVFGVLRWCDGYHYVGSPLVVKRK

SEQ ID NO: 70315 - protein, 126 aa, Gossypium hirsutum
  Clone ID: GOSHI-09MAY01-C37077_1.pep
MTRSFNFLPMLLLLTLSALTVQEISAAPSCTEVAIELLPCLSFLSGNGAADVPSRACCLGAQTIAYEAQTKDDRRAICECLVNALANIGTSDSFTARIPLIATQCGVDVSLPPITSDKDYCSKLFP

SEQ ID NO: 70316 - protein, 49 aa, Gossypium hirsutum
  Clone ID: LIB3146-033-Q1-K1-D8.pep
CFSSANYQRQKLLVQSLDLTSLDIPCDCATLWKILIIYSSIHHSLNLFK

SEQ ID NO: 70317 - protein, 217 aa, Gossypium hirsutum
  Clone ID: GOSHI-09MAY01-C37027_1.pep
VAETSALLEQKWDKIFFTGGARVGRIVMAAAAKNLTPVTLELGGKCPAVVDSNVNLQVTSRRIVAGKWVCNNGQACISVDYIITTKELAPKLIATLVSVVEEICGGDLMESKERSRIINSFHFKRLVNLLEEDKVSSKIVFGGQREESQLQIAPTILLDVPEDSMIMQEEIFGPLLTIITVERLEDSFAMINRKPKPLAAYLFSDDEQIKRKFVQNI

SEQ ID NO: 70318 - protein, 77 aa, Gossypium hirsutum
  Clone ID: GOSHI-09MAY01-C37337_1.pep
NRKSFLLLHIIFPFKKRAKENTTMPFTLKTMYLTKYVKNLHLGIIFHCQAKLGRGMQANHIKEFVLLSTILSSLGLL

SEQ ID NO: 70319 - protein, 258 aa, Gossypium hirsutum
  Clone ID: GOSHI-09MAY01-C30567_1.pep
GGSSSGADAASASTWVPHPNPSPQYPRRLSELVRRSLMSSAGAESGGHVNHSPLSSGLPTSPEEMLLSSGVPNQRPPRQYPRSVSWLERQDAGFLAVPHSLRNLAAATEGRSRLLVPEIRNVLDLMRRGENLRFEDVVILDQSAFFGVADIHDRHRDMRLDVDYMSYEELLALEERIGNVNTGVSEEMISNQLKRPKYSCVPGTQLETEPCCVCQEEYNHREDLGTLGCGHDFHADCIKQWLMHKNLCPICKTTGLNK

SEQ ID NO: 70320 - protein, 200 aa, Gossypium hirsutum
  unsure (1)..(200): unsure at all Xaa locations
  Clone ID: GOSHI-09MAY01-C30777_1.pep
YVAGDRVITDPLCKPFSMGRNLICVYSKKHMYDVPELADMKRKANIRSLKEMALLLRTGSKLVWIAPSGGRDRPNPVTGEWNPAPFDSSSVDXMRRLIESSGAPGHMYPLALLCYDIMPPPSKVEKEIGERRIISFHGAGLSVAPEVAANCEKSEEVKDVFTQALYKSVTEQYNVLKSAIHGKQGLEASTAGIALSQPWN

SEQ ID NO: 70321 - protein, 64 aa, Gossypium hirsutum
  Clone ID: LIB3828-014-Q1-K6-C7.pep
NCVNSLGFSVKRRKKKKKKKKKKKKKKKKKKKKKKKKKKKKKKKKKKKKKKKKKKKKKKKRWTS

SEQ ID NO: 70322 - protein, 76 aa, Gossypium hirsutum
  Clone ID: LIB3543-054-Q1-K6-H4.pep
AIFHQVTNLHFRGASVWLAVMEDLLSKGMRNAENAILSGCSAGGLASILHCDSFRALLPMGTKVKCISDAGYFINT

SEQ ID NO: 70323 - protein, 134 aa, Gossypium hirsutum
  Clone ID: LIB3120-010-Q1-K1-D8.pep
FSGILNKKRIFNPDVYNWNRIKVRYCDGSSFTGDVAAVNPVANLHFRGARVWLAVMEDLLSKGMRNAENAILSGCSAGGLASILHCDSFRALLPMGTKVKCISDAGYFINTRDVSGGHYIQTFFDQLVATHGSA

SEQ ID NO: 70324 - protein, 131 aa, Gossypium hirsutum
  Clone ID: GOSHI-09MAY01-C30197_1.pep
MAGSNVFILLACFILLGFSSMEVSLAARNLQQVPLPSLPNPIVVLPPLPNLPPLPNLPPLPNLPPLPNLPPLPNLPPLSNLPPLPRLPIPPLSNPTIVLSPLPRLPIPPLSNPTTVLPPLSIVPIPPLSNP

SEQ ID NO: 70325 - protein, 194 aa, Gossypium hirsutum
  unsure (1)..(194): unsure at all Xaa locations
  Clone ID: GOSHI-09MAY01-C30187_1.pep
MATATVTAASTLSWLHSFGGTQNETAKVADKNRVFVVFAQKKAKKTRKIILKEDVEYLGKKGQLLDVKAGYFRNYLLPTGKAQIITSSLLKEMKMEEERIEAEKQRVKEEAQQLALIFETVGAFKVKRKGGKGKQIFGSVTAQDLVNIIKAQLQRDVDKRIVFLPKIRXTGEYVAELKLHPEVTARVRVNVYAN

SEQ ID NO: 70326 - protein, 140 aa, Gossypium hirsutum
  Clone ID: GOSHI-09MAY01-C30087_1.pep
MDCALSPQIFINTRFARCVAIRLGVEIRLYRKRWLSSTCCAVGVSEMGAGNLFDDGSLKGSENGSLLGALGDSVLPPFGTVDAEITPETVDFFVSDAEGDPDCPSKGFSSIDQALNTIRQGKFVIVVDDENDDFKEPLSL

SEQ ID NO: 70327 - protein, 162 aa, Gossypium hirsutum
  unsure (1)..(162): unsure at all Xaa locations
  Clone ID: LIB3828-032-Q6-K6-D2.pep
MNREIYLHTGFLPSSFGIYAMSLSSGLFLLEKPAWAVAVAAVGVILGGPFSILAFLPLTFYSLDKQFKQAFLSGAVTSIALLALSILVDHCYYQRWTSSVFNLLVYNVLGGGESHLYGTEGPLFYIRNGFNNFNFCFILALLFLGILPXARKKYAPDLFIVI

SEQ ID NO: 70328 - protein, 130 aa, Gossypium hirsutum
  Clone ID: LIB3048-055-Q1-L1-C3.pep
RPASWLFAEEKVGGFYAVRLFLGFLSLISDATLVVALSRKYGKRLASYALAMLCLATGCFFASTSFLPSSFSMYAMSLSSGLFLLEKPAWAVAVAAVGVILGWPFSILAFLPLTFYSLAKQFKQAFLSGA

SEQ ID NO: 70329 - protein, 163 aa, Gossypium hirsutum
  Clone ID: GOSHI-09MAY01-C30307_1.pep
MLFMATLSTLHTTFTCHSLRYQKSFNTPFCLNKNPIWKKTIKTPTLTASVATEAVTETETPSDFIIPQKPEEVVKQVGKPRLVLKFIWMEKNIGLALDQVIPGHGTVPLSPYFFWPRKDAWEELKATLESKPWISQKKMIILLNQATDIINLWQQSGGNLSQS

SEQ ID NO: 70330 - protein, 145 aa, Gossypium hirsutum
  unsure (1)..(145): unsure at all Xaa locations
  Clone ID: GOSHI-09MAY01-C30277_1.pep
PTRPPTRPPTRPGGIVSDDDNGNAVVTARLLVPNNMGGCLLGRGGDAIQRLRSGTGATIRVLPADHLPACPVATDELVHTSGKRDVTXRALYELSTLSHQHPRKDKPPLELLLCHIQARISLLGLFHRAIQCGRIEIFLLMIVHQ

SEQ ID NO: 70331 - protein, 143 aa, Gossypium hirsutum
  Clone ID: GOSHI-09MAY01-C31907_1.pep
RDMAMPRDRPLHLCLLILGSDTTPSIGRLNGTELLKAACNQTSDYAFCHATLTADPNAGGPQALAGDLANAALRLAQTKATHAQSLIPLLLQNATTSLDHNRLQMCQSSNNKAISQLSAANNDFNSDSLDTMVEENKHCCSCY

SEQ ID NO: 70332 - protein, 188 aa, Gossypium hirsutum
  Clone ID: GOSHI-09MAY01-C31937_1.pep
MNLQIQTQSLSTHFPLPPFPPKPKFLQAKPKPSFKLWSSLSTVSVPPTKTSHKPFPAEVSRTIMELSSMGTLATLAQDGWPLGVGVRFAVDAEGTPVLCLPQPSPDNRSTLHVQLDQCGLRTPQCTIQGSLTKPADATILRWFDSVWKKRFGESADVDNLYTVDVQRVLQMEDLNEDGVWVTSSDYKN

SEQ ID NO: 70333 - protein, 78 aa, Gossypium hirsutum
  unsure (1)..(78): unsure at all Xaa locations
  Clone ID: GOSHI-09MAY01-C31877_1.pep
MGGGNGQKSRMAREKHVEKYKAAKGSQXWNQNKKAMTIQCKVCMQTFICTTSEVKCREHAESKHPKSDIYACFPHLKK

SEQ ID NO: 70334 - protein, 286 aa, Gossypium hirsutum
  Clone ID: GOSHI-09MAY01-C31867_1.pep
MATVEAIAALSFSCYPSSSASKFLLYAKPSRLSSLTSHIPKSTPLLSHNISISPLISTQKKLSFQLCSTLQEVSLEAETDKTQKSNVKRKLFVLNLPWSYTVADIKDLFGQCGTVKDVEIIKQKDGRSRNFAFVTMASGEAAQAAIDKLDSHEVSGRIIRVEFSRRLKKPSPPSLEPMVPSRETRHKLYVSNLAWKARSTHLREFFSAFNPASVRRVFSNPSGQSARYGFVSFATLEEAEAAASTLDGKELMDRPIRLKFTERKDDESGGEKKEAKDEPDDQNEEA

SEQ ID NO: 70335 - protein, 139 aa, Gossypium hirsutum
  Clone ID: LIB3120-025-Q1-K1-A7.pep
DSRIRATAPRVTATRTNLPSATLAYGEAAGAAIDKLDSHEVSGRIIRVEFLRRLKKPSPPSLEPMVASRETRYKLYVSNLAWKARSTHLRKFFSAFNPGSGRVVDSNRSEQSAGYGSDFFATMDEAEPAVSTLDGKELM

SEQ ID NO: 70336 - protein, 176 aa, Gossypium hirsutum
  Clone ID: GOSHI-09MAY01-C31457_1.pep
MLTVSVKWQKELLKAVEIDTSQPPYVFKCQLYDLTGVPPERQKIMVKGGLLKDDADWSTVGLKQGQKLMMMGTADEVVKAPEKGPVFMEDLPEEEQVVSLGHSAGLFNLGNTCYMNSTVQCLHSVPELKSSLVKYSHSGRNNDVDQTSHMLTIAARDLFGELDKSVKPVAPMQFWR

SEQ ID NO: 70337 - protein, 202 aa, Gossypium hirsutum
  Clone ID: GOSHI-09MAY01-C31467_1.pep
MALSMASTSFSSFSIIRIHPKKLFSRKVTTLLRGETRTKATKGGVSSVCEPLPPDRPLWFPGSTPPEWLDGSLPGDFGFDPLGLGSDPETLKWFAQAELMHARWAMLAVAGILIPELLESLGFIDNFSWYDAGSKQYFADPTTLFVVQTALMGWVEGRRWADIIKPGSVDIEPNLPNKKKPTPDVGYPGGLWFDPLMWGRGS

SEQ ID NO: 70338 - protein, 240 aa, Gossypium hirsutum
  Clone ID: GOSHI-09MAY01-C31407_1.pep
MKHLVCGEVVDIRDIINVRNLDGRTALHMAVTENVQSSLVELLMSVPSIDLNVCDVDGLTPLDLLKRRPKSASSEILIKELLAAGGISRGQDNVARSALVSHLKEHGVGASPGTSFRVPDAEIFLYTGVENTYDARCDKESVEYSSCLSELSDLNLSTSFDTKKSSSVNHTARRLKNFLHWPMKKERKATSTESGDTDDPVEVTSACRNWPDIHIPLREKYTKSVSLPNNKRTLALHNDL

SEQ ID NO: 70339 - protein, 178 aa, Gossypium hirsutum
  Clone ID: GOSHI-09MAY01-C31647_1.pep
PTRPPTRPKMEVHPKNVSGKFYGKKVRTEIWRRYNGDRRFYLQRQRFAGYQSEIVRSVFCLCPLGWAPWSPRLVESVALGCVPVIIADGIQLPFPSAVKWSEISFTVAERDVGKLGRILEHVAKTNLSTIQKNLWDPAVSKALLFNDHMQEGDATWQVLESLYKKLDRSYKRSRVSSQ

SEQ ID NO: 70340 - protein, 66 aa, Gossypium hirsutum
  Clone ID: GOSHI-09MAY01-C31677_1.pep
MAKSKDVRVTIILECTSCVRNGVNKESTGISRYITQKNRHNTPSRLELKKFCQYCYKHTIHGEIKR

SEQ ID NO: 70341 - protein, 256 aa, Gossypium hirsutum
  unsure (1)..(256): unsure at all Xaa locations
  Clone ID: GOSHI-09MAY01-C31607_1.pep
IYIPVINWFLMIMCVVVVSIFRSTTDIANAYGIAEVGVMLVTTTLVTLVMLLIWQTNLFMALCFPLVFGSIELIYFSAVLSKVLEGGWLPLVFATFFLSVMYIWHYGSVLKYQSEVREKISMDFMLELGSTLGTVRAPGIDLLYNELVHGIPSIFGQFLLSLPSIHSTIIFVCIKYVPVPVVPQEERFLFCRVGPKDYHIFKCIARYGYKDVXKEDHHAFEQLVQILENFLLKEAQDLALESRLHEMDIDSVFVSS

SEQ ID NO: 70342 - protein, 256 aa, Gossypium hirsutum
  Clone ID: GOSHI-09MAY01-C31627_1.pep
DIVSAFEGNSNLFWAERFGKQFLGMNDLWVKHCGISHTGSFKDLGMTVLVSQVNRLRKLKRPVVGVGCASTGDTSAALSAYCAAAGIPSIVFLPANKISIAQLVQPIANGAFVLSIDTDFDGCMKLIREVTAELPIYLANSLNSLRLEGQKTAAIEILQQFDWEVPDWVIVPGGNLGNIYAFYKGFKMCQELGLVDRIPRLVCAQAANANPLYLYYKSEWNEFKAVKANTTFASAIQIGDPVSIDRAVYALKNSNG

SEQ ID NO: 70343 - protein, 88 aa, Gossypium hirsutum
  Clone ID: GOSHI-09MAY01-C31177_2.pep
FFALKSLLMADAIRLLSSPSSSLIHSLRFSSPSLLTTFHFASNYPLSSLGPTNQNADKIFSYSSSIGLAPLALIPRKPSLSFKVLATV

SEQ ID NO: 70344 - protein, 188 aa, Gossypium hirsutum
  Clone ID: GOSHI-09MAY01-C31177_1.pep
MADAIRLLSSPSSSLIHSLRFSSPSLLTTFHFASNSPLSSLGPTNQNSDKIFSYSSSIGLAPLALIPRKPSLSFKVHATVEETEQPKWWERNAGPNMIDIHSTKEFISALSEAGDRLVIGEFYGTWCASCRALFPKLCRTAQEHPEIIFLKVNFDENKPMCKSLNVKVLPYFHFYRGADGQLESFFCS

SEQ ID NO: 70345 - protein, 128 aa, Gossypium hirsutum
  Clone ID: GOSHI-09MAY01-C31117_1.pep
QRTTVAAIPPLSTATSVTDLSVLDSTTVALIGGGSVAALAAVLSFTDPERRRRLQAEGGRARGKEVVRNYFNSSGFQRWKKIYGETDDVNKVQLDIRLGHSKTPENVMKMLTDDGSLNGVTVCDAGCG

SEQ ID NO: 70346 - protein, 188 aa, Gossypium hirsutum
  unsure (1)..(188): unsure at all Xaa locations
  Clone ID: GOSHI-09MAY01-C31057_1.pep
VVLLAFKLGVPDEYFXGMQNSMVSKLDKVLVDTDAAFEVVISSCGEQGHTPAIMLSAGFKPQTEPHLRGMLTCVRASQLWGLREKSRIFIHSGRWLMGVLDELGVLEQGQCFIQVSNPSLQNCFLKHGSRFAETKKNFEVIKGLVVIAKNPCLHPGDIRILEAVDAPGLHHLYDCLVFPQXGERPHTN

SEQ ID NO: 70347 - protein, 181 aa, Gossypium hirsutum
  Clone ID: GOSHI-09MAY01-C31077_1.pep
PRVRTSLTVDGIFYVIDTGFGKMKVYNPKMGMDALQVFPVSRAAADQRAGRAGRTGPGTCYRLYTESAYLNEMLPAPVPEIQRTNLGNVVLLLKSLKIENLLDFDFMDPPPQENILNSMYQLWVLGALNNVGGLTDIGWKMVEFPLDPPLAKMLLMGEQLECLDEVLTIVSMLSVPSVFFR

SEQ ID NO: 70348 - protein, 119 aa, Gossypium hirsutum
  unsure (1)..(119): unsure at all Xaa locations
  Clone ID: GOSHI-09MAY01-C31027_1.pep
MALQAASLLPPTISIHKEAKSNACLKETTLFGVPFSTHFSFPLHLTQELRKKGVAAGIVRAQTAATTPAVDRAAPQGKKTLRKGTVIITGASSGLGLATAKXALAETGEWHVIMACRNF

SEQ ID NO: 70349 - protein, 96 aa, Gossypium hirsutum
  Clone ID: GOSHI-09MAY01-C31267_1.pep
HRLTAMELLRVPFLHIDDYGWDLRLIEYQRDSYDAGPLMRQPLYDVHVSNKSSLVNGYSNYLGYGHESNIGYNSHEYETSELHLEDGHLGDVGPFI

SEQ ID NO: 70350 - protein, 121 aa, Gossypium hirsutum
  Clone ID: GOSHI-09MAY01-C32917_1.pep
KPWGVESARSAYAKLGDDATAQLLDIRPLKESRDVGSPDIKGFGKKPVSIAYNGEDKPGFLTKLSLKFKEPENTTLFIMDKFDGNSELVAELVTANGFKAAYAVKDGAEGPRGWVNSGLPG

SEQ ID NO: 70351 - protein, 313 aa, Gossypium hirsutum
  Clone ID: GOSHI-09MAY01-C32597_1.pep
MVCLSRVLTISCTVKPSPPYKPPSLSSRFVHTKCELKSSWRSMATEPDSSSSAPSVESDSPADKTAAGFCIIEGPETVQDFAKMELQEIEDNIRSRRNKIFLQMEEVRRLRIQQRIKSAELGISKEEQESELPNFPSFIPFLPPLTSANLKVYYVTCYSLIAGIIIFGGLLAPTLELELGLGGTSYADFIRSVHLPMQLSQVDPIVASFSGGAVGVISALMVVEINNVKQQEHKRCKYCLGTGYLACARCSSTGSLVLTEPVSTLNGGDRPLSTPRTERCSNCLGSGKVMCPTCLCTGMAMASEHDPRIDPFD

SEQ ID NO: 70352 - protein, 102 aa, Gossypium hirsutum
  Clone ID: GOSHI-09MAY01-C32557_1.pep
HAFAHASAHASAHASGVSQVGSRALEHGMTNKLTRPSKLLDVSSDFALTYKDKEGDWMLVGDVPWELFVISVKRLRIMRTSEATGLAPMLQGRNQRQRSKPN

SEQ ID NO: 70353 - protein, 129 aa, Gossypium hirsutum
  Clone ID: GOSHI-09MAY01-C32537_1.pep
MAFTHYLFAVPMDTSIHPKISIPPSFCSTESPSSLPFPSFSSPFPPLSKARNLSIFPRINRVGHKAKAEPRESEVNIEADAFSHFKHLLLPITDRNPYLSEGTRQAAATTAALAEKNGAAITVVVIDEK

SEQ ID NO: 70354 - protein, 133 aa, Gossypium hirsutum
  Clone ID: LIB3145-052-Q1-K1-B8.pep
FCSIESPSSLPFPSFSSPFPTLSKARTRINRVGHKAKAEPRESEVNIEADAFSHFKHLLLPITDRNPYLSEGTRQAAATTAALAKKNGADITVVVIDEKQKESLPEHETQLASVRWHLSESGFKEFKLVERLG

SEQ ID NO: 70355 - protein, 188 aa, Gossypium hirsutum
  Clone ID: GOSHI-09MAY01-C32747_1.pep
MATTLFFLLFFTPFLYSATAPNHNAPQDLVRSSCINASYPSLCLRTLSSYSGPTGTPRDLAQAAVKVSLARARKASTYLKTSLTGKSERERAALSDCVEQMAESVDELSKTLSELKHLRGETFEFQMSNARTWVSAALTYEDTCIDGFEGVDRKVKGDVKKKITNVAMVTSNALYLIRRLDESGGLNR

SEQ ID NO: 70356 - protein, 216 aa, Gossypium hirsutum
  Clone ID: GOSHI-09MAY01-C32137_1.pep
MSKGTKRAVLVGCNYPKTQFSLHGCINDVKAIRGVILDIGFKESDVNVLTDAPGSPVLPTGVNIKDALNRMVNKAKAGDILFFYFSGHGTRVPIFQPGQPFKQDEAIVACDLNLVTDVDFRRLVNRLPEGASFTILSDSCHSGGLIEKEKEQFGGQHMTTTVNTDKPKPSKAKAKSLTFDIIHSAIDTAAGILHDAANVGQKIFGIFGKDVVSNST

SEQ ID NO: 70357 - protein, 95 aa, Gossypium hirsutum
  Clone ID: GOSHI-09MAY01-C32027_1.pep
KESIFLFHFHSKNISVFLERIRVPFHSLSLGFLREISKHFKEKKLSFFFLNLLTPLWVLVKIFRSGLHSSSFFLSKVSSFFSWGVTLRKNNKHEL

SEQ ID NO: 70358 - protein, 123 aa, Gossypium hirsutum
  Clone ID: GOSHI-09MAY01-C32287_1.pep
MEAEVIKAELVLPTHMSFKRIQMYEKYPKGQSKVRWKQLKQILQAENCQNYSPDEPNYVNIESPPSMQPCKRICDITGFEAPYHDPRTNLRYANADVFKLVRSLPNEYVQRYLALRKAAVVLR

SEQ ID NO: 70359 - protein, 51 aa, Gossypium hirsutum
  Clone ID: GOSHI-09MAY01-C33997_1.pep
CISSYMYMNFFYFSLILSVLYFIVLGCSHFFLRCLLLAVLTLGCLRVDVHG

SEQ ID NO: 70360 - protein, 114 aa, Gossypium hirsutum
  Clone ID: GOSHI-09MAY01-C33927_1.pep
NGFGMEQGTPGTVSNTGKMAKATTLLFLMAIILTEGARDMPLKDQVYNPQGLLGLWGLPLFGLPLPFFKPPPCLGHGGPCCGGLFPFLGKPKAGTPLKNFTRADVNGDAIDPSP

SEQ ID NO: 70361 - protein, 57 aa, Gossypium hirsutum
  Clone ID: GOSHI-09MAY01-C33887_1.pep
CLVSTRVPKWYFCLVLVFLVSHLFFESALIFYSQLKNAVCIYIPNPIIMQFLANLWG

SEQ ID NO: 70362 - protein, 152 aa, Gossypium hirsutum
  Clone ID: GOSHI-09MAY01-C33867_1.pep
PTRTAQKLLELHLAFGFRKYFICFGGKRQGSHVALIQEGKDLVNYALINAVAIRKILKKYDKVHFSKQGQAFKSQAQSMHIEILQSPWLCELMAFHINLRETKVKSGMTLASFEGCYLTFNDGKPFLSCELFDSVKLDIDLTCSICLDTVFD

SEQ ID NO: 70363 - protein, 274 aa, Gossypium hirsutum
  Clone ID: GOSHI-09MAY01-C33547_2.pep
MSKSVIETPPKGGFSFDLCKRNEMLAKKGANPPSFRKTGTTIVGLIFQDGVILGADTRATGGPIVCDKNCEKIHYMAPNIYCCGAGTAADTEAVTDMVSSQLQLHRYHTGRESRVVTALTLLKRHLFNYQGYVSAALVLGGVDVTGPHLHTIYPHGSTDTLPFATMGSGSLAAMAVFESNYREGLTRDEGIKLVTEAICSGIFNDLGSGSNVDICVITKGGKEYLRNHLQPNPRTYTSSKGYSFPKKTEVLLTKITPLKEKVEIIEGGGDVMEE

SEQ ID NO: 70364 - protein, 273 aa, Gossypium hirsutum
  Clone ID: GOSHI-09MAY01-C33547_1.pep
MSKSVIETPPKGGFSFDLCKRNEMLSKKGVNPPSFRKTGTTIVGLIFQDGVILGADTRATEGPIVCDKNCEKIHYMAPNIYCCGAGTAADTEAVTDMVSSQLQLHRYHTGRESRVVTALTLLKRHLFNYQGYVSAALVLGGVDVTGPHLHTIYPHGSTDTLPFATMGSGSLAAMAVFESKYREGLTRNEGIELVTEAICSGIFNDLGSGSNVDICVITKGGKEYLRNHLQPNPRTYTSSKGYSFPKKTEVLLTKIIPLKEKVEIIEGGDAMEE

SEQ ID NO: 70365 - protein, 59 aa, Gossypium hirsutum
  Clone ID: LIB3582-028-P1-K1-G11.pep
MSKSVIETPPKGGFSFDLCKRNEMLAKKGANPPSFRKTGTTIVGLIFQVLFWGKLNSGL

SEQ ID NO: 70366 - protein, 82 aa, Gossypium hirsutum
  Clone ID: GOSHI-09MAY01-C33727_1.pep
PTRPGLGAYLGIMGSRRDVVTAVWKTGLDPVWYKCMRCLRQTSAFASADSTHQPSQNERVSWWISRWAYGCPMCGGPWVRVV

SEQ ID NO: 70367 - protein, 87 aa, Gossypium hirsutum
  Clone ID: LIB3135-008-Q1-K1-B12.pep
MNVEQCSGLIKFYTIITNYFLSFFIKTLIVVLFTFMRLFFFFIIFLDYFCFFLFFYLNIIFFFFFFYLFYFFFFVLFFYITHFLFFF

SEQ ID NO: 70368 - protein, 187 aa, Gossypium hirsutum
  unsure (1)..(187): unsure at all Xaa locations
  Clone ID: GOSHI-09MAY01-C33667_2.pep
QSEGSYYNIGSPGTNDNSGISVNTKKYHSLPSISGLSVPHRDLACAEKNAPWDTSNGYGPAAGQPMFSXAGSRTTVPLVFDELSQPKGYQDAFPVQLSSSPGSGSLWSRQPFEQFGVAEKKRTAGSEVPGSGLNSMSWDTASGMDLESKLLQSFRHCIVKLLKLDGSDWLFRQNDGADEDLIDPCSC

SEQ ID NO: 70369 - protein, 279 aa, Gossypium hirsutum
  Clone ID: GOSHI-09MAY01-C33667_1.pep
MSWDTASGMDVEAKLLQSFRHCIVKLLKLDGSDWLFRQNDGADEDLIDRVAARERFLYDAEAKQMNQALCTGESQYSSPERKYGSTLKSNEASLANILISSVPQCGEGCIWKADLIISFGVWCIHRILDLSLMESRPELWGKYTYDLNRLQGIIDPAFSKPRSPMLPCFCLQIPADYQQRSSPPVSNGMLPPTAKPGRGKCTNAATLLDIIKDVEIAISCRKGRSGTAAGDVAFPRGKENLASVLKRYKRRLSILVGTHEGLGSHKVLTSAPLSASYGS

SEQ ID NO: 70370 - protein, 99 aa, Gossypium hirsutum
  Clone ID: GOSHI-09MAY01-C33637_1.pep
AIALRSLYSRDGGGAKIFARRPMNQSRESSMGLVDPTAFRPRGLQLGLSLFSFTREWGASLLGRYLLDSEFGPTSATREILIVFLPALMPAGGRKQKST

SEQ ID NO: 70371 - protein, 223 aa, Gossypium hirsutum
  unsure (1)..(223): unsure at all Xaa locations
  Clone ID: GOSHI-09MAY01-C33197_1.pep
MAMAMAGTATFSISSATSIFRTSSSLKFSSKPVLIPMRFSPKTQSPPRTLRIYALTSNDIKVGTNLEVDGAPWRILEFLHVKPGKGAAFVRTKMRNYITGNTVEKTFRAGSTIEEANVFKESKQFTYKDGSQFVFMDLNTFEESRLNEADVGDKTKWLKEGMDCNLLFWNGKIIDFGPPITVQLTVVDVDPXLKGDTASSGSXPATVDTGAVVNVPLFVNIGD

SEQ ID NO: 70372 - protein, 156 aa, Gossypium hirsutum
  unsure (1)..(156): unsure at all Xaa locations
  Clone ID: GOSHI-09MAY01-C33057_1.pep
GDSAREFWFQTPPKIGPDVPYKFGIIGDLGQTYNSLSTLEHYMQSGAQTVLFVGDLSYADRYQYNDVGIRWDSWGRFVEKSTAYHPWIWSAGNHEIEYMPYMDEVVPFKSYLQRYPTPHLSCKSSSPMWYAIRRASAHIIXLSSYSPFVKYTPQYE

SEQ ID NO: 70373 - protein, 199 aa, Gossypium hirsutum
  unsure (1)..(199): unsure at all Xaa locations
  Clone ID: GOSHI-09MAY01-C33077_1.pep
MLSNPTSSKPRTSNIFATTPAPSSMPVGGGSLQSLQPERSSSKNKRMGIPYEKMDGWMXDSVAEIVKKLPESPLLIHVYSENATMETTAVEENWVSMKQKWQKGERAMPDGVIFVDQIQGVEEGTWGIVVQSKSEEEDDGCGSGPGSEPVPPACYLLKTTSEVGSGLGLRCTHFCLVKVSSFRESAFSQLKNCWLLQGN

SEQ ID NO: 70374 - protein, 113 aa, Gossypium hirsutum
  unsure (1)..(113): unsure at all Xaa locations
  Clone ID: GOSHI-09MAY01-C33377_1.pep
MLAGSISPLLDTYKPIRTASTRFSGAYPKNIDTLKMEPLSRSYNIYSKLSIFNTKRLVNAPISTLGGAALSLRYANLIILIEKLLSSPHFITLDAXDDLYTMLPTHYEKCSSC

SEQ ID NO: 70375 - protein, 68 aa, Gossypium hirsutum
  Clone ID: GOSHI-09MAY01-C33327_1.pep
LPFFFHVEQVFPQCRGLISCLGTPQIASTDRYWVYPSAFSNRALNHPMVKCARKKLKQEPDPIHQSNQ

SEQ ID NO: 70376 - protein, 156 aa, Gossypium hirsutum
  Clone ID: GOSHI-09MAY01-C33267_1.pep
MSWLMLNAKFLMHGVLQLKQWVSPTDVELKYVENSSISSAEEKLVDLSNQSVENVNNYTGMEGPETISTIDTIPETPTAASSSVNFDNDSLSSVKTGLDDFLAGVNKSVNSSLDKGENAVKNLLEKITSSITSGKTSTSEAVDNAQVLVNNKLSNL

SEQ ID NO: 70377 - protein, 135 aa, Gossypium hirsutum
  Clone ID: GOSHI-09MAY01-C28987_1.pep
ASCCNPDISTWMQNLAPITQWRAGSMSIFICSSPTSSHPSLNFSGTKYLENSSLSISIFADFNLPVPLWASKPLTINSKSSKLFAEATISCLTINVIKDVLNYCSNKKNPSILFPKLESISAFKDIFYLASVTLA

SEQ ID NO: 70378 - protein, 134 aa, Gossypium hirsutum
  unsure (1)..(134): unsure at all Xaa locations
  Clone ID: GOSHI-09MAY01-C28957_1.pep
PRWSNADKALTTCRNGPLIEYSKNRXKADRASPPFLSPHLHFGEVSVRKVFHLVRMNHVLWANEGNKAAEESANLFLKSIGLREYSRYLSRNHPYSHERPLLGHLKSFPWVVNXGYFTAWRHGRTRYPLRDAGM

SEQ ID NO: 70379 - protein, 153 aa, Gossypium hirsutum
  unsure (1)..(153): unsure at all Xaa locations
  Clone ID: GOSHI-09MAY01-C28977_1.pep
MAGGGNKRRSNNNKNKNSGSGSNSNSSSQNKTKSGRGRSKSSSTRIRNSLFVEGGPLSDWQLDSQGRNRCWNQSGXRISGLGSDRAKASTSKNGPSTKIGGSAIRYEYPSLDLQDPESDILAHEGDNKKDELHPIILLSKESQILAYMDQTTP

SEQ ID NO: 70380 - protein, 199 aa, Gossypium hirsutum
  unsure (1)..(199): unsure at all Xaa locations
  Clone ID: GOSHI-09MAY01-C28827_1.pep
MLVGVQHPSNKIDCLVCSYCFKFIGSIEKQIGRKLYLKTIGIGNSSRNGCQSNSSDDEEDNHYVQNHHSSENGASSSSGSTMPLPMMAVESLMNGELALPYSNKFPLPSVASCLGGCEEAFYCSKSCAEADWESSLCLLCTGEKSESCSRTALLKFIQHAHETNDIFLLAAKAISFTILRXWKPISIGHKRKWWDCIAL

SEQ ID NO: 70381 - protein, 141 aa, Gossypium hirsutum
  Clone ID: GOSHI-09MAY01-C28487_1.pep
MDELIGYLVLSPAVANLSSIRHVNLENNSFRGTLPTELFGATRLKSLVVSGNSLYGPLPSQVGNLKNLQTFDVSRNLFNGSVPSSIVQCKKLTTLVLSQNYFNGSLPEGFGNSLVSLQKLNLSYNRFDGSIPGDIGNLSNL

SEQ ID NO: 70382 - protein, 136 aa, Gossypium hirsutum
  Clone ID: GOSHI-09MAY01-C28467_1.pep
ILVLLAGLLENAELALDSLSICMTISGWVFMISVGFNAAASVRVGNELGAGHPKSAAFSVVIVTVLSFIISVAAAIIIMVLRDVISYAFTEGEVVAEAVSDLCPLLALTLILNGVQPVLSGVALGCGWQTFVAYVN

SEQ ID NO: 70383 - protein, 153 aa, Gossypium hirsutum
  unsure (1)..(153): unsure at all Xaa locations
  Clone ID: GOSHI-09MAY01-C29797_2.pep
KALSPGLVYDISTEEYITFLCSLGYTVDHVKTIVKRPNITCSTKFKDPGELNYPSFSVLFGGKRVVRYTRELTNVGPARSIYKVTVNGPSTVGISVRPKTLIFRSVGEKKRYTVTFVAKRGTSPMAKPEFGSIVWXNAQNQVKSPVSFSWSLM

SEQ ID NO: 70384 - protein, 401 aa, Gossypium hirsutum
  Clone ID: GOSHI-09MAY01-C29797_1.pep
LYSGRGMGKNPVGLVYSKGNSSGSNLCLTGSLDPALVRGGRVRCDRGTTARVEKGAVVRDAGGVGMILANTEASGEELVADSHLLPAVAVGRKVGDLIREYARSDPNPTAALVFGGTVLDIKPSPVVAAFSSRGPNMVTPQILKPDVIGPGVNILAAWSEAIGPTGLAKDSRKTMFNIMSGTSMSCPHISGLAALIKAAHPEWSPSAIKSALMTTAYTQDNTNSTLRDAADGSLSNPWAHGAGHVDPQKALSPGLVYDISTEEYITFLCSLGYTVDHVKTIVKRPNITCSTKFKDPGELNYPSFSVLFGGKRVVRYTRELTNVGPARSIYKVTVNGPSTVGISVRPKTLIFRSVGEKKRYTVPFVAKRGTSPMAKPEFGSIVWGNAQNQVKSPVSFSWSLM

SEQ ID NO: 70385 - protein, 48 aa, Gossypium hirsutum
  Clone ID: LIB3149-016-Q1-K1-D9.pep
ICVGTSMSCPHISGLAALIKAAHPEWSPSAIKSALMTTAYTQDNTNST

SEQ ID NO: 70386 - protein, 128 aa, Gossypium hirsutum
  unsure (1)..(128): unsure at all Xaa locations
  Clone ID: LIB3149-001-P1-K1-B6.pep
VIVTPLNISHVQATIYCSKKHGLEIRTRSGGHDFEGLSYVSHVPFVVIDLVNLRSVDVDVENEEAWVQSGATVGEVYYRINERSTNLSFPAPVFRTGXIGGSISGGCVCSLVRNYCLSAXNVIDAHLV

SEQ ID NO: 70387 - protein, 110 aa, Gossypium hirsutum
  unsure (1)..(110): unsure at all Xaa locations
  Clone ID: LIB3048-015-Q1-L1-F2.pep
DVENEEVWVQSGAIVGEVYYRINERSTKLTFPGAFGYTVGMGGFISGGCDGLLSRTYGLAADNVIDAHXLVDASGKSLYXKTIGGELVWALSRSRSWNLGNRLLWKIKLG

SEQ ID NO: 70388 - protein, 99 aa, Gossypium hirsutum
  Clone ID: GOSHI-09MAY01-C24977_1.pep
MSGRKETVLDLAKFVDKGVQVKLTGGRQVTGTLKGYDQLLNLVLDEAVEFLRDQDDPLKTTDQTRRLGLIVCRGTAVMLVSPTDGTDEIANPFIQPDGA

SEQ ID NO: 70389 - protein, 47 aa, Gossypium hirsutum
  Clone ID: uC-gsflnu33B061c10b1.pep
MSGRKETVLDLAKFVDKGVQVKLTGGRQVTGTLKGYDQLLNLALDEA

SEQ ID NO: 70390 - protein, 81 aa, Gossypium hirsutum
  Clone ID: LIB3272-008-P1-K1-A10.pep
MSGRKETVLDLAKFVDKGVQVKLTGGRQVTGTLKGYDQLLNLVLDEAVEFLRDIQLVHVSELLDDKIHLLFMDTLQTRMIR

SEQ ID NO: 70391 - protein, 183 aa, Gossypium hirsutum
  Clone ID: GOSHI-09MAY01-C24887_1.pep
GRVGEFGNGEFTEAELKKIMANEKLAEIAMTDPKRAKRILANRQSAARSKERKMRYISELEHKVQTLQTEATTLSAQLTLLQRDSVGLTNQNNELKFRLQAMEQQAQLRDALNEALTAEVQRLKRATQQLGGDSDPSKGMVSEPLSVNQQMFQLNISHQMQQQSPPQPQQQNGNTTAKTELNQ

SEQ ID NO: 70392 - protein, 76 aa, Gossypium hirsutum
  Clone ID: LIB3146-002-P1-K2-C10.pep
VESSNDPGNLTNNCLFALLEVAGSHYAAICVENDEIVRGESNTPMKLTVRKTIPFVEDVCVSGTDAVLPLRGIIEQ

SEQ ID NO: 70393 - protein, 47 aa, Gossypium hirsutum
  Clone ID: LIB3147-005-Q1-K1-E10.pep
PTRPAETWAVFIFDRLLIYEMQLANFAMCMFGSFLVLGFKHYLDLMN

SEQ ID NO: 70394 - protein, 199 aa, Gossypium hirsutum
  Clone ID: GOSHI-09MAY01-C24507_1.pep
TMVSNEDEFNLTNEQERWVVGIMLGVTLTKLVLMFYCRTFTNEIVKAYAQDHFFDVITNIIGLVAVLLAKYIDDWMDPVGAIILALYTIRTWSMTVLENVNSLVGRSAAPEYLQKLTYLCWNHHKAIKNIDTVRAYTFGSHYFVEVDIVLPANMALQEAHDIGESLQEKLELLPDIERAFVHLDYEFSHKPEHAQAHAL

SEQ ID NO: 70395 - protein, 118 aa, Gossypium hirsutum
  Clone ID: GOSHI-09MAY01-C24527_1.pep
RRTYPLPLINSSATATCTATVTSVLTCSTCRHTRPRRRKSPLVAGIELKRVVKGLFFWAFFGLRGPGLRVCFETGLKRSFRATPATVRGGATAGNHGRITSLRERAFAPRVRPRAENA

SEQ ID NO: 70396 - protein, 167 aa, Gossypium hirsutum
  Clone ID: GOSHI-09MAY01-C24477_1.pep
MEDKQSVATLIDSTTTKIQQLQRAFAELESHRAVTLNLKWKELEEHFHGLEKSLKRRFHELEDQEKEFETKTRKSREMLKKREAAVVAKEQASLVRVQEKRDAAVFAISNALEKHRKVSPEEPADSCDGDSGELSVEEKPPDSVASESNSEDIKCSSENGNFGVKSY

SEQ ID NO: 70397 - protein, 203 aa, Gossypium hirsutum
  Clone ID: GOSHI-09MAY01-C24787_1.pep
HAFAHAFAHAFDWIPGPGKSIPNEKGLIVSSLENGIRLEYQLASEGVEQAELAGKLFLKELKENAVPLENVRMCYSPFARTRHTAEVVASTLNLPFEGPQCKVMEDLRERYFGPSFELLSHDKYTDIWAMDEKDPFTRPEGGESVDDVASKLASAMATMESEYQGCTILVVSHGDPLQILQTILNAASKQMEPSCNDLASIIQ

SEQ ID NO: 70398 - protein, 266 aa, Gossypium hirsutum
  Clone ID: GOSHI-09MAY01-C24687_1.pep
IAPGVNILAGWTGAAAPTDLDIDPRRVDFNIISGTSMSCPHVSGLAALLKKAYPNWSPAAIKSALMTTAYNLDNSGHTINDLATGEEASPFIFGAGHVDPNRALNPGLVYDTDSSDYIAFLCSIGYDSKRIEVFVREPNSSDVCATKLATPGDLNYPSFSAVFNSNDHVVKYRRKVKNVGTSAGAVYEAKVNAPPGVKISVSPSKLLFSAVNQTLSYEVSFASDSLGGVFSSSHKGSGRLEWSDGVHLARSPIAVRRTQGVQDEPF

SEQ ID NO: 70399 - protein, 111 aa, Gossypium hirsutum
  Clone ID: GOSHI-09MAY01-C24647_1.pep
NLGVPSDQPCVPILPQPFVSFLNPITQAHHVVYLQCFNITRGMLLWPISSDLIKFLKSSQHELQRISSKHIISSVRYNTIEKEHNKSLLQFFFLTRALCSLMPCLHWSLSS

SEQ ID NO: 70400 - protein, 315 aa, Gossypium hirsutum
  Clone ID: GOSHI-09MAY01-C24617_1.pep
FLQVEGRLTLSMSTDVASRMLDGAVKLPKQLFGESTAVMAPHEVVQPAKGGRDLLRLFKELRQSVANDWGGSKPPVVEEDKVFLEKKEWIHDLEQQISNASQQAESLVKAQQDMGETMGELGLAFIKLTKFENEEAMYNSQRVRAADMKCLATAAVKASRFYRELNAQTVKHLDTLHEYLGLMLAVHGAFSDRSSALLTVQTLLSELSTLHARAEKLEAASSKIFGGDKSRIHKIEELKETIRVTEDAKNVAIREYERIKENNKCELERLDKERRVDFLNMLKGFVVNQVGYAEKISNVWAKVAEETSGYAKDSC

SEQ ID NO: 70401 - protein, 81 aa, Gossypium hirsutum
  unsure (1)..(81): unsure at all Xaa locations
  Clone ID: GOSHI-09MAY01-C24167_1.pep
LKFINEVINRGVTIILFVVTNLVCVPKKRKXNLSKFRGLKGSWKPIRTLEWNWKRDVTPVPSEMVRSLAQXKKGLIRIILN

SEQ ID NO: 70402 - protein, 84 aa, Gossypium hirsutum
  Clone ID: GOSHI-09MAY01-C24047_1.pep
LEVLNTVRSVGQPLVDDWKCLKKMVRTFETHCGSLAQYGMKHMRSLANICNARIQTEQMAEASAQACVSVPTGRWSSLQKGFSA

SEQ ID NO: 70403 - protein, 63 aa, Gossypium hirsutum
  Clone ID: GOSHI-09MAY01-C25997_1.pep
KTLLVFCSSTPALQLTLTADSKKLYFSTHTINLVINFDLVSQTPFFFSSLYVFELYQSSFCFS

SEQ ID NO: 70404 - protein, 146 aa, Gossypium hirsutum
  Clone ID: GOSHI-09MAY01-C25987_1.pep
LIIVPTSKAQAIQRSGRAGREGPGKCFRLYPESEFEKLEDSTKPEIKRCNLSNVILQLKALGVDDIFGFDFIEKPSRTAIKKSLEELLLLGALTDEFKLSDPVGRQMARLPLDPVHSKALILASQFKCLDEMLIAAAMLSVESIFY

SEQ ID NO: 70405 - protein, 95 aa, Gossypium hirsutum
  unsure (1)..(95): unsure at all Xaa locations
  Clone ID: LIB3048-023-Q1-L1-C2.pep
LIIVSTSKAQAIERSGRARREGPGKCFRLYPESXSDTLEDSTKPEIKRCSLXNGILQLKGLRVEDIFGNDYXQKPSWTAISTISDEQLQLGTVTD

SEQ ID NO: 70406 - protein, 140 aa, Gossypium hirsutum
  Clone ID: GOSHI-09MAY01-C25897_1.pep
VSSEYFDFDFPRGTFAPVEDDYYLLLDRSPRKQVPLGPNHQANVPSWGRHIKNIKFAQNEASKAADIDNEDNKMGTCIIPLPDLDLSANSSDKVGAGRFDCSCLDRGSLRCVQQHVTEARKLLRKSLGHEKFVKLGFYNM

SEQ ID NO: 70407 - protein, 138 aa, Gossypium hirsutum
  Clone ID: GOSHI-09MAY01-C25857_2.pep
AGITWVLISNFKLADNLQRRPDGTFNRDLSEFLDRRVPANINPVDGVFSFDHVDGATGLLNRVYQPSSLNEAQWGMVDLEKPLSTTEIVPVIVFFHGGSFTHSSANSAIYDTFCRRLVSLCKAVVVSVNYRRSPEHRY

SEQ ID NO: 70408 - protein, 75 aa, Gossypium hirsutum
  Clone ID: GOSHI-09MAY01-C25857_1.pep
MAGSNEVNLNESKRVVPLNTWVLISNFKLAYNLQRRPDGTFNRDLSEFLDRRVPANINPVDGVFSFDHVYGAPVF

SEQ ID NO: 70409 - protein, 85 aa, Gossypium hirsutum
  Clone ID: LIB3272-032-P1-K1-E7.pep
NLSSQRKPHNKKKERKKTLKSKSIIVWFRIFLFLFFFALLYWSLYTLPLFFGFFFFVLNKKRHFLSEEKKNPTPLNRGREMEGRK

SEQ ID NO: 70410 - protein, 58 aa, Gossypium hirsutum
  Clone ID: GOSHI-09MAY01-C25847_1.pep
NNLMDFEKSYSNMHIKLEINKCLVTTSIIYILHFNSYNMDLEACLRITNALMRMRQQA

SEQ ID NO: 70411 - protein, 173 aa, Gossypium hirsutum
  unsure (1)..(173): unsure at all Xaa locations
  Clone ID: GOSHI-09MAY01-C25877_1.pep
MDRKQHIAIFTTASLPWMTGTAVNPLFRAAYLAKDGERKVTLVSPWLSLKDQKLVYPNNTTFGSPSEQESFIRQWLEERTAFISGFVIRFYPGKFAVDKRSILPVGDISEIIPDEEADIAVLEEPEHLTWFHHGKRWKTKFRLVIGIIHTNYLEYXVKREKNGQFQAFLLKYV

SEQ ID NO: 70412 - protein, 157 aa, Gossypium hirsutum
  unsure (1)..(157): unsure at all Xaa locations
  Clone ID: AI054570.1.pep
MDRKQHIAIFTTASLPWMTGTAVNPLFRAAYLAKDGERKVTLVIPWLSLKDQKLVYPNNTTFGSPSEQESFIRQWLEERTALYLVSHTVLSXKFAVDKRASSCRDSQNHPDEEQILCPEKLDTYMFIMEELKLNRLYRNIIHFGVVRRKWTFSFFEL

SEQ ID NO: 70413 - protein, 106 aa, Gossypium hirsutum
  Clone ID: GOSHI-09MAY01-C25807_1.pep
MLVFHNLDCKKPVVAAIEGLALGGGLELAMGCHARIAAPKTQLGLPELTLGVIPGLGGTQSLPRLVGVSKAIEMMLVRLLWVEQRHIIVVDHHIKICGLDSLILSH

SEQ ID NO: 70414 - protein, 123 aa, Gossypium hirsutum
  Clone ID: LIB3196-003-P1-M1-G6.pep
FGEATRRRDVKAIVLTGKGGRFSGGFDINAFQNPSGDTSDRTIESIDLVLNTIEDCKKPVVAAIEGLALGGGLELAMGCHARIAAPKTQLGLPELTLGVIPGLGGTQSLPRLVGVSKAIEMML

SEQ ID NO: 70415 - protein, 158 aa, Gossypium hirsutum
  Clone ID: GOSHI-09MAY01-C25837_3.pep
MHRSHVQGSRAGAREKKIMGLREVFYRMGLNDKEIVALSGAHTLGRSRPERSGWGKPETKYTKDGPGAPGGQSWTVQWLKFDNSYFKDIKAKRDEDLLVLPTDAGLFEDPSFKVYAEKYAEDQETFFKDYAEAHAKLSNLGAKFNPPQGIVLNDGAAP

SEQ ID NO: 70416 - protein, 163 aa, Gossypium hirsutum
  Clone ID: GOSHI-09MAY01-C25837_2.pep
PRVRKYGRVDVSGPNECPEEGRLPAAGPPSPADHLREVFYRMGLNDKEIVALSGAHTLGRSRPERSGWGKPETKYTKDGPGAPGGQSWTVQWLKFDNSYFKDIKAKRDEELLVLPTDAVLFEDPSFKVYAEKYAEDQETFFKDYAEAHAKLSNLGAKFNPPED

SEQ ID NO: 70417 - protein, 136 aa, Gossypium hirsutum
  Clone ID: GOSHI-09MAY01-C25837_1.pep
NSKGSGGVYKKARVQTSSSQPPLKVRKEKLGDRITALHQLVSPFGKTDTASVLLEAIGYIRFLQSQIEALSSPYLGTASPNMRNQQSVQGERNCAFPEDEGQEKQEPKPKDLRSRGLCLVPVSCTQQVGSENGADY

SEQ ID NO: 70418 - protein, 66 aa, Gossypium hirsutum
  unsure (1)..(66): unsure at all Xaa locations
  Clone ID: LIB3145-021-Q1-K1-F2.pep
KQKPSIRKDGPRAPXGGQSWTVQWLKVDNSYFKDIKAKRDEDLLVLPTDAVLFEDPSFKVYAEKYA

SEQ ID NO: 70419 - protein, 122 aa, Gossypium hirsutum
  Clone ID: LIB3149-020-Q1-K1-H11.pep
MHRSHVQGSRAGAREKKVRKEKLGDRITALHQLVSPFGKTDTASVLLEVIGYIRFLQDQIEALSSPYLGTASPGVTNQQSEKPKDLRSRGLCLVPVSFTHPVESDCNGADYWAPAFAGAGSF

SEQ ID NO: 70420 - protein, 180 aa, Gossypium hirsutum
  Clone ID: GOSHI-09MAY01-C25557_1.pep
SWVVGSFFSLKFKLNIINTFSLQRLEFLGDSVLDYLITLHLYNKYPGITPGLLTDLKSASVNNNCYALSAVKAGFLKHILQSSQKLYKDIKETVESFQELSLEYTFGWESEKSFPKVLGDVMESLAGAIFVDSGYNKEIVFQSIRPLLEPMITPETLTVHPVKELYELCQKEHYELKKPI

SEQ ID NO: 70421 - protein, 123 aa, Gossypium hirsutum
  Clone ID: LIB3146-055-Q1-K1-E8.pep
MGSVFSFKFKLTIINTFSLQRLEFLGDSVLDYLITLHLYNKYPGITPKLLTDLRSASVNNNCYALSAVKAGFHKHILQSSQKLYKDIKETVESFQELSLEYTFGWESEKSFPQVLADVMESLA

SEQ ID NO: 70422 - protein, 115 aa, Gossypium hirsutum
  unsure (1)..(115): unsure at all Xaa locations
  Clone ID: LIB3493-024-P1-M1-H3.pep
GLLFLDWIGISINFTNIPYERHFKVRAEKFVNVQHFESLLHYSFQDPSLLVEALTHGSYMLAEIPGCYQRLEFLGDSVLDYLITLHLYNKYPXITPGLLTDLRSASVNNNCYALS

SEQ ID NO: 70423 - protein, 180 aa, Gossypium hirsutum
  Clone ID: GOSHI-09MAY01-C25547_1.pep
KAEEELTEIEKEIHNAEANKLHYENIMNNKVLPQIKEAEAKYLELEKDRKESYKKASVICPESDIEALGDRDETTTEQLDAKLKRLNQSLLHESQQYSESIDDLRMLHQEKERRILRELHTYKAFRERLDACQKALDLRWKKFQRSASLLRRELTWQFNGHLGKKGISGHINVSYEEKTL

SEQ ID NO: 70424 - protein, 236 aa, Gossypium hirsutum
  Clone ID: GOSHI-09MAY01-C25527_1.pep
MAGKEFTVNLNKPLVFQVGHLGEAYQEWVHTPIVTDESPRFFKSDFMEILTRTVWWVVPLIWVPVAMWFISLSYTMGHTLPQVVLMSVVGSFIWTFLEYCFHRFLFHIETESYWANTFHYLIHGCHHKHPMDGLRLVIPPAEAAILAIMFWNLYGILFTISTRPALFGGGLIGYVIYDMIHYYVHHGQPTKQSIKKLKKYHLNHHFRIQNKGFGITTTLWDRVFGTLPKTKADKSG

SEQ ID NO: 70425 - protein, 135 aa, Gossypium hirsutum
  Clone ID: GOSHI-09MAY01-C25487_1.pep
SKYTDGADGHEMGANPQPIIDQGPSFYGNSPGSSFMYTAPPPPYSYVSQPPPFPVVRLRGLPFDCTQTDVAEFFHGLDIVDVLFVHKNSKFTGEAFCVLGYPLQVDFALQKNRQNMGRRYVEVFRSKRQEYYKAI

SEQ ID NO: 70426 - protein, 63 aa, Gossypium hirsutum
  Clone ID: LIB3493-026-P1-M1-B8.pep
RNFSTCSTEVNILMVLMGVKMGAKRQRIIDQGPSFYGNSPGSSFMYTAPPPPYSYVSQPPPFL

SEQ ID NO: 70427 - protein, 103 aa, Gossypium hirsutum
  Clone ID: GOSHI-09MAY01-C25457_1.pep
MAMIPRFFGNRRSSIFDDPFSFDILDPFRGFPLSSSSLTTTPVPESAAFANTRIDWKETPEAHVFKADLPGLKKEEVKVEIEDDRMLQISGERKFEKEDKNDT

SEQ ID NO: 70428 - protein, 196 aa, Gossypium hirsutum
  Clone ID: GOSHI-09MAY01-C25447_2.pep
HASAHASAQTSAKRSLLAIFLLLSFLSISTATSTRKTRTRNPCKSMVFYFHDIIYNGHNAKNATSAIVGSPQWGNKTILTGKNHFGDLVVFDDPITLDNNLHSKPVGRAQGFYIYDKKDIFTAWLGFSFVFNSTQNKGSINFAGADPLMNQTRDISVIGGTGDFLMARGVATLMTDAFEGEVYFRLRTDINLYECW

SEQ ID NO: 70429 - protein, 200 aa, Gossypium hirsutum
  Clone ID: GOSHI-09MAY01-C25447_1.pep
DICRQFDDSFKQLTGSETSELESTATSSVKRPRIEANHALLEEIREINQRLIDTVVDISDEDVDPGAAAASAEGRGGTVVKCSFSAVALSATLKSQYMSAQMSPIQPLHLLVPTNYPNCSPILLDKFPVEVSKENEDLSVKAKSRFSISLRTLSQPMSLGEIARTWDVCARAVISDHAKLSGGGSFSSKYGTWENCLSAA

SEQ ID NO: 70430 - protein, 83 aa, Gossypium hirsutum
  unsure (1)..(83): unsure at all Xaa locations
  Clone ID: LIB3829-008-Q6-N6-C9.pep
RFSISXRPLSQPMSLGEIARPWDVCARAVISAHANLSGGGTFSSKYGPWENCLSAAYSSTQPLVTHLAHLCFAHNQFSDRIYL

SEQ ID NO: 70431 - protein, 106 aa, Gossypium hirsutum
  Clone ID: uC-gsronu33B104h01b1.pep
AIVGSPQWGNKTILTGQNHFGDLVVFDDPITLDNNLHSKPVGRAQGFYIYDKKDIFTAWLGFSFVFNSTQHKGSINFAGADPLMNKTRDISVIGGTGDFFITCVIR

SEQ ID NO: 70432 - protein, 162 aa, Gossypium hirsutum
  Clone ID: LIB3493-026-P1-M1-C2.pep
VAMTKCRLQARNFITQDGMSGTKKMRRHTSAMPLNVVSSVGSINDSFKQLTGSETSDLESTATSTVKKPRIEANHALLEEIREINQQLIDTVVDISDEDVDPGTVATAAEGGEGTVVKCSFNAVALSSNLKSQYMSAQMSPIQPLRLLVPTNYPNCSPVLLD

SEQ ID NO: 70433 - protein, 133 aa, Gossypium hirsutum
  Clone ID: GOSHI-09MAY01-C25787_1.pep
KSSKKHQIYSKEFQAMLDGLDEEDSLEEGGQATEKKRRLSMHQVKALEKNFDVGNKLEPERKVKLAEELGLQPRQVAIWFQNRRARWKTKVLEKDYAMLKANYDALKLDHDNLEKEKLGLIAKVSVYISNPIF

SEQ ID NO: 70434 - protein, 87 aa, Gossypium hirsutum
  Clone ID: GOSHI-09MAY01-C25767_1.pep
LLHCRLSGLIVDVFGDLAVVASSAAWVEKYKSKVKACISSIDEINHIHWRPSVEILKEEGMDAADLKELHPSTCPQRTKVLENGIIY

SEQ ID NO: 70435 - protein, 110 aa, Gossypium hirsutum
  Clone ID: GOSHI-09MAY01-C25717_1.pep
LPIPHWLVGHHHSFGHWYGLLFGFLPNPLLKTLISNQGRVHGGEAISELTGKFDPKYRHSFSDLLMHSYSEIGAFSHFYHIDGKPCQTHINNAVNSDRQLQFRMQGISAI

SEQ ID NO: 70436 - protein, 75 aa, Gossypium hirsutum
  Clone ID: GOSHI-09MAY01-C25697_5.pep
TVFKTNEYCCTQGYGTCGPTRYSRFFKDRCRDSYSYPQDDPSSTFTCPAGSNYRVVFCPRGSPHIEMVGSKSQEK

SEQ ID NO: 70437 - protein, 249 aa, Gossypium hirsutum
  Clone ID: GOSHI-09MAY01-C25697_1.pep
RSRVRLTMSYLTISQISSLLFFSVLFISAHAARFEIRNECSYTVWAAASPGGGRRLDPRQSWTIDVPAGTAMARIWGRTNCNFDASGRGHCQTGDCGGLLQCKGWGVPPNTLAEYALNQFGNMDFYDISLVDGFNIPMVFGPTNGGCHNIRCTADINGQCPNELRAPGGCNNPCTVFKTNEYCCTQGYGTCGPTRYSRFFKDRCRDSYSYPQDDPSSTFTCPAGSNYRVVFCPRGSPHIEMVGSKSQEK

SEQ ID NO: 70438 - protein, 162 aa, Gossypium hirsutum
  unsure (1)..(162): unsure at all Xaa locations
  Clone ID: AI055593.1.pep
ISQISSLLFFSVLFISAHAARFEIRNECSYTVWAAASPGGGRRLDPRQSWTIDVPAGTAMARIWGRTNCNFXASGRGHCQXDCGGLLHERWXCTSNTLAEYALNQFGNMDFYDISLVDGXFNIPWXXGPTKAGXSQHFGALADINGQCPDELRLLVGCITHV

SEQ ID NO: 70439 - protein, 190 aa, Gossypium hirsutum
  unsure (1)..(190): unsure at all Xaa locations
  Clone ID: AI054908.1.pep
TISQISSILFFSVLFISAHAARFEIRNECPYTVWAAASPGGGRRLDPWQSWTIDVPAGTAMARIWGRTNCNFMPVEXGHCQTAXCGGLLHVKLXGVPPNTLAEYALNQFGNMDFYDIXLVXXFNSHWCFGPIXAGCHTFRCTADINGHAXXXVKPXXGCNNHAPCFKTMNNCALRVGTVCRPVSGFSGRA

SEQ ID NO: 70440 - protein, 72 aa, Gossypium hirsutum
  Clone ID: LIB3135-062-Q1-K1-H11.pep
FYETHGPTNLFLSFDNLLPSRRLCELEQNRCASLHLCHTDNSSLFPTPVYPYIVPTKYDVLIEDDFPLLDYT

SEQ ID NO: 70441 - protein, 41 aa, Gossypium hirsutum
  Clone ID: LIB3272-048-P1-K1-C2.pep
KHKKGSYNPWGANSPGGGRRLDPRQSWTIDVPAGTAMARIW

SEQ ID NO: 70442 - protein, 166 aa, Gossypium hirsutum
  unsure (1)..(166): unsure at all Xaa locations
  Clone ID: GOSHI-09MAY01-C25657_1.pep
SVLRVAFPIILTXLILYSRSIISMLFLGHLGDIELAAGSLAIAFANITGFSVLSGLALGMEPLCSQPFGAQKPKLLSLTLHRTLGFLLFFSILISFLGVNMVYILVYLHQDPNITRNGQNILFFALPDLFTQSLVHPIAFTLCTRNTHRNFITLISPSSLAINYTR

SEQ ID NO: 70443 - protein, 166 aa, Gossypium hirsutum
  unsure (1)..(166): unsure at all Xaa locations
  Clone ID: GOSHI-09MAY01-C25677_2.pep
AKEVAIFASASESFSKSNINCSIEDSLARFRDVVSAAREISLPVRGYXVIPMLENVMNFVPIDNLAVHFHDTYGQALSNILTSLQMGISNVDSSVSGLGGCPYAKGGSGNVATEDVVYMLNGLGIETNVDLEKLLVARDFICKHLRRPPSSKTALALSNMKANSKL

SEQ ID NO: 70444 - protein, 258 aa, Gossypium hirsutum
  unsure (1)..(258): unsure at all Xaa locations
  Clone ID: GOSHI-09MAY01-C25677_1.pep
GLTVADATSFASPXWVPXLADAKDVMDAIQNIXGARFPVLTPNLKGFEAAVSAGANEVAIFASASESFSKSNINCSIEDSLARFRDVVSAAREISLPVRGYVSCVVGCPVEGIVPPSKVAYVAKQLFDMGCSEISLGDTIGVGTPGTVIPMLENVMNFVPIDNLAVHFHDTYGQALSNILTSLQMGISNVDSSVSGLGGCPYAKGGSGNVATEHVVYMLNGLGIXTNVDLEKLLLAGDFICKHLRRPPSYEDSGCFEQ

SEQ ID NO: 70445 - protein, 139 aa, Gossypium hirsutum
  Clone ID: GOSHI-09MAY01-C25667_1.pep
PDRPNLSFNHMSYGISPRLVFTEKLLVLDLSFNDLSGPLPGKIAEATEKSGLVLLDLSHNRFSGKIPLKITELKSLQALFLSHNLLTGEIPARIGNLTYLQVVDLSHNSLSGSIPLDIAGCFQLLALILNNNNLSGEIQ

SEQ ID NO: 70446 - protein, 133 aa, Gossypium hirsutum
  unsure (1)..(133): unsure at all Xaa locations
  Clone ID: LIB3048-001-Q1-L1-C10.pep
WRIPDQPNLLFNYLGYWIGAKLGFTGKLVGLDLKFNGLXGLFPGKLAKXTGKSSLGLLELSHNRFSGKIPLKITELKSLQALFLSHNLLTGEIPARIGNLTYLQVVDLSHNSLSGSIPLXLVGCFQLLALILN

SEQ ID NO: 70447 - protein, 225 aa, Gossypium hirsutum
  Clone ID: GOSHI-09MAY01-C25637_1.pep
MARGKIQIKLIENSTNRQVTYSKRRNGLFKKANELTVLCDARVSIIMFSTTGKLHEFISPSTTTKQVIDQYQKTLGIDIWNTHYEKMQEQLKQLKEVNRNLRKEIRRRMGDCLNDLSIEDLGALEQEMESSVTLIRDRKYRVLSNQIDTSRKKVRNVEEIHKNLLHELESLKEDPYGLVDNGGDYDTLIGYQNGGPRIFALRLQPNHPSLHSGGGSDLTTYPLLD

SEQ ID NO: 70448 - protein, 193 aa, Gossypium hirsutum
  Clone ID: GOSHI-09MAY01-C25197_1.pep
VAAHASAHASGFNQIVLKKERRRRKQGRKKMGLPCTMALWFQLLLLMCGSGIHGVKNLREKQGDAQLVRKVEDKYSLVSNIAHPAAEESSSQVAKQLGDIYSSFSVLVDKSTKLSSDQLAKELEDKYSRIAAWKPFVDKTPQSSSQLAKELEDKYSRIAAWKPFVDKTPQSSAQLAKELEDKYSALSGYNIPS

SEQ ID NO: 70449 - protein, 39 aa, Gossypium hirsutum
  unsure (1)..(39): unsure at all Xaa locations
  Clone ID: LIB3149-057-Q1-K1-F2.pep
GLNILLYXGYIYSFLTPPLLHMLISSFINILLLLECNST

SEQ ID NO: 70450 - protein, 154 aa, Gossypium hirsutum
  Clone ID: GOSHI-09MAY01-C25117_1.pep
MAGSSAMLVQLTLMLALLSCSMAQSPSASPTMSPSSSTTPSPVATPPPTTMTPPPAMTPMSAPAPSIPMAPTPSTTPMAPTPSSVPEAPTPSMNSSPPAPPPVTPPSMTPNSEPTATAPPPAMTPGEGPPGSAASTREYTMSLLALLGGVALFV

SEQ ID NO: 70451 - protein, 62 aa, Gossypium hirsutum
  Clone ID: LIB3149-004-P1-K1-B11.pep
SKTATKEPSQLTKASAPRIDDKRYKMEQGKKNTLINSLIYIKVNETKKRSVLNKECNSSKQC

SEQ ID NO: 70452 - protein, 61 aa, Gossypium hirsutum
  Clone ID: GOSHI-09MAY01-C25047_1.pep
NRIHTLSITPCLFLHFPSNQAATTQLTYLFILILTVMVIGLLLSTTIHPPLTALMVSVRKF

SEQ ID NO: 70453 - protein, 164 aa, Gossypium hirsutum
  Clone ID: GOSHI-09MAY01-C25077_4.pep
DLERKVVNWRDDDDNTVLHIAATKQQHQAVQLLLDSFYGLDANAKNSEGLTAREIIERVERQGLNMSGAEDDDTTTVKIERIKKRTSRSERALIKLIRAKNGLLENMLNATLGVAALVITAIYQSSLSPPRGLWQGGILFPFCSANLQGKLNSSHPALLLFRFF

SEQ ID NO: 70454 - protein, 175 aa, Gossypium hirsutum
  unsure (1)..(175): unsure at all Xaa locations
  Clone ID: AI055156.1.pep
MDPSLREIAGTGNIDALYSLIGEDPYMLEHIDQIPFIDTPLHIAANKGQIKFAMEMMNLKPSFGRKLNQDGFSPMHLAFKMGHTRLVLRLLETDKDLXRVKGREGXTPFHCAAAVGNSNLYXQXLETCPECVEDVTVRNETALHLALKNDHTDAFNLLHGWLRKNHREGMVGKKV

SEQ ID NO: 70455 - protein, 167 aa, Gossypium hirsutum
  unsure (1)..(167): unsure at all Xaa locations
  Clone ID: AI054990.1.pep
ANEGQIKFAMEMINLKPSFGRKLNPDGFSPMHLALQTGHTKLVLRLLKTDKDLVRVKGREGMTPFHCAAAVGNSNLLFHFLETCPECVEDVTVRNETALHLALKNDHTDAFNLLHGWLRKNRCGGGKDLERRFVNLRDDDDNTALHIAATKQQHXAVQLGVGVPLWG

SEQ ID NO: 70456 - protein, 90 aa, Gossypium hirsutum
  unsure (1)..(90): unsure at all Xaa locations
  Clone ID: AI054715.1.pep
MDPSLREVAGTGDTDALYALIRKDPYMLEHIDQIPFTDTPLHIAANEGQIKFAMEMINLKPSFGRKLNPDGFSPMHLALQTGHTXLVLXC

SEQ ID NO: 70457 - protein, 211 aa, Gossypium hirsutum
  Clone ID: GOSHI-09MAY01-C25007_1.pep
PSKHQAVALRVGSDLSAFYNCDMLAYQDTLYVHSNRQFYVNCLVAGTVDFIFGNAAAVFQNCDIHARKPNSGQKNMVTAQGRTDPNQNTGIVIQKCRIGATSDLQPVRKNFPTYLGRPWKEYSRTVVMQSTISDVIQPAGWHEWSGSFALKTLFYAEYQNTGAGASTSARVKWGGYKVITSASEAQAFTPGRFIAGGSWLSSTGFPFALGL

SEQ ID NO: 70458 - protein, 161 aa, Gossypium hirsutum
  unsure (1)..(161): unsure at all Xaa locations
  Clone ID: GOSHI-09MAY01-C25337_1.pep
MDGIEPYSFNRHPQYPRSTRTRHVYSYGPDEELDDEEEMELDNEDVDDDNDDDPDVYYHRVKESERFERYPKRQKVRTSVPSFQYAPDHRDSLKNAYDWTQQEIYVLLEGWGNRFLQLGRRSLRGENWVDIXEKVSDALKSVKNEAQCRRMIDGLKKKSKT

SEQ ID NO: 70459 - protein, 99 aa, Gossypium hirsutum
  Clone ID: uC-gsflmaxxa064b07b1.pep
KKETLKRKMDGIEPYSFNRHPQYPRSTRTRHVYSYGPDEELDDEEEMELDNEDVDDDNDDDPDVYYHRVKESERFERYPKRQKEIYVLLEVWGNRFLQL

SEQ ID NO: 70460 - protein, 187 aa, Gossypium hirsutum
  Clone ID: GOSHI-09MAY01-C25217_1.pep
MSEMEKNVDWMIHNDDNSSNDSSPDGGASHDILGSKSFAFRAPQENFCIQDFDLGKIYGVGSYSKVVKAKKKDTGIVYALKIMDKKFITKENKTAYVKLERIVLDQLDHPGIMRLYFTFQDNFSLYMALEPCEGGELFDQINRKGRLPEDEARFYAAKVVDALEYIHSMGLIHRDIKPENLLLTKDG

SEQ ID NO: 70461 - protein, 140 aa, Gossypium hirsutum
  Clone ID: GOSHI-09MAY01-C26947_1.pep
KFRAFTLNKSKSMANTSNTCTPQRKELIGISTETPKHEERSNSKDLIQKYLNIIKYVKVSKNSIPSDKAKVSLSASGELPKVASPATVYPMKGKQGSVSTGVCKQLVKSRSASYAASPINWKDDSLLLRPDAIESAILHC

SEQ ID NO: 70462 - protein, 142 aa, Gossypium hirsutum
  Clone ID: GOSHI-09MAY01-C26967_1.pep
DHMPCEDPRRNSQLSREMNFYRERHCPLPDETPLCLIPPPLGYKIPVQWPESLHKIWHSNMPHNKIADRKGHQGWMKEEGPYFIFPGGGTMFPDGAASYIEKLGQYIPITGGTLRTALDMGCGVASFGGSMLKEGILTLSFA

SEQ ID NO: 70463 - protein, 111 aa, Gossypium hirsutum
  Clone ID: GOSHI-09MAY01-C26907_1.pep
SSASSVLSKVDLQGLSITDLSLAVIGHYGKSATNLMLSGLQNVSDKGFWVMGNAHGLQKLVSFTIASCWGVTDVSLEAIGKGCANLKQMCLRRCCFVSGDGLVALAKSAGS

SEQ ID NO: 70464 - protein, 113 aa, Gossypium hirsutum
  Clone ID: GOSHI-09MAY01-C26847_2.pep
MSSTPIKRPKSKHNSYSKNSSLNSILEPPHSLFPSKGEFLRLITVLAIASAVALSCNYFLTLFTFTSKPFCDSNLDPIDSFSDSCEPCPSYGKCYEGKLECIYGYRRHGKLCI

SEQ ID NO: 70465 - protein, 135 aa, Gossypium hirsutum
  unsure (1)..(135): unsure at all Xaa locations
  Clone ID: AW187183.1.pep
FRQTQLDAKCWFRYTTYVYMKRRAMETIDKLLETRTNLHGLQEFKCPVALAEHYKPLTCRFRELVSQQSLFIMPICAGLIGCAVLFLKVRQRMYISARAEELFNQALHHLRQISQEISXPNVTVWGRRTAXLRCT

SEQ ID NO: 70466 - protein, 186 aa, Gossypium hirsutum
  unsure (1)..(186): unsure at all Xaa locations
  Clone ID: GOSHI-09MAY01-C26867_1.pep
RKSSKYPNLVRWYNSVSAEYSDALNEVTAWYVGKKGLGKQVAAKPKEQKSADGNSSDKVNLGSRPSSEIDLPCAELGKVRLRFAPEPSGYLHIGHSKAALLNQYFVQRYQGEVILRFDDTNPTKESNEFVENLIKDVETLGIKYQMITYTXDYFPKLMDMGXKLIKEGKAYVDDHHVTNAEERWMH

SEQ ID NO: 70467 - protein, 260 aa, Gossypium hirsutum
  unsure (1)..(260): unsure at all Xaa locations
  Clone ID: GOSHI-09MAY01-C26817_1.pep
LKDTPATYAIVEFFAHWCPACRNYKHHYENVAKLFNGPNAVHPGIVLMTRVDCALKINSKLCDKFSVSHYPMLFWGPPTKFPAGWSSNQAKSKLHVIDDGRTAERLLNWINKQIGSSYGLEDEKFENEHLSSNISDPGQIARAVYDVEEATATAFDIILEHKMIKSETRAPLIKFLQLLVAHHPSRRVSERKRISTCQLDDRAPCXLWSLNQPYGYPQYMIRVPPNFHICGKGGPRGYWMVCRGNKNDSRGFNWGLWVLM

SEQ ID NO: 70468 - protein, 190 aa, Gossypium hirsutum
  unsure (1)..(190): unsure at all Xaa locations
  Clone ID: GOSHI-09MAY01-C26837_1.pep
MLGGLYGDLPPPSDEDNQPSSNATVWSSSTKMAPPTLRKPFSGFAPPQTILRSQNKPKNPIPKTTTSSSVSISVSPSPVAVAPDGMVQHQPALVGVTSSVIEEYDPARPNDYEEYRRERKRKAMEEEMRRELERRRREEDEREREREERERERERERERERERDSMIRLNIXGEEAGKRRAGMKRGGQGP

SEQ ID NO: 70469 - protein, 75 aa, Gossypium hirsutum
  Clone ID: LIB3493-010-P1-M1-B3.pep
VLTPGATNDEKVFLKGLVVCLDSLASNRKGSRVESHLCLLDHTVALLLGWLSSSDGGGRSPYNPPSICTHFFTFP

SEQ ID NO: 70470 - protein, 89 aa, Gossypium hirsutum
  Clone ID: GOSHI-09MAY01-C26597_1.pep
TASPTLSFNCIPLFLFSSFSINGISLCSNLRYGACSCCWSNETCRSTSRDVLDVCVPKHSNAQSLAKSFNPPCCCWFVCNFLFFSPMIE

SEQ ID NO: 70471 - protein, 178 aa, Gossypium hirsutum
  unsure (1)..(178): unsure at all Xaa locations
  Clone ID: GOSHI-09MAY01-C26507_1.pep
MSVSMSKPSISASIPIPRPRKPSSFSQLKIRCESLDSASNIDVKRPQSSSLSAAGKLMDSDSKNGSYPAAMAPFTGRDPNVKKPEWLRQKAPQGLRFDEVKQSLSRLKLNTVCEETQCPNIGECWNGGGDGIATATIMVLGDTCTRSCRFCAVKTXRKPPPPDPMEPENTAQAIASWG

SEQ ID NO: 70472 - protein, 57 aa, Gossypium hirsutum
  Clone ID: GOSHI-09MAY01-C26487_3.pep
SITFKILFQREHKFNLHILRFITQVLTFCITVLTRIRVFKIFSLCILGKKKRFHYFI

SEQ ID NO: 70473 - protein, 210 aa, Gossypium hirsutum
  Clone ID: GOSHI-09MAY01-C26487_1.pep
QRYPTMGGLFFLPVGLFVSNFATGFSSVEVAAAGAATLAFATIGLLDDALCVIKQHSNGLSPWLRLFLEVSVGIWFSFWLNATNWSSPYGMKMLVPLPAPLGLVCFGKVYLLLTSFSFVSMGNGVNLTDGLDGLAGGTAALAFIGMSIAVLPVCPELAIFGASMAGACVGFLLHNRYKASVFMGDTGSLALGGALPAMAPCTGMFFPLFL

SEQ ID NO: 70474 - protein, 54 aa, Gossypium hirsutum
  Clone ID: AW187901.1.pep
CRKMLVPLPAPLGLVCFGKVYLLLTSFSFVSMGNGVNLTNGLDGLAGGTAALPF

SEQ ID NO: 70475 - protein, 117 aa, Gossypium hirsutum
  Clone ID: GOSHI-09MAY01-C26427_1.pep
MKNKRARTSVDKAVVDVWQREVGELSTRNFAHRLAASEDLVLRLEIYKKLKKHRGCVNTVSFNADGNILVSGSDDKRVILWDWETGNAKLTFQSGHVNNVFQAKIMPYSDDRSLVTC

SEQ ID NO: 70476 - protein, 240 aa, Gossypium hirsutum
  Clone ID: GOSHI-09MAY01-C26787_1.pep
NLLPYPDKHNDSYSATKALGEALVVKSNGVNGLLTCCIRPSSIFGPGDGLLVPSLVAAARAGKSKFIIGDGNNVYDFTYVENVAHAHICAERALASGGEVAEKAAGKAYFITNLEPIKFWEFVSLILEGLGYQRPKIKIPAIVVMPIAHIVEWTYRLLGPYGMKVPQLTPSRVRILTCSRSFDCSRAKDQIGYTPIVLLEDGLRKTIESFSHLRAECQPKKGGPSKASVYLGRGRVADTL

SEQ ID NO: 70477 - protein, 230 aa, Gossypium hirsutum
  Clone ID: GOSHI-09MAY01-C26757_1.pep
RGKPQPSFEQTKPALPALERLINSNDEEVLTDACWALSYLSDGTNDKIQAVIEAGVCPRLIELLLHPSPTVLIPALRTVGNIVTGDDMQTQCIIGHQALPCLLNLLTNTYKKSIKKEACWTISNITAGNVDQIQAVIEAGIIAPLVHLLQNAEFEIKKEAAWAISNATSGGTHEQIKFLVSQGCIKPLCDLLNCPDPRIVTVCLEGLENILKVGETKKNLGHTGDVNLYA

SEQ ID NO: 70478 - protein, 93 aa, Gossypium hirsutum
  Clone ID: GOSHI-09MAY01-C26737_1.pep
MVKKKERTLNETESSIDLKSLIHESALFFDKLVELIPARFYLPDEKDKPWFQGLSKAEKASAKKQARENIKKARRDRLDPEKSSKTTLDLVKE

SEQ ID NO: 70479 - protein, 44 aa, Gossypium hirsutum
  Clone ID: GOSHI-09MAY01-C26657_1.pep
HTGFFIWFVGKMLLFYYINVHPRIKESIRIDFHPANRQMWKLGY

SEQ ID NO: 70480 - protein, 257 aa, Gossypium hirsutum
  unsure (1)..(257): unsure at all Xaa locations
  Clone ID: GOSHI-09MAY01-C26647_1.pep
MGQKSRNNRLFHSSIILLLVSLSAALSSPFQLQTLLPRPLPSAPTLSWHDSEPESNSLQETSQLDPLSSNTTLEVQLELHHVDALSSEDTPELLFDLRLQRDALRSGTIYSLVSKAVARNPPRAAGRRSGFSSSIISGLAQGSGEYFTRLGVGTPARNLYMVLDTGXDVVWVQCSPCKSCYSQSDXIFDPSKSASFSSIPCRSALCRSLDSSGCNQRRMCLYQVSYGDGSVTFGDFFTETLTFRRTSVGRVALGCGH

SEQ ID NO: 70481 - protein, 43 aa, Gossypium hirsutum
  Clone ID: GOSHI-09MAY01-C26627_1.pep
VTSNLMLIQTVSPYQNEFSSGICKFVKQWDPKSVDFFCFYLLK

SEQ ID NO: 70482 - protein, 69 aa, Gossypium hirsutum
  Clone ID: GOSHI-09MAY01-C26197_2.pep
LKGHDVEHIDERSLCCGTLLDCEWKAQAGNPCGASFDWSCSGICKSVERMQEVHQRCGEGDDAIWHTSF

SEQ ID NO: 70483 - protein, 251 aa, Gossypium hirsutum
  Clone ID: GOSHI-09MAY01-C26197_1.pep
VIETGMPHGEELKRLEKEKGIIMRFVIGHSATPGGILDRGIEAEEEQYKDFLRLNHIEGYHELSSKTQIYFSTAVAKWDADFYIKVDDDVHVNLGMVGSTLARHRSKPRVYIGCMKSGPVLAQKGVKYHEPEYWKFGEEGNKYFRHATGQIYAVSKDLATYISVNRHILHRYANEDVSLGSWFIGLDVEHIDERSLCCGTLLDCEWKAQAGNPCGASFDWSCSGICKSVERMQEVHQRCGEGDDAIWHTSF

SEQ ID NO: 70484 - protein, 161 aa, Gossypium hirsutum
  unsure (1)..(161): unsure at all Xaa locations
  Clone ID: GOSHI-09MAY01-C26187_1.pep
MADSKMYISQTELENHXNPGDLWISIQGKIYNVTEWSREHPGGALPLLNLAGQDATDAFVAYHPGLAWQYLDKFFTGYYLKDYSVSEVSKDFRKLAAEFSKMGLSEKKEHGTGILLCIIALLFSISVYGVLCSNSALVHLLSGALLGFSWIQSGWIGHDSG

SEQ ID NO: 70485 - protein, 192 aa, Gossypium hirsutum
  unsure (1)..(192): unsure at all Xaa locations
  Clone ID: GOSHI-09MAY01-C26147_1.pep
MMQAKTAMVTTLYHRPHRLLLDTQPNASPSLPNGSRTRNAFANEANFDTNMVIILAALLCALICALGLNSIMRCAFRCGRRFGLDATEETAARLAAATGLKKSALRRLPVAVYGSGNGYERLLSGPIGLGEFMGGEKXVRVLPKCNHGFHVRCIDTWLLSHSSCPTCRQSLVDQATSSSDGAVEIENGIRPH

SEQ ID NO: 70486 - protein, 278 aa, Gossypium hirsutum
  unsure (1)..(278): unsure at all Xaa locations
  Clone ID: GOSHI-09MAY01-C26117_1.pep
MNDSSLFCSSSNHEEEADVLQAMHLASISSLPFTLKVAVDLGLLDIIAEAADTPPGMVSVAEIVSKLPTNNPNAPSIVDRMLRLLAAHSILTCDQITGQDGLTQRSYGLASIGKYFVQNEDGVSFAALLRLHLEKYILECWKFLKDVTLEGGFSCKKAFGKHLFELLADDDDMSKSFNEAMSIYTTLIMNQVLETYRGFEGVSQVVDVGXGGVGTNLKLIVSKHPQIRGINFDLPQVIKDAVPCPGVEHVAGDMFTEIPKAEVXFMKSMLHEWGDDRC

SEQ ID NO: 70487 - protein, 88 aa, Gossypium hirsutum
  Clone ID: GOSHI-09MAY01-C26017_1.pep
YNTFIKVCSFSILEKEKTNKGDRSTQAKDTLLIPLILGSLIDLCLIFYNPFFFFTRKRQLRNKIYQDLDIGFREKPRQCCLRSKLKKQ

SEQ ID NO: 70488 - protein, 195 aa, Gossypium hirsutum
  Clone ID: GOSHI-09MAY01-C26027_2.pep
AFIAVETAQRLFLGMIKSVFRAPISFFDSNPSSRILNRSSTDQSTLDTDIPYRLAGLAFALIQLFSIIILMSHVAWQIFLLFLAILSISFWYQNYYITTARELARMVGIRKAPILHHFSESITGATTIRCFGQEDRFMEKNLSLIDDYSRVAFHNSSTMEWLCVRINFLFNFVFFLVLVILVSLPRSAIDPSLAG

SEQ ID NO: 70489 - protein, 207 aa, Gossypium hirsutum
  unsure (1)..(207): unsure at all Xaa locations
  Clone ID: GOSHI-09MAY01-C26027_1.pep
QISQTEVIEEKHGEPNCKDKLFESSQEQETETGRVKWSVYSTFVAAAYKGALVPVIVLCQVLFQGLQMGSNYWIAWATEENRNVSREQLIGIFILLSGGSSIFILGKAVLLATIAVETAQRLFLGMIKSVFRAPISFFDSNPSSRILNRSSTDQSXTFDTDIXPYRLVGAVHFALFQLVSINHSLCPIVAWQNFPFFLWHPNIYLWF

SEQ ID NO: 70490 - protein, 132 aa, Gossypium hirsutum
  Clone ID: GOSHI-09MAY01-C26397_2.pep
EKMSHVRKMMKERGMKVVPGCASIEIDGFVHEFVMGDWHHPEAKEIRQALRVIAERVSDAGYESQVSDVLHNVGNEEKGIYLCEHSERLAIAYGILKTKAPVPIRIVKNLRVCIDCHEVTKIISKIYEREII

SEQ ID NO: 70491 - protein, 84 aa, Gossypium hirsutum
  Clone ID: GOSHI-09MAY01-C26397_1.pep
WLTQINSFLLHSPTTPAVTHQKPEIQIPRASLTGAQPNNPLKACSYFPLPRGMMPISHHKLNEQKPSISHLIAHPRHYLHAPER

SEQ ID NO: 70492 - protein, 57 aa, Gossypium hirsutum
  Clone ID: GOSHI-09MAY01-C26377_1.pep
VESNYYGLITKFVNKHAGMEMAQLICGGCRTFLMYTCGAASIKMLHQVQFNDFVHVI

SEQ ID NO: 70493 - protein, 175 aa, Gossypium hirsutum
  unsure (1)..(175): unsure at all Xaa locations
  Clone ID: LIB3825-021-Q1-K6-E8.pep
SIRSHRKSDELGYLGSCSSVNSLGVATGTRCSLGGLIWDLLEGRRMEDYLLLWIGPDNSAFSNVVLTFNGCEIVRYDATEDQLVTDVSQQKRILKRRYYLVERAKDANMVGILVGTLGVAGYLHMIRQMKELIMLAGKKAYTLVMGRPNPAKLANFPECDVXIYVSCAQTALLDS

SEQ ID NO: 70494 - protein, 59 aa, Gossypium hirsutum
  Clone ID: LIB3048-009-Q1-L1-E9.pep
CLFLVRYDATEDQLVTDVSQQKRILKRRYYLVERAKDANMVGILVGTLGVAGYLHMIHQ

SEQ ID NO: 70495 - protein, 105 aa, Gossypium hirsutum
  Clone ID: GOSHI-09MAY01-C26337_1.pep
EEIGEELDEDLLEQRTCNDHHPKKNNEKKPITGKNRNADLPRTEPIACREERNRLLRRRSLLIQAVRRSDTVESEKDAKLKSGSARGLVRWEGKGRLESISARGG

SEQ ID NO: 70496 - protein, 80 aa, Gossypium hirsutum
  Clone ID: GOSHI-09MAY01-C26327_1.pep
WVLVLAYAFVIFFFCRKGENENEGMVGCGSKTVKEPRIVVQTTSDIDILDDGYRWRKYGQKVVKGNPNPRLVIILHLIVY

SEQ ID NO: 70497 - protein, 83 aa, Gossypium hirsutum
  Clone ID: LIB3048-009-Q1-L1-G9.pep
KSFIACSLSPCRWIVPSLATTSANSQVLIFTLSCKKKKSQERKLKQVPINGRICFTFLAMIQAYHLLESGPFSLISSQPLEFL

SEQ ID NO: 70498 - protein, 126 aa, Gossypium hirsutum
  unsure (1)..(126): unsure at all Xaa locations
  Clone ID: GOSHI-09MAY01-C26257_2.pep
CFCDSNEQLTARGKPLLQCHYSYSACGLGSDGTDRLVQLVQEMQHGKASRVDDGTLYGAKITGGGSGGTVCVVGRNCLRSSQHILEIQQRYKKATGYLPFIFEGSSXPGVGKFGYLKIRRSIAPKS

SEQ ID NO: 70499 - protein, 363 aa, Gossypium hirsutum
  Clone ID: GOSHI-09MAY01-C26257_1.pep
FEDSISMLVSSAVPEGKGVSSSAAVEVASMSAIAVAHGLSISPRELALLCQKVENHIVGAPCGVMDQMTSACGEANKLLAMVCQPAEIIGLVTIPSHIRFWGIDSGIRHSVGGADYGSVRIGAFMGRKIIKATASTRLSQSMSTANGASPDEVDNDGLELLEAEASLDYLCNLSPHRYEALYANLLPQSMLGEVFLEKYVDHGDTVTVIDKKRTYSVTAAAKHPVYENFRVKAFKALLTSASSNEQLTALGELLYQCHYSYSACGLGSDGTDRLVQLVQEMQHGKASRVDDGTLYGAKITGGGSGGTVCVVGRNCLRSSQHILEIQQRYKKATGYLPFIFEGSSPGVGKFGYLKIRRSIAPKS

SEQ ID NO: 70500 - protein, 392 aa, Gossypium hirsutum
  Clone ID: GOSHI-09MAY01-C26277_1.pep
SSRNHANTHDDKSSHKFHPRRRPSFCCGSGRYICGKSENWTQTNGEPSNHQITIPNALGTDVLDVEKPVVFTYEDILFSTDGFSDSNLLGRGIYGSVYFGFLRDQEVAIKRMTATKTKEFMAEMKVLCKVHHANLVELIGYAASDDELFLIYEYAQKGSLRSHLHDPLNKGHTPLSWIMRVQIALDAARGLEYIHEHTKTHYVHRDIKSSNILLDGSFRAKISDFGLSKLVGKTNDEEATATKVVGTFGYLAPEYLSDGLASSKSDVYAFGVVLFEIISGKEAIIRTEGSAMKNTERRSLASIMLAALRNTPDSLSMSNMKDYIDPSMLDLYPHDCVFKMAMLAKQCVDEDPIVRPDMKQIVINLSQILLSSVEWEATLAGYTQVFSVLAHG

SEQ ID NO: 70501 - protein, 149 aa, Gossypium hirsutum
  unsure (1)..(149): unsure at all Xaa locations
  Clone ID: GOSHI-09MAY01-C26207_1.pep
PRVRANFHFFFQVALVRARLRRATERYGSLNSRKVSNAISQLPEKERSNTNHEISAKLDSIPESCTTLGHAADKATKILERVNSSSIPSVVCLSNEVDSGGRDNXLLKGAEHTMKPVPLVRPXDFLCPISLELMRDPVIVATGQTYERS

SEQ ID NO: 70502 - protein, 345 aa, Gossypium hirsutum
  Clone ID: GOSHI-09MAY01-C27997_1.pep
LIKAGIGSQVKVTVPLNADVYASSNTYPSGGDFRTDIFDPMLKIVKFLNDSNSPFTVNIYPFISLYTDSNFPVEYAFFDGNATPLNDGGTLYYNMFDANLDTLAHALQKNGFGNLPIIVGEIGWPTDGDRNANIEYARRFNQGFMAHISGGKGTPMRPVPIDAYLFSLIDEDEKSIDPGNFERHWGIFYFDGQVKYPLNLGTTNSGALIPAKGVQYLERKWCVMKPSAPLDDPQVAQSVSYACGLADCTSLGYGTSCGNLDARGNISYAFNSYFQKNNQFEKACEFPNVSVITKTDPTPTGMGNCKFPIMIQPYYESAGRRFGCGQMPLPLVSVLLLLLLTVVQH

SEQ ID NO: 70503 - protein, 131 aa, Gossypium hirsutum
  unsure (1)..(131): unsure at all Xaa locations
  Clone ID: LIB3048-054-Q1-L1-C5.pep
SIDPGNFERHWGVFYFDGQXKYPLNLGTTNSGALISXKWSPLLKGKVPHEKLHPPFDEPPIRQKVSYLCGLADCTSLGYGTSCGNLDARGNISYAFNSYFQKNNQFEKACEFPNVSVITKTDPTPTVGNCK

SEQ ID NO: 70504 - protein, 144 aa, Gossypium hirsutum
  unsure (1)..(144): unsure at all Xaa locations
  Clone ID: GOSHI-09MAY01-C27937_1.pep
PPELLLGSTDYTAAVDLWSVGCVFAELLLGKPILQGRTEVEQLHKIFKLCGSPPDDYWKKSRLPHATLFKPQQPYNSCLQETFKILXATAVNLVETLLSVEPYKRGTASSALALEYFTTKPYACDPSSLPVYPPSKEIDAKHRE

SEQ ID NO: 70505 - protein, 51 aa, Gossypium hirsutum
  Clone ID: GOSHI-09MAY01-C27857_1.pep
SLYQLILFIFILYISHFSHSFKWPQMKKKPSNLSLCNYTSFALVTRYYLIS

SEQ ID NO: 70506 - protein, 259 aa, Gossypium hirsutum
  unsure (1)..(259): unsure at all Xaa locations
  Clone ID: GOSHI-09MAY01-C27867_1.pep
GRVGWDINSVDPCTWNMAACSAEGFVISLEMASTGLSGLLSPSIGNLSHLRTMLLQNNQLSGPIPDEIGKLSELQTLDLSGNHFVGAIPSTLGSLTHLSYLRLSKNNLSGPIPRHVANLTGLSFLDLSYNNLSGPTPKILAKGYSITGNNFLCASSEHICTDVSYPLNVAGSVSSSRVSGNHHWLLSVAIGIGFAFVVSVMLLACWVRWYRSRIMLPSYVQHDYDFEIGHIKRFSYRELQIATSNFXPKNILGQGGYGV

SEQ ID NO: 70507 - protein, 277 aa, Gossypium hirsutum
  unsure (1)..(277): unsure at all Xaa locations
  Clone ID: GOSHI-09MAY01-C27557_1.pep
MAAASSSTIFFNPLTSQLCNSKKKPCSDPSASTLKLGLFGHATNTAAASLRFKKLNYGKGYSSGFSVVCKAVSVKPDAEIEGLNIAEDVTQLIGKTXPMVYLNNIVKGSVANIAAKLEIMEPCCSVKDRIGYSMISDAEQRGLITPGKSILVEPTSGNTGIGLAFIAASKGYRLILTMPASMSLERRVLLKAFGAELVLTDSAKGMKGAVQKAEEIVKSTHNAYMLQQFDNPANPKIHYETTGPEIWEDTRGKVDIFVGGIGTGGTISGVGRFLKEK

SEQ ID NO: 70508 - protein, 140 aa, Gossypium hirsutum
  unsure (1)..(140): unsure at all Xaa locations
  Clone ID: GOSHI-09MAY01-C27547_1.pep
PIFKDAHADSDGRAVDTGCFLRYSDSPFFGANYTIDLKPFLKTRNTTKRDALIGGLVGGGGLLLLITLLLFWVRKSRNNMAVPQEDVEAPPELQGPLTYTYKELNFATTSFSXTNKLGEGGFGEVYKGILKNGRVVAVKK

SEQ ID NO: 70509 - protein, 250 aa, Gossypium hirsutum
  Clone ID: GOSHI-09MAY01-C27537_1.pep
ARGARSVPAHKVILQASGNFVLSSSHEDVIQLQQVAYPTLHALLQYVYAGQTQISEAQLSSLWGLALRFEVMPLVKQCEEAMERFKANKKLSDSGETMELSYASSHIHFGGNFCCGLPINMQRLQQLRSTGEYSDISIYIEGQGLIARAHKVILGLYSVPFTKMFTNGMCESNSPEVCLRDVSPAALKAMLEFMYCGDLRIEDNEDFGTLLLQLLLLSDKFGISLLHQECCKMLLECLSEGRSSSGRWSY

SEQ ID NO: 70510 - protein, 132 aa, Gossypium hirsutum
  unsure (1)..(132): unsure at all Xaa locations
  Clone ID: GOSHI-09MAY01-C27147_1.pep
TFHRFDKFNLKYRPCGQSRLREIFLKQDNLIQGRFLGELTKQVFSDLAASKYHMAEYRISIYGTKQSEWDQLASWIVNNVFHSENVGWLIPIPRLSNVYRXTGTATPSQSILDNIFLPLFQATADPDSHPQM

SEQ ID NO: 70511 - protein, 101 aa, Gossypium hirsutum
  Clone ID: GOSHI-09MAY01-C27067_1.pep
MGDVILFVDNFSSNSSISLCRICHEEELESFKSLEVPCACSGTVKFAHRDCIQRWCNEKGNTTCEICLQEYEPGYTVTVPSKKAQLIEDAVTIRDSLQIPR

SEQ ID NO: 70512 - protein, 94 aa, Gossypium hirsutum
  Clone ID: GOSHI-09MAY01-C27007_1.pep
MIVRTYGRRTRGLTRTFSDSVNDYVSDSPPLSQETVPSEDVYSFPFATQESSSFWPSSQEFNDDVYQGRVTTGLEASHRGFRFHHLGNDLVGRS

SEQ ID NO: 70513 - protein, 197 aa, Gossypium hirsutum
  Clone ID: GOSHI-09MAY01-C27357_1.pep
MASSSVVTTQISNQLGTTDWKKSIPSLSLGNLNLNKNLAGKQFLSLSAPQKSGLNYKSLRVNGLFGGKKENGEKGDDAPSKAGILGNMQNLYETVKKAQMVVQVEAVRVQKELAAAEFDGYCEGELIKATLSGNQQPVRIEITEAAMELGAEKLSLLVNEAYKDAHQKSVQAMKERMSDLAQSLGMPQGLSEGLKQQ

SEQ ID NO: 70514 - protein, 55 aa, Gossypium hirsutum
  Clone ID: LIB3149-040-Q1-K1-C1.pep
TSTWFRGGAIKLSLLVNEAYKDAHQKSVQAMKERMSDLAQSLGMPQGLSEGLKQQ

SEQ ID NO: 70515 - protein, 226 aa, Gossypium hirsutum
  Clone ID: GOSHI-09MAY01-C27337_1.pep
GNRVKAVVIGLGAGLLPMFLHGCMQSMQIEGVELDPVMLNLARDYFGFTEDKRMKVHIADGIQFVRDYRNLFSAGNEVLLSSNGSCKLSDAESRSTAIDIIIGDVDSSDSSSGLRCPAADFVEDSFLQNVKDTLSEQGLFVINLVSRSPAIKDAVVSRMKEVSAPWVCIQLEGEVNLVLFGLCSESRIEEDCIPDAALKLDKLLKSEHPEISQSITDAAKKLKRLK

SEQ ID NO: 70516 - protein, 219 aa, Gossypium hirsutum
  Clone ID: GOSHI-09MAY01-C27217_1.pep
SAPIMDVDPRLYEQIAVNDNDIHNIIMSYLVHNCFKETVESFIACTGMKQPSDYLEDMEKRKRIYQFALEGNALKAIELTEQLATNLLEKNKDLHFDLLSLHFVELVCSRKCTEALEFAQMKLTPFGKEQKYVEKLEDFMALLAYEEPEKSPMFHLLSLEYRQHVAESLNRAILAHGNHPTYTAMERLIQQTTVVRQCLNQEHAKDGPPPFSLKDFLKT

SEQ ID NO: 70517 - protein, 182 aa, Gossypium hirsutum
  unsure (1)..(182): unsure at all Xaa locations
  Clone ID: GOSHI-09MAY01-C20877_3.pep
PRVRPRVRSTVESVVKSAVSKEKRMGAXLVRWFFHDCFVNGCDGSILLDDTSSFTGEKTAAPNNNSVRGFNVVDDIKAKVEKACPGVVSCADILALAARDSVVILGGPGWDVKLGRRDSKTASFAAANSGVIPPPTATLSQLINRFQARGLSAKDMVALSGAHTTGKPGPGLRSRRIYNETN

SEQ ID NO: 70518 - protein, 104 aa, Gossypium hirsutum
  Clone ID: GOSHI-09MAY01-C20877_2.pep
LVQLGGPGWDVKLGRRDSKTASFSAANSGVIPPPTATLSQLINRFQARGLSAKDMVALSGAHTIGKARCVLSRGRIYNETNIDTSFAKARQSSCPRTSGSGDNN

SEQ ID NO: 70519 - protein, 179 aa, Gossypium hirsutum
  unsure (1)..(179): unsure at all Xaa locations
  Clone ID: GOSHI-09MAY01-C20877_1.pep
MAFSSSFSVMFVVVVWMMVGSSSYAQLSTNFYSKSCPKVLSTAESVVKSAVSKEKRMGASLVRLFFHDCFVNGCDGSILLDDTSSFTGEKTAAPNNNSVRGFNVVDDIKPKVEKALPRVVSCADILALAARDSXVVILGGRWDVSLEKDFKTAALCCDMGSSTFDAPSHYHDSTRASAR

SEQ ID NO: 70520 - protein, 144 aa, Gossypium hirsutum
  Clone ID: GOSHI-09MAY01-C20837_1.pep
MGMEGISATMYKNLTGYWRRRGYVKLNGTSGARRSRVELGSSRRKRFWKIRIKAKLRIRSPKKWLVWLRDAYMKMMLGLANSRMVSSGYGGSIANQGIAAFGKRPVKEYDEKVSVVIYKSLVMAHGQVVPREPGGLCSAIICQR

SEQ ID NO: 70521 - protein, 62 aa, Gossypium hirsutum
  Clone ID: LIB3083-053-Q1-L1-A6.pep
RMVSSGYGGSIANQGIAAFGKRPVKEYDEKVIVEIYKSLVMAQGQLVPREPGKLCSAIICQR

SEQ ID NO: 70522 - protein, 369 aa, Gossypium hirsutum
  Clone ID: GOSHI-09MAY01-C20557_1.pep
MASAVNSSAPGLQDVCARTVNSSTEEMKRETTTIKSSAEKMNKETALKINNSAEKMKKETSLNSSAEKMRQETAAENGSAEKMKKETALTVNISAEKMNKETALTINNSAEKMNKEMARTVNSSAEKMRQETATVNGSAEKMKKETALTVKSSNEKVKKETALTVNNSAEKVKKEIASTVNGSAEKMKKETTVAVSKSPDIETMLGPLGMNETSDLFHADPFVADSKPSIDSIVKDENNPIANVELNRKGDSTNNENQKSGRKASNPAKQDHTENGPQISPALPSYMAATESAKAKLRLQGSPRFSQDGGEKHNLARRQSLPISANSKIHSQSPRTQRLVHAGKEGSKSDRPLSSRDRNAKATQVEWRR

SEQ ID NO: 70523 - protein, 61 aa, Gossypium hirsutum
  Clone ID: LIB3145-005-Q1-K1-A12.pep
VSVSKQVLLIYTTKHMYLEPNSANNSSNHNKITSSTLLELPLALSVSWMTVGLVALCSLSY

SEQ ID NO: 70524 - protein, 113 aa, Gossypium hirsutum
  Clone ID: LIB3083-106-Q1-L1-A1.pep
KVSSWPAEMAVQENPPNELEKVKRNLRKVHNPVVENSVQSQVESDKQKQSLEKFPSATNPDIVEQSLNSLAEKANKEMASTVNSSAEKMKNEMAMTVNSSAELFIVVVSLFIS

SEQ ID NO: 70525 - protein, 323 aa, Gossypium hirsutum
  Clone ID: GOSHI-09MAY01-C20517_1.pep
FKDLGMTVLVSQVNRLRKMNKPVVGVGCASTGDTSAALSAYCAAAGIPSLVFLPANRISMAQLVQPIANGAFVLSIDTDFDGCSRFVPRVPPGLPIYLANSLNSLRLEGQKTAAIEILQQFDWEVPDWVIVPGGNLGNIYAFYKGFSMCKELGLVDKIPRLVCAQAANANPLYLYFKSGWKDFQPVKAKTTFASAIQIGDPVSIDRAVYALKNSNGIVEEAKEEELMDAMAQADSTGMFTCPHTGVALTALNKLRRSGVIGPTDRTVVVSTAHGLKFTHSKIDYHSKNIKDMACRLANPPVQVTADFGSVMDVLKKYLLSKSH

SEQ ID NO: 70526 - protein, 128 aa, Gossypium hirsutum
  Clone ID: GOSHI-09MAY01-C20447_1.pep
CLWKHSSLTIPLVNEISILDYLIKKSKTWSPPLLAVLLGVHKPGSSHVRDDGDDDLHGVGIITLAGSNAGATMRSEVDEKSSSPHGISLGGEPDEWSTYVNSNFQGCNISIMFESSFNATIPGVIWTS

SEQ ID NO: 70527 - protein, 232 aa, Gossypium hirsutum
  Clone ID: GOSHI-09MAY01-C20427_1.pep
MDKEKKLKQTQEEEEMEFKDCENHSQQAQQEEEEEEEEKIEIGDEIIRSKIGIMRALAERDDPSVKEVDDFMIRRFLRARDLDIEKANTMLLKYLSWRRTFLPKGFVSESEISNQLADNKLCMQGVDKQGRPIVVAFGGRHKPTKGNLEEVKRFVVYGLQKICARMPRGQEKFVAIGDLEGWGYSNSDIRAYVPSLSILQDCYPERLAKLFIVHVPYIFMTAWKVVYPFIDS

SEQ ID NO: 70528 - protein, 135 aa, Gossypium hirsutum
  Clone ID: GOSHI-09MAY01-C20757_1.pep
MAASSAFLSTFISPQTVSFSPKSSSSLRLLPPTSVRMVRTVTLATASQPATSPRTPRGIMKPRRVTPEMQDVVGVPEIPRTQALKQIWAYIKEHNLQDPENKKIINCDEKLKKIFGGKDRIGFLEIAGLISPHFL

SEQ ID NO: 70529 - protein, 58 aa, Gossypium hirsutum
  unsure (1)..(58): unsure at all Xaa locations
  Clone ID: GOSHI-09MAY01-C20677_1.pep
VWPPQLYIYKSLGAXERLPSSHTCFYRLCFPPYTSRAEMQKRLNVVTQEHVGCSFGTW

SEQ ID NO: 70530 - protein, 125 aa, Gossypium hirsutum
  Clone ID: GOSHI-09MAY01-C20667_1.pep
ALQSMEEEAERIYKDERGLLLDDEAASTRDAMYEQAENVERELEHMTEQIKSIIETVNSSQGGELEALDGMTPLDVVVKILNNQLTSLMWIDEKAEEFSGRIRKLAAQGNAADGELIAAPKYWMS

SEQ ID NO: 70531 - protein, 92 aa, Gossypium hirsutum
  Clone ID: GOSHI-09MAY01-C20157_3.pep
MRMEIICGIIIYQLLRRFFYGGNDVLDVETSDDNAIFSVANRLLEKLCGGTAYVGLNIPDADTGSRKSIDIGLVTKGEATVISVKNVSGLVL

SEQ ID NO: 70532 - protein, 226 aa, Gossypium hirsutum
  unsure (1)..(226): unsure at all Xaa locations
  Clone ID: GOSHI-09MAY01-C20157_1.pep
MWLEIICGIIIYQLFRRFFYGGNDVLDVETSDFNAIFSVANRLEKLCGGKVYVGLNIPDADTGSRKSIDIVLVTKGEAAVISVKNVSGFVSINDDGSWTSEGGRSHRKERIPDPVAEAKNTASVLESYLEQRGVTLPEGYFSYKVIIPNPNFREIYRNFPPEVITYDQWVQLEPGPKGMISGWDKGALRGGKNEMQDSXHQQLNYILMTAPMRDRLELKGSKHVLG

SEQ ID NO: 70533 - protein, 128 aa, Gossypium hirsutum
  unsure (1)..(128): unsure at all Xaa locations
  Clone ID: LIB3083-029-Q1-L1-H11.pep
FSYRVIIHNQNFCEIYRNFPPEVITYDQWVQLEPGPKGMISGWVKGAFRGGKKKMKDSFNKRLNFILGQALMWXRLELKGSQQVLGEILEFKGKQEDTLALTTIKRSXVGHMNVQKISMLGLAHSSSR

SEQ ID NO: 70534 - protein, 123 aa, Gossypium hirsutum
  Clone ID: GOSHI-09MAY01-C20087_1.pep
MDIEPLWALGGWFFLYFFDCMAAPKSTSSLSHTYEKPHFFPLFLTLVFLVFLLLLNPSSNPINSSNVTPSIPFKRLLLHNSWKSSSSTMNLPPKQRRHPRTYASSFGAEAHEVPSGPNPISNR

SEQ ID NO: 70535 - protein, 181 aa, Gossypium hirsutum
  Clone ID: GOSHI-09MAY01-C20357_1.pep
MNNTISLTLLHIAFCFTLVSFTPISALELHGTGANMVETTCQKTPFYNLCVSALKSDPRSSGADVAGLAQIGTDKLKAKATATLRQITALLKVAKDPKLKMALRDCADYYNAIVKYDIPVAVEAVTKGDPKFGVEGATDAANEADACGRGFKNQPKFPIYASNKVVHDLSAVVASIVQLLL

SEQ ID NO: 70536 - protein, 52 aa, Gossypium hirsutum
  Clone ID: LIB3148-004-Q1-K1-G2.pep
GGQLMIDILFQCQSSILLLNKTTNHFTLYPFFITSITHLYIHFYCPLLGIRQ

SEQ ID NO: 70537 - protein, 66 aa, Gossypium hirsutum
  Clone ID: uC-gsronu33B077a11b1.pep
VNFFLFFFLFFLYLIIFFFLFLFIFFLFGFFFLNKTTNHFTLYPFFITSITHLYIHFYCPLLGIRQ

SEQ ID NO: 70538 - protein, 167 aa, Gossypium hirsutum
  Clone ID: GOSHI-09MAY01-C20367_1.pep
KHSESGSHRSIDESRHQNESLAHTNMIGRDLGPNLTDDIELLGFGNADSEERLSDISDGDLSMGATDTDGSICSAVEFTLFPEVSKPPDKPEKVEKASKSEKSDNIGKSIAPSLPSKLPKLSQKVLQTKPTARLSLSRSTSKIPSSSKKITAATTSNSSIKPPKRRP

SEQ ID NO: 70539 - protein, 52 aa, Gossypium hirsutum
  Clone ID: GOSHI-09MAY01-C20287_1.pep
IPLPNAGDYGGWFCPCHGSHYDVSGRIRKGPAPYNLEVPTYTFLDESKLLIG

SEQ ID NO: 70540 - protein, 161 aa, Gossypium hirsutum
  Clone ID: GOSHI-09MAY01-C20247_1.pep
CCFWRCSCFCGQQILTWAQIYIPADNIALDCGSSTSGNSAAPDGRDWTGDNMSWFAESGSQSVSASVQKHNSSFHGVPYLTARMSKSEFTYMFPVTAGQKFIRLYFNPALYHGFDTSVYFFSVKVGPYTLLNNFTSSVTADRSRKGSSIREFCVSLMQNQT

SEQ ID NO: 70541 - protein, 71 aa, Gossypium hirsutum
  Clone ID: GOSHI-09MAY01-C20267_1.pep
WPVNFGVESGSTFQCGNLYILDSSQDCFAAVLHWQSFFTYLLYKDFLLIVIGHNYNLFSWCCKISKDRYIT

SEQ ID NO: 70542 - protein, 56 aa, Gossypium hirsutum
  Clone ID: GOSHI-09MAY01-C20217_1.pep
FPSGTKSNTRINYNLLSLHLQKLPAAPRTLPPPLLMKLRELLQKIHARCGSKLPKY

SEQ ID NO: 70543 - protein, 82 aa, Gossypium hirsutum
  Clone ID: GOSHI-09MAY01-C21977_1.pep
MSSGEPSFEELLEEKKRVRNPLVPVGALITAGVLTAGLISFRQGNSQLGQMLMRARVVVQGATVALMVGTAYYYGDNPWKSS

SEQ ID NO: 70544 - protein, 89 aa, Gossypium hirsutum
  Clone ID: uC-gsflnu33B062d12b1.pep
KLGFLKGPPPHLCILFGLFVRFLTYNHFFLFFSFFFFFFFFFFFFFFFFFFFFFFFFYFIFFFFFFFGMMLLFNIYSYKKKLHIKIKTI

SEQ ID NO: 70545 - protein, 136 aa, Gossypium hirsutum
  unsure (1)..(136): unsure at all Xaa locations
  Clone ID: GOSHI-09MAY01-C21817_1.pep
EKLKKAKFGLRYRQVSLGAATTQVRLAASLGASLVWLSGGLSLVQLLIQETLPSWFLSAHNPDHDGGEPGGLVAMLSGXALAYFVVLCGTLVWGVDSSSPTSKRRPKVLGAHLEFLASAIDGKISLGCEHATWHAY

SEQ ID NO: 70546 - protein, 95 aa, Gossypium hirsutum
  Clone ID: GOSHI-09MAY01-C21597_3.pep
EEKLRKRNQELEGELKESREREEQMRQELRKMWERLRVAEEADERLCSQLGDLEAESVNQARAYNAHILSLMDQLSKGSNLLINSHPSPASISIL

SEQ ID NO: 70547 - protein, 103 aa, Gossypium hirsutum
  Clone ID: GOSHI-09MAY01-C21597_1.pep
MAPTMAAPEEELRKRNQELEKELKESREREEQMRKELRKMWERLRVAEEAEERLCSQLGELEAESVNQARAYNSHILTLMDQLSKGNNLLINNHPSPAPISIL

SEQ ID NO: 70548 - protein, 106 aa, Gossypium hirsutum
  Clone ID: LIB3829-024-Q6-K6-A9.pep
PSFLKHSYHWLRSGGTKRRLRKRTGLERDEGIGRGTVRRITKEWERLRVAEEAEERRWSQLGELEAESVNQARAYNSHILTLMDQLSKGNNLLINNHPSPAPISIL

SEQ ID NO: 70549 - protein, 239 aa, Gossypium hirsutum
  unsure (1)..(239): unsure at all Xaa locations
  Clone ID: GOSHI-09MAY01-C21487_1.pep
MAEEPATAGAGSGYREFRGKDEFPSNMLHGIFAIAMWIGSVHFDIFLLLFSFLFLPFSKFLMVLGFLLIFMVLPIDPYSKFGRKLSRYICKHLCSYFPITLYVEDFNAFNPDRAYVFGYEPHSVLPIGVVTLAGHTSFMPLPKIKVLASSAVFHTPFLRHIWTWLDVATASRKKFYSLLDAGYSCIVVPGGVQETFHMDHDSEIAFLXHRRGFVRIAIEMGCPLVPVFAFGQSRVYDWW

SEQ ID NO: 70550 - protein, 82 aa, Gossypium hirsutum
  Clone ID: GOSHI-09MAY01-C21437_1.pep
MSYDDVEIEDMQWNEELQAYTYPCPCGDLFQITKEELKIGEEIARCPSCSLYITVIYNAEDFADRKSNNNLEPPKRQAVAVA

SEQ ID NO: 70551 - protein, 77 aa, Gossypium hirsutum
  Clone ID: GOSHI-09MAY01-C21707_1.pep
TVGTRIQEVNVLGGLIVPVWGTIEKALSEQARVSHRRLCVVGLEPTADNWRIVGLLVRNAAVETVLQDLTWVQDIED

SEQ ID NO: 70552 - protein, 143 aa, Gossypium hirsutum
  unsure (1)..(143): unsure at all Xaa locations
  Clone ID: GOSHI-09MAY01-C21687_1.pep
MGASESVPQKSIHEFTVKDYKNQDVDLSMYNGKALLVVNVASKCGLTDSNYTQLTDLYNKYKDQGLEILAFPCNQFLSQEPGTSQDAQEFACTRYKAEYPIFQKVHVNGPKTEPVYKFLKXNKSGFLGNRIKWNFTKFLVDKD

SEQ ID NO: 70553 - protein, 114 aa, Gossypium hirsutum
  unsure (1)..(114): unsure at all Xaa locations
  Clone ID: LIB3148-059-Q1-K1-H5.pep
MGAYESVPQKSIHEFTVKDYKNQDDDLSMYKGKALLVVNVASKCGLTDSNYTQLTDLYNKYKDQGLEILAFPCNQFLSQEPGTSQDAQEFAXSRYMAEYPXFQKVHVNGPKTEP

SEQ ID NO: 70554 - protein, 122 aa, Gossypium hirsutum
  Clone ID: GOSHI-09MAY01-C21637_1.pep
PTRPLGGGIGKGGGLGGGIGKGGGLGGGIGKGGGLGGGIGKGGGLGGGVGKGGGLGGGIGKGGGLGGGHGGGLGSGIGKGGGLGGGIGKGGGLGGGIGKGGGIGGGGGFGKGGGFSDAAGSG

SEQ ID NO: 70555 - protein, 145 aa, Gossypium hirsutum
  Clone ID: GOSHI-09MAY01-C21147_1.pep
PTFPFGATFPLGSASFPGSSATYSDSSHGGRICLPSVHAQLLSPAGAVPSHYPRPYVVSLVHNNGNSIAENGRKWGRQGLDLNAGPGVLDIEGRDETTALASRQLSVVSSQALAEEQARMYQVAGDVLKKKELEGCWDGYKQSSW

SEQ ID NO: 70556 - protein, 89 aa, Gossypium hirsutum
  Clone ID: LIB3135-060-Q1-K1-B5.pep
VVSLVHNNGNSIAENGRKWGGQGLDLNAWPGVLDIEGRDETTALASRQLSVVSSQALAEEQARMYQLAGDVLKKKELEGCWDGYKQSSW

SEQ ID NO: 70557 - protein, 211 aa, Gossypium hirsutum
  Clone ID: GOSHI-09MAY01-C21127_1.pep
PTFPPRANISDPVFDGQNRGGPEVAKRTSVGSSSSMRKASSTANIVDDLSSIFGAAASSSGVFQEVDGETEERRRARLERHQRTQERAAKALAEKNQRDLQVQREQAERHRISETLDVEIKRWAAGKEGNLRALLSTLQYVLWPECGWQPVSLTDLITAAAVKKVYRKATLCIHPDKVQQKGANLQQKYVAEKVFDLLKEAWNKFNSEELF

SEQ ID NO: 70558 - protein, 47 aa, Gossypium hirsutum
  Clone ID: uC-gsronu33B039c08b1.pep
SNSWFYTVAWSGTHDCSICCCLLWFDETINEQLKLVIGPALLEKHGR

SEQ ID NO: 70559 - protein, 217 aa, Gossypium hirsutum
  Clone ID: GOSHI-09MAY01-C21357_1.pep
QQPGYDIIAQFIIGYILPGKPSANLLFKIYGRISTIHALSFLSDLKLGHYMKIPPRCMYTAQLVGTVVAGIVNLGVAWWMLDDIDNICDVEGNHPDSPWTCPKYRVTFDASVIWGLIGPRRLFGPGGMYRNLVWLFLIGAFLPVPVWVLSKIFPEKKWIPLINIPVLSYGFAGMPPATPTNIASWLITGTIFNYFVFKYHKRWWQKYNYVLSATLDA

SEQ ID NO: 70560 - protein, 208 aa, Gossypium hirsutum
  unsure (1)..(208): unsure at all Xaa locations
  Clone ID: GOSHI-09MAY01-C21367_2.pep
NHKRITPLLRFYTSKSEEELTSLDTYVENMSATARAIHDLATDSLKSAKTAPFLEKLVQKDLEVLYLIEPIDEVAIQNLQTYKEKKFVDISKEDLELGDEDEVKERETKQEYNLLCDWVKQQLGDKVAKVQISKRLSSSPSVLVSGKFGWSANMERLMKAQALGDTASLEFMRGRRILEINPDHPIIKDLNXACKNAPESSDAKRAVA

SEQ ID NO: 70561 - protein, 271 aa, Gossypium hirsutum
  unsure (1)..(271): unsure at all Xaa locations
  Clone ID: GOSHI-09MAY01-C21367_1.pep
ASGNHKRITPLLRFYTSKXEEELTSLDEYVESMGENQXAIYYLATDSLKSAKTAPFLEKLVQKDIEVLYLVEPIDEVAIQNLQTYKERXKQEFNLLCDWIKQQLGDKVAKVQISKRLSSSPCVLVSGKFGWSANMERLMKAQALGDTASLEFMRGRRILEINPDHPIIKDLNAACKNAPESSEAKRAVDLLYDTALISSGFSPDSPAELGNKIYEMMAMALGGRWGRYEDDDEVEASEVSAAETDTSASEASENQVIEPSEVRTESDPWQD

SEQ ID NO: 70562 - protein, 229 aa, Gossypium hirsutum
  Clone ID: GOSHI-09MAY01-C21297_1.pep
MITVFLQGETKPVKPYTHRYHVPYRASQSTAPFWYSIKRASAYIIVLSSYSAYGKYTPQNQWIEQELPKVNRTETPWLIVLMHSPWYHSYNYHYMEAETMRVMYEPLLVQYKVDVVFSGHVHAYERSERISNIAYDLVNGECSPVKDLSAPIYITIGDGGNIEGIANNMTVPQPEYSAYREASFGHAIFDIKNRTHAYYSWHRNHDGYSVQGDSTWVFNRFWHPVDESQ

SEQ ID NO: 70563 - protein, 127 aa, Gossypium hirsutum
  Clone ID: LIB3584-016-P1-K1-C4.pep
EVGPDVPYTFGLIGDLGQTFDSNVTLTHYEKNPMNGQTMLFVGDLSYADNHPNHDNVRWDTWGRFVERSAAYQPWIWTTGNHEIDFAPEIGETKPFKPYTHRYHVPYRASQSTAPFWYSIKRASAYI

SEQ ID NO: 70564 - protein, 248 aa, Gossypium hirsutum
  unsure (1)..(248): unsure at all Xaa locations
  Clone ID: GOSHI-09MAY01-C22977_2.pep
VLNMSTLAWSVVASVEGRVPLASEGLSLVVGSFNGEDMLISFGGYNGHYNNEVNVLKPSHKSTLQSKMMEARVPDSVSAIHNVTNPTRDLESEXKVGHEGKIREIVMDNIDTGHQKFEGEETTERIIATLKVENEELESSLNKEKFQSLQLKQELAEAKAQNSDLHKELQTIRSQLAAEQFRCFKLEVDVAEQRQKLQTMETLQKELELLQRQKAASQHAALNAKQRXGSRGVCRWRAGCPPQNADNI

SEQ ID NO: 70565 - protein, 101 aa, Gossypium hirsutum
  Clone ID: AI726980.1.pep
HAERYFLVFGGGSHATCFNDLHVFDLQGMEWSRPTQQGEIPTPRAGHASVTVGENWFIVGGGDNKSGALETVVLNMSTLAWSVVASVEGLVPLASEVFYVL

SEQ ID NO: 70566 - protein, 69 aa, Gossypium hirsutum
  Clone ID: AW187607.1.pep
PTQQGEIPTPRAGHASVTVGENWFIVGGGDNKSGALETVVLNMSTLAWSVVASVEGLVPLASEKCCNGD

SEQ ID NO: 70567 - protein, 176 aa, Gossypium hirsutum
  Clone ID: GOSHI-09MAY01-C22967_3.pep
MGIDLVAGGKSKKTKRTAPKSDDIYLKLLVKLYRFLVRRTGSKFNAVILKRLFMSKVNKPPLSLSRLIEFMKGKEDKIAVVVGTVTDDIRVYEVPALNVTALRSTETATARIENAGGECLTFDQLALRAPLGHNTISIFLLHFVLSCYATLVSSNVCMLIQMTFLSPIFLKILLLI

SEQ ID NO: 70568 - protein, 157 aa, Gossypium hirsutum
  Clone ID: GOSHI-09MAY01-C22967_2.pep
QIFTWNLSPLRPSKPTRPLKRLFMSKVNKPPLSLSRLIEFMEGKEEKIAVVVGTVTHASGVYDVPALKVTALRFTETARARIEKAGGECLTFDQLALRAPLGQNTVLLRGPKNAREAVKHFGPAPGVPHSHTKPYVRSRGRKFERARGRRNSKGFRV

SEQ ID NO: 70569 - protein, 187 aa, Gossypium hirsutum
  Clone ID: GOSHI-09MAY01-C22967_1.pep
MGIDLVAGGKSKKTKRTAPKSDDIYLKLLVKLYRFLVRRTGSKFNAVILKRLFMSKVNKPPLSLSRLIEFMKGKEDKIAVVVGTVTDDIRVYEVPALNVTALRFTETARARIEKAGGECLTFDQLALRAPLGQNTVLLRGPKNSREAVKHFGPAPGVPHSHTKPYVRSKGRKYERARGRRNSKGFRV

SEQ ID NO: 70570 - protein, 60 aa, Gossypium hirsutum
  Clone ID: uC-gsronu33B046d07b1.pep
SAPLGQNTVLLRGPKNSREAVKHFGPAPGVPHSHTKPYVRSKGRKYERARGRRNSKGFRV

SEQ ID NO: 70571 - protein, 50 aa, Gossypium hirsutum
  Clone ID: LIB3149-035-Q1-K1-C10.pep
ITNRPQNPGLMFCHCTRCKVGIVGWEPDLIHLICIILFEMWHLTNLRFDI

SEQ ID NO: 70572 - protein, 60 aa, Gossypium hirsutum
  Clone ID: uC-gsflnu33B079e12b1.pep
KGRPFDLVFFILNLAVFFFFFFFFFFFFFFFFFFFFFFFFFFFNSQCQPENYSISKQNPT

SEQ ID NO: 70573 - protein, 84 aa, Gossypium hirsutum
  unsure (1)..(84): unsure at all Xaa locations
  Clone ID: LIB3583-045-P1-K1-C8.pep
NTCLLSKVNKPPLSISRLIEFMKGKGGXKIAVVVGTVTDDIRVYEVPALKVTALMFTETARSRIEKVCGECLNFDQLAFKAPFG

SEQ ID NO: 70574 - protein, 57 aa, Gossypium hirsutum
  Clone ID: LIB3189-042-P1-K1-G12.pep
TTENENLNNKQASKSKSAVILNSKPLADPCYSSPFILACFRAHIYIDVDFADTESPP

SEQ ID NO: 70575 - protein, 127 aa, Gossypium hirsutum
  Clone ID: GOSHI-09MAY01-C22897_1.pep
FFNHCLFFLGALIVSTPQDVALSDARRGVRMFSKVQVPILGLIENMSCFKCPHCGEPSCIFGAGGARKTAAEMGLQLVGEIPIELDIRKGCDKGMPIVVSAPDSAVSKAYHDVAQTVVMRLEDLAKA

SEQ ID NO: 70576 - protein, 242 aa, Gossypium hirsutum
  Clone ID: GOSHI-09MAY01-C22587_1.pep
KKKDKVEEAEELEEGKKEKKKDKEAKEKKKEKKKKDEVEEAEELEEGKKEKKKDKEAKEKKKEKKKDEVEEDEELEEGKKEKKRDKEAKEKKKEMKKDEVEGEEKEEKKEKKKDEEDKDTKYKDEEKEIDEEEKKKVKVEKNVVKGDSGITSREIVIEDTGKEPEGEGDQEKQKGKAKEEKDDNNKCEKKRKFEGKDKSKDISKLKQKLEKINSKIYALLEKKADILRQINEAENTTNEVAV

SEQ ID NO: 70577 - protein, 130 aa, Gossypium hirsutum
  Clone ID: GOSHI-09MAY01-C22517_1.pep
YRQKRKVTADEQIGEIKRLKEEIQRFNVENGMLKAQLGLLLFNAQFQAAAQQRQDGYITQSTGKQLHPQTVTVHGTNSEAVDKMNEIQNLQGTVPVNVVDGNDGIAKNQTSSEVETCSNNEAAITDILMK

SEQ ID NO: 70578 - protein, 43 aa, Gossypium hirsutum
  Clone ID: GOSHI-09MAY01-C22467_1.pep
KQDKIDELAGILRPFGDEVASSRETAIWLTKSLMSAQKLNGGT

SEQ ID NO: 70579 - protein, 160 aa, Gossypium hirsutum
  Clone ID: GOSHI-09MAY01-C22797_1.pep
GQLTLKSDVDSCGGVFIELITGRKAIDNTRAPGEQNLVAWARPLFRDRRKFPKMADPLLQGRYPIRGLYQALAVAAMCLQEQAATRPLIGDVVTALTYLASQTYDPNAPNNQSNRVGPSTPRVKDDRRSMADGLDSPEARGRLRGSPSTHRNSPDYRKRN

SEQ ID NO: 70580 - protein, 135 aa, Gossypium hirsutum
  Clone ID: GOSHI-09MAY01-C22777_1.pep
LLSRSRSRPDDRRPIKREAVPQMNIDAPRRLLQFAVRDAVGTSRAPISAKEPSSKRLRSVVSTSSGELPARPKRIQSVAWGPMPGATVIKAVAEAAEDVTKVKNAGSVFDRLGPGMDVLETRDLHPEFRESRSGG

SEQ ID NO: 70581 - protein, 90 aa, Gossypium hirsutum
  Clone ID: GOSHI-09MAY01-C22647_1.pep
ENAYPFTDAKVESLEKELEEAAKSLPRSEYHAGQRHLLTLVSEGSGGGPFICCDCEEQGSGWAYQCLECGYEVHPRCIRAVTPQSSIEDR

SEQ ID NO: 70582 - protein, 239 aa, Gossypium hirsutum
  Clone ID: GOSHI-09MAY01-C22067_1.pep
PSPPPPPLPLPSPPMSPPMPQIPPKNYPFLFPKVQSSVLSDPSRFFSPNLLSSPLPTNSFFQNFTLKNGDQPEYIHPYLIKSADSSLSISYPSFFHNPSFIYQIFVPDLTIFATDKTTSTSDKSHVISSYSDLSLTLDIPSSNFRFFLVRGSPFLTCSVTGNTPISISTVHAILSFSSNSSLTKHTIKLNNGQTWIIYASSSISLNHSVSLITSGGFSGILRIAVLSDSDPTCESILDH

SEQ ID NO: 70583 - protein, 104 aa, Gossypium hirsutum
  Clone ID: GOSHI-09MAY01-C22287_1.pep
MASKPFIALATTVFFFSLIAVNHFGKPFQGKLGEMEVVPITDAVGPESVAFHPLGDGPYVGISDGRIIKWQPNEHRWISFGITSPNREGCEGKHDHETREHICG

SEQ ID NO: 70584 - protein, 135 aa, Gossypium hirsutum
  Clone ID: GOSHI-09MAY01-C22257_1.pep
VSLDMCEDCLSWSPSENGDDEVMENGDEDFKCSCCGVMVEKKWNLPCFMIKPSWEVLDYPQEGNLITDGGEKVEGFIADEGYASDGIRSDFAAGDHKDEQMIEENKRVGIISDDEGIEPREVEKEEFSYFVSKFD

SEQ ID NO: 70585 - protein, 246 aa, Gossypium hirsutum
  Clone ID: GOSHI-09MAY01-C23987_1.pep
EENDPIKAVKNLVPRGLINSGNLCFLNSTLQALLAWSPFVQLLQQPKLRHIPKVGYPILTSFAEFVSDFDVPSSDSKLKKKDPAVLEIGRPFSPVMFESVLKSFTPDVPNSISGRPRQEDAQEFLSFIMDQMHDELVKLQGQSGSSNGVRSSLVSYAEDDEWETVGPKNKSAVTRTQSFLPSELSDIFGGQLRSVVKAIGNKASATVQPFLLLHLDIHPEPGHTIEDALHLVSAPSFEVISLTVDG

SEQ ID NO: 70586 - protein, 241 aa, Gossypium hirsutum
  unsure (1)..(241): unsure at all Xaa locations
  Clone ID: GOSHI-09MAY01-C23957_1.pep
VAYNTVLNGLCKTGNTGRAVKFLRMMNERGFEPNIRAYSTLIDCLCKNGLLNEAVDLFSEVNVKGIRPNIVIYNCLIHGMCNSGQQHEATKLLNEMVGNNVSPDIFTYNILIDAHCKEGTILEAVSIFNAMRKQGIKPDVVTYNILVDAWCKERLISESLDVVHTMRKQGIEPDVVTYSTLVDAHCQEGRFLPNIVXHNEKEGIEPDVVTYNILVDVYCQERSISRAVDTIATMRKPGAEP

SEQ ID NO: 70587 - protein, 251 aa, Gossypium hirsutum
  Clone ID: GOSHI-09MAY01-C23877_1.pep
KKAFLIHWVRLDQYSSVDEAYNDGMKRLETLVSRVHDIDPPKLPAGSIKLYTRLFGPKLEISSMTSDAYTEAVLRAKEHILAGDIFQIVLSQRFERRTFADPFEIYRALRIVNPSPYMTYLQARGCILVASSPEILTRVKKGKITNRPLAGTIRRGKTPKEDLMLEKELLADEKQCAEHIMLVDLGRNDVGKVSKPGSVKVEKLMNIERYSHVMHISSTVTGELLDDLTSWDALRAALPVGTVSGAPKVKA

SEQ ID NO: 70588 - protein, 128 aa, Gossypium hirsutum
  Clone ID: GOSHI-09MAY01-C23807_1.pep
IILCVARAARRISALLTRSLSVSSSSVSTLFSSLGKNSGRNGIGKRFSTAAALEDLIVPPVQIAYTQNLIDGKFVDAASGKTFPTYDPRTGDVIANVAEGDAEDIDRAVAAARKAFDEGPWPKMTPYE

SEQ ID NO: 70589 - protein, 102 aa, Gossypium hirsutum
  Clone ID: GOSHI-09MAY01-C23547_4.pep
MLAPSVTAPLRPSLSTGHRLESRIECSSRCGSVRIPNRIKPRELGLQSQPRVGRSRKQSSSIACTATALNATCSASGQTQTVTREAPTITQAPVHSKESHCS

SEQ ID NO: 70590 - protein, 160 aa, Gossypium hirsutum
  unsure (1)..(160): unsure at all Xaa locations
  Clone ID: GOSHI-09MAY01-C23547_1.pep
MLAPSVTAPLRPSLSTGHRLESRIECSSRCGSVRIPNRIKPRELGLQSQPRVGRSRKQSSSIACTATALNATCSASGQTQTVTREAPTITQAPVHSKEKSLQLDDGDSGFPPRDDNGGGGGGRSGGGNWSGGFFLFGFLPFLGXLKDKESEEDYRDSRRR

SEQ ID NO: 70591 - protein, 124 aa, Gossypium hirsutum
  unsure (1)..(124): unsure at all Xaa locations
  Clone ID: AI055380.1.pep
MQXPVVLSVRNSEIGLSQGELWLGNHNLRXKXKGRKQIFNPLHAPQLLLQNALLQCIXDNXXCNFVRHXTDHPXFWFIQGRXSLQLXNGDQRIPXVTYGGEVRXKGVGTVVSGILLLESRVLGF

SEQ ID NO: 70592 - protein, 77 aa, Gossypium hirsutum
  Clone ID: LIB3543-047-Q6-K6-E3.pep
KVHVFLIPRPTVSSSRDNQLQAGFLCMFGLTGARSELKYLHLDKFHCVTLARCPWRAEIIRHENVVCQKRLLLAPFG

SEQ ID NO: 70593 - protein, 86 aa, Gossypium hirsutum
  Clone ID: LIB3083-104-Q1-L1-D7.pep
AAVYKDPSDACAGIAGDSYKRWLELENRTNDITIIIVQIKGLSNSGVGTTDSELHSRPCQIGGSMNQSTAIVPPLMHQRPLESDVG

SEQ ID NO: 70594 - protein, 358 aa, Gossypium hirsutum
  unsure (1)..(358): unsure at all Xaa locations
  Clone ID: GOSHI-09MAY01-C23467_1.pep
PVFWELNSLKSGAGGGEPRDGSTEANQHLQLPQQQLQTGREAGADDDRSVAADSWSIKSDYGSTLDDEQRHADAAEALSSAANFRPASDYSSDKDEPDAETSMLGLQSYWDAAYLDELANFREHGHVGENWFGTDVMDTVISWTKXLCTDVSQGHMPNHVGEPKPQSVEHDEKYLSCWSVLDIGTGNGLLLQELSKQGFTDLTGTDYSEGAIDLARSLADRDGFSNIKFLVDDILETKLDRQFQLVMDKGTLDAIGLHPDGPIKRIMYWDSVSKLLAPGGILVITSCNHTKDELVQEVENFNQRNIAISQEPSATKDQETHRDHPPFRYLNHVRTYPTFMFGGSVGSXRVATVAFLRN

SEQ ID NO: 70595 - protein, 109 aa, Gossypium hirsutum
  unsure (1)..(109): unsure at all Xaa locations
  Clone ID: uC-gsflnu33B073a06b1.pep
YSDGPIKRMMYWDSVSKLVAPGGVLAITSCIHTKDDMVQEVENFNHRNAXMLRQDPNTIKDRETHIDCPSVQYLNHVQTYSTIYVSPDLWEHNVATGALVLELKDNLKV

SEQ ID NO: 70596 - protein, 62 aa, Gossypium hirsutum
  Clone ID: LIB3148-037-Q1-K1-H1.pep
MAVFRLAPEESPDPTQQHPPPQQQLQAGREVASDDERSVAADSWSIKSDYGSTLDDEQRHAD

SEQ ID NO: 70597 - protein, 360 aa, Gossypium hirsutum
  Clone ID: GOSHI-09MAY01-C23427_1.pep
ATERDVYEFFSKAGKVRDVRLIMDRNSRRSKGVGYIEGYDVMSVPMAIALSGQLLLGQPVMVKPSEAEKNLVQSNTSGAGAGGVAGPYGAVDRKLYVGNLHFNMTEMQLRQIFEPFGPVELVQLPLDPETGQCKGFGVGQFAQLEHAKAAQSALNGKLEIVGRTIKVSSVTDHVVTQDTTAKSADFDDDEGGGLALNAQSRALLMPKLDRSGIATSITSSLGVPLLNGSAPSPQAVTLPVNGQAAYPAPVLPPIMSTTALDSVGQPSECLLLKNMFDPATETEPDFDLDIKEDVEEECSKYGRVKHIYVDKNSAGCVYLRFDSAEAAGKAQRAMHMRWFAGRSISALFMQPQEYEARFKC

SEQ ID NO: 70598 - protein, 93 aa, Gossypium hirsutum
  Clone ID: AI725494.1.pep
ECLLLKNMFDPATETEPDFDLDIKEDVEEECSKYGRVKHIYVDKNSGGCVYLRFDSTEAAGKAQRAMHMRWFAGRSISALFMQPHEYEARFKG

SEQ ID NO: 70599 - protein, 49 aa, Gossypium hirsutum
  Clone ID: LIB3145-009-Q1-K1-H7.pep
IIAQCVYRPLDFIEAARKTQRAMHMTWFARRSISALFMQPQEYEARFKC

SEQ ID NO: 70600 - protein, 31 aa, Gossypium hirsutum
  Clone ID: LIB3146-008-Q1-K1-E2.pep
ETEPDFDLDIKEDVEEECSKYGRVKHIYVDK

SEQ ID NO: 70601 - protein, 134 aa, Gossypium hirsutum
  unsure (1)..(134): unsure at all Xaa locations
  Clone ID: GOSHI-09MAY01-C23777_1.pep
LKVSYKFNLLKSRCPRRTVCSVKCALPEERADKHXMSSKAKIAEGAAPGLAILKNKAPRWHEHLQCWCLNFHGRVTVASVKNFQLAATVDPSQPGGKGDEEKVLLQFGKVGDDTFTMDYRSPLSPYFAFAICLT

SEQ ID NO: 70602 - protein, 141 aa, Gossypium hirsutum
  unsure (1)..(141): unsure at all Xaa locations
  Clone ID: GOSHI-09MAY01-C23737_1.pep
VFRSGRSGHKNLYIMDAIEGETSWIERLTDGPWTDTMCNWSPDGDWIAFSSDRHDPGSGSFELYMIHPNGTGLRRLLRSGSSGRVNHPSFXSDGKLLVFTTDYGGISAEPISNPHHYQPYGEIFTMKLDGSDLKRTTHNSY

SEQ ID NO: 70603 - protein, 181 aa, Gossypium hirsutum
  unsure (1)..(181): unsure at all Xaa locations
  Clone ID: GOSHI-09MAY01-C23087_1.pep
FKDLRTQATQQNQTVETELFSCPVCYEPLIRKGPPGLNLDAIYRSGFRPKKCNKSYSSKDVCLDLTVTTGLRNYTEVKPVRTELFRSPLVSFLYERGWRQNFNLSGFPGADEEFRMAXEYFKPAEGGTLVDVSCGSGLFSRKFAKSGTYSGVIALDFSENMLRQCNDFIEQDASLLASNIA

SEQ ID NO: 70604 - protein, 129 aa, Gossypium hirsutum
  Clone ID: GOSHI-09MAY01-C23057_1.pep
FTAGFQTLFHCRSRPTADPNLSPPTPHSKRSRLGSLTASPRRFEIGLLYPVCEKKRKEVKIQRNLFCYLLAYCCPIFAILFCFLFFVVLFVVAGITWHEAAHVGEGRGARFAAASEDERCQLAAALSRS

SEQ ID NO: 70605 - protein, 282 aa, Gossypium hirsutum
  Clone ID: GOSHI-09MAY01-C23077_1.pep
MTASSLTSVNVSSTETSPTSAPKFSFSTSFSAVPTSPATQSSEPSSVVAVDANRKASSSSPSSVPFSAFVSSSDSLSFQPLEMPIPLPADLSPVSSSEILKVEAQPHNEIHDLKKDGDPIIRAPPLQHELPATELSLKPKFAVSSPKKSETPTGVLSGSQTRIIDLASPATNLASNPQPLQPSTGDSLSAPSSISINTANGKSGNLDLTQEDEMEEEAPETNQMTEHGLGSLSSFGIGSNPNPTAPKPNPFGAPFGVVATSAATSSFTSTVNPGELFRPASF

SEQ ID NO: 70606 - protein, 241 aa, Gossypium hirsutum
  unsure (1)..(241): unsure at all Xaa locations
  Clone ID: GOSHI-09MAY01-C23397_1.pep
KEPGKRAEGVLICDWAELTHECLLNILSRLTFEHRWSGPMLVCKPWLNACKDPSLNSVFDLETRFDSSSESTRWWTPEFERRIDSMLRSVITWSNGNLTQILTRHCSDLSLNFAAQRCPNLQVLSIKSSPRVTDASMAQIAYHCRNLKQLDISYCYEISHESLSLIGRNCPNLKILKRNLMNWLDPSQHVGIVPDEYLNACPXDGDTEAAVIAKFMPQLEHLEIRFSKLSAKGLGSICEGC

SEQ ID NO: 70607 - protein, 241 aa, Gossypium hirsutum
  unsure (1)..(241): unsure at all Xaa locations
  Clone ID: GOSHI-09MAY01-C23367_1.pep
YGILIPYKQAWRAKERGLAAIYGSSEEGYCMLPTFCEQIKKTNPGSIAEVFTTGADNRFQRLFISFHASICGFLSGCLPIVGLGGIQLKSKYLGTLLSATAFDADGGLFPLAFGIVDTENDDSWIWFLSELHKALEMNSEKMPQLTFLSDGQKGTLDAVRRKFPNSCQAFCMRYLSESISKEFKNSKLVHLLWKAAYATTTTAFKEKMAEIEEASPEAAKWIQQFPSSRWAXVYFEGTRYG

SEQ ID NO: 70608 - protein, 193 aa, Gossypium hirsutum
  Clone ID: GOSHI-09MAY01-C23277_1.pep
AKGDTAKRIVLDAKIDYPAACNAMETLLVHKDLSSNGLLNTLTKELQHEGVTLYGGPRASSLLNIPEAHSFHHEYSSMACTVEIVDDVQAAIDHIHQHGSSHTDCIVTENHEVAEIFLHGVDSAAVFHNASTRFCDGARFGLGAEVGISTSRIHARGPVGVEGLLTTRWILRGSGQVVDGDKGVIYTHRDLTQ

SEQ ID NO: 70609 - protein, 67 aa, Gossypium hirsutum
  Clone ID: LIB3148-029-Q1-K1-A4.pep
YDSKGEIIFFFTVYNNIFTCWILFFVSNYKIATTHSSLCNGYNKVHILDICRANMGSNNRTRGRTRG

SEQ ID NO: 70610 - protein, 104 aa, Gossypium hirsutum
  Clone ID: GOSHI-09MAY01-C23217_1.pep
QQCKGLLLPILEEIRSVNSQIPSEAGGDAGAAARAPSEQSNFTAVADYHCYVCVCVYLVMTNIVLCLLNMFCYVFALSPLCLRLSFFVYHFTSQLCFGWRKHKK

SEQ ID NO: 70611 - protein, 73 aa, Gossypium hirsutum
  Clone ID: LIB3083-099-Q1-L1-F4.pep
QQCKGLLLPILEEIRSVNSQIPYQFAWNTVNTLKAPSEQSNFTAVADYHCYVCVCVYLVMTNIVLCLLNTPLL

SEQ ID NO: 70612 - protein, 62 aa, Gossypium hirsutum
  Clone ID: GOSHI-09MAY01-C23237_2.pep
ECLRPKRAQNMGRESSVACNGYRRFLDLLTLAIFIFYHSDRALFLTKKSTFRFHLIQFWLVF

SEQ ID NO: 70613 - protein, 160 aa, Gossypium hirsutum
  Clone ID: GOSHI-09MAY01-C23237_1.pep
MDDRGGSFVAVRRISPRLRPRVPCHSTSAEVVAGSTAWLGRGLSCVCAQSRESDARPSFDLTPSQEECLQRLQNRIDIAYDSSIPEHQEALRALWNAAFPEEELRGLISEQWKEMGWQGKDPSTDFRGGGFISLENLLFFATNFPKSFKDLLWKLEGDRS

SEQ ID NO: 70614 - protein, 75 aa, Gossypium hirsutum
  Clone ID: LIB3083-104-Q1-L1-E4.pep
GQRELRGLQWIPSILRSLNPSHFSFLSCIDSQDFFLPRFFLIFFFFSRILVATDRSFTMLYFSKLYWLYFFLSAI

SEQ ID NO: 70615 - protein, 123 aa, Gossypium hirsutum
  unsure (1)..(123): unsure at all Xaa locations
  Clone ID: GOSHI-09MAY01-C98987_1.pep
ALYLWEVMWAMEYTPNXLSLSEQPDAALDSNSTHTLHAKELKRSGKFQRKNLQNGHADKNCALSVFLVASVLETKNRQILKDAKGLDDVVPILGEIPGNLDAKKACQHALKIQDKPLKKAKKS

SEQ ID NO: 70616 - protein, 148 aa, Gossypium hirsutum
  unsure (1)..(148): unsure at all Xaa locations
  Clone ID: GOSHI-09MAY01-C98957_1.pep
SAISSFAAVIKTIIIHQEEEMKLKEKCEETRKEFLRKSQAFEEWYHKYRQRRSGSDEMDAERGEDANAKDPVSERQFAVESLKKRLEEEVEAHEKHCIQVREKSLGSLKIRLPELFRAMSDYSHACSDAYEKLRXLSQSQKPNTAPSK

SEQ ID NO: 70617 - protein, 74 aa, Gossypium hirsutum
  Clone ID: GOSHI-09MAY01-C98977_1.pep
VTATRYSLAQLKLSTKIPWYPWYVKKQVGGWTEVYEGLTFAPVRGAGHEVPLFKPRAALQLFKSFLSGEPLPKA

SEQ ID NO: 70618 - protein, 254 aa, Gossypium hirsutum
  unsure (1)..(254): unsure at all Xaa locations
  Clone ID: GOSHI-09MAY01-C98527_1.pep
IGEAKETXRRVKPAVADGPRGVDSHLKAYERAQQMLQDLESEMMNKGGGDRVEQSRLFDAFLGSSSIWQPQPCKDPISLPKSNAVKPQDDFGDENINSNVTVNQVVIPQPKPVALPFGNSLNIDALPFYSSKLVKEVKAPVVNQLHETLKRTRSGNSANSMRVNEMGGDCTKPLSEELEKPEIKTRRRLSLSTKEKGDKLADLLPDSQDFEEAIIAAAVLGPANEAVTQRMFPKKTDKRLKVFQDITLSLTPRA

SEQ ID NO: 70619 - protein, 190 aa, Gossypium hirsutum
  Clone ID: GOSHI-09MAY01-C98357_1.pep
MDTPYNTHISSSLSKFEDSPVFNYINSLSPIKPVKSIHVTQTFNPLSFASLPSIFTSPHVSSHKESRFLKSYTDPLKPESSSADGTKVSTNEEAGADAQENFDQGVSLGETSFEMPNEPSRIAIGLPQTLKYDCGSPDCDATPCVFKTTCVSDTSLAIVPFFQEASEKAYLMEWKYGTLSRLSKKGYYRI

SEQ ID NO: 70620 - protein, 186 aa, Gossypium hirsutum
  unsure (1)..(186): unsure at all Xaa locations
  Clone ID: LIB3829-004-Q6-K6-E8.pep
VXRMYTGSFMTSLDMKGFSISIMKVDQTLLQHLDASTKAPHWPVGSAGLXMCNRPPAKIPVPLPSSRSMKSDELLSRPLQLTEQGHILEVAIEAAANAIINMRDILNDWDSTVGDGDCGSTDXLLLQMYKGATAILDDMKKYYPLNNAAETVNEIGSSVRRAMGGTSGVLYTIFCKAAYAQLKANS

SEQ ID NO: 70621 - protein, 118 aa, Gossypium hirsutum
  unsure (1)..(118): unsure at all Xaa locations
  Clone ID: uC-gsronu33B158h08b2.pep
FCPSACFLVGNRPPAKIPVPLPSSRSMKSDELLSRPLQLTEQGHILEVAIEAAANAIINMRDILNDWDSTVGDGDCGSTMYKGATAILDDMKXYYPLNNGLKTVNENGSSVRRAMGGT

SEQ ID NO: 70622 - protein, 247 aa, Gossypium hirsutum
  Clone ID: GOSHI-09MAY01-C98227_1.pep
LPGRERGIGGKHVLDPIRSGTSFNESVDEILCWRDYVKIFQHPEFHSPNKPPSFREIALEYSKRVRLVAREIIRGISESLGLEKDYIDETLNLENGLQLIAANLYPPCPQPELAMGLPPHSDHGLLTLLIQNQIGGLQVQHKGKWVNIDPIPNSFLANIGDHIEILSNGKYKSVLHRAVVNNRDVRISIAVPHGPALDAIVSPAPKLVEIVGNPPAYGAMKYKEYLELQQGSMLNGKSSLERIRNGV

SEQ ID NO: 70623 - protein, 107 aa, Gossypium hirsutum
  Clone ID: GOSHI-09MAY01-C99987_1.pep
RLKELIKYKGFQVAPAELEAMLIAHPDIIDAAVVGMKDEAVGEVPVAFVVKPGKSEISEDEIKQYISKQVVYYKRISRVFFIEAIPKAPSGKILRKELRAKLATKKH

SEQ ID NO: 70624 - protein, 126 aa, Gossypium hirsutum
  unsure (1)..(126): unsure at all Xaa locations
  Clone ID: GOSHI-09MAY01-C99837_1.pep
GGPGVRKQFLVPLIAIQAPXSIISWMKGEYGIWAAFLGLLVRLFFFIPGELELPFLALLLVIVAPLHVMNLRGTQQGAIISLVIAAYLAYQHFSGAGSLQRAFDQGSIIATVGIVCITVVSCLLLI

SEQ ID NO: 70625 - protein, 291 aa, Gossypium hirsutum
  Clone ID: GOSHI-09MAY01-C99467_1.pep
CCALLVLTPLFEYIPQCALAAIVISAVITLVDYEEAIFLWRVDKNLFLLWTLTTTTTLFLGIEIGVLVGVGVSLAFVIHESANPHIAVLGRLPGTTVYRNIQQYPEAYTYNGIVIVRIDAPIYFANISYIKDRLREYEVVGDKSTKRGPEVERIYFVILELAPVTYIDASAVQALKDLHQEYTSRDIQIAISNPNQEVLLTLSKAGVVEMIGKEWYFVRVHDAVQVCLQHVQTMSPKASDPSHEKSSFFQRKMKQRWVDLSVSELESGNSQMRSDSTQDDPQLEPLLSRRS

SEQ ID NO: 70626 - protein, 123 aa, Gossypium hirsutum
  unsure (1)..(123): unsure at all Xaa locations
  Clone ID: GOSHI-09MAY01-C99407_1.pep
FRYLPISAPALFFRGNMGKLIIAASNDITSRSXWEAYTSGELSRKGDLDDHQSFGVATPFLKSLMQVGSRFGESTLKLGSILTDGQVGIFKDRSAAAMSTFGDILPVQAAGLLSSFTTTRSDS

SEQ ID NO: 70627 - protein, 58 aa, Gossypium hirsutum
  Clone ID: GOSHI-09MAY01-C99437_1.pep
EAWCILEESFKAEVKFLGEATSGDLLQKLEFLRKGLEKWATRSCHSRRRKKELLIQSV

SEQ ID NO: 70628 - protein, 148 aa, Gossypium hirsutum
  Clone ID: LIB3829-009-Q6-K6-F7.pep
STLVQAMSLLSCSSPMLCCCCCTSFLLSLVFILLVLLFIDRLLFVSFAIIVSSSSPGFQRSSSLLQWKCFFSLTPSPNSLMMGRTRTVEETQFLVLHAKHFFSLVSLLFSTSCFYLRVLQKTTDSTCYVSFVKLFSPCVCCHHWGWAW

SEQ ID NO: 70629 - protein, 112 aa, Gossypium hirsutum
  Clone ID: uC-gsflnu33B081d03b1.pep
SVKSYLASMRIRKRQVPLPFSSISPVPLSSDPNFNRPPVAVVQLPLRQQQPSTPCCFDPHYPSQSDHPIGQPLPTQPRDGTTHGEQLTKNKQDYLVLKTGGEEEVENNNDTR

SEQ ID NO: 70630 - protein, 202 aa, Gossypium hirsutum
  unsure (1)..(202): unsure at all Xaa locations
  Clone ID: GOSHI-09MAY01-C99017_1.pep
DITQSSSNGGGLLRMFKLFPMLTSGCKXMGKPRRKPFLNHTAATCTIFGYRKGRVFLAIQADPNCVPMFVIELPMLTSVLQKEMESDMVRIALESETKTHKKKLLEEFVWAVYCNGRKMGYSIRKKHLCDDELHVTQLLRGVSTGAGVLPTLNHKESSDGELTYMRARFERVVGSKDSEALHMINPDGAPGPELSIFFLRSY

SEQ ID NO: 70631 - protein, 42 aa, Gossypium hirsutum
  Clone ID: GOSHI-09MAY01-C99347_1.pep
TVPSSLLTQNMNEFKATALPRITWEGRTGLCEFLSPFPRQKG

SEQ ID NO: 70632 - protein, 76 aa, Gossypium hirsutum
  unsure (1)..(76): unsure at all Xaa locations
  Clone ID: GOSHI-09MAY01-C99367_1.pep
TYVVAEPEXQEEEIAGVDFIIIASDGLWNVLSNEDAVALVQHITDAEAAARKLIKEAYALGSSDNITCVVVRFDSS

SEQ ID NO: 70633 - protein, 202 aa, Gossypium hirsutum
  Clone ID: GOSHI-09MAY01-C99267_1.pep
QTSIGIQRLVSDDESYIMDLALNEVIENFGHLATYVARLGKKCTDPIYHHFEAFVNDPLLNNMEWFGWEYRWKKMEKKMKKMERFVAATMQLTQELEVLAELEQTLRRMQRNPELDRVKLLEFQQKVILQRQEVKNLREMSPWVRTYDYIVRFLLRSLLTILERIKNVFGTNQMVPVERNDDFESVNSDYLSRSHSFSTVIP

SEQ ID NO: 70634 - protein, 158 aa, Gossypium hirsutum
  unsure (1)..(158): unsure at all Xaa locations
  Clone ID: GOSHI-09MAY01-C99217_1.pep
PSGLGFLRDDAALLKPCSTFFDRHNDGIFYPWETCQGSRAIGAGYLSSFISAFLINLGLSRKTRPXVSWKFEEIFPKFARTHSDALPSHELKAMLKANREPKDYRGWVASCTEXITLYNLCKDKGGLXRRKQFRGVYDGSLCQQMDWEKLATAGKKKE

SEQ ID NO: 70635 - protein, 85 aa, Gossypium hirsutum
  Clone ID: GOSHI-09MAY01-C99237_3.pep
PSDRRPKFRKPRVPSFTLHRNPPRSGPHAREHTHTRPLARTCTPHDHALFLDSTTRKQPWIGVERPISRHRWPPKVALVLRQPLG

SEQ ID NO: 70636 - protein, 118 aa, Gossypium hirsutum
  Clone ID: GOSHI-09MAY01-C99237_2.pep
PGPIHIQKNKTKQQSKSNYTRPKTLQWPNNWLHKPNGPNRFQKQEALEFYLPCATATTHVGTSSTSPSSLIARPTSVRSASRLHDQNTALDRGRKTHFSASLATESGVGAATTIGACE

SEQ ID NO: 70637 - protein, 87 aa, Gossypium hirsutum
  Clone ID: LIB3829-034-Q1-K6-A5.pep
GTDWVSNILYRISNKNLLLKKQIKGGRPFFFVFFPFFIRIYNKNKYKRGKRKAYQKTALDRGRKTYFSASLATESGVGAAAAFGTCE

SEQ ID NO: 70638 - protein, 86 aa, Gossypium hirsutum
  Clone ID: LIB3828-026-Q6-N6-F9.pep
PGPIHIQKNKTKQQSKSNYTRPKTLQWPNNWLHKPNGPNRFQKQEALEFYLPCATATTHVGTSSTSPSSLIARPTSVRSASRLHDL

SEQ ID NO: 70639 - protein, 126 aa, Gossypium hirsutum
  Clone ID: GOSHI-09MAY01-C94787_1.pep
GIFPSFGKGGIGGKVGKVGGILGFFPVFYVVTQRSSYLDFWLLYILCFFFFLLVVFFFFFFFFFFFFFFFFFFFFFLNQNIFRDKKQGPETETGTRLKKKIFSRVHYTKGCKSRKLNYNLPICICQ

SEQ ID NO: 70640 - protein, 319 aa, Gossypium hirsutum
  unsure (1)..(319): unsure at all Xaa locations
  Clone ID: GOSHI-09MAY01-C94057_1.pep
VISGFIIXFVSLKASALMLALWTTRAVGVEYWLFISXYNGIPALGINSXRRRILQVSPSNHVEDTISTSQERNSLVSNDGENSATAGKSFAFKIIEWISNVPYIEAGKVYLQQDVVLPGVALALLFFTVLSFGTLMTAALEWQGIPAFVIGIARGISASIGIAATIVYPMLQSHISTLRTGLWSVWSQWICLLVSVASIWVTNSHLSAYMLMAGVATSRLGLWMFDLSIIQQMQDAVPESDRCIVGGVQNSLQATFDLMAYVMGIVISNPQHFWKLNLVSFWAVTMASFLYTCHLYRIRKHLFHFEKLSSLLISSAQRL

SEQ ID NO: 70641 - protein, 37 aa, Gossypium hirsutum
  Clone ID: LIB3825-022-Q1-N6-F4.pep
YTWSVYGDGFRAGNQAVYKYGLRRTLEHIRMTGRFPY

SEQ ID NO: 70642 - protein, 113 aa, Gossypium hirsutum
  unsure (1)..(113): unsure at all Xaa locations
  Clone ID: LIB3825-022-Q1-K6-F4.pep
HRIATFKVLPALLQSATCEEGICQVLAHMWIATHLDSSSSNDVAPTSSSGSSRIRKGKRPEFERKLGEFFKHQIESDTXSVYGDGFRAGNQAVYKYGLRRTLEHIQMTGRFPY

SEQ ID NO: 70643 - protein, 312 aa, Gossypium hirsutum
  unsure (1)..(312): unsure at all Xaa locations
  Clone ID: GOSHI-09MAY01-C95527_1.pep
MTSDGATSMRAAPRRKPSLKERENNRRRERXKLLLQIYTGLKALGNYNLPKHCDNNEVLKALCAEAGWVVEKNGTTYRKGCKPPRAPTDILGSSAKITSFSSQNPSPLSSAFPSPIPSCQVSPSSSSFPSPTRLDARNQSSLFPFLRSTIPSSLPPLRISNSAPVTPPLSSPTSRNPKPIPNWEAIDKESMASFNYPLYAVSAPASPTHCHFHAPAAIPECDESDASTIESGQWISFQKFAPSTSQMPTSPTFNLVKPIAPQSLPNDLIKEKGHGSEFQFESGLVKPWEGERIHEVRLDDLELTLGSGKARC

SEQ ID NO: 70644 - protein, 142 aa, Gossypium hirsutum
  unsure (1)..(142): unsure at all Xaa locations
  Clone ID: GOSHI-09MAY01-C95467_1.pep
LPVRAVIQVLFCEQSKLQPTLLIXSGSFNGTRSPNPAGLEAPVRCMSKREMNAQQMEIKKLKEELLRVQNQCVAIQMQMEKLVDKKKGFFRWKKLGIMPSLKSSVSVFEKIEEEREANFGRQTPIDIKQKPVRPPKWRKSMS

SEQ ID NO: 70645 - protein, 325 aa, Gossypium hirsutum
  unsure (1)..(325): unsure at all Xaa locations
  Clone ID: GOSHI-09MAY01-C95697_1.pep
AAWADAWAEEHSFANSSKSILAPFVYLHLVHDYDDQDKLFFCDEDQTSLREVPWLIMKTDNYFVPSLFLIPTFEQELSNLFPRKEAVFHLLGRYIFHPTNPVWGLITRYYQAYLAKADERIGIQIRVFDTGTGPFQHVLDQIIACTLKENLLPDISMEKPIINQSQKSKAVLVTSLSGGYFERLRDMYWEXPTVTGEVIGFYQPXSHEEYQQTEKQFHNRKAWAEMYLLSLTDVLITSSWSTFGYVAQSLGGLKPWILYKPENRTAPDPPCGRVMSMEPCFHAPPFYDCKAKRGIDTGAVVPHVRHCEDMSWGLKLVDNGSELKA

SEQ ID NO: 70646 - protein, 179 aa, Gossypium hirsutum
  Clone ID: GOSHI-09MAY01-C95357_1.pep
PTAFKLFSGSSFTMLTRSFVEFCILGTDNLPRTLLMYFTNTPYSYSNYFPTVLCNSDQYKKTVINHNLLHVAFNKTFSTKPLSLKPEEFDAMIQSGAAFATHFQFDSPVLDRIDQEILKRSPGKVVPGGWCLGDPANDTCSVWGDASILRPGPGAKRLKKRIVDLLADDKYRSMQCRYE

SEQ ID NO: 70647 - protein, 134 aa, Gossypium hirsutum
  Clone ID: GOSHI-09MAY01-C96847_1.pep
KGKDTSKVSRLQRKLIFDTINEILNRKRQLPAWKLVSSMKSGCGEQPSLRQIWSEFQKIRERDSSDDLFEVICSVLRKDLAGDAINGWGDYPIEMSELVLNIERVIFKDLIVETIWDLAAASGKSNKIRRQLVF

SEQ ID NO: 70648 - protein, 195 aa, Gossypium hirsutum
  Clone ID: AI731866.1.pep
VKQDFGSIDILVHSLANGPEVSKPLLETSRNGYLAALSASSYSYVSLLKHFIPLMNPGGSSISLTYIASERIIPGYGGGMSSAKAALESDTRVLAFEAGRKHKIRVNTISAGPLRSRAAKAIGFIDTMIEYSIANAPLQKELSANEVGNAAAFLASPLASAITGAVIYVDNGLNAMGVGVDSPIFKDLNIPGEKH

SEQ ID NO: 70649 - protein, 83 aa, Gossypium hirsutum
  Clone ID: LIB3825-013-Q1-N6-H11.pep
PLRSRAAKAIGFIDTMIEYSIANAPLQKELSADEVGNAAAFLASPLASAITGAVIYVDNGLNAMGVGVDSPIFKDLNIPGEKH

SEQ ID NO: 70650 - protein, 132 aa, Gossypium hirsutum
  Clone ID: GOSHI-09MAY01-C96117_1.pep
GLSWQFYGDNVGEAVHFGDYSSGTFGAYWISKGHLVGSFLEGGTKEEYEAIAKATSLKPPVEDLAELGQQGLNFALTISKKPQPALPIEVSRSTSGLVLEKPVYAWHAAAGVVLAASIAGFAYWYGRRRRRW

SEQ ID NO: 70651 - protein, 101 aa, Gossypium hirsutum
  unsure (1)..(101): unsure at all Xaa locations
  Clone ID: GOSHI-09MAY01-C96047_1.pep
KISKECLKLIPHDKFSFAKVWLLTAQFEIRQLNLKGARQILGITIGKAPKDXFKKYIEIELQLGNIDCCQKLYEKYLEWAPENCNAWSKYAEFERSLAKTE

SEQ ID NO: 70652 - protein, 78 aa, Gossypium hirsutum
  Clone ID: GOSHI-09MAY01-C96077_1.pep
NLLLFQYIQPSYLDSKQKFQILYVSDTVILFSSLKFSYIRWVVPYTDVRICVGCKGSESVPDTKSREEEAFASLFRNE

SEQ ID NO: 70653 - protein, 141 aa, Gossypium hirsutum
  Clone ID: GOSHI-09MAY01-C97997_1.pep
GRVGEYKKLLKFDNKLQSNLFLSERYDTKVWLVGDGLTDKEQFKAPKGTIFIPFSIFPPKKVRKDCYYHTTPAMVAPASVENLHSCEDWLPRRAMSASRVAGIIHASEGFDVNECDGTIFSVDKVWEASLENGFRPLPIST

SEQ ID NO: 70654 - protein, 129 aa, Gossypium hirsutum
  unsure (1)..(129): unsure at all Xaa locations
  Clone ID: GOSHI-09MAY01-C97947_1.pep
MSCKGYNKEAKVVINVWVERSPGPVRXMVKLGASVEDAIKLVLHKYADERRTPKLDYSLGFELHHSYFSLQSLDKLQLIGDASCRTFYLRKRSSLDHCSNGGSGSYVSEIGPAKAKSPAFFFRLSWLEQ

SEQ ID NO: 70655 - protein, 182 aa, Gossypium hirsutum
  unsure (1)..(182): unsure at all Xaa locations
  Clone ID: GOSHI-09MAY01-C97977_1.pep
CLVTSPVFYTPFMRHIWTWMGASPATRKNFYSLLEAGYSCVIVPGGIQETFLMQYDCETGFLKSRRGFVRIAMEMGCPLVPVFAFGQSYSYKWWKPSGNFFLQLARAIKFVPILFWGVLGXPLPYQHPMHVVVGKPIELKKNPHPTAEEVLEVQAQFVKALQDLFARHKARVGYSDLPLKIL

SEQ ID NO: 70656 - protein, 97 aa, Gossypium hirsutum
  unsure (1)..(97): unsure at all Xaa locations
  Clone ID: LIB3825-028-Q6-N6-F4.pep
LQSYSYKWWNPSGNFFMQLARAIKFVPILFWGVFGTPLPYQHPMHVVVGNPIELKKNTHPPPEKVLXVQAQFVKALQDLFARPKARVGYFDLPLKIL

SEQ ID NO: 70657 - protein, 104 aa, Gossypium hirsutum
  unsure (1)..(104): unsure at all Xaa locations
  Clone ID: GOSHI-09MAY01-C97917_1.pep
DAEVLGILKTGVLFVSASQPINALAFIFDGLHYGVSDFPYAACSMMLLSAISSXFVLFAPKVLGLLGVWLGLTLFMALRMTAGFVRTLSKTGPWWFLHSDLERA

SEQ ID NO: 70658 - protein, 123 aa, Gossypium hirsutum
  Clone ID: LIB3828-025-Q6-K6-G5.pep
SLLYSIHSSLIIRHYIFASIDPITKYTNLSINRQWYHNLVVASKQVVIKFVCLFYRDILFKHMHIITDVKNIFYTFKFSFDIFICNFPSDLDLHVHFSEPFQNPFSINNYKYIYSSLHRTKKV

SEQ ID NO: 70659 - protein, 193 aa, Gossypium hirsutum
  unsure (1)..(193): unsure at all Xaa locations
  Clone ID: LIB3828-024-Q6-K6-C4.pep
AFGGXRPCVAAFGXAXQFDETDPKQPTKTWEYFNWYYFVMGASILAAVTVIVYIQDNIGWGWGLGIPTISMFLSIIAFVLGYPLYRHMDPVGSPFTRLLQVSVAAFRKRNLTMVSDPNLLYQNEELDASISIDGRLVHSKQMAFLDKAAIVTEEDNVKAPNLWRLNSVHRVEELKSLIRMGPIWASGILLITA

SEQ ID NO: 70660 - protein, 119 aa, Gossypium hirsutum
  Clone ID: GOSHI-09MAY01-C97147_1.pep
GSTCERTTSTDKYSLFEKFCQSGLCRLGLKPSDNINFHGIWKGVEPYVSLIGIYWSLRAAFGPLLETLSLLDRLLFLQEQGDVLESVMLPIFDPAISPRNVAIIAKKPDAGISSHHSSR

SEQ ID NO: 70661 - protein, 63 aa, Gossypium hirsutum
  Clone ID: GOSHI-09MAY01-C97397_1.pep
MDTDSTSNPIKLFHKLVSQLNNEIRGFKAKVKELWYVEEYDVLALALNGKMKVRRFQMGCSST

SEQ ID NO: 70662 - protein, 177 aa, Gossypium hirsutum
  Clone ID: GOSHI-09MAY01-C97347_1.pep
FHASARFSYASLWRALVFSDANGIKEHSVKLGAGEDLYVLFAGILTMRPWNRVIDPAVDHLVIKGTDSDRSELQMYASQYFPQISELLSRLPRVILLMLKTNDCLRAVNNSLLQGSSLETFLIIGRVSSEAVVEAKMMQMKSLFSRIDIWFEEFLFEARLLALQIAFWLLRVRNALT

SEQ ID NO: 70663 - protein, 141 aa, Gossypium hirsutum
  Clone ID: GOSHI-09MAY01-C90987_1.pep
MASEYNGSSKASESVFKIPPIKFTKLFINGKFVDSVSGKTFEAIDPRTGEAITRVSEGDKEDIDLAVKAARQAFDHGPWPRMSGSERGMIMMKFADLIEKNVEELAALDAINGGKLFSHCKAMDIPGAARNLRYYAGAADK

SEQ ID NO: 70664 - protein, 189 aa, Gossypium hirsutum
  unsure (1)..(189): unsure at all Xaa locations
  Clone ID: AI731104.1.pep
MVSVIQEKPMLPPTAAVAKNEHRPLAFDASILGSESNIPSQFIWPDDDKPCLDDPELVIQAIDLGAFLLGDSLAVSKVAEAVNEACKKHGFFLVVXHQYMDRFFSLQLSEKQKAKRKVGESYGYASSFVGRFSSKLPWKETLSFRXEDFKDFGRLYXEYCEARNKVSKEIMGLLXISLXLDQAYFKDFF

SEQ ID NO: 70665 - protein, 184 aa, Gossypium hirsutum
  unsure (1)..(184): unsure at all Xaa locations
  Clone ID: LIB3543-035-Q1-K1-H11.pep
MLPPTAAVAXNKHRPLAFDASILGSEISSQFIWPDDDKPCLDAPELVIPTIDLGAFLLGDSLAVSKAAEAVNEACKKHGFFLVVNHGVDSGLIDKAHQYMDRFFSLQLSEKQKAKRKVGESYGYASSFVGRFSSKLPWKETLSFRYCPHTQNIVQHYMVNWMGEDFRDFGRLYQEYCEAMNKVS

SEQ ID NO: 70666 - protein, 180 aa, Gossypium hirsutum
  Clone ID: GOSHI-09MAY01-C90587_1.pep
MGEENKKIRKEEVIAKLKDDGDFDKLRLKIIRKLKDNEELRNNIISAVKQSAALNRPGAENMKVRQLSDAIHDEVGNKVMGQISDSLWEIISSEGSMRTEITETVQSVYDKLATPQGKEKGESSVHEMVHVEKESESNGTIKATARRVDETLSDGDPQEPPGFSMSNNRHSSHCQQSHKA

SEQ ID NO: 70667 - protein, 201 aa, Gossypium hirsutum
  unsure (1)..(201): unsure at all Xaa locations
  Clone ID: GOSHI-09MAY01-C90787_1.pep
KLKTELNFAKLEVGQLKSPPAAAAVRYQEEYIRSTLQIRSAYEQVECIRTQSCQREMELETELNKMKADVEELRANLMDKETELQSILAQNEELNLXTEKKQFDEGELELSMKLYEKXEADLTELNANLTAKETELQSVTMQNEKLKMEIMKMEMDSNKLSDESAALLEAARAAEQEALLKHDNLTEEAEKSRKRAAQVTE

SEQ ID NO: 70668 - protein, 148 aa, Gossypium hirsutum
  Clone ID: GOSHI-09MAY01-C91877_1.pep
MGSTSTTAGGRRGGDRKKAVSKSAKAGLQFPVGRIARYLKKGRYAQRYGGGAPVYLAAVLKYLAAEVLELAGNAARDNKKNRINPRHVLLAVRNDEELGKLLQGVTIASGGVLPNINAVLLPKKASSSSDKDQSSKSKFLIRFRHNKD

SEQ ID NO: 70669 - protein, 121 aa, Gossypium hirsutum
  Clone ID: GOSHI-09MAY01-C91457_1.pep
GHHAIKSLGHHGDTAQLIKFLLPVLKDNNVDVYMNGAGHCLEHITSMNGAMQYLTSGGGSKAWRGDLKPDDDVNHSAKFLYDGQGFMSVEMNENEAMILFYDVEGLILHQWKISKQLRSAV

SEQ ID NO: 70670 - protein, 135 aa, Gossypium hirsutum
  Clone ID: GOSHI-09MAY01-C91427_1.pep
RTAWRIEVLKQGIQNTGRFNILSKDIGVPLVAFSLKDSSKHTVFEIAENLRRFGWILPAYTMPANAQHVAVLRAVIREDFSHGLAKRLVAHIEQVLKEMDGLPSRLQHKKTERETQEEVFRYWKRLVDRKRAGVC

SEQ ID NO: 70671 - protein, 136 aa, Gossypium hirsutum
  Clone ID: AW186783.2.pep
RMGNDQILPSKAPLEEICISEILGISLASFRGLIYNKSPFQLLSQRSEQRSKADSQGSTEAELYGEKAMEAMRGNPILLLLSYIPETSGLGSIGLPQIAKKKGYCCGIDQLVLDWTFSGLFSVSTLGSKILQMDLD

SEQ ID NO: 70672 - protein, 153 aa, Gossypium hirsutum
  Clone ID: LIB3543-039-Q1-K1-H2.pep
CLGFRLSSLQFLRPFHHSFTIKIGEGYGSSLYFHQNQHSKTILTCISTFLAPISTEKTRDLTDAFVKVLRMQSCTGKRPWRKCVGTTHRSPVLLLLSCIPETSGLGSIGLPRMAKKKGYCCGIDQLVLDWAFSGLFLVSTLGPKILQMDLDLI

SEQ ID NO: 70673 - protein, 122 aa, Gossypium hirsutum
  Clone ID: GOSHI-09MAY01-C91397_1.pep
LSYALVITKNHIFTSGASGTNAAVIRGALRAEKPELLTVILPQSLKKQPPESQELLEKVQTVIEKPYNDHLPLIEASRLCNRDIISHVQQVICFAFHDSKLLMETCQEAKNLRKIVTLFYLD

SEQ ID NO: 70674 - protein, 271 aa, Gossypium hirsutum
  unsure (1)..(271): unsure at all Xaa locations
  Clone ID: GOSHI-09MAY01-C91307_1.pep
YSNGNEKYVTKXLVRNYRCHPEILYLPSLLFYNDELTPCKDDIGSLLNSVKFLPNKDYPVFFFGIQGCDEREGSNPSWFNRIEASKVVEIVSSLTASGILNEKDIGVITPYRQQVLKLKKAFENLDIPDVKVGTVEQFQGQERKVIIISTVRSTIKHNEFDRTHCLGFLSNPRRFNVAVTRAIALLVIVGNPHIIAKDPYWSKLIWRCADHNSYQGCALPERQEYEDDASIPEDCRVDDESSIAEMWGEDAKEIGNLVPFTDEAEWSDGWK

SEQ ID NO: 70675 - protein, 54 aa, Gossypium hirsutum
  Clone ID: GOSHI-09MAY01-C91217_1.pep
FRSSHHFNCSSHCLTTGCTGVSAVALQGVLASSSHCSCSFSQTLQGWMSDLLLV

SEQ ID NO: 70676 - protein, 241 aa, Gossypium hirsutum
  Clone ID: GOSHI-09MAY01-C92917_1.pep
WQSRERGKLGSLTLTGEDEHRINPARIDAIRSALNQIRSDSTSLSGSVLITTAHGKFFSNGYDLAWAGSSPDKIRLMSSKLRELVADLISFPMPTVAAITGHACAAGLIFAFCHDYIVMRKDRGFLYMSETDIGLKIPAWFIAVISCKIGDAKVRRDVVLKAKKLTAEQALESGIIDAAFDTAAETAEGALELGEKLVKNGWNGQVYCENRKQLYREILDKLGVDETTDDVNNVAIATSKM

SEQ ID NO: 70677 - protein, 146 aa, Gossypium hirsutum
  Clone ID: GOSHI-09MAY01-C92527_1.pep
MAVMVTRKQPCPIDSISLRIARLQKILRTFIGDRNNEKQFLGSLNVKIKASPIVHFQLELEKEIGNNESVRSMLAEWRTKPTVERLWFDVMTRVEGDKLNPLTLKKVRPFVSVDTVSWSNLLSNISFTKFPSILVPPEALTLGVKW

SEQ ID NO: 70678 - protein, 169 aa, Gossypium hirsutum
  unsure (1)..(169): unsure at all Xaa locations
  Clone ID: GOSHI-09MAY01-C92417_1.pep
LSRSDSLSLVGFSDANWGLDFDDRRSTSGYCVFFGSNPISWSSKKQQVVSRSTTEAEYRSLAAVTSDVMWLLSLLRELQIGSASPPNIXCDSSSAVAVAANPVLHSKFKHVELDLFFVREKVADGSVLVREVPASDQVADVLTKPLPFSCFARFRNFLRVLSIGKMDAC

SEQ ID NO: 70679 - protein, 68 aa, Gossypium hirsutum
  Clone ID: GOSHI-09MAY01-C92407_1.pep
GRIEALVRMGGENVMCRGSKPVTIAPKMSHGGPLIKCDSFDLLELTRLMEHIGNLIYLKPWWPKETLP

SEQ ID NO: 70680 - protein, 113 aa, Gossypium hirsutum
  Clone ID: GOSHI-09MAY01-C92677_1.pep
MASFAQAPRGDSKSGEKIFKTKCAQCHTIEKAAGHKQGPNLNGLFGRQSGTAPGYSYSAANKSMAVIWGENTLYDYLLNPKKYIPGTKMVFPGLKKPQERADLIAYLKESTAS

SEQ ID NO: 70681 - protein, 71 aa, Gossypium hirsutum
  Clone ID: GOSHI-09MAY01-C92157_1.pep
LGLALLGVIPEDSEVIRSTNRGYPLVLNKPPTLAGLAFEQAAWRLVEQDSMKAVMVEEEPKKRGFFSFFGG

SEQ ID NO: 70682 - protein, 100 aa, Gossypium hirsutum
  Clone ID: LIB3828-011-Q1-N6-F9.pep
KDFSGGLIYLCIPGDLDLSRALFEQPSVGLAFKGQFYSFLLTFGIFFGGIIPIVFFFGGPAPVNVERKLRISDVFPPKKKKKKKKKKKKKKKKKEKKKRG

SEQ ID NO: 70683 - protein, 63 aa, Gossypium hirsutum
  Clone ID: LIB3829-009-Q6-N6-B7.pep
KVFSEGPINLCIPGDLDLSGALFEHSSADNFTLSLVTLEQFFGGIITDCFFEASATLICGKKP

SEQ ID NO: 70684 - protein, 170 aa, Gossypium hirsutum
  unsure (1)..(170): unsure at all Xaa locations
  Clone ID: GOSHI-09MAY01-C92317_1.pep
MVHNEQKKNQGCKGNKLLNSVSVLGSSGPIRFVVNEGELVGTVIDIALKSYAREGRXPVLGSDLNEFLLYSPSVGSHALSPWEAIGSIRARNFMLCKKPSTEKKIENNGRTNEAISRKATGKGXWKAWINKSLNLKNLLPLIHYLFFINFIFLDMDFKFVVGFSDYFRSN

SEQ ID NO: 70685 - protein, 110 aa, Gossypium hirsutum
  Clone ID: LIB3825-009-Q1-K6-H6.pep
LSCIGKPFIFFFCRDVDLQTWYSNMLSGGEGSPPIGLGLELGRGSDHRPTGFTKYSGFTVFQLQELQLQSLIYKYMEAGLPVPNHLLLPIWKSADWFSWRSTCQSLSTLL

SEQ ID NO: 70686 - protein, 158 aa, Gossypium hirsutum
  Clone ID: LIB3825-006-Q1-K6-E11.pep
RPRGFQSVCKSFRPFTTVNPVYVASPYCIFFSAFDPHTDYQEMEPQYTPLKIARFADFGIGLTNMESNMLSGGEGSPPIGLGLELGRGSDHRPTGFTKSCGFTVFQLQELQLQSLIYKYMEAGLPVPNHLLLPIWKSVAGSLGGLHANPYQPYSNCKH

SEQ ID NO: 70687 - protein, 98 aa, Gossypium hirsutum
  Clone ID: GOSHI-09MAY01-C93487_1.pep
FGGFFGGSASRPCLPKNIIKESISIATETGMLQLFFTIAFSAAPLTLYVPPVRSLNLFVETMEDLARESRVYTHRLYPRARFVWSRLLDCMLCNLSLD

SEQ ID NO: 70688 - protein, 83 aa, Gossypium hirsutum
  Clone ID: LIB3825-009-Q1-K6-F5.pep
SLSNLTVMNPSQLDCKFSVEWGFSVQFEVKWRGFLLLEVRLIIEVDTKVNEETDKPRYIIKFQNPITSRYKNYIKTLTLGNFI

SEQ ID NO: 70689 - protein, 67 aa, Gossypium hirsutum
  Clone ID: GOSHI-09MAY01-C93757_1.pep
RPRGCSCHSVGTSSPNIQVEFDPKFVYRNGMMVPIDSSQEVSFHCKFETLCLCPLIESISMTKQPAD

SEQ ID NO: 70690 - protein, 179 aa, Gossypium hirsutum
  Clone ID: GOSHI-09MAY01-C93647_1.pep
PKFATNPNGPNAETKAETLAGPPCAAAKPRPPCLRTPQRSAATPQPSLSAVRSVQRLQQPRQASVRQHSTRTCEREQTTAANTYKKDNSKMRMCIQFLFLFLFLNISYFCFSYKAKASAHCNFFTHKYATKKIQKLKQYKATIFLKVISRLKSLGVPFRLDLFFSFFVLLIFFFIRRFE

SEQ ID NO: 70691 - protein, 348 aa, Gossypium hirsutum
  unsure (1)..(348): unsure at all Xaa locations
  Clone ID: GOSHI-09MAY01-C93677_1.pep
YGGGWVPVVAVKMGLRGILKYLGVLWLFAQLPALLKEILGSILKDNEGALLNLDQEQPALRFFVGGYVFAVSVHRVQLLLQVLSVKRFHHQQQQQQQQNNANSQEELTQSEISEICDYFSRRVASEPYDASRVASFITLLTLPISVFGEFLKLIAWEKRISTNXKVGDIAPAQKPRIELCLENHTGVNGCSXSATKSNIYYDRPDECRVDFALDGCTSILALIPHINTAGGAXAWLPYCVSVRLRYSFGENPNVSFLGMEGSHGGRACWLRLDEWEKCKQRVARTVEVSGSSPADATQGRLRIVADNVQRAXHLCLQGLSNGVSKLDKNPTNSFFIISSFKSKLSLLI

SEQ ID NO: 70692 - protein, 257 aa, Gossypium hirsutum
  unsure (1)..(257): unsure at all Xaa locations
  Clone ID: GOSHI-09MAY01-C93667_1.pep
WRPAGADRGFTFLHYNLTIAYHRTNLLARYGRXSANGNGGKLEALGYKEGYRVDVDVPESTWEKAPSFHDILIFNTGHWWWAPSKFDPVKSPLLFFEKGLPVIPPIPPDLGLDKVLNHVIRFVEKTMRPDAIKLFRTQSPRHFEGGDWDQGGSCQRLQPLLPEQVENLFSLKNNGTNVETRLVNQHIYNALKGSNVHILDITRMSEFRADAHPSTAGGKKHDDCMHWCLPGVTDTWNDLVCNTFKQSLKFETDLYYY

SEQ ID NO: 70693 - protein, 83 aa, Gossypium hirsutum
  Clone ID: GOSHI-09MAY01-C93007_1.pep
KIYFLQESLLEIQYVVELRPSYFKKFQHIVQEQTIQQLQCSSQTHLSTKKRISIKYRDDYVEKPTLSLLMSLKEMEVCMVSNA

SEQ ID NO: 70694 - protein, 128 aa, Gossypium hirsutum
  Clone ID: GOSHI-09MAY01-C88937_1.pep
SFSGLSPGKHGWSINEFGDLTRGAASTGKVFNPSNEGTAKQPVGDLGTLDVDKNGEAFYTGVKQQLRVADLIGRSIAVYETEDRSDPGLTAAVIARSAGVGENYKKKCACDGTTIWEASDKDFVTSKV

SEQ ID NO: 70695 - protein, 143 aa, Gossypium hirsutum
  Clone ID: GOSHI-09MAY01-C88547_1.pep
MINKYKLDNRPTAFQVNPPLPAGFADVDVLKQHFSQYGDLVSVELQDVEKDDNTGSEASHNCSVLITYSTHHSAEKAYADGKCWKTHNLQLSWQTSSNDQHSRKETDVETNEKLTACCSTSGNCEHMECLVPEDSKHNPIPNV

SEQ ID NO: 70696 - protein, 199 aa, Gossypium hirsutum
  unsure (1)..(199): unsure at all Xaa locations
  Clone ID: GOSHI-09MAY01-C88577_1.pep
EKRPTKNKTQLKVKKTNQKRQREPRFAFMTKSEVDHLEDGYRWRKXGQKAVKNSPFPRSYYRCTSTSCNVKKRVERCFTDPSIVVTTYEGQHTHPSPLMPRPNLVGSTINSGISAGAAAAFSVPMQRNTQCHYYYQQQQQQQHQHPFANSLSSLNFGHNGPSIDSSFLHERRSRTSGQSLLKDHGLLQDIIPSHMLKEE

SEQ ID NO: 70697 - protein, 81 aa, Gossypium hirsutum
  Clone ID: GOSHI-09MAY01-C88447_1.pep
ILKKKKKRLIWQPPIQARNPPFQGLEALSFFVKFNVGIPKGGEGCSWLYLKKGVEEKETVMAGWTIVGCKRKLEGKVAGMT

SEQ ID NO: 70698 - protein, 145 aa, Gossypium hirsutum
  Clone ID: GOSHI-09MAY01-C88467_1.pep
NTDGAPGQSLLDGKHRAIDKVDERSKRHDKKHLASGEAQPPRGGRSSPRSSEDNDSRHRRHSRSKSAEGDDGMLVSKEEAYDLKVSVNDDQELRSKYLPKFDSDEGHSPNSKLNADEPDRLERSSSKQWLGSNGSGDQSISPRQK

SEQ ID NO: 70699 - protein, 63 aa, Gossypium hirsutum
  unsure (1)..(63): unsure at all Xaa locations
  Clone ID: LIB3149-013-Q1-K1-C4.pep
SIQACSDMNKLLRSMTAFGSYTNSSHLRHCLVFLLVCGFFRQLLLLHKCTPLCSFIXFFGKCF

SEQ ID NO: 70700 - protein, 119 aa, Gossypium hirsutum
  Clone ID: GOSHI-09MAY01-C88627_1.pep
GLARLGSKLTEAEVQQLMEAADVDGNGSIDYIEFITATMHRHRLERDEHLYKAFQHFDKDNSGYITRDELEAAMKEYGMGDDDTIKEIISEVDTDNDGKINYEEFRDMMRSGTQHTQLF

SEQ ID NO: 70701 - protein, 61 aa, Gossypium hirsutum
  Clone ID: GOSHI-09MAY01-C88197_1.pep
IPHFMHLSLKVTTIRYEFLYLINPPFLGCLFQLILYFPMLVLLHFVGYYLLGTPHFFLLSS

SEQ ID NO: 70702 - protein, 213 aa, Gossypium hirsutum
  unsure (1)..(213): unsure at all Xaa locations
  Clone ID: GOSHI-09MAY01-C88257_1.pep
GILSAEIGQLSTIPPKQRXPEAIQAFIKRKRDLPHEAFKGGFILEKIARPISTGHLNLVNTNIDDNPSVTFNYFHHPRDLQRCVDGIRMAAKVIQSKHFTNFTRCDKPTVEKLLNMSVKANINLIPKHTNDTKSLEQFCKDTVIPIWHYHGGCHVGKVVDPALKVLGTNRLRIVDGSTFNESPGTNPQGPVLMMGRYMGVKILRRRLGKAAHG

SEQ ID NO: 70703 - protein, 254 aa, Gossypium hirsutum
  Clone ID: GOSHI-09MAY01-C89967_1.pep
VHNAPEKESGRSGKNKHKVEEASSTAPLWSGISKETNHTSSVRARGLKSKSFESKLDPHSFQALTESKDGNQSSEQDVAFPNEEAYGQLNNQWKSQHSRRMPRNPQAYKSAVHGDAVVWAPVRSHAKVEVTEEVSHKSAVENVASQTKNDDQVQNNPRNKRAEVERYIPKPVAKEMAQQIISQQPVTHSDDPNAADEIVGRADSGSYGIECSQHSETATRTVGNPTESRNDGRQGRGHGSWRQRASAEATSQGL

SEQ ID NO: 70704 - protein, 207 aa, Gossypium hirsutum
  unsure (1)..(207): unsure at all Xaa locations
  Clone ID: LIB3543-042-Q1-K6-G1.pep
MAAFLKLEDSPMFQKQVCSLESMADELKXRCQVLTEGSRKYIAALGEAYNADNSFAESLEAFGCGHDDPLSASIGGPIMSKFISAFRELASYKELLFSQVEHVLVDRLMHFTTVDLQDAKESRQRFDKATNGYSQAREKFMSLKKNTPGDVVAVLEEDLENSKSAFERTRFNLVNSLMNIEAKKEYEFLESISAIMDGHLRYFKLGY

SEQ ID NO: 70705 - protein, 132 aa, Gossypium hirsutum
  Clone ID: LIB3543-050-Q6-K6-G5.pep
FLLAISHLVVELSWWKTIGRLSCWTVNLLIRGPIMSKFIKAFRELASYKELLRSQVEHVLIDQLMHFMNVDLQDAKESRRRFDKAISTYDQAREKFVSLKKNTPGDIVAELEEDLQNSKSSFERSRFNLENR

SEQ ID NO: 70706 - protein, 124 aa, Gossypium hirsutum
  unsure (1)..(124): unsure at all Xaa locations
  Clone ID: uC-gsflnu33B131f09b1.pep
MSAFLKLEDSPMFQKQIWSLEHMADDLKNRCQILYKGSKRFMAALGEAYNGDNSFADSLEAFGGAKDDPYSLSIGGFQGPIMSKFIKAFRELASYKELLRSQVEHVFIDQLMHFMKXDLQDAKE

SEQ ID NO: 70707 - protein, 141 aa, Gossypium hirsutum
  Clone ID: GOSHI-09MAY01-C89557_1.pep
KRETKNPYLLNLPFELVFTDMSLLSDLVNLYLSDTIEKVIAEYILYIFFRFCFQYFSFFFSRLSMSCKTKFMPGPKITTQIPNPKKQGPDGPKLKQFQQKIRNLETLVRRILLPMCLQRTRRPRSATASHLCTKTANLCLC

SEQ ID NO: 70708 - protein, 232 aa, Gossypium hirsutum
  Clone ID: GOSHI-09MAY01-C89547_1.pep
PRVRPASAGTTVRNESAEDFLALLKEWERLCASFSLSKSENLERQSFNSSVNEDNVNDEEEEEDENEDGDGEVFEVEKFLAICYGDPKEKGERGLYLKVRWKNYGPEEDTWEPLDGLGDCRECLKDFVTSGFKAKILPLPGDVDVICGGPPCQGISGFNRFRNKDNPLQDEKNKQLQVFTEIVEYLKPKFVLMENVVDIVKFAEGYLGRYALSKLIHLNYQVRMGMMAAGAY

SEQ ID NO: 70709 - protein, 184 aa, Gossypium hirsutum
  Clone ID: GOSHI-09MAY01-C89727_1.pep
MVTLVVATSADPASIGPASSLLAMPGWHPGPSLQDAASYTNKEVRLIKLDKRLVVENHLDKRWEEATGETVDDVVFLSKHVASSNRPALTIHPIGTPHLREVEALTAGGKPGWAAPPNPRIGPWFRLLKNIANSHNLVPEFEVTLEATHHGPEINSPTMFVEIGSTERYWKRQDAAQAIALLVW

SEQ ID NO: 70710 - protein, 44 aa, Gossypium hirsutum
  Clone ID: GOSHI-09MAY01-C89697_1.pep
PSVRSTVVVCGNCQTVLCQPTGGRARLTEGCSFRKKVTNSDGSD

SEQ ID NO: 70711 - protein, 280 aa, Gossypium hirsutum
  Clone ID: GOSHI-09MAY01-C89047_1.pep
MSWPPQSINKSLPDAKSIFFNLPKPTPCLPHVFLTAISLLFFISSTKRNPSFVKFLPFVSSDRRRFLKIPSMSHSGPPFATPQALSDWLKPRLPSDSLASWGVKPGTKNVHNLWLELSEGETTIVDSSPPLRTVNVVTVRVMGKDDLILVESRQQLSDGSFRDRFKPLSEKMKPNETVEEAVARAVKEELGSVIDPGSVRIVPGSYIKKLEERNSASYPGLPARYVLHSVDAWVEGLPEEDFCTDEQEEYQDLNGTMELEKAVSVRKHFWKWVSSDSLHS

SEQ ID NO: 70712 - protein, 222 aa, Gossypium hirsutum
  unsure (1)..(222): unsure at all Xaa locations
  Clone ID: GOSHI-09MAY01-C89337_1.pep
RTRGRFHEWVRGDLTDILVPVXAFHLHNMFQGVINHQQRFDFDRVPAVVELCMQAGADVTDEILRSGSLTTHEFSGTISGIESLSDDDIRVIANGTLRAWETLRSGVKKLLLDYPAKVCKYWSEVHVGPSGHLARHCGVFRYERWRGTHYWIKARVDNLVPPKIVWRRRPQDPKVLLDEGRNYYGHAPAVVDLCSHAGAIVPSKYLCMMKLSGLPGPIGVKP

SEQ ID NO: 70713 - protein, 291 aa, Gossypium hirsutum
  unsure (1)..(291): unsure at all Xaa locations
  Clone ID: GOSHI-09MAY01-C84997_2.pep
CFGFTARPKQTSRPNCRSNFKISRELLLEEEIEEEDDDDCSYYSEVTNTAHRDEVESIGRAKRSEEILRFKLDNGLICRQFPVKGTNRIVRSEDGNGNKMINEYVREYKIGSGSYGKVVLYRNSIDGGHYAIKAFHKSHLSKLRVALTETALTDVLREILIMKVLEHPNIVNLLEVFDDPSMDQFYMVLEYVESKWVCDGSGPPGGIGEDTAKKXIVHGDIKPDNLLITSTGTVKIGDFSVSQVFENDNDELRRSPGTPVFTAPECCLGSVYHGKAADTWAVGVTLYCMVL

SEQ ID NO: 70714 - protein, 202 aa, Gossypium hirsutum
  Clone ID: GOSHI-09MAY01-C84997_1.pep
DGSGSPGGIGEDTARKYVRDIVWGLMYLHDHNMVHGDIKPDNLLITSTGTVKIGDFSVSQVFENDNDELRRTPGTPVFTAPECCLGSVYHGKAADAWAVGVTLYCMVLGKYPFLGETLQDTYEKIVNSPLILPNDLNLELRSLLEGLLCKDPKERMTLNDVAKHPWVIGKYGPIPQYMCWCKRNNTDDGRNPIRGPMILNGN

SEQ ID NO: 70715 - protein, 182 aa, Gossypium hirsutum
  Clone ID: GOSHI-09MAY01-C84897_1.pep
RLIVTVGLTLEPTELLRLGLGVDPFDVESPSVDFGLMTKVEPLAVLRPSSAKDVAQLVKAAYESSHGFTVSARGHGHSINGQAQTGTGVVVQMSGVGSGGKPRVWGGDMYVDVWGGELWIDVLKSCLAYGLAPKSWTDYLYLSVGGTLSNAGISGQAFHHGPQISNVHELDVVTRKGELITC

SEQ ID NO: 70716 - protein, 184 aa, Gossypium hirsutum
  Clone ID: GOSHI-09MAY01-C84497_1.pep
RCLVSQFGGIRKVKVNQVKDSTNGMPASMGQPYSRGVNGLVSMSTAYSTSCNNAISLDLPYGSGDENTISMGPTFTKEDGNFISMGHTFNKRAGDFISMGHNYNKGNESILSVGLPFDKEDGNFISMGQSYDKGDANLTSLSPSYGKGQGNFISSAYGQPNGNLISMVPSFDKEDDNIPMQPSY

SEQ ID NO: 70717 - protein, 193 aa, Gossypium hirsutum
  Clone ID: GOSHI-09MAY01-C85987_1.pep
GKVSNGFAKTPKHGTPPKPPLPSPSSANKTNSSQKTVFSRSFGVYFPRSSAQVQPRPPDVTELLRLVEELRERESRLKTELLEHKLLKESVSIVPLLENDIAVKNAELERALKEMENLRNENEKLRTEVEEMKGKVEEERKEKERKVRGMESEISELKKMVTSHPVCNGKAEVFGENEDLLSSSQRFNGVPGK

SEQ ID NO: 70718 - protein, 157 aa, Gossypium hirsutum
  Clone ID: LIB3582-038-P1-K1-F3.pep
MVIMARLERALKEMENLMNENEKLITDVEEMKGKVEEERKEKERKVRGMESEISELKKMVTSHPVCNGKAEVFGENEDLLSSSQRFNGLLEVSAKSNLVKNLKRSNSKCWETVVFSASSNEKVESLEFKREVLEADRQRHSRCNSDELAESTLLNIR

SEQ ID NO: 70719 - protein, 193 aa, Gossypium hirsutum
  Clone ID: GOSHI-09MAY01-C85757_1.pep
MEDQAPDPNGPSHGSERSEPVRSRWTPKPEQILILESIFNSGMVNPPKDETVRIRKLLEKFGSVGDANVFYWFQNRRSRSRRRQRQQLLAAGAREQRNNQSQILGNGGGGGAIQYENNEVSMGFANSPPNFASFLIGPSSSYGVMNDDGMGNLLSLSSQMGFQGNGESSNITSVLCPSETSNLQYQSGFITVF

SEQ ID NO: 70720 - protein, 245 aa, Gossypium hirsutum
  Clone ID: GOSHI-09MAY01-C85047_1.pep
FPETLDLTSYMSGDGDDTNVYKLYAVVVHLDMLNASFFGHYICYTQDFNGNWYRIDDCKVMRVELAEVLSQVAYMLLYSRVSVRPSCLKTSGTQGNDEQKSMKALVEHCPKEQIQCLPENESITSSLSPSLSLNGSLHSEIPGLKVESSTGMNTDAQPQDGDVVRLKSNSSLSEEVSFCENNSCLQIDSEVIRINGDDMDKVNSIAVRGNPENMDRISTLPCSTDMKGICRSDKDLFDATNSEDI

SEQ ID NO: 70721 - protein, 184 aa, Gossypium hirsutum
  unsure (1)..(184): unsure at all Xaa locations
  Clone ID: GOSHI-09MAY01-C85067_1.pep
MDQREKTQQQQQQPVMGVVPGAGQMGYSTAYQTASMVASGTTGVAVPIQTQPSATFSSSPHQLAYQQAQHFHHQQQQQQQQQLQMFWANQMHEIEQTTDFKNHSLPLARIKKIMKADEDVRMISAEAPVIFAKACEMFVLELTLRSWIHTEENKRRTLQKNDIAAAISRTDVFXFLVDIIPGMS

SEQ ID NO: 70722 - protein, 138 aa, Gossypium hirsutum
  unsure (1)..(138): unsure at all Xaa locations
  Clone ID: GOSHI-09MAY01-C85017_1.pep
GYEPHVLAVDDNLIDRTLVEKLLKNSSCKVTTAENGLRALEFLGLGSDERNSLEGTVSKVNLVITDYCMPGMTGYELLKKIKESPVLKGGPVVIMSXSENIPTRINQCLEEGAQMFMLKPLKQSDVKQLKRHLMKYRS

SEQ ID NO: 70723 - protein, 210 aa, Gossypium hirsutum
  unsure (1)..(210): unsure at all Xaa locations
  Clone ID: GOSHI-09MAY01-C86467_1.pep
MLPSNKYPGLSEDDLYDDFNMDEVDLNLEXYEELFGMTLNHSEELLENGGIASLFGTKDMPAADSDCQVAAAAEGSSVGLVNAIQPACSNAASADSMMSNKTDSILYFTARRPHPGESSAGDYQDCGASSMLLMGEPPWCPPCTETSFTSATRTDAVMRYKEKKKTRMFEKRVRYASRKARADVRKRVKGRFVKAGDAYDYDPLSPTRSF

SEQ ID NO: 70724 - protein, 337 aa, Gossypium hirsutum
  Clone ID: GOSHI-09MAY01-C86787_1.pep
MLFLLVVHLRIQASAEGNTVKKRNADGEGSSSTKGKKLSGSSLEGRSNVSSHSVSISDSRRARNWSPNSDSSVASSIRTRRSSSSYGRGRLPHPVVRASVTLNEPPVVMPQVPQAAVTIDLNAPVSTETGSTCAISYGRAGRISESLHSIIPSIPSEAGINLSSMTGDSFRRYNMDGIAEVLLALERIEQDEELTYEQLLVLETSLFLNGLNFYDQHRDMRLDIDNMSYEELLALEERMGNVSTALSEEAMSKCLKKSIYEAISMEDVAKVSCEVEKDDVKCSICQEEYVVGDEVGRLLCDHWHHVGSLPRWLQVKNWCPICKASAEAMQSSCSPQN

SEQ ID NO: 70725 - protein, 80 aa, Gossypium hirsutum
  unsure (1)..(80): unsure at all Xaa locations
  Clone ID: GOSHI-09MAY01-C86757_1.pep
EMFPGRIRAKAMSVCLASHWVVNFFVGLLFXRLLEQIGPLVLNAIFATFCLLAVIFVKRNVLETKGKSLQEIEMTLLPPE

SEQ ID NO: 70726 - protein, 110 aa, Gossypium hirsutum
  Clone ID: LIB3825-008-Q1-N6-F8.pep
LAQLPSSCINKAMIMATRLEMIESSRARKKSGEKQLQETPSSDQELETQAIVLKSTASFRGERTEDSEEFVSAVRDLLSKLKSATTDDDCAKSLELLKEAQGIANELINR

SEQ ID NO: 70727 - protein, 128 aa, Gossypium hirsutum
  Clone ID: LIB3827-002-Q1-N6-F5.pep
YKLVPGVSARSFGIKVALLAQLPSSCINKAMIMATRLEMIESSRARKKSGEKQLQETPSSDQELETQAIVLKSTASFRGERTEDSEEFVSAVRDLLSKLKSATTDDDCAKSLELLKEAQGIANELINR

SEQ ID NO: 70728 - protein, 79 aa, Gossypium hirsutum
  Clone ID: GOSHI-09MAY01-C87447_1.pep
CLQDCDECFGSLREEIWRLPFLKNRHMKETFCTYYQASVKVSSYHIISYIYIPRVRLYTRIIWGSVKIKLVINNNKRTG

SEQ ID NO: 70729 - protein, 67 aa, Gossypium hirsutum
  Clone ID: GOSHI-09MAY01-C87037_1.pep
MAVPKVCFMAVFAALVFATAVDAQSSAPAPAPTSDGNSIDLGIAYVLMLVALVLTYLIHAADFCFSF

SEQ ID NO: 70730 - protein, 121 aa, Gossypium hirsutum
  Clone ID: GOSHI-09MAY01-C87377_1.pep
HQYSGIASLPPVIQLTGLPGCHAIAVINCIGRSPFDFCSRYFSTESSRLTYAESVKPIPDMDWAMQNDYSEPVMTVTPPTRRPPGRPPPKKVGFQEAMKPPLQSSKGKGLGPNKAPCKGLL

SEQ ID NO: 70731 - protein, 207 aa, Gossypium hirsutum
  unsure (1)..(207): unsure at all Xaa locations
  Clone ID: LIB3543-058-Q6-K6-G6.pep
ASAPRPPSVRPASGXTLPVLWPEQIKETXISDPVDARFSVYRXKRRSFSNDRTLNPSISGAEQDSVCSTKGIHQDTPGFSNRRVXNFSIDSSEEGTVICKPVTSKVSSANKTTRRSLTKASATPKRKTEPLKKRDSFHFSRTPVKKPLPATRRASLPLPTRNTVRESPCRSNAGILHLIQSPDVSVNAPRIDKIAEFPLASYEDAFF

SEQ ID NO: 70732 - protein, 161 aa, Gossypium hirsutum
  Clone ID: LIB3585-051-P1-K1-A8.pep
SNVFLVSKAAVLLFILCRQFPGSRTPIKKPLPATRRTSLPPPTRTTVRESASMSKAGILHLIQSPDVSVNAPRIDKIAEFPLASYEDAFFPIHKTSSISAQGSSGSPQFVDRSITKDKCTVQTSDRASIKPRFTDAWQGIQRSMFKADGENATDSSDQNAT

SEQ ID NO: 70733 - protein, 257 aa, Gossypium hirsutum
  Clone ID: GOSHI-09MAY01-C80037_1.pep
KKRKAGEKKMYRYERVSSTSVSKADKVDLESGDTLYPGLSYGENQLRWGFIRKVYGIVAAQLVLTTVVSAFVVFSAPVNELLRGNSGILLFLCLVPFILLWPLHVYHQKHPVNLIILGLFTVSLSLTVGVSCANTDGRIVLEALILTACVVASLTGYTFWASKKGKDFSFLGPILFTSLIILILSGLIQMFFPLGSTSTAVYGGISALIFCGYIVYDTDNLIKRFTYDDYILASATLYLDILNLFISILRVLRSGDN

SEQ ID NO: 70734 - protein, 337 aa, Gossypium hirsutum
  unsure (1)..(337): unsure at all Xaa locations
  Clone ID: GOSHI-09MAY01-C80277_1.pep
RNDPRVRPRVRGESFIVECNESDCFVKRTYQGXRKRSLGVVQFDTTKNRYLAAGDDFSIKFWDMDNVQPLTSVDADGGLPASPRIRFNKDGSLLAVSANDNGIKILANSDGMRLLRTLENLSYDASRTSEAPKPTINPISAAAAAAVATSAGLADRSASVVAIAGMNGDARSLGDVKPKITEESSDKSKIWKLTEISEPSQCRSLRLPENLRVTKISRLIFTNSGNAILALASNAIHLLWKWQRSDRNSNGKATASVSPQLWQPSSGILMTNDVADTNPEEAVPCFALSKNDSYVMSASGGKISLFNMMTFKTMATFMPPPPAATFLAFHPQDNNII

SEQ ID NO: 70735 - protein, 214 aa, Gossypium hirsutum
  Clone ID: LIB3543-055-Q1-K6-B8.pep
KRPIKLPQRSLGVVQFDTTKNRYLAAGDDFSIKFWDMDNVQPLTSYDAEGGLPASPRIRFNKDGSLLAVSANDNGIKILANSDGMRLLRTLENLSYDNSRTPEAPKPTINPISAAAAATSAALADRSASVVAIPGMNGDARSFADVKPRITEESSDKSKIWKLTEISESSQCRSLRLPENLRVTKISRLIFTNSGNAILALASNAIHLLWKWQR

SEQ ID NO: 70736 - protein, 133 aa, Gossypium hirsutum
  Clone ID: GOSHI-09MAY01-C81907_1.pep
HFQPQGIKRRESPPPLDLGFNGEENSDSVPTVQAAAGRALALGVRRTGLCCRGCWRLGRTEAMWLLLVKAATRGPFCPRVCRSLAWLSGYGSCNWTNGFQWGRANWPIYRSHQPYLPEVAIEQIEIEDLISLK

SEQ ID NO: 70737 - protein, 82 aa, Gossypium hirsutum
  Clone ID: GOSHI-09MAY01-C81927_1.pep
MEYSGIPLYRCRNCKNPLALIDDLLSKNFIAKSRKAYMFEHAMNIVLGPKYDKQLITGRFSIADVFCSKCGEELGWKYASAL

SEQ ID NO: 70738 - protein, 75 aa, Gossypium hirsutum
  Clone ID: LIB3585-005-P1-K1-F11.pep
QAKSGKAYMFQHAMNIVLGPKYDKQLITGRFSIADVFCSKCGEELGWKYVQSYDLKNRYKEGKFILEELKMFQEY

SEQ ID NO: 70739 - protein, 49 aa, Gossypium hirsutum
  Clone ID: uC-gsronu33B005b11b1.pep
LTVKLIITNLLHVYFSFSNVLLLIAFFLFLLKELYIYSVFLYSFSFSGH

SEQ ID NO: 70740 - protein, 126 aa, Gossypium hirsutum
  Clone ID: GOSHI-09MAY01-C81627_1.pep
MRGNSPGSVDTRHRLSASIEAIYKRRLNRNKVKGTGKPFHISVQDRNSCCKYPLLKLVLIAIVCGTFVSLLYSPEAYTSDHLSAVKSRRDFMKRWIWGGADSRYVSDIDIDWDDVMKVVEMMGEQH

SEQ ID NO: 70741 - protein, 165 aa, Gossypium hirsutum
  Clone ID: GOSHI-09MAY01-C81017_1.pep
HASAHASAHAFVKKFYVYMMMAYLLLSAIWFSQYAGWWKDILLLHHCISAVIGLGLFEMILWYSDYSNLNSTGMRPVVITTWVVTVGAIRKTLSRLLTLSASMGYGVARPTLGGLTSKVLLLGATYFLAAELLDITEYVGTIIDISGRARLFLVLPDAFLDAFMI

SEQ ID NO: 70742 - protein, 162 aa, Gossypium hirsutum
  unsure (1)..(162): unsure at all Xaa locations
  Clone ID: GOSHI-09MAY01-C82817_1.pep
HASAHSSAHASAHASASPVDADLPLSADVAVIMYTSGSTGLPKGVMMTHGNVLATVSAVMTIVPGLGSKDVYLAYLPLAHILELAAENLIPAVGGIIGYGTPLTLTDTSNKIGRGTKGDATVLSPTVMAAVPAILDRVRDGVRKKVDAXGWTSQKLFDWLIP

SEQ ID NO: 70743 - protein, 96 aa, Gossypium hirsutum
  Clone ID: LIB3582-061-P1-K1-F7.pep
YISNRMKIKSLKIQPLHPIPIVAFIAYFFRSSSLRIALSLLMLQVQVGGGTVAVLAGDVTGAVGWDRWQRQQQFGGLGFIIFCVKVFLGCNCFGLG

SEQ ID NO: 70744 - protein, 85 aa, Gossypium hirsutum
  Clone ID: uC-gsronu33B179f10b1.pep
SLSVGSEADEVQAERRRGPVAPATVHGGQKSPQVQVGGGTVAVLAGDVTGAVGWDRWQRQQQFGGLGFIIFCVKVFLGCNCFGLG

SEQ ID NO: 70745 - protein, 276 aa, Gossypium hirsutum
  Clone ID: GOSHI-09MAY01-C82507_1.pep
PRVRSNHAPGSGPVTLRRTFESPHYCSTLRLAEHSAAEVALQSLSSRGPSHSLAARILDETGVYKNLLQEIAQRVGAPLPQYTTFRSGLGHLPVFTGTVELAGITFTGESAKNKKQAERPAAMAAWTSLKQLAKETASFSSEPENNDELEQITIARALLNYRIKEKMAMANSSTAPIPFTKKFPIQNPRPTSPQPPATTSKILPFICRKVVPRNRSMSATASDKPILPSLQAPESRGPCMQKFPVAGAAPYVPIQQFRTPCHGIAPPVTIRTTVPV

SEQ ID NO: 70746 - protein, 167 aa, Gossypium hirsutum
  Clone ID: GOSHI-09MAY01-C82497_1.pep
MAVAENAGAKIGSAGQNLESTVASANAPDKSKPRTDSVTDAKEANFQQLKPVAATINDGDSNIKMQNGFNKNQQQMLTKTAGCNEFSNMENGGDGKIFNNHMNNLVEILSKLNPLAEEFVPPSLANHHHNLNDNQNQNKGFLQNGFGYSTDSFVVYTNSGNTNGHSN

SEQ ID NO: 70747 - protein, 157 aa, Gossypium hirsutum
  unsure (1)..(157): unsure at all Xaa locations
  Clone ID: GOSHI-09MAY01-C82737_1.pep
MAAEAVFRRSPSASTPWKSPSSTYKRSKTNHLLHFTIRASSHSIEEGNKAYKQLXKKIEDVILRAEMLAPTALELEEARRIKQEEMIRDYDLWNAPVKSSEILXLKLADSVKVVDALKDLKYKAEEAKLIAQVAETDAVDYSLGEPAYDASLALVIC

SEQ ID NO: 70748 - protein, 87 aa, Gossypium hirsutum
  Clone ID: GOSHI-09MAY01-C82327_1.pep
RNGIPGVAQRSFKSGSALTVTYFIRVPVNDNPRLNNYHPSLPQFYNTISNIQRLIYPMFSLIFPLLQNQLFLLVYISIHICRVENIC

SEQ ID NO: 70749 - protein, 212 aa, Gossypium hirsutum
  unsure (1)..(212): unsure at all Xaa locations
  Clone ID: GOSHI-09MAY01-C82257_1.pep
SKMLLASVDLGCSDEILTIIAMIQTGNIFYRPREKQAQADQKRAKFFQPEGDHLTLLAVYEAWKAKNFSGPWCFENFVQSRSLRRAQDVRKQLLSIMDKYKLDVVSAGKNFMKIRKAITAGFFFHAARKDPQXGYKTVVENQPVYIHPSSALFQRQPDWVIYHELVMTTKEYMREVTVIDPTWLVELAPRFFQQADPRQMSKPQPPERIEPL

SEQ ID NO: 70750 - protein, 117 aa, Gossypium hirsutum
  unsure (1)..(117): unsure at all Xaa locations
  Clone ID: LIB3493-033-P1-M1-C1.pep
KSALTETHFTLLAAYDASKAKNXTGSWXCDNVGQARSLQRSQDFRKQLFIMTDHYRLNVVSAGKNFINITKAITRGFFFHAARKDPQDGYITVVENQPVYIHPTGALFQRQPDWVIY

SEQ ID NO: 70751 - protein, 270 aa, Gossypium hirsutum
  unsure (1)..(270): unsure at all Xaa locations
  Clone ID: GOSHI-09MAY01-C83307_1.pep
LLSITLAFAWQKALREWPQIMVYFILWCTFFMSLSAGILLICFQKPATDGVGVCFIAFAIGNGLYACWVSQRVGFCCKVLLKSLEPVDKFRDLNQPAYWMLGAGFLWMSLWILAVVGALNFYYPALVIIALLLSLCWTTEVMRNVVNLTVSRVIALYYLRGMQSNTQFCFQRALTRNLGSACLGSLFVPAIEAMRIIARGLNLLEGEDEFMFSCAHCCLNVMQSIFRYGNGWAYVQIAAYGKGFVRASQDTWXFEREEMEPIVDSDMMSA

SEQ ID NO: 70752 - protein, 302 aa, Gossypium hirsutum
  unsure (1)..(302): unsure at all Xaa locations
  Clone ID: GOSHI-09MAY01-C83327_1.pep
HAHVLVVTYPAQGHINPLIQFAKRLTSKGVKTTVATTLYTVKSINVSSTIAIEPISDGFDEGGFNQAPTLQAYLESFKAAGSKTLTELIMKLNNSGTPVCCVAYDLMLPWALDVAKDFGISAAMMLTNSASVCSLYWHINQGGLNLLVKQETLAAPPMPGLPSLDVSDLPSFLAQPTSQSAYLALILDIFGICEENDWVFCNSFEELESELVEALMAKWPVVMIGPMVPSFYLDSRIEGDTSYGLXLWNYDNDQCLKWLDSMPFKSVXYVSFGSMASISXEQFQEIAWGLKASNMPFLWVAK

SEQ ID NO: 70753 - protein, 190 aa, Gossypium hirsutum
  Clone ID: GOSHI-09MAY01-C83257_1.pep
PTRSRTRGILGKMRSIGPLIQSPQGDLPILVKLVTEPLAWHGLVIQACVRTFLPSGKTKKKSGSTNQSISLLSNAVRDAIQGLCSVLEEVAKWSHDQIKIPADSTIDLLVSSLKRYGGAGKVFNMLETVASSPNETQLGDRRSQALRSWSPVDVGRKIGTGQCRVLSEFWRICESKIKSLKTLKQQIAQV

SEQ ID NO: 70754 - protein, 110 aa, Gossypium hirsutum
  Clone ID: GOSHI-09MAY01-C58906_1.pep
SDVVVPNNTLLKIVDPGTRLIDALEMMKQGVRRLLVPKSKVWKGMSKRFSILYNGKWLKNIDNGSGNNLIANANRPSSSSAAAYMRDKFCCLSREDMIILSVLGHYSFLS

SEQ ID NO: 70755 - protein, 172 aa, Gossypium hirsutum
  unsure (1)..(172): unsure at all Xaa locations
  Clone ID: GOSHI-09MAY01-C58876_1.pep
TCKIWQRFLEVFDLSLKYLQLARYATLCIRETQGCLFIAXNRVSVGHMTDLQEWPGAGCMVAAVCGSTEQEPIXVVGKPSTFMMDFYCRNNGKYIXMCMVGDRLDLTFIWTKCCCKPLLSIGVTHSHSDTPNDQTVIHPQVLFSSIGEDLGISHYSYLPGCVHTKIFQFCPK

SEQ ID NO: 70756 - protein, 68 aa, Gossypium hirsutum
  Clone ID: GOSHI-09MAY01-C58816_1.pep
LQTKTILLLQTDLVHALLAKSLPFSSSSSRKFSFIGSFESNASSSLKPSSVLLNLSAPQTSAPSADER

SEQ ID NO: 70757 - protein, 132 aa, Gossypium hirsutum
  Clone ID: GOSHI-09MAY01-C58546_1.pep
MAATTSLSLLPSSLGFPNERPSSTSQSSSYSCSCSVFFNAGTRLRSHDSFACVTFPSSSSTCYWRFNNRAGTHRFGTTVVAASGDYYATLGVPKSASGKEIKAAYRRLARQYHPDVNKEPGATEKFRRTVLH

SEQ ID NO: 70758 - protein, 198 aa, Gossypium hirsutum
  unsure (1)..(198): unsure at all Xaa locations
  Clone ID: GOSHI-09MAY01-C58576_1.pep
GGPSVSTTKIMGTYGYACTWNMLVTGHLTARSDVYXSFGVVLLXLLYGKKNLLYEDGDASKEQNLVDWXARPKLNDKRKLLQIIDPRXLENQYSARXAAQKACSLAYYCLSQNPKARPLMSDVVETLEPLQCTGGSADEVSSSLNSKVTGGSAGPFAMGGVPDYRVRHRFSNNVGPGAICRSPNPNCSPGGPAACRVR

SEQ ID NO: 70759 - protein, 166 aa, Gossypium hirsutum
  Clone ID: GOSHI-09MAY01-C58696_1.pep
MGISLDTLRPEPCVEGYSTPGGYSCKAVHPIALAKVMSIAKMMKSEFNDKDYSLSGIGGVETGGDAAEFILLGANTVQGCTGVMMHGYGLVKKLCEELKDFMKKHNFKSIEDFRGVSLQYFTTHTDLVRRQQEAIRERKAIKKGLQSDKEWTGDGFVKETESMVSN

SEQ ID NO: 70760 - protein, 190 aa, Gossypium hirsutum
  Clone ID: GOSHI-09MAY01-C58116_1.pep
MVHVSFYRNYGKTFKKPRRPYEKERLDAELRLVGEYGLRCKRELWRVQYALSRIRNAARDLLTLDEKNPRRIFEGEALLRRMNRYGLLDESQNKLDYVLALTVENFLERRLQTLVFKTGMAKSIHHARVLIRQRHIRVGRQVVNIPSFMVRVDSQKHIDFSLTSPFGGGRPGRVKRKNQRAAAKKAAGGN

SEQ ID NO: 70761 - protein, 125 aa, Gossypium hirsutum
  Clone ID: GOSHI-09MAY01-C58006_1.pep
ELLLKRQGILPIVKKTVSFAEDGNVYRIITNGDEVNSSGDGSLTDESVSSDERGDTMENLVKESEDLVENLEEAMNLNKQARSNSVEDYQIQGGDFVFSAPLPVKMESKADLMKKRNGALKIVSS

SEQ ID NO: 70762 - protein, 253 aa, Gossypium hirsutum
  Clone ID: GOSHI-09MAY01-C58026_1.pep
PPAKFRTICSSIDKLDKQSFEQVKKEMVEEKGLSVETADKIGTFVKIRGPPLELRSRFRPRARGSELLKHNASKEALGDLSILFDALYKSRCIDKVVFDLSLARGLDYYTGVIFEAAFKGGVQVGSIGAGGRYDNLIGNFGTKQVPAVGMSLGIERVLTIMEEKAQNQAVRATETQVLVAILGDKLAVAAELVSELWDVGGGAEYMVHKKVMKHIEYAIDSKIPWMVIVGERELNEGIVKIENHRNYHRGSDS

SEQ ID NO: 70763 - protein, 75 aa, Gossypium hirsutum
  unsure (1)..(75): unsure at all Xaa locations
  Clone ID: LIB3149-059-Q1-K1-G6.pep
ELWDVXIKADFIVHKKVMKHVEDAIDSKIPWMVIVGERELNEGIVKLKNIETTNEEVIPRSNLVGELQQRLKLNP

SEQ ID NO: 70764 - protein, 175 aa, Gossypium hirsutum
  Clone ID: GOSHI-09MAY01-C58266_1.pep
KVQHVEDKVKDLLIRIQKGEALGKDDINSLKARKLIVAQTWKGYSVKKGPNYAPTRKKVATDLTRENLQRGDWKELEFKEYNFNAKGPPAEAGHLHPLLKVKQQLKNIFLQLGFEEMPTNNFVESSFWNFDALFQPQQHPARDSHDTFFLEVPSTTRELPEDYVKLVKRVHESGG

SEQ ID NO: 70765 - protein, 195 aa, Gossypium hirsutum
  Clone ID: GOSHI-09MAY01-C58236_1.pep
LSKELMYQQVLRRFAHFNAIQLSEPAPLQELIMLALKEEDLDLESNENDELKKKIAEMNTQLLKQKSEMLEEYFCIFIDSDGNLSRLPILLDQYTPDMDRVPEFVLCLGNDVEWEEEKNCFQSLAAALGNFYAMHPPMLPNPSGKGLEFYRKRKHGKHTQDGGNSCHVDGTAEEDEFEHELLSEAETAWAQREWS

SEQ ID NO: 70766 - protein, 93 aa, Gossypium hirsutum
  Clone ID: GOSHI-09MAY01-C59906_1.pep
ASLGLSDHPQVQCVRTYKALQPDELTLEKTDILAVRTWTSDGWLEGVRLADGEKGWVPQAYVEEISSLSARLRNLRENKRVTSATSKLGEAPV

SEQ ID NO: 70767 - protein, 166 aa, Gossypium hirsutum
  unsure (1)..(166): unsure at all Xaa locations
  Clone ID: GOSHI-09MAY01-C59596_1.pep
MQQGDYSSYYQYPYLSNPNSNPNPNPNPNPNPVPSEFHQAPYASAPPFSSGYASSDYSVYPPNYPPYSQNLDAAPPTASAYTPPPSATTTPPAPAIAPQSSFNQQPMAPPSATAAPSFPPYDSHVPYQPPASQPPYFQQYDQHQTASSYGPXSSKPHPNPTPNPSS

SEQ ID NO: 70768 - protein, 80 aa, Gossypium hirsutum
  Clone ID: GOSHI-09MAY01-C59586_1.pep
NPNSDTTVPRKIRNENETQQLNQLTSFENPNCKKIKKESIEKPYKSISNYLISGKREIQGNPRTVFPFCPFPVFLPDLFS

SEQ ID NO: 70769 - protein, 196 aa, Gossypium hirsutum
  Clone ID: GOSHI-09MAY01-C59456_1.pep
MADAFCSDCKRNTEVVFDHSAGDTVCSECGLVLESHSIDETSEWRTFANESGDNDPVRVGGPTNPLLADGGLSTVIAKPNGASGEFLSSSLGRWQNRGSNPDRGLILAFKTIATMSDRLGLVATIKDRANEIYKKVEDQKSSRGRNQDALLAACLYIACRQEDKPRTVKEICSVANGATKKEIGRAKEYIVKQLGL

SEQ ID NO: 70770 - protein, 106 aa, Gossypium hirsutum
  unsure (1)..(106): unsure at all Xaa locations
  Clone ID: GOSHI-09MAY01-C59466_1.pep
MTEQMTLRGTLKGHNGWVTQIATTPQFPDMILSASRDKTIIMWKLTRDETNYGIPQRALRGHSHFVSDVVISSDGQXFALSGSWDGTLRLWDLTTGTTTRRFVGHT

SEQ ID NO: 70771 - protein, 43 aa, Gossypium hirsutum
  Clone ID: GOSHI-09MAY01-C59796_1.pep
AKSCFILPLLQMHFYSNFQHLRLSLVKEKVIKQNKINEVCIFY

SEQ ID NO: 70772 - protein, 103 aa, Gossypium hirsutum
  Clone ID: GOSHI-09MAY01-C59716_1.pep
MAKNVAQSATLASLDQKLAMAKRCSHEGVVAGAKAAVVATIATAIPTLASVRMLPWARANLNHTAQALIISTAAGAAYFIVADKTVLATARKNSFKQAPNKDA

SEQ ID NO: 70773 - protein, 97 aa, Gossypium hirsutum
  Clone ID: LIB3196-005-P1-M1-H3.pep
WINMLIKSATLACLDQKLAMAKRCSHEGVVAGAKAAVVATIATAIPTLASVRMLPWARANLNHTAQALIICTADGAAYFIVADKTVLATARKNSFKQ

SEQ ID NO: 70774 - protein, 184 aa, Gossypium hirsutum
  unsure (1)..(184): unsure at all Xaa locations
  Clone ID: GOSHI-09MAY01-C59686_1.pep
CPSYQERLCQRHHEQDQRGREARPRRLQLXGRTRPLQFRIQQLEALRRLIQEREQELVGALAADLHKNEWNAYYEEVVYVLEEIEYMIQKLPEWAADEPVEKTPQTQQDELYIHSEPLGVVLVIGTWNYPFNLTIQPMVGAIAAGNAVVLKPSELSENMASLLATIIPQYLDKDLYPVINGGVP

SEQ ID NO: 70775 - protein, 138 aa, Gossypium hirsutum
  unsure (1)..(138): unsure at all Xaa locations
  Clone ID: LIB3825-028-Q6-K6-G8.pep
DLGGSLGREAATGRGVVYATEALLAEYGKSIKGMTFGIQGFGNVGSWASRLIHEKGGKVIAVSDITGALKNTNGIDIPELLKHXEATGSLKSFNGGDSMDPNELLVHECDVLIPCALGGVLNRLGSIAEHLGPINYCA

SEQ ID NO: 70776 - protein, 117 aa, Gossypium hirsutum
  Clone ID: LIB3149-060-Q1-K1-F2.pep
IKGMTFVIQGFGNVGSWASRLIHEKGGKVIAVSDITGALKNPNGIDIPELLKHKEATGSLKSFNGGDSMDPNELLVHECDVLIPCALGGVLNRENAAYVKAKFIIEAANHPTDPDAY

SEQ ID NO: 70777 - protein, 71 aa, Gossypium hirsutum
  Clone ID: GOSHI-09MAY01-C59106_1.pep
PLHLASCNAHSKYKYFIQTTQRTLGEQNSPMQTLCKKKKLTSSVTWPPLDLRISNRNKTGLYAYCIMTEIL

SEQ ID NO: 70778 - protein, 110 aa, Gossypium hirsutum
  Clone ID: GOSHI-09MAY01-C59006_1.pep
GAPHAASPPPACPPQLIANRWPSTRVRPPEVARKARRRSLVRSPKSGRDRAWLLLLLSALKPRSLGLQAFQKRTKGTTFALLRSPRTVRGTAAPLMAPSAGFRTCERERG

SEQ ID NO: 70779 - protein, 283 aa, Gossypium hirsutum
  unsure (1)..(283): unsure at all Xaa locations
  Clone ID: GOSHI-09MAY01-C59036_1.pep
PLRPSTRPSKLNCDSFIPKLRNRCRNLGMTMDNPILYEPARMQIFSDGNALLQLLENVTCRVHELGRGNLQFLLCVMXSGKDDGYKCLKWISETKIGXVTQCCLSNHANKGQDQYLANLALKINAKLGGSNVELNDRLPHFHGEGHVMFIGADVNHPGSDNKTSPSIAAVVATMNWPQANRYAARVRPQFHRKEQILEFGEMCLELVESYARLNNVKPEKIVLFRDGVSEGQFDMVLNEELMDLKSAFQRINYFPTITLIVAQKRHQTRFFPEGKGDGVPRVI

SEQ ID NO: 70780 - protein, 161 aa, Gossypium hirsutum
  unsure (1)..(161): unsure at all Xaa locations
  Clone ID: GOSHI-09MAY01-C59386_2.pep
IDDGTGQKQIWRIEGSSKVPVDPATYGQFYGGDSYIILYNYRHGGRQGQIIYNWQGAQSTQDEVAASAILTAQLDEELGGTPVQSRVVQGKEPAHLMSLFGGKPMIIYKGGTXSREGGQTAPASTRLLQVRANSAGATQAVEVLPKAGALNSNDAFVLKTR

SEQ ID NO: 70781 - protein, 149 aa, Gossypium hirsutum
  Clone ID: GOSHI-09MAY01-C59386_1.pep
WLCLEEWAQCDIEGLRPAPKVPDSLSCLPAQSRVVQGKEPAHLMSLFGGKPMIIYKGGTSREGGQTAPASTRLFQVRANSAGATRAVEVLPKAGALNSNDAFVLKTPSAAYLWVGTGASEAEKTVAQELLRVLRAQPVQVAKGSEPDGF

SEQ ID NO: 70782 - protein, 117 aa, Gossypium hirsutum
  Clone ID: GOSHI-09MAY01-C59246_1.pep
ILDTQEVNFEQGMQILKIFKDHSSKTCILDDFEFYEARQKMIQERKAKHQLLQKQGLSGEPKGENPAMAKETLEKPVEAALTERTVASTAEAVNATNGDAKPIEEKGSVAATEDGSQ

SEQ ID NO: 70783 - protein, 108 aa, Gossypium hirsutum
  unsure (1)..(108): unsure at all Xaa locations
  Clone ID: GOSHI-09MAY01-C54946_1.pep
MALTLPNTFLQIKPSPPPSLPLRKVVTARGGGYRPQVTCRKKDIHPEFHEDAKVYCNGELVMTTGGTQKEYVVDVWSGNHPFYLGNRXSAVLVDADQVEKFRKKVGSI

SEQ ID NO: 70784 - protein, 147 aa, Gossypium hirsutum
  Clone ID: LIB3493-051-P1-M1-H4.pep
GRVGKYENGVITPRPPPIQYGRNQGGRFRQQNRNPDQPRYDRQGNTTPNQQGNVPYNQQGFVQGGGRNYRPPQNYRQQPPMNNRDCAPRGPDPSHQSSYNQGRQGSYNSQERREFVQGEQRNYMPPEQRDFRVDHRNYASSQGGNYG

SEQ ID NO: 70785 - protein, 121 aa, Gossypium hirsutum
  Clone ID: LIB3165-037-P1-K1-H12.pep
DKYENGIMAPRPPPIHYGRNQGGRFRQQNRNSDQPRYDRQGNTTPNQQGNVPYNQQGFAQGDGRNYRPPQNYPPQQNYRQQPPMNNRDYAPRGSDPLHQNSYNQGKHGSYNSKDETSFKES

SEQ ID NO: 70786 - protein, 129 aa, Gossypium hirsutum
  Clone ID: GOSHI-09MAY01-C54696_1.pep
MENNNNQVTGELKSGNKKQVRLFYCMECEELARKVAAHSQLITLQSINWRSFDDGFPNLFINNAHDIRGQHVAFLASFSSPAVIFEQLSVIYNLPRLFVASFTLVLPFFPTGSFERMEEEGDVATAFTM

SEQ ID NO: 70787 - protein, 205 aa, Gossypium hirsutum
  Clone ID: GOSHI-09MAY01-C54676_1.pep
VEPRPRSLGIDYVDESEVLTLADEENHINKHNFRIPFVCGCRNLGEALRRIREGAAMIRTKGEAGTGNIIEAVRHVRSVMGDIRILRNMDDDEVFSFAKKIRSPYDLVVQTKQLGRLPVVHFAAGGVATPADAALMMQLGCDGVFVGSGVFKSGDPARRARAIVQAVTHYSDPAVLAEVSCGLGETMVGLNLNDKKVERFAARSE

SEQ ID NO: 70788 - protein, 91 aa, Gossypium hirsutum
  Clone ID: LIB3165-036-P1-K1-A5.pep
PTRPVVHFVAGGVATPAEAALMMELGCDGVFVGSGVFKSGDPARRARAIVQAVTHYSDPAVLAEVSCGLGEAMVGLNLNDKKVERFAARSE

SEQ ID NO: 70789 - protein, 103 aa, Gossypium hirsutum
  unsure (1)..(103): unsure at all Xaa locations
  Clone ID: GOSHI-09MAY01-C55446_1.pep
QGSFHITLFPSPFFHLHSLSVRNSVKRAGEGLLLDAXGTLLQLSKPVQETYASIGAKHGLKFNSPAIKKGSKRAFPAPWPALPPLEGDGKPFWKLVVSEATGC

SEQ ID NO: 70790 - protein, 108 aa, Gossypium hirsutum
  unsure (1)..(108): unsure at all Xaa locations
  Clone ID: GOSHI-09MAY01-C55406_2.pep
LWLQRCILALGFVIDLIAFGLAVAAEQRRSTCXVRTNGNESFCVYDKDIATGLPVGSFLFLLLGQILIMVASPCLCCGNAMKPRGSRAWAAVLFITCWAFFLIAEVCL

SEQ ID NO: 70791 - protein, 195 aa, Gossypium hirsutum
  Clone ID: GOSHI-09MAY01-C55406_1.pep
MASTLLLALVFVIDLIAFALAVAAEQRRSTASVGNNGKESYCVYDEDIATGLGVGSFLFLLLSQILIMVTSRCLCCGKAMRPSGSRAWAVVLFITCWLFFFIAEVCLLAGSVRNAYHTKYKNLLNDPPSCATLRKGVFGAGAAFAFLTAVVSELYYVSYSKANDATVNYGQDTRSVGVGTCKWICSKAVINFIHC

SEQ ID NO: 70792 - protein, 211 aa, Gossypium hirsutum
  Clone ID: GOSHI-09MAY01-C55366_1.pep
PTRPPTRPDCSAHMLWVGERTRQLDGAHVEFLRGISNPLGIKVSDKMDPKDLVKLCEILNPRNKPGRLTIITRMGADNMRIKLPHLIRAVRQAGLIVTWVSDPMHGNTIKAPCGLKTRPFDAIRSELRAFFDVHEQEGSYPGGVHLEMTGQNVTECIGGSNTVTFDDLNSRYHTHCDPRLNASQSLELAFAISERLRKRRLKSAKELCNDN

SEQ ID NO: 70793 - protein, 211 aa, Gossypium hirsutum
  unsure (1)..(211): unsure at all Xaa locations
  Clone ID: GOSHI-09MAY01-C56986_1.pep
RTRGIAEAQQQEKVSSEVPAAEKKRWTLGDFDIGKPLGRGKFGHVYLAREKRSNHIVALKVLFKSQLQQSQVEHQLRREVEIQSHLRHPNILRLYGYFYDQKRVYLILEYAAKGELYKELQKCKYFSERRAATYVASLARALIYGHGKHVIHRDIKPENLLIGAQGELXKIANLGWSVHTFXRKRTKCGXLIISPPEMGESFKALIQLLIS

SEQ ID NO: 70794 - protein, 130 aa, Gossypium hirsutum
  unsure (1)..(130): unsure at all Xaa locations
  Clone ID: GOSHI-09MAY01-C56946_2.pep
MKNLKVRAVCRDNGEKTDISRVFXVEQVKGLLDKIQQNLFDVAKQKRDACIEVVKTWDEFVKALGQKKLILAPWCDEEEVEKDVKARTRGEMGAAKSLCTPFEQPELPDGTKCSASGKPAKKWTYWGRSY

SEQ ID NO: 70795 - protein, 285 aa, Gossypium hirsutum
  unsure (1)..(285): unsure at all Xaa locations
  Clone ID: GOSHI-09MAY01-C56946_1.pep
MENVGGLLNTAGVEAFIPNTGRGLXGATCHCLRQHCRKMFEINFENEKGEKSMAWQTSWAYSTRTIGVTAMVHGDNKGLALPPKVAALQVIVIPVPYKDADTQGIFDACAATVAILSDAGIRAEADLRENYSPGWKYSNWEMKGVPLRIEIGPRDLANNQVRAVRRDNGEKTDISRVFLVEQVKGMLEKIQQNLFDVAKQKRDACIEVVKTWDEFIKALGQKKLILAPWCNEEEVEKDVKARTKGEMGAAKSLCTPFEQPELPEGTKCFASGKPATKWTYWGRSY

SEQ ID NO: 70796 - protein, 88 aa, Gossypium hirsutum
  Clone ID: GOSHI-09MAY01-C56936_1.pep
MTQKGNLFKGQKKQKTIPPNRHGKVPHIRKGKRVVKPSKMTKEMDADRELTKFINHCNEIKAATVANKDGGQLSIVKPPPESSGNVKE

SEQ ID NO: 70797 - protein, 69 aa, Gossypium hirsutum
  Clone ID: LIB3149-024-Q1-K1-B3.pep
RRKEISSRGKKSRKQSLPIAMEKFLTFAKELTKFINHCNEIKAATVANKDGGQLSIVKPPPESSGNVKE

SEQ ID NO: 70798 - protein, 128 aa, Gossypium hirsutum
  Clone ID: GOSHI-09MAY01-C56546_1.pep
MMLPVVKLGTLALKTACKPIANRLKKEAGLHPRFRQLIINIAQANHRFTTTMQRRIYGHATDVAIRPLNEEKAVQAAADLLGELFVFTVAGAAIIFEVQRSSRSEARKEEQRKQELEAMKQKDEDVAR

SEQ ID NO: 70799 - protein, 89 aa, Gossypium hirsutum
  Clone ID: LIB3582-054-P1-K1-A5.pep
NKQHMSSAEACNELMAYSLILSCCCYTCCVRRKLRKALNITGGFIDDFLSHLMCCCCALVQEWREVEIRGFNGSEKTKTSPPPSQFMES

SEQ ID NO: 70800 - protein, 58 aa, Gossypium hirsutum
  Clone ID: LIB3149-021-Q1-K1-E4.pep
MQLFFPSFWQGGFIDDFLSHLMCCCCALVQEWREVEIRGFNGSEKTKTSPPPSQFMES

SEQ ID NO: 70801 - protein, 87 aa, Gossypium hirsutum
  Clone ID: GOSHI-09MAY01-C56016_1.pep
MDPLSALRDFTVRGELDKIVRVNDEFRFGTEYSFPCSAETAYRSKQGNLYNLETLVFYMQNHHRRHTEYMHNFLFLRMPGGTFTDRK

SEQ ID NO: 70802 - protein, 241 aa, Gossypium hirsutum
  Clone ID: GOSHI-09MAY01-C56346_1.pep
MDGNKQAQSSSYPPQPPTTSITPSPPSSSAAIAATPPAPFHHLLQQQQQQLQMFWSYQRQEIELVNDFKNHQLPLARIKKIMKADEDVRMISAEAPILFAKACELFILELTIRSWLHAEENMRRTLQKNDIAAAITRTDIFDFLVDIVPRDEIKDEAGLGGMVGTTASGVPYFYPPMGQPAGAPAGPGGMMIGRPAVDPTGGIYAQPPSQAWQSVWQTAVADGGSYASGSSGCQGNLDGQG

SEQ ID NO: 70803 - protein, 143 aa, Gossypium hirsutum
  Clone ID: GOSHI-09MAY01-C56286_1.pep
EYFIRHMDGCTLDTEGEKERVVKCLEAAIHRRASEGLSLELCAKDRVGLLSEVTRILRENGLSVTRAGVSTVGEKAVNVFYVRDASGTPVDANPIEALRKEMGQPMMLNVKKAPSSTKAREAEPTGWAKPSFFFGNLLEKFLA

SEQ ID NO: 70804 - protein, 125 aa, Gossypium hirsutum
  Clone ID: GOSHI-09MAY01-C56256_1.pep
FYAFYDRCFEIKQNKYVYKVCPYKQASQEEGHMTTRLGRWDKFEDAYKMMVFSNGDKCWNGPDRSMKVKLRCGLKNELTDVDEPSRCEYVALLATPAVCLEDKLKELQHKLDLSNKEQPQEHDEL

SEQ ID NO: 70805 - protein, 104 aa, Gossypium hirsutum
  unsure (1)..(104): unsure at all Xaa locations
  Clone ID: GOSHI-09MAY01-C57906_1.pep
MLDPGIYAKLILELGKNPDKHILAEELLGDLXKEDDLNLSXQDCPGIMKARIKAXKFEIGESLFYWFKQSRRDPRVVMYTTLLHSRYSENKYMEALALVWEMRP

SEQ ID NO: 70806 - protein, 173 aa, Gossypium hirsutum
  unsure (1)..(173): unsure at all Xaa locations
  Clone ID: uC-gsflnu33B015d04b1.pep
MPHLYPDDRILTSTVEVLARKRELKLPVNLEKFTSSTNRSLIEAMLKGFVKGGSLNLAWKLLSVVKQSKRMLDPGIYAKLILELGKNPDKHILVEELLXDLGERDDLNLSQQDCTVIMKVCIRHRKFEIVESLFYWFKQSGRDPSVVMYTTLLHSRYSENKYMEALALVWEME

SEQ ID NO: 70807 - protein, 175 aa, Gossypium hirsutum
  unsure (1)..(175): unsure at all Xaa locations
  Clone ID: GOSHI-09MAY01-C57806_1.pep
VTSVGLKXFERQSSREVPRHXCSFRISSEGLPVILPYITKQILYASPADFKHLLQYKSIKFADFVDADFGQKAADLMLGCCVIVLREDHIQADALAIAIGCWKGRSSLSVMVTAMDCQELLERLSARMETEKNGTLAPESLGVLDKKQDMSGENGTPLEDHNVEAMKIQDTNASE

SEQ ID NO: 70808 - protein, 98 aa, Gossypium hirsutum
  Clone ID: GOSHI-09MAY01-C57546_1.pep
MKESELSTEPIGQNLIKLISNLCFSVFVFSVLIFTVIAITYQPPDPWLESAPALTKLFTQTENATFKNDDSILKTGEDVVLVAAPEVPPALAINPITE

SEQ ID NO: 70809 - protein, 277 aa, Gossypium hirsutum
  Clone ID: GOSHI-09MAY01-C57456_1.pep
MATATSIVRSPAALLSAKVTVSDHKPTPTVQFSRFPSKRSCFTALLSSLHDNNNDDDNNNNVISHPKPLSSSQLFNSVSNGSRLRVAYQGVRGAYSEAAAEKAYPNCEAVPCDQFDAAFQAVEKWLVDRAVLPIENSLGGSIHRNYDLLLRHSLHIVGEVKLAVQHCLLANHGVQLEDLSRVLSHPQALAQCENTLTKLGLSREAADDTALAAKHVALHKLKDTGAVASSSAAKIYGLNILAQDVQDDCDNVTRFLILAREPIIPGIQNSFKTKLCF

SEQ ID NO: 70810 - protein, 160 aa, Gossypium hirsutum
  Clone ID: LIB3828-003-Q1-K6-A7.pep
MLCYSGPLSSTQLPNSVSAGSRLRVAYQGVRGAYSEAAAEKAYPNCEAVPCDQFDAAFEAVEKWIVDRAVLPIENSLGGSIHRNYDLLLRHSLHIVGEVKLAVRHCLLANHGVRVEDLQRVLSHPQALAQCENTLTKLGLSREATDDTALAAKYVAFNKL

SEQ ID NO: 70811 - protein, 43 aa, Gossypium hirsutum
  Clone ID: GOSHI-09MAY01-C57166_1.pep
SCNLALLPFNLLWLTEVFLFNMLFQEKNCLTLFCAEMHLLLQI

SEQ ID NO: 70812 - protein, 144 aa, Gossypium hirsutum
  Clone ID: GOSHI-09MAY01-C57136_2.pep
NWEEHITQDSEQWEWQMTVSKLFEERPIWPKESVTERLLQKGLKFSHLVLKRLLLGVAYYFSNGPFRRFWIRKGYDPRKDPESRIYQRTDFRVPEPLRNYADASVANNLTHKWGDLCSFQVFPYKFQMILQLFELDDDYIQQEI

SEQ ID NO: 70813 - protein, 209 aa, Gossypium hirsutum
  unsure (1)..(209): unsure at all Xaa locations
  Clone ID: LIB3827-001-Q1-K6-E10.pep
ERLLQKGLKFSHLVLKRLLLGVAYYFSNGPFRRFWIRKGYDPRKDPESRIYQRTDFRVPEPLRNYADASVANXTLQPKTGWFSECVLDCLRLRVALRFLSVYPKTGAESILKSCSNEFEKLKRSCLYKDVFNSHQEEHQQTNKGDDDKERAKSSDNKEDEVEAEDEEELDAYDETLTLGDGDDEISXQPDTYLDMENNSRTYLQEXFGS

SEQ ID NO: 70814 - protein, 124 aa, Gossypium hirsutum
  Clone ID: GOSHI-09MAY01-C57036_1.pep
PASAHAWRVCSRKIQSKKPKLGGKKSLNSEVLTTMEPASGEDDATVSEKRSIPRLDYKRLYDETYGNVPSSSSDDEDWNDGTAPRKKKKRNAEVATTSANGNASPTGSVSVSNGLNEPTREACT

SEQ ID NO: 70815 - protein, 65 aa, Gossypium hirsutum
  Clone ID: GOSHI-09MAY01-C50806_1.pep
KNKLFFFIPIKKNSNQVQATHCLQSVNLICQFHHYINFLQKLCMIDSLFNSFFSFVFFFISFLTM

SEQ ID NO: 70816 - protein, 105 aa, Gossypium hirsutum
  Clone ID: GOSHI-09MAY01-C50836_1.pep
LVTGLGNGSLTGSLKPHSSSSSQLAKESPLIVQVLVIARAQRQIMHQLDNLSNLIHEYRGERCRQERNDRSNRAIDVETIGVPLIFTLAIGGLGVILFRNLASQK

SEQ ID NO: 70817 - protein, 50 aa, Gossypium hirsutum
  unsure (1)..(50): unsure at all Xaa locations
  Clone ID: LIB3583-032-Q6-K7-B9.pep
NKITPKPPIARVKISGTPIVSTSIALFDRSSFLGDXFXPGIMYQIAQIXP

SEQ ID NO: 70818 - protein, 100 aa, Gossypium hirsutum
  Clone ID: GOSHI-09MAY01-C50606_1.pep
IKRKHKVCYDDGDEEILNLRREKWAVIYDETASEREDGPDVHILCPDGLSEMSQKRKAKAADQPSKKAKMDALPKRGGGASSGKSKGAVTKSGQKTKEDG

SEQ ID NO: 70819 - protein, 118 aa, Gossypium hirsutum
  Clone ID: GOSHI-09MAY01-C50016_1.pep
VKSAETIYESVQAIIALEEMIKTESLRNEWWYWSSLSAAAEISTVSSLALRVYSLDAAIVYEKSCDFNSIDNLKPSSMPGPKLPSNLDLPEKCKVSRRTIKKREEPERLIFVKLQFKS

SEQ ID NO: 70820 - protein, 138 aa, Gossypium hirsutum
  unsure (1)..(138): unsure at all Xaa locations
  Clone ID: GOSHI-09MAY01-C50026_1.pep
RPKKVRRESKAKKITEYDYVNAMKEEISKVVRLQEELGIDVLVHGEPERNDMVEYFGEQLSGFAFTVNGWVQSYGSRCVKPPIIYGDVSRPRAMTVFWSSTAQSMTRRPMKGMLTGPVTILNWXSFVRNDQNRHETCY

SEQ ID NO: 70821 - protein, 200 aa, Gossypium hirsutum
  Clone ID: GOSHI-09MAY01-C51946_1.pep
MAIYGNLRVDATLASHHQHPFRTYIRSSKVECVGFMNGGSRVSEITPKWNGVTINSRSIGSKNKRSVGIMGDYKFSPNAVHEEVESFLLHAINMSFFERLHLAWKIVFPSPASRRSSNANIAKQRLKMILFSDRCAVSDEAKQKIVKNIVHALSDFVEIESKDKVQLSVSTDSDLGAIYSVTVPVPRVRAEYQEADESGT

SEQ ID NO: 70822 - protein, 222 aa, Gossypium hirsutum
  unsure (1)..(222): unsure at all Xaa locations
  Clone ID: GOSHI-09MAY01-C51966_1.pep
MSFMAAAKVFACPFVLVALFSMVASDPDLLQDLCVANKAAGIKVNGFPCKDEANVTEADFFFSGLANPGVINNSVGSVATGANVEKIPGLNTLGVSLARIDYAPGGLNPPHTHPRATEIIFVLDGELXVGFITTSNMLVSKSVKKGDVFVFPRGLVHFQKNNGDKSASVIAGFTSQLPGTQSIAATLFTSTPAVPDNVLTKTFQIGTKEVDKIKNKLAPKKT

SEQ ID NO: 70823 - protein, 185 aa, Gossypium hirsutum
  Clone ID: GOSHI-09MAY01-C51926_1.pep
CFLSFVTALGSIVSRVKNRILVSDAEPNCQQSPSSSRESKDLTDSHIKTLHDSPLDQKTEKKLTRSSAQPCKMTRTSLSGSIQAKGIKHEKGKSLNFQYSTEELGGGLKNSAKGDSGRKSGARRCLKPDPVYQKQRACTGGGAFRTSNPSFSVVIHPSQYGSCSTVHIPEEFGKRYLKKNGEMML

SEQ ID NO: 70824 - protein, 60 aa, Gossypium hirsutum
  Clone ID: GOSHI-09MAY01-C51886_1.pep
NMLLYMTTELPLFNNYHASKWYHIVFTACGFFVFCFGNGRDMWINPNFLLWFKYCFWSSF

SEQ ID NO: 70825 - protein, 186 aa, Gossypium hirsutum
  Clone ID: GOSHI-09MAY01-C51816_1.pep
MSPVFLFPTSVLPSSFYLDFSLFLPEMTKFKKRNRPAGHRMSMLRTMVSQLVKHERIETTVAKAKEIRRLADNMVQLGKEGSLCAARRAAAFVRGDDVIHKLFTELAYRYKDRAGGYTRLLRTRIRVGDAAPMAYIEFIDRENELRQSKPPTPQPPQRPSLDPWTRSRLSRQFAPPKEEKSSESDI

SEQ ID NO: 70826 - protein, 38 aa, Gossypium hirsutum
  unsure (1)..(38): unsure at all Xaa locations
  Clone ID: uC-gsflmaxxa119h07b1.pep
MTTFRKLNRPTGHRMSMLRTMVSXSLKHERIETTVVKV

SEQ ID NO: 70827 - protein, 318 aa, Gossypium hirsutum
  unsure (1)..(318): unsure at all Xaa locations
  Clone ID: GOSHI-09MAY01-C51826_1.pep
GFRLSSRSSGYVGDDNDNRPGDGRRASCKRKALEGNVGQSSSSGSSSYFHCAESSAGHGVSASSSVGNGMNISASSGQAHPRLGLEVGGSGSDANPGPIVLPAAKGSHRNFRLRISPSSIQEPIAPPVFSTGDMTRRSVISSSQQSSRLSTDHSLDIRSAPVLDNASLQNPNVAVHVPTLPRNVQSFRWNGGSGSRTGNTSSSNISGXGMLDPNEGLQSRSMAWNLVDHPMVGPAPELRNLGRNPMNPDVNSGNLSGPGNFASTSRGGSSSGANASSVPTWAPQLNHPSQYPRRLSGLVRRQLMSSLGPESGGPGNHP

SEQ ID NO: 70828 - protein, 87 aa, Gossypium hirsutum
  Clone ID: LIB3146-034-Q1-K1-E6.pep
EDKPLDRLSFLTSSSIVGTDHYNDIKAAPVLDNACLQNPNVAVHVPTLPRNVQTFRWNGGSGSRTGNTSSSNIFGDRDSVPHEGHLF

SEQ ID NO: 70829 - protein, 163 aa, Gossypium hirsutum
  Clone ID: GOSHI-09MAY01-C51546_1.pep
RFHCLAEFDEGKRSCRKRLDGHNRRRRKPQPQPQPHSLSVNPGRCLSNLQGSRHLPSSSPQIFATTAITSSWLGTAKMEPDIGSESSRNGFFRGSFPHSYKREEQLSLLQTNHSSLHGVSVYQLPLLSNGVGSSQKMFSNAIDSDRALSLLSSQPAENSGDWF

SEQ ID NO: 70830 - protein, 84 aa, Gossypium hirsutum
  Clone ID: LIB3146-030-Q1-K1-E4.pep
VVNTSEDKPKHQLTSVFGTAKKLRKQQIFYKEPNQQRSEVKSEIALQGIRVSVELTTSDEMVMARNKKPLSCVKVSWLACLPLF

SEQ ID NO: 70831 - protein, 48 aa, Gossypium hirsutum
  Clone ID: uC-gsronu33B110g04b1.pep
YGYLSNIFLSFFSFFSLWGYYFHFLVAQLNNCVNTIFSTKSQTSTDQK

SEQ ID NO: 70832 - protein, 153 aa, Gossypium hirsutum
  Clone ID: GOSHI-09MAY01-C51466_1.pep
IQVEIACALHSWDNRKGSRELMGGPISWHEMDSNGSNSLVISNGSGTINNNLSTHTDVYHSDGTAKNRNRTTKVEPNHGDEWVEQDEPGVYITLVALPGGIKDLKRVRFSRRRFSEKQAEQWWAANRARVYQRVNVPLVEKPTLGAGREGLAH

SEQ ID NO: 70833 - protein, 97 aa, Gossypium hirsutum
  Clone ID: GOSHI-09MAY01-C51796_1.pep
FGINTSSLHKNKKFHTLKKRKTLGAFIRRIITLQRRSANSPGETVGKLAIPLNWVTVHLSQITYLKVKPGKFQELSPFNINIVKQFPIFNMPLMIKS

SEQ ID NO: 70834 - protein, 166 aa, Gossypium hirsutum
  unsure (1)..(166): unsure at all Xaa locations
  Clone ID: GOSHI-09MAY01-C51696_1.pep
SKLTDLKIEGMQEXEAVTSEMVRLIETATVPILAVDVDGLVNGWNMKIAELTGLPVDKAIGRHLLTLLEDSSVETVKKMLSLALQGKEEKNGHFEIKTHGLRSEVGPVSLVVNACANRDLHENVVGVCFVAQDITGQKIVMDKFTRIEGDFQTILPNSNPVVSTIF

SEQ ID NO: 70835 - protein, 192 aa, Gossypium hirsutum
  unsure (1)..(192): unsure at all Xaa locations
  Clone ID: GOSHI-09MAY01-C51676_1.pep
NKQREEERRRKEEEKAXKQAAAKASSHSQKSAGADDEDMDPTQFHENRLKFLAAQKAEGKNPYPHKFFASMSIIEYIDKYGSLANGEHIEDISVSLAGRIMSKRSSSSKLFFYDLHGDGAKVQVMADASKSGLDEAEFAKFHSSVKRGDIVGVTGFPGKTKRGELSIFPKSFTAVSHCLHMMPTQKAGPDAS

SEQ ID NO: 70836 - protein, 175 aa, Gossypium hirsutum
  unsure (1)..(175): unsure at all Xaa locations
  Clone ID: AI729311.1.pep
MEGSVEETAKGVSDLAVDSASPAEIQSKNARKKELKNKQREEERRRKEEEKAAKQAAAKASSHCQKSAGADDEDMDPTQFHENRLKFLAAQKAEGKNPYPHKFFASMSIIEYINKYGSLANGEHIEDVVXSLAGRIMSKRSSSSKLFFYDLHGDGAKVQVMADARQYLAWYETSK

SEQ ID NO: 70837 - protein, 173 aa, Gossypium hirsutum
  Clone ID: GOSHI-09MAY01-C51616_1.pep
EYLKGDASEITTLIQADYHEQILEETLKQVRLHKQVLEEKYTSPGPPPTTKVKLPPNAGDVNGFVTASSSSISNHFLNFLDSNGLLPPGCASIIDEAPAIAEILPPHSTDLLNEEEINVEEHLSLTRGLENHNKVQHPEFGQVNDVMFPWTQLYPTGSTWGPNKLVRGWAFEA

SEQ ID NO: 70838 - protein, 176 aa, Gossypium hirsutum
  Clone ID: GOSHI-09MAY01-C51636_1.pep
MENFSSKPTIVILLLLTTVSTADLTSKELDAAILVLQSRGYTLFPNAISTSDLQVRLLSSQNSSIFTLFAPPDSLLFSLDLLSSARLYTFSLFLHVSPHFLSSSDLLALPRPAFIDTLLPNRRLFVEHAMSTRNGTALLTVSVDGVVVSVPDLFLGSNIVVHGLDGILVGKIRVLG

SEQ ID NO: 70839 - protein, 347 aa, Gossypium hirsutum
  Clone ID: GOSHI-09MAY01-C51146_1.pep
MTVMFSGLVSVAESAVGVNWGTISFHKLKPSTVVDLVGDNKIQKVKLFEADPLVLRALMGSGIQVMVGIPNEMLAALSSSPAAADLWVRQNVSAYVGKGGADIRFIAVGNEPFLTSYNGQFQSYVIPAMANLQQSLVRANLAGYIKLVVPCNADAYEGNVPSQGAFRSELTQIMTQLVSFLNSNGSPFVVNIYPFLSLYGNSEFPQDYAFFEGTTHPVIDGANTYTNAFDGNYDTLIAALSKMGYGQMPIVIGEVGWPTDGAVGANLTAAEVFNQGLIKHVLSNKGTPLRPAVPPMDVYLFSLLDEGAKSTLPGNFERHWGIFSFDGQAKYALDLGLGNKRLKTPRM

SEQ ID NO: 70840 - protein, 152 aa, Gossypium hirsutum
  unsure (1)..(152): unsure at all Xaa locations
  Clone ID: GOSHI-09MAY01-C51246_1.pep
MVDDFMVCVDKIIASAACFESSSVSPGQPISTTAAGNTNVVVPMTKASGDDDSGKEGEGKTGYSSKKVKEVVECRICQEEDDLLSLEAPCACSGXLRLAHRRGFQRWCHKEGDLTXEICNQVFSPNYSLSPTRTLPMFLQLTLSKHGARILI

SEQ ID NO: 70841 - protein, 93 aa, Gossypium hirsutum
  Clone ID: GOSHI-09MAY01-C52596_1.pep
IEKKTVKEQRKIKPNPTFKNIFLYIFFLISVQKKFCSPLQRSIGLYMVESKKQALENFPPFTFLSYFLPLSIVCCMCMENVRCAGYWTCEQER

SEQ ID NO: 70842 - protein, 71 aa, Gossypium hirsutum
  Clone ID: GOSHI-09MAY01-C52726_1.pep
HPSMILCTVSVVAMDFCHCFTVNERMPLILSHYLTSHNQTKHETIKTRKNINPTRSRPNPPDCHKNGSSPN

SEQ ID NO: 70843 - protein, 329 aa, Gossypium hirsutum
  unsure (1)..(329): unsure at all Xaa locations
  Clone ID: GOSHI-09MAY01-C52636_1.pep
MQACNGAAMMGSLLQPIWVKGNRPIFPLKGYGLKFNSVKPCRAQLESSLVTGKPPSSDSFPVVETRFVDHGLSEADPEVRAIINKEKERQFKSLELIASENFTSRAVMEAVGSCLTNKYSEGLPGKRYYGGNEYIDELEILCQKWALAASHLDENKWGVNVQPLSGSPAYFXVYTAILNPHDRIMGLDLPHGGHLSHGFMTPKRRVSGTSIYFESMPYRLDESTGLVDYDMLEKTATLFRPKLIICGASAYPRDFDYPCMRKIADAVGAFLMMDMAHISGLVAASVVADPLEYCDIVTTPPHKSLRGPRGGWSLEGARFWDIGSHKKRF

SEQ ID NO: 70844 - protein, 157 aa, Gossypium hirsutum
  unsure (1)..(157): unsure at all Xaa locations
  Clone ID: AI055615.1.pep
MQACNGAAMMGSLLQPIWVKGNRPIFPLKGYGLKFNSVKPCRAQLESSLVTGKPPSSDSFPVVETRFVDHGLSEADPEVRAIINKEKERQXKNLELIALENFTSRAVIDASGSCLTNKYSERLTCKKYYGGNEYIDELEILCQRSVGSIYLDEINGA

SEQ ID NO: 70845 - protein, 75 aa, Gossypium hirsutum
  Clone ID: LIB3146-057-Q1-K1-D3.pep
LLFSSIFSPPICCFLLLFPPLLLPNCFPNISSDCLPKPWLFVRNTSGKSKCRLVMELAISTQFVFQMFLKIFLLL

SEQ ID NO: 70846 - protein, 89 aa, Gossypium hirsutum
  Clone ID: LIB3146-040-Q1-K1-C1.pep
LTINRHITIDCIKTSSRTVRDRRASYIVQIPFKHTCATFLVRYVSFPGINSKVTVPAKEEQRTGKSFESENVKKKGIQLQKTNSRGKNV

SEQ ID NO: 70847 - protein, 76 aa, Gossypium hirsutum
  Clone ID: LIB3146-040-Q1-K1-C2.pep
TGTDVPISATGFSELNTLLFHILPYKALSCSLLLFRTHSYFGVDAWKAYISHKESSTSMFKWNLDYIGGSSIPHSP

SEQ ID NO: 70848 - protein, 144 aa, Gossypium hirsutum
  Clone ID: GOSHI-09MAY01-C52106_1.pep
MKRRTPDSQATVSDQKLKKIKEDEEPEDTKSGLMNLDENLLYEVFKHVDARTLARASCVSRLWRQTAKDERLWELICTRHWANIGCGTQQLRSVVLPLGGFRQLHSRYLWTFSKPQAASASAWTPPKIINSKPAARWGKDEANV

SEQ ID NO: 70849 - protein, 257 aa, Gossypium hirsutum
  unsure (1)..(257): unsure at all Xaa locations
  Clone ID: GOSHI-09MAY01-C52086_1.pep
SSKHTDGLVNMXIENGARRGNMLVAHTGEGQLMSWDEHIMLIGHTVNCFGGSVKVIGNTGSDSTREAIHATEQGFAVGMHAALHINPYYGKTSLEGLVSHFNSVLPMGPTIIYNVPSRTGQDIPPRVVNTVAQSPSLAGIKECVGNDRIEQYTGNGIVXWSGNDDQCHDARWSHGATGVISVTXNLVPGLMHKLMFNGKNASLNAKLLPLIQWLFEEPNPIGLNTALAQLGVVRPVFRLPYVPLPLEKKVIFVELVT

SEQ ID NO: 70850 - protein, 135 aa, Gossypium hirsutum
  Clone ID: uC-gsflnu33B136a01b1.pep
VFFFFRIRVVVKKGDDRCHDARWSHGATGVIAATSNLVPGLMHELMFNGKNASLNAKLLPLIQWLFEEPNPIGLNTALAQLGVVRPVFRLPYAPLPLEKRVIFVELVNEIGRENFVGEKDVQVLDDNDFILAGRY

SEQ ID NO: 70851 - protein, 137 aa, Gossypium hirsutum
  Clone ID: LIB3146-039-Q1-K1-A3.pep
TGWDPRVRGIVVWSGNDDQCHDARWSHGATGVISVTSNLVPGLMHELMFNGKNASLNAKLLPLIQWLFEEPNPIGLNTALAQLGVVRPVFKLPYVPLPLEKRVIFVELVNEIGRENFAGEKDVQVLDDNDFILVGRY

SEQ ID NO: 70852 - protein, 92 aa, Gossypium hirsutum
  Clone ID: GOSHI-09MAY01-C52316_1.pep
MKRSLGSSDSLGALMSICPTTDEHSPRNNHVYSREFQSMLDGLDEEGCLEESGHVAEKKRRLSVDQVKALEKNFEVENKLEPERKVKLAQEL

SEQ ID NO: 70853 - protein, 94 aa, Gossypium hirsutum
  Clone ID: GOSHI-09MAY01-C52296_1.pep
MVLDGIVSSPLRRSASTRRQSSRDEFGSWSTLVERHRFLLTALGLLAFLCTIYLYFAVTLGATDTCSGLKGTEKATCNLQHVSSTLSHGKLKFL

SEQ ID NO: 70854 - protein, 71 aa, Gossypium hirsutum
  Clone ID: LIB3146-041-Q1-K1-H11.pep
PRVRFDLPALIFSSDLSFNKMIDFTIGNLRSRNRKDLLRSVTIRGGLGFYVHLLETIEAYKGFQITLVEDF

SEQ ID NO: 70855 - protein, 112 aa, Gossypium hirsutum
  Clone ID: GOSHI-09MAY01-C52256_1.pep
SGMCVKVVCDHLGLGVKTGMPYVWRNDRGDAIASLRKEWEGVKLMEEVVPFFQSVRLSREATTTEDCVAEVANVVKEQLESKDPMFARAAKAMVDWVKLWKSVGSSTSSPGA

SEQ ID NO: 70856 - protein, 57 aa, Gossypium hirsutum
  Clone ID: uC-gsronu33B048h02b1.pep
LAGKTGRPYVWRNDRGDAIASLRKEWEGVKLIGEVIRGFILGGPRLRPLPFKAIVFY

SEQ ID NO: 70857 - protein, 264 aa, Gossypium hirsutum
  unsure (1)..(264): unsure at all Xaa locations
  Clone ID: GOSHI-09MAY01-C53816_1.pep
PDRKVIFVTCEDEEKFLIYKSLKXKSVRLEASSSGVSISPSSLDDRDADSVAKNLSTNGSSAVDMRGPPDLTGLSPKASYSNKGSSSAGLILLADADAQTSGAKAAACGRLASLAAVSDKAYSDLGVPASFRVPAGVVIPFGSMEWALEQNKSMETFMSLREKIETARLEDGELDNLCHQLQQLVSSVQPPQDIIDSIMRVFPGNVRLIVRSSANVEDLAGMSAAGLYESIPNVSPSNPTVFASAVSHVWASLYTRRAVLSRRA

SEQ ID NO: 70858 - protein, 85 aa, Gossypium hirsutum
  Clone ID: GOSHI-09MAY01-C53426_1.pep
MARAGGITNAVNVGIAVQADWENREFISHISLNVRRLFEFLLQFEATTKSKLASLNEKLDTLERRLELLEVQVGTASANPSLFST

SEQ ID NO: 70859 - protein, 214 aa, Gossypium hirsutum
  unsure (1)..(214): unsure at all Xaa locations
  Clone ID: GOSHI-09MAY01-C53796_1.pep
PRPLGIYNSPLSXEDEIISIINHAFAKGITFFDTADVYGAHTNEVLVGKALKQLXPREKIQLATKFGIAGMAPTGMIVKGSPEHVRACCEASXLKRLDVDYIDLYYQHRVDTSVPIEETMGELKKLVEEGKIKYIGLSESSPDTIRRAHAVHPITAVQMEWSLWTRDIEDEIVPLCRDLGIGIVPYSPLGRGFFGGRAVVDSLSAGTFLASHPG

SEQ ID NO: 70860 - protein, 119 aa, Gossypium hirsutum
  Clone ID: GOSHI-09MAY01-C53706_1.pep
FLSVMTVLFVVCGLTISDLFAAILAFLPTGWAILLIGQAMRPVLKSLKFWDSIKELARGYEYIMGLILFMPIAILSWFPFVSEFQTRLLLNQAFSRGLQISMILAGRKEKDITSPVKYA

SEQ ID NO: 70861 - protein, 102 aa, Gossypium hirsutum
  Clone ID: GOSHI-09MAY01-C53186_1.pep
RVVSLFFNNFMVMWCKKLCKIGEGLLTSTCLTDVDISECPNLRSAPFNGQSQSLLSLRLRNCEELLEIEGVIICKHKIGNVRDCKLSYYDFNFQLIWVSLLF

SEQ ID NO: 70862 - protein, 107 aa, Gossypium hirsutum
  Clone ID: GOSHI-09MAY01-C53086_1.pep
ILLPHPILQQLDQSFIPIRCFTAVVGHHVQWPKLKNLYFYRYKNEIMANMEPLELTWARGDVGEADVGARTWRTCVGRLAAAATEKGVRVFLFFFLFRVKYFGLGLI

SEQ ID NO: 70863 - protein, 238 aa, Gossypium hirsutum
  Clone ID: GOSHI-09MAY01-C53076_1.pep
GVLEFIDYAYTVFGFTYDLKLSTRPEKYLGDLETWNRAEAALTEALNQSGKPWQINEGDGAFYGPKIDISVSDALNRKFQCATLQLDFQLPERFKLEYSAEDEAKREKPVMIHRAILGSVERMFAILLEHYKGKWPFWLSPRQAIVCPVSEKSQQYAMQVRDWIHEAGYYVDVDMTDRKIQKKIREAQLAQYNFILVVGEEEMNTKKVSVRVRDSGDFSGMSIEDLLNHFQAETEAFH

SEQ ID NO: 70864 - protein, 106 aa, Gossypium hirsutum
  Clone ID: uC-gsronu33b023d04b1.pep
YAFEETYQDGGINGERMFAILLEHYKGKWPFWLSPRQAIVCPVSEKSQQYAMQVRDWIHEAGYYVDVDMTDRKIQKKIREAQLAQYNFILVVGEEEMNTNKVSVPV

SEQ ID NO: 70865 - protein, 222 aa, Gossypium hirsutum
  Clone ID: GOSHI-09MAY01-C53306_1.pep
MKRSASELALEEFSRNTMSTTTIPAPSAFPDFALHPPIAHLSNSFHFTEFSGDAAELSPQTHVLLSQTLTSHLDSQSSFCGNESWGSTVCEGNNSNYRSRENEVRGATTLSSDHDPSDDDDDDVEEEDDDDDDDDEEGGEGEGAVEEADAGQSEQSLDPSHLKRLRRKLSNRESARRSRKRKQEQLAELEFQAEQLRGENDSLCKQLTNAHQLIRDVGTNNR

SEQ ID NO: 70866 - protein, 279 aa, Gossypium hirsutum
  Clone ID: GOSHI-09MAY01-C53276_1.pep
RWLDFGGYENKMNKTAKALDEISGGWLDDHRKGGHWDENKKEKDFLDVMNSVLKGASLAGYDADTINKATSLNMILAGSDTTTVTLIWGLSLMLNKPHVLKKAQEELDTHIGRDRFVNETDIGKLVYIQAIVKETLRMYPPAPLSAPRELSESCSIGGYDIPKGTRLIINLHKIQRDPKKWPEPSEFKPERFLTTHKDVDVRGQHFELMPFGSGRRSCPGTSFALHMLYLTMSNFLHAFDFSTPSNGLIDLTGTVGLTNIKSTPLEALVSPRLAPELYN

SEQ ID NO: 70867 - protein, 101 aa, Gossypium hirsutum
  Clone ID: LIB3149-013-Q1-K1-F6.pep
MIITEKAWEGIGEGWLDDHIKGGHWDENKMEKDFMDVMNSVLKGASLACYDADTINKATSLNIILAGSDTTTVTLIWGLSLMLNKPYVLKKAQKKLDTHIG

SEQ ID NO: 70868 - protein, 80 aa, Gossypium hirsutum
  Clone ID: GOSHI-09MAY01-C48466_1.pep
KQYAGDILQKTPLMEKDTRREKLIRGFALLGRIIIGRGVNNSSNHGSRKDYVFGKSSQSCDQRLSLQQHHFFFSVCFWVV

SEQ ID NO: 70869 - protein, 63 aa, Gossypium hirsutum
  Clone ID: LIB3135-045-Q1-K1-H6.pep
FLPINLFNPKTNTKKKRRLLNGQPPLTILAAFYKYVVLPESMVDAIIYSPPNYDSPKKGKSPN

SEQ ID NO: 70870 - protein, 214 aa, Gossypium hirsutum
  Clone ID: GOSHI-09MAY01-C48086_1.pep
KKQDFNGRLGGEGGTFYFGRPETVNASLAWAVLVLAIHRDWQDKARREVMEIFGSQYPHSEGLAELKIMSMIINETLRLYTPLNGMVRRARRQVQVGKLVLPAEVDVLIPNMALHHDPELWGDDAHVFKPERFEEGIAKATKYNAAAFIPFGMGPRACVGMTFAINETKTALSMILQRYTISLSPAYVHSPAPRITVQPQHGIQVMLNSLSNDA

SEQ ID NO: 70871 - protein, 112 aa, Gossypium hirsutum
  Clone ID: GOSHI-09MAY01-C48356_1.pep
FDAKTKAGKTPLDLAVTEEIRSLLKEREQAPEEVNTGGKRKVEQPDSSRPPLDKPENSNDEATVAEHDGQEGESVKRKGDDNKPEGVSEPKKPRVVLKHLSEDDTQEDDDTP

SEQ ID NO: 70872 - protein, 74 aa, Gossypium hirsutum
  Clone ID: GOSHI-09MAY01-C48346_2.pep
MTTKRGRSLTTLATVRAYGVRGVLNVGVWRLVAARVSAVLGQLGPIIGFSLAQVLLGSIVFNLGCVNNFGLVLF

SEQ ID NO: 70873 - protein, 129 aa, Gossypium hirsutum
  Clone ID: GOSHI-09MAY01-C48346_1.pep
RRKAPKKSRLSKTEHNWTFSLYSVPVTRQRAKRDNCTSPNIPGPKPNKTWAKLNPITGPNWPKTAKTLATISSATCPTFGSLHTVPRSTLRARHTLVPLRDSSESVLISSSSGRTWEGPGTAEENCCGE

SEQ ID NO: 70874 - protein, 95 aa, Gossypium hirsutum
  Clone ID: GOSHI-09MAY01-C48376_1.pep
GGDVHVHACSELKRDYLVSSFLFFFSMFHLPSNPVVKKSSVFFFFWFMYKLYVCFLLYGSCRVFVCIHNWSMTLLSLKLQTMACLFVVLSFSVLM

SEQ ID NO: 70875 - protein, 138 aa, Gossypium hirsutum
  Clone ID: GOSHI-09MAY01-C48366_2.pep
MFYGAMVWDPWLIGARIVCLQCLYYLTLGVFLSFLVGTHVSHMSLVYFFDFATITSSTVVGRCVIASFLFSSVAGAGYMIYLIERANKCLDFSATLYIIHLFICLVYGGWPSSGTWWVVNGTGVAVMALLGEYLCIKR

SEQ ID NO: 70876 - protein, 95 aa, Gossypium hirsutum
  Clone ID: GOSHI-09MAY01-C48366_1.pep
QNSRSTQRPILTSILLYLDLCSAGYMLYLIERAKKCLDFSATLYIIHLFICIMYGGWPSSITWWVVNGTGVAVMALLGEYLCIRRELREIPITRY

SEQ ID NO: 70877 - protein, 98 aa, Gossypium hirsutum
  unsure (1)..(98): unsure at all Xaa locations
  Clone ID: GOSHI-09MAY01-C48306_1.pep
PGRPTRAECIKILKIFFLSTPIENGEVILFXIILKEYRNRVFYDITFVMDLVMIAHTNGKERTYAECRKILGGGGFSHYKIINIPALVSIIEAYPDAQ

SEQ ID NO: 70878 - protein, 174 aa, Gossypium hirsutum
  Clone ID: GOSHI-09MAY01-C48266_1.pep
ACFATSSCEADVPSIPLGDSAFQNPLYGCMQDSSELQNRGQVDPPTPTPTFVKVYKSGSVGRSLDISRFSSYHELREELAQMFGIEGKLEDPLRSGWQLVFVDRENDILLLGDDPWEAFVNNVWYIKILSPEDVQKMGEQRAEPFSPTTPGQRMNSTGTDTGTGKLSSVGSLEY

SEQ ID NO: 70879 - protein, 151 aa, Gossypium hirsutum
  unsure (1)..(151): unsure at all Xaa locations
  Clone ID: uC-gsflnu33B058d10b1.pep
RPRVRPRVRPRVRSIPLGDSSFQNPLYGCMQDSSELQNRGQVDPPTPTPTFVKVYKSGSVGRSLDISRFSSYHELREELAQMFGIEGKXEDPLRSGWQLVFVDRENDILLLGDDPWEAFVNNVWYIKILSPEDVPKMGEQRAEPFSPTTSG

SEQ ID NO: 70880 - protein, 113 aa, Gossypium hirsutum
  Clone ID: LIB3135-043-P1-K1-B11.pep
GLLQNTGENDPTTRTFVEGYKSGSVGRSLDITRFSNYAELREELGQMFGIKGQLDDPDRSGWQLVFVDRENDVLLLGDDPWESFVNSVWYIKILSPEDVHKMGKPGNDPRYLS

SEQ ID NO: 70881 - protein, 115 aa, Gossypium hirsutum
  Clone ID: GOSHI-09MAY01-C49586_1.pep
GLVYNGNNQDEGDKKGEGASRFSTALWSFVDSIPTTPASASESPLVNRAFERMSSFSRLRMNVRNTNALTVNGGTTARRRSRSKGFFFFSILGALCAILWFLIGMVRVVRSSISS

SEQ ID NO: 70882 - protein, 118 aa, Gossypium hirsutum
  Clone ID: GOSHI-09MAY01-C49566_1.pep
MSSTGGSTKGGRGKPNASKSVSRSHNAGLQFPVGRIARFLKAGKYAERVGAGAPVYLSAVLEYLAAEVLELAGNAARDNKKTRIVPRHIQLAVRNDEELSKLLGSVTIANGGVLPNIH

SEQ ID NO: 70883 - protein, 204 aa, Gossypium hirsutum
  unsure (1)..(204): unsure at all Xaa locations
  Clone ID: GOSHI-09MAY01-C49716_1.pep
RRSLKIEGELYGGIPPGVEARLANLTLDTDDLKKFSEMRNRADMPSTFQXKQPLLSSAEYLPAFFNMLNARRAIVPAANGHCSPRALARYYAALADCGVVPTPHSSASNPPLGSHPHIPKFPSKKTDEKQKGKVDGGVKNERSDGRQNIYIRIEEDDDDDEEKCSKSSKDTSKGGGLENKKGKIFSNPKVHEAFMGRGEYENMC

SEQ ID NO: 70884 - protein, 127 aa, Gossypium hirsutum
  Clone ID: GOSHI-09MAY01-C49616_1.pep
HRLPLAQFHRVYQFRVQKYQKIQWDFHQQQLLQLPPMFSLAYLHPTLNHPKSQHPRRSFRRRHHWSAHPSRFPLHSTYPTMGSSSFAGLETTIGTMLQFPNTNVPYRNGSKKLPNWCPRFQTSMLQV

SEQ ID NO: 70885 - protein, 76 aa, Gossypium hirsutum
  Clone ID: GOSHI-09MAY01-C44486_1.pep
GAIDLLEKMLIFDPHRRITVDGALCHPYLAPLHDINEEPVCPRPFSFDFEQPSFTEENIKELIYRESVKFNPDPMY

SEQ ID NO: 70886 - protein, 135 aa, Gossypium hirsutum
  Clone ID: GOSHI-09MAY01-C44446_1.pep
IRDAVCCRFHLLSEAQDGAEVLMSEIRISAEKGGEFFIDTDRLMRQAPTPIPSPQSSGDFSALSPISGGFVMSCRVQGEGKNSKPLVQLAMRHVTCIEDAAIFMALAAAVDLSIEACKPFRRKFRRGSRGSRHSL

SEQ ID NO: 70887 - protein, 113 aa, Gossypium hirsutum
  Clone ID: GOSHI-09MAY01-C44406_1.pep
VLRNEPSNEKCDVYSFGIILWELATLRLPWSGMNPMQVVGAVGFQNRRLDIPKELDPLVARIIWQCWQTDPSLRPSFADLTVALKPLQRLVIPLHQDQSSSPMPQGISVNSTP

SEQ ID NO: 70888 - protein, 173 aa, Gossypium hirsutum
  Clone ID: LIB3829-029-Q6-K6-H8.pep
ILLVPKASTGLRKLTIFLSQASKSDQTPGLITVNRPGRHHEPGGVATTNGGSGSGSVGVQIHQSRRLPDFLQSVNLKYVKLGYHYLISNLLTLCFIPLIAVISIEVSQMNLDDLRQLWVHLQYNLASIIICSAILVFGLTVYIMTRPRPVYLVNYSCYRAPDHLKAPYGRFMD

SEQ ID NO: 70889 - protein, 74 aa, Gossypium hirsutum
  Clone ID: LIB3148-030-Q1-K1-G9.pep
RFEGNPGAFGIDGSERRLSRFPSHRSWWLRPLGSWCRPGLLTVMSPRVWSDFDGWDKKIVNFLRPVCVFGTSKI

SEQ ID NO: 70890 - protein, 162 aa, Gossypium hirsutum
  unsure (1)..(162): unsure at all Xaa locations
  Clone ID: GOSHI-09MAY01-C44126_1.pep
PRVRSLGHKSSGNPAAILSSLMNKREKLQDEXRNIEKQVFELETNYLQDSSHFGHVLKGFEGFLSSSKNTANLKRSRKFQPEDRLFSLSSVTSPVADELGVRQDDGRSDFGSARSKGGGLAANGQGKPKKGRTASSARDGKRTRPSSEQDFDDEDDPDMSLR

SEQ ID NO: 70891 - protein, 81 aa, Gossypium hirsutum
  Clone ID: GOSHI-09MAY01-C44366_1.pep
TFFLFLKELDPFKPIVHIYVKLSKKKIEIKSIDRHISYEALSGSCVASQNKAIIHKPFSISTPLIVIVEFTATQSYNYGWL

SEQ ID NO: 70892 - protein, 86 aa, Gossypium hirsutum
  Clone ID: LIB3149-013-Q1-K1-A9.pep
IWVFDANLLHRKGIFKNLGCSNTFLFVVAESGETPMVSICIPKSLPFFLLLYYRVTNIMLNPSYPNQIINMLDYYVQPTMVEVLVD

SEQ ID NO: 70893 - protein, 184 aa, Gossypium hirsutum
  Clone ID: GOSHI-09MAY01-C44206_1.pep
MAAPMLWLLSIFSILSIAACIDDKCAACNAVAAELEIQLSKEKPRNHLDMRHRLDSKGQRQGKVIDYRMSELRAVELLDGLCEKMQDYTLEKLDSSRREWIKVHNWDILTIDKQEAKAYSKDISSYCGRLLEETEDELTELIKKGSVKQGDVSKVLCEELSEHCSGASDTTPIMMNYNYCGSAG

SEQ ID NO: 70894 - protein, 131 aa, Gossypium hirsutum
  Clone ID: GOSHI-09MAY01-C45996_1.pep
HPCQIMADALTIIEHIGRLEGTKVVYVGDGNNIVHSWLLLASVVPFHFVCACPKGFEPDKETVEKAQKAGISKIEITNDPKEAVKGADVVYSDVWASMGQKEEAAHRRQVFQGFQVDETLMKIAAQKLISC

SEQ ID NO: 70895 - protein, 116 aa, Gossypium hirsutum
  Clone ID: GOSHI-09MAY01-C45986_1.pep
MRISQMDAFQWHKIAAVSGIAALGLGTYGFHIFKPENPVYKEVWQIASTYHLFHTAALLSAPITKRPHIFGGLLTAGILSFSGSCYTAAYLEDRKYSALAPFGGLAFVAGWASLLF

SEQ ID NO: 70896 - protein, 45 aa, Gossypium hirsutum
  Clone ID: GOSHI-09MAY01-C45966_1.pep
AFGGEKATGGGREAGSDSWKQYMRRSTCTINYGSELPLAQGINFG

SEQ ID NO: 70897 - protein, 435 aa, Gossypium hirsutum
  unsure (1)..(435): unsure at all Xaa locations
  Clone ID: GOSHI-09MAY01-C45916_1.pep
MDFHRNPSTNSASSSTSSTSSAAAHHQPPPSSATDNDPMHSWWESVSKQRSRILSLAALLPSGGVAVSSLADSDRPAVSLLSSPFAYSLISSALSSPKSGSGSDRLCQWLYETFQSSDPHLRLLVLSFLPLLSGIYLSRVHSSDSSSLPSLAGFEAVLLAVYSSEAKSRAGKPLLVQIPDLSQPSLYHAPRNKPVDDRSRQSVGVLSPPLEPHLAVKSTKRAIIVGTALDCYYKQVSQMPAWSKLDFCKFAAAWAGQDCPCRTKLDRDEDNHHENGNVNGNGHIRLLREDSGFSNGTRSGDGDEVDYEDDVIKEVVVVEDEXLGINEENLETKGVRIPLPWELLRPVVTILGHCLFGPLNSQDVKDSASVAVRCLYARASHDLAPQAILALQSLIRLDXNARAAATTAATVTTNASSNAXTPSKAKKPEILLVSK

SEQ ID NO: 70898 - protein, 87 aa, Gossypium hirsutum
  Clone ID: GOSHI-09MAY01-C45526_1.pep
SQDQPTCADATTNGPDEVAGTEQTEEDASAVDVKERLKKVASMKKKKSSKEMDAAAKAAAQEAAARSARLAAAKKKEKNHYNQQPVR

SEQ ID NO: 70899 - protein, 141 aa, Gossypium hirsutum
  unsure (1)..(141): unsure at all Xaa locations
  Clone ID: GOSHI-09MAY01-C45436_1.pep
RDIGEFGYIAPESSSTTVASMKSDVYGFGVVLLELVTRQKPLEVNAGEEGFKGGLVDWVNHSLXTGRIKDAIDKDLYGKGHDEQIVQVLKIGCNCVVAHPKKRWSMFKVSQSLRTMAEENGLSEEFDDFPLIFTDQDDESI

SEQ ID NO: 70900 - protein, 66 aa, Gossypium hirsutum
  Clone ID: LIB3148-039-Q1-K1-F10.pep
IFSRSKNLRLFNIFIDIIQLFITDINKKQLTLLPIYIDSSSWSVKIRGKSSNSSDKPFSSAMVRND

SEQ ID NO: 70901 - protein, 314 aa, Gossypium hirsutum
  Clone ID: GOSHI-09MAY01-C45726_1.pep
MASLSIRFLALSLSVTALFTCSSGHGHTYDPYNDKARMIHHGGPMLNGTVKLAIMWYGNCGKEIKNTMRNFIKSLTVPAKAKLQPQVTCWWKVVESYQSMIPDAKPGKSPKIKVKVVKQSGEKTYKYGKVLTLQGHIPELIEHVTKGDTELLPVIVAARDVSIQGICNGQCADHLLTEDPHPRPYIIVGNPETECPGECGWPFFPADMGPKGPVLKPPSGNMAADAMVVAFAGALVDAITNPMNDALYHSNKAKELGPATVCKGIFGRGAAPGNPGEVLTDPKTGGNFNAYGNKNKKFLLPAIWNPKTKSCWTV

SEQ ID NO: 70902 - protein, 239 aa, Gossypium hirsutum
  unsure (1)..(239): unsure at all Xaa locations
  Clone ID: GOSHI-09MAY01-C45116_1.pep
DVFCPTSKDGVKTILIPPNELLRFSHKVPSFVLTGKERRGCQXGSFELDPASLPEEEEGDGRDPSVSEMEDPMAGSNDPDPSASAPKSFEIPESEFYDFDADKTEEKFRAGQIWALYGDEDGLPKYYGEIKKVESSPVFKVHVRWLFSCPLETTTQWQDSDMPTCCGRFGIRRGSQTYTSTDSFSHLLKAEPTDTKGKYNIIPRKGEVWGLYRNWTPNIKCSDLENWEYDIVQVLEETY

SEQ ID NO: 70903 - protein, 127 aa, Gossypium hirsutum
  Clone ID: GOSHI-09MAY01-C45056_1.pep
GAPGKRVPRLLKLIRLDSHLAGVNNKFRNAQFSWVTENGKQERHLVATVGKFSVIWNFQQVKNGSHECYHNQEGLKSCYCYKIVLKDDSIVDSRFMHDKFAVSDSPEAPLVIATPLKVSSFSISSRR

SEQ ID NO: 70904 - protein, 135 aa, Gossypium hirsutum
  Clone ID: GOSHI-09MAY01-C45066_1.pep
MYEKSGADLDSRSEFAAKAPSMSRTSIAYKFSSDYILREQYKNPWDEMRMGKLLEDLDALAGTISYKHCRNGDGATRPILLVTASVDTMVLKKPIRVDFDLKISGAGTWVGRSSMEFQLEVTQSTPDSPDPSDSV

SEQ ID NO: 70905 - protein, 223 aa, Gossypium hirsutum
  unsure (1)..(223): unsure at all Xaa locations
  Clone ID: GOSHI-09MAY01-C45036_1.pep
PTRSGKTVALVGESGSGKSTVMSLLQRFYDPNSGRISLDGVDIQKLQLKWLRQQMGLVSQEPVLFNDTIRANIAYGKGGNATEAEILAASELANAHKFISSLQQGYDTVAGERGVQMSGGQKQRIAIARAIGKSPQILLLDEATSALDAESERVVQAALDRVXVNRTTVVVAHRLSTIKNADVIAVVKKGAAVEKGKHDSLINXIKDGFYASLGALHMSASTA

SEQ ID NO: 70906 - protein, 146 aa, Gossypium hirsutum
  Clone ID: GOSHI-09MAY01-C45346_1.pep
LLSSWCGWHTDHGSLTGLTCAMFKRNDVEISCPDSAAGLYIRTRSGEIVKATFGENEIAYQIGETTEILSQGYLCATPHCVRAPKGKEASGVGRSTFALFMQPDWDEKLKFSEDVYIHKELIPSNDSLTFGEYSETLLDKYYHMKT

SEQ ID NO: 70907 - protein, 191 aa, Gossypium hirsutum
  Clone ID: GOSHI-09MAY01-C45226_1.pep
SLVIPLSKYVGKAANLYDRGYQLCGSAYVISKHISNTWLWDRVRVSGGAYGGFCNFDTHSGVFTFLSYRDPNLLQTLDIYDGTGRFLRELKMDDDTLTKAIIGTIGDVDAYQLPDAKGYSSLVRYLLGITEEERQRRREEILSTSLKDFKEFADAIDAVKDNGVAVAVASPDDVETANKERLNFFQVKKAL

SEQ ID NO: 70908 - protein, 186 aa, Gossypium hirsutum
  unsure (1)..(186): unsure at all Xaa locations
  Clone ID: LIB3543-037-Q1-K1-H5.pep
LLVGRTLXXTEKFVGKFLDLLPSKSLVERASWNVRLPSNNEAIVIPDSXITVVGGRGDLYDRGYQLSGSAYVISKHVSNTWLWDRVRVSGGAYGGFCNFDTHSGVFTFLSYRDPNLSNSLXYMMXTGDFLRELKMDDDTLTKAIIGTIGDVDAYQLPDAKGYSSLVRYLLGISEEERQRRREELLS

SEQ ID NO: 70909 - protein, 185 aa, Gossypium hirsutum
  Clone ID: GOSHI-09MAY01-C46876_1.pep
MIEVMSESPSPFAFDGTTLESIDDLLSILPGGVDPALQQICGNTDHPVECIIATMPFLDENAPIEPLSILKAGIKAMDNQTKNALAEVTKLSMDPTTPKTIVPILQTCIDVYNSILNSDQKSLEAISNHNLVQLSTELGTNVENVLGCDNAFKQAKLESPMKDMDAMLANIISNTLTIGVDMVHF

SEQ ID NO: 70910 - protein, 110 aa, Gossypium hirsutum
  Clone ID: GOSHI-09MAY01-C46806_1.pep
HASAEEKKLGQKFLVDVDAWMDLRKAGESDNLSDTLSYTDINRIVKEVVEGPSHDLLESVAQMIASKTFTNHSQISAVRVKVGKPHVAVHGCLDYLGVEIIRYRTIDAPN

SEQ ID NO: 70911 - protein, 89 aa, Gossypium hirsutum
  Clone ID: GOSHI-09MAY01-C46576_1.pep
MPSLQTALPPELANNVIRLYRECLRRAKYIGHKQHNTALVVDMVRQQFKKHMHETDPEKIQKLKDDAARGLINHILYESEKLSGTKIQQ

SEQ ID NO: 70912 - protein, 101 aa, Gossypium hirsutum
  Clone ID: LIB3146-009-Q1-K1-H3.pep
FLKLKENVNDEVQGEILGVIKGIKDGVSGIQQITCGENFSPARAKGFSIASVAVFNGVNEMEEIEGNEEYVNLQKQKVRDYLDGVIVVDYVVPSSSSSSNL

SEQ ID NO: 70913 - protein, 53 aa, Gossypium hirsutum
  Clone ID: LIB3148-058-Q1-K1-C9.pep
EMEGSEENEEYVNLQKQKVRDYLDGVIVVDYVVPSSSSSSSSSSSSSSSSSNL

SEQ ID NO: 70914 - protein, 78 aa, Gossypium hirsutum
  Clone ID: LIB3828-011-Q1-N6-C4.pep
NARLQGESGDEIISRLKRDLLPTMLNGIMYWPFCDFITFRFIPVHLQPLVSNSFSYLWTVYMTYMASLEKPVSILPAE

SEQ ID NO: 70915 - protein, 40 aa, Gossypium hirsutum
  Clone ID: LIB3148-058-Q1-K1-C1.pep
KGYEAFCKDSFVVINFGEYYSTKILFQKINHKRETKRNKF

SEQ ID NO: 70916 - protein, 71 aa, Gossypium hirsutum
  Clone ID: LIB3149-034-Q1-K1-A1.pep
YRQFRRVGNSIVCCNNFLSENQYNTHINYFIIFFFYLVTNNACFRKKKCITRDKIGDEPVSIWVFHFLFIN

SEQ ID NO: 70917 - protein, 54 aa, Gossypium hirsutum
  Clone ID: LIB3148-057-Q1-K1-F1.pep
KIITTDYRVTYSLELLILNLNIVCTVAYEWDALSVYVFSLLFIYLFFSLKRTRG

SEQ ID NO: 70918 - protein, 87 aa, Gossypium hirsutum
  Clone ID: GOSHI-09MAY01-C46146_1.pep
HCCLRILIIFCMTRLSIKHSGSLIFFICNWYTLPPLDSPKKNISFLSERVYKKCRSQDSSRLKKSSRLYFSYGLAKQVLFFLLNTGR

SEQ ID NO: 70919 - protein, 59 aa, Gossypium hirsutum
  Clone ID: GOSHI-09MAY01-C46176_1.pep
RHCRLTPHDFMFIFALNVSCNCCLICIGTFDLAMYKNSSCFKESSSPPPLPPPIYFKLL

SEQ ID NO: 70920 - protein, 168 aa, Gossypium hirsutum
  Clone ID: GOSHI-09MAY01-C46116_1.pep
DEYWKKSKLPNATLFKPLQPYKRRIKETFKDFPPSSLPLIDTLLAIDPAELLTATAALRSECFMTEPYACEPSSLPKYSPSEEMDAKRRADVARRLIAASKAPGDGARKTRTRDRARAGPAPEANAELQSNLDGRRLITHANAKATICFCHQPLSSIVRICSLLPLSN

SEQ ID NO: 70921 - protein, 135 aa, Gossypium hirsutum
  unsure (1)..(135): unsure at all Xaa locations
  Clone ID: LIB3148-049-Q1-K1-F2.pep
HASACEPSSLPKYPPSKEMDAKRRDDEARRLKAASKAPGDGARKTRTRDRTRAVPAPEANAELQSNLDRRRLITHANAXSKSEKFPPPHQDGALGFPLGASQHIDPSCVPPDVPFSTTFTYSKEPIQTWSGPLVE

SEQ ID NO: 70922 - protein, 194 aa, Gossypium hirsutum
  unsure (1)..(194): unsure at all Xaa locations
  Clone ID: GOSHI-09MAY01-C46126_1.pep
HKAHTVNFTSFEMKANCSCQMFEHSGIICRHILXVFRVKNVLTLPSQYVLKRWTRNAKIGDMQDEHATELPNNSRESLTDRYNTLRQEAIKYVEEGAKSIHVYNVAMDALQEALKKVSSAKNQSPISAEDGALSNGRNQELHAAGDIETVACQSADEKEKKIRELTTELETINRRCEVYRANLLAVLXRDMEEQ

SEQ ID NO: 70923 - protein, 123 aa, Gossypium hirsutum
  Clone ID: GOSHI-09MAY01-C46086_1.pep
PTRPAERALATIELLCRIPSGCSAFASHALTVPLLVKTILRISDRATEYAAGALMALCSESEQSQKDAVSAGVLTQLLLLVQSDCTDRAKRKAQMLLKLLRDSWPEDSIGNSDDFAGSEIVPF

SEQ ID NO: 70924 - protein, 138 aa, Gossypium hirsutum
  Clone ID: GOSHI-09MAY01-C46016_1.pep
MVASDGSNNKPMGSSDHSYVECHNGLNAYDFGLDIGAYNHKDTSDEKNLGEYIAIKHSAKNSDTSLMDSCSFASQDISLSSIGSLSLADKDKLEEMKSELDAIDSQYQQCFQELLRMREEAMESARKRWISKKKVSVM

SEQ ID NO: 70925 - protein, 172 aa, Gossypium hirsutum
  Clone ID: GOSHI-09MAY01-C46246_1.pep
SIQSPSNSNPIFQHETPLPGKARSKRSRVAPCGWSARLRHLDPKSAAQKKRENPNANSELPVRKCLHCAAEKTPQWRTGPLGPKTLCNACGVRYKSGRLVPEYRPAASPTFVSAKHSNSHRKVLELRRQKEVQRAQHQQLMSQTSVFGISNGGCPDDFLIHHHGGPNFSHMI

SEQ ID NO: 70926 - protein, 132 aa, Gossypium hirsutum
  Clone ID: GOSHI-09MAY01-C47916_1.pep
DPFNNLDVLNPFSHSFPFPFPSFLSTHFPGFSSEIFPSLGTQLNCVETPRAHVYKAYLPGVTRDEVLVFIDDDRMLQISTENGNFMSRFKLPDNARTDEIEGFMENGMLIVTIGKQTQAPERPNVRVVEITE

SEQ ID NO: 70927 - protein, 261 aa, Gossypium hirsutum
  unsure (1)..(261): unsure at all Xaa locations
  Clone ID: GOSHI-09MAY01-C47926_1.pep
RKCPADDNIDNPPFDFGIFTHALSSGIVSSTKFFSKYCYCLWWGLQNLSTLGQGLETSTYPGEVIFSIALAIFGLILFALLIGNMQTYLQSLTIRLEEMRIKRRDSEQWMHHRMLPQDLRERVRRYDQYKWLETRGVDEENLVQSLPKDLRRDIKRHLCLALVRRVPLFESMDERLLDAICERLKPCLFTESPYLXVERGDPVDEMLFIIPGXRLRSVTPDGGRSXGFFNRHLLKEGDFCGEELLPGLGSQNGASFTSTRT

SEQ ID NO: 70928 - protein, 144 aa, Gossypium hirsutum
  unsure (1)..(144): unsure at all Xaa locations
  Clone ID: LIB3135-038-Q1-K1-F7.pep
DSDHWLHYXLLPQDLRERVGRYDQYKWLVTRGVDEXNLVQSLPKDLRRDIKRHLCLSLITMVPLLESLDQTLLDAICERLISCLFTESTYIVREGDSVXRFYSLFVALVDSVTTHGXRSGFFNQILLKERDFCGXGTFTWALDS

SEQ ID NO: 70929 - protein, 146 aa, Gossypium hirsutum
  unsure (1)..(146): unsure at all Xaa locations
  Clone ID: LIB3189-040-P1-K1-C5.pep
MLLKMCLARNKGEKKRMLRVICVYTNXXPEGDPXLQLPCEEIPLLAGADQFKMMYWSXVHKELKSMGIDNSHPQDYLNFYCLGNREEVPKSSGPSSSQCNHSETVSASQKFQRVMVYVHAKGMIVDDEYVILGSGNINERFLAGSR

SEQ ID NO: 70930 - protein, 113 aa, Gossypium hirsutum
  Clone ID: LIB3135-037-Q1-K1-F4.pep
KDSGAQNLIPMELALKITSKIRAKERFAVYIVIPMWPEGDPTSASVQEILCWQAQTIQMMYGVVAQELKSMGIENSHPQDYLNFYCLGNREEVPKSSGPSSSQCNHSETVTKQ

SEQ ID NO: 70931 - protein, 128 aa, Gossypium hirsutum
  unsure (1)..(128): unsure at all Xaa locations
  Clone ID: GOSHI-09MAY01-C47566_1.pep
MADEVNKTAFLEIQGRMIELTXKLKQVQNQMRTKEGEKKRAFLTLEELNQLPDDTNTYKSIGRTFVLEPKSVLVNEQEQKLKDSESAIGSLQSSKEYMEKQLAEVENNLRELLQQDPGLARQIMSMSV

SEQ ID NO: 70932 - protein, 140 aa, Gossypium hirsutum
  Clone ID: GOSHI-09MAY01-C47506_1.pep
AVEIITDYRTDSSLRHGCNDMLKADCVDLLVKYYKEARRAVYLSNEEDDTRSKRDASGASLPIEKTSSVRNMVVKSKTRRGGRCCLCFHPFSIQKVSVIVFFCCHAYHTTCLTDSTDSNSSKKGTGPTSQEPYGYDNDDD

SEQ ID NO: 70933 - protein, 187 aa, Gossypium hirsutum
  unsure (1)..(187): unsure at all Xaa locations
  Clone ID: GOSHI-09MAY01-C47136_1.pep
MAAKKASESFSKTLIEEVHKWGCMKQTGVSSRYMMEFGSKPTQRNLLISGQFLHKELPIRIARRAIELESLPYGLSEKPAVLKVRDWDLDSFRDLRSFPEIKATNDEREFTQMIKAIKVRHNNVLPMMALGVQQLKQGMDPEIVSEDLDEVHQVLDRFYMSRIGIRMLIGQHVELHNPXPTLHCVGY

SEQ ID NO: 70934 - protein, 79 aa, Gossypium hirsutum
  Clone ID: GOSHI-09MAY01-C47366_1.pep
YFLLYFNSSQSRSSCLVSALSPDPEPDPRALNGQGSDILHTPLHRSIIPGRPLRIIGKTTTTTIIATTSPLCPTNRTRR

SEQ ID NO: 70935 - protein, 212 aa, Gossypium hirsutum
  Clone ID: GOSHI-09MAY01-C47256_1.pep
MTKVFPNASFTIGDAISEKQPPQHKLLPAGEASEETILTVWKKSLLFNCNGFTVFDSKGDLVFRVDNYMDGNKGEILLMDASGNPLLTIRRKKMSLGDSWLVFVPRAMEKPRLCVKKSVNILSKCLAYVSSGNNNSRNNIMYEIEGSYSQRNCAVFDDKRRLVAEIKRKEAVGGVAFGTDVFRLIVRPGYITTDSAMALLILLDQMFGSSRR

SEQ ID NO: 70936 - protein, 68 aa, Gossypium hirsutum
  Clone ID: LIB3135-047-Q1-K1-F3.pep
SKVDNYMDGNKGEILLMDASGNPLLTIRRKKMSLGDSWLVFEGESMEKPRLCVKKSVNILSKCLAYVS

SEQ ID NO: 70937 - protein, 212 aa, Gossypium hirsutum
  Clone ID: GOSHI-09MAY01-C40996_1.pep
TPIIILLCLTSFQLFCLVLKKPFIKKKVQLVEIISLSCEVAMFATCFVLLDKEFSTTIGIFMLTLFLMGFLAQMSAERYALYEQTKQLDTSENRFFTGLKIASVGFLLYFVPQKLMKSFESTFPVFGLCMDTSTTGLPCDRNSSSSERAWPRQLREMAKASFSKDGSKAPTDPSSSKSKWSGLWGTKRSGSSSLDSSLDYKSKSKSKGLYKD

SEQ ID NO: 70938 - protein, 134 aa, Gossypium hirsutum
  unsure (1)..(134): unsure at all Xaa locations
  Clone ID: GOSHI-09MAY01-C40986_1.pep
FCPEAIMFXRTLLMAAADHKLASEQDSQFYHFMELKALRPLLCIHDGVDEINPLNFLMVMEMSDDSLFFRSDNFRASALLTVIETLQGFIEIYDGLNSFPEIFLPIATLLVEVSEQKHMPKALKDKFNNVSQLI

SEQ ID NO: 70939 - protein, 339 aa, Gossypium hirsutum
  unsure (1)..(339): unsure at all Xaa locations
  Clone ID: GOSHI-09MAY01-C40896_1.pep
NFSLTGQKGKTYKFRVTNVGISTSINFRIQGHPMTLVEVEGCHTLQEVYESIDIHAGQSIAVLVTLHGSVRVDLAAASTRFTKPILTTTGILRYQGSQTPPSLPWPVAPTYHVHWSMKHARTIRMNLTANAAWPNPGGSFHYGAIXLWRTILLANELVEINDKLRYAVNGISYVDPATPLKLADWFNIPGVFVLNGTKDAPPSGPPTLGVSVFGLTLHDFVEIVFQNTEKTIQSWHLDGYNFFVAGYGGGNWTTDVRRRKRYNLVDAVSRNTVQVYPKSWTSILVSLDNKGMWNLRSQTWSKRYLGQEVYLRVWNDEKSLYTETDIPPNALFCGKAVQS

SEQ ID NO: 70940 - protein, 83 aa, Gossypium hirsutum
  unsure (1)..(83): unsure at all Xaa locations
  Clone ID: LIB3147-035-Q1-K1-B9.pep
TQFKTRILKSHIRSLRTRKXISLTSXXTXVCNXNHKFSYKLFFLKATGHLNYLNNLRIKKLQIXKCRVIFHXKIDXHNISRIX

SEQ ID NO: 70941 - protein, 143 aa, Gossypium hirsutum
  unsure (1)..(143): unsure at all Xaa locations
  Clone ID: LIB3147-035-Q1-K1-D11.pep
LTKGEPNSWSPPPXGGGPXSRTLVDLSRALQXXSNMCGASTXYGIPXHLDCTXGMRXTLSXIRSNSMPSIVLKSMALNKKGNXFLIXFEFLTFDFKTLINQFGTNFGRYEGANPSLCVTDSXTYFLKIRRPKIIFKGDPITPQ

SEQ ID NO: 70942 - protein, 240 aa, Gossypium hirsutum
  unsure (1)..(240): unsure at all Xaa locations
  Clone ID: GOSHI-09MAY01-C40876_1.pep
PWCASSRYCIPGHPHRWAQKYYVPXYASDANAIRQVIERDIAYVDTVNYTADYRPDWGSMSLLIDFLRPNTSEGSSWYSLLKKAGGGCNDLVYPRLRFVAVLTAMAWTEAYGGFSSVLIWLLVMHSAQREVRERHHYSVDCVVAIYVGILLWKMTGFIWSAKGGTGDSRLTKLGKIQGRLLQAAKDSDMDEVRELLKDVELGNQESPKQGPSKVMWLFASGTIFFSLTIVILAFTWTSDG

SEQ ID NO: 70943 - protein, 114 aa, Gossypium hirsutum
  Clone ID: GOSHI-09MAY01-C40596_1.pep
FPLEKIFDLSKLSGRGKGGKGLGKGGAKRHRKVLRDNIQGITKPAIRRLARRGGVKRISGLIYEETRGVLKIFLENVIRDAVTYTEHARRKTVTAMDVVYALKRQGRTLYGFGG

SEQ ID NO: 70944 - protein, 79 aa, Gossypium hirsutum
  Clone ID: LIB3147-058-Q1-K1-C6.pep
MITEKTRGVLKIFLENVIRNAVTYTEHARRKTDTAMDVVYSIKTQLTTLYGFIYLIKGFKIFILLPEIFPCNCLKNPFF

SEQ ID NO: 70945 - protein, 54 aa, Gossypium hirsutum
  Clone ID: LIB3147-031-Q1-K1-H11.pep
LIYEETRGVLKIFLENVIRDAVTYTEHARRKTVTAMDVVYALKRQGRTLYGFGG

SEQ ID NO: 70946 - protein, 247 aa, Gossypium hirsutum
  Clone ID: GOSHI-09MAY01-C40586_1.pep
PPPSLPTLEIPGLNAPIPPGASFGYHPGGWGKPPVDEYGRPLYGDVFGVHQQEQPNYEEEPVDKSKHWGDLEEEEEEEEEEEEEEEEEEQIEEEELEDGIQSVDSLSSTPTGVETPDVIDLRKQQRKEPERPLYQVLEEKEERIAPGTLLGTTHTYVVNTGTQDKSAAKRVDLLKGQKSDRVEVSLQPEELEVMDNVLPAKYEEAREEEKLRSQREDFSDMVAENEKKRKRKMQEKEGKSKKKGFKF

SEQ ID NO: 70947 - protein, 57 aa, Gossypium hirsutum
  unsure (1)..(57): unsure at all Xaa locations
  Clone ID: uC-gsronu33B132c06b1.pep
LRVRPRVRSAAKRVDLLKGQKSDRVEVSLQPEELEVMDNVLPVXYEEAREEEKLLTQ

SEQ ID NO: 70948 - protein, 220 aa, Gossypium hirsutum
  Clone ID: GOSHI-09MAY01-C40556_1.pep
YLLCLACQPSGMSVYSVGCGLGGKLGHGSRTDEKYPRLIEQFQLLNLQPMVVAAGAWHAAVVGRDGRVCTWGWGRYGCLGHGNEECESVPKVVEALRDVKAVHVATGDYTTFVVSDDGDVYSFGCGESASLGHNTAGEGQGNRHANVLSPELVMSLKQVNERVGLRGLTNSIYWNAHTFALTESGKLYAFGAGDKGQLGIELANNQTERGNPERVDIDLN

SEQ ID NO: 70949 - protein, 219 aa, Gossypium hirsutum
  Clone ID: GOSHI-09MAY01-C40576_1.pep
MAAIIGESPKLALYSYWQSSCSWRVRFALNLKGISYEYKAVNLSKGEQFTPEFEKLNPLHFVPVLDDGDVVVSDSYAILLYLEEKYPQIALLPADPQLKALNLQVASIVTSSIQPLHMLSNLKYLVQKVGPQESLLFAQTNVEKGFNALEKLLKDINGKYASGDEVYMADVFMAPQIAAAMQRFKIDMSKYPRLCPIFESLKAFPDLVHASPERKPDAV

SEQ ID NO: 70950 - protein, 183 aa, Gossypium hirsutum
  Clone ID: GOSHI-09MAY01-C40536_1.pep
MADVPQVPTLSIPEVKLSSSSGGRNMPVIGMGTAADPFDETALKEAILEAISVGYRHFDAASLYKSEKPLGEAIAEAIKFGFIASRDELFITSKLWCTDAHPDLVLPALKNSLRMLQLEYLDLYLIHWPLSAKPGKIGFPVPKDEQLAMDFNSVWAAMEDCLRFGLTKSIGVSNFLLRETWKH

SEQ ID NO: 70951 - protein, 174 aa, Gossypium hirsutum
  Clone ID: GOSHI-09MAY01-C40526_1.pep
PALLVRPRVRNPEHLQSKTLDPCEKGSSSEDQTTKSPEWISPKGCPNQSIETKKVCADCGTSKTPLCRGGPAGPKSLCNACGIRSRKKRRAILGLNKGEDKKSKKGNINGNSYNRKSSSSNTKNLADYLLQRLLSLGKEVLMQRSKVEKQRSKLGEEEQAAVLLMALSYGSVYA

SEQ ID NO: 70952 - protein, 145 aa, Gossypium hirsutum
  unsure (1)..(145): unsure at all Xaa locations
  Clone ID: GOSHI-09MAY01-C40476_1.pep
PTRPCCDDMQSCCIGLFFPCYLFGKNAEFLGSGTLVGSCITHFILWALVNTLCCVLTQGFYLALPGFGCFISCYPCGYRRALRSRYNLQEAPCGDFATHFFXCHLCAICQEYREIRERAEDPKPPDLNLAVVTAPDVQTMDPSHL

SEQ ID NO: 70953 - protein, 349 aa, Gossypium hirsutum
  Clone ID: GOSHI-09MAY01-C40756_1.pep
FETSPDYGHLASKMGSEYLAKLLSQHLELVIRQRIPSIISMINKTIDELNAELDRIGRPVAADGGAQLYMILELCRAFDRVFKEHLDGGRPGGDRIYGVFDHQLPAALKKLPFDRHLSLKNVQKVVTEADGYQPHLIAPEQGYRRLIDGSITYFKGPAEASVDAVHFVLKELVRKSIAETEELKRFPSLQNDIATAANEALERFREESCKTVVRLVEMESSYLTVDFFRKLHAAPEKKPEKNGNPPGPNNDHFHDTSLARIGSNVSAYIAMVSDTLKNTIPKAVVYCQVREAKRSLLTHFYAQVGRKEKERLSAMLDEDPQLMEKRTQIAKRLELYKAARDEIDAVAWK

SEQ ID NO: 70954 - protein, 298 aa, Gossypium hirsutum
  unsure (1)..(298): unsure at all Xaa locations
  Clone ID: GOSHI-09MAY01-C40746_1.pep
WQLEDRYRQVQPPRPDCLLFDLXDDTLYPLSSGISKECGKNIKDYMVEKLGIEMDKIVELSNLLYKNYGTTMAGLRAIGYDFXDYDEYHSYVHGRLPYDNLKPDPHLRSLLLTLPLTKILFTNADKVHAAKALIKLGLEDCFQGIICFETLNPTHKNTVSDDEDDIEFLGSAVATTDVPSSPEIFDIIXHFAELKPGPSATLLPKTPIVCKPQESAIELALKIAKITPQRTLFFDDSVRNIQAGKCVDLHTVLRPKGADYALESIHHIKQALPELWETHMKSEVSYSGQVTVETPVTA

SEQ ID NO: 70955 - protein, 148 aa, Gossypium hirsutum
  Clone ID: LIB3147-033-Q1-K1-G11.pep
PTRPIEKDKIFELSNALYKNDGTTMAGLRAIGYDFDYDEYHSYVHGRLPYENLRQDPQLRSLLLSLPVRKIIFTNADKDHAKKALKKLGLEDCFEGIICFETLNPIHKNTVSDDEDDIEFLGSSVTRNDSLKTPEIFDIIGHFDNPNP

SEQ ID NO: 70956 - protein, 63 aa, Gossypium hirsutum
  unsure (1)..(63): unsure at all Xaa locations
  Clone ID: GOSHI-09MAY01-C40776_1.pep
GQEDDMSIELFLXDVKKIAFHYGFELEKEQTIETTYTTNPRSMMQNHYHAAFWTMRKKRTTTT

SEQ ID NO: 70957 - protein, 208 aa, Gossypium hirsutum
  Clone ID: GOSHI-09MAY01-C40086_1.pep
FCSISHAHETRSQVSSERQKWDQIFEGLVGMLKTQQQQLETLTKERKILGDRINMQYERWTSDVRLYEDHISQMSTDLESKEMTRLLEAAKADMLVGLKQREAFLCKLRLEETSDELTDFRIWFDILCKNSNDVSLRDPKGTKKGMLGDEDIGSKSVTLKTLEGNLRRLKLKYENLASEKSCQIAALMAENKFAWNQLNIMETQFTDK

SEQ ID NO: 70958 - protein, 58 aa, Gossypium hirsutum
  Clone ID: GOSHI-09MAY01-C40036_1.pep
ELFHKYVQNPTNLNKIEPMGLNKPFYIYILLIFIYILGRKIKFWWDEMKEQRMYLYMY

SEQ ID NO: 70959 - protein, 163 aa, Gossypium hirsutum
  unsure (1)..(163): unsure at all Xaa locations
  Clone ID: GOSHI-09MAY01-C40336_1.pep
MSATPTQKSSNVNQEELQKVFNQFDANRDGKISVTELRDVLKSMGSSITEEELKRVLEDIDTDKDGFINLSEFSSLFRSSSDEVTAALELRDAFDLYDQDKNGLISTSELHLVLNQLGMKCSVXDCARMIKSVDSDGDGNVNFEEFQKMMSASLAANGKGSKP

SEQ ID NO: 70960 - protein, 210 aa, Gossypium hirsutum
  unsure (1)..(210): unsure at all Xaa locations
  Clone ID: GOSHI-09MAY01-C41896_1.pep
MGNLLRPYDXEYMRMAILKHEETFKEQVYELHRLYRIQKTLMKSMESSRPKGNFSLKNNYHHGNINMHHDTRTRLDLEHPAAEGDHRSNNVVAEPDYGRNTILESIDESEIELTLGPTRYVPRKKHGTPRTSDSGPSFSSSSTESSHVKKTSTTGDDFTGKDQMGPPKVTDMTFGYPNGSKNNTDLEEQLRQERLKQPPWLFQVLSMNMT

SEQ ID NO: 70961 - protein, 174 aa, Gossypium hirsutum
  Clone ID: GOSHI-09MAY01-C41846_1.pep
MSNPKVFFDILIGKAKAGRVVMELFADVVPKTAENFRALCTGEKGVGQCGKPLHYKGSAFHRIIPSFMCQGGDFTRGNGTGGESIYGMKFADENFNLKHTGPGCLSMANAGPNTNGSQFFICTEKTPWLDGKHVVFGKVVDGYSVVKEMEKVGSESGRPLQPVVVEDCGQVEEN

SEQ ID NO: 70962 - protein, 128 aa, Gossypium hirsutum
  Clone ID: GOSHI-09MAY01-C41866_2.pep
MSYDYLWRGIIIGDTGGGKSCLLLRCTDKRSQPVHDLTIGVEFGARMVTIDGRPIKLQIWDSAGQESFRSITRSYYRGAAGALLVYDITRRETFNHLASWLEDARQHANPNMTIMLIGNKSDLSHRRA

SEQ ID NO: 70963 - protein, 158 aa, Gossypium hirsutum
  Clone ID: GOSHI-09MAY01-C41866_1.pep
MSYDYLFKYIIIGDTGVGKSCLLLQFTDKRFQPVHDLTIGVEFGARMVTIDGRPIKLQIWDTAGQESFRSITRSYYRGAAGALLVYDITRRETFNHLASWLEDARQHANPNMTIMLIGNKCDLSHRRAVSKVEGEQFAKEKGLLFLEASARTAQMSRR

SEQ ID NO: 70964 - protein, 229 aa, Gossypium hirsutum
  Clone ID: GOSHI-09MAY01-C41476_1.pep
MKDGGNMADRKYESDEQPAQTPQERVRLSCLRVLHQLAASTICAEAMAATSVGTTQVVPLLMKAIGWQGGSILALETLKRVVGAGNRARDALVAQGLKVGLLEVLLGLLDWRAGGRNGLCSQMKWNESEASIGRVLAIEVLHAFAAEGAHCIKARAWVNASDVWSAYKDQKRDRFLPSNAQSAAAGVAGLIESSSSRLVYAITAPPQTTQSRLPASTVSDSNGSQDQLS

SEQ ID NO: 70965 - protein, 173 aa, Gossypium hirsutum
  unsure (1)..(173): unsure at all Xaa locations
  Clone ID: GOSHI-09MAY01-C41606_1.pep
SSLVIIQASVSSSDFGNLLPGRLKHLAHTITESPANNLGLNNSVFGKVKSITLSSYLKGTLHATAPTASPAPSPEPSISPHPSFRPTHXQHHHPRVIIPNLAXKCKAASPSGNTPLHSPGPESGPYPSVPPLISPAPSTIAPPPCPYSRPATPRSHSNLTLIITFHVTAVPRS

SEQ ID NO: 70966 - protein, 126 aa, Gossypium hirsutum
  Clone ID: GOSHI-09MAY01-C41046_1.pep
MWATLRSRYLHLSATTLPSSSLTNGSWKLGFSGLNQTFSSSTVERISNELLSLQEVEKVLSDVRADDVAVVPVGNQCDWADFMVIATGRSPWHVKNIAQALIYKVKQKQKGAKRMVLPSVQGQETG

SEQ ID NO: 70967 - protein, 216 aa, Gossypium hirsutum
  Clone ID: GOSHI-09MAY01-C41016_1.pep
HNLGRVSKLTTLKGTQANALFWSPGGRFIVLAGLKGFSGQLEFFNVDELETMATAEHFMATDIEWDPTGRYVATAVTSVHEMENGFNIWSFHGKLLYRILKDHFFQFLWRPRPPPFLSAEKEEEILKYLKKYSKKYDAEDQDVSMLLSEQDREKRRMLKEEWEKWISEWRRASEEEKLERQKLRDGEASDEEEEYEAKEVEVEEILDFSEEVLFEE

SEQ ID NO: 70968 - protein, 93 aa, Gossypium hirsutum
  Clone ID: GOSHI-09MAY01-C41356_1.pep
MDKNMLAALEGLPEEDKARMSAMIDHLQLRDSLRMYNSLVERCFTDCIDNFTRKTLQKQEETCVTRCAEKFLKHSMRVGMRFAELNSQAPTQD

SEQ ID NO: 70969 - protein, 93 aa, Gossypium hirsutum
  Clone ID: uC-gsflnu33B138g11b1.pep
MDKNMLAGLEGLPEEDKARMSAMIDHLQLRDSLRMYNSLVDRCFNDCVDNFTRKTLQKQEETCVMRCAEKFLKHSMRVGLRFAELNSQAATQD

SEQ ID NO: 70970 - protein, 205 aa, Gossypium hirsutum
  Clone ID: GOSHI-09MAY01-C41306_1.pep
DKDARGQQGSYPIKLFYTSNMPIILQSALVSNLYFISQLLYRKYSGNFFVNLLGKWKESEYSGGQFIPVGGLAYYVTAPASLADMAANPFHALFYLVFMLSACALFSKTWIEVSGSSARDVAKQLKEQQMVMPGHRDSNLQKELNRYIPTAAAFGGMCIGALTVLADFMGAIGSGTGILLAVTIIYQYFETFEKERASELGFFGL

SEQ ID NO: 70971 - protein, 170 aa, Gossypium hirsutum
  unsure (1)..(170): unsure at all Xaa locations
  Clone ID: GOSHI-09MAY01-C41256_1.pep
MPGDLAKTDSEASXLSQSSPPRSPRRQMYYVXRPSRDSHDGEKTTNSFNSTPVLSPTHSXSNSSLGPHSSRESSSTRLSKHHGSRKPRTNKQSWKEFDAIEEEALLDGEAAHHALHRRRCYFLAFLVGFFVLFTTFSLILWGARRPQKPKITMKVKKKKSNHFYICHAFS

SEQ ID NO: 70972 - protein, 71 aa, Gossypium hirsutum
  Clone ID: GOSHI-09MAY01-C42986_1.pep
HNTPKSESRLFKVLLGAENGDRVRALAACHMDTSRWDVDHVSFQLLKIKPGSSPVCHVFPPDNLVWVALPA

SEQ ID NO: 70973 - protein, 78 aa, Gossypium hirsutum
  Clone ID: GOSHI-09MAY01-C42916_1.pep
VLMFWVLGLVCYWVLDRLKGLRLFIWFYFVWASKDCKRTIFRLFNLKKLYFYIFLLLLMGPGKLGRLQYILKIGLEMI

SEQ ID NO: 70974 - protein, 346 aa, Gossypium hirsutum
  Clone ID: GOSHI-09MAY01-C42866_1.pep
MECVEAALKTSFRKEMALKPSPQAFLEDIWVVNGQNGVSCDDFSVDDLFDFSNEEGFLQQKRADEEDEEEEEVPASSSLPKRQKLSQDNGHFSNDSTTNFDYGSLSTNELAVPADDVENLEWLSHFVEDSFSEHSTAYPTGTLMEKPKLLDGKLPEPGKSVTTTACFETPVPAKARSKRVRTGGRVWSLVATPSLTESSSSSTSSSSSSSPSPWMFCPNSGSGSIFEPSEPLSVEKPPVKKHKKRPSTDTTGCNGTQPTRRCSHCGVTKTPQWRAGPMGAKTLCNACGVRFKSGRLLPEYRPACSPTFSSELHSNHHRKVLEMRRKKETLGQAEPGLTPPVVPSFG

SEQ ID NO: 70975 - protein, 99 aa, Gossypium hirsutum
  Clone ID: uC-gsflmaxxa060f04b1.pep
MECVEVALKTSFRKEMALKPSPQAFLEDIWVVNGQNGVSCDDFSVDDLFDFSNEEGFLQQKREDEEDEEEEEVPSSLLLWLIEHMLFPNNLHFLYLSTY

SEQ ID NO: 70976 - protein, 57 aa, Gossypium hirsutum
  Clone ID: GOSHI-09MAY01-C42816_1.pep
FIIYSILLSTNEVFQSIYTIIGRSGNTCINKKLSMHYTFHLYHIIICFKVFFLVIPV

SEQ ID NO: 70977 - protein, 238 aa, Gossypium hirsutum
  unsure (1)..(238): unsure at all Xaa locations
  Clone ID: GOSHI-09MAY01-C42586_1.pep
LIDSHDVIFLLTDTRESRWLPTLLCANRNKITITAALGFDSFLVVRHGPGPFNSIPNLKAEMEDSLAAGMDNLVLTNTDGQHRLGCYFCNDVGAPTDSTSNRMLDHQCTVTRPGLAPIASALAVELLVGILHHPNGIFPEAEIANSSSGGNFELPLGILPHQIRSSLPHFQQMTLLGHSSNSCTACCXTVVSEYRKRSMQFILQAINHPTYLEDVTGLTELMRSANSFQLDWDDDIEV

SEQ ID NO: 70978 - protein, 52 aa, Gossypium hirsutum
  Clone ID: LIB3148-001-P1-K1-G12.pep
CIKESDSLPQEYNLLSLRDELWSIRDSGEFSILHFELTTDIIEYSRNHCILS

SEQ ID NO: 70979 - protein, 51 aa, Gossypium hirsutum
  Clone ID: uC-gsflnu33B090d09b1.pep
KKVRDSLPQEYNLFSFQDEFCSIRDSGEFSILHFELTTDIIEYSRNHCILS

SEQ ID NO: 70980 - protein, 202 aa, Gossypium hirsutum
  unsure (1)..(202): unsure at all Xaa locations
  Clone ID: GOSHI-09MAY01-C42696_1.pep
ALDKAFSGIGVDEKSLISILTNSXEEHKRSLRKGSSKLFIEDENGFERWDQSSIKILKHQFNRFRDAVVLSLLHPWERDARLIEKAIRKGPKHYNVIVEVACTRSSDQLLGARKAYHSLFHHSIEEHLTHIKGRERKLLVALVSAYRYEGTGVNEDVAKSEAQILYEAINNGDKNKLLDHEDAIMILATRSKQHLQALYRHY

SEQ ID NO: 70981 - protein, 151 aa, Gossypium hirsutum
  unsure (1)..(151): unsure at all Xaa locations
  Clone ID: GOSHI-09MAY01-C42006_2.pep
HASADAWAHASALGSVKSIGESFGSKCSSNFRTSMATYKIKLVGPKGEVNEFEAPDDKYILDAAEEAGVELPYSCRAGACCTCAGKMISGSVDQSDGSFLDDXQMEEGYLLTCVAYPTSDWEIHTHKETDPFLSSLWSEMITALVVGYGLI

SEQ ID NO: 70982 - protein, 147 aa, Gossypium hirsutum
  Clone ID: GOSHI-09MAY01-C42006_1.pep
MTTLSLTSPCIVKVAIPERFSSAIVKAPTSLGSVKSISKSFGLKCSSNFRTSMATYKIKLVGPKGEVNEFESPDDKYILDAAEEAGVELPYSCRAGACCTCAGKMISGSVDQSDGSFLDDKQMEEGYLLTCVAYPTQLEITPQEPIF

SEQ ID NO: 70983 - protein, 186 aa, Gossypium hirsutum
  unsure (1)..(186): unsure at all Xaa locations
  Clone ID: GOSHI-09MAY01-C42026_1.pep
VLDDCRGLAVQGKYYYRIDPLGEGAKWRRSFGQEIYSPLLLAFAEEDGQNWMSSHTPTFSAIDASYSLPDNVALITLQELDDGKVLLRLAHLYEVGEDSDLSVMSKVELKKLFPGKKIAKVRELSLSANQEREEMEKRRLVWKVEGESENQXENPRVVRGAPVDPKKLEVELAPMEIRTFVMEFES

SEQ ID NO: 70984 - protein, 193 aa, Gossypium hirsutum
  Clone ID: GOSHI-09MAY01-C42396_1.pep
TSRDKWLGNDGVELPDKAGLYSTATEDAEYKDDKIEFWNNAYGFDMSCIKQHAMMEPLVDTVDHNQIVTNSHLLKTMDISKMAPGDASFTASFKLVAQRDDYIHAFAAYCDVSLTQCHTLMGFSTGPKSRATHWKQTGLYLEDVLTIREGEAIVGSMTVAPNKKNPRDVDIMVKYSLSGRRCAVSRVQFYKMR

SEQ ID NO: 70985 - protein, 212 aa, Gossypium hirsutum
  unsure (1)..(212): unsure at all Xaa locations
  Clone ID: GOSHI-09MAY01-C42236_1.pep
RVGERVVNPPKQAVSVFADTQSSEIKDRIFDEFNSLSVLYQKPSYMFTDKEHRGPLEFADELGNLSIGEAANNVVPTQMVEENDKDLLLTTSEKEETKGSRNNGSAYTVPYDGSSTSVFASQAQIESAVSNPTLAGHSPQASFAIDDLLGLGIPATPAVPSPPQLKLNTKAALDPSTFQQKWRQLPVALSQEISVNPXGVAALTAPQALLRH

SEQ ID NO: 70986 - protein, 87 aa, Gossypium hirsutum
  Clone ID: GOSHI-09MAY01-C42226_1.pep
NQMQTDYKQFYKRLWSLDLPSKIKITNWRFSCNFLPTFGNLHYRRLMASATCQRCQNGTETKEHVFRECSVNRLQTGRWVAPTDPWV

SEQ ID NO: 70987 - protein, 175 aa, Gossypium hirsutum
  Clone ID: GOSHI-09MAY01-C43976_1.pep
MGPSFFIFNIIISLALTLVNGDAGLIQKTCKTTKYYDLCVSSLKSDPTSANSDTKGLAMIMVGVGMANATATSTLLSSQLLTTKNDTIMRKVLKECSDKYAHAADALQDSVQDFDSELYDYVYMHIMAAADYPNACHNAFRRYPRLVYPQQIARREDGLKHICDVILGIGDHLAS

SEQ ID NO: 70988 - protein, 227 aa, Gossypium hirsutum
  unsure (1)..(227): unsure at all Xaa locations
  Clone ID: GOSHI-09MAY01-C43936_1.pep
VTPPAEVPAISVLKSAIAGGGSCGLSSALMYPIDTVKTQVQASTTLTFPELMSNIPQIGLRGLYKGSIPAILGQFSSHGLRTGISEVSKLVLINVAPNLPDIQVESMASFLGTVLGTVARLPCEVLKQRLQAGLYDNVGEALIGTWQQDGLKGFFRGTGATLCRELPFYVAGMGLYTESKKFVQRLIIRELEPWETVVVGAISGRLASVTTTPFDVXKTRMMTTSGA

SEQ ID NO: 70989 - protein, 164 aa, Gossypium hirsutum
  Clone ID: GOSHI-09MAY01-C43856_1.pep
PRVRYLAGDSSGGNIAHHVAVRAAEADVEVLGNILLHPTFGGQKRTESEKRLDGKYFVTLHDRDWYWRAYLPEGEDRDHPACNPFGPRGRSLEGLKFPKSLVVVAGLDLIQDWQLAYVEGLKKSGQEVNLLFLEKATIGFYFLPNNNHFYCLMEEIKNFVNPNC

SEQ ID NO: 70990 - protein, 74 aa, Gossypium hirsutum
  unsure (1)..(74): unsure at all Xaa locations
  Clone ID: LIB3828-029-Q6-N6-B1.pep
VKPVHLALXSTAFPCIGVTLSAIQLKPMQERYHLYDPFCWQSYGELTTPTVPPIACLQIGKPPNNRVQSNYDVC

SEQ ID NO: 70991 - protein, 48 aa, Gossypium hirsutum
  unsure (1)..(48): unsure at all Xaa locations
  Clone ID: LIB3148-018-Q1-K1-C1.pep
AFFLDGIIPVQGSHYVRLYSYVIRYSPIRDSFVKAXXKKEQTQTKKQV

SEQ ID NO: 70992 - protein, 107 aa, Gossypium hirsutum
  Clone ID: GOSHI-09MAY01-C43806_1.pep
EIEEGLSHRGFQVLRLNTYTTVPVDHVDHIVLEKAQSAPVVAVASPSAVRSWVNLISEPDSWSNAVACIGETTASAAKRLGLRNVYFPMQPGLDGWVGSILEACKGS

SEQ ID NO: 70993 - protein, 109 aa, Gossypium hirsutum
  Clone ID: GOSHI-09MAY01-C43566_1.pep
HAVIVKQEPPPPPPPEDKKEEEKPKDGGKEEKKNEESSGEKGKKDSSSGGVDDKGKVKKGIGGGVEKTRVAVELKKNEFYYYPPRYATEFYAYPPQYFSDENPNACSIM

SEQ ID NO: 70994 - protein, 98 aa, Gossypium hirsutum
  unsure (1)..(98): unsure at all Xaa locations
  Clone ID: uC-gsflnu33B084h11b1.pep
STRPGKEEKRGDFSGDFYKNDSSSGGGDDKGKDNKGSGGGEGGEANVAAGGGGEAAEGGVEETRVAVELXKNEFYYYPPRYATEFYAYPPQSFSDENP

SEQ ID NO: 70995 - protein, 202 aa, Gossypium hirsutum
  unsure (1)..(202): unsure at all Xaa locations
  Clone ID: GOSHI-09MAY01-C43746_1.pep
LRFAIMYIISXKTINPSGAEAVEAALRESEVDTSAFQYVKKIKSLNVSLASANSASRSNIVDWAEKLYGQSISAVTAGMKNLLSGDRQLALTRTVEALMEGKPNPEIDSYLVFDPRAPKSSPGTSSSHLKGPFKEAIVFMIGGGNYVEYGSLQDLAQHQQPAKQVIYGTTEILTGMEFVEQLSLLGQKMGLGSSSAAASATH

SEQ ID NO: 70996 - protein, 90 aa, Gossypium hirsutum
  Clone ID: GOSHI-09MAY01-C43686_1.pep
FNSEKVASLAYARIQGKAALVAHFQNSSLMNEDKRCRPILFHSEGQETSDQEHFLSCNLNICIRQPDGSYSGDSLESPKGLLDEKPEKSW

SEQ ID NO: 70997 - protein, 45 aa, Gossypium hirsutum
  Clone ID: LIB3148-015-Q1-K1-G2.pep
FSTSLVTYHGVSIAEKQTLHMTQPFSYACAFICRPTFRTRGRTRG

SEQ ID NO: 70998 - protein, 203 aa, Gossypium hirsutum
  Clone ID: GOSHI-09MAY01-C43636_1.pep
MESTLSTLPSALTPFSFSKPLNPKSTLFSFSQSPLLGPVAVLSYSFPLRTISSIPKRLHRRLECVSSGTGGGFGGNDGSSGGGGGGGGEGTGGGDSKAKLGAGVVDDLSALSPDVIILNVGGMMCGGCASSVKKILESQPQVSSATVDLKTATAMVWPVSEAKAVPNWQKELGEALAKQLTSSGFESELRVAGEEAIGDVSPQ

SEQ ID NO: 70999 - protein, 196 aa, Gossypium hirsutum
  Clone ID: GOSHI-09MAY01-C43196_1.pep
PTRPATNARSKVLSRLQNMTGLATLYDFTKKIPYQTEFAVRFLNIAEVKRALGVNESMVFEECSDVVGDVLHEDVMKSVKYMVEFLVKNSKVLLYQGLYDLRDGVVSTEAWVKTMKWEGIEKFKMADRVIWKVNGELAGYLQKWGSLTNVVVSGARHLLPADQALNSQAMTDDWVLEKGQFGGKQRGSSTKCRATL

SEQ ID NO: 71000 - protein, 108 aa, Gossypium hirsutum
  Clone ID: GOSHI-09MAY01-C43186_1.pep
RFFFFFFFLYHFTRATGRGLVLSTREIEKLRLKQEEEDRLNRLLIENKIKDFEAGWIRKFDAHKDAVSLLSDKLTNAENEVKLLKELCNLKVSAGTPECVPNESGMSS

SEQ ID NO: 71001 - protein, 108 aa, Gossypium hirsutum
  Clone ID: LIB3826-001-Q1-N6-E7.pep
ARCSLPDEPLYKDVTGSGGLVLSTREIEKLRLKQEEEDRLNRLLIENKIKDFEAGWIRKFDAHKDAVSLLSDKLTNAENEVKLLKELCNLKVSAGTPECVPNESGMSS

SEQ ID NO: 71002 - protein, 136 aa, Gossypium hirsutum
  Clone ID: GOSHI-09MAY01-C43156_1.pep
TVYLQTLSQLPRPKTQSPKFKLDSPNPITSAQDLKIHGPMAQNLDLGSAKQKLGFLSRCSLTYGLHCVSVRQRTASVRAPRTPCTCKQTREQQQIEIENRKTGIFLFFYFLSSAIKPKTEGMCFFYTIESNQIERK

SEQ ID NO: 71003 - protein, 232 aa, Gossypium hirsutum
  Clone ID: GOSHI-09MAY01-C43126_1.pep
PTRPLLVTCLNWIAWFPFLLFDTDWMGKEIYGGEAKGDAHKVKLYGDGVRAGALGLMINSIVLGLTSLGLEPAGRLIGGVKNLWAIVNFILCACLASTVLITKMAEAWRQHHGSPLSHPPFNITGSALAVFGVLGIPLAVTYSIPFALASIYCSSTGGGQGLSLGVLNLSIVIPQMFVSVISGPLDDAFGGGNLPAFVLGSIAAAVSALLAILALPNPPKQVSLSPGMGGGH

SEQ ID NO: 71004 - protein, 56 aa, Gossypium hirsutum
  Clone ID: uC-gsflnu33B006f06b1.pep
HAYGILLLVTCLNWIAWFPFLLFDTDWMGKEIYGGKDKVDDLQEELDIDVMVSWRA

SEQ ID NO: 71005 - protein, 145 aa, Gossypium hirsutum
  Clone ID: GOSHI-09MAY01-C43096_1.pep
IDSDWAINNGNWLWLSCSSFFYQYNRIYSPISFGRKYDPNGNYIRHFLPILKDMPKEYIYEPWTAPLSVQTKAKCIIGRDYPKPVVLHDTASNECRKKMGQAYALNQRLNGRVSEEYLRKLRRKFDEDEDKQEPKPRRQRQKLIK

SEQ ID NO: 71006 - protein, 91 aa, Gossypium hirsutum
  Clone ID: GOSHI-09MAY01-C43076_1.pep
TSGSTMLNRSLLSSDMWAVIARVFAYHEKVHWMYFLAFAAVAVGLVIYSGGDKEEDRHQCTAGVGDEDAGRSKHFYEEAGFDNINRGAIAV

SEQ ID NO: 71007 - protein, 35 aa, Gossypium hirsutum
  Clone ID: GOSHI-09MAY01-C43276_1.pep
LEVHTTWGLKMAFVVDNGKGPNESLLPPPSDFPKC

SEQ ID NO: 71008 - protein, 184 aa, Gossypium hirsutum
  Clone ID: GOSHI-09MAY01-C78986_1.pep
MDAQGRNKALFRAKLNAQKKEKRIDSPLISYNESDQPVCRVCDVVLKSVSHWDAHQASRKHHEAINTLKANAARRTQASNTQSGLPPRFFDNHGTEKQTTEIEKLPDPSSNKKPGISAQTYAKECLYSETEEDGCPQSSAIQTKMTQPPESRQVTQLETKKVKGSLPDNFFDRDETKLPTNLMK

SEQ ID NO: 71009 - protein, 146 aa, Gossypium hirsutum
  Clone ID: GOSHI-09MAY01-C78886_1.pep
MPDYLLQQQRDANLAREGLPYAGLISCVTTFENHIIMCDTVSQGVLKLNRVSGISSSFQFSNLGMLGLPYWLSFPLESFYAVATGLSVRQTDHIQQFSLLPGRVDIRLSIDIPTDTELVEPLHESCIWCQARGAATELSVVENVAG

SEQ ID NO: 71010 - protein, 104 aa, Gossypium hirsutum
  Clone ID: uC-gsronu33B038e01b1.pep
KEITKGDFFGFSSRFFALVFYELIRFLVKPIFIVLLRDQRIRKEGLTFANEPLGTISSSPKIKARNRSLEAKTQSLYEDQSGEIRWFLYVPSPTNFNGGMRMVG

SEQ ID NO: 71011 - protein, 90 aa, Gossypium hirsutum
  unsure (1)..(90): unsure at all Xaa locations
  Clone ID: LIB3582-009-P1-K1-D2.pep
HPKHGRFVLPRHQPSYTHAKGQSDPCTRALLCTFANEPLGTISSSPKIKARNRSLEAKTQSLYEDQSGEIRWFXYVPSPTNFNGGMRMVG

SEQ ID NO: 71012 - protein, 153 aa, Gossypium hirsutum
  Clone ID: GOSHI-09MAY01-C78786_1.pep
RPPTRRLQVVHRLWERNDVKGAISAMEKMSDHGVLADVMSIVTEKIDIVTLEICTSLLPLLSGLLGSDMDRHLSICLDMLLKLVRIFGSMIYSTLSALAPAGVDIEAEQRFERCNLCFIELEKVKQCLPTLTRRGGSVAKSAQELNLALQEVS

SEQ ID NO: 71013 - protein, 57 aa, Gossypium hirsutum
  Clone ID: GOSHI-09MAY01-C78736_1.pep
LPKNLALGRLRGSDNVLEIYSRCYSEQPLVIQGAGAGNDTTAAGVLADILDIQDLFP

SEQ ID NO: 71014 - protein, 90 aa, Gossypium hirsutum
  Clone ID: GOSHI-09MAY01-C78146_1.pep
FLLHPHLSPSPTSLLESMQKLPQQVKRLFDSPEPIGDNYLPPFIPSHQPRSRFENLLAKSRIKINANHMILLESTFQRGKVFDNPKCIAE

SEQ ID NO: 71015 - protein, 128 aa, Gossypium hirsutum
  Clone ID: GOSHI-09MAY01-C78396_1.pep
LIWNQACMQESTGKVLLHGHSEDGSFSSYTNQDQSELLPSFFKDQVVLPYHSEQKQDGLDFQAPKNVLMEDGDFNGQFQGQLRPSLPLEEGQKRQDEVFVQQNMSGNIYSDGSRGRYLPPRQEHLPSG

SEQ ID NO: 71016 - protein, 283 aa, Gossypium hirsutum
  unsure (1)..(283): unsure at all Xaa locations
  Clone ID: GOSHI-09MAY01-C79936_1.pep
AYELHSGVLIDLTLGDIQQTLILNGCHPLPRRRCYTRTPSKPPSSLPLTGLPTSLPDSGAIWDKYSWXSFACLSSNNPTGFDLNAQRSSLLKYTSELDLPLTQFMQLAKSANSPIRLGIDIGGGTGTFAALTKKSYNVTMLTTTMNVNAPYNEAVALRGLVPLHVPLQHRFPVFDGTMDLVRSGRAVNRRIPLSVMEFMFYDVDRVLRGGGYLWVDRFFSKAVDLEKIYGPLIGKLGYKKVKWAVANKTDPSGLKHGEVYLSALLQKPVSKSLWGKIEDSFNI

SEQ ID NO: 71017 - protein, 83 aa, Gossypium hirsutum
  unsure (1)..(83): unsure at all Xaa locations
  Clone ID: LIB3585-043-P1-K1-G5.pep
STIVEPSFVVLQNLIFNSKIGPMVFSCHNNPDLFHRYMNNTLFSTCPYDPDLQETLILNGCHPLXPRRRCFSRTPSKPPSYFR

SEQ ID NO: 71018 - protein, 410 aa, Gossypium hirsutum
  unsure (1)..(410): unsure at all Xaa locations
  Clone ID: GOSHI-09MAY01-C79876_1.pep
FASFVEISRYNLIPLSVTSLCGCPCRLLSNKTLIPTRRTPKLKLNFVFHGSQSVFRVRPTSIYRQTRRVNITSHVAPCLKPESIDESNAEEEVDQGAVLPTTKDSFSEXNNKSSQLRKRIVFGLGIGISVGGAVLAGGWVFTVALAAAVFLGAREYFELVRSRGITAGMTPPPRYVSRVCSVICAFMPILTLYFGNIDISVTSAAFVVATALLMQRGNPRFAQLSSTMFGLFYCGYLPCFWVKLRCGLAAPALNTRIGAGWPFLLGGQAHWTVGLVATLISFSSIIAADTYAFLGGKAIGKTPLTNISPKKTWEGAIVGLGGCIATSVVLSKIFSWPASLVSAIAFGFLNFFGSVFGDLTESMIKRDAGVKDSGSLIPGHGGILDRVDSYIFTGALAYSFVKILLPLYGV

SEQ ID NO: 71019 - protein, 80 aa, Gossypium hirsutum
  Clone ID: LIB3825-022-Q1-N6-E2.pep
VQFSFCIIIESKVFINQGPKTATFRVRIYFSNLCHHIIIHDLHRFKRPHFTLFSCYLYSKWIDDVVGRVEEIFFSKSQNT

SEQ ID NO: 71020 - protein, 193 aa, Gossypium hirsutum
  Clone ID: GOSHI-09MAY01-C79866_1.pep
SAALEGSVLKSLNLSNNALGEKGVRAFGSLLKSQSCLEELYLMNDGISEEAAKAVCELIPSTEKLKVLHFHNNMTGDEGALAISDVVKRSPFLEDFRCSSTRVGSGGGVALAKALESCTNLKKLDLRDNMFGVGAGVALSKALSKHLDLVEVYLSYLNLEDEGTVAIANALKESAPSLEGLEMAGNDITADAA

SEQ ID NO: 71021 - protein, 158 aa, Gossypium hirsutum
  unsure (1)..(158): unsure at all Xaa locations
  Clone ID: GOSHI-09MAY01-C79556_1.pep
HASALGRSIEKAVKANTDALWARFQDENAKQEKLERDRMQQITNLITNCLNKDLPAMFEKSLKKEIAAVGPVVARAISPTLEKSISSAITESFQKGVGERAVNHLEKSVSSKLEATVARQIQAHFQTXSGKQALQDALRSNLETSVIPAFEMSCTSTV

SEQ ID NO: 71022 - protein, 195 aa, Gossypium hirsutum
  unsure (1)..(195): unsure at all Xaa locations
  Clone ID: GOSHI-09MAY01-C79406_1.pep
VLTYAYFQKXGWGAFSDAILREVHSLKRXRGPDPNYDDICFSGAGRDVSQLSKSFPEVEMGWGNGNKLLLSPENYLFRHTKLIGAYCLGIFANAESTTLLGGIVVRNTLVTYDRDNDRIGFLKTNCSELWRRVKISGAPAPAPSVSQSNDTNLEIPPASAPSGSPANVLPGSFHIGFITFDMSISTNDSQLKLNF

SEQ ID NO: 71023 - protein, 76 aa, Gossypium hirsutum
  Clone ID: GOSHI-09MAY01-C79436_1.pep
PISLKISTTHLKILIKSLWKLPPKLITIINFTNFSLGFMELLRGKTKLERETFNNGADLPRSCSDSYEASHHPMIL

SEQ ID NO: 71024 - protein, 76 aa, Gossypium hirsutum
  Clone ID: LIB3584-018-P1-K1-G1.pep
PMSLKISTTHLKILIKSLWKLPPKLITIINFTNFSLGFMELLRGKMKLERETFNNGADLPRSCYDSYEASHHPMIL

SEQ ID NO: 71025 - protein, 132 aa, Gossypium hirsutum
  unsure (1)..(132): unsure at all Xaa locations
  Clone ID: AI054601.1.pep
IALIASNAAAVLPAFWALRQKAFAEWVIYTSSGISSGLYHACDVGTWCALSFGVLQFFDFRLSFLAVVSTFVYLTTIGEVYIMAIHTGVAILTALMAITNATRPFNXIILVMVIGAPALFCVWLIELFTLFR

SEQ ID NO: 71026 - protein, 160 aa, Gossypium hirsutum
  Clone ID: LIB3584-017-P1-K1-G3.pep
GRVGFFDFWLSFLAVVSTFVYLTTVGEVYKRAIHTVVAILTALMAITKATRPSNVILVMAIGALALLVGWLIEFSTKYRSLSFSMDLCLNSLERRRIKEWVNSLVKTIMKRFRWGFLVAGFIALAMAAISRDLENRQNYWIWHNVWHVTIYTSSFFFLWS

SEQ ID NO: 71027 - protein, 178 aa, Gossypium hirsutum
  Clone ID: GOSHI-09MAY01-C79236_2.pep
MAFLRSLTPATATAPAAASAAASASALPAAFVFSSSSSSSSFSSSRNSSHFPNAKSLPFLSSPPNRLGLTRNFATSPTALNMDSPSSHHNPSQENGSLPDLLTEYMVDMKCEGCVTAVKNKLQTVDGVKSVEVDLSNQVVRVLGNSPVKTMNEALEQTGRKARLIGQGVPEDFLVSAA

SEQ ID NO: 71028 - protein, 184 aa, Gossypium hirsutum
  unsure (1)..(184): unsure at all Xaa locations
  Clone ID: LIB3830-002-Q1-K6-A2.pep
MAFLRLLTPATAIAAASASALPAAFVFSSSSSSSSSSSRNSSHFPNAKSLPFLSSPPNRLGLIRNFATSPIALNMDSPSSNHNPSQENGSLPDLLTEYMVDMKCEGCVTAVKNKLQTVDGVKSVEVDLSNQVVRVLGNSPVKTMNEALEQTGRKARLIGQGVPEDFLVSAAXAEFKGPQIFCVV

SEQ ID NO: 71029 - protein, 128 aa, Gossypium hirsutum
  Clone ID: GOSHI-09MAY01-C74956_1.pep
AKVLLAACRGELKGVSLNWSPGSAMVVVMASQGYPGSYEKGTVIQSLEEAENVAPCVKIFHAGTALDLDGNFVAMGGRVLGVTAKGRDLKEARDRAYDAVEEIKWPGGFYRRDIGWRALPQNEFARNA

SEQ ID NO: 71030 - protein, 130 aa, Gossypium hirsutum
  Clone ID: GOSHI-09MAY01-C74946_1.pep
MEGINEKEEAQKGSSPAELGKWAEIQDTLKKRVITVDDFPWRLASPSESEPQQQQLKYVGGVDVSFSKEEPSMACGSLVVLDLLHDLRLVYQEYTCLSLDIPYGPGFLAFREAAILLHLLAKMKKDASPF

SEQ ID NO: 71031 - protein, 53 aa, Gossypium hirsutum
  Clone ID: GOSHI-09MAY01-C74916_1.pep
RMNNIQILPSKAPLGENLVSHIILFFFRKRILNLTLFVQEKKENVDKSKHSTA

SEQ ID NO: 71032 - protein, 66 aa, Gossypium hirsutum
  unsure (1)..(66): unsure at all Xaa locations
  Clone ID: AI055459.1.pep
VTRNIVSTVNLDCKVDLKQIALQARDAEYNAKRFAAVIMRLRXLKTTALILAFGKMSALVLTVTAC

SEQ ID NO: 71033 - protein, 106 aa, Gossypium hirsutum
  Clone ID: LIB3584-028-P1-K1-F6.pep
MAEQGGLEGSQPVDLSKHPSGIVPTLQNIVSTVNLYCKLDLKQIALQARNAKYNPKRFAAVIMRIREPKTTALIFAFGKIVCTGAKSEQQSKLAARKYSRIIQKLG

SEQ ID NO: 71034 - protein, 442 aa, Gossypium hirsutum
  unsure (1)..(442): unsure at all Xaa locations
  Clone ID: GOSHI-09MAY01-C74196_1.pep
GRVGGRVGGLSAPTFGNGSLLYRLVLAKDAINLSGAFPRTPEYVEECQHPEAFDPSVVRGSIVICSFSAGFYNETSTLTAIFDTARVLGFMGFVLVANPSYGDFIGQPIPFSVSGALIPKVADAKIVSQYYEQQTLRDARGVVRQFNARAAIQDGRVASFGGQAPIVSRFSSRGPGFIDINRNPSDVLKPDILAPGNEIWAAWSPVSALDPILTGYNFALLSGSSMAAPHVAGIAALIKQKYPSWNPSMIASAISTTATKFDNNGGIIMAEGFNIGSLYSSNNFDXGAGFVNPTHAMGPGLVLSSEFEDYISFLCSMPFIDRFAIKAATRVWCGQSIGHPANLNIPSVTISALRRSLTVRRSFKNVPTKPETYVSLAIPPNGTTITLRPPWFTIAPEGTQDLDIEINVIKSTNEFTFGEIILTGSLNHIVRMPVTIRPVSIV

SEQ ID NO: 71035 - protein, 191 aa, Gossypium hirsutum
  unsure (1)..(191): unsure at all Xaa locations
  Clone ID: LIB3582-056-P1-K1-F5.pep
YVSQYYEQQTLRDARGVVRQFNARAAIQDGRVASFGVQAPIVSRFSXRGPGFIDINRNPSDVLKPDILAPGNEIWAAWSPLSALDPILTGYNFALLSGSSMAAPHVAGIAALIKQEYPSWNPSMIASAMSTTATKFDNNGGIIMAEGFNIGSLYSSNNFDFGAGFVNPTHAMDPGLVLSSGKPFHISKFYH

SEQ ID NO: 71036 - protein, 179 aa, Gossypium hirsutum
  unsure (1)..(179): unsure at all Xaa locations
  Clone ID: GOSHI-09MAY01-C74346_1.pep
MLITVLENMGLLCSKNHRYTEADAEENAQAADFDASAHPAPHAAEHIQKLLLLGAGESGKSTIFKQIKLLFQTGFDEDELKSYISVIHANIYQTIKKLHDGSKELAQNDADSSKYVLSSEKQTLALGRFIVFGWFDYTXINRELVQEIETLWKDIAIHETYARGNELQVPHCTHYFMEN

SEQ ID NO: 71037 - protein, 109 aa, Gossypium hirsutum
  Clone ID: GOSHI-09MAY01-C74226_1.pep
LVENLQAFCLIWREMNSQLNPYLILGSTRLTFSCSMMLNDTSTLVVHLSRLTIIGFKEGNRISWQVLKRFECINFDCSRKKKSRLFLFVNVIMNILTRHRNNLFITSNN

SEQ ID NO: 71038 - protein, 237 aa, Gossypium hirsutum
  unsure (1)..(237): unsure at all Xaa locations
  Clone ID: GOSHI-09MAY01-C75816_1.pep
FVISDWQGIDRITSPPHXANYTYSVQAAIQAGIDMVMVPFNLTEFVDDLTYLVDSKVIPMDRIDDAVQRILQVKFTMGLFETPMADFSLVNELGSQAHRDLAREAVRKSLVLLKNGKPGSTPLLPLPKKASKILVAGTHADNLGYQCGGWTINWQGFNGNNSTRGTTILGAIKSTVDQSTEIVFRESPDANFVKSNKFDYAIVVVGEPPYAETAGDSTNLTMIDPGPSAINNVCGTV

SEQ ID NO: 71039 - protein, 137 aa, Gossypium hirsutum
  Clone ID: GOSHI-09MAY01-C75556_1.pep
TMSGNTRNCSSYFDARQRYGEIKGLFFLDETQRDTEGKRRTDLHFLDLERGEISDVLSTTPPDVPLGSTVVTCGNHVYTIGGTILRGGILRSLNHVFRFDFKHAERGWRKVSSMLYPRGLPEALAAQGKDLRLQGIP

SEQ ID NO: 71040 - protein, 141 aa, Gossypium hirsutum
  unsure (1)..(141): unsure at all Xaa locations
  Clone ID: GOSHI-09MAY01-C75456_1.pep
AFSNGVEALIQKGYKKITPFFIPYSITNMGSALLAIDTGLMGPNYSISTACATANYCFYAAANHIRRGEADIMVAGGTEAAVMPTGIGGFIACRALSQRNDEPKRASRPWDKDRDGFVMGEGXGVLVMEXLDHAMQRGANI

SEQ ID NO: 71041 - protein, 71 aa, Gossypium hirsutum
  Clone ID: LIB3493-015-P1-M1-G12.pep
RVRINIDYSLIQKGYKKITPFFIPYSITNMGSALLAIDTGLMGPNYSISTACATANYCFYAAANHIRRGDL

SEQ ID NO: 71042 - protein, 84 aa, Gossypium hirsutum
  Clone ID: LIB3543-028-Q1-K6-G10.pep
LTLKISSPSVEFRHFCVFHRFLFCILTLSSFLSFSDKFFCPQKRGALFSLFYIVFFFLFFCPKQVFNLGFLDLLEFISGKYPYI

SEQ ID NO: 71043 - protein, 63 aa, Gossypium hirsutum
  Clone ID: LIB3493-009-P1-M1-E2.pep
KFSSPSVEFRHFCVFHLFLFCILTLSSFLSFSDQFFCNLIEYPNLYRFFLPLFCPKEIFISDS

SEQ ID NO: 71044 - protein, 186 aa, Gossypium hirsutum
  Clone ID: GOSHI-09MAY01-C75616_1.pep
METLSHTITASASPKPRLPRNDNVHRRLLRFRHGFSSLNLGTLRSQRSTSGFFKVECSQQSSKNCIDFTDPDWKSKFQQDFERRFNIPHITDTFPDAQSFPSTFCLKMRTPVTEDFAEGYPSDEEWHGYINNNDRVLLKVIHYSSPTSAGAECIDPNCTWVEQWVHRAGPREKIYFKPEEMKAAIV

SEQ ID NO: 71045 - protein, 268 aa, Gossypium hirsutum
  Clone ID: GOSHI-09MAY01-C75136_1.pep
AGSPFSAGIISANGLVAHSRSHGGGFAVRTEPCMARSVSVPGCSEVVSPPSLPSQDENLDTVKDAATDISRTGSRRDMATQMSPQGSTCSSPKESASFSLSTPAPLPIMELQSIHASKSEVRDVQIDERVTMTRWSKKHRTGNTAKSSQIVDDPTRPAADTRTPTWDVTETAKCVSTCGGEEAKITAWENLHKAKAEAAIRKLEMKLEKKRSSSMDKIMNKLRSARRRAQEMRSSMFPNQSHQVTRTSRKAIPFHGTSLTDCFTCLTV

SEQ ID NO: 71046 - protein, 227 aa, Gossypium hirsutum
  Clone ID: GOSHI-09MAY01-C75216_1.pep
MQANEFDGNAAFAGGGFMPFQATQTAPDRPSSSSKNSDARCLTPVTVKQLKDLSKVGESGISIDGVDVNNIVLVGIISKIDNAVSDCTFRVDDGTGWVECTKWIHEHVDSVEVDVLSVGMYVRVYGQFKSIQSRRSIHTFSIRPITDFNEIAHHFLECIYVHLYNTKLRLRMTNATDGMTAQPQVANSYSGNHIMGYSYQTNSTSQFSNQYNTDEEQIQWIKQENFW

SEQ ID NO: 71047 - protein, 150 aa, Gossypium hirsutum
  unsure (1)..(150): unsure at all Xaa locations
  Clone ID: GOSHI-09MAY01-C76966_2.pep
LESCSFADNWSNVLTGRSGVVFAVKLYPAGATTNSQDGVTDLFGKCLPVLEEMVEENMPLLVHGEVTDPDVDVFDREKVFIDTGLQPLIQRLPRLMVVMEHITTLDAVRFVESGVAGFLAATVTPQHLILNRNALFQGXLQPHNYCLPVL

SEQ ID NO: 71048 - protein, 311 aa, Gossypium hirsutum
  Clone ID: GOSHI-09MAY01-C76966_1.pep
AYRESILKALPADSNFTPVMTLYLTDTTSPNEIKLARRSGVVFAVKLYPAGATTNSQDGVTDLFGKCLPVLEEMVEENMPLLVHGEVTDPDVDVFDREFVFIDTVLQPLIQRLPRLKVVMEHITTMDAVRFAESGEEGFLAATVTPQHLILNRNALFQGGLQPHNYCLSVLKRETHRQAIVSAVTSGSKRFFLGTDSAPHEKQRKECSCGCAGIFNAPVALSLYAKVFEEAGALDKLEAFTSFNGPEFYGLPRNTAKIKLTKASWKIPDSLSFSFGNIIPMFAGETLEWQPCVGEKAEMLNEVQEVGANKG

SEQ ID NO: 71049 - protein, 49 aa, Gossypium hirsutum
  unsure (1)..(49): unsure at all Xaa locations
  Clone ID: LIB3493-003-P1-M1-E12.pep
LRGQTPKVVKQDKKKKPRGRAYKRIQXNRRFVIAVVGSGKKKGPNSSEK

SEQ ID NO: 71050 - protein, 58 aa, Gossypium hirsutum
  unsure (1)..(58): unsure at all Xaa locations
  Clone ID: LIB3493-041-P1-M1-E7.pep
KTLFARMLSLGGPASDVGDLDKKNNPRGRAYKRIQXNRRFVIAVVGSGKKKGPNSFEK

SEQ ID NO: 71051 - protein, 104 aa, Gossypium hirsutum
  Clone ID: GOSHI-09MAY01-C76506_1.pep
MGFSEKPRIDGRLENEGEKWVITGIPSLKPINTEPSEEEATAACSTTPTSKESKIADRLPCPPPATRRKPALRCHRNGVREFFTPPDFEALFNSHFHNAIRLPN

SEQ ID NO: 71052 - protein, 74 aa, Gossypium hirsutum
  Clone ID: GOSHI-09MAY01-C76736_1.pep
KTHTTAMEKKKSSNKKTQLLYVRYGRRLRGKPINLLVAKLAAPLTPLLTASHCKANTLSSASSILQALNHSDKF

SEQ ID NO: 71053 - protein, 174 aa, Gossypium hirsutum
  unsure (1)..(174): unsure at all Xaa locations
  Clone ID: GOSHI-09MAY01-C76006_1.pep
GRVGGRVGGRVGFSENNFKVEIINDLPADKTITVYRCGPLVDLCRGPHIPNTSFAKAFACMKASSAYWRGNKDRECLQRVYGISLPDQKRLKEYIRQIEEAKKYDHRLLGTEQELFFCHPLSRKLXFFLPHGTRIYNKLMGFIRNEYWKRGMKKVXSPHMYNMXLWETSGHAAI

SEQ ID NO: 71054 - protein, 124 aa, Gossypium hirsutum
  Clone ID: GOSHI-09MAY01-C76346_1.pep
MGLEGVEPSSFMADFLAGCGGYAVVDGGLATELERHGQDLNDPLWSAKCLISFPQLVRRVHLDYLEAGANVIIGASYQATIQGFEAKGLSIEEAETLIKRSVEIACEAREIYLQRCAKGWWDFL

SEQ ID NO: 71055 - protein, 277 aa, Gossypium hirsutum
  unsure (1)..(277): unsure at all Xaa locations
  Clone ID: GOSHI-09MAY01-C77726_1.pep
DYKRSASSLGDSLTAEDEREEGVLRASNGVHDNNLKDGSSHGSRMGSELETNKSHLKALNNTPKKSAKSNGVPHKNATKSSVEETLKVSPKSSSESSEGSNARHAEELKEVDVLDETPNGNKSFASDNEPVDAEDKFQVENEAALNEKINEMETRIEKLKAELREVAALEISLYXSVVPEHGSSAHKLHTPARRLSRLYIHACKHWEQNKRATIAKNTVSGLIFXLAKSCSNDVSRLTFWLSNTIVLREIISQAFGNSRNSSPLAWLSELNGSNKRS

SEQ ID NO: 71056 - protein, 101 aa, Gossypium hirsutum
  Clone ID: GOSHI-09MAY01-C77196_1.pep
MWLSGAEALGTDAVPGFLPTEDIVEKKDDEELAVSADEDQNLCALCGEPFDDFYSDETEEWMYRGAVYMNAPSGSVEGIDSSQLGPIVHAKCRPVSVGRPP

SEQ ID NO: 71057 - protein, 202 aa, Gossypium hirsutum
  unsure (1)..(202): unsure at all Xaa locations
  Clone ID: LIB3828-003-Q1-K6-H12.pep
YIPHIVSVGSPAPSSSRVTIASRSRVRGLLLXXIPAKQEGFGLQQLSLKXFSPSSLFNAVKLRRDGPLCLMTEHKEAIWSTYVATTKPDTSILNRLIDAGMSPRVEESMSVVNNEILRRHFLELTTNFLAPFGPYFRATTPSEGSSPYADPPPLPPFNADDFLMSLSARGVXXKFLSKRMRSNWXNLYRRFLKGPNFLPWFS

SEQ ID NO: 71058 - protein, 118 aa, Gossypium hirsutum
  Clone ID: LIB3584-002-P1-K1-C7.pep
PHIVSVGSPAPSSSRVTIARRSTGRIPAKQEGFGLQQLSLKKFSPSSLFNAVKLRRDGPLCLMTEHKEAIWSTYVATTKPDTSILNRLIDAGMSPRVEESMSVVNNEISPRHFLELTI

SEQ ID NO: 71059 - protein, 159 aa, Gossypium hirsutum
  unsure (1)..(159): unsure at all Xaa locations
  Clone ID: GOSHI-09MAY01-C70566_1.pep
MEIHEFDETKEDSLNITTNELNNLNISVTGVPNATISLNESISLPLKRNRRVRTKLDKLEARLQRARAAIKDAKNSSQLLDPEYVPIGPMYWDAXAFHRSYMEMEKQFKVFVYKRGEPPVFHDGPCXSIYSMEGNFIYQMDVHTKFRTNDPEKLMLLPS

SEQ ID NO: 71060 - protein, 197 aa, Gossypium hirsutum
  Clone ID: GOSHI-09MAY01-C70536_1.pep
MIMEEHWKLVYVIGILALGFAVKSNADGSISCGFPAIYNFGDSNSDTGGISATLNEILPPNGETFFGHPAGRASDGRLIIDFIAEGIKLPYLSAYMDSIGTNFRHGANFATGGSSVRPPGFSPFNLGIQISQFIQFKARTTTLYNQLSLNRRIPLSISNLPRPAEFSQALYTFDIGQNDLGHGFQTMSEKQVRDSIP

SEQ ID NO: 71061 - protein, 244 aa, Gossypium hirsutum
  Clone ID: GOSHI-09MAY01-C70496_1.pep
MEPETVAVAEVGQKRSRKGGLKQGKANGGGDHGGDQSEHEMHIWTERERRKKMRNMFSSLHALLPQLPAKADKSTIVDEAVTYIKNLQQTLQTLEKQKLEKLRNSATVDDDQSSIITSQVQPPESREAFFTDNQGPTNNYPVTIDMSQTFPAQASPACFQTWFSSNVVITMCGDDAQINVCSPRKPGTFATILYILEEHQLEVVSAHIFSDQYRTMYMIHVHAGGASEQFPELLSIEETFKLAA

SEQ ID NO: 71062 - protein, 77 aa, Gossypium hirsutum
  Clone ID: LIB3582-019-P1-K1-B2.pep
MELEKVSVAEVGEKRSRKGGLKQGKANGGVDHGADQSEHEMHIWTERERRKKMRNMFSSLHALLPQLPAKVIKIYII

SEQ ID NO: 71063 - protein, 140 aa, Gossypium hirsutum
  Clone ID: GOSHI-09MAY01-C70436_1.pep
EFKDKRKEKEKERKEKEREREREKGKDRSKKDETDSENLDISDSYGHKEEKKKEKEKDRKHRKRHAADDGSSDKDDREESKKSRRHGSDRKKSRKHAHSPDSDSESRHRKHKRDHRDGSRRNSGYEELEDGELGEDGEIQ

SEQ ID NO: 71064 - protein, 229 aa, Gossypium hirsutum
  Clone ID: GOSHI-09MAY01-C70756_1.pep
MEGMEMKEVKFENKDLKHLGFVRVVAIHALVCVSNLYEFAKQNSGPLRSTVEGPVTTVVGPVYEKFKDVADHLLRFLDKKVDEALHKIDNHLPAKAKQAIPRARPRVRKTAQHAWKLVDEARTNGPRGALHYATAEYKHLMVINSTKLWVKLNHNSAFHSVAEWVTPTAANWAGKYNKLINDMSGKGYIVFGYLPLIPVDEFGEAIKVAKAKEKEHLNDHKSDSSSGSD

SEQ ID NO: 71065 - protein, 119 aa, Gossypium hirsutum
  unsure (1)..(119): unsure at all Xaa locations
  Clone ID: uC-gsflnu33B114b09b1.pep
EVKFENKDLKHLGFVRVVAIHALVCVSNLYEYAKQNSGPLRSTVEGAVTTVVGPVYEKFKDVPDHLLQFLDKKVDEALHKIDDHLPAKAXHAINQAQYLVHKTAQHAWKLVDEARTNGP

SEQ ID NO: 71066 - protein, 143 aa, Gossypium hirsutum
  Clone ID: GOSHI-09MAY01-C70766_1.pep
MNQKTLLDRSDASWFIAFPFSKPDGRDAKTKSSRWSKVSSESSSSPTNYPDFSALPFDILTKIAAPFNFPNLLAASLVCRSWGDALRALREAMVLLRQGKQFKHGRGGVGRNLEKALVSFLKGSARGSTLAMADAGLVSWERG

SEQ ID NO: 71067 - protein, 188 aa, Gossypium hirsutum
  Clone ID: LIB3582-031-P1-K1-F5.pep
MESICISLKATATASPVNISQGRSNGGTVFWGETIRGGWDFGTQLWKSLRAENGVKKAKPGVAYSIITPEINKETMKFEPPKFEAPQADPKNVASIILGGGAGTRLFPLTSQRAKPAVPIGGCYRLIDIPMSNCINSGIKKIFILTQFNSFSLNRHLARTYNFGNGVNFGDGLVEVLAATQTPGEAGK

SEQ ID NO: 71068 - protein, 137 aa, Gossypium hirsutum
  unsure (1)..(137): unsure at all Xaa locations
  Clone ID: AI727392.1.pep
MESICISLKATATASPVNISQGRSNGGTVFWGETIKGGWDFGTQLWKSLRAENGVKKAKPGVAYSIITPEINKETMKFEPPKFEAPQADPKNVASIILGGGAGTRLFPLTXQRAKPAVPIGRCYRLIDIPMSNCINS

SEQ ID NO: 71069 - protein, 92 aa, Gossypium hirsutum
  unsure (1)..(92): unsure at all Xaa locations
  Clone ID: GOSHI-09MAY01-C71966_1.pep
PRVRVGSLRYALHLRFLCPSPKKGSKSFLRCKSDPGSVPQKTSIEKDGDRRFYLYNDLRVVFPQRHSDADEGKLKVEXYHYPEDPRYFEISN

SEQ ID NO: 71070 - protein, 99 aa, Gossypium hirsutum
  Clone ID: GOSHI-09MAY01-C71886_1.pep
DTKEFDMDVIIETNRTTARIFPAVLDVENPEFKRRLDKMVEINEQLLAVGETSDIPLVKNLKRIPLIAALASELLATYLMPPIESGSVDFAEFEPQLVY

SEQ ID NO: 71071 - protein, 220 aa, Gossypium hirsutum
  Clone ID: GOSHI-09MAY01-C71416_1.pep
MIGDGSSPLPLNRRRLTNIDSMEAASAKAKLAAAKEKFGREIHVFETEGPSPIQNEVPSTEESDDVYEFTAEDYHRVMATKKEDNYLKTRKIREAEEAARRSRVTKAVIRVRFPDNHTLEVTFHPSETIQCLYDLIMRVISRPDLPFYLYTTPPKKQIKDMTQDIFSTGFIPGAIVYFSYDLPKGADATAANSAAFLLDEVMSLKGLEVILVLTGKGSSI

SEQ ID NO: 71072 - protein, 158 aa, Gossypium hirsutum
  Clone ID: GOSHI-09MAY01-C71196_1.pep
MASSILISSKFSPFHFPSPKSSLFLPAPTSLHFPSSNPPRFPSFPSKSLPKAKSLLISSSLAPTPPTPLRRPLYIPNHIPDPNYVRIFDTTLRDGEQSPGATLTSKEKLDIARQLAKLGVDIIEAGFPAASKDDFEAVTAIAKEVGNAEDENGFLPVV

SEQ ID NO: 71073 - protein, 220 aa, Gossypium hirsutum
  Clone ID: GOSHI-09MAY01-C71346_1.pep
MEDGKSSSQSAGKPIRCKAAICREAGEPLVIEEIMVAPPCPYEVRIRIICTSLCYSDITFWKLTVPPACVPRILGHEAVGVVESVGENVNEVAPGDVVIPTFLSECGECEDCCSKRSNLCSKFPFKIHPWMPRYENSRFTDLKGEVLYHFLFVSSFSEYTVVDINHVVKIDPAIPPNRACLFGCCIATGVGAACKVANVEAGSTVVIFGLGSIGLAVARE

SEQ ID NO: 71074 - protein, 201 aa, Gossypium hirsutum
  unsure (1)..(201): unsure at all Xaa locations
  Clone ID: LIB3584-022-P1-K1-C3.pep
VNRSQADIKKNVDMIASRRKEREFFASSPDYGHLASKMGSEYLAKVLSKHLESVIRARLPGITSLINKSIEELEAELSHLGRSVAVDAGAQLYTILELCRAFDRIFKEHLDGGRPGGDRIYGVFDHQLPAALRKLPXDRHLSLANIRKVVLEADGYQPXLIAPEQGIDRLLVGALNYFRGPTKGFCKNLCTFFLKKVWKKG

SEQ ID NO: 71075 - protein, 166 aa, Gossypium hirsutum
  Clone ID: LIB3585-062-P1-K2-E8.pep
GGRPGGDRIYGVFDHQLPAALRELPFDRHLSLQNIRKVVSEADGYQPHLIAPEQGYRRLIDGALNYFRGPAEASVDAVHFLLKELVRRSIAETQELKRFPTLQAEIAAAASEALERFREESKKTTLRMVDMESSYLTVDFFRKLPQEVEKGGNPTFSSVDRYAESH

SEQ ID NO: 71076 - protein, 204 aa, Gossypium hirsutum
  Clone ID: GOSHI-09MAY01-C71226_1.pep
GIHYLVGGGGCSSHFPKRINSRKGYSSFLFIDRVPPRLLQRSMNDNLEQMLIQDENLTDRSPFLKLRRWQWWLLVAINILFLIAGQAAAVLLGRFYYDQGGNSTWMATFVQTAGFPILCIPLIFLHPSQKLETSTSSTYPSIKIVALLYFVLGLLVAGDNMLYSVGLLYLSASTYSLICATQLAFNAVFSYLLNSQKLTALILN

SEQ ID NO: 71077 - protein, 175 aa, Gossypium hirsutum
  unsure (1)..(175): unsure at all Xaa locations
  Clone ID: GOSHI-09MAY01-C72886_1.pep
MENQAKKVLLTSNGDDMSVNIALHLAKRGCRLVLMGNEWCLRSVREKLMGSTDGNVVPMEVVGLDLEAESEGAFDDAVDKAWNVFGXLDALLNCYAYQGKMQDXILQLGEEEFRRIIKVNFMAVLFLQKAVAKRMRDHKTGGSIVFMTTILGAERGLHQELLHMFVFGRSAQLAK

SEQ ID NO: 71078 - protein, 133 aa, Gossypium hirsutum
  Clone ID: GOSHI-09MAY01-C72526_1.pep
LALIVVLALAFGHDTWAGFFSDSASIIKDFATMTPFLAISIAVDSFQSVLSGVARGIGWQHMVVVVNLASYYVVGMPIAAIAGFKFKLYAKGLWWGFICGLLIQAAILLVITFHRRWSKIDISAERDEENSVD

SEQ ID NO: 71079 - protein, 157 aa, Gossypium hirsutum
  Clone ID: GOSHI-09MAY01-C72766_1.pep
MGSVPSELSLDFRPKFIPKTISNFLEEISLMGSVSDKVSKLDSFVKRLEEEMRKIDGFKRELPLSMLLLNDAILALKEESTQCIRRRNVEPVLEEFIPLKNNRKENNNHSDDEEEDDSKKNWMSSVQLWNTDDDDHSSIDDKLDTKRNHGDPFKNRG

SEQ ID NO: 71080 - protein, 122 aa, Gossypium hirsutum
  unsure (1)..(122): unsure at all Xaa locations
  Clone ID: GOSHI-09MAY01-C72646_1.pep
IIDGLCGLPNKIREVLKLDQEMKDLAKLLIAEQSLLVFGRGYNYATALEGALKVKEVALMHSEGILAGEMKHGPLXALVDENLPIVVIATRDACFSKQQSVIQQLRARKGHLIVMCAKGDAA

SEQ ID NO: 71081 - protein, 103 aa, Gossypium hirsutum
  Clone ID: GOSHI-09MAY01-C72666_1.pep
SQQNAKHRLESPQSIPQLCYLSTAGHKSLFRNKPWLLPLGQLLEMTNSTNHGFRSKVWMPPTLAMRYSFLLHPKSKAQKHAMPLELSDRHVVQTYGSHTPIPH

SEQ ID NO: 71082 - protein, 118 aa, Gossypium hirsutum
  Clone ID: GOSHI-09MAY01-C72126_1.pep
MPRGIKFASAISESGEIKVEGQVKDGIPHLTKVGSFEVDVSLEGSIILCRQVDQPGLIGKVGSILGQENVNVSFMSVGRIAPRKQAVMAIGVDDQPSKGSLQRIGEVPAIEEFVFLKL

SEQ ID NO: 71083 - protein, 186 aa, Gossypium hirsutum
  Clone ID: GOSHI-09MAY01-C72246_1.pep
MEVERVQEIANFSKETIPEEFIRTTYEQPALTTVQGTVLEVPVIDLSDPDEEKVVRTIVDASSNWGMFQVVNHGIPHETVRKLKEVGKAFFELPPQEKEAYAKSPGSQSIEGYGTKLQREVEGKKAWVDHLFHKIWPPSEINYQFWPKNPPSYRKNNEEYAKHMPWGFDKLFRCLSLGLGLEGNEM

SEQ ID NO: 71084 - protein, 87 aa, Gossypium hirsutum
  Clone ID: uC-gsflmaxxa040a04b1.pep
MEVERVQEIANFSKETIPEEFIRTTHEQPALTTVQGTVLEVPVIDLSDPDEEKVVLTIVDPSSNWGMLLDLHFGFVSLGTKATYRSL

SEQ ID NO: 71085 - protein, 186 aa, Gossypium hirsutum
  Clone ID: GOSHI-09MAY01-C73956_1.pep
MSARSTAGQVIRCKAAVAWEAGRALTIEEVEVAPPQAMEVRLKILFTSLCHTDVYFWEAKGQTPVFPRIFGHEAGGVVESLGEGVTDLKPGDHVLPVFTGECGDCRHCKSEESNMCDLLRINTDRGVMLSDGKTRFSINGKPIYHFGGTSTFSEYTVVHVGCVAKVNPAAPLDKIFVLSCGISTGL

SEQ ID NO: 71086 - protein, 136 aa, Gossypium hirsutum
  Clone ID: LIB3583-010-P1-K1-B2.pep
LAAVAWEAGRALTIEEVEVAPPQAMEVRLKILFTSLCHTDVYFWEAKGQTPVFPRIFGHEAGGVVESLGEGVTDLKPGDHVLPVFTGECGDCRHCKSEESNMCDLLRINTDRGVMLSDGKTRFSINGKPIYHFVGT

SEQ ID NO: 71087 - protein, 67 aa, Gossypium hirsutum
  Clone ID: GOSHI-09MAY01-C73976_1.pep
RVQRTVCLLHPFLKVVRRIGWFGNMRVLGNTLLRVDIGLLILTTYETLLTDPLLVRITKYFKMLYGH

SEQ ID NO: 71088 - protein, 180 aa, Gossypium hirsutum
  Clone ID: LIB3583-010-P1-K1-C11.pep
SFGNGGPNPQLSGPGSGQRGGIDSGAESDPLSNVGTGMGFNASSSFVPSNMANPGSSGQVQSQQYSNLSGNHILPDQQQPQQPESQQFQHGQQGMQQVSAPHNTQQGQQQQQQQQQQQQFQSIRGGMAGVGAVKLEPQLTNDQHSQPQQLQTLRNLAPVKLEPQQIPPSRTLAQVKMEPQ

SEQ ID NO: 71089 - protein, 177 aa, Gossypium hirsutum
  Clone ID: LIB3582-006-P1-K1-D8.pep
DPLSNVGTGMGFNAPSSFVPSNMANPVSSGQVQGQQYSNLSGNHILPDQQQPQQPESQQFQHGQQGMQQVSAPHNTQQGQLQQQQQFQSIRGGMAGVGAVKLEPQLTNDQHSQPQQLQSLRNLAPVKLEPQQIPPSRTLAQVKMEPQHSDQSFLHQQQQQQQQQQQQLLQMSRQPPQ

SEQ ID NO: 71090 - protein, 168 aa, Gossypium hirsutum
  Clone ID: GOSHI-09MAY01-C73686_1.pep
MISLIFNQIFKLSATTSIINSHIREMEKLVSSWCKNKPLPESYIFPPETRPGNLVVPTCNSIPVIDLSKAEGQNRTHTVQQILKAGQEYGFFQVVNHGVPESLMNESMDVFKEFFEMPWEDKAMLYSEDPKNSCRLSTSSVNYAREKIHHWRDNLRHPCHPLQSCIKH

SEQ ID NO: 71091 - protein, 90 aa, Gossypium hirsutum
  Clone ID: GOSHI-09MAY01-C73606_2.pep
SFPYPCKLQTLFFIPFPSPFPLLLVLKKPNSYIHYSVLNFGFDFSMFFLQYITEAFGRLVYSSLQVQTVVGNLVWRVETGESEMALWGLG

SEQ ID NO: 71092 - protein, 81 aa, Gossypium hirsutum
  Clone ID: GOSHI-09MAY01-C73606_1.pep
NCESMFKAWRFTLGQALKSHLRFSTLRSPYRVTNNRLERQVDEMTKCFYDVLKKEHSKMRTAIKNRIMNIKIGFFSKPKGA

SEQ ID NO: 71093 - protein, 118 aa, Gossypium hirsutum
  unsure (1)..(118): unsure at all Xaa locations
  Clone ID: uC-gsflnu33B126b06b1.pep
MGVAEDSEPPLKRVKGPLEESKSLPEDHSTTKSVSCSLGDQMARPLTSQGDGETIGSHGVIRKAEFIKIITRALYSLGYDKSGALLEEEXGIPLHSLVANLSHGHVTNGKWDDVWPHC

SEQ ID NO: 71094 - protein, 259 aa, Gossypium hirsutum
  unsure (1)..(259): unsure at all Xaa locations
  Clone ID: GOSHI-09MAY01-C73156_1.pep
VDTLVKKAYXSWQQIIEYEGKSLLNFKQNRRSSARNEPQTDAIGYPNALDHQLQLPVAVPTEQVHSGPQAGGFNDNQSTRYPGQSELVNSNSRSQFDSTQFLQYDQLVNNSEQPQSSRTNNNAVGLALGPPQSSTLGFHNAISSMQPSNLNPFDDWSNNRDKGVEDLFSEEEIRLRSHEMLENEDMQHLLRLFSMGGHHATVTEDGGFGFPNYMPSPMVNFNXTKIRSRPGKAVVGWLKXQGAAMRWGVFLPYRTVSFA

SEQ ID NO: 71095 - protein, 311 aa, Gossypium hirsutum
  Clone ID: GOSHI-09MAY01-C73356_1.pep
IIIIYEEFLFLGGLVEIGSVEKSFTQHSYCIEGNLYYVIFQFQLSSYEQKGYKNVKASALGAPAIRVTSSSNDLLDSQVKEQTEKEELDRNQSSHRFPFWSLFSDNSPLTKYDATDNGFASDPFTVGTPRSRHRLTMLLLKSSLVVIVILALTGSFWWTLSISTSSRGHIFHSSRRLQEQLVSDLWDIGELSFGTSRMKEIEFCPGELENYIPCFNVSENLDSGFSDGNEYDRVCRQRSRQNCLVLPPMNYKIPLRWPTGRDIIWVANVKITGQEVFTSGKLTKRMMMFGGEQISFRSASLMFDGVEDYSH

SEQ ID NO: 71096 - protein, 157 aa, Gossypium hirsutum
  unsure (1)..(157): unsure at all Xaa locations
  Clone ID: GOSHI-09MAY01-C68986_1.pep
SILSKRVPLPNGGSLVIEQTEALVSIDVNGGHGMFGHGTSQEKATLDVNLAAAKQIARELRLRDIGGIIVVDFIDMADDSNKRLVYEEVKKAVERDRSMVKVSELSKHGLMEITRKRVRPSVTFMVSEPCTCCHGTGRVEALETSFXKIEQEIGRLL

SEQ ID NO: 71097 - protein, 147 aa, Gossypium hirsutum
  Clone ID: GOSHI-09MAY01-C68976_1.pep
DELMCALLPDSPSATASRTKSGPIWITNGDPLQHPVGSALSAVLHSDYMRASDNEILRCGDDSLEPSDLRQFAQSQADYVLGDHPMDISYLVGYGGKYPPFVHHRGASTPVDATTGCSEGFKWLSSKKPNPNVAIGALVGGPFKNEL

SEQ ID NO: 71098 - protein, 113 aa, Gossypium hirsutum
  Clone ID: GOSHI-09MAY01-C68556_1.pep
MAQKVVLKVLTMTDEKTKQKSIEAAADIFGVDSIAADLKDQKLTVIGQMDAVAVVKKLKKVAKVDIISIGPAKEEKKEGKKEEKKEEKKQEKKEEKKEEKKEEKKEEKKEEKK

SEQ ID NO: 71099 - protein, 195 aa, Gossypium hirsutum
  unsure (1)..(195): unsure at all Xaa locations
  Clone ID: GOSHI-09MAY01-C68506_1.pep
VVGKTSYAGNFSGYDEFVPMVDKAVDSSWKKQTSLLRPSASKGTLAAPETPKAQEGIRAWILLMLMAFFMTLYTLFHSVALNITRKLPNSVSGHCQNVTEPKPNATQKEECRAPSPTALQTQADLLSSVIERLGELEQKVGTLQAKPSKMPYEKEELLNSAVCRVETLKAELIAAKKALHKXLMKQKELFASLNS

SEQ ID NO: 71100 - protein, 247 aa, Gossypium hirsutum
  Clone ID: GOSHI-09MAY01-C68536_1.pep
GRVGGRVGKSYASIVKFMKENGVPLSTRTHSLVKSAVKSHDQPGTVAPPISPAPVSDAQISNNSITENGTNQDVEAEGPSIYVKGLPLHATPSMLENEFKKFGPIKNGGIQVRSQKGFCFGFVEFELASSAQSAIEASPINIGGRNAIVEEKRSTSRGNKGRSSGSGAGYRNDGARGGVYGGGGGRGYSRGEFGNRSNNRGGYSNRRGDGYQRGDMGSNGGSRMNRSGGLAVNAAAKNMAPRVPAPA

SEQ ID NO: 71101 - protein, 226 aa, Gossypium hirsutum
  Clone ID: GOSHI-09MAY01-C68456_1.pep
MIPNSYRKRQRVPHRHTAATRLSSTATVVNSFSDKTVSESSQKLHRTSSAASTITTSPNAVTSSFNDPYTADVLLRLFVDRSPFDSDAPSDSSRQSDIQIYLHSAVIRRAKYFAAILSDCWQHRTNADAKSNNGAEGSRSNDNNNNLVHLNLAVVDDPNSISIHLTVLQLLYTSDFATVIDSASTALEILPVALELLFEDCVKSCLRFLEAVPWSEEEEKRVLSLI

SEQ ID NO: 71102 - protein, 48 aa, Gossypium hirsutum
  Clone ID: GOSHI-09MAY01-C68656_1.pep
KYNSMKIMFNRPKTTKTNLLKLKTNDTQKIYSFHHHISSFGSKKQFPF

SEQ ID NO: 71103 - protein, 182 aa, Gossypium hirsutum
  Clone ID: GOSHI-09MAY01-C68666_1.pep
IFIADHPVELESPKPDQLSPETPADHIFRSKLPDIPISNHLPLHTYCFENLPSLSDKPCLISGSSGKIYSFSETHLIAQKTAAGLSNLGIQKGDAIMILLHNCAEFVFAFMGASMIGAVSTTANPFYTSKEIFKQFIAARAKLIITQSQYVDKLKDTNNNNDGVENFPKIGEDFKVITIDDP

SEQ ID NO: 71104 - protein, 271 aa, Gossypium hirsutum
  unsure (1)..(271): unsure at all Xaa locations
  Clone ID: GOSHI-09MAY01-C68106_1.pep
MGFPSILSRIAISRNLLSSKPTNPSILLSSRWFSNLVANNTDKAESSLPATSAAYHVSSGGYMRGTVFWEPDTPLTIEEFHMPRPKAGEVLIKTKACGVCHSDLHVIKGEIPFSSPCVIGHEVTGEIVEHGPLTDRKIIERFPIGSQVVGAFIMPCGNCFFCSKGHDDLCEDFFAYNRAKGTLYDGETRLFLRNSGKPVYMYSMGGLAEYCVIPALGLAVLPQSLPYTESAILGCAVFTAYGAMRHAAEVXPWDSIAVIGVGXVCSSCLQI

SEQ ID NO: 71105 - protein, 225 aa, Gossypium hirsutum
  unsure (1)..(225): unsure at all Xaa locations
  Clone ID: GOSHI-09MAY01-C68036_1.pep
MQKNVKDCNFLFYTKLVLTFKLINGRIFTXFEMQHRFSEPVKNWSNSTGKLSHWPLKDSFEYYAVLAHRDRLLRGRKLSGPSTTLSCAVGNFTFQINSLGFLHYTTVQLGTPGVKFMVALDTGSDLFWVPCDCTKCAPTEGTVYASDFELSIYDPKGSSTSKKVTCSSSLCAQRNQCLGTFSNCPYMVSYMSAQTSTSGILVEDVLHLTTEDGHPDSVEAYVTFG

SEQ ID NO: 71106 - protein, 200 aa, Gossypium hirsutum
  Clone ID: GOSHI-09MAY01-C68376_1.pep
MESELNNLIKLWVLTTFSLSYSYHISAKISKGFPRLVSIFPVIFLLSILPFNIHGFHLGAAHVFVFSWMANFKLLLFAFDRGPLSPPPANLILFILAACSPFKIKENSVKVLKGETPFQGNQPRVVPSLILEAVNKASLLTLLFYSYNFKQYFHKHVLLILYFFHTFLSIQFLLAVAAIPAQICLPGVELEPQFNAPLRA

SEQ ID NO: 71107 - protein, 208 aa, Gossypium hirsutum
  Clone ID: GOSHI-09MAY01-C69866_1.pep
LKEDENNLEALLLRGQAYYYLADHDVAQRHYQKGLRLDPEHSELKKAYFGLKNLLKKTKSAEDNVNKGKLRLAVEDYKGALALDPDHLAHNVHLHLGLCKVLVKLGRGKDASSSCSEALNIDGELLEALVQRGEAKLLTEDWEGAVDDLKSAAQKSPQDMNIREALMRAEKALKMSKRKDWYKILGVSKTSSVAEIKRAYKKLALQWH

SEQ ID NO: 71108 - protein, 177 aa, Gossypium hirsutum
  Clone ID: LIB3584-042-P1-K1-A4.pep
IVHYLSGPIRVVDKNETPAMPGDLLAVEICNLGPLPGDEWGYTATFDRENGGGFLTDHFPCATKAIWYFEGVRFPGLTHPGIIGTAPSMELLNIWNEREREVEENGHKSLKLCEVLHSRPLANLPSTKGCHLGKIKKGTAEWEKIAKEAARTIPGRENGGNCDIKNLSRGSKIYFPV

SEQ ID NO: 71109 - protein, 131 aa, Gossypium hirsutum
  Clone ID: LIB3584-048-P1-K2-C2.pep
IKKGTAEWEKIAKEAARTIPGRENGGNCDIKNLSRGSKIYLPVFVEGANLSTGDMHFSQGDGEVSFCGAIEMSGFLELKCEIIRGGMKEYLTPMGPTPLHVNPIFEIGPVEPRFSEWLVFEGISVDESGRQ

SEQ ID NO: 71110 - protein, 206 aa, Gossypium hirsutum
  unsure (1)..(206): unsure at all Xaa locations
  Clone ID: GOSHI-09MAY01-C69456_1.pep
MKASGLGWAVLLVLLGLVVNGKAEIYIVTVEGEPIISYKGGENGFEATAVESDEKLDTTSELVTSYASHLEKKXDMLLGMLFEHGSYKKLYSYKHLINGFSVHLSPQQAETLKRAPGVKSVERDWKVRKLTTHTPQFLGLPTGVWPAGGGFDRAGEDIXVIRFVDSGIYPHHPSFAAHHDDPYGPVPKYRGKCEIDPDTKRDFCNG

SEQ ID NO: 71111 - protein, 192 aa, Gossypium hirsutum
  Clone ID: GOSHI-09MAY01-C69686_1.pep
LVGFMAGAAVIAASQQLKGLLGIVHFTGKMQFVPVMTSGFDHKDEWSWQTIVMGLGFLLSLLTTRQITIKKPKLFWVSAAAPLTSVILSTILVFCIKSKAHGISYIAHLPKGLNPPSLNMLYFNGQYLALTIKTGLITGILALTERIAVGRTFASLQNYQVDGNKEMMAIGLMNMAGSCTSCYVTTGSFSRS

SEQ ID NO: 71112 - protein, 115 aa, Gossypium hirsutum
  Clone ID: GOSHI-09MAY01-C69666_2.pep
LKRRIIDTVHLFHLARHVFKIYILKGFFEAGSYAKTFAVLSGVHSLVVCFLKRLRGKDDVINAGVAGCCTGLALSFPGAPQALLQSCLNFGAFSFIIEGLNKQEPALAHSFLRET

SEQ ID NO: 71113 - protein, 208 aa, Gossypium hirsutum
  Clone ID: GOSHI-09MAY01-C69666_1.pep
MATSDSPNTSAESDIETNPNPNSSKAIIPTPSNSNSPAVCLFQFAGDSAAGAFMGSIFGYGSGLIKKKGFKGSFVEAGSYAKTFAVLSGVHSLVVCFLKRLRGKDDVINAGVAGCCTGLALSFPGAPQALLQSCLTFGAFSFIIEGLNKQQPALAHSFSARNKSAHHKGPRPLALPLSIPIPDELKGAFSSFCKSLVKPNKGRFPTGN

SEQ ID NO: 71114 - protein, 63 aa, Gossypium hirsutum
  Clone ID: uC-gsflnu33B089a11b1.pep
KGCYEHTEDRDGQHKLETSPVVIEKAEHRNRGSEATGKERVKRKTKHEAGKRKHKRSRRLIVT

SEQ ID NO: 71115 - protein, 272 aa, Gossypium hirsutum
  unsure (1)..(272): unsure at all Xaa locations
  Clone ID: GOSHI-09MAY01-C69156_1.pep
QQMDVLGRLRHPNLVSLKAYYFAREEKLLVYDYMPNGSLFWLLHGNRGPGRTPLDWTTRLKIAAGAARGLAFIHYTCKALKLTHGNIKSTNVLLDKSGDARVSDFGLTIFPSPTNNAPRSDGCRAPELSSDGXRKPTQKSDVYSFGVLLLEILTGKCPSVVDNGGAAVYGYGGPLDLPRWVQSVVREEWTAEVFDLELMRYKDIEEEMVGLLQIAMACTSASPDQRPKISHVVKMIDEIRGVEVSPSHDQALDSVSDSPCLSEDTCGGAVSQ

SEQ ID NO: 71116 - protein, 105 aa, Gossypium hirsutum
  Clone ID: GOSHI-09MAY01-C64996_1.pep
MCRVNSTSIAFLSVLLFCFSSFEVTYSAREGKQWRKQSIAGGFRRLMAKGGSSDVVADATTTFNVLDYGAKGDGRTDDSKAFEAAWADACKVEASTGMVPSGSIF

SEQ ID NO: 71117 - protein, 279 aa, Gossypium hirsutum
  Clone ID: GOSHI-09MAY01-C64516_1.pep
MVYSKDQLLARLKELQIDFSQYEHPVVLTVEAQAKYVGNVGGALSKNLFLKDKKHRYYVVSALADTKVDMKVLSQRLGLGKGGLRMAAEEALVEILKVPLGCVTPFAVVNESASHVSLLLDQGFKTQECCFFHPLSNDMSISLNALGLDKFLKSIGRDPSYVDLEANPPVGKDQPPDLAAFVPSGAPVLPDLPVKAPTQDSTGKHVSAASNSAAVAAKAVKPSGAVQNVKEKSVNGVRPSIPSTDAGKFVEELLDRTSTLLLSEISEDSIKRHGGQLGA

SEQ ID NO: 71118 - protein, 98 aa, Gossypium hirsutum
  Clone ID: LIB3583-007-P1-K1-D2.pep
FLYILHAGAAPSTTFLFSLCYNVCLVGYKDLLAFLGCAFQSISSFNFQFCHFFEDMSHYCWIKDSKLKSIAFSTHFPMTCQSVSWEKECTRYAHILLS

SEQ ID NO: 71119 - protein, 120 aa, Gossypium hirsutum
  Clone ID: LIB3828-009-Q1-K6-D3.pep
SWPCFSYGGYAFVPSSLVTGTWIGILQELQIEFSQYEHPVVLTVEAQAKYVGNLGGALSKNLFLKDKKHRYYVVSALADTKVDLKVLSQRLGLGKGGLRMAAEEALVEILKVPLGCVAPF

SEQ ID NO: 71120 - protein, 117 aa, Gossypium hirsutum
  unsure (1)..(117): unsure at all Xaa locations
  Clone ID: LIB3272-006-P1-K1-G6.pep
LTNTLAFSKDQLLDRLKELXIEFSQYEHPVVLTVEXQAKYVGNLGGALSXKNLFLKDKKHRYYVVSALADTKVDLKVLSQRLGLGKGGLRMAAEEALVEILKVPLGCVTPFAVVNES

SEQ ID NO: 71121 - protein, 83 aa, Gossypium hirsutum
  Clone ID: uC-gsflnu33B011a12b1.pep
YHEHRSHHTVDLKANPSVGNDQAPDLAAFVPSDAPIVADLAAQAPTQDSTGKHVSAASNSAAVAAKAIKPSGNAHNVKGEASQ

SEQ ID NO: 71122 - protein, 80 aa, Gossypium hirsutum
  Clone ID: GOSHI-09MAY01-C64496_2.pep
LKGQGKKDFPLTQNGVGKKVLGDIEILHTDTLIKEVEKVFSANHPDPVEIEKAKKVLNEHEQALVDAIARLEDASDGESA

SEQ ID NO: 71123 - protein, 293 aa, Gossypium hirsutum
  Clone ID: GOSHI-09MAY01-C64496_1.pep
SVASLSMGAPSPALHPWMQPSSSASRRGPMPGANSKKSKSLMQHPSRGLPGKPQAPNRTSTGAAAAQRPAGAAPCDPLIGRKVWTRWPEDNHFYEAVITDYNAAEGRHALVYDINTADETWEWVNLKEISPEDIKWEGEDPGISRRGGRPGQGHGVKKSMSRGGGVAGAGRGRGSLKGQAKKDFPSKQNGVGKKVLGDIEILHTDTLIKEVEKVFGASHPDPIEIEKAKKVLKEHEQALVDAIARLEEASDDESDGEHRFSQGQSMDQERAWRKRQYDEMGEGRMIEGSDGNK

SEQ ID NO: 71124 - protein, 183 aa, Gossypium hirsutum
  unsure (1)..(183): unsure at all Xaa locations
  Clone ID: LIB3825-027-Q6-K6-G8.pep
GTELFKVNADDMILRIREWRAAGGMQPGMLSTSQPIHDXXPSPSVSGITQXNXKTSQSVASLSMVAPSPALHPSMQPSSSALRRGPPSGAKSKKSKSSTQYTSTGLPGRPQASNRMSSGAFATNEPAEAAPYDPLIGRKVWTRWPEDNHFYEAVITDYNRLEGRHALVYDINTADETWEWVNL

SEQ ID NO: 71125 - protein, 234 aa, Gossypium hirsutum
  unsure (1)..(234): unsure at all Xaa locations
  Clone ID: GOSHI-09MAY01-C64736_1.pep
MEKDAVRINNSGIGNSTNYSRDRNGGAGDGGLLRSSSDPAKQTASSSDFVLQWGNRKRLRCMKIQVKDDQSGPVNRTTVRVDRRVVRADRDSSNQPSNNNHGNGYFNLRQRPASPQAPPSQRVLRNPASATKKEAHLQEAVRQLHPXVWPPKFVIALTNKEKEEDFMAIKGSKLPQRPKKRAKFIQRTLNLVSPGAWLCDLTLERYEVREKKISKKGPRGLKAMGNSNMESDSE

SEQ ID NO: 71126 - protein, 172 aa, Gossypium hirsutum
  unsure (1)..(172): unsure at all Xaa locations
  Clone ID: GOSHI-09MAY01-C64606_1.pep
MEAGKPHAVCIPLPAQGHINPILLFAKLLHFHGFHITFIHTEFNYYRLIQSRGLDSLRGSPDFRFETITDGLPSTNMRGIQDLPDLCSXVAGSWLRSFRELIMKLMLDQDVPRLLAYIEWGDELTWKLLKNWHPEIGLFILMLGMWGTFILKPKNVILPLKISELIMVSETR

SEQ ID NO: 71127 - protein, 85 aa, Gossypium hirsutum
  Clone ID: GOSHI-09MAY01-C64396_1.pep
MQTLCSCENGIEVRTMMENKRSPCSVDHSSFTPLASKRQKSDLLISTKDRKDKVGERIVTLQQLVSPYGKTDTASVLLQAMEYIQ

SEQ ID NO: 71128 - protein, 66 aa, Gossypium hirsutum
  unsure (1)..(66): unsure at all Xaa locations
  Clone ID: GOSHI-09MAY01-C64356_1.pep
MATPVEPPNGIHYQGKHYYSMWQTTFEIDTKYVPIKPIGRGAYGIXCSSVIRVTNEKVAIKKINNA

SEQ ID NO: 71129 - protein, 147 aa, Gossypium hirsutum
  Clone ID: GOSHI-09MAY01-C65936_1.pep
LAGIDPRVRLLIIHPSDHPPRRLLIPWVFGGFFTSIVWLYMIANELVALLVAFGVIFGINPSILGVTILAWGNSMGDLVSNVALAMNGGDSVQIAMSGCYAGPMFNTLVGLGISLLLGASSKSPSSYLVPQDSTLVYTMGFLMSGLI

SEQ ID NO: 71130 - protein, 180 aa, Gossypium hirsutum
  unsure (1)..(180): unsure at all Xaa locations
  Clone ID: GOSHI-09MAY01-C65406_1.pep
YILGAWQRSGFGKGDSIALEITKHGADCNIIPSLNFETHHAGEVGNVGESEKIKSFQPCPPRYVDYTPCQDQKRAMTFPRDNMIYRERHCPREEEKVHCLVPAPKGYVTXFPWPKSRDYVPYANAPYKALTVEKAIQNWIQYEGNVFRFPGGGTQFPQGADKYIDQLAAVIPITNGTCRT

SEQ ID NO: 71131 - protein, 48 aa, Gossypium hirsutum
  Clone ID: LIB3272-022-P1-K1-C2.pep
GILFVCNTLEIVKLSSGVSARGRRYNLPNLVKSLVFFLVLFFFQYLRV

SEQ ID NO: 71132 - protein, 48 aa, Gossypium hirsutum
  Clone ID: LIB3272-051-P1-K1-G7.pep
GILFVCNILEIVKLSSGVSARGRRYNLPNLVKTLVFFFVLFFFQYLRV

SEQ ID NO: 71133 - protein, 226 aa, Gossypium hirsutum
  Clone ID: GOSHI-09MAY01-C65686_1.pep
MEFHRFLFYASIILSISVYLFPIMANSMGINYGQMADNLPSPEDVVPIVKSIGATKVKLYDADPKVLIAFANTGVEFIVGLGNEVWDKMRDPPKAQAWVKQNVQSHLPATKITCIFVGNEVLTFNDTSLSNSLLPAMQSVHTALVNLGLDKQVTVTTAHSLSILETSYPPSSGAFREDLVDCLSETLSFHQKTGSPFLINAYPFFAYKGNPKQVQLDFVLFQPNQG

SEQ ID NO: 71134 - protein, 184 aa, Gossypium hirsutum
  Clone ID: GOSHI-09MAY01-C65346_1.pep
TVLPLNLEVGPISMMKWQLFMQIDQSFQIHRSYGSMVEGEADELKRVFLEGNPYLLVITMVVSVLHSVFDFLAFKNDIQFWNKNKSMEGLSAKSVVVSFLCQLIVFLYLLDNETSWMILASSGIGCCIEFWKIGKAMHIEVDRTGKIPMLRFRDRDSYASNKTKEYDDIAMKYLSYVLFLLVAG

SEQ ID NO: 71135 - protein, 224 aa, Gossypium hirsutum
  unsure (1)..(224): unsure at all Xaa locations
  Clone ID: GOSHI-09MAY01-C65206_1.pep
MYSDPKPSFSFLILLFLCLQPLIFSLSTDASPPPTVCIVGSGIGGSSVAHFLRHYFHPSPSQPRPPNIKIFERSYVVGGRMATVSIGGETFEAGASILHPKNYHALNYSNLLGLKVKPPPASEDDDSMSLGIWDGKKFDFKTLQVDSKFPLLQKIVSYVNSFRIFFRYGFSLLKMGSFVESTVDSFLKYYESPEXKTIFETVDEMLKWAGLYNLTTQTLQMNSL

SEQ ID NO: 71136 - protein, 160 aa, Gossypium hirsutum
  Clone ID: GOSHI-09MAY01-C66976_1.pep
NKCPLGDQDEVELDDVWFAYPSRPNHMVLKGITLKLQPGSKVALVGPSGGGKSTIANLIERFYDPIKGKILLNGVPLLEISHEHLHRKISIVSQEPVLFNCSIEKNIAYGCEGRVNITDIENAAKMANAHEFISKFPDKYQTHVGERGVRLSGGQKQRVA

SEQ ID NO: 71137 - protein, 106 aa, Gossypium hirsutum
  Clone ID: GOSHI-09MAY01-C66886_1.pep
MAGYAKLMIETGVVAGLALGSRPMVANGQKVCGMNKDGFMACQPSVTAGNPSPPPPSASCCMALNEAHLTCLCFFKNSKLMNDYGIHFNRAEDLPLQCNLTKSFNC

SEQ ID NO: 71138 - protein, 68 aa, Gossypium hirsutum
  unsure (1)..(68): unsure at all Xaa locations
  Clone ID: uC-gsflnu33B112b09b1.pep
MERGLRSLFVFLVEQPSQLKYIEWPSFXSTLKTAILTLVLVAGLIVALSSVDSILCYILALLLRKTPS

SEQ ID NO: 71139 - protein, 104 aa, Gossypium hirsutum
  Clone ID: LIB3272-033-P1-K1-H3.pep
NGEIIMATNFCAMVIGSRLPANCSRLLYPKYHKLSVQLNRYQRTRFDCYDPNQQFYGKLCTGSSLKKPDTSRHVVSVGSNRDQLRFDDELPEEPFWLSLGRETI

SEQ ID NO: 71140 - protein, 198 aa, Gossypium hirsutum
  Clone ID: GOSHI-09MAY01-C66576_1.pep
MAVQAPLYAENMCGVQDWMVNPAPALIPSSYFTLQDPSRYTLPFHLQQNAHNLAVASSSSSSASDAFGSVALSQSLDAQLEMQRQELDCVLRLQNERLRSALREQRKRQSAILLKCMESKAMHLIRQKEEDLARATKKTMEFEASLRKAEMESHSWQNLAKAKEAMIMDLNNTLEQARESLVWVSNAPEDAESLFRDQ

SEQ ID NO: 71141 - protein, 101 aa, Gossypium hirsutum
  Clone ID: GOSHI-09MAY01-C66696_1.pep
MVAHNEIILFPYSKPCLNRSDFSLENLFQASISTKKIRLPMASLKGPNGPTGVMAPVEPAKEAPVGLPRRYHRSWRLLKVAAAQRMMLGSSRNFTFGANLC

SEQ ID NO: 71142 - protein, 140 aa, Gossypium hirsutum
  unsure (1)..(140): unsure at all Xaa locations
  Clone ID: GOSHI-09MAY01-C66176_1.pep
MVNFLSSISVCNSVVRASVMANAVNSNDFLMYSKSSSARKQKVSTNSPRCLKIPSCERSRSAAIDVXILIAVIAACGFLLLPTINCMSLQLIELIGAAFYLFKEEIVRTPMIYASIGLGFSCAALATWILLLCTNRKCRD

SEQ ID NO: 71143 - protein, 163 aa, Gossypium hirsutum
  Clone ID: GOSHI-09MAY01-C66396_1.pep
MTSTTPTNRSSADDITNTTPFLSSTTTVSRSDSATRPSVRRQSLREAARFMRRATSRRTMREPSMLVRETAAEQLEERQSDWAYSKPVVILDVIWNFAFVAVAAGVLFLSRDENPEMPLRLWIIGYAFQCLLHMVWVCVEYKRRKRRQSMEYSRFNAGEDCVL

SEQ ID NO: 71144 - protein, 146 aa, Gossypium hirsutum
  Clone ID: GOSHI-09MAY01-C66326_1.pep
VYIEWDAVELPSQFMENWCYHRDTLMSIAKHYETGESLPEEVYLKLLAARTFRAGSLSLRQLRFASVDLELHTKYIPDGSESVFDVDQRVSKKTHVIPPLPEDRFLCGFNHIFAGGYAAGYYSYKWAEVLSADAFSAFEDVGLDNT

SEQ ID NO: 71145 - protein, 233 aa, Gossypium hirsutum
  Clone ID: GOSHI-09MAY01-C66216_1.pep
METEGEQLCEAARNGDGAQAKALVESGADVSFFDSDGLTPLMHAAKLGHTDLVKALLEAGAPWNALSPSNQSAGDFAMDSGHQEAYEALLNAGIQAELILGTIARKTKKNGDFEGDYLEDRVTFSEDKLMDSDSKAVMMAWEKPLMEAHAKAVCSGGGNVLNVGFGMGLVDTAIQQYGPATHTIIEAHPEVYARMLRTGWDKKDNVKIIFGRWQDVLSKLESYDGIFFDTYGE

SEQ ID NO: 71146 - protein, 157 aa, Gossypium hirsutum
  unsure (1)..(157): unsure at all Xaa locations
  Clone ID: GOSHI-09MAY01-C67996_1.pep
FDDSGMPEVPAKWRGECESAPDFNPKFCNRKLIGARSFSKGYRMASGGGGIYKKPGEIQSPRDKDGHGTHTASTAAGSHVANASLLGYASGTARGMATHARVATYKVCWETGCFGSDILAGMERAIEDGVDVLSLSLGGGSAPYFRSTXIAIGAFTC

SEQ ID NO: 71147 - protein, 209 aa, Gossypium hirsutum
  Clone ID: GOSHI-09MAY01-C67506_1.pep
MEKDSGSNLEVTGERKSEVDVADDLFNAYMNLENLETLNSSGTEDRDMDSKASGTKTYGGESSDNEVDSRVHKHPINIQGMSSGVSSEKREGVKRRAAGDIAPTVRHYRSVSMDSYMGSLQFDEDPPKIPPSGNHGNHHSPGSSGDANSSKFNFELGSSEFNESELKKIMENEKLAEMASVDPKRVKRDLANRQSAARSKPREMQYIAE

SEQ ID NO: 71148 - protein, 110 aa, Gossypium hirsutum
  Clone ID: GOSHI-09MAY01-C67726_1.pep
MSKLFSFSGTDDFCPGGSIYTNPKESSLFLSLGRHVDVYFPSRKRSRISAPFVFSGERSEKNKSSIEVLPDECLFEILRRLPGGQERSSCACVFRRWLTIVSNIRSNEIS

SEQ ID NO: 71149 - protein, 175 aa, Gossypium hirsutum
  Clone ID: GOSHI-09MAY01-C67676_1.pep
GKQQPLKRSVSAGLYMSPGSPSGSDLSDSSVPVLSSSHVYKPIPRTGGVSVDVNVMPLPGVEAAASSSNDPPTSLSLSLPGAESYELSVSTLPVTESTQTRNEAKNDGKGGEVMGFSAEFMAVMQEMIRMEVRDYMVQMQQQNGGVSRGEGMGMCLDAGFRNVLSMSRVGVNKID

SEQ ID NO: 71150 - protein, 120 aa, Gossypium hirsutum
  Clone ID: GOSHI-09MAY01-C67076_1.pep
CTGAKSEQQSKLAAREGAGVIQKLGFPAKFKDFKIQNIGGSCDGKFPIRLEGLAYSHGAFSSYEPELFPGLIYRMKQPKIGLLIFVSGKIVITGAKVRDETYTAFENIYPRLTEFRKNQQ

SEQ ID NO: 71151 - protein, 339 aa, Gossypium hirsutum
  Clone ID: GOSHI-09MAY01-C67226_1.pep
MANNTQILNLISMALLLFVSNSEGYSAAEEEADRISALPGQPKVSFPQFSGYVTVNQVAGRALFYWLTESPNSPSSKPLVIWLNGGPGCSSVAYGASEEIGPFRINKSASGLYLNKFSWNNVANLLFLETPAGVGFSYTNRSSDLLDTGDRRTAMDSLEFLIRWLDRFPRYKNREVYITGESYAGHYVPQLARQIMVYNKKSKHPINLKGIMVGNAVTDNYYDNLGTVTYWWSHAMISDKTYQQLINTCDFRRQIESNECESLYSYAMDQEFGNIDQYNIYAPPCNNSDGSRFTRHNMRLPYRPHSIFRQLSGYDPCTEKYADIYYNRPDVQKALHANT

SEQ ID NO: 71152 - protein, 154 aa, Gossypium hirsutum
  Clone ID: GOSHI-09MAY01-C60836_1.pep
MASGVAVSDGVIKVFNDMKVRKSSTPEEVKKRKKAVLFCLSEDKKNIILEEGKEILVGDVGQTVDDPYATFVKMLPDKDCRYALYDATYETKESKKEDLVFIFWAPECAPLKSKMIYASSKDAIKKKLTRIKPELAGNRFQEVKGPLTLGEKLG

SEQ ID NO: 71153 - protein, 113 aa, Gossypium hirsutum
  unsure (1)..(113): unsure at all Xaa locations
  Clone ID: GOSHI-09MAY01-C60456_1.pep
MAASSATGASPEAPKIVWNETQRRFETEDNKAYIEYVLRHDGKVXMDIIHTFGSPSSQAKAWMGSHLCVAAFHHGNSHSLSIIPSCSYVSDTFLLRNPSWNSLLYSEDLRSNI

SEQ ID NO: 71154 - protein, 200 aa, Gossypium hirsutum
  unsure (1)..(200): unsure at all Xaa locations
  Clone ID: GOSHI-09MAY01-C60416_1.pep
KINGTQLAAILPLAVVHTLGNLFTNVSLGKVAVSFTHTIKAMEPFFSVVLSAMFLGELPTLWVVASLVPIVGGVALASVTEASFNWAGFWTAMASNLTNQSRNVLSKKVMVNKEESMDNITLFSIITVMSLILLAPVAIFTEGVKFTPAYLQSAGLNVKEVVVRSLLAALCFHAYQQVSXYDIARVSPVTHSVGICVKGW

SEQ ID NO: 71155 - protein, 125 aa, Gossypium hirsutum
  Clone ID: GOSHI-09MAY01-C60166_1.pep
ANMERIMKAQALRDNSTMGYMAAKKHLEINPDHSIIETLRQKAEADKNDKSVKDLVILLYETALLSSGFSLEDPQTHANRIYRMIKLGLAIDEDDPTADDTSAAVTEEMPPLEGDDDTSRMEEGD

SEQ ID NO: 71156 - protein, 183 aa, Gossypium hirsutum
  Clone ID: GOSHI-09MAY01-C60246_1.pep
MAEHHQQLRRTDDMKNFFHENGPSTSKVLMVATLLPVGGILLLLAGLSLIGSLIGLAIAAPLFLIFSPVLVPAAFLIAGSIAGFLTSGAFGITGLSSLSWIATYIRGSRGSMSQGLDPVKWPLPDTAVSMEQKIQNRSQGGGRISEGGREQEGGKSKTQEGGKSKTQEGGKSKTQEGGNKTVG

SEQ ID NO: 71157 - protein, 68 aa, Gossypium hirsutum
  Clone ID: GOSHI-09MAY01-C61946_2.pep
KKQKQQCGHLRVPRSSKPCKLRDYLLRVEVETFPKSIAYDNHHLIGVWSSSKLRALLADTQPKRARHT

SEQ ID NO: 71158 - protein, 80 aa, Gossypium hirsutum
  Clone ID: GOSHI-09MAY01-C61946_1.pep
VYQITEIPSGREVTKVPSIYRITDLPLIYRITVLPSIYRIIVLPLIYRITDLPSIYKITKIPSVYKITKILSISKITKIP

SEQ ID NO: 71159 - protein, 60 aa, Gossypium hirsutum
  Clone ID: uC-gsronu33B050g07b1.pep
FAIFLDEISYAISHIRPPSTMALGFTPLPKLMTRFIHSDDPSFSHTPRSVAFNPHKRSTH

SEQ ID NO: 71160 - protein, 96 aa, Gossypium hirsutum
  Clone ID: LIB3196-034-P1-M1-F4.pep
MDAIKKKMQMLKLDKENAIDRAEQAEADKKQAEDRCKQLEEEQQALQKKLKGTEDEVEKYSESVKEAQEKLEQAEKKATDAEADVASLNRRIQLVE

SEQ ID NO: 71161 - protein, 77 aa, Gossypium hirsutum
  Clone ID: LIB3196-034-P1-M1-F10.pep
EDQIFTFKGESLFRAEQAEADKKQAEDRCKQLEEEQQALQKKLKGTEDEVEKYSESVKEAQEKLEQAEKKATDAEAD

SEQ ID NO: 71162 - protein, 110 aa, Gossypium hirsutum
  Clone ID: GOSHI-09MAY01-C61926_1.pep
MSRKEMAWWLRLAVLMMVGSHWAWGQCETSIPKLISQCGQYVEGSGPETTPSKACCDVITSLDIPCMCKYVTPDVEKLVNMEKVVFVAKSCGLTLQPGMKCGSFVVPPSV

SEQ ID NO: 71163 - protein, 86 aa, Gossypium hirsutum
  Clone ID: GOSHI-09MAY01-C61466_1.pep
CMLMLIGITVCYVTYYLHMNLLSIYAYSLLLTHCSFGQASSGVGIGRRLSHTIRKTFGKWLVNLSMACIAIYLFCVNDLMVWLWNG

SEQ ID NO: 71164 - protein, 69 aa, Gossypium hirsutum
  Clone ID: uC-gsronu33B110d07b1.pep
VVKQLRNKSVALVKVLWLKHGVEETTWEPEETMRNQYPHLFTVLDKPAQESGYVEGSVTLSGRLLVNGL

SEQ ID NO: 71165 - protein, 144 aa, Gossypium hirsutum
  Clone ID: GOSHI-09MAY01-C61186_2.pep
AGGLMEENAYPYTGERKECKFNPEKVAVEVVNFTNIPIDENQIAANLVLRGPLAVGLNAIFMQTYIGGVSCPIICGKRWINHGVLLVGYGAKGFSILRLGNQPYWIIKNSWGKRWGEHGYYRLCRGHSMCGINTMVSAVATQVY

SEQ ID NO: 71166 - protein, 384 aa, Gossypium hirsutum
  Clone ID: GOSHI-09MAY01-C61186_1.pep
MEPGGQSLALTTTTIAIQILTFSLIFSFSFALLKTPQEPTIHQVTENSDIPTLKTKFSRNHVHKQFRVFMETYGKNYSTREEYMHRLRIFAKNLVRAAEHQLLDPMAVHGVTQFSDLSEEEFESLYTGFKGPNVAAPLLRDGVGGEAEALEVDGLPESFDWREKGAVTEVKMQGTCGSCWAFSTTGAIEGANFIATGKLLNLSEQQLVDCDHMCDIKDKNACDNGCGGGLMTNAYKYLIEAGGLMEENAYPYTGERNECKFNPEKVAVEVVNFTNIPIDENQIAANLVLRGPLAVGLNAIFMQTYIGGVSCPIICGKRWINHGVLLVGYGAKGFSILRLGNQPYWIIKNSWGKRWGEHGYYRLCRGHSMCGINTMVSAVATQVY

SEQ ID NO: 71167 - protein, 177 aa, Gossypium hirsutum
  Clone ID: GOSHI-09MAY01-C61156_1.pep
LFLHPSDTSGTVLVSHRLTGVENDTVWSRSLRIALLAKNKLGFIDGVCLRSVYPESLRAQWDRCNAFVLSWILNTVSPDLSAGLVFASDAAAVWKDLKDRFSKVDGSCIFFLHRSIAHLTQGDASVFSYFTQLKLLWDEYTALVSFSDCACEVAQQNSNHLLQQRLFQFLMGLNETY

SEQ ID NO: 71168 - protein, 170 aa, Gossypium hirsutum
  unsure (1)..(170): unsure at all Xaa locations
  Clone ID: GOSHI-09MAY01-C61146_1.pep
GTHGAILQIISHGFIGAALFFLAGTSYDRMRLVYLDEMGGMAVSIPKIFTMFSILSMASLALPGMSGFVAELIVFFGIITSQKYFLMPKILITFVXAMGMILTPIYSLSMSRQMFYGYKLFNAPSSYFFDSGPRELFVSISIFLPVIGIGIYPDFVLSLSGEKVETILYN

SEQ ID NO: 71169 - protein, 169 aa, Gossypium hirsutum
  Clone ID: GOSHI-09MAY01-C61316_1.pep
MSHRKFSAPRHGSLGFLPRKRSSRHRGKVKSFPKDDPSKPVHLTAFLGYKAGMTHIVREVDRPGSKVNKKEVVEAVTIVETPPMVVVGIVGYVETPRGLRTFKTVFAEHISDECKRRFYKNWRGSRPCAPSKYCKKWQDEDGKKQLEKDFSSMKKYCQVIRVIAHTQMR

SEQ ID NO: 71170 - protein, 196 aa, Gossypium hirsutum
  Clone ID: GOSHI-09MAY01-C61326_1.pep
ILRKRTAEWLRRMHALLRAQARARAGRAQISESSQSSCKSSHFHHPDPATPEKFEHVIRSKGTKYEQSSMLKRNGSKSSGRTVDNQEKLHSGWYRRVDEQTWVHSTRIGPNDDEKNDKILEVDTGKPNFISKRRNLFHSTHLSLNSDLYSCSFTNSRDSHQTAPSPSSGEVQSLTPLMLSHSEAIQESPFCDAVDD

SEQ ID NO: 71171 - protein, 164 aa, Gossypium hirsutum
  Clone ID: GOSHI-09MAY01-C61286_1.pep
CKTKWVLQNETTDGASPWLRNAANPRPRPGGCMFRPWICEQGEHPPTARMRCCRNRCVDLNSDDAHCGLCALRCPFTWQCCRGVCINTNISPLNCGRCGNRCPFRVPCSFGMCGYAQPRPFPPRPPRPFPPHPPRPIPPHPPRPFPPPHPHRPQPTPCPPTQPG

SEQ ID NO: 71172 - protein, 100 aa, Gossypium hirsutum
  Clone ID: LIB3196-025-P1-M1-D6.pep
ARISPSERLQSVGVHIWAHTKAYERCWECSLCSHIRGLNMHPRGLGLEFAAFLSHGDAPSVVSFCSTHFGFTLASAVSIGSNTNSCSRKGRNKVLASHSI

SEQ ID NO: 71173 - protein, 94 aa, Gossypium hirsutum
  Clone ID: GOSHI-09MAY01-C62976_1.pep
MCGGAIISEFITRKGAHGVTASDIWPNSPFVKNGFSSDSTQSFHDDSLALCKRNRPQSSDGVHVEKKVKRQRKNLYRGIRQRPWGKWAAEIRDP

SEQ ID NO: 71174 - protein, 256 aa, Gossypium hirsutum
  unsure (1)..(256): unsure at all Xaa locations
  Clone ID: GOSHI-09MAY01-C62806_1.pep
MLTADSGSVLRLVEIEGRGRALVASQPLKAGQIVLQDSPIVVYSAFPLVKPQSSASYCDNCFRILSSSANVVPCPLCSHHLFCGPNCLTAATASSHSPWVCQAFSRLRDCPSXFSQPLEQQVQARFLIAAYNLPXVSPSDFQVLLSLQGQYSPSDAPAAEFLHSLILSVCPPPSLPIPIELTAALLAKDKLNAFGLMEPFSLQQDGERSVRAYRIYPKASFFNHDWLPNACRFDYLDSASGQNTDMIVRMIHDVPV

SEQ ID NO: 71175 - protein, 69 aa, Gossypium hirsutum
  Clone ID: GOSHI-09MAY01-C62486_1.pep
DAWVGNFSSSIILLHFICIQIRFLNACPFKPLFDFILIPIQKPKGLLWFLGLSILRIVDLSHRGSLSGI

SEQ ID NO: 71176 - protein, 139 aa, Gossypium hirsutum
  Clone ID: GOSHI-09MAY01-C62416_1.pep
MQQRLINDLTAQRGRLQTESGEFSRQLDEKDALVSQLSRGKQAFTQQIEELKRQLEEEIKAKNALAHALQSSRHDCDLLREQYEEEQESKAELQRALSKANTEVAQWRTKYETDAIQRTEELEEAKKKLAQRLQAAEEH

SEQ ID NO: 71177 - protein, 138 aa, Gossypium hirsutum
  Clone ID: uC-gsronu33B099e02b1.pep
KILFSLDFPSTDPNIPLLSTDLPLSMLTNRFGLRETIILAVKFLLNSNFNQTDGIPSISVRRSQLEVVAHMGRTEGTKKTVRRSCGVGKPRVPEVSICPGHLGRFKIGPFFKISLKFGLQFVCGLNVNLVLCPKLGFL

SEQ ID NO: 71178 - protein, 88 aa, Gossypium hirsutum
  Clone ID: LIB3196-042-P1-M1-F11.pep
THGFFVPSVRPMCATTSSWLLLQPINKLTEILGIPSVWLKLELRRNFTAKIIVSRSPNLFVNIDRGKSVLKRGMLGSVEGKSTQARVL

SEQ ID NO: 71179 - protein, 52 aa, Gossypium hirsutum
  Clone ID: GOSHI-09MAY01-C62266_1.pep
PSYYIVSRSFLVHMMCTQHHTCDLAMLPLFYSIFPNVQPGSLSLLLTSILPI

SEQ ID NO: 71180 - protein, 133 aa, Gossypium hirsutum
  Clone ID: GOSHI-09MAY01-C63716_1.pep
MASLVSIFVLLFTCSFSNFSAESRKELKDKEDIHLRHLVQSNVIDPSRVMQLSWRPRVFQYSGFLMDEECDLLISLGHGAKEGILGINDDRAILETRRQLASSETLLNTNDKVLAMIEERISAWTFLPKENSN

SEQ ID NO: 71181 - protein, 307 aa, Gossypium hirsutum
  unsure (1)..(307): unsure at all Xaa locations
  Clone ID: GOSHI-09MAY01-C63736_1.pep
ALESTKQGTKQRRDKLRNIMGERSCLDSCCWVTGYLCTTWWLLLFLYHCCLPFTVGHEVPELMPAARLKREGLKGIHPVVLVPGIVTGGLELWEGKPCADGLFRKRLWGGGGFTQLLRRPLCWLEHLSLHNETGLDPPGIRVRPVPGLFGADYSAPGYFVWDVLVKNLAKIGYEGKNLHMAAYDWRLSFQNTEVRDRALSRLKXKIELMYRANGNKKVVVVPHSMGVAYFLHFLKWVETPPPMGGGGGPGWCAEHIKAIVNIGPSFLGVPKAVSNILSAEGKDVAYFRAMAPGVLDSGTLGLRALEH

SEQ ID NO: 71182 - protein, 37 aa, Gossypium hirsutum
  Clone ID: GOSHI-09MAY01-C63006_1.pep
VDNKIPLISLLLRVKISIYLFKNVLRYRFQHKCISVN

SEQ ID NO: 71183 - protein, 250 aa, Gossypium hirsutum
  Clone ID: GOSHI-09MAY01-C18976_1.pep
MLPTHSKTPSTMAITKQHLIPLFAISFLLFSQLHCSTTSAQAPAQSPAPPGPPDVTKILQKAGQYSVFVRLLKSTQVSDRLIGELKDTDDGKTIFAPTDKAFSALKSGALNSLNDEQRVQLVLFHVIPSYIPFSQFQTVSNPMRTQAGDSGDGEFPLNVPSSGNTVVLKTGLTKTSVSDTIYTDGQLAVYRVDQVLQPLQVFAARSSALAPAPGMSRKAADVDGKSKASSLAMQNLALFVVSVIAFALSL

SEQ ID NO: 71184 - protein, 165 aa, Gossypium hirsutum
  unsure (1)..(165): unsure at all Xaa locations
  Clone ID: GOSHI-09MAY01-C18966_2.pep
MAMKIFSVFFFALLFLASPFLQVARCQSEAEADVAEAVEGGDLGIVGEDVQDFGDPNYSSAPEVKTVCVFPKNSAKLVLAGEQTELLVGMENIGESPVNVIAIKASVHLPFDHRMLVQNLTAVAFNNATVPPSVQATFPYVFACSKFLQPGXFDLVGSIIYDIDQ

SEQ ID NO: 71185 - protein, 256 aa, Gossypium hirsutum
  Clone ID: GOSHI-09MAY01-C18966_1.pep
MAMKSFSVFFFVLLLLASPILQVARCQSEAEADVAEAVEGGELGIVGEEAQDFGSGNFDSAPGVETLCLFPKNSAKLVSAGEETELLVGVENVGESPVNVIAITASVHLPFDHRMLVQNLSAQAFNNASVPPSKQATFPYIFAVSKYLQPGTFDLVGNIFYEIDQHPYQSTFYNGTIEVVEAGGFLSVESVFLVTLGIALLVLFGLWLHGQFQRISKKTKRAPKVEVGTRTTDTSLDEWLQGTAYTQSASKSKKKK

SEQ ID NO: 71186 - protein, 99 aa, Gossypium hirsutum
  Clone ID: LIB3196-013-P1-M1-D11.pep
MAMKSFSVFFFVLLLLASPILQEAVEEGELGIVGEEAQDFGSGNFDSAPGVETLCLFPKNSAKFISAGEETELLVGVENVGESPVNVIAITASVHLPFD

SEQ ID NO: 71187 - protein, 218 aa, Gossypium hirsutum
  Clone ID: GOSHI-09MAY01-C18856_1.pep
GDSGKGGDPTLWADLLKYFGELGEDCSKEVKEVLTYIERDDILPPIIVLQTLSRNPCLTLSVIKDYIARKLEQESKLIEEDRRAIEKYQEDTMAMRKEIQDLRTNARIFQLSKCTACTFTLDLPAVHFMCMHSFHQRCLGDNEKECPECAPEYRSVMEMKRSLEQNSKDQDQFFQQVKSSKDGFSVIAEYFGKGVGRVASNGSTGTARSDSVSSSSGF

SEQ ID NO: 71188 - protein, 138 aa, Gossypium hirsutum
  Clone ID: GOSHI-09MAY01-C18596_1.pep
MASLSGLCSSFPSVKPNNRIGGELSPVRKDSLAVSTRSNSSFKHSVAREVSADLSKTNDVAGLKQAKQGGLEKDPKALWRRYVDWLYQHKELGLYLDVSRIGFSDEFVSEMEPRFQAAFKAMEELERGAIANPDEGRM

SEQ ID NO: 71189 - protein, 196 aa, Gossypium hirsutum
  Clone ID: GOSHI-09MAY01-C18516_1.pep
LLSTLKENFVPQVLIQKIFTQTFSYINVQLFNSLLLRRECCTFSNGEYVKAGLAELELWCCQAKEEFAGSSWDELKHIRQAVGFLVIHQKYRISYDDIANDLCPILSVQQLYRICTLYWDDNYNTRSVAPNVISSMRVLMTEDSNDAASSSFLLDDNSSIPFSVDDLSNSLQEKDFLEVKPPEELLENPPFQFLPE

SEQ ID NO: 71190 - protein, 160 aa, Gossypium hirsutum
  Clone ID: GOSHI-09MAY01-C18496_1.pep
GDQGKVNLPIVPVKPPAPVTHRKALSNSHQAQQIISLNPLPLKKHGCDRAPIQVCSEEEFLRDVMQFLIFRGHTRLVPQGGLAEFPDAILNAKRLDLFNLYREVVSRGGFNVGNGINWKGQVFSKMRNHTLTNRMTGVGHTLKRHYETYLLEYELAHDHL

SEQ ID NO: 71191 - protein, 95 aa, Gossypium hirsutum
  unsure (1)..(95): unsure at all Xaa locations
  Clone ID: LIB3135-029-Q1-K1-C12.pep
GVGNTLKRHYETYLLEYELAHDDVDGECCLLCHSSAAGDWVNCGVCDEWAHFGCDRRQGLGAFKDYAKTDGLEYVCPHCSISNFKKKPHXTVNGY

SEQ ID NO: 71192 - protein, 287 aa, Gossypium hirsutum
  Clone ID: GOSHI-09MAY01-C18446_1.pep
TDFKQYQVLKQNPGWWTHQRHDGKLWNLNNYRTDVIQALGGVEGILEHTLFKGTYFPTWEGLFWEKASGFEESMKYKKLTNAQRSGLNQIPNRRFTLWWSPTINRANVYVGFQVQLDLTGIFMHGKIPTLKISLIQIFRAHLWQKIHESVVMDLCQVLDQELDALEIETVQKETIHPRKSYKMNSSCADILLFAAHRWPMSKPSLVAESKDMFDQKASNKYWIDVQLRWGDYDSHDIERYTRAKFMDYTTDNMSIYPSPTGVMIGLDLAYNLHSAFGNWFPGSKPLL

SEQ ID NO: 71193 - protein, 68 aa, Gossypium hirsutum
  Clone ID: GOSHI-09MAY01-C18436_1.pep
KNPKKVKQLQTEFVKFVSCGAHCTAAIAEPRENDGTISKRRLWIWGQNQGSNLPRLFWGAFTPNMVSS

SEQ ID NO: 71194 - protein, 212 aa, Gossypium hirsutum
  Clone ID: GOSHI-09MAY01-C18116_1.pep
MASTESSRSSTAGSPDSYIGSLISLTSKSEIRYEGVLFNINTEESSIGLRNVRSFGTEGRKKDGPQVPASDKIYEYILFRGSDIKDLQVKSSPPPVQTPAPIHNDPAIIQSHYPQSAIASTSLPSSGSGSMQDMGSQTSSIGLTRPPFQGNLPLYQPGGNLGPWGSPAAPTTNSGLSIPMYWQGYYGSANGLPPQQQPLLQPPPGLSMPSSM

SEQ ID NO: 71195 - protein, 286 aa, Gossypium hirsutum
  unsure (1)..(286): unsure at all Xaa locations
  Clone ID: GOSHI-09MAY01-C18136_1.pep
MTQDVEMKEQPAPSNSVPSSSPFTLHHLKEIASLIETGAYDREARRILRAIRLTMALRRKLKASVLSSFLSFALTPGSEAFTRLSSYLPKGDENEMEVDTATSTAQPPAKHSLPELEIYCYLLVLIFLIDQKKYDAPAAGSSASISRLKNLNRRTLDVLAARLYFYYSLCYELTGALAEIRGNLLALHRIATLRHDELGQETLLNLLLRNYLHYNLYDQAEKLRSKAPRFEAHSNQQFXRYLSYLGKIRTIQXLEYTDAKEXFLQAARKAPIAVSGFRVQCNKWAI

SEQ ID NO: 71196 - protein, 93 aa, Gossypium hirsutum
  Clone ID: LIB3197-054-Q1-M1-B6.pep
MTQDVEMKEQPAPSNSVPSSSPSTLHHLKEIASLIETGAYDREARRILRAIRLTMALRRKLKASVLSSFLSFALTPGSEAFTRLSSYLPKVIF

SEQ ID NO: 71197 - protein, 133 aa, Gossypium hirsutum
  Clone ID: GOSHI-09MAY01-C18086_1.pep
MGSLRGISIAIFVVQALLASVALVSAQGSATPSRWQTLSGEAPVVIARGGFSGIFSDSSFGAYSLALVTGPSDVILWCDVQLTKDGAGICFPDLKLDNNSNIATVFSDKPVTYLVNGVSTKGLFSIDYTLNDL

SEQ ID NO: 71198 - protein, 144 aa, Gossypium hirsutum
  Clone ID: LIB3197-052-Q1-M1-F5.pep
SATPSRWQTLSGEAPVVIARGGFSGIFSDSSFGAYSLALVTGPSDVILWCDVQLTKDGAGICFPDLKLDNNSNIATVFTDKPKTYLVNGVSTKGLFSIDYTLNDLGSVYLSQGIYSRTNKFDGNNYPIMTVQDTYTQLKPLGFW

SEQ ID NO: 71199 - protein, 329 aa, Gossypium hirsutum
  Clone ID: GOSHI-09MAY01-C18076_1.pep
MEKSTTFLIRRSIYTFLQYYHYFTATAAILALPYSLSVLVSQFFVPSSPLLPSIHNHLKAIFMAAEFPPSSDFFRVLSFKISQTISSSIFALPFTLSFFLVAKASIIHLLNHHHTPTSPPSLSSVLSLYKPLLSTFICNFFVLLSANSTAFCLLFFGFHLFNGFGFSSSPNWLIFMSAAGAVLYSVIIANALIICNLALVSSGMEKSGGYSAILRACVLIKGRASTALALAVPWNLALAAIEALFHYRVVRAYHSGDFNSFSIALEVVLIAYLYSNVVVLDTVVSSMLFKSCKTGCLMDEERRDCYRIEIVAEKDGNAYVKLTNIEQLP

SEQ ID NO: 71200 - protein, 99 aa, Gossypium hirsutum
  unsure (1)..(99): unsure at all Xaa locations
  Clone ID: LIB3083-072-Q1-L1-A7.pep
MVKSTTFLIRRSIYTFLQYYHYFTATDAILALTYSLSHLASQIFVPSSPLLPSIHNHLXAIFMAAEFPPSSDFFTVLSFKNFHTMSSSICALPFTLSFF

SEQ ID NO: 71201 - protein, 45 aa, Gossypium hirsutum
  Clone ID: GOSHI-09MAY01-C18006_2.pep
WDINPEVRPPFTDIVKMLEIAETDILTTVRKARFRCCMTQPMTID

SEQ ID NO: 71202 - protein, 360 aa, Gossypium hirsutum
  unsure (1)..(360): unsure at all Xaa locations
  Clone ID: GOSHI-09MAY01-C18006_1.pep
ENSSVGSNDSLTHILSHPGLKPVKRSNYSVSVGQSVFRPGKVGHALNDDALAQALMDRRYQTEVLQNYDEWAIDLRKLNMGTAFAQGAFGKLYRGTYNGEDVAIKILERPENSPEKAQVMEQQFQQELMMLATLKHPNIVRFIGACRKPMVWCIVTEYAKGGSVRQFLTRRQNRAVPLKLAVKQALDVARGMAYVHGLGFIHRDLKSDNLLIAADRSIKIADFGVARIEVQTEGMTPETGTYRWMAPEMIQHRPYTQKVDVYSFGIVLWELITGMLPFQNMTAVQAAFAVVNKGVRPVIPNDCLPVLSEIMIRCWDTNPEVRPPFTEIVKMLENAETEILTTVRXKARFRCCMTQPMTID

SEQ ID NO: 71203 - protein, 98 aa, Gossypium hirsutum
  unsure (1)..(98): unsure at all Xaa locations
  Clone ID: uC-gsronu33B061c12b1.pep
WIVVGYGQLGDEWAIDXRKLNMGTGFAQGAFGKLYRGTYNGEDVVINILQRPKTKHVKAQVKEXPFSXELIKIACLMHTTIVRFNGVGCNDLVAFMFM

SEQ ID NO: 71204 - protein, 200 aa, Gossypium hirsutum
  Clone ID: GOSHI-09MAY01-C18246_1.pep
MAGKGEGPAIGIDLGTTYSCVGVWQHDRVEIIANDQGNRTTPSYVGFTDTERLIGDAAKNQVAMNPLNTVFDAKRLIGRRFSDAAVQSDIKLWPFKVIPGSGDKPMIVVSYKGEEKQFAAEEISSMVLIKMREIAEAYLGFTVKNAVVTVPAYFNDSQRQATKDAGVIAGLNVMRIINEPTAAAIAYGLDKKATSVGEKN

SEQ ID NO: 71205 - protein, 142 aa, Gossypium hirsutum
  Clone ID: GOSHI-09MAY01-C19976_1.pep
SIEGKFVPTKKRGGLAVQATELKCGGIVVACACDHRVADAYTANMFLVSWAEIAQSKPASMVPSFRRSLLNPRRPGRADPSLDEMYVPIPSLPPPEENHEPTDHLISRIYYVSSDQIIELQSLASSDGDKRSKLESFSAFLW

SEQ ID NO: 71206 - protein, 206 aa, Gossypium hirsutum
  Clone ID: GOSHI-09MAY01-C19846_1.pep
QFAPSNQWFIRTVNRVFEHAGDLVNIKVAHSLMRLIAEGFGEDDDNADSKLRSSAVESYLRILGEPKLPSVFLQVICWVLGEYGTADGMFSASDITGKLCDVAEAYSNDETVKAYATTALMKIYAFEIAARRKVDMLPECQSLMEELLASHSTDLQQRAYELQAVIGLDAHAVECIMPSDASCEDIEVDRDLSFLNDYIQEAIEKG

SEQ ID NO: 71207 - protein, 147 aa, Gossypium hirsutum
  unsure (1)..(147): unsure at all Xaa locations
  Clone ID: GOSHI-09MAY01-C19816_1.pep
VLFLSGMVAMIMMRTLYKDIANYNQLETQDEAQEETGWELVHGDVCRPPINYGLLCVYVGTGVQIFAMSLVTMIFALLGFLSPSNRGGLMTAMVLLWVFMGIFAGYSSSRLYKMFKGTEWKRITLXKTAFMFPGILFAXIFFVLNAL

SEQ ID NO: 71208 - protein, 292 aa, Gossypium hirsutum
  unsure (1)..(292): unsure at all Xaa locations
  Clone ID: GOSHI-09MAY01-C19576_1.pep
TIGWLIFMKASPIKFKSSMEPLLQVFVSLESTPDAVFRTDAVKYALIGLMRDLRGIAMATNSRRTYGLLFDWLYPAHMPLILKGITHWTDAPEVTTPLLKFMAEFVLNKAQRLTFDSSSPNGILLFREVSKLIVAYGTRILSLPNPADIYAFKYKGIWISLTILARGLAGNYVNFGVFELYGDRALSDALDIALKMXTLSIPLADILXAFRKLTRAYFSFWEVLFNSHINFILNLDAATFMHIGGSLESGLKGPDIIFHPCAALLIFAASIHNITFGAPSYLSVNWQLLKPA

SEQ ID NO: 71209 - protein, 160 aa, Gossypium hirsutum
  unsure (1)..(160): unsure at all Xaa locations
  Clone ID: GOSHI-09MAY01-C19756_3.pep
GSYLINTWSDMAGCLDPTIPPSIDRTLLFARYPPHPXFHHIEYXPPPAMKISPVSTGSESTEAFIFKLTLDQLNALKAKCXEDGNAVYYXSYPMSSGNXVGDPVCKARGLVDDQGTILYXATEGRAWHDLPLPPGYCGNVLCTDSPEAALSDLLLKLTWY

SEQ ID NO: 71210 - protein, 314 aa, Gossypium hirsutum
  Clone ID: GOSHI-09MAY01-C19756_1.pep
FLTVDYSGGISTYPLLVLQVTYFKCGGASLGVGMQHHAADGYSGLHFINTWSDMARGLDLTIPPFIDRTLLRARDPPQPVFHHVEYQPPPAMKIPPQSTGPESTAISIFKLTRDQLNALKAKCKEDGNDVNYSSYEMLSGHVWRSVCKARGLEDDQGTKLYIATDGRARLRPPLPPGYFGNVIFTATPIAVAGDLLSKPTWYAASRIHDALVRMDDEYLRSALDYLELQPDLSALVRGAHTFRCPNLGITSWVRLPIHDADFGWGRPIFMGPGGIPYEGLSFVIPSPNNDGSLSVAISLQTEHMKVFEKLFYDI

SEQ ID NO: 71211 - protein, 141 aa, Gossypium hirsutum
  Clone ID: LIB3120-020-Q1-K1-A10.pep
PRVRPRVRPRVRPRVRLSGHVWRSVCKARGLEDDQGTKLYIATDGRARLRPPLPPGYFGNVIFTATPIAVAGDLLSKPTWYAASRIHDALVRMDDEYLRSALDYLEFQPDLSALVRGAHTFRCPNLGITNLVRLPIHDADF

SEQ ID NO: 71212 - protein, 154 aa, Gossypium hirsutum
  Clone ID: GOSHI-09MAY01-C19706_1.pep
MGRWWSKYAVAFMALALFSISATARPCKTFLVSSYSISFHNPNDPSSAVSSRFVTVFTEIGQWNPLSMPVDPKPSYAFSSLRDRSRDILSVVVALLFGVGCGSLTAAAIYLVWIIFTARCEYHEDDKSDEEFSPKKMGYVNIPANPAVNVKEAL

SEQ ID NO: 71213 - protein, 72 aa, Gossypium hirsutum
  unsure (1)..(72): unsure at all Xaa locations
  Clone ID: GOSHI-09MAY01-C19696_1.pep
IQEMFRGVRDQFTVMFGRKAFLNWYKGEGMDEMEFTEAESNMXDLVSEYHQNQDATVDXEEEENEEEGAEYE

SEQ ID NO: 71214 - protein, 62 aa, Gossypium hirsutum
  Clone ID: GOSHI-09MAY01-C19616_1.pep
QETATLADMNIFPGDRLWVKDSEIHEDRDIADELSDQKMNVENIEEGFRGTLLTAYISSQVV

SEQ ID NO: 71215 - protein, 149 aa, Gossypium hirsutum
  Clone ID: GOSHI-09MAY01-C19046_1.pep
MGFEKGASLLEDLIEKAGGCAVMDGGFATQLESHGASINDPLWSALCLIKDPHLIKQVHLEYLEAGADILVTSSYQATIPGFLSRGLSLEEGESLLKKSVQLAVEARDKFWDRVGCVPGNSYNRALVAASIGSYGAYLADGSEYSGCYG

SEQ ID NO: 71216 - protein, 230 aa, Gossypium hirsutum
  Clone ID: GOSHI-09MAY01-C19066_1.pep
PDINKVFIKHGKASKFDEADGYKTGEEWVLDTEGVNLLAVMCHEDVDARRTTSNHLIEVIEVLGIEAVRRSLLDELRVVISFDGSYVNYRHLAILCDTMTYRGHLMAITRHGINRNDTGPMMRCSFEETVDILLDAAVYAESDYLRGVTENIMLGQLAPIGTGECALYLNDEMLKNAIELQLPSYMEGLEFGMTPARSPVSGTPYHEGMMSPNYLLSPNLRLSPLSDAQF

SEQ ID NO: 71217 - protein, 241 aa, Gossypium hirsutum
  Clone ID: GOSHI-09MAY01-C19036_1.pep
HNGRIASLIFVKDCKSGSPIEDSQQIDKIEARLRNVLKGDNDIRSAKTTVSMAVTHTERRLHQMMFADRDYERKPILEHKSELSAVTVQNWVERGYSVVNVQCKDRTKLLFDVVCTLTDMQYVVFHATIKTSGDKAYLEFYIMHRDGILVSSEPERHRLIQCLQAAVERRASEGVRLELCTSDRQCLLADVTRTFRENGLNVTRAEISTTSDVALNVFYVTDATGNLADPKTIEAVRQKIG

SEQ ID NO: 71218 - protein, 101 aa, Gossypium hirsutum
  unsure (1)..(101): unsure at all Xaa locations
  Clone ID: LIB3048-023-Q1-L1-D5.pep
KIEARLRNVLKGDDDIRSAKTTVSMAVTHTERRLHQMMFADRDYXRKPILEHKSEFSAVTVQNCVERGYSVVYAQYRVRTQFQLYDVCIFPDFSIFHNPII

SEQ ID NO: 71219 - protein, 158 aa, Gossypium hirsutum
  unsure (1)..(158): unsure at all Xaa locations
  Clone ID: GOSHI-09MAY01-C19026_1.pep
PRVRHILKPDSTLATASNAEDGEPGPVAAIRLPMLRICNFKGGTPEQVQAYFSILVCVLPNDQRRSWCNPELEIVKVVADQVXAAAISHAAVLEESQLMRDKLAEQNRALQLSRQNAMRASHARNAFQKVMSDGMRRPMHSILGLLXTLQDGNLNDDQ

SEQ ID NO: 71220 - protein, 117 aa, Gossypium hirsutum
  Clone ID: GOSHI-09MAY01-C19386_1.pep
MSGASTAAYLARRAAQKERVRILYRRALKDTLNWAVHRHLFYQDASDLREKFEANKHVEDLDTIDKMIDAGEATYNKWRHPDPYIVPWAPGGSKFTRNPVPPSGIEIVYDYGREEND

SEQ ID NO: 71221 - protein, 137 aa, Gossypium hirsutum
  Clone ID: uC-gsronu33B062g11b1.pep
MSGAATVAYLARIAAHKERVRILYRRALKDTLNWAVHRHLFYQDASDLREKSEANKHVEDLDTIDKMIAAGEATYNKWRHPDPYIVPWAPGGSKFTRNPVPPSGIEILYDHGKDAPRFSLVLSLSPPYLALILFRSF

SEQ ID NO: 71222 - protein, 182 aa, Gossypium hirsutum
  Clone ID: GOSHI-09MAY01-C19376_1.pep
MVQKLEAIKGGGGSIKVGLGSKGTISSLMTRELDSVKPVPKTPVSFRHKSQTIPTSVACPTPKRLQLGRSLDGASTSGNDNNYISYKHHQTSQKTKSLSKSTHQIPMLGFENIALDRTPSRQKSDKKVSNIVEVVDIKCGKYPDRAWSNPVTNRLKKLGFSKLSQSISRPATCSHQTSGSYN

SEQ ID NO: 71223 - protein, 57 aa, Gossypium hirsutum
  Clone ID: GOSHI-09MAY01-C19366_1.pep
MYAQFQRLDVDPTGSTLGIMKAKPEHATRGHALVEPASDALTGQWLQIRKMIVSTYG

SEQ ID NO: 71224 - protein, 159 aa, Gossypium hirsutum
  unsure (1)..(159): unsure at all Xaa locations
  Clone ID: GOSHI-09MAY01-C19246_1.pep
MAEKLAPEKRHSFLHNGEKVFEWDQTLEEVNIYINLPPNVHSKQFYCKIQSKHVEVGIKGNPPYLNHDLFSPVKTDSSFWTLEDDIMHITLQKRDKGQTWSSPILGQGQLDPDATXDLEQKRLMLQRVLGENPGFDFSQAQFTGSCPDPGTFMGGISSD

SEQ ID NO: 71225 - protein, 295 aa, Gossypium hirsutum
  unsure (1)..(295): unsure at all Xaa locations
  Clone ID: GOSHI-09MAY01-C14966_1.pep
AWTNYSLTEXKIKDLTKRTNTIKNQIQKILIIKDKKNEFLTQEINSSSNKIRYQDKILESSKKFWQIVKRRNIRLIRKFYFFINFFIEKIYMDILLYIINIPRTNTQLFLESTKKMIENFIHNNEANQERINKTTKNTTHFISTIKTSLSSLSNISIRNKNEKAFCDLSSLSQAYVFYKLSQTQVISFYKFKPILQYHGTSLFLKNEIKDYFEERGVSHSRLRHHYGLRQKIVWHSGMNEWKNWLRSRYQYDLVQNRWLKLGPGQWRNRVNQHYLAQNKHLTKWDSDEKKKKRAG

SEQ ID NO: 71226 - protein, 143 aa, Gossypium hirsutum
  unsure (1)..(143): unsure at all Xaa locations
  Clone ID: GOSHI-09MAY01-C14916_1.pep
ISLSGPPLKLQEVVRGVRPMPLPEMANLLNSFRLMICPGLDPNPNNLVASTTFYSESTHAMLCLIRIETDPADRTQLRMTLASGDPTLTFELKEFIKEQLISIPTASPQSPAPAPAPAPPPAVXATPQIPPNDPAALLAGLLP

SEQ ID NO: 71227 - protein, 120 aa, Gossypium hirsutum
  Clone ID: LIB3189-047-P1-K1-H7.pep
EEIENVIKKNWKKKYSHHGCAERITKYPTNPSFTKPTNIIKLLRDPASPCIMKFSICVRDKCQMGGRQSIKTKVSKCILNKSSIFTTANQLVELQDHSVVFVGSLELREVVQVLVTEEEQ

SEQ ID NO: 71228 - protein, 109 aa, Gossypium hirsutum
  Clone ID: GOSHI-09MAY01-C14866_1.pep
MGEAKGVVKHILLAKFKDEIPPEKIEELIKGYANLVNLIHPMKAFHWGKDVSIENLHQGFTHVFESTFESTEGIAEYIAHPAHVEFANLFLPSLDKVIVFDYKPTVVRC

SEQ ID NO: 71229 - protein, 108 aa, Gossypium hirsutum
  unsure (1)..(108): unsure at all Xaa locations
  Clone ID: GOSHI-09MAY01-C14546_1.pep
MDQEVVGRHALLFDDDAMAAFVNSPEALVDWNSLAIDRYDVRHLLSGPPPPRKRRRHLSSPSGTADDKLESDLDXERYLXDLPPPSPSLPDRQDGEYNEEPAAAGWSL

SEQ ID NO: 71230 - protein, 193 aa, Gossypium hirsutum
  Clone ID: GOSHI-09MAY01-C14516_1.pep
MFLFDWFYGVLASLGLWQKEAKILFLGLDNAGKTTLLHMLKDERLVQHQPTQHPTSEELSIGKIKFKAFDLGGHQIARRVWKDYYAKVDAVVYLVDAYDKERFAESKRELDALLSDEALANVPFLILGNKIDIPYAASEDELRYHLGLTNFTTGKGKVNLTNSSVRPLEVFMCSIVRKMGYGDGFKWVSQYIK

SEQ ID NO: 71231 - protein, 219 aa, Gossypium hirsutum
  unsure (1)..(219): unsure at all Xaa locations
  Clone ID: GOSHI-09MAY01-C14496_1.pep
KARYFLKSNVLSAKIGAYPFFTWRSICIAREVIGDGVLWRVGKGDRINIWNDPWLXWDRTLLLKIVDENTVDRILTIPISVSRPEDRVVWKYEGSGEYTVKSGYRVLFAAHLQSTAYMPIIEEVYIDFYKDLWSLSIPDKIKIHIWRLVNNLVPHFDNLARRMLCVDTYCPLCKYKLEDTNHLVWSCDILQQVWASLSIKVPSFDESLSHKLRFVNMFS

SEQ ID NO: 71232 - protein, 132 aa, Gossypium hirsutum
  unsure (1)..(132): unsure at all Xaa locations
  Clone ID: LIB3146-043-Q1-K1-D10.pep
FVAFGQFGQGETRSWDRALLLXIVDESTVDRILAIPISESRPEDRLVWKHEGSGEYTVKSGYRVLIVDHLQRTIYMPAIDEIYTDFYNDLWSLSIPDKIKIHIWRLVNNLVPHFGNLARRTMCVDTYCPLCK

SEQ ID NO: 71233 - protein, 243 aa, Gossypium hirsutum
  Clone ID: GOSHI-09MAY01-C14486_1.pep
MAKSAVYFLLFLMTAATPSLLVESSDDTNHAYLPCSDTKVQISDGFTFGIAFASRQSFFFNSSLQLSPCDRRLSLSNANSRLALFRPKVDEISLLTINTSSFTPDVVGGYMVAFAGRKYAARSLPAFVANGTYTVTSFTLVLEFKKGRLQNLFWKRDGCAQCSGRSNFVCLNKQDCAINTNNCKNHGGSVDCSIGIQLAFSGTDKHLSALNSWYEVENLRQYSLFGLYSNLRDSLTSQYNKFF

SEQ ID NO: 71234 - protein, 153 aa, Gossypium hirsutum
  Clone ID: GOSHI-09MAY01-C14446_1.pep
MEMGDFFVGGYYGGGATGDFSPEKRMSMVEEKLGENFIVDDLLDFSNEDAVIGDGLLFDNVAGNSTDLSTVTCNSSASGGENHFSSANFTHSSQFSGELGVPYDELAELEWLSNFVEDSFSTVPNLQSNHHIFALPTPESSSSSTRSDSLPRS

SEQ ID NO: 71235 - protein, 187 aa, Gossypium hirsutum
  unsure (1)..(187): unsure at all Xaa locations
  Clone ID: GOSHI-09MAY01-C14476_1.pep
MGISRFVLLVFTISMLASPALSDLVLSKVDRRIYLTSHIVRISSTLEVENAGPETVSKVLLAFPDLQAQNLAYLMASPHEAKAKFKVSVVSFPIDVVKPEDMPPGVTFYSVSLPQGLTVGASFTFDVLXVFTHALRPMPEQIGQADIQLVLYQDSAYYLSPYVVKVQSLSLKLPDSRIESYTTLEST

SEQ ID NO: 71236 - protein, 63 aa, Gossypium hirsutum
  Clone ID: GOSHI-09MAY01-C14406_1.pep
LFAEEDISEAAEALSDMPIKKLYMLIEMAAQGEQGGAAEAIFSGREKIKLAHFYDCLQDVVRY

SEQ ID NO: 71237 - protein, 60 aa, Gossypium hirsutum
  Clone ID: LIB3197-028-Q1-M1-G2.pep
PTRPSEAAETLNEMPIKKLYMSIEMAAHGEQGGAAEAIFSGREKIKLAHFYDCLQDVVRY

SEQ ID NO: 71238 - protein, 240 aa, Gossypium hirsutum
  Clone ID: GOSHI-09MAY01-C14766_1.pep
MSGGGTQNSLRKALGAIKDTTTASLAKGNSDYKELDIAIVKATNHYERPAREKNIRAIFAAISATRPRADVAYCIHALARRVSRTHNWAVALKTLIVIHRALREVDPTFHEELINYGRCRNHMLNMSHFKDDSSPNAWDYSAWVRTYALFLEERLECFRVLKYDIEMDRPRTEDLDTAELLEQLPALQQLLFRVLGCLPQGAAVHNFVIRLALSMVASESIKIYQAISDGTVNLVDKFFD

SEQ ID NO: 71239 - protein, 56 aa, Gossypium hirsutum
  Clone ID: uC-gsronu33B172e04b1.pep
SHASGCYHMLNMSHFKDDSSPNAWDYSAWVRTYALFLEERLECFRVLKYLVTFTIY

SEQ ID NO: 71240 - protein, 83 aa, Gossypium hirsutum
  Clone ID: uC-gsflmaxxa092f03b1.pep
AVHMVLEVQMREDMEMVAKPEVVKVVTISLESTLSPLPYIKSINVVTTGTKKNKSNLIRNPKYLKISYETYRIQIDDVKSYII

SEQ ID NO: 71241 - protein, 328 aa, Gossypium hirsutum
  unsure (1)..(328): unsure at all Xaa locations
  Clone ID: GOSHI-09MAY01-C14686_1.pep
YLFIHYHSLHHXXPVPHACTAGHATPLEHLVLCTVIGIPITGSIPHASGSTAMIYGHVLVFDFFRCLGHSNAEVVPHEVFNKLPLLRYFIYTPTYHSLHHTEMETNFCLFMPLFDALGSTLNTKSLELHKKITSNSGKNGRVPDFVFLAHVVDIMSAMHTPFALRSFASTPFRMRMFLLPFWPLTFIIMLVMWGWSKTFLFSFYNLRCRLHQTWVVPRFGFQYFLPFATKGINKHIEEAILRADRLGVKVISLAALNKNEALNGGGTLFVNKHPELKVRVVHGNTLTAAVILNEFSKDVXEVFLTGATSKLGRATALYLCRKRVGFLC

SEQ ID NO: 71242 - protein, 132 aa, Gossypium hirsutum
  Clone ID: GOSHI-09MAY01-C14646_1.pep
MVEAQTWTTRRMSNPRLDSTATADHEVLDIPVTPTADVRNSIYNVGSHLSPNLLTALIIASWFMSNIGVLILNKYLLSFYGYRYPIFLTMLHMISCACYSYAAINFLEIVPRQHILSRKQFLKIFALSVIFC

SEQ ID NO: 71243 - protein, 310 aa, Gossypium hirsutum
  Clone ID: GOSHI-09MAY01-C14196_1.pep
MEGDINQKLLTETTKNEEEEVLFKERLWTEMKKLWIVAGPAIFTRFSTFGVTVISQAFVGHLGPTELAAFSLCFTVLLRFGNGVLLGMASALETLCGQAFGAKQYHMLGIYLQRSWIVLFATALCLLPIYIFTTPILIALGQDETIATVAGYISYWFIGIVFSFIVSFTCQMFLQAQSKNMIIAYLAAFSIGIHICLSWLLTVKLKYGLSGALLSTILAYWIPNIGQLLFVTCGGCKDTWKGFSMLAFKDLMPVVKLSLSSGAMLCLELWYNTILVLLTGNLKNAQVAIDALAICLNINGWEMMISLGFL

SEQ ID NO: 71244 - protein, 152 aa, Gossypium hirsutum
  Clone ID: GOSHI-09MAY01-C14066_1.pep
MSLSLRFLSAKLFLCLCLTLFQHHVTCSALNPTGLTLRAVLDDSPNSPLYLIENMTIAERIERFIQVTNAKDNYLNLNARVGPDNSNSLSRVVMARDGLFYSVWLLIGSQGQEVKLLMGTGGGLTWTQCQPCLNCFPQNLPIYDSRTFTTYS

SEQ ID NO: 71245 - protein, 184 aa, Gossypium hirsutum
  Clone ID: GOSHI-09MAY01-C14386_1.pep
PSRPPTRPGKPAVVEYGNTGEDVDPETGGPASVPVPLPDMGLPPSFDGDNPAFMYRFLEPTSQFLAPPVLDTHGWDHDCGYDGVNVEHSLAIASQFPAAVSVQLTKDKKEFNIHLDSSVSAKHGENGSTMAGFDIQNVGKQLAYVFRGETKFKNLKRNKTAAGFSVTFLGENVATGLKLEDHIV

SEQ ID NO: 71246 - protein, 241 aa, Gossypium hirsutum
  unsure (1)..(241): unsure at all Xaa locations
  Clone ID: GOSHI-09MAY01-C14376_1.pep
LHFLEKRCISGGALLFHLRQANLITCVAACRKPPVFCIITEYLAGGSLRKYSHQQEPYSGPLHLALTVALDIAPGMQYLHSHGILHRDLISDNLLLGEDMCVKVADFGISCLESQCGSAKGFTGTYRWMAPEMIKEKHHTKKVDVYSFGIVLWELLTALTPFDNMTPEQAAFAVCQKDARPLVPSSCPLAFSHLINRCXSSNPEKRPQFEEIVSILESYAEFLEEDLEFFKTYKPFLSCSI

SEQ ID NO: 71247 - protein, 138 aa, Gossypium hirsutum
  Clone ID: GOSHI-09MAY01-C14366_1.pep
MAPKVGEKKPAEKKPAEKAPAEKRPKAEKKISKEGGADKKKKKVKKSVETYKIYIFKVLKQVHPDIGISSKAMGIMNSFINDIFEKLAQEASRLARYNKKPTITSREIQTAVRLVLPGELAKHAVSEGTKAVTKFTSS

SEQ ID NO: 71248 - protein, 103 aa, Gossypium hirsutum
  unsure (1)..(103): unsure at all Xaa locations
  Clone ID: LIB3149-055-Q1-K1-C2.pep
AVTPAEKGRADIAPAEKRPKAENKISKEGGADKKKKAKKSVETYKIYIFKVLKQVHPDIGISSRAMGIMNSFINDIXEKLAQEASRLARYNKKPTXTSREIQT

SEQ ID NO: 71249 - protein, 223 aa, Gossypium hirsutum
  Clone ID: GOSHI-09MAY01-C14296_1.pep
MAKPSREAISMASTSPSSLSPPTVPMELHVSNRQKLLKSLRQHLSNSSRPHHGFVLLQGGEEQTRYCTDHIELFRQESYFAYLFGVREPGFYGAIDIATGKSILFAPRLPANYAVWLGEIKPVSYFQERYMVSMVYYTDEIVQLLVDQYKGSGKPLLFLLRGLNTDSNNFSKPAEFEGIENFERDLTTLHPVLTECRVCKSDLELALIQFANNISSEAHVEVI

SEQ ID NO: 71250 - protein, 146 aa, Gossypium hirsutum
  Clone ID: LIB3582-008-P1-K1-D6.pep
MASTSALDVSTSTVRAALHVSNRQKLLKSLRQHLSNSSRPHHGFVLLQGGEEQTRYCTDHIELFRQESYFAYLIGVREPGFYGAIDIATGKSILFAPRLPADYAVWLGEIKPVFYFQERYMVSMVYYTDESVQLLVDQYKGSGKPL

SEQ ID NO: 71251 - protein, 209 aa, Gossypium hirsutum
  Clone ID: GOSHI-09MAY01-C14236_1.pep
MSKEVTEEGQSRKDYVDPPPAQLVDINELKLWSFYRALIAEFIATLLFLYVTIATVIGHKKQHDACNGVGLLGIAWSFGGMIFILVYCTAGISGGHINPAVTFGLFLARKVSLIRAVTYMVAQCLGAICGGGLGKAFMNHEYTTLGGGANTVATGYNKGTALGAEIIGTFMLVYTVFSATDPKRNARDSHVPVLAPLPIGFASVMVHLA

SEQ ID NO: 71252 - protein, 282 aa, Gossypium hirsutum
  Clone ID: GOSHI-09MAY01-C15986_2.pep
KKKVKKTNVPVAELVYGAMLSGDLQKAVEKEFRPPVRDRVMEETKDKKNAVEAYVYDMRNKLCDKYHDFVTASDKEELMAKLQETEDWLYEDGEDETKGVYIAKLEELKKQGDPIEERYKEYSERGTIIDQLAYCINSYREAAMSNDTKFDHIELAEKQKVLNECVEAEAWLREKKQQQDQLPKYATPVLLSADVRKKAEALDRFCRPIMMKPKPAKPATPEAPATPPHPGSEAQPQGANSPKASPNRNGDPSENVPAGSGEAPPASVEPMETDKAETTSAA

SEQ ID NO: 71253 - protein, 243 aa, Gossypium hirsutum
  Clone ID: GOSHI-09MAY01-C15986_1.pep
IKGRPTRAPTRPPTRPVYDMRNKLSDKYRDVGTAPGADAWAAKLQETEDWLYEDGEDEIKGVYVAKLEELKKQGDPIEERYKEYMERGTVIDQLAYCINSYREAAMSNDPKFDHIELAEKQKVLNECVEAEAWLREKKQQQDLLPKYATPVLLSADVRKKAEALDRFCRPIMTKPKPTKPASPETRANPPPQGEGQSQGADANASPNHNNVPGENATAGSGEAAPASAEPMETDKSETASTTA

SEQ ID NO: 71254 - protein, 171 aa, Gossypium hirsutum
  unsure (1)..(171): unsure at all Xaa locations
  Clone ID: LIB3584-018-P1-K1-G7.pep
NLHGIVSVESATLLEEEEVEVPVSKEPEKDNSKMETDESPSGTAAPSANETDVNMQDAKGTADAAGAENGVAESGDKPVKMETDTKVEAPKKKVXKTNVPVAELVYGAMLPADVQKAVEKEFEMALQDRVMEETKDKKNAVEAYVYDMRNKLSDKYRDFVTAPEKEEFTAK

SEQ ID NO: 71255 - protein, 90 aa, Gossypium hirsutum
  Clone ID: GOSHI-09MAY01-C15956_1.pep
MAMRKVYSEIKGMKLKEVPGYFKPMLSMGYLKKSVQRGLDNYHAKYIETDSIEPLYHVCFGGMIFSYLVALPNERRHLEHKQHAEQHGHH

SEQ ID NO: 71256 - protein, 81 aa, Gossypium hirsutum
  Clone ID: uC-gsflnu33B143h05b1.pep
LRVRKLKEVPGDFKPMLSVGFVKKSIQRGLDNYHAKYIETDSIEPLYHICFGGMIFSYLVALPNERRHLEHKRHAEQHGHH

SEQ ID NO: 71257 - protein, 136 aa, Gossypium hirsutum
  Clone ID: GOSHI-09MAY01-C15926_2.pep
MALSGVKNDRGELRILENLDELRTDLADYIAELSEAAVKERGVFAIALSGGSLIGLMGKLCEAPYNKTVDWAKWYIFWADERVVAKNHSDSNYKLAKDGILSKVPIVPSHVHSINDSVSAEEAADEYMFVIRQLVK

SEQ ID NO: 71258 - protein, 252 aa, Gossypium hirsutum
  Clone ID: GOSHI-09MAY01-C15926_1.pep
MALSEVNNDRGELRILENLDELRTDLADYIAELSEAAVKERGVFAIALSGGSLIDLMGKLCEAPYNKTVDWAKWYIFWADERVVAKNHSDSNYKLAKDGLLSKVPIVPSHVHSINDSVSAEEAADEYMFVIRQLVKTRMVSVSDISDCPKFDLILLGMGPDGHIASLFPNHAALDETDEWVTFITDSPKPPPERITFTLPVINSASNVAMVVTGESKADAEHLAIDNVEPNCPSLAARLVQPTKGKLVWVLD

SEQ ID NO: 71259 - protein, 192 aa, Gossypium hirsutum
  Clone ID: GOSHI-09MAY01-C15886_1.pep
MSLKHHHNSNSAAAAQSLSFDDIADFFSLPLDDAASTLGVCTSVLKKICRENGLDRWPHRKFLAGKSVEEIKRHAARERRREIAELSKAHRQSSQPQPQNNEQPKLQGGSALPNLQQQGIRNIQTAQALNFSHQSLMTGAAMSDEFKFGFPSDGLSVTTNKWWGSSKSDCNEVSDADGAETEGEDKLQTIGE

SEQ ID NO: 71260 - protein, 114 aa, Gossypium hirsutum
  Clone ID: LIB3165-034-P1-K4-G2.pep
KHHNTSGSETVGESFSLDDIADFFFLPLDDAASTLGVCTSVLKKICRENGLDRWPYRKFLAGKSVEEIKRHASRERRREIAELSKAHRQSSQPQPQNNEQPKLQGGSALPNLQQ

SEQ ID NO: 71261 - protein, 222 aa, Gossypium hirsutum
  unsure (1)..(222): unsure at all Xaa locations
  Clone ID: GOSHI-09MAY01-C15816_1.pep
EPSSLKSPPISVESSFSIFLRLTHTTFSQFKCGKAFQGLGWILLKRSNALSTIIGVYGNSSKLKLQIGVRHFSSSDLPEHTVLGMPALSPTMSQGNIAKWKKKEGDKIEPGDILCEIETDKATLEFECLEEGFLAKILVPEGSKDVPXVGQPIACMVEDEENITKIPSTLGAGFDVEEKTAHHDVRNSEKEDEPSSTNIKASDLPPHIVIGMPALSPPNESG

SEQ ID NO: 71262 - protein, 72 aa, Gossypium hirsutum
  Clone ID: GOSHI-09MAY01-C15836_2.pep
LKTELDLVIEEEPLLLGKVSVKRLLREGVDANYRDKQGLSVLHLATLFNRTDIAFALMDCGASMDYKNAQGN

SEQ ID NO: 71263 - protein, 222 aa, Gossypium hirsutum
  Clone ID: GOSHI-09MAY01-C15836_1.pep
MSSEPPPFQEAPRCDVCKCSFNTFRRRHHCRCCGRTLCHEHSSDQMPLPQFGILSSVRVCADCSNNSSGSAKADPQPPLGGVGSATDEVARLNINADVGAQTEATAKQQPVVSIPKCKCGMPLCICESPAPKTDAVPLTMKNPPSSVASSNPKPKKTDTVPKSRGSTSNCESSSGFNPGLATNGTAADESHTDYDVNGEGLREAIKNGDTAAVKRLLSEGVH

SEQ ID NO: 71264 - protein, 73 aa, Gossypium hirsutum
  Clone ID: LIB3272-022-P1-K1-H4.pep
LLREGVDANYRDKQGLCVLHLATLFNRTDIVFALMDCGASMDYKNAQGETPMDCAPVTLQYKMQTKLKEGRAA

SEQ ID NO: 71265 - protein, 188 aa, Gossypium hirsutum
  Clone ID: GOSHI-09MAY01-C15556_1.pep
MEKIQHSHVQARGLKLHVAQSGTGPKVVLFLHGFPEIWYSWRHQMIAVANAGFRAIAFDFRGYGLSDHPPEPEKASFKDLVDDVVALLDLLGINKVFLVGKDFGAVPAFMVAVIHPERVLGVITLGIPFLIPGPLGIQLDLLPKGFYILRWAEPGRAEADFGRFDVKTVVRNIYILFCRSELQVAGEN

SEQ ID NO: 71266 - protein, 139 aa, Gossypium hirsutum
  Clone ID: LIB3828-022-Q1-K6-A2.pep
WCCAGPKVVLFLHGFPEIWYSWRHQMIAVANAGFRAIAFDFRGYGLSDHPPEPEKASFKDLVDDVVALLDLLGINKVFLVGKDFGAVPAFMVAVIHPERVLGVITLGIPFLIPGPVGIQFDLLPKGFYILRWAEPGRAE

SEQ ID NO: 71267 - protein, 165 aa, Gossypium hirsutum
  unsure (1)..(165): unsure at all Xaa locations
  Clone ID: LIB3584-010-P1-K1-G10.pep
SLPIPGGGGGGCVSWSVSVIKQXEKIQHSHVQARGLKLHVAQSGTGPKVVLFLHGFPGRGGGWFFYMIAVANAGFRAIAFDFRGYGLSDHPPEPEKXSFKDLVDDVVALLDLLGINKVFLVGKDFGAVPAFMVAVIHPERVLGVITLGIPFLIPGPVGIQFDLLP

SEQ ID NO: 71268 - protein, 131 aa, Gossypium hirsutum
  Clone ID: GOSHI-09MAY01-C15566_2.pep
KGLKLQHPTRPAASYLRRKTARGRPYLGRLQHSDGIHPPPCLTSSRGNADLSVGATTNLQDVENDIFPNKNEFDDGDIDDEIDPTLKEKIDREVEDFARRLNSDWPERMQEILSLGQEKKPVHLSLNGKGS

SEQ ID NO: 71269 - protein, 318 aa, Gossypium hirsutum
  unsure (1)..(318): unsure at all Xaa locations
  Clone ID: GOSHI-09MAY01-C15566_1.pep
LNRNAMFCPMICHEVYKKXLGSSKNYAISLPQQVNPAMLSLILEXCRFHQVPGRSNKERKSFDEKFTRMDTKRLCELTSAADSLQLKPLVDLTSRALARIIEGKAPEEIREIFHLPDDLTEEEKLEPLKNATDDPRIRLLNRLYAKKRKELKEREKLKNVEVDEERVDDRSVDDLLSFINGDDGDSKGIKTSKSKKKNRRRKDLQKSTSAHEATKNHNKESMGPLSACRSAEVRQILPGVGATPNLQDVEDDIFPNKNEFDAGDIDDEIDPPLKEKIDREVEDFARRLNSDWPERMQEILSLGQEKKPGHLSLNGKGS

SEQ ID NO: 71270 - protein, 103 aa, Gossypium hirsutum
  Clone ID: GOSHI-09MAY01-C15456_1.pep
MASMLQPQIILLKEGTDTSQGKAQLVSNINACTAVADVVRTTLGPRGMDKLIHDDKGNVTISNDGATIMKLLDIVHPAAKILGDIAKSQDSEVGDGTTSGVLL

SEQ ID NO: 71271 - protein, 488 aa, Gossypium hirsutum
  Clone ID: GOSHI-09MAY01-C15436_1.pep
MAMMLQRKLLRRTFGEGKAILNFNSNPVLSPCTSFSTVTSAAATPFHNAPRQLPPFDYQPKPYNGPSADQILEKRKKFLGPSLFYYYQKPLNIVEGKMQYLYDENGRRYLDAFAGIVTVSCGHCHPEVLNAITEQNKLLQHATTIYLHHAISDFAEALASKMPGNLKVVYFVNSGSEANELAMLMARLYSGNLGMISLRNAYHGGSSSTIGLTALNTWKYPIPEGEIHHVINPDPFRGVFGSDATRYAKDVQDHIEYGTSGKVAGLIAETIQGVGGAVELAPGYLKQVYDIVRKAGGVCIADEVQTGFGRTGSHYWGFETQGVIPDIVTMAKGIGNGLPLGAVVTTPEIAHVMAQKIQFNTFGGNPVCSAGGLAVLRVIDKEKRQAHCADVGSHLIGRLRSLQDKHDIIGDVRGRGLMVGVELVTDRKEKTPAKAETAILFEKMRELGVLLGKGGLHGNVFRIKPPMCFTKDDADYLVDALDYAMSEL

SEQ ID NO: 71272 - protein, 65 aa, Gossypium hirsutum
  Clone ID: LIB3145-019-Q1-K1-F3.pep
GRVGGRVGGRVGGRVGGRVGRQCVSPKMMPIILLMLWIMQCQSCEQKGLSNLWILWHQSSAKSCV

SEQ ID NO: 71273 - protein, 85 aa, Gossypium hirsutum
  Clone ID: uC-gsronu33B055a08b1.pep
MLNLNSKPLLCPCTYFCTATDAASASFDKAPRQLQPLDYQAKPYNGPADDQILEKRKKMMGPFLLYYYQKTLNIVEGKMQYLYDE

SEQ ID NO: 71274 - protein, 231 aa, Gossypium hirsutum
  Clone ID: GOSHI-09MAY01-C15796_1.pep
MEQWWWYLWFTIISLFGASLGNWIHRWRNPKCNGKLPPGSMGLPLIGETLSFFVTSNSIDIHPFVAQRMKRYGSLFKTSLAGRPVVVSLDPDFNYFVLQQEDKLVELYYMDSLAKLVHQDDMKNIGGDFHKYFKRVILSHFGHEPLKHKLLSQFEDVINHELQDWSKLPQVDLKHQTASMLFNTASKILMSCVPEENLGHDLSDILQGLMTFPVYFPGTAFYKCLKKKEKH

SEQ ID NO: 71275 - protein, 132 aa, Gossypium hirsutum
  Clone ID: GOSHI-09MAY01-C15756_1.pep
MEGLGVKLPSFPFLSPNISSSSSSSTFRLGFRRLSASTSAAVKEGSGSLGQLTRPDFPILHQEVNRSKLVYSDNAATSQKPTAVSKSLQNYYVAYNSNAHRGIHYLSAKATDEYELARKNVAAFINASDSAE

SEQ ID NO: 71276 - protein, 202 aa, Gossypium hirsutum
  unsure (1)..(202): unsure at all Xaa locations
  Clone ID: GOSHI-09MAY01-C15766_1.pep
VAPWPARLQTPPDRLQSIHMESYIARKELFKADSKYWNEILASYVRALHWKKYKLRNVMDMRAGFGGFAAAMIDNQLDACVLNVVPGRGPGPVPXAWDRRLIGVMHDWCESFDTYPRTYDLLHAAGLFSVERKRCNMSTIMLEMDRILRPGGRVYIRDSLDVMDELQDIAKAMGWHPTLRDTSEGPHASYRILVCDKRLLRS

SEQ ID NO: 71277 - protein, 208 aa, Gossypium hirsutum
  Clone ID: GOSHI-09MAY01-C15716_1.pep
MAPVSALAKYKLVFLGDQSVGKTSIITRFMYDKFDNTYQATIGIDFLSKTMYLEDRTVRLQLWDTAGQERFRSLIPSYIRDSSVAVIVYDVASRQSFQNTTKWIEEVRTERGSDVIIVLVGNKTDLVDKRQVSVEEAEAKARDLNVMFIETSAKAGFNIKALFRKIAAALPGMETLSSTKQEDMVDVNLKSTNANSSQSQQEAGGCAC

SEQ ID NO: 71278 - protein, 397 aa, Gossypium hirsutum
  Clone ID: GOSHI-09MAY01-C15736_1.pep
MESALANALAVVDQRQKIEQYKHILSTVFSSNDIVQANKFIDHMLSDDVPLMVSRQLLQTFAHELERLKPDAQKEISHYTLDQIQPRVVSFEEQVLFIREKLAELYESEQQWSKAAQMLSGIDLDSGMRVIDDTFRLSKCVQIARLYLEDDDAVNAEAFINKASFLVSNSQHEVLILQYKVCYARILDLKRKFLEAALRYYDISQIEKRQIGDETIDEDALEQALSAAVTCTILAGAGPQRSRVLATLYKDERCSKLKIYPILQKVYLERILRKPEIDAFSEELKPHQKALLPDNYTVLDRAIIEHNLLSASKLYTNIRFDELGTLLGIPPHKAEKIASRMICEDRMRGSIDQVEAVIQFEDDTEELQQWDQQIVGVCQALNDILDSMAKKGMEVPI

SEQ ID NO: 71279 - protein, 60 aa, Gossypium hirsutum
  Clone ID: GOSHI-09MAY01-C15616_1.pep
DAWVGRAPRLRRAPMFFREVYHAIKRIDLFEKSMSYSITLKEHNKRTIACQMGRSDSGAV

SEQ ID NO: 71280 - protein, 122 aa, Gossypium hirsutum
  Clone ID: GOSHI-09MAY01-C15166_1.pep
CALADVVSMRFIDGNEGSTGLMGIDYSTAFWLYKETGYRAYRVDYIEDLTNPFVSMYFGAAYLAWLSEYEGRERSLQFIFHAYISGPKNVHLEETCPEWLKFEQILARYERTKSREGSCNII

SEQ ID NO: 71281 - protein, 215 aa, Gossypium hirsutum
  unsure (1)..(215): unsure at all Xaa locations
  Clone ID: GOSHI-09MAY01-C15116_1.pep
LDLSFNGLSRNIPKEMGNWSSLEGLNLNDGGFEAQIPKELGTLSFLTTLNIYNNRLSGPFPDEIGNLSSLAQLLAYSNNISGSLPSSLGNLKRLTSFRAGQNLLTGGLPSIIGSCESLEYLGLAQNALTGELPKEIGKLKNLKELILWENQLSGLIPVELSNCTNLSILALYDNKFVGRVPKELGNLINLTKLYLYRNQLNGTIPXEIGNLSFAE

SEQ ID NO: 71282 - protein, 165 aa, Gossypium hirsutum
  Clone ID: GOSHI-09MAY01-C15076_1.pep
MDTTSNSKHRPFSIKLWPPSESTRLVLVQRLTNNLSSNSIFTQKYGALNKEDAEENAKKIEDIAFNVANEQYDREPDGDGGAAVQLYAKECSKLLLEVLKRGPEEKEKELASQNNASAETFFDISKGQRAFIKAEEAENLLRPLKEPGNSYTKICFSNRSFGLKA

SEQ ID NO: 71283 - protein, 55 aa, Gossypium hirsutum
  Clone ID: LIB3189-051-P1-K1-G11.pep
MATMARDWPSVLILWNQNVIRSYLDAWCFFKFCPLSDEPPPSLPKKILFRSSIMS

SEQ ID NO: 71284 - protein, 70 aa, Gossypium hirsutum
  Clone ID: LIB3189-051-P1-K1-G6.pep
MATMARHRPSVLILWNQNVIRSSLDACCFFKSCPLSDEPPPFLPKIISSRSSIMSSLLPPCVPCRVLVFL

SEQ ID NO: 71285 - protein, 102 aa, Gossypium hirsutum
  Clone ID: GOSHI-09MAY01-C15016_1.pep
DELHASRLQNFFISVPKKGQNINHRWRDLCSEPLSEFPNPFPTITGHPFCAFFKGRAKSCCALLQFLYRSPCARCSPSFKTPAFALAMEAHSFNIEIKYCIF

SEQ ID NO: 71286 - protein, 203 aa, Gossypium hirsutum
  unsure (1)..(203): unsure at all Xaa locations
  Clone ID: GOSHI-09MAY01-C15296_3.pep
MGQQSLIYSFVARGTVILAEYTEFSGNFNTIAAQCLQKLPASSNRFTYNCDGHTFNYLVDNGFTYCVLXTESAGRQIPIAFLERVKEDFSKRYGGWKAANAKAKSLNKNVGSKLKEHMKYFVEHPEEISKLAKVKAQVSEVKGVMMENIDKVXLDRGEKIELLVDKTENLRSHVTLIQTAFHWLHFGESVSLPNLGSFFSFSK

SEQ ID NO: 71287 - protein, 77 aa, Gossypium hirsutum
  Clone ID: GOSHI-09MAY01-C15296_2.pep
MGQQTLIYSFVARGTVILAEYTEFTGNFTSIAGQCLQKLPTSNNKFTYNCDGHTFNYLVENGFSMNVFFFFLFIFWL

SEQ ID NO: 71288 - protein, 231 aa, Gossypium hirsutum
  unsure (1)..(231): unsure at all Xaa locations
  Clone ID: GOSHI-09MAY01-C15296_1.pep
MGQQSLIYSFVARGTVILAEYTEFTGNFTGIAAQCLQKLPASNNKFTYTCDGHTFNYLVEDGFTYCVVAVESAGRQVPIAFLERVKEDFNKRYGGGKAATATAKSLNREFGSKLKEHMQYCVDHPEEISKLAKVKAQVSEVKGVMMENIEKVLDRGEKIELLVDKTENLRSQAQDFRQQGTKMRRKMWLQNMKXIKLIVLGILIALILIIVLSVCHGFHWLNLSCISFVLL

SEQ ID NO: 71289 - protein, 70 aa, Gossypium hirsutum
  unsure (1)..(70): unsure at all Xaa locations
  Clone ID: uC-gsronu33B050d03b1.pep
MGQQTLIYXFCGXGTVILAEYTEFTGNFTSIAGQCLQKLPTCKSKFTYNCDGHTFXYLGENGFSMNGFFF

SEQ ID NO: 71290 - protein, 57 aa, Gossypium hirsutum
  Clone ID: GOSHI-09MAY01-C15276_1.pep
SFIRNSSSQFFQGHFLRPFLLVLGISLSSYGGKFTVKSWKLRFCSNQNSGFETINMK

SEQ ID NO: 71291 - protein, 104 aa, Gossypium hirsutum
  unsure (1)..(104): unsure at all Xaa locations
  Clone ID: LIB3543-032-Q1-K1-C11.pep
ARIVWSLXSAVGIFCLGSGATIVHGVQNLWIAHPPDNIEYAALVIGGSFIIEGASLVVAIQAVKKGAATEGMKVKDYVWRGHDPTSVAVMTEVILCVPIYTFGY

SEQ ID NO: 71292 - protein, 145 aa, Gossypium hirsutum
  Clone ID: LIB3197-033-Q1-M1-G9.pep
VGIFCLGSGATIVHGVQNLWIAHPPDNIEYAALVIGGSFIIEGASLVVAIQAVKKGAATEGMKVKDYVWRGHDPTSVAVMTEDGAAVTGLAIAAASLVAVKTTGNAMYDPISSIIVGNLLGMVAIFLIQRNRHALIGRAIDEHDM

SEQ ID NO: 71293 - protein, 108 aa, Gossypium hirsutum
  Clone ID: GOSHI-09MAY01-C16976_1.pep
SLISALNVNFNNCLHFSSLLCCLAYIALWVCGFLVRFCVLLSLPLGPCAEGRSQSAWASRPLFWVEIPILELGCLEIGQIGTDRNISDFRYESLNPLLHWRVISGMNL

SEQ ID NO: 71294 - protein, 69 aa, Gossypium hirsutum
  unsure (1)..(69): unsure at all Xaa locations
  Clone ID: LIB3197-034-Q1-M1-B1.pep
NQSPMKQRNSXNHKNQNGQRKPSVASFCAPKTLIGGKTPEGVDGAAVSGVCYERTRKEGKENKENERAN

SEQ ID NO: 71295 - protein, 304 aa, Gossypium hirsutum
  Clone ID: GOSHI-09MAY01-C16796_1.pep
LNSDLIGFHTFDYARHFLSCCSRMLGLEYQSKRGYIGLEYYGRTIGIKIMPVGIHMAQIESVLRLADKEWRVGELKQQVEGKTVLLGVDDMDVFKGVNLKLLAMEQMLEQHPKWQGRAVLVQIANPARGRGQDLEEIQAEITASCKRINETFGQPGYEPIVFIDRPVSLCERVAYYTVAECVVVTAVRDGMNLTPYEYIVGRQGVSESVSSSESSGPKKSMLVVSEFIGCSPSLSGAIRVNPWNTESTAEAMNEAISMADAEKQLRHEKHYRYVSSHDVAFWSRSFFQDMERTCKDHFRRRCWG

SEQ ID NO: 71296 - protein, 130 aa, Gossypium hirsutum
  Clone ID: GOSHI-09MAY01-C16646_1.pep
MEEITQGVNNINLVADSHKKNRIQVSNTKKPLFFYVNLAKRYMQQHNEVELSALGMAIATVVTIAEILKNNGLAVEKKITTSTVDMKEDSRGRPVQKAKIEILLGKTENFDELMAASAEEREIVDGEVQG

SEQ ID NO: 71297 - protein, 134 aa, Gossypium hirsutum
  Clone ID: GOSHI-09MAY01-C16166_3.pep
MVSKTEETQLNRLENQVDNGGGGAWEYLCLVRKLKVRRSEKVLKYGLSILNDPKKRSALGPEEWTLYEQVAIAAMDCQCLNVAKDCIKALLKKFPESKRVGRLEGMLLEAKGSWAEAEKAYSSLLEDNPLVQVI

SEQ ID NO: 71298 - protein, 326 aa, Gossypium hirsutum
  unsure (1)..(326): unsure at all Xaa locations
  Clone ID: GOSHI-09MAY01-C16166_1.pep
KIPPKKGKKNVYIERSDRCVRAGPTHPVSKTEETQLNRLENQVDNGGGGAWEYLCLVRKLKVRRSEKVLKYGLSILNDPKKRSALGPEEWTLYEQLAIAAMDCQCLDVAKDCIKVLHKKFPESKRVGRLDCMLLEAKGSWAEAEKAYSSLLEDNPLDQVIHKRKVAMAKAQGNISGAIESLNKYLEIFMADHDAWRELAEIYVSLQMYKQAAFCYEELILSQPTVPLYHLAYADVLYTLGGLENLQTSKKYYASTIDLTGGKNSRALLGVCLCTSAIGQVSKGRNKEDKESPELQSLAAKALEKXYRQKADDKLGLLTSALRSLKI

SEQ ID NO: 71299 - protein, 100 aa, Gossypium hirsutum
  Clone ID: LIB3830-002-Q1-N6-E6.pep
LYHLTYADVLYTLGGLENIQTAKKYYASTIDLTGGKNTRALLGICLCTSAIARLSKGRSKEDKESPELQSLAAKVLEKEYKQRAADKLGLLTSALRSLKI

SEQ ID NO: 71300 - protein, 66 aa, Gossypium hirsutum
  Clone ID: uC-gsronu33B014g05b1.pep
TEETQLNRLEYQVDNGGGGAWEYLCLGRKLKCWRSLKGLKYLIIGLFRPLKTFFVFPLFKLYSSLC

SEQ ID NO: 71301 - protein, 76 aa, Gossypium hirsutum
  Clone ID: GOSHI-09MAY01-C16086_1.pep
LKPFLINPTPHIQFCPTDFNHYRFKLTLSTMAAATKLQLSLEESRIRGSDLGMCPDRVKPLAWAPMKGKYRRNCCG

SEQ ID NO: 71302 - protein, 213 aa, Gossypium hirsutum
  unsure (1)..(213): unsure at all Xaa locations
  Clone ID: GOSHI-09MAY01-C16046_1.pep
MATCFLSSYWLKQQFIIVVFLFTVISSISLPVNGCFTSIFSFGDSMSDTGNSIEISVLETGKLPDGAFPPNGRTFFHRPTGRACDGRLVIDFLAEALGLPFLPPYYRYKNGTSDKFESGVNFAVGGAGALNSSFPGIYNPNTNVSLVDEVNSFIQFLNLRTDFKQLLRNSLIXMGEIGGNDYSXPSSKGKSMEDVRNFVLPIVDSITSSINEL

SEQ ID NO: 71303 - protein, 132 aa, Gossypium hirsutum
  Clone ID: GOSHI-09MAY01-C16026_1.pep
MAFTLRSVKVPPNSTSLEEARSRVFDFFRKACRSIPTIMDIYNLDDVVTKSELRSSISSEIRKNSHVTNPKVIDLLLFKGMEELNNIVEHAKQRHHIIGQYVLGRQGLAQDLDTKDEGTSEFLKNFYKSNYF

SEQ ID NO: 71304 - protein, 200 aa, Gossypium hirsutum
  unsure (1)..(200): unsure at all Xaa locations
  Clone ID: GOSHI-09MAY01-C16396_1.pep
MFYRCKILNVNFPSSMSLGTFVKHLPFSKPKTSLPPQRLNFKSLTTTTTCVTRSSSYFETLNSRQKDQIHLYVDALLQWNQMNLTAVNEVNEVMERHIEDSLAIIPPIQNSYISSCNNSFDNLRIVDVGSGAGLPGLVLAVACPXWEVTLVESMNKRCLFLEHAVNLIGLSNVQVVRERAEKWGPDXTLRERFDVAVAMA

SEQ ID NO: 71305 - protein, 166 aa, Gossypium hirsutum
  Clone ID: GOSHI-09MAY01-C16336_1.pep
MALVTTAEVCDANPQLIVSGELRALQPIFQIYGRRPVFSGPIVTLKVFEDNVLIREFLEEKGNGRVLVVDGGGSLRCAILGGNPVVQAQNNGWAGIVVNGCVRDVDEINGCDIGVRALHSHPMKANKKGIGEKHVPLTIAGTRICDGEWLYADTDGILVSKTELSV

SEQ ID NO: 71306 - protein, 50 aa, Gossypium hirsutum
  Clone ID: uC-gsronu33B126c02b1.pep
VTICIYVYTKVFYINNTISTMYNADPFKPIIHTNIICTHFHTSPSHSATT

SEQ ID NO: 71307 - protein, 154 aa, Gossypium hirsutum
  Clone ID: GOSHI-09MAY01-C16256_1.pep
MGFFLFFFLSLLSLASSASRVDQKTFIVRVQNEAKPSVFTTHKHWYESSLASVLSPSTPAQLLHVYDTVFHGFSAKLSPTDALKLQTLPHILAVIPEQVRRLHTTRSPLFLGLQTTDSAGLLKESDFGSDLVIGVLDTGVWPERQSFNDRDLGP

SEQ ID NO: 71308 - protein, 342 aa, Gossypium hirsutum
  Clone ID: GOSHI-09MAY01-C16276_1.pep
ADGAVEDMKEFLFGSLDMPGVNLERSLKNYEPSEASVDINSVPKDVKTQPLAEKKATSKKPTGLGAPPPGPPSTVDAYEKLLSSIPEFASFGKLFKSSAPVELTEAETEYAVNVVKHIFDGHVVFQYNCTNTIPEQLLENVTVIVDASEAEEFAEVASKPLRQLPYDSPGQTFVAFEKPEGVSAVGKFSNMLRFIVKEVDPSTGEAEDDGVEDEYQLEDLELVAADYMLKVGVSNFRNAWESMGADCERVDEYGLGPRESLAEAVNAVINLLGMQPCEGTEVVPNNSRSHTCLLSGVYIGNVKVLVRLQFGLDGPKDVAMKLAVRSEDEAASDAIHEIVPSG

SEQ ID NO: 71309 - protein, 135 aa, Gossypium hirsutum
  Clone ID: LIB3147-024-Q1-K1-C3.pep
DRATLYLNTLGGDGAVVETDEGVKEFLFGSLDVPLVNLENSLKNYDPSEKAFDINSVPKDVKTQPLAEKKATSKKPTGLGAPPPGPPSTVDAYEKLLSSIPEFASFGKLFKSSAPVELTEAETEYASNVVKHIFD

SEQ ID NO: 71310 - protein, 135 aa, Gossypium hirsutum
  unsure (1)..(135): unsure at all Xaa locations
  Clone ID: LIB3146-047-Q1-K1-G12.pep
PTRPQTLTFHEDEYQLEELEVVAADYMLKVGVSNFRNAWETMDADCERVDEYGLGPRESLAEAVNAVINLLGMQPCEGTEVVPNNSRSHTCLLSGVYIGNVKVLVRLPVGLDGPKDVAMKLAXRSEDEACSDAIH

SEQ ID NO: 71311 - protein, 179 aa, Gossypium hirsutum
  Clone ID: GOSHI-09MAY01-C16216_1.pep
MQLKPLNTFTITLMLFFTFLILFFSGFLEFPSVSSSIQQPFTTPSLTLSSNPNPFTDLLSAFKTWDSQMGCSQFKLKRHDLIRLLSNSSGSLQEPVSHSSCNLLKMEHVSVLVKGWTWVPDNLDNLYSCQCGMSCLWTKSPVLADKPDALLFETATPPLQRHSGDPLRVYMDLEAGRRR

SEQ ID NO: 71312 - protein, 226 aa, Gossypium hirsutum
  Clone ID: GOSHI-09MAY01-C17986_1.pep
PRPPRVRPASASSLIFNKLRSSPRLRFSFAVAPLCSRRAKFMAHTLASANLGLTQPANIESPKIAFAAKEIDVGEWKGDMLAVGVTEKDMTKDENSKFQNSILKNLDRLLGGLLAEVSSEEDFTGKSGQSTVLRLPGLGSKRVGLIGLGQSASSPSAFRGLGEAVAAAAKTAQANSVAVVLASSEGLSNESKLGFASAIASGTVLGLHEDNRYKSESKKPQLKSLD

SEQ ID NO: 71313 - protein, 106 aa, Gossypium hirsutum
  Clone ID: GOSHI-09MAY01-C17886_1.pep
YNFKNILPLDLHMKIMTHPPDQFVPDIGLEGGAYQHPEQTSRREERNLPNISVPLPVKREEHIPSKVVEDLSMEVEQQFPTKAEEQPQHGLAVSEGESSQISNAIA

SEQ ID NO: 71314 - protein, 88 aa, Gossypium hirsutum
  Clone ID: GOSHI-09MAY01-C17556_1.pep
PLHHSLRLFCAVRVFAESILRYGLPPSFLACVLSPSVKGEKKVRSILEGLCERANSTFWKTEDECGAMAGLGGDTDAHPYVSFTINIA

SEQ ID NO: 71315 - protein, 131 aa, Gossypium hirsutum
  Clone ID: GOSHI-09MAY01-C17536_1.pep
KMKFPSICNKSRTKGMSWKLSLFCHLKAVPFINKPRRLKHSTSALSDSTAKFISALDCSWSQSRHCFTVPKDSEELLDMAIEALRSNRLFFEPGDTGFILEGSPGSHSRVVWHWPWKTGGSHTWDFRVFNG

SEQ ID NO: 71316 - protein, 265 aa, Gossypium hirsutum
  Clone ID: GOSHI-09MAY01-C17446_1.pep
MEFSRVSMISCFALLLCSSLAYGASSPPAPMAMSPSPTPSPAPAPAPEYVNLTYLLSVAGPFHTFLNYLESTKVLDTFQNQANNTDQGITIFVPKDSAFKALKKPSLSNLTNDQLKSLILFHAMPKFYSLADFNKLSTKGPVSTLAGSQYSLNFTDNSGTVHLDSGWSKTKVSSAVHSTDPVAIYQVDKVLLPEAIFGTDIPPMPPAPAPAPDMSPAADAPSAETKGKGSSSKAEPSTSSSHRIMNFGTWNQLVLALFGGWVMFF

SEQ ID NO: 71317 - protein, 102 aa, Gossypium hirsutum
  Clone ID: LIB3543-039-Q1-K1-A6.pep
MEFSRVSMISCFAFLLCSSLAYGASSPPAPMAMSPSPTPTPAPAPAPEYVNLTYLLSVAGPFHTFLNYLESTKVLDTFQNQANNTDQGITIFVPKDSAFKAL

SEQ ID NO: 71318 - protein, 100 aa, Gossypium hirsutum
  unsure (1)..(100): unsure at all Xaa locations
  Clone ID: LIB3148-038-Q1-K1-H10.pep
MRVGTFNTFLNYLESTKXLDTFRGQANSTDQGITIFAPKDSAFEALKKPSLSNLTHDQLRXLILFHAMPKLYSLADFHKFSTKGPVSTLACRQYSLNFTD

SEQ ID NO: 71319 - protein, 331 aa, Gossypium hirsutum
  Clone ID: GOSHI-09MAY01-C17406_1.pep
MDSREDDGGEPLSRMAEWRDVTPLPQDDGPNPVVPIAYKEEFRETMDYFRAIYKADERSPRALRLTRRAIHLNPGNYTVWHFRRLVLEALNADLDEELDFLQRIANSNSKNYQLWHHRRWVVDRLGANARAKELNLIKKILSIDAKNYHAWSHRQWVLQALGGWEDELDYCQQLLEEDIFNNSAWNQRYFVVTRSPFLGGLKAMRASEVRYTVEAILANPNNECPWRYLRGLYKDDIKALVNDPEISSVCLKVINTKNNYVFALKMLLDLLCHGFQPCHEFRDSVVALRTSDTDPLDPDLSMAICDILEHVDSLRASYWIWRKNKLSVAAV

SEQ ID NO: 71320 - protein, 102 aa, Gossypium hirsutum
  unsure (1)..(102): unsure at all Xaa locations
  Clone ID: GOSHI-09MAY01-C17686_3.pep
MAEGSAAVPSTELLEWPKKDKRRFLHALYRVGDLDRTIKFYTECFGMKLLRKRDIPEEKYSNAFLGFGPEESQFRVELTYNYGVLSYDIGNXVFGHFAIATT

SEQ ID NO: 71321 - protein, 76 aa, Gossypium hirsutum
  Clone ID: GOSHI-09MAY01-C17686_2.pep
MPSKCEICCELLIAILLPPLGVCLRHGCCSVEFCICLLLTILGYIPGIIYALYAIVFVDRDEYFDEYRRPLYYSSA

SEQ ID NO: 71322 - protein, 97 aa, Gossypium hirsutum
  Clone ID: GOSHI-09MAY01-C17686_1.pep
GFLHAVYRVGDLDRTIKFYTECFGMKLLRKRDIPEEKYSNAFLGFGPEESHFVVELTYNYGVSSYDIGTGFGHFAIATPDVYKMVDEYRRPLYYSSA

SEQ ID NO: 71323 - protein, 103 aa, Gossypium hirsutum
  Clone ID: LIB3197-056-Q1-M1-C3.pep
MAEGSAAVPSTELLEWPKKDKRRFLHAVYRVGDLDRTIKFYTECFGMKLLRKRDIPEEKYSNAFLGFGPEESHFVVELTYNYGVSSYDIGTGFGHFAIATPDV

SEQ ID NO: 71324 - protein, 71 aa, Gossypium hirsutum
  unsure (1)..(71): unsure at all Xaa locations
  Clone ID: LIB3197-056-Q1-M1-C4.pep
YKSLDQKDKRRFLNTVYRVGELDHTIKFYTECFRMKLLRKIDILEEKYSNSSLIRXDDSHFVDELTYNHGV

SEQ ID NO: 71325 - protein, 77 aa, Gossypium hirsutum
  Clone ID: GOSHI-09MAY01-C17656_1.pep
RTLQNQTMSCGSCLYLSYFGTLISCGTNRSAPPSLMKRKIYCKELVEMALFFLALYHSCPGASLAILVAGALQVLES

SEQ ID NO: 71326 - protein, 155 aa, Gossypium hirsutum
  unsure (1)..(155): unsure at all Xaa locations
  Clone ID: GOSHI-09MAY01-C17616_2.pep
LGIRRPSPIQMVAIPLGLQQRDVIGIAETGSGKTAAFXVWPMLAYISRLPPMSEENEAEGPYAVVMAPTRELAQQIEDETMKFAHYLGIKVVSIVGGQSIEEQGFRIRQGCEVVIATPGRLLDCLERRYAVLNQCNYVGLDEADRMIDMGFEPQV

SEQ ID NO: 71327 - protein, 179 aa, Gossypium hirsutum
  Clone ID: GOSHI-09MAY01-C17616_1.pep
KEEAANTYDTFDMRVDKHWSDKKLEEMTERDWRIFREDFNISYKGSKIPRPMRSWSESKLTAELLKAVERVGYKKPSPIQMAAIPLGLQQRDVIGIAETGSGKTAAFVLPMLAYISRLPPMSEENEAEGPYAVVMAPTRELAQQIEDETMKFAHYLGIKVVSIVGGQSIEEQGFRIRQV

SEQ ID NO: 71328 - protein, 302 aa, Gossypium hirsutum
  Clone ID: GOSHI-09MAY01-C17176_1.pep
FFSSPLFLELKPVSFPFESHAAPLPNGSGSNAATSPETAAATTAITVASNTAPSSKLSHLTESLKLEHQFLRVPFEHFKKTIRTNHRTVEKEVSAVISSVTDVADSDEISKDDAILSLTSLVSRLQGIKRKLEEGSHAENLQAHRCRARLDHLDSADAENLSEWNNVRLKRVLVDYMSRMSYYDSAMKLAESSNIQELVDIDVFQEAKKVIDGLRNQEVGPALAWCADNKSRLKKSKSKFEFQLRLQEFVELGRAENYMRAISYARRYLSPWGATHLKELQRVMAPLPVRSHTGCAKYKILL

SEQ ID NO: 71329 - protein, 73 aa, Gossypium hirsutum
  Clone ID: uC-gsronu33B100f06b1.pep
LHEFIELVRAENYMRAISYARRYLSPWGATHLKELQRVMATLAVRSHTECAKYKVLFEPKQRYFLVDQSFTII

SEQ ID NO: 71330 - protein, 133 aa, Gossypium hirsutum
  unsure (1)..(133): unsure at all Xaa locations
  Clone ID: GOSHI-09MAY01-C17136_1.pep
MVIQGAGFVREVKMVLLTLNKANEDSPYSGDGXLVENRPSVGDEDLDSAAAPLPSVSKSNIGHRWSDITSYGTKKKVQCWFQHPNGNWELGRVISTSGTESVISLPDGKVLKVNSDSLIPANPDILDGVVISC

SEQ ID NO: 71331 - protein, 70 aa, Gossypium hirsutum
  Clone ID: GOSHI-09MAY01-C17386_1.pep
FLSLLSLHYFLGRETLIPFFLNLSVLFVGESKREKLVCFCSTAEGKPFLIFQTISGGIFPFFQLEKSVFG

SEQ ID NO: 71332 - protein, 76 aa, Gossypium hirsutum
  Clone ID: LIB3197-041-Q1-M1-H2.pep
GFDGCIPSVITTEFCFLGTILGVTGAKSLVFVICIGDSRQEFPSPVSLPNGFLSFSGECMTLDFEAIKRTQNCYKD

SEQ ID NO: 71333 - protein, 245 aa, Gossypium hirsutum
  unsure (1)..(245): unsure at all Xaa locations
  Clone ID: GOSHI-09MAY01-C17326_1.pep
ISLADRATIANMSPXYGATMGFFPVDHVTLQYLKLTGRSDETVSMIEAYLRANKMFVDYNEPQQERAYSSFLQLDLAEVEPCISGPKRPHDRVPLKEMKADWHACLDNNVGFKGFAVPKEEQDKVAKFTFHGLPAELRHGSVVIAAITSCTNTSNPTVMLGAGLVAKKAYELGLEVKPWIKTSLAPGSGVVTKYLLHSGLQKYLNQQGFNIVGYGCTTCIGNSGDLDESVASAISENDIIAAAVL

SEQ ID NO: 71334 - protein, 37 aa, Gossypium hirsutum
  Clone ID: GOSHI-09MAY01-C17286_1.pep
KVEPVCIPIITAVYQRSGGGPGSAASNEEEDDSHDEL

SEQ ID NO: 71335 - protein, 83 aa, Gossypium hirsutum
  unsure (1)..(83): unsure at all Xaa locations
  Clone ID: LIB3147-019-Q1-K1-H4.pep
YCTNFGRILNGRKKTSPIIRFFYLGANIYILKYLLLSLEQHFDSRXXKKKKKKKKKKKKKKKKKKRGARSRPRXRAKSTGVLG

SEQ ID NO: 71336 - protein, 134 aa, Gossypium hirsutum
  Clone ID: GOSHI-09MAY01-C17226_1.pep
MGAPALLTLNPQKPPTFTMSDEEVEQVEEQYEEEEEAQEEEEVQEEEKPRPKLTAPKIPEGEKVDFDDIQKKRQNKDLMELQALIDSHFEARKKEEEELVALKERIEMRRAERAEQQKIRAEKERERQNRLAEE

SEQ ID NO: 71337 - protein, 119 aa, Gossypium hirsutum
  unsure (1)..(119): unsure at all Xaa locations
  Clone ID: LIB3196-013-P1-M1-A10.pep
PDASSCKRCCPQGAPALITLNPQKPPTFTMXTEEVEQVEEQPEEKEEAQEEAAXVHEEAHEVHEPYEKPRPKLTAPKMPEGEKVDFDDIQKKRHXNDLMELQALMDCHFXEARMKDEEV

SEQ ID NO: 71338 - protein, 122 aa, Gossypium hirsutum
  Clone ID: GOSHI-09MAY01-C10946_1.pep
MDGSSIDESASSDSISVSIAPSNISPLPQLTKSPDSLYRVGSGTSVIVDSESGVEAESRKLPSSKYKGVVPQPNGRWGAQIYEKHQRVWLGTFNEEDEAAKAYDIAAQRFRGRDAVTNFKHL

SEQ ID NO: 71339 - protein, 344 aa, Gossypium hirsutum
  Clone ID: GOSHI-09MAY01-C10896_1.pep
MASFLTQSVLKLFLVISLFQISLAVRKLSEVVQDQPQLLTYHNGPLLSGKITINLIWYGKFKPSERAIVSDFVTSLSSTPPSQSNQPSVAQWWKTTEKYYHLTSKKSSLSLSLGKQILDDKYSLGKSLKNKQIVELASMGDQKNAINVVLTASDVAVEGFCMSRCGTHGSALGSTDGLVKAKKHSKFAYIWVGNSQTQCPGQCAWPFHQPIYGPQSAPLIAPNNNVGLDGMVINLASLFAGTVTNPFGNGYFQGPAEAPLEASSACPGIYGKGAYPGYAGNLLVDPTTGASYNAHGNNGRKTLLPALYDPSTSSCSTLVYPFEAPITKISVSQYPVYKVIPFIC

SEQ ID NO: 71340 - protein, 152 aa, Gossypium hirsutum
  unsure (1)..(152): unsure at all Xaa locations
  Clone ID: AI054855.1.pep
KSSLSLSLGKQILDDKYSLGKSLKNKQIVELASMGDQKNAINVVLTASDVAVEGFCMSRCGTHGSALGSTDGLVKAKKHSKFAYIWVGNFHTQCPGQCAWTFHXQPIYGPQSAPLIVPNNNLGIDGQVINYGSLYVGTVSILFRKGYLLGSL

SEQ ID NO: 71341 - protein, 84 aa, Gossypium hirsutum
  unsure (1)..(84): unsure at all Xaa locations
  Clone ID: LIB3149-056-Q1-K1-H8.pep
LHIRHDNLTSRCLKTISKVVRPAKAAVYAMPQTPCVWCIKGXLVRDWLVNARHLPGHWVWELPTQCKRTGVLWPTRPSVEPGRA

SEQ ID NO: 71342 - protein, 161 aa, Gossypium hirsutum
  Clone ID: GOSHI-09MAY01-C10856_1.pep
MSHSMGKCQKIRRIVRIRQMLKQWRRKASITASNNTIGNNNNGDAPSDVPAGHVAVCVGTSLRRFIVRATYLNHPVFKKLLVQTEEEYGFKNMGPLIIPCDESFFEEILRVVSRSDSSSNSGPFSTFKDLQRCCHVGMEDKLGFFCESRPLLHGVSDKSVY

SEQ ID NO: 71343 - protein, 98 aa, Gossypium hirsutum
  Clone ID: GOSHI-09MAY01-C10876_2.pep
PYFSIVPWGFCKETNEQIRLFCCGLWLILQSNGNIQQDYQRTRVTVLFDAAFAPPPPRSTTGLLERNEVGEILASKTVFPLRDSNSVHGRGTVGLQAM

SEQ ID NO: 71344 - protein, 143 aa, Gossypium hirsutum
  Clone ID: GOSHI-09MAY01-C10876_1.pep
FTRRTKNFYRKLWKLYIPSKIIITVCRLSWNFILSLVNLRHKRVVVEDQCPQCRQNEEDSSHIFRIVPWGFCKETNEQIRLFCCGLWLILQSNGNIQQDYQRTRVTVFLTQPLTINLPDQLQACLYEMKWGRSLHQRRFFTPR

SEQ ID NO: 71345 - protein, 124 aa, Gossypium hirsutum
  Clone ID: GOSHI-09MAY01-C10866_1.pep
MASERDTKKGTSELLSSAKLVADAAKSTFNKESDKVDKGKVAGAGADLLGAAQHYGKLDKDKGVGQYVEKAETYLHQYQTSHLAPTTNPDSHGAGAAAKDSETAAAGGGGVGDYMKMAQGFLGK

SEQ ID NO: 71346 - protein, 112 aa, Gossypium hirsutum
  Clone ID: GOSHI-09MAY01-C10506_1.pep
GIGRVCMSESYDGGHNGDYAKPTQLPNPNSGIDGVKLSDGRILLAYNTISRGVLKVAVSTDDGDSWNEVLTLEENLEMEFSYPAVIEASNGLVHITYTYNRTQIKHVILQPN

SEQ ID NO: 71347 - protein, 305 aa, Gossypium hirsutum
  Clone ID: GOSHI-09MAY01-C10496_1.pep
MDSNPQSCENPEIKSTEVQTQNQNQVSQSPFATASLSLSSLPPTLPTQFFIQPKILSLFSAQCPSKVKVPTQASSLSHLSLSSTSPSPSKLSFKSTFANNPLQSPLSLGPGRHLDPSNGAAIRRASIVWFRNDLRVHDNECLNTANNESMSVLPVYCFDPRDYGKSSSGFDKTGPYRATFLIESVSDLRKNLQARGSDLVVRIGKPECVLVELAKAIGADAVYAHREVSHDEVKAEEKIESAMKEEGVEVKYFWGSTLFHVDDLPFKLEDMPSNYGGFRDKVNGLEIRKTIESLDQMKGMPSRGD

SEQ ID NO: 71348 - protein, 215 aa, Gossypium hirsutum
  Clone ID: GOSHI-09MAY01-C10786_1.pep
AARQAFDAEKLDNKKFSSLGETVVKNDRLVVRIDGHYFPWDAAAPILLGMVTFGSEKIIEPTGMIPIDRLEKSVEGGPSKAIVTQSRKWRLWPFSLKRSRSRKAAQPGAADTGGSDIGNAADDSLASDDDENFLTPKPVKKMIRAITPTSEQLASLNLKDGMNQITFTFSTAMLGKQQVDARIYLWHWNTHVVISDVDGTITKSDVLGQFMPLVG

SEQ ID NO: 71349 - protein, 122 aa, Gossypium hirsutum
  unsure (1)..(122): unsure at all Xaa locations
  Clone ID: GOSHI-09MAY01-C10746_1.pep
MPGNLYQMDPRSAAEKAVSVIGFGFDLCRDVRLSACLPGPSGSRLIELDSAATRDLVFPDGVVVKDVPNSIKYDKGERTRFRSDVLSVSQMSEKFNRDLSLSGKIPSGXFNAMFEFKGCWHK

SEQ ID NO: 71350 - protein, 380 aa, Gossypium hirsutum
  unsure (1)..(380): unsure at all Xaa locations
  Clone ID: GOSHI-09MAY01-C10776_1.pep
HAPGRNLLDRPTRPGDRVNDAPALLIADIAXAVADATDAAPSASDIVLTEPALSVIIRAGLTSPAIFQRMKNYTMYAVSITIRIVLGFMLLALIWKFDFPPFMVLIIAILNDGTIMTISKDRVKPSPLPDSWKLAEIFTTGIVLGSYLAVMTVIFFWAAYKTNFFPRVFGVATLEKTAHDDIKKLASAVYLQVSIISQALIFVTRSRSWSFVERPGLLLLAAFVIAQLIATLIAVYANWSFAAIEGIGWGWAGVIWLYNIIFYIPLDFIKFFIRYALSGRAWDLVIEQRIAFTRQKDFGKEQRELQWAHAQRTLHGLQAPDTALASERTHFTELNQMAEEAKRRAEIARLRELHTLKGHVESVVRLKNLDIDTIQQAYTV

SEQ ID NO: 71351 - protein, 47 aa, Gossypium hirsutum
  Clone ID: LIB3149-035-Q1-K1-G10.pep
LNQMAEEAKRRAEIARLRELHTLKGHVESVVRLKNLDIDTIQQAYTV

SEQ ID NO: 71352 - protein, 84 aa, Gossypium hirsutum
  Clone ID: LIB3147-055-Q1-K1-F1.pep
PFPCKMADGIKVIKDTYIRASLAGKRSLSLHFPLFLRNTIPPPYTVYACWIVSMSRFFNLTTASTCPFSVCSSLNLAISALLLA

SEQ ID NO: 71353 - protein, 226 aa, Gossypium hirsutum
  Clone ID: GOSHI-09MAY01-C10766_1.pep
GGPSRPPTRPGQPRKPRLKMAMSMAIATDCGSSRWSMASLKSALPRLTSTASSIKLPCRRRAPPPVKSPQLVRSFTALYPVNPLHSLGFSGLTSFEQNFTIIDNGGRFYAMRHGRRVPKLNRPPDQRRALLRGLTTQLLKYGRIKTTRARASAVRKYVDKMITLAKDGSLHKRRQALGFIYEKQIVHALFAEVPERYGERNGGYTRIIRTLPRRGDNAPMAYIELV

SEQ ID NO: 71354 - protein, 187 aa, Gossypium hirsutum
  unsure (1)..(187): unsure at all Xaa locations
  Clone ID: GOSHI-09MAY01-C10706_2.pep
MNPEYDYLFKLLLIGDSGVGKSSLLLVNXRFADDSYLDSYISTIGVDFYIRTVEQDGXKLSNFQNGTCSSPLLLWDTAGQERFRTITSSYYRGAHGIIVVYDVTDQESFNNVKQWLNEIDRYASDNVNKLLVGNKCDLTANKVVSYETAKAFADDIGIPFLETSAKDATNVEEAFMAMAASIKNRYV

SEQ ID NO: 71355 - protein, 203 aa, Gossypium hirsutum
  Clone ID: GOSHI-09MAY01-C10706_1.pep
MNPEYDYLFKLLLIGDSGVGKSCLLLRFADDSYLDSYISTIGVDFKIRTVEQDGKTIKLQIWDTAGQERFRTITSSYYRGAHGIIVVYDVTDQESFNNVKQWLNEIDRYASDNVNKLLVGNKCDLTENKVVSYETAKAFADDIGIPFLETSAKDATNVEEAFMAMAASIKNRMASQPGMNNARPPTVNIKGQPVNQNSGCCSS

SEQ ID NO: 71356 - protein, 130 aa, Gossypium hirsutum
  Clone ID: LIB3583-045-P1-K1-F8.pep
MNPEYDYLFKLLLIGDSGVGKSCLLLRFADDSYLESYISTIGVDFKIRTVEQDGKTIKLQIDYLMIYTWDTAGQERFRTITSSYYRGAHGIIVVYDVTDQESFNNVKQWLNEIDRYASENVNKLLVGNKC

SEQ ID NO: 71357 - protein, 46 aa, Gossypium hirsutum
  Clone ID: LIB3828-025-Q6-N6-A10.pep
IIVFYFSIHAMIVYRMASQPGMNNARPPPVNIKGQPVNQNSGCCSS

SEQ ID NO: 71358 - protein, 207 aa, Gossypium hirsutum
  Clone ID: GOSHI-09MAY01-C10736_1.pep
ARSAPVASAKQNRGLADEDHCVNRNILPNHKYGYVDCSESLAGIASDLGSESVDQGVGINGETAGEGIFGSEMDVDPPTSICQPELPSLSVEILAGNALPGHGDSAFINKVPNMDGYSLPKDDALRDNECEEEIFNINCHESAMAVEPQPDEVPQTEQLSKPCTVTNQDHLGSKCTEPSVPSPSLCCTLKPQVLDTAEPSGVLNLDI

SEQ ID NO: 71359 - protein, 47 aa, Gossypium hirsutum
  Clone ID: GOSHI-09MAY01-C10686_3.pep
MTLYIGREASKLWKRICSETTTEINLFLDNWKYLLAGLIFQYIHGLA

SEQ ID NO: 71360 - protein, 126 aa, Gossypium hirsutum
  Clone ID: GOSHI-09MAY01-C10686_2.pep
PPRPFYFGLGSLIKHVAWLAVMVQSLLIVASRKHYMVDVVVAWYTVNLVVFFIDKKLPELPDRSSGSSPMLLPLSPKDKDSKTKEENPKLLNGNSVDPADWRPRTQVNGKIQEDGNGIHDTAMNGA

SEQ ID NO: 71361 - protein, 314 aa, Gossypium hirsutum
  Clone ID: GOSHI-09MAY01-C10686_1.pep
MTLYIGREASKLWKRICAETTTEINLLLDNWKYLLAGLIFQYIHGLAARGVHYLHRPGPTLQDLGFFILPELGQDKGYISETVFTCVFLSFVLWTFHPFIFKSKKIYTVLVWCRVLAFLVASQILRIITFYSTQLPGPNYHCREGSKLARLPKPESVLEVLLINFPRGVIYGCGDLIFSSHMIFTLVFVLTYQKYGTRSFIKHFAWLVAIVQSLLIVASRKHYTVDVVVAWYTVNLVVFFIDKKLPELPDRSSGSSPMLLPLSTKDKDSKTKEENHKLLNGNSVDPADWRPRTQVNGKIQEDGNGIHDTAMNGA

SEQ ID NO: 71362 - protein, 69 aa, Gossypium hirsutum
  Clone ID: LIB3272-043-P1-K1-A10.pep
SLEESIRGASIFSLLLVEGNRSLNKFRPLKFFFFWRRLTCLRFWVKGDFFFQKIELFLVLMMFALTAGF

SEQ ID NO: 71363 - protein, 138 aa, Gossypium hirsutum
  unsure (1)..(138): unsure at all Xaa locations
  Clone ID: GOSHI-09MAY01-C10196_1.pep
HRVRSLIAFRWHVSMPKIIEKSISILSDAGLGMAMFPRGRPRARQPKIIACGXSVATFAMAVRFLTGPAVMAAASIAVGLRGTLLRVAIVQAALPQGIVPFVFAKEYNVHPAILSTAVIFGMLIALPITLVYYILLGL

SEQ ID NO: 71364 - protein, 158 aa, Gossypium hirsutum
  Clone ID: LIB3189-036-P1-K1-C7.pep
MLVADHPQNGENKGMTGSGDVNGEDFSFAGRDGEEEREKEGPNGLNKLGSSSTAELHPKAAGGPESGVGKQMPPASVMTRLILIMVWRKLIRNPNTYSSLIGLVWSLIAFRWHVSMPKIIEKSISILSDAGLGMAMFSLSLFMALQPKIIACGNSVAT

SEQ ID NO: 71365 - protein, 109 aa, Gossypium hirsutum
  unsure (1)..(109): unsure at all Xaa locations
  Clone ID: LIB3166-023-P1-K1-C1.pep
TGGSHAFHTFHFSFYPKTIAXGDCVSTFAIPPRLLTGPAVMAAASIAVXGLRGTLLRVAIVHAALPQXIVPFFFAKEYNVHPAILSTXLSFGMLIALPITLVYYILLGL

SEQ ID NO: 71366 - protein, 159 aa, Gossypium hirsutum
  Clone ID: GOSHI-09MAY01-C10126_1.pep
MKREGVAASVEYSPYPIYADQRNRFKHHSLMQDFDDLFKETEAMRKRLQVLKDKKLTLLAEVRFLKRRHKFLMQNRTSNTPAEQSFAHSQNKVIRSKPNTVVLKSTGKEHTWGRLATGFDLNQKVKTKETTLAHPSPMFDLNQKQQKVFSEKQRSYFAN

SEQ ID NO: 71367 - protein, 130 aa, Gossypium hirsutum
  unsure (1)..(130): unsure at all Xaa locations
  Clone ID: LIB3584-010-P1-K1-C11.pep
TLLAEVRFLKRRHKFLMQNRTSNTPAEQSFAHSLNKVIRXKPMGGGGFFFXKEHTLGRLATGFDLNQKVKTKETTLAHPSPMFDLNQKQQKVFSEKQEVTLRTSLPALDSYQKERPYSEKEATAWCRFSI

SEQ ID NO: 71368 - protein, 308 aa, Gossypium hirsutum
  unsure (1)..(308): unsure at all Xaa locations
  Clone ID: GOSHI-09MAY01-C10096_1.pep
MEGELVLLGGGGGGGGGGSSGVSTNESAVLSNVEVVSEACSYPAESELELGLGLSLGGATGKTKPATATSSWGECGRILTAKDFPSVVSHRTKNGGPSRSASRPKRAAESVSHEGGSPTGVSGSSQVVGWPPIRAYRMNSLVNPSKVSKSXEGDSGIGEKDKPKDALTRPLNYNGNKISSTTTVNEKGHLGFVKVNMDGTPIGRKVDLNAHSCYQSLAQALEDMFLRSTNSVGAEKEQLTKASKLLDGSSEFVLTYEDKEGDWMLVGDVPWRMFVSSVRRLRIMRTARAGGLAPGFHDSNERQRSKPI

SEQ ID NO: 71369 - protein, 152 aa, Gossypium hirsutum
  Clone ID: GOSHI-09MAY01-C10086_1.pep
HASALGKYNGFSDYGSKFSGRIPYGERFAQTDGIAPVGRGRGPSWRSETSDDWDFPAFNASRNGQFQSRRAPASSGLDGRSPKSEHESDQIGGRRGWDKGPGPERLGEGPSARSVWQASKDEATLEAIRVAGEDNGASRTGRVPELTAEALG

SEQ ID NO: 71370 - protein, 59 aa, Gossypium hirsutum
  Clone ID: GOSHI-09MAY01-C10056_2.pep
MEALRMRLFLAMMVVLMAMSAVQYVAAADAPAPTPTSDATAFVPTAFASLVALAFGLLF

SEQ ID NO: 71371 - protein, 59 aa, Gossypium hirsutum
  Clone ID: GOSHI-09MAY01-C10056_1.pep
MEALRIRLFLAMMVVLMAISAVQYVAAADAPAPTPTSDATAFVPTAFASLVALAFGLLF

SEQ ID NO: 71372 - protein, 53 aa, Gossypium hirsutum
  Clone ID: uC-gsflnu33B006d06b1.pep
KSTKRLHQQMEALRIRLFLALMVVLMAISLSPYLLLADTPPSLLLPPTPPFLL

SEQ ID NO: 71373 - protein, 88 aa, Gossypium hirsutum
  Clone ID: GOSHI-09MAY01-C10076_2.pep
MASGGKVSFKVTLTSDPKLPFKVFSVPEAAPFTAVLKFAAEEFKVPPQTSAIITNDGVGINPQQSAGNVFLKHGSELRLIPRDRVGAF

SEQ ID NO: 71374 - protein, 88 aa, Gossypium hirsutum; identical to SEQ ID NO: 71373
  Clone ID: GOSHI-09MAY01-C10076_1.pep

SEQ ID NO: 71375 - protein, 52 aa, Gossypium hirsutum
  Clone ID: AI725550.1.pep
KFAAEEFKVPPQTSAIITNDGVGINPQQSAGNVFLKHGSELRLIPRDRVGAF

SEQ ID NO: 71376 - protein, 156 aa, Gossypium hirsutum
  unsure (1)..(156): unsure at all Xaa locations
  Clone ID: GOSHI-09MAY01-C10356_1.pep
MPLLAQLNEHAKLSMLRRATWTLSNSWGGTPQPPWEQVTPALPALERLVHSNDEEVLTDACRALSYLSDGTNDKIQAVIQAGLCPRLVELLLNPSPSVLIPALRTVGNIVTGDDLQTQCIIDHGASACLMNLLTNNYKKSIMKEACWTIXNITAGN

SEQ ID NO: 71377 - protein, 113 aa, Gossypium hirsutum
  Clone ID: LIB3584-033-P1-K1-E8.pep
TINPLILCYAPFFLFWLPSKRNHKTFSTTFLSLVGLSLLGVTGSFFSAKSQPDFLERPFLLIPLTFLVPYLHSLLLPPPPSSLPLPLLLLLLLLLLFKIYLFLQNPNRSIEKE

SEQ ID NO: 71378 - protein, 83 aa, Gossypium hirsutum
  Clone ID: LIB3166-024-P1-K1-G6.pep
STYLVLCTIFPILAAFQKKPQNLFYDFPFPCRPITTRRHWLFLVSLISTRFHRTPLSTYTFDLFSPLSSLSSSSSSPLLSSSS

SEQ ID NO: 71379 - protein, 176 aa, Gossypium hirsutum
  Clone ID: GOSHI-09MAY01-C10276_1.pep
IFNPEAAWHIENRLPPPNWPSHGNVELKDLQVRYLPSTPLVLKGITLSINGGEKIGVVGRTGSGKSTLIQVFFRLVEPTGGKIIIDGIDICMLGLHDLRSRFGIIPQEPVLFEGTVRSNIDPIGQFSDEEIWKSLERCQLKDAIASKPDKLDSLVADNGDNWSVGQRQLLCLGRVM

SEQ ID NO: 71380 - protein, 88 aa, Gossypium hirsutum
  Clone ID: GOSHI-09MAY01-C10266_1.pep
KNPNFLIQLSLSFSDLCFHNHQTGRQAATSPPSPFTSSPLFNNSLFWGTKKFHLAELQGINIPFLSSPFFPSLSIHFFSLFFFLQFQN

SEQ ID NO: 71381 - protein, 67 aa, Gossypium hirsutum
  Clone ID: GOSHI-09MAY01-C11956_1.pep
MTKRCFGTFLNIFIKKITTHRLEIYEIFASFSTKIIYISGFSLTFVKKKKTLSFVHLNENKYKREKG

SEQ ID NO: 71382 - protein, 137 aa, Gossypium hirsutum
  Clone ID: GOSHI-09MAY01-C11886_1.pep
PDSITFVAILSACAHLGLVNDGERLFWLMRKKYGIDSRMEHYACMVNLYESAGLIDEAFNMIVERMEFKAGLTVWGAMLYACSVHGNIQIGDIAGQKLFELEPDNQHNFELLMKIYSDAERVKDVERVGKLMLDRGL

SEQ ID NO: 71383 - protein, 400 aa, Gossypium hirsutum
  unsure (1)..(400): unsure at all Xaa locations
  Clone ID: GOSHI-09MAY01-C11866_1.pep
ASTPNFGITFCLQASVSVSFHSSLTNLSLKSVETSKQQSYRIAAMSKAESSSSDQVKLDISLSPRVNSVKPSKTVAITDHATALAQAGVPVIRLAAGEPDFDTPAIIAEAGINAIREGYTRYTPNAGTLELRTAICHKLKEENGISYTPDQIVVSNGAKQSILQAVLAVCSPGDEVIIPAPYWVSYPEMARLADATPVILPTLISDNFLLDPELLESNITEKSRLLILCSPSNPTGSVYPKKLLEKIAEIVAKHPRLLVLSDEIYEHIIYAPAAHTSFASLPGMWERTLTVNGFSKAFAMTGWRLGYIAGPKNFIAHVIKFQIHSTSGSYNIAQKPGVAALGLGYAGGGVISPWXESLRERQDFLVKSFGELESVKISEPQGAFYLFIDFISYYGIKLKV

SEQ ID NO: 71384 - protein, 190 aa, Gossypium hirsutum
  unsure (1)..(190): unsure at all Xaa locations
  Clone ID: uC-gsronu33B012g11b1.pep
PTLISDNFLLDPELLESNITEKSRLLILCSPSNPTGSVYPKKLLEKIAEIVAKHPRLLVLSDEIYEHIIYAPAAHTSFASLPGMWERTLTVNGFSKAFAMTGWRLGYIAGPKNFIAACNKIQSQSTSGASSIAQKAGVAALGLGYAGXEVVSTMVKAFXERRDFLVKVWRMKVLDIEPRSFYYHDSVYYE

SEQ ID NO: 71385 - protein, 168 aa, Gossypium hirsutum
  Clone ID: GOSHI-09MAY01-C11836_1.pep
DAWVPLLFLCNIPLKSITQSPCADTKFLQERTTGRKKREREKIMLPLVPSIFLHFIFIFFVVVHGSKNDSIYEILKLHGLPTGLLPKGITRFEYDDTGRFEVHLDQACNAKFESEFHYDINVSGTLSYGKIMELSGILAQDLFLWFPVKGIWVDVPSSGLIYFDILFV

SEQ ID NO: 71386 - protein, 171 aa, Gossypium hirsutum
  Clone ID: GOSHI-09MAY01-C11556_2.pep
MAKLPLQILLLFLLSLISSSTAEIKTLTITSDSRPMILFEKFGFTHSGHIAISVSSVSVTSSANAPNPDASRLGFFLLSEEALLQVLLEIQQNPHFCVLDSRYIQHLFTFGDLSPPPLSRFNHTYPVSSPNEYSLFFANCAPETRVSMNVRTETYNLERDGSKDYLSAGLT

SEQ ID NO: 71387 - protein, 464 aa, Gossypium hirsutum
  Clone ID: GOSHI-09MAY01-C11556_1.pep
SRFTLFRSGKPLQNFLPPFLFANHLPKMTKTTVILLFFFLSIVSSTTAEIKTLTIKSDSRPMILFEKFGFTHTGHVTISVSSVSVSSSSNAPNPSPSLLGFFLLSEESLLQVLLEIQQNSHFCVLNSRYIQHLFTFSELSPPPLSRLNRSYPVSSPNEYSLFFSNCAPETRVSMDVITEIYNLDRDGSKDYLSAGQTQLPSLYTVFSVLYLFFLAYWVYVCYTNRRSVHRIHLLMSGLLLFKALNLICAAEDKHYVKVTGTPHGWDVLFYIFQFIRVVLLFTVIVLIGTGWSFLKPFLQEREKKVLMIVIPLQVLANIASVVIGETGPFIKDWATWNQVFLLVDIICCCAIIFPIVWSIRSLRETSKTDGKAAKNLAKLTLFRQFYIVVIGYLYFTRIVVFALRTIAAYKYQWVSNAAEETASLAFYLIIFFMFRPVEKNEYFILEEEDEEAAELALRDEDFEL

SEQ ID NO: 71388 - protein, 154 aa, Gossypium hirsutum
  Clone ID: GOSHI-09MAY01-C11496_1.pep
WPPIRSFLKYTLAAHPPKRDDGDGKAEAKLGSGCLYVKVSMDGAPYLRKVDLKIYGSYKDLSSALEKMFSCFTIGQCGSHGVSGGDGLSESRLIDLLHGSEYVLTYEDKDGDWMLVGDVPWEMFTDSCKRLRIMKSTEAIGLAPRAMEKCKNRT

SEQ ID NO: 71389 - protein, 378 aa, Gossypium hirsutum
  unsure (1)..(378): unsure at all Xaa locations
  Clone ID: GOSHI-09MAY01-C11476_1.pep
MASGFSGGGPDFYGGLAGRSVGNTGTINNNQTTAPYRTQVPGMFMDTSSQIVNRATPGFIGKRTLADFQTQQALNNNSGRLFLRSVKPRTYQHTSPISPLSPIDLPFNLSPDVMSNFSSPSSCMSQRYGLPLLQQLRPQQVPLGINTGATIQAVNTGLSGGPYMNPVSTRVVQPHDPEKKMMNQLQDLEKQLLDDDNDEGDAVSVITNTNSEWSETIQNLIGSTGSPNNPIAPSPTSTTSSCSSTSSTASPASPCSKQTILDAAAAISEGKNDVVNEILTRLAQAANSKGSSEQRLMECMLSALKSRVNSVENPPPVAELFSKEHAASTQLLYDLSXPCFKLGFLAANQAYPPCHFRQTXAVIKFMVVDFDFGVGGQT

SEQ ID NO: 71390 - protein, 111 aa, Gossypium hirsutum
  Clone ID: GOSHI-09MAY01-C11466_2.pep
EFGKERRLESSLFGAPTNYYKKMFCLLIIYYKPSFKEFHRKLWNLHTSIKNPTASLADILELYAYSSLVNLRNKRITTIVRCPRCGFGEEDSFHVFRQCHGFLKKVPKNRI

SEQ ID NO: 71391 - protein, 88 aa, Gossypium hirsutum
  Clone ID: LIB3585-055-P1-K1-F3.pep
QVDIAQIILKIPLAETDSEDLRVWKGEATGEFSVRSAYKLLQEDVLSPNNLLQTELKEFHRKLWNLQLPSKILLLVWRISWNYMPTLV

SEQ ID NO: 71392 - protein, 127 aa, Gossypium hirsutum
  Clone ID: GOSHI-09MAY01-C11416_4.pep
PRVRPRVPSCVVLVELACLQTSSLTLDEAVKTTNRRVNALENVVKPRVENTISYIKGELDELEREDFFRLKKIQGYKKREIERQLAEAKLLAEEQVAEKASLRKGVSINSAHNMLSAAREKDEDIIF

SEQ ID NO: 71393 - protein, 261 aa, Gossypium hirsutum
  Clone ID: GOSHI-09MAY01-C11416_2.pep
MSGQSQRLNVVPTVTMLGIMKARLVGATRGHALLKKKSDALTVQFRQILKKIVSTKESMGEIMKTSSFSLTEAKYVAGENIKHVVLENVQNASLKVRSRQENVAGVKLPKFEYFTEGETKNDLTGLARGGQQVQQCRAAYVKAIEVLVELASLQTSFLTLDEAIKTTNRRVNALENVVKPRLENTISYIKGELDELEREDFFRLKKIQGYKKREIEKQLAAAKEFVEDKFAEKISLQKGISINAAHNLLSAAREKDEDIIF

SEQ ID NO: 71394 - protein, 200 aa, Gossypium hirsutum
  Clone ID: GOSHI-09MAY01-C11416_1.pep
MSGQSQRLNVVPTVTMLGIMKARLVGATRGHALLKKKSDALTVQFRQILKKIVSTKESMGEIIKTSSFSLTEAKYVAGENIKHVVLESVQTASLKVRSRQENVAGVKLPKFEYFTEGETKNDLTGLARGGQQVQQCRAAYVKAIEVLLELASLQTSFLTLHEAIKTTNRRVNALQNVVNEQRRNKNHSFTLKGELGLTSK

SEQ ID NO: 71395 - protein, 156 aa, Gossypium hirsutum
  Clone ID: LIB3825-031-Q6-K6-B8.pep
MSGQSQRLNVVPTVTMLGIMKARLVGATRGHALLKKKSDALTVQFRQILKKIVSTKESMGEIMKTSSFSLTEAKYVAGENIKHVVLESVQTASLKVRSRQENVAGVKLPKFEYFTEGETKNDLTGLARGGQQVQQCRAAYVKAIEVLVELASLQTS

SEQ ID NO: 71396 - protein, 46 aa, Gossypium hirsutum
  Clone ID: LIB3189-025-P1-K1-E1.pep
MSGQSQRLNVVPTVTMLGIMKARLVGATRGHALFKKKSDALTVQFR

SEQ ID NO: 71397 - protein, 381 aa, Gossypium hirsutum
  Clone ID: GOSHI-09MAY01-C11786_1.pep
MDLHVEPTSATADSIPPSPPHDPLDSVPIGSPEDDILSPPSDDDIDHDHGHENEDDHGQEDQVQNHEISSAVDVLTDDLKKKIIKQAEYYFSDENLPTDNYMMGLIKKNKEGFVPISVISSFRKTKRLTRNYTSIVAALKESSLLVVSSDGKKVKRRNPLPFIEVRDPKLFTILVDNLPEDHSVENIKRIFGEVGRIKKISVRDPHAVEETKKTGRADILISSKLHALVEYETIEAAEKAVATLNDEHDWRNGMHVKLLERKGKHGQRKQAWRGPAHEKNINAQVSDQTGTEEKNASSEYHEDIPDDEDGEHLSKEKNGVRPRNRGRGRRQKNRGANGHGHGTTSSCHAVEPSKPPPGPRMPDGTRGFTMGRGRSPISKPS

SEQ ID NO: 71398 - protein, 106 aa, Gossypium hirsutum
  unsure (1)..(106): unsure at all Xaa locations
  Clone ID: LIB3825-024-Q6-K6-C4.pep
LFLSIPFPAGHLATRFCIRCLMMILTTITVTKMKMITARRIRFRIMRSRRRLMYLLIFSGGGRFFSFLWGXSXEKRPTRQPLMGLIKKNKEGFVPMSVVSSFGELX

SEQ ID NO: 71399 - protein, 241 aa, Gossypium hirsutum
  unsure (1)..(241): unsure at all Xaa locations
  Clone ID: GOSHI-09MAY01-C11766_1.pep
NLKGLDEDDQKRWMXLTGRDLNFTIPPEASEFCTWRNLTSTEFELDRPLSSFENSPTAAXKKLLNGSGLNLSTRPSNHANGCVMDLSPVSNKRKKDLFLNGDDEDCCLLINQHNDRVNDTEMHPIEPPWLNEFSGVMRNVYGPVTAAKTIYEDEEGYLIIISLPFADLKRVKVSWWNNLTHGVVKISSMNTACLPFYKRTVGTQLTDHCWTCSSESYRKYLPTDICILLGLWINRRVNMCQ

SEQ ID NO: 71400 - protein, 119 aa, Gossypium hirsutum
  Clone ID: LIB3166-043-P1-K1-G4.pep
PTRPPTRPFTRPPTRPANGGVMDLSPVSNKRKKDLFLNGDDEDCCLLINQHNDRVNDTEMHPIEPPWLNEFSGVMRNVYGPVTAAKTIYEDEEGYLIIISLPFADLKRVKVSWWNNLTH

SEQ ID NO: 71401 - protein, 62 aa, Gossypium hirsutum
  Clone ID: GOSHI-09MAY01-C11736_2.pep
DVLILRFGIIVLGVGLFCGRCCILLIVTFFAFAYCVLIKQKKKDNLYHFSRYQRIKIICSLD

SEQ ID NO: 71402 - protein, 349 aa, Gossypium hirsutum
  Clone ID: GOSHI-09MAY01-C11736_1.pep
MGSESQVVCVTGASGFIGSWLVMRLLEHGYTVRATVRDPDNQKKVKHLLDLPKANTHLTLWKADLSEEGSFDAAINGCCGVFHVATPMDFESKDPENEVIKPTINGVLDIMKACIKAKTVKKLIFTSSAGTVNVEEHQGTVYDESNWSDLDFVYAKKMTGWMYFVSKTLAEQAAWKFAKENNLDLITIIPTLVIGPFLMPSMPPSLITGLSPLTGNEAHYGIIRQGQFVHLDDLCMSHIFLFENPKAEGRYICSSHEATIVELAKMLREKYPDYNIPTEFKDADENLGNVVFNSKKLLDLGFQFKYSLEDMFVGAVETCHEKGLIAPPTKIENAINGDPIACIETPTSV

SEQ ID NO: 71403 - protein, 70 aa, Gossypium hirsutum
  Clone ID: uC-gsflmaxxa069b05b1.pep
KISTFFIKCSRQRWDLNLKLFVLLVPLVSLDHGSIFFSPLLTFNSLISFLLFFPLFLSFSLFLSFSIHSL

SEQ ID NO: 71404 - protein, 202 aa, Gossypium hirsutum
  unsure (1)..(202): unsure at all Xaa locations
  Clone ID: GOSHI-09MAY01-C11726_1.pep
KFPEKICDKKQLQRFLGCLTYAECYIAKLAEIRKPLQKKLKKDYVWQWTQEDTAYIRKIKNKLKDFPTLYQPQDEDLMILETDASQEYWSGVLKAKSLKNDNQEMLCRYTSGTFTGAELNYHSNEKEWLAVKKAIGKFRIYXPKEFVVRTDNKQFGPFIRNNITGDYKQGRLLRWQQWFNYYKFTIEHIRGEENYLADLLTR

SEQ ID NO: 71405 - protein, 407 aa, Gossypium hirsutum
  Clone ID: GOSHI-09MAY01-C11696_1.pep
FICRKLEIELPGGRTHFGESCGLPLSTYFSAVKLLWLMENKEEVRAAIKKGDALFGTIDTWLIWNLTGGVNGGIHVTDVSNASRTMLMNLQTLDWDKATLKTLGIPAEILPKIVSNAEVIGKIAKGWPLFGVPIAGCLGDQHAAMVGQACRRGEAKCTYGTGAFILLNTGTAPIKSTHGLLTTLAFKLGPKAQTNYALEGSIAIAGAAVQWLRDSLGIISSASEIESLASKVDCTGGVYFVPAFNGLFAPWWRDDARGICIGITRFTSKSHIARAVLESMCFQVKDVLDSMHKDAGEKGEVKNGEGEFLLRVDGGATVNNLLMQIQADLLGSSVVRPADIETTALGAAYAAGMAVGVWKEEELFALGQNIKTASIFSPKSSVEWRKKKVDSWCKAVERTFGLADLEM

SEQ ID NO: 71406 - protein, 219 aa, Gossypium hirsutum
  Clone ID: LIB3543-042-Q1-K6-B10.pep
AAWASLGGGGQVIRAAKSDSRLANNHLPPDIQMLRCRACYEALRFSPKIEAMGKLLVGGGRAYGPFIALHLRYEKDMLAFSGCTHGLSDVEAEELRTIRENTAYWKIKDINATEQRSRGYCPLTPTEVGIFLTGLGYPSNTPIYIAAGEIYGGDTHMADLRSRYPILMSKEKLASVEELEPFTNHASQMAALDYIVSVESDVFIPSHSGNMARAVEGHR

SEQ ID NO: 71407 - protein, 98 aa, Gossypium hirsutum
  Clone ID: LIB3166-042-P1-K1-G1.pep
MCRENTAYWKIKDINATEPFTNHASQMAALDYIVSVESDVFIPSHSGNMARAVEGHRRFLGHRKTISPDRKALVRLFDKIEKGLLMEGRKVSNRISEI

SEQ ID NO: 71408 - protein, 278 aa, Gossypium hirsutum
  Clone ID: GOSHI-09MAY01-C11616_1.pep
MKPIRCIISFSLLLWATWLVTVGSDLTADRAAMVALRKAVGGRTLLWNLSSSPCTWTGVNCSQNRLVELRLPGMGLSGQLPSGIGNLTQLQTLSLRFNALSGSIPADFAKLTSLRNLYLQGNRYSGEIPLFLFSLPNLIRLNLASNNFTGSIPESVNNLTAWGTWSRENNHLSGSIPDIEGPSLVQFNVSFNQLNGSIPKGLSNKPQSAFLGNSLCGKPLVPCNGTESSGNKLSGGAIAGIVIGCVLGVLLILILLICLCRRKSGKKMEERDVAPPKQ

SEQ ID NO: 71409 - protein, 196 aa, Gossypium hirsutum
  unsure (1)..(196): unsure at all Xaa locations
  Clone ID: GOSHI-09MAY01-C11156_1.pep
MEGLVGFSDRSKDGAFLENESGSEGLVDEELSGFNLKSAGLLGRPQGTINITSTYESRTRDLESSLVARGDLWRVEASNGSSTSGSDNSLFLLQLGXVLFVRDTTLLLPVHLSKQHLLWYGYDRKNGMHSLCPAIWSKHRRWLLMSMLCLNPLACSFVDLQFPNGQFTYVSGEGLTTSAFLPICGGXLLRPQGQYP

SEQ ID NO: 71410 - protein, 53 aa, Gossypium hirsutum
  Clone ID: LIB3166-035-P1-K1-D3.pep
VGSGRIHLCSECASVSTVRITKIPAFTLVFLAKIAALNCTSSKECTACTLPAN

SEQ ID NO: 71411 - protein, 216 aa, Gossypium hirsutum
  Clone ID: GOSHI-09MAY01-C11136_1.pep
GAWNEAFDASKTKDHDFHLINGSSVKVPFMTSKKKQTVSAYDGFKVLGLPYKQGNDKRRFSMYFFLPDAKDGLPALVEKVSSESGFLERHLPYQPVEVGELRIPRFKISFGLKASEVLKRLGLVLPFSGEGGLTEMVDSPQGQNLYVSNIFHKSFIEVNEKGTEAAAATSAVIALRSLRIPQTIDFVADHPFLFLIRENATGVVLFIGHVLNPLEN

SEQ ID NO: 71412 - protein, 66 aa, Gossypium hirsutum
  Clone ID: GOSHI-09MAY01-C11076_2.pep
AEKLPGRHHACEEWLPLTPPPAEKVDPPVGTLDDLFWKTKAIPRIYYLPLSDEQVAAKQAAHGRNI

SEQ ID NO: 71413 - protein, 57 aa, Gossypium hirsutum
  unsure (1)..(57): unsure at all Xaa locations
  Clone ID: GOSHI-09MAY01-C11076_1.pep
RTSPLPPPPPEKPDPPIXVTLDDLFWKTKATPRIYYLPLSDEQVAAKQAAHGRNIKL

SEQ ID NO: 71414 - protein, 69 aa, Gossypium hirsutum
  Clone ID: GOSHI-09MAY01-C11026_1.pep
PMSNLFSCLWFNEVDRFASRDQLSFAYTYLKLTRMNPDKPFHLNMFKDCERRALAKLFRHRLLSSPPPP

SEQ ID NO: 71415 - protein, 145 aa, Gossypium hirsutum
  Clone ID: GOSHI-09MAY01-C11376_1.pep
MEVGLKMTMKGGGGDHVGGCDKEKMGFEETELRLGLPGGGGGGGDGEVVRKRGFSETVDLKLNLSSKQDTSGIDPNDEKVKGLHQEKNLLLSAIDAAKPPAKAQVVGWPPVRSFRKNMLATTTQKSSSEESGEEAALVKVSMDGA

SEQ ID NO: 71416 - protein, 86 aa, Gossypium hirsutum
  Clone ID: LIB3147-006-Q1-K1-B2.pep
PTRTPLLITTNLFLLYFSPFSSKHQTQKAWLQQTAKKRKQLEKEAMGVGLKMTMKGGGGDHVGSCDKEKMGFERYLGGLNLENIDE

SEQ ID NO: 71417 - protein, 74 aa, Gossypium hirsutum
  Clone ID: GOSHI-09MAY01-C11276_1.pep
PPFLRAHSSHQLICEVGTGNGGSIGGTSPLPASLSKLLIKGGTVVNAHRQERADVYVEDGIIVASKPNIKVGDE

SEQ ID NO: 71418 - protein, 124 aa, Gossypium hirsutum
  unsure (1)..(124): unsure at all Xaa locations
  Clone ID: GOSHI-09MAY01-C12996_6.pep
MSVTRTAFVEDTLAIRAAPTGCEVIVSGKLRAHRAKSMKFKDGYMISSGXPQVNEYIDSAARHVLLRQGVLGIKVKIMLDWDPKGKQGPTTPLPDFVTIHPPKEDEVIKVEAPVPTEIELPPVA

SEQ ID NO: 71419 - protein, 238 aa, Gossypium hirsutum
  unsure (1)..(238): unsure at all Xaa locations
  Clone ID: GOSHI-09MAY01-C12996_5.pep
MAAAAQISKKRKFVADGVFFAELNEVLTRELAEDGYSGVEVRVTPMRTEIIIRATRTQNVLGEKGRRIRELTSVVQKRFKFPENSVELYAARVRNRGLCAIAQAESLRCKLLGGLAVRRXACYGVLRFIMESGAKGCEVIVSGKLRAQRAKSMKFKDGYMISSGHPVNEYIDSAVRHVLLRQGVLGIKVKIMLDWDPKGKQGPTTPLPDLVTIHPPKEDEEIRRVEPEPTNIEVPVMA

SEQ ID NO: 71420 - protein, 117 aa, Gossypium hirsutum
  unsure (1)..(117): unsure at all Xaa locations
  Clone ID: GOSHI-09MAY01-C12996_3.pep
GLYGVLRFVMESGAKGCEVIVSGXRAQRATSMKFKDGYMISSGHPVNEYIDSAVRHVLLRQGVLGIKVKIMLDWDPKGKQGPTTPLPDFVTIHPPKEDEVIKVEAPVPTEIELPPVA

SEQ ID NO: 71421 - protein, 236 aa, Gossypium hirsutum
  Clone ID: GOSHI-09MAY01-C12996_2.pep
MATAQISKKRKFVADGVFFAELNEVLTRELAEDGYSGVEVRVTPMRTEIIIRATRTQNVLGEKGRRIRELTSVVQKRFKFPENSVELYAEKVNNRGLCAIAQAESLRYKLLGGLAVRRACYGVLRFIMESGAKGCEVIVSGKLRAQRAKSMKFKDGYMISSGHPVNEYIDSAVRHVLLRQGVLGIKVKIMLDWDPKGKQGPTTPLPDFVTIHPPKDDEVIKVEAPVPTEIELPPVA

SEQ ID NO: 71422 - protein, 210 aa, Gossypium hirsutum
  Clone ID: GOSHI-09MAY01-C12996_1.pep
LRELAEDGYSGVEVRVTPMRTEIIIRATRTQNVLGEKGRRIRELTSVVQKRFKFPENSVELYAEKVNNRGLCAIAQAESLRYKLLGGLAVRRACYGVLRFVMESGAKGCEVIVSGKLRAQRAKSMKFKDGYMISSGHPVNEYIDSAVRHVLLRQGVLGIKVKIMLDWDPKGKQGPTTPLPDLVTIHPPKDDEVIKVEAPVPTEIELPPVA

SEQ ID NO: 71423 - protein, 113 aa, Gossypium hirsutum
  unsure (1)..(113): unsure at all Xaa locations
  Clone ID: AI725920.1.pep
ICHGEEKPRGWEDFYNEKLRGKSAKFLKFKNGKKIFFGQPEEEKIDLCFXKIFFEKGGNRELKINIRXNWNPKGKKGPKNXIRDFVTINPPKEDEVIKVEEPVPTEIEIPPVG

SEQ ID NO: 71424 - protein, 97 aa, Gossypium hirsutum
  Clone ID: GOSHI-09MAY01-C12966_1.pep
SWNLDAKYAFLSTYMLFFLLVEGAKSRGKTELFVLKSVKGVVDSSSFKNSFTYTSLSFDIHIWYMLIIIVVSCILFFETECHLCLHQGNGDTPVCFS

SEQ ID NO: 71425 - protein, 98 aa, Gossypium hirsutum
  unsure (1)..(98): unsure at all Xaa locations
  Clone ID: GOSHI-09MAY01-C12936_1.pep
MEDLITEIPPPSRFFQEDLNNFIPPSPSLAPPFLVFSIPKPEKPLRPSLLIVALSSPSLYIFHHLSPXTLXGSLILPEVPFXSAFFVEPSFRDKTCNI

SEQ ID NO: 71426 - protein, 334 aa, Gossypium hirsutum
  Clone ID: GOSHI-09MAY01-C12836_1.pep
MGWKGILGFEYGIVQGPLGPDIAGPELVAAVANAGGLGLLRAPDWESPDYVKELIRKTRKLTDKPFGVGVVLAFPHKENVKAILEEKVAVLQLYWGECSKELVIEAHNAGVKVVPQVGSLEEAKNAINVGVDAIIVQGREAGGHVIGQEGLISLLPPGVRRRGGHGIPVIAAGGIVDARGYVAALALGAKGICMGTRFLATHESYAHPTYKRKLIEYDKTEYTDVFGRARWPGAPHRVLQTPFFCDWKCLNAQENETNQPIIGRTIIHGVEREIRRFAGTVPNPTTTGDIESMVMYAGQSVGLIKEILPAGQVVKKLVEAAQLLIHQTFNPDSI

SEQ ID NO: 71427 - protein, 58 aa, Gossypium hirsutum
  Clone ID: LIB3147-019-Q1-K1-D1.pep
KSPPCSFYIFNFGLFYFIKGHLFFFYFFFYYFFFFFFFFFFFFFFFFFFFFFFFFFFF

SEQ ID NO: 71428 - protein, 141 aa, Gossypium hirsutum
  unsure (1)..(141): unsure at all Xaa locations
  Clone ID: GOSHI-09MAY01-C12546_1.pep
PTLPGKRRENRRGIKVQCYSMEDTANFYMRPIEGLTGVLDMDTKEVVEVSDTGRSIPIPKATNTDYRFSEQKLRQDLNSINPISMEQPKGPSFXVSEDEHLVKWAXNWEFHLKPDPRAGVVGSRAKVRDLESGVLRDVMYK

SEQ ID NO: 71429 - protein, 299 aa, Gossypium hirsutum
  unsure (1)..(299): unsure at all Xaa locations
  Clone ID: GOSHI-09MAY01-C12496_1.pep
PTRPADNVLAEPDRSPKISNLKDATVLEKYNEKKSAETEPADDVHAEPDKSLKIHPREKXLIDFREKLYLAPLTTVGNLPFRRVCKTLGADVTCGEMAMCTNLLQGQASEWALLRRHSSEDLFGVQICGAYPDTIARTVELIEKECTVDFIDINMGCPIDIAVDKGAGSFLLTKPLRMKGIIQAASGTVDKPITVKVRTGYFGGKNRIDSLIADIGSWGATALTIHGRSRQQHYSKLADWDYIYQCAQKAPCTLQVLGNGDIFSYLDWNNRKTDCSELSTCMIARGALIKPWLFTEIKE

SEQ ID NO: 71430 - protein, 89 aa, Gossypium hirsutum
  Clone ID: LIB3166-053-P1-K1-B7.pep
KCFLCFICFSVALILWQQGQASEWALLRRHSSEDLFAVQICGAYPDTVARTVELIEKECTVDFIDINMGCPIDIVVDKGAGSFLLTKPL

SEQ ID NO: 71431 - protein, 144 aa, Gossypium hirsutum
  Clone ID: GOSHI-09MAY01-C12436_1.pep
MCSGSKSEHKPSSFIMEGELQEPKAGSQSILLELAASDDLVAFTSEVEETGVDFGEASFWYGRRIGLRKMGFEERTPLMIAAMFGSIEILKYIIGSGKIDANRACGSDGATALHCAVAGGAHSSVETVKLLLDASADVNCVDAN

SEQ ID NO: 71432 - protein, 79 aa, Gossypium hirsutum
  Clone ID: LIB3165-060-Q1-K1-G5.pep
MEGELQEPKAGSQSILLELAASDDLVAFKSEVEEKGLDFGEASFWYGRRIGLRKMGFEERTPLMIAAIFGSIEILKYII

SEQ ID NO: 71433 - protein, 98 aa, Gossypium hirsutum
  Clone ID: AI055088.1.pep
LEPPKCDGCNAAAISNEPPFIVPWPMEPLFSASSSVRCHGFTSPEIPDKATVASKSHSEAEKRRRDRINSQLTALRKLIPKSNKVCSLLQSCLLLHCQ

SEQ ID NO: 71434 - protein, 109 aa, Gossypium hirsutum
  Clone ID: LIB3166-055-P1-K1-G3.pep
MENCYPFSLLEPPKCDGCNAAAISNEPPFIVPWPMEPLFSASSSVRCHGFTSPEIPDKATVASKSHSEAEKRRRDRINSQLTALRKLIPKSNKMDKAALLGSAIEQVKD

SEQ ID NO: 71435 - protein, 560 aa, Gossypium hirsutum
  unsure (1)..(560): unsure at all Xaa locations
  Clone ID: GOSHI-09MAY01-C12726_1.pep
GANRYPFAEDLGKQALMITEVSGRISELKTTIDAGLLQRDNLLRTIGDQFEQWNLKVKTEKSIYHSLNMLSLDVTKKCLVAEGWSPVFATKQIQEALQRAAFDSNSQVGAIFQVLHTRESPPTYFRTNNFTSAFQEIVDAYGVAKFQEANPGVYTIVTFPFLFAVMFGDWGHGICLLLATLYFMVREKKLSSQKLGDITEMTFGGSYVIMMMSLFSIYTXGLVYNESFSVPLELFGRSAYACRDLSCRDATTVGLIKVRDTYPFGVDPAWHGSRSELPFLNSLKMKMSILLGVAQMNLGIILSXFNAXFFRNSLDRWFQFIPQMIFLNSLFGYLSFLVIVKWCAGSQADLYHILIYMFLSPTDELGENQLFPGQKITQQVLLLLALVSVPWMLLPKPFLLKRQHENRHQGQSYAPLESTDETLLSVANNDSHGHDHEEFEFSEVFVHQLIHTIEFVLGAVSNTASYLRLWALSLAHSELSVVFYEKVLLLAWGYNNIIILIVGIIVFIFATVGVLLIMETLSAFLHALRLHWVEFQNKFYEGDGYKFYPFSFALLDDEDD

SEQ ID NO: 71436 - protein, 181 aa, Gossypium hirsutum
  Clone ID: GOSHI-09MAY01-C12686_2.pep
QRPRPRGWKVIMFLSKSDEEATSNRKLAKDLVDKWSRPIFNKSTRFEDMRNVDDDRVPLRRPPVKRPANRAAAMESRDGDFDLDISRDQKSRRSTSAQDASRSESSSRLHASRPDAAPMDFVVRPQSKIDPDEIRARAKQVIQDQRRLKMNKKLQQLKAPKKKNLQATKLSVEGRGMLKYL

SEQ ID NO: 71437 - protein, 395 aa, Gossypium hirsutum
  Clone ID: GOSHI-09MAY01-C12686_1.pep
MRRRARRRRGGTRRNFLGVCTEKGTVKKLGKSEEVNEMWEWVNPENDQEGARTMDDDDFIDDSGVDPADRYGSDNEARSPGAAPQAEEDDEDPEIKALASARASGKKNEKSPAEIALLVESVMAELEVTAEEDAELNRQGKPAISKLKKLPLLTEVLSKKQLQPEFLDHGVLTLLKNWLEPLPDGSLPNINIRAAVLQILTDFPIDLEQHDRREQLKKSGLGKVIMFLSKSDEETTSNRKLAKELVDKWSRPIFNKSTRFEDMRNVEDDRVPLRRPSVKRPTNRAASMESRDGDFDLDISRDHKSGRSSSGQNASRSESSSRLHASRPDATPMDFVVRPQSKIDPDEIRARAKQVVQDQRRLKMNKKLQQLKAPKKKQLQASKLSVEGRGMLKYL

SEQ ID NO: 71438 - protein, 139 aa, Gossypium hirsutum
  unsure (1)..(139): unsure at all Xaa locations
  Clone ID: AW187938.2.pep
NCQMALSISYFTYIPHLFIWGGVVFWYIFLIAYGAIDPDISTFAYQVFIEACAPAGSYWLLTLLVXIASLLPYFTYSAIQMRFFPLYHQMIQWIRSDGQTNDPEYCHMVRQRSLSHTTVGYTARFEAKSKSSKERARDH

SEQ ID NO: 71439 - protein, 88 aa, Gossypium hirsutum
  Clone ID: LIB3145-022-Q1-K1-C1.pep
ACAPAGSFGFLTLLALMAGLGRFSFSGILKRGFPLYHQMIQWIRSDGQTNDPEYCHMVRQRSLSHTTVGYTARFEAKSKSSKERARDH

SEQ ID NO: 71440 - protein, 51 aa, Gossypium hirsutum
  Clone ID: LIB3166-055-P1-K1-A2.pep
SYVYYVHLKGTPVAGAIYSYLNNHRNTPSCSLNSLTRMNESEFRFSHRVRS

SEQ ID NO: 71441 - protein, 251 aa, Gossypium hirsutum
  unsure (1)..(251): unsure at all Xaa locations
  Clone ID: GOSHI-09MAY01-C12146_1.pep
EHAAVTILDRWKVAMLNQQGKQLQSPKFMNNYLGIGCDAKVALDIHNLREENPEKFYNQFMNKVLYAREGPXASGIMDRTFADFPWQVRVEVDGVEIEVPEDAEGVLVANIGSYMGGVDLWQNEDETYENFDPQSMHDKILEVVSISGTWHLGTLQVGLSRARRLAQGRSIKIQLFAALPVQIDGEPWSQQPCTLAISHHGQAFMLKRTAEESLGHAAAIITDVLESAETNHVINASQKRALLQEMALRLT

SEQ ID NO: 71442 - protein, 93 aa, Gossypium hirsutum
  unsure (1)..(93): unsure at all Xaa locations
  Clone ID: LIB3166-048-P1-K1-G9.pep
RTRGVDLWHIVDDTYENCDPHSMHDEILXVVSISGTWHLVTLHVGPICALILSHGXVLSKTSSCLYLPVQIDGEPWSLHPCTLAISHHIQVFI

SEQ ID NO: 71443 - protein, 179 aa, Gossypium hirsutum
  Clone ID: GOSHI-09MAY01-C12166_1.pep
MEVVKNLDIQRYMGKWYEIASFPSFFQPKKGENTSAFYTLKEDGTVHVLNETFVNGKKDSIEGTAYKADPKSDEAKLKVKFYVPPFLPIIPVTGDYWVLYIDEDYQYVLGGGPTKKYLWILCRQKHMDEEIYNMLEQKAKDLGYDVSKLHKTPQSDSTPEGEHVPQEKGFWWIKSLFGK

SEQ ID NO: 71444 - protein, 91 aa, Gossypium hirsutum
  Clone ID: LIB3146-008-Q1-K1-D6.pep
ENLDIQRYMGKWYEIASFPSFFQPKKGENTSAFYTLKEDGTVHVLNVTFVNGKKDSILCFFFFVCFYYCLFSSYIFFLFSYFFFFIFCSCF

SEQ ID NO: 71445 - protein, 74 aa, Gossypium hirsutum
  Clone ID: LIB3146-015-Q1-K1-E9.pep
AKNKNRLSIKKAPNWILMPIYLFFVRFTMIHLFLLPEQGFYPPEPFLLGDMLSLWCRITLGYEVSALDKTHQSV

SEQ ID NO: 71446 - protein, 403 aa, Gossypium hirsutum
  Clone ID: GOSHI-09MAY01-C12066_1.pep
ADKNDDVYAQITLQPEADQSEPTSPDPCPAEAPKRTVHSFCKILTASDTSTHGGFSVLRKHATECLPPLDMNQATPTQELAAKDLHGYEWRFKHIFRGQPRRHLLTTGWSTFVTSKRLVAGDAFVFLRGDNGELRVGARRLARQQTTMPSSVISSQSMHLGVLATAAHAVTTQTLFVVYYKPRTSQFIIGVNKYLEAIKNGFSVGMRFKMRFEGEDTPDRRFTGTIVGVGDFSPHWSESKWRTLKIQWDEPATIQRPERVSPWEIEPFAPSASINLVQPAVKNKRPRPVDIPVSEITTNSVGSTFWGRGSTQSHELTQVGSTPEIQSSESQVMWGMRQKEADYCRDYNSNAWPHSPLVNVSLNLFPNSVSDKNRTEKPQITLTGYALPSLSRPSKGLMHDQVE

SEQ ID NO: 71447 - protein, 140 aa, Gossypium hirsutum
  unsure (1)..(140): unsure at all Xaa locations
  Clone ID: GOSHI-09MAY01-C12356_2.pep
RTRGRVAWADAWAALKAVIKCIEEHNIEEQYPIDPLQKRVLLLEKVKADKKGSTEAAKPQTKRARANGAGYGPRVTNVAADKPFYSRTTDRYPQYVLDRPLLYSGPADXPRPLSFGFATYNFSPSHGNYFGYQYQVPYLH

SEQ ID NO: 71448 - protein, 68 aa, Gossypium hirsutum
  Clone ID: GOSHI-09MAY01-C12356_1.pep
EDHSHSFSHFFGKLVKIGNLILVAEVVTMTWREVVGGRTKKRGAVVVSRSGVNIGSVLNVQPGTYQWF

SEQ ID NO: 71449 - protein, 119 aa, Gossypium hirsutum
  Clone ID: GOSHI-09MAY01-C12336_1.pep
MASGAGDWSAEQIDDYETLISTTDVELLKRAWRNEKASPEILPFEEALVKRAKEQIQLMEETVDDFAESGHDPLIASLYQMDLDRAQFLLRSYLRVRLQKIEKFMFHIWKMDTYRNRLS

SEQ ID NO: 71450 - protein, 130 aa, Gossypium hirsutum
  Clone ID: GOSHI-09MAY01-C12326_3.pep
MAPPTRIGLAGLAVMGQNLALNIAEKGFPISVYNRTTSKVDETVERAKKEGDLPVYGFHDPESFVQSIQKPRVVIMLVKAGAPVDQTIKTLSAYLEKGDCIIDGGNEWYENTERRQKEMSALGLLYLGMG

SEQ ID NO: 71451 - protein, 171 aa, Gossypium hirsutum
  unsure (1)..(171): unsure at all Xaa locations
  Clone ID: GOSHI-09MAY01-C12326_1.pep
MAPPTRIGLAGLAVMGQNLALNIAEKGFPISVYNRTTSKVDETVERAKQEGDLPLFGFHDPESFXVKSIQKPRVIIMLVKAGAPVDQTIKTLSAYMEKGDCIIDGXGNEWYXENTERRQKEMSAXGLLYLGMGVSGGEQGARNGPSLMPGGXSFEAYKYIEDILLRVPPRV

SEQ ID NO: 71452 - protein, 64 aa, Gossypium hirsutum
  unsure (1)..(64): unsure at all Xaa locations
  Clone ID: LIB3543-032-Q1-K1-C6.pep
MAPPTRIGLAGLAVMGQNLALNIAEKGFPISVYNRTTSKVDETVERAKXEGDLPVYGFHDPESF

SEQ ID NO: 71453 - protein, 358 aa, Gossypium hirsutum
  Clone ID: GOSHI-09MAY01-C12296_1.pep
MGETNENIRINSSKDRDNLSLQMEKYPRDLLQRFMSTETQASITSEREEDEAEEEAELNLGLSLGGRFGVDKNAKKLIRSSSIASSMPTFREEGANNTPPTIPYPTLIRTSSLPTETEEEWRKRKKLQSLRRMEAKRRRSEKQRSSREKMEVNLLEEDKQPGRANNVGVGPPFGLQSRAASARQITSQGSIGSLGRSSSSMSEMENKALQVPCIAGAGSCGEARSSGSTQSLQDQGSQEAACSSGKKKSETCHTPELEAETLSKTVENKGKERGNAMEDMPCVFTKGDGPNGKRIEGILYKYGKGEEVRIMCVCHGNFLSPAEFVKHAGGGDVDHPLRHIVVNPNYASFFLMDFDVIP

SEQ ID NO: 71454 - protein, 84 aa, Gossypium hirsutum
  Clone ID: GOSHI-09MAY01-C12276_1.pep
KWKDKKNTLGPAGPPLQRGVFVVLQSVQNFLLLSLIISSLHDFFALRSITPMKQLYRYIWFKQNDKAKRKRKPNQSLMGKEKPT

SEQ ID NO: 71455 - protein, 48 aa, Gossypium hirsutum
  Clone ID: LIB3189-023-P1-K1-B7.pep
CADIEGSDLVAAKEKWYTYSTEQKPIVEKYISSFRYRKLTILPPLLEN

SEQ ID NO: 71456 - protein, 55 aa, Gossypium hirsutum
  Clone ID: LIB3135-032-Q1-K1-D3.pep
DAGPSFMMNPDGPFRGFGGPMRPFGRMFGGLPYDDWGYALGSGRPSRADWRYRPY

SEQ ID NO: 71457 - protein, 90 aa, Gossypium hirsutum
  Clone ID: LIB3189-023-P1-K1-B1.pep
HEICGQQVAIDSATPVDDAGPSFMMNPAGPFRGFGGPMRPFGRMYGGLPYDDWGYAIKIQSDFNIGVFMVLLPLINQIAILFSTNVQILG

SEQ ID NO: 71458 - protein, 159 aa, Gossypium hirsutum
  unsure (1)..(159): unsure at all Xaa locations
  Clone ID: GOSHI-09MAY01-C13906_1.pep
ATELEELIGFLFAPSPPVKKAGVDIVRDLTGSEDGLHSLSNYANTVLPSLSRLLSDDKEVSEPAAEALVNLSQNAGLAAKMVGMGLIKIALDMLLKPGSSITRLLAMLLVYLTQLDDGISSLLQIGDDKMPGLYVMRLXRSFCRSSETSDAPFDHVGPY

SEQ ID NO: 71459 - protein, 133 aa, Gossypium hirsutum
  Clone ID: GOSHI-09MAY01-C13816_2.pep
MAVPLLSKKIVKKRVKKFKRPQSDRKISVKTNWRRPKGIDSRVRRKFKGCTLMPNIGYGSDKKTRHYLPNGFKKFVVHNVQELELLMMHNRTYCAEIAHDVSTKKRKEIVERAAQLDVVVTNKLARLRSQEDE

SEQ ID NO: 71460 - protein, 133 aa, Gossypium hirsutum; identical to SEQ ID NO: 71459
  Clone ID: GOSHI-09MAY01-C13816_1.pep

SEQ ID NO: 71461 - protein, 106 aa, Gossypium hirsutum
  Clone ID: LIB3493-045-P1-M1-B2.pep
RAVVRRLHQEEMAVPLLSERIVKKRVKKFKRPQSDRKISQVFILFLLFRKNIYIFFLISALLFTLFLNDTFSSVCLIFKNPFIQSLLIVVIGFYSGSLLLKKLNNT

SEQ ID NO: 71462 - protein, 133 aa, Gossypium hirsutum
  Clone ID: uC-gsronu33B079b11b1.pep
MAVPLLSKKIVKKRVKKFKRPQSDRKISVKTNWRRPKGIDSRVRRKFKGCTLMPNIGYGSDKKTRHYLPDGFKKFVVHNVQELELLMMHNRTYCAEIAHDVSTKKRKEIVERAAQLDVVVTNKLARLRSQENE

SEQ ID NO: 71463 - protein, 103 aa, Gossypium hirsutum
  unsure (1)..(103): unsure at all Xaa locations
  Clone ID: LIB3272-009-P1-K1-B11.pep
MAVPLLSKKIVKKRVKKFKRPQSDRKISVXDKKTRHYLPDGFKKFVVHNVQELELLMMHNRTYCAEIAHDVSTKKRKEIVERAAQLDVVVTNKLARLRSQENE

SEQ ID NO: 71464 - protein, 119 aa, Gossypium hirsutum
  unsure (1)..(119): unsure at all Xaa locations
  Clone ID: LIB3146-046-Q1-K1-E5.pep
PRVRPLVRPLRPISVKTNWRRPKGIDSRVRRKFKGCTLMPNIXFGSDKKTRHYLPNGFKXXVVHNVQELELLMMHNRTYCAEIAHDVSTKKRKEIVERAAHLDVVVTNKLAKLRSQEDE

SEQ ID NO: 71465 - protein, 101 aa, Gossypium hirsutum
  unsure (1)..(101): unsure at all Xaa locations
  Clone ID: LIB3147-020-Q1-K1-C4.pep
ITRSWVTTDWLWHQSIDSGLKTNFRECTFMPNIGYGSDKTTLHYLPNGFKKFVLHNVQELELLMMHNKTYCAEIAHDVSTKKKKEICQRSAQXLDVCVTNK

SEQ ID NO: 71466 - protein, 86 aa, Gossypium hirsutum
  unsure (1)..(86): unsure at all Xaa locations
  Clone ID: LIB3146-047-Q1-K1-H11.pep
TAYPLLSNNIANNRVKKFMTPXNYRKISVMTNCLMPKGIDSXLLLKFKGCTLMPNIVYGSDKNTLHYLLNRFKKFVLHIILKLELL

SEQ ID NO: 71467 - protein, 105 aa, Gossypium hirsutum
  Clone ID: uC-gsronu33B126a03b1.pep
RFHHDRRAVRMLSGIITKKRVKKFKRPQSDRKISVKTNWRRPKGIDFRVRRKFKGCTLMPNIGYWSDKKTRHYLPNGFKKFVAHNVQELELFMMHNRTYCAEIAH

SEQ ID NO: 71468 - protein, 205 aa, Gossypium hirsutum
  Clone ID: GOSHI-09MAY01-C13596_2.pep
HASPTRRPRVRGRVGRPRVRFAIASDRRLGVQLQTIATDFQRIYKVHDRLFLGLSGLATDAQTLYQRLVFRHKLYQLREERDMKPETFASLVSAILYEKRFGPYFCQPVIAGLGDEDKPFICTMDSIGAKELAKDFGVAGTASESLYGACESMFKENMEPEELFETVSQALLASVDRDCLSGWGGHVYVVTPTEVKERILKGRMD

SEQ ID NO: 71469 - protein, 204 aa, Gossypium hirsutum
  Clone ID: GOSHI-09MAY01-C13596_1.pep
MSIFEYNGSALIAMVGKNCFAIASDRRLGVQLQTIATDFQRIYKVHDRLFLGLSGLATDAQTLYQRLVFRHKLYQLREERDMKPETFANLVSAILYEKRFGPYFCQPVIAGLGDEDKPFICTMDSIGAKELAKDFVVAGTASESLYGACESMFKEGMEPEELFETVSQALLSSVDRDCLSGWGGHVYVVTPTEVKERILKGRMD

SEQ ID NO: 71470 - protein, 96 aa, Gossypium hirsutum
  unsure (1)..(96): unsure at all Xaa locations
  Clone ID: LIB3197-030-Q1-M1-B8.pep
MSIFEYNGSALVAMVGKNCFAIASDRRLGVQLQTIATDFQRISKIHDRLFLGLSGLATDAQTLYQRLVFRHKLYQLREERDMKPETXASLVSAILY

SEQ ID NO: 71471 - protein, 76 aa, Gossypium hirsutum
  unsure (1)..(76): unsure at all Xaa locations
  Clone ID: LIB3828-001-Q1-K6-F1.pep
NPLEIGGDCLELXXXRGXXXXTWXXXXXAVLTYHGYEGTPIILEDRHRRIKGVFEMKFSCDKLTKILFSKCDVSFK

SEQ ID NO: 71472 - protein, 128 aa, Gossypium hirsutum
  Clone ID: GOSHI-09MAY01-C13576_3.pep
MSSTDEFMDDMNGNGDSYGTVNRRFKDRAEQVAKTKEILSKQAVQTKEMLSKQAVKIAKQAEEHERFINKVTHLLGVLGFGGFCFLLGARPQDIPYVYWVFYVTFVPLRWIFYRFKKWHYYLLDFCLL

SEQ ID NO: 71473 - protein, 275 aa, Gossypium hirsutum
  unsure (1)..(275): unsure at all Xaa locations
  Clone ID: GOSHI-09MAY01-C13576_1.pep
MTSSDEPGEDIIVNGDTPGTGKPRFRKVAKTKEMLSKQAVQTKEMLSKHAVKIAKQAEEHERFINKVTHLLGVLGFGGFCFLLGARPQDIPYVYCVFYVTFVPLRWIYYRFKKWHYYLLDFCYYANTIFLVDLLLYPKNEKLFMICFSFAEGPLAWALIVWRCSLVFSSVDKIISVLIHLLPGIVFFTIRWWNPATFEAMHPEGTPHRFSWPYVEDKSYLWTWLFGVPLAAYTLWQGLYFLIVNVLRXRQRLLRXDPEVMTSYRELSKNAQKGNN

SEQ ID NO: 71474 - protein, 203 aa, Gossypium hirsutum
  unsure (1)..(203): unsure at all Xaa locations
  Clone ID: AI055318.1.pep
MTSSDEPGEDIIVNGDTPGTGKPRFRKVAKTKEMLSKQAVQTKKILSKHAVKIAKQAEEHERFINKVTHLLGVLVFGGXFCFLLGARPQDIPYVYCLFYVIFVPLRWIYYRXKKWHYYLLDFCYYANTIFLFDLLLYPSNEKXFLVCFSFAXGPLAWALXCWRCSLXFSSVDQILAXLSSFTGMAILLHCILYALDQQVVFGS

SEQ ID NO: 71475 - protein, 66 aa, Gossypium hirsutum
  Clone ID: GOSHI-09MAY01-C13506_2.pep
MGPGGPGGPPGWGGPPPGPGFSGGICDFIGSCLSFLCCCWLLGDCFGGPMGPPGPPGPPGFGPPPP

SEQ ID NO: 71476 - protein, 145 aa, Gossypium hirsutum
  Clone ID: GOSHI-09MAY01-C13506_1.pep
RSKKACNYGGGGPGGPGGPIGPPKQSRNSQQQHRKLTQAPITSQKPPKNPGPTGGPPHPGGPPGPGGGPPHPGGPPGPGGGPPHPGGPPGPGGGPPHPGPPGPGGPPGPPGPPGPGGPPGPPGPIFSQAATNELTEEWREGNKKA

SEQ ID NO: 71477 - protein, 197 aa, Gossypium hirsutum
  unsure (1)..(197): unsure at all Xaa locations
  Clone ID: AI727418.1.pep
APAAAREEQGPGPTTRRARPQPAQPAQAQPTGTARQTTAPAAATRERAETRRNNATPQKKGSEKRKTRQERGGGEKPTKHQTAAQGEHTGGPQPTRRNTKNQGTTGRPPHPGGPXGXGGGPPHPGGLXGPGGGPPHXGGPXGPGGGPPHPGPPGPGGPPGPPGPPGPGGPPGPPGPIFSQAATNELTEEWREGNKKA

SEQ ID NO: 71478 - protein, 90 aa, Gossypium hirsutum
  Clone ID: LIB3148-006-Q1-K1-B6.pep
FIRLIYFFLKNKTTARPNKKKKNLRLHWFLERAFCVAADCLKTVLVAQCIHHGHLDHLNFDLHHPSYMSTIFIFQHKFLEACLASIWVAP

SEQ ID NO: 71479 - protein, 254 aa, Gossypium hirsutum
  Clone ID: GOSHI-09MAY01-C13446_1.pep
MHKLGRGHRDKVQQFMTITGASEKLALQALKASDWHLEGAFDFFYGQQSHIKSYTDTTYLEELYKRYKDPYTDMILPDGITLLCNDLQVDPQDIVMLVVSWHMKASTMCEYSKEEFFTGLQALGIDSLEKFRERIPFMRSELKDEQKFREIYNFAFGWAKEKGQKSLALDTAIGMWQLLFAEKQWPLVDHWCQFLQARHNKAISRDTWSQLLEFARTVDPALSNYDAEGAWPYLIDEFVEYLNENGIIQSGQFK

SEQ ID NO: 71480 - protein, 116 aa, Gossypium hirsutum
  unsure (1)..(116): unsure at all Xaa locations
  Clone ID: LIB3083-048-Q1-G1-D5.pep
THLEDLNKRYKDPYTDMILVDGITLQCNHLQLVVSWHMKAPTMCEYSKEEFFTGLHAQRKHSLEKFRERIPFMPSELKDEQKFREIYNFAFGCAXRKGQTSFGMDTANGMWEFAVR

SEQ ID NO: 71481 - protein, 187 aa, Gossypium hirsutum
  unsure (1)..(187): unsure at all Xaa locations
  Clone ID: GOSHI-09MAY01-C13416_1.pep
MGKGGGCVPSKKRQPSSAEGSATATATTATNNAPIEADEETHETASVAVNPTNAQSVTATLKIFIVYYSMYGHVEKLAKRMKKGVDGVEGVEAVLYRVPETLPADVLDHMKVPSKNPEVPEIKAAELAQADGVLFGFPTRFGCMAAQMKAFFDSSGQFWKEQTLAGKPAGFFVXTGTQGGGQKATAW

SEQ ID NO: 71482 - protein, 155 aa, Gossypium hirsutum
  Clone ID: LIB3272-005-P1-K1-A2.pep
ARRYQVRDSRHASDLAKRMKKGVDGVEGVEAVLYRVPETLPADVLDHMKVPSKNPEVPEIKAAELAQADGVLFGFPTRFGCMAAQMKAFFDSSGQFWKEQTLAGKPAGFFVSTGTQGGGQEATAWTAITQLAHHGMLFVPIGYTFGAGMFKMDSI

SEQ ID NO: 71483 - protein, 137 aa, Gossypium hirsutum
  Clone ID: uC-gsronu33B164g01b2.pep
LWCRKIVFVFGIGVGADEETHETASVAVNPTNAQSVTATLKIFIVYYSMYGHVEKLAKRMKKGVDGVEGVEAVLYRVPETLPADVLDHMKVPSKNPEVPEIKAAELAQADGVLFGFPTRFGCMAAQMKAFFDSSGQF

SEQ ID NO: 71484 - protein, 115 aa, Gossypium hirsutum
  Clone ID: GOSHI-09MAY01-C13406_1.pep
MRWPAVKSGGLGVVAMTYVAVDYLRILSPTWHERLQPVLWSLLALVAVTRVPFYRHWSAEFRAAISFLASMIFMLSALLFEACTVRSVAVALGLTWPNGRPPLPDTGQWLLLALN

SEQ ID NO: 71485 - protein, 84 aa, Gossypium hirsutum
  Clone ID: GOSHI-09MAY01-C13746_2.pep
DAWARVLHPDVSANGRNDAAANEFIKVHEAYSTLSDPEKRADYDRTLLFRPRRSFSVSIESMAGQTSSGFSGYSKRTWETDQCW

SEQ ID NO: 71486 - protein, 154 aa, Gossypium hirsutum
  Clone ID: LIB3147-052-Q1-K1-D7.pep
DDWLRFKEMDPSVSGRGAEPVFRDKTKGERISKEEYLKSKRKGEEKPKEKELEWGKGLAQKREAETRLQDLELEKSKPFARTRDDPELDNMLKDRLRWGDPMAHLVKKKQPELVLKDLGDAEKMKESGFIVPQDIPPHSWIVRKLDAAPNRYGI

SEQ ID NO: 71487 - protein, 288 aa, Gossypium hirsutum
  Clone ID: GOSHI-09MAY01-C13716_7.pep
PNVAEKACGALYFLAQGYEEVGPSSPLTPFFQEIVQSLLTVTHREDAGESRLRTAAYETLNEVVRCSTDETAPLVLQLVPVIMMELHNSLEGQNLSSDGREKQSELQGLLCGCLQVIIQKLGSSESTKYLFLQYADQIMGLFLSVFACRSATVHEEAMLAIGALAYATGPDFAKYMPEFYRYLEMGLQNFEEYQVCAVTVGVVGDIRRALEEKVVPYCDGIMTQLLKNLSSNQLHRSVKPPIFSCFGDIALAVGEYFEKYLMWAMSALQSAAELSTHTTGDDELIEYI

SEQ ID NO: 71488 - protein, 112 aa, Gossypium hirsutum
  Clone ID: GOSHI-09MAY01-C13716_6.pep
PTPSAEFWRAYSGIFQGFKNSPKTQLLIPYAPHILQFLDGIYMEKDMDDVVMKTAIGVLGDLADTLGSHAASLIQQSVSSKDFLSECSSSEDVMIKESAEWAKLAISRAISV

SEQ ID NO: 71489 - protein, 79 aa, Gossypium hirsutum
  Clone ID: GOSHI-09MAY01-C13716_5.pep
MKDVELGTMSASFDFFTSSIITRGGFWHTITHPLFAWLFKIFSHCSIANFFRICTLFHQPSAYQHCTNPQHPDAWADAW

SEQ ID NO: 71490 - protein, 128 aa, Gossypium hirsutum
  Clone ID: GOSHI-09MAY01-C13716_4.pep
HGSAVDSPIITQANCQQIVVVLLQSMKDTPNVAEKACGALYFLAQGYEEVGPSSPLTPFFQEIVQSLLTVTHREDARESRLRTAAYETLNEVVRCSTDETAPLVLQLVPVIIMELHNTVEGQKLSSDL

SEQ ID NO: 71491 - protein, 61 aa, Gossypium hirsutum
  Clone ID: GOSHI-09MAY01-C13716_3.pep
MKNAIGVLGDLADTLGSHAGSMIQQSVSSKDFLNECLSSEDLMIKESAEWAKLAISRAISV

SEQ ID NO: 71492 - protein, 220 aa, Gossypium hirsutum
  Clone ID: GOSHI-09MAY01-C13716_1.pep
MKASQCGPKWDFHSPCAVTVGVVGDICRALKEKVVPYCDGIMTQLLKNLSSNQLHRSVKPPIFSCFGDIALAVGEYFEKYLMWAMSALQSAAELSTHTTGDDELIEYINTLRNGILEAYSGIFQGFKNSPKTQLLIPYAPHILQFLDGIYMEKDMDDMVMKTAIGVLGDLADTLGNHASSMIQQSVSSKDFLNECLSSEDLLVKESAQWAKLAISRAISV

SEQ ID NO: 71493 - protein, 86 aa, Gossypium hirsutum
  Clone ID: LIB3083-030-Q1-L1-D3.pep
TPWFKTFLLVSLLLLMPFSQGMVEEGLHGGMKQAADYSVEQGGKEMMMIQMRTVRKLMMLGGMQDYDDTGANQKHEHDPRKKPGKP

SEQ ID NO: 71494 - protein, 90 aa, Gossypium hirsutum
  Clone ID: LIB3189-015-P1-K1-G10.pep
LKNLLNGPSWPLVVPFLFEGVAIQHVYFFSKSMHLGMSRVLGCMCRVITIVRQQKLPVFMLSLTFASASWGQIPFFLIMKELDTDNFSRT

SEQ ID NO: 71495 - protein, 160 aa, Gossypium hirsutum
  unsure (1)..(160): unsure at all Xaa locations
  Clone ID: AI055404.1.pep
NTLPSYTGGDQGFLNSYYSDFPNAHVFDPNIPDEVLKSRPAPEMERLSTLYNADVGLYMLANKWMVDESEXRVIHYTLGPLKPWDWWTSWLLKPVDVWQNVRXSLXEVPSGTGRGKNPTDDFLVKFLFLSFSVLPGLSSFRHTGVQFGEPYLRSDLTLFQ

SEQ ID NO: 71496 - protein, 191 aa, Gossypium hirsutum
  unsure (1)..(191): unsure at all Xaa locations
  Clone ID: uC-gsronu33B147b02b1.pep
VNTLPSYTGGDQGFLNSYYSDFSNAHVFDPNIPEEVLKSRPAPEMERLSTLYNADVGLYMLANKWMVDESELRVIHYTLGPLKPWDWWTSWLLKPVDVWQNVREQLKESLPGTGGGKNPNDELLIKFLFLLPFCALLFWFYXSFVQTGGSVCRTSLCNQVRHFYHIIRSSGTVAYTSVSSSSTINASQFSN

SEQ ID NO: 71497 - protein, 143 aa, Gossypium hirsutum
  Clone ID: LIB3189-013-P1-K1-F2.pep
KFCANLKHSERLNSGVMVVEPSEAVFNDMMSKVNTLPSYTGGDQGFLNSYYSDFSNAHVFDPNIPEEVLKSRPAPEMERLSTLYNADVGLYMLVNKCYFYDSDLCVFTYHFFFFILGFCFFLFFDPFYFLIFLFHFYYVLFLF

SEQ ID NO: 71498 - protein, 222 aa, Gossypium hirsutum
  Clone ID: GOSHI-09MAY01-C13146_1.pep
MGLFKAAGVVYKPVEEIDLGPDSNEFYLLPHVIAPRMAGFLVKIFAWFLESRIIGTLLLYILKRNNLIHKLVSNATLEEAPMFVPLHPFVDLNEQEVEQIDSDASPAERVQRAMNCLPLTLEKSVDDSNSSSFRRWTIADYSRAYSSGEITPRKVAEQFINAVHESSRAALPMSFFINYDAEDILKQATESTLRYVRGDPFSALDGVPIAFKDGLDCSPFPT

SEQ ID NO: 71499 - protein, 359 aa, Gossypium hirsutum
  Clone ID: GOSHI-09MAY01-C13076_1.pep
MQETNNSRVNQRIATISAHLNPPSFSHMEGSSGLGRADCRAKGGLTGFKVAILGAAGGIGQPLSLLMKMNPLVSVLHLYDVVNTPGVTADISHMDTGAVVRGFLGQQQLEEALTGMDLVIIPAGVPRKPGMTRDDLFNINAGIVKTLCEGIAKCCPNAIINLISNPVNSTVPIAAEVFKKAGTFDPNRLLGVTMLDVVRANTFVAEVMGLDPREVDVPVIGGHAGITILPLLSQVKPPCSFTQKEIEYLTNRIQNGGTEVVEAKAGAGSATLSMAYAAVQFADACLRGLRGDADIVRCAFVASHVTELPFFASKVRLGRCGVEEIYPLGPLNEYERVGLEKAKKELETSIEKGVAFVKK

SEQ ID NO: 71500 - protein, 113 aa, Gossypium hirsutum
  Clone ID: uC-gsflmaxxa029h10b1.pep
INFRVNQRIATMGGHLNPPSCCHMEGSSGLGRADCRAKGGLTGFKVAILGAAGGIGQPLSLLMKMNPLVSVLHLYDVVNTSWCYLLILAHMDYLELWVRGIFCGQHPICEECF

SEQ ID NO: 71501 - protein, 191 aa, Gossypium hirsutum
  Clone ID: GOSHI-09MAY01-C13326_1.pep
MQEMKAEIATKNSKKANLLDHNSLKHILDESVPEIVTSRGYAEDVRMSNVRLFIGTIIIVIALFAQFYKKKFPGNRDFLIGCIVLYIVFNVILQLFSYRKEKNAIMFTYPPPGSVTSTGLVVSSKLPRFSDLYTLSIASADPKSISAGKPVEFTKNVTQWFTKDGVLVEGLFWKDVGALIDDYAAVPKKKK

SEQ ID NO: 71502 - protein, 110 aa, Gossypium hirsutum
  unsure (1)..(110): unsure at all Xaa locations
  Clone ID: LIB3189-007-P1-K1-H10.pep
MVSGARTEGHISARVSKTIQSIKEIVGNHSDDDIYVALKEANMDPNETAQKLLHQDTFHLVRRKRDRKKESIGYQGSMDPRKFSENAGQVMKFRTYPXRGSRRGGYSRNA

SEQ ID NO: 71503 - protein, 89 aa, Gossypium hirsutum
  Clone ID: LIB3189-007-P1-K1-H11.pep
MVRVARTMGHNSARVSKTIQSIKEIVGNHSDDDIYVALKEANMDPNETAHKLLHQDTFHLVRRKRDRKKESIVYQGSMDPRKFSENAVK

SEQ ID NO: 71504 - protein, 70 aa, Gossypium hirsutum
  unsure (1)..(70): unsure at all Xaa locations
  Clone ID: LIB3493-033-P1-M1-G12.pep
GYAELLLGQPLFPCHSGVXRVGEIINVLSSPTREVIXGMNSNYSEFRFLQIXAYPWIMFFHNRMPSGICG

SEQ ID NO: 71505 - protein, 519 aa, Gossypium hirsutum
  Clone ID: GOSHI-09MAY01-C13246_1.pep
MARTRITIFFMGLVLWCCLTKAEYMKYKDPKHAVHVRTRDLLDRMTLEEKIGQMVQIERSVASADVMNKYFIGSVLSGGGSAPSPQASPEAWINMINDFQKGSLATRMQIPMIYGIDAVHGNNNVYKATIFPHNIGLGATRDPKLVKKIGAATALESRATGIPYVFAPCIAVCRDPRWGRCYESYSEDPHLVDAMTEIVPGLQGDIPAKSSKGIPFVAGNKNVAACAKHYVGDGGTTKGINENNTVINWHDLLSIHMPGYYTSIIKGVSTVMVSYSSWNGVKMHANRDLVTGFLKNKLRFRGFVISDWEGIDRITYPPHANYTYSIQAAIGSGIDMVMVPYNYSSFIHGLTFLVKSNFIPMSRIDDAVKRILRVKFAMGLFENPLADNSLVDQLGSQEHRELAREAVRKSLVLLKNGHSADQPLLPLPKKTSKILVAGSHADNLGYQCGGWTIEWQGFSGNDLTNGTTVLKAIKNTVDSSTNVVYEENPDPKFVKSNNFSCAIVVVGEHPYVETKSDSM

SEQ ID NO: 71506 - protein, 47 aa, Gossypium hirsutum
  Clone ID: LIB3825-014-Q1-N6-A11.pep
CNQVFWCAGELASSMSLLIKDVAETHCSFQIFWVNLVAILNFKLAPV

SEQ ID NO: 71507 - protein, 142 aa, Gossypium hirsutum
  Clone ID: LIB3189-007-P1-K1-E11.pep
MAGIATTCYYLTLSSTSTRKTWLELKTNYGRATPIRRRNLSIRAEVNFVNAEEAKKLIAVEGYAVLDVRDKSQFDRAHIKSCYHVPLFIENTDNDPGTIVKRTLHNNFSGLFFGLPFTKLNPEFVQSVKSQFSPESKLLLVC

SEQ ID NO: 71508 - protein, 89 aa, Gossypium hirsutum
  unsure (1)..(89): unsure at all Xaa locations
  Clone ID: GOSHI-09MAY01-C8925_1.pep
MDWLCCFNSSQHGGGRSSSTSGKGKCHEGIMRFGFSLVKGKGSYPMEDYYVAXFMQIIGHELGLFAIYDGHMXDSDPAYLQKHFVFQFP

SEQ ID NO: 71509 - protein, 250 aa, Gossypium hirsutum
  unsure (1)..(250): unsure at all Xaa locations
  Clone ID: GOSHI-09MAY01-C8855_2.pep
NPGGPRVGLQEEVREAKIKVLGSLKQDGDEDRSEWKKLAQSLKSEYPRYTPLLVKILESLLSRSNIGDKLPRGEKIISAADEVIDSIGADELAKLFSLKADPEDEDSEEXKKKMETTRDRLAEALYQKGLALAEIESIKGEKPSALAASEAVSSDLRSDLFEENFKELTKWVDVKSSKYGTLYVLRERRFGRLGTALKVLNDMIQDDGEPPKKKFYEMKLSLLDEIGWNHLSTYERQWMHVRFPPSLPLF

SEQ ID NO: 71510 - protein, 344 aa, Gossypium hirsutum
  unsure (1)..(344): unsure at all Xaa locations
  Clone ID: GOSHI-09MAY01-C8855_1.pep
MELAIAQFWSSGMGSHETTIVDFEIVFHGIGVNRSAAARPGREPPCGGEAEALLASERLAPTATLNKIRVPYRPTEAKLCTLPTNRDKLXQGKQILALTLTYHFKLEDGAEVKPHIPLLNNRIYDTKFESQFYMISDTNKRVYAMGDCYPASSQLPKGEYSLRLYLRHDNVQYLEKMKQLVLFLERNLEEKDIIPLNFFSEPDGPVMGNGTFKYSILVPGIKESFYLSPPNKDKLPKCSSQGSVLLGAISHGKLSYAGEGKNPQKNPVSYQISYVVPPSKIDEDKGKGSSSASTKPMAERLQEEVREAKIKVFGSLEQDSDEDRSEWKKLAQSLKSEYPRYTHA

SEQ ID NO: 71511 - protein, 113 aa, Gossypium hirsutum
  Clone ID: GOSHI-09MAY01-C8825_1.pep
NPLMAASNKTHNSHLITSVFFFFILLTNSSLSSARLLSAAQPTLNLALPSDKPHQALPCDHMVPFKNFHVGVMRRSPSQKAAGMYGPSFLSMLPKGGHVPSSGPSRGSNDIKT

SEQ ID NO: 71512 - protein, 177 aa, Gossypium hirsutum
  Clone ID: GOSHI-09MAY01-C8555_1.pep
HPKDDSPSLPDERKPRKRGRKPANGREEPLNHVEAERQRREKFNQRFYALRAVVPNISKMDKASLLGDAITYITDLQMKIRVLETEKEMVNNGQKQLSMPDIDFQQRHEDAVVTMRYPLDAHPVSQVLKALKENQITARESDVSTTDNDKIVHTFTIGAPGGAAEQLKEKLLDALSK

SEQ ID NO: 71513 - protein, 135 aa, Gossypium hirsutum
  Clone ID: GOSHI-09MAY01-C8545_1.pep
FKRTTSLFFLTALGSRFIFSLGFFVFPSSALLSCSFFSLSFWYFGLIESIMSKNILVTGGAGYIGSHTVLQLLLGGYKVVVADNLDNSSAVAIKRVEELAGQFGRNLSFRQVDLRDRSVIQKLFAETKFDAVIHF

SEQ ID NO: 71514 - protein, 97 aa, Gossypium hirsutum
  Clone ID: GOSHI-09MAY01-C8575_1.pep
MAMNGGLRSASKFLTSSSQSLLHKSGNRGFHSTGVKRMGGGHGHDEPYYLHAKHMYNLDRMKNQKLTMSLGVLTAFSIGVFVPIYAVIFQQKKTASG

SEQ ID NO: 71515 - protein, 82 aa, Gossypium hirsutum
  Clone ID: uC-gsflnu33B099a09b1.pep
LHASALIHKSGNRGFHSTGVKRMGGGHGHDEPYYLHAKHMYNLDRMKNQKLTMSLGVLTAFSIGVFVPIYAGIFQQKKTASG

SEQ ID NO: 71516 - protein, 39 aa, Gossypium hirsutum
  Clone ID: uC-gsronu33B048d10b1.pep
NMGLQPKNRCQLMIFHPIQVVHMLSMEVIWFIMPMPSSR

SEQ ID NO: 71517 - protein, 90 aa, Gossypium hirsutum
  Clone ID: LIB3166-002-Q1-K1-E4.pep
MRRGRGAAAAAPAAAANAVARRPALQPGGSIKEPRYRGVRKRPWGRFAAEIRDPWKKTRVWLGTFDSAEEAARAYDTAARTLRGPKAKTN

SEQ ID NO: 71518 - protein, 75 aa, Gossypium hirsutum
  Clone ID: LIB3166-058-P1-K1-C1.pep
MRRGRGAAAANAVARRPALQPSGSIKEPRYRGVRKRPWGRFAAEIRDPWKKTRVWLGTFDSAEEAARAYDTAART

SEQ ID NO: 71519 - protein, 167 aa, Gossypium hirsutum
  Clone ID: GOSHI-09MAY01-C8535_1.pep
VVDQKGIFTDVCIGWPGSMPDDQVFEKSALFQRGLKDVWIVGNSGYPLMGWVLVPYTHQNLTWAQHGFNEKMGAVQNVAKEAFARLKGRWSCLQRRTEVKLQELPMVLGACCVLHNICETNNEDMDPELQFELFDDETIAENNLRSSNAVLARDNIAHNLLHRSWWN

SEQ ID NO: 71520 - protein, 56 aa, Gossypium hirsutum
  unsure (1)..(56): unsure at all Xaa locations
  Clone ID: GOSHI-09MAY01-C8715_1.pep
MSEVFEGYERQYCELXSANLSRKCNSASAITDSEQKIQMFSEINSGIDEADVLIRK

SEQ ID NO: 71521 - protein, 314 aa, Gossypium hirsutum
  Clone ID: GOSHI-09MAY01-C8725_1.pep
MGIEISGGTIIPGGWGAAAMAVAAKTCDACKSSAAAIFCRTDWVFLCLNCDSNFHSGHERVSMCEVCEQAPAAVTCKADAAALCVTCDADIHSANPLARRHERVPIEPFYDSADSIVKSSPFSFLVPTTDHNGTNCKQEIESNKGDFFFTEMDRFIDFGYPNSSQHLHDAAMDSVVPVQTPKPVIPLINDGSCFDTFSYQTQSSRTRPVSSSSLEVGTVPDGNYHATQVGGSIDREARVFRVIEKRKNRNSEKTIRYASRKAYAESRPRIKGRFAKRTETHNDDVDHMFNNSSSFAVGPAGFMAETDYGVVPSF

SEQ ID NO: 71522 - protein, 149 aa, Gossypium hirsutum
  unsure (1)..(149): unsure at all Xaa locations
  Clone ID: GOSHI-09MAY01-C8645_3.pep
DVKNKNELLVLIRKYIEGIAVIDLKDAYPNVMEDLQGLKAAGRGWLLSNFDSQEDIAFPNDPRVPIKVDDDLKELFRSIELPRDMLDIEKDLQKNGMKPXTTTAKRRPAAQXQGITSKPKPRQKNKEFSKKAKLTNAHLPELFQSLKNS

SEQ ID NO: 71523 - protein, 166 aa, Gossypium hirsutum
  Clone ID: LIB3543-051-Q6-K6-C4.pep
GRVGGRVGERLQHINSIRKAPVGAQMKRVIDILFQTRQAFTPEQINEACYVDVNGNKDVFEGLRKNPKVNYDGKRFSYKAKHDVKNKNELLVLIRKYIEGIAVIDLRDAYPNVMEDLQGLKAAGQIWLLSTLIGTLGSFGGSSHVGSSFGGGRFVVAFPGPWFVLL

SEQ ID NO: 71524 - protein, 134 aa, Gossypium hirsutum
  Clone ID: LIB3829-014-Q6-N6-D10.pep
IEGIAVIDLKDAYPNVMEDLQALKAAGQIWLLSNFDSQEDIAFPNDPRVPIKVDDDLKELFRSIELPRDMLDIEKDLQKNGMKPATNTAKRRAAAQVQGISAKPKPKQKNKEFSKKAKLTNAHLPELFQNLKNS

SEQ ID NO: 71525 - protein, 140 aa, Gossypium hirsutum
  unsure (1)..(140): unsure at all Xaa locations
  Clone ID: GOSHI-09MAY01-C8155_1.pep
MANSLLSSNFFGTQLGLSPPTPXKTTRKLQVTQSILNKKPNSSHTVKTLQSHATLAALLFSAVAPQALAVDNAPPTPPPVIEAQPTKPSPSNQSPFSQNLLLTAPKPQSQSSDLPEGSQWKFSEFLNAFKKGKVERVKFN

SEQ ID NO: 71526 - protein, 193 aa, Gossypium hirsutum
  unsure (1)..(193): unsure at all Xaa locations
  Clone ID: GOSHI-09MAY01-C8115_1.pep
MAASSPAMQMQSLLLASPMTGLASKRQMVQFYIVKPMPRFQRKLNLQVRCLAEDGDQKEPMPAARTPEPKQSPPRISPKVSTKFSDVFAFSGPAPERINGRLAMVGFVAALAMELSKWQDVLTQISNGGIPLFVGTSIGLSLASLIPLFXGETVESRSGQFMSSDAELWNGRFAMLGLVALAFTEYVKGGTLV

SEQ ID NO: 71527 - protein, 73 aa, Gossypium hirsutum
  Clone ID: GOSHI-09MAY01-C8085_5.pep
MGLSSLPAPSEGVLCVLLVNTALSISMVKGIIRSILHVVGIHLSYFLACYYLSSSSSPPSSDLIEIPAVSFDI

SEQ ID NO: 71528 - protein, 166 aa, Gossypium hirsutum
  Clone ID: GOSHI-09MAY01-C8085_3.pep
MGLSSLPAPSEGVLCVLLVNTALSISMVKGIIRSILHVVGIHLSSSSSSSSSSSSSSSSSSSPSSDLIEIPAVSFDISIGNADSYIKEFRSRMPSTRYDAVCSGSQPEHDCSVCLTRFEPESEINRLSCGHLFHKVCLEKWLNYWNVTCPLCRNALLPEDDPAYFW

SEQ ID NO: 71529 - protein, 132 aa, Gossypium hirsutum
  unsure (1)..(132): unsure at all Xaa locations
  Clone ID: GOSHI-09MAY01-C8085_2.pep
MGLSSLPAPSEGVLCILLVNTALSISIVKGIIRSILHVVGIHLPPPPSDYTENPSEAFDFHLNTPESYIEEFRSRTPTIHFGAVLCSCKRPQHDCRVCLTQFEPKSEINHLSCGHLFHKVCLEKWLDXWNIT

SEQ ID NO: 71530 - protein, 158 aa, Gossypium hirsutum
  Clone ID: GOSHI-09MAY01-C8085_1.pep
MGLSSLPAPSEGVLCVLLVNTALSISMVKGIIRSILHIIGIHLSSSSSSSSSSSSSSSSSSSPSSDLIEIPAVSFDISIGNADSYIKEFRSRMPSTRYDAVCSGSQPEHDCSVCLTRGMSHALFAGTLCCPNLIRPTFGERAEIFEFSMYSAFIVQGF

SEQ ID NO: 71531 - protein, 93 aa, Gossypium hirsutum
  Clone ID: LIB3826-002-Q1-N6-F10.pep
SFDISIGNADSSIKEFRSRMPSTRYDAVCSASHPEHDCSVCLTRFEPESEINRLSCGHLFPKVCLEKWLNYWNVTCPLCRNALLPENDPAHFW

SEQ ID NO: 71532 - protein, 165 aa, Gossypium hirsutum
  Clone ID: GOSHI-09MAY01-C8075_1.pep
MDPFGLFCTGALLACGLYWFVCLLGPAEQKGKRAVDLSGGSISAEKVQDNYKQYWSFFRQPKEIETAEKVPDFVDTFYNLVTDIYEWGWGQSFHFSPSIRGKSHRDATRLHEEMAVDMIEVKPGDRVLDVGCGVGGPMRAIATHSRANVVGITINEYQVNRARLH

SEQ ID NO: 71533 - protein, 112 aa, Gossypium hirsutum
  Clone ID: GOSHI-09MAY01-C8015_1.pep
MLYENSLVSDLFAAVVCCGVIFAFLLLWQVTAKCGVDQKLNRKLVHISIGLVFMLCWPLFSAGYRGAILAAITPGVNIIRMLLIGSGIWKDEATVKSMSRYGNYRELLKGPL

SEQ ID NO: 71534 - protein, 200 aa, Gossypium hirsutum
  Clone ID: GOSHI-09MAY01-C8375_1.pep
YIFYHTTKLLYLFVFYSSNSGCGHELCVRCALYLCSTSHIPSNMVAPTGSIPCPLCRHGIRSFVKLPSSPIKEIKLQLSFGLCTPCMLHPRDADCPSPTSEIRKNRISSVSSDIFCPVTCSPFPSVAIPLCTCNDSPCPSFEHRETTAETQEESPGRSQATSIEQDKLEGPRLERSSCSSMFWGRRSCSREHQCYSEINA

SEQ ID NO: 71535 - protein, 101 aa, Gossypium hirsutum
  Clone ID: LIB3166-001-Q1-K1-G11.pep
PTRPIRKNRVASVSSDIFCPVTCSPFPSVAIPLCTCNDGPCPSFESGETEMQDGSPRRSQSTSIEQDKIEGPRLERTTCSNMFWGRRSCSREHQCNSEINA

SEQ ID NO: 71536 - protein, 113 aa, Gossypium hirsutum
  Clone ID: GOSHI-09MAY01-C8365_1.pep
MSCSVAVSNSPAFSPSSSLFLNKTPIISPSTEALNLTLTHLKTSSSPASPSPSPSSPFRLRLPKPPPVSLLSSSSVSNSSPSSGSGSAPGLGSGPVSTVLKRKRPARLEIPVV

SEQ ID NO: 71537 - protein, 192 aa, Gossypium hirsutum
  Clone ID: GOSHI-09MAY01-C8315_1.pep
MAISVPILAIIFALHLIAFVFAVGAERRRSFAEVVPDQYDERTYCLYSTDASTVYGLSAFGLLLLSQVVVNGVTRCLCFGKGLVSATSSTTCAIFFFVFSWLSFLGAEACLLAGSAKNAYHTKYRGIFGGEDISCATLRKGVFAAGAALTLLSLVGSVFYYWAHSRADTGGWQKHRNEGVGMTEQPPEFGKV

SEQ ID NO: 71538 - protein, 83 aa, Gossypium hirsutum
  unsure (1)..(83): unsure at all Xaa locations
  Clone ID: LIB3146-028-Q1-K1-F2.pep
LYSTDACTVYGLSDWGLLLLNQVAENSITRCLXLAKALSTALDXTTCAIFFFVVSCLSFMGAEACLLAGSAKNAYHTKYRGIF

SEQ ID NO: 71539 - protein, 225 aa, Gossypium hirsutum
  Clone ID: GOSHI-09MAY01-C8305_1.pep
MLWVDKYRPKALAQVVVHEEIAQNLTKLVTEQDCPHLLFYGPSGSGKKTLIMALLRQIFGPSAEKVKVENRNWKIDAGSRTIDLELTTLASTNHVELSPSDVGFQDRYIVQEIIKEMAKNRPIDTKGKKGFKVLVLNEVDKLSREAQHSLRRTMEKYSASCRLILCCNSSSKVTEAIRSRCLNIRINAPSAEQIVKVLEFIGKEEGLQLPSGFAAPIAGKSNRNL

SEQ ID NO: 71540 - protein, 118 aa, Gossypium hirsutum
  Clone ID: GOSHI-09MAY01-C8335_2.pep
QIRDYIHVMDLADGHTAALRKLFTTESIGCVAYNLGTGCGTSVLEMVAAFEKASRKKIPIKLCPRRPGDATAVYASTEKAQRELGWKYAYDSHLFPSALFYWNYMDPLLHIPIIYPYL

SEQ ID NO: 71541 - protein, 128 aa, Gossypium hirsutum
  Clone ID: GOSHI-09MAY01-C8335_1.pep
PRVRHDYPTKDGSAIPDYIHVMDLADGHTAALRKLCTTESIGCVAYNLGTGCGTSVLEMVAAFEKASGKKIPIKLCPRRPGDATAVYASTEKAQSELGWKAKYGVAEMCRDQWKWASSNPWGYQSKKP

SEQ ID NO: 71542 - protein, 257 aa, Gossypium hirsutum
  Clone ID: GOSHI-09MAY01-C8295_1.pep
RVRLVVKQTRKSLQADALILNTAEELDGPILSQIRTKCPRVYAVGPLHAQLNTRLNAKHGESYDHISNTLWEVDKSCIFCPRFLPNRSVIYVSLGSIASTSREQLVELWYGLLNSKTKFLLVVRPNSVIGKDGEGEDVVMELMEKSKDRGYIVNWAPQEAVLNHPAIGGFFTHNGWNSTLESVVAGVPMICWPQFADQHVNSRVVSVVWKIGLDMKDVCDSKIVEKMVNDVMVDRKEEFAKSASEMAKEDKKEIKML

SEQ ID NO: 71543 - protein, 284 aa, Gossypium hirsutum
  unsure (1)..(284): unsure at all Xaa locations
  Clone ID: GOSHI-09MAY01-C8285_2.pep
MLSQPRFITTQKGRPFGSYRFLSIVYLTMSLNPGHXGLEDMRDDALEPADLNDRDMVVVDVGGGTGFTTLGIVQHVDAKNVTILDQSPHQRALASQXEPLXECVIIVGDAVDLPFPTDFADRYVSAGSIEFWPDPLRGDLGXAFWVLFLGGLACLIGPEYPTFWLSRFFADVWKLFPKXEDPRVRWFEXAGFKDVQLIRDWPLNRYRGVRRHGLIMGCSVTGVKPASGDSPLQLGPKAEDVSXPVYPFVFLLRFMLGATAAAYYVLVPIYMWLKDQIVPEGGPI

SEQ ID NO: 71544 - protein, 341 aa, Gossypium hirsutum
  Clone ID: GOSHI-09MAY01-C8285_1.pep
MASSMLNGAESFTLIRGVTPRRVDFFGSGFHGKHLSNLGLAFSVRISRPGTTMAPKCGLSASRPASQPRFIQHKKEAFWFYRFLSIIYDHVINPGHWTEDMRNDALEPADLNNRNMIVVDVGGGTGFTTLGIVKHVDAKNVTILDQSPHQLAKAKQKEPLKECRIIEGDAEDLPFRTDYADRYVSAGSIEYWPDPQRGIKEAYRVLKLGGKACLIGPVYPTFWLSRFFADVWMLFPKEEEYIDWFEKAGFKDVQLKRIGPKWYRGVRRHGLIMGCSVTGVKPASGDSPLQLGPKAEDVSKPINPLTFLLRFILGTMAATYYVLVPIYMWLKDQIVPEGQPI

SEQ ID NO: 71545 - protein, 67 aa, Gossypium hirsutum
  unsure (1)..(67): unsure at all Xaa locations
  Clone ID: LIB3146-055-Q1-K1-A12.pep
VVKPGGKLSLIGPCPPHWGCRFFADAWMLFPPEEEYIXWFEKAGFNDVQLKRIGPPWYRGVRRPPLI

SEQ ID NO: 71546 - protein, 174 aa, Gossypium hirsutum
  unsure (1)..(174): unsure at all Xaa locations
  Clone ID: GOSHI-09MAY01-C8245_1.pep
MGGEKKFGVLLCAEDSDYIKKRYGGYFGVFVEMLAEEGETWDVFRVANGEFPDDDEIAEFDGFVITGSCNDAHGNDVWICRLISLLKKLDSLKTIVLGICFGHQILSRALGEKQGXSRSGWDIGVTTIHLSSSSSKFFSSLEIPTTLLIIECHRDDVRELPXKAEVLAWSEKTG

SEQ ID NO: 71547 - protein, 57 aa, Gossypium hirsutum
  Clone ID: LIB3272-013-P1-K1-F4.pep
MVGLVPKPYSFAFALSVVCLLDQILSRALGGKTGRAVSGWDIGVTTIHLSSSSSKFF

SEQ ID NO: 71548 - protein, 96 aa, Gossypium hirsutum
  Clone ID: LIB3583-007-P1-K1-H5.pep
MGGGKKFGVLLCAEDSDYIKKRLISLLKKLDSLKTKVLGICFGHQILSRALGGKTGRAVSGWDIGVTTIHLSSSSSKFFSSLEIPTTLSIIECHPD

SEQ ID NO: 71549 - protein, 129 aa, Gossypium hirsutum
  unsure (1)..(129): unsure at all Xaa locations
  Clone ID: GOSHI-09MAY01-C9945_2.pep
EPEKKRQVSFQGVGRTLGSSSTSAAPEPTTGSSPLNTALNPSPGLVVDESLPSTSIQLRLADGTRMITRFNLHHTVDDIRSFINSSRPGGATNYPXSVQIMGFPPKLLTDPTQTIEHAGLANSVVIQKF

SEQ ID NO: 71550 - protein, 303 aa, Gossypium hirsutum
  Clone ID: GOSHI-09MAY01-C9945_1.pep
MASRDKKPAKPSSSRAGGIRTLSDLNRPSGPDSDSDSDDPQEYYTGGEKSGMLVQDPSKKNDVDEIFNQARQLGAVEGPLEHPRPSSSTSFTGTGRLLSGETVPSAPQQPDSIIHNIVFWTNGFTVDDGPLRRLDDPENAAFLESIRKSECPKELEPADRRSSVHVNLIKRDEKCPEPEKKHQAAFQGVGRTLGSGSTSATPEETSSTSPLNTAPNPSPGLVVDESLPSTSVQLRLADGTRMVARFNLHHTVGDIRSFIDASRPEGATIYQLQMMGFPPKLLVDPTQTIEQAGLANSVVIQKF

SEQ ID NO: 71551 - protein, 111 aa, Gossypium hirsutum
  unsure (1)..(111): unsure at all Xaa locations
  Clone ID: LIB3166-020-P1-K1-D6.pep
IHTLSDLNQPYGPNSYIQSYXIPKESYIKAKKSAILVNNLSKKNNLHQIFNQARQLEPLKGPFXHPCPSSSTSFTGTGRXLSGETVPSAPQQPDSIIHNIVFWTNGFTVDD

SEQ ID NO: 71552 - protein, 106 aa, Gossypium hirsutum
  Clone ID: LIB3493-058-P1-M1-E12.pep
MASHDKKPTKPSSSRSGGIRTLADLNRPSGPDSGSDSDNPQEYYTGGEKSGMLVQDPSKNNEVDEIFNQARQLGAIERPIEQLNPSSSSTSFTGTGRLLSGETVSS

SEQ ID NO: 71553 - protein, 140 aa, Gossypium hirsutum
  Clone ID: GOSHI-09MAY01-C9965_1.pep
MVQEKKLVQDVSGWLRVYDDGSVDRTWTVPPEVKFMAEPVSPHEQFIDGIATRDVTIDQNSGLRARIYLPEEENPKFPIILHFHGGGFCISQADWFMYYQFYTRLAKSIPAIVVSVYLRPAPENKLPAACDDGYAALLWL

SEQ ID NO: 71554 - protein, 178 aa, Gossypium hirsutum
  unsure (1)..(178): unsure at all Xaa locations
  Clone ID: GOSHI-09MAY01-C9895_2.pep
MEQYEEQEHEVYGGEIPDEEGEVDADMSGGAEDYEGNEHDLEHDPNSNSXRNLEDMKKRLKEIEDEAGALREMQAKVEKEMGAVQDSSGTSATQAEKEEVDSRSIYVGNVDYSCTPEEVQQHFQSCGTVNRVTILTDKFGQPKGFAYVEFVEMTLFKSXLLLNETXLHGRQLKGAVRE

SEQ ID NO: 71555 - protein, 232 aa, Gossypium hirsutum
  Clone ID: GOSHI-09MAY01-C9895_1.pep
MDQYEEHEHEVYGGEIPDEEGEMDAEFDMTAGAEDYQGNDQGLQQDPSSSKDLEDMKKRLREIEEEAGALREMQAKVEKEMGAVQDSSSASASQAEKEEVDSRSIYVGNVDYACTPEEVQQHFQSCGTVNRVTILTDKFGQPKGFAYVEFVEIDAVQNALLLNESELHGRQLKVSANRTNIPGMKHYRGRPFNPYFRSRRPFMPAFYPPYGYGRVPRFMRAMRYRAYLDGSH

SEQ ID NO: 71556 - protein, 144 aa, Gossypium hirsutum
  unsure (1)..(144): unsure at all Xaa locations
  Clone ID: GOSHI-09MAY01-C9865_1.pep
MDLFLNAKAVRLRGHHDKYLXFAEEDEESVSQDRNGSSKAARWTVEFVPGSQTIIRLKSSYNKYLTASNQPFLLGMTGRKVIQTLPRRLDSSVEWEPIREGCEVKLKTRYGNFLRANGGLPAWRNSVTHDIPHRTATQDWVLGM

SEQ ID NO: 71557 - protein, 93 aa, Gossypium hirsutum
  unsure (1)..(93): unsure at all Xaa locations
  Clone ID: LIB3166-047-P1-K1-E3.pep
MDLFLNAKAVRLRGHHDKYLVAEEDEESCSQDRNGSSKSAXWTVEFVPGSENIIRLKSVYNKYVTGSNQAFLLGMTGRKVIQSLPKRLDSSVE

SEQ ID NO: 71558 - protein, 123 aa, Gossypium hirsutum
  Clone ID: GOSHI-09MAY01-C9815_1.pep
SRVRLNLLQPKRWALDSIVPNRTRGRLLKTIFSLEIPPSPSISTKQGGVNGRFAREAFYSLLFFFEYQNHKSKKKRETKENKVFRDFLNRKSPCSVLSIAFYCVLFVCVKNIQWLLHGFYSRK

SEQ ID NO: 71559 - protein, 108 aa, Gossypium hirsutum
  Clone ID: GOSHI-09MAY01-C9805_1.pep
VFHTINLCVRKRRELFFFSLVRSKQFEWFWFLLFENLSPFFLLLPASLNPFLLIICLLNQNLIFGFVFHQYLANGSKANLDKDFFKSQVFSETRSRFFFFSFPSALLI

SEQ ID NO: 71560 - protein, 352 aa, Gossypium hirsutum
  unsure (1)..(352): unsure at all Xaa locations
  Clone ID: GOSHI-09MAY01-C9835_2.pep
MGAFHRLNLLHFTLSLVVIAVNGHNITAILEGFPDYSVYNSFLTQTKLADEINTRETITCLVLNNGAMSALTSKHPLSVVKNILSLHVLLDYYDPQKLHKISDGTTLTTTLYQTTGNAPGNLGFVNITDLQGGKVGFGSAIPGSKLDSSYTKSVKQIPYNISILEISAPVIAPGILTAPAPSSSGVNITGLLEKAGCKTFASLLTSSGVLKTYESALDKGLTVFAPSDEAFKAEGVPDLSKLTNAEQVSLLEYHASPDYTPKGTLKTTKDPISTLATNGAGKYDLTVTTAGDXMTLHTGVGPSRVAEAVFDSPPVAIFTVDNVLLPSELFGMSPSPAPAPEPVFLALPTPFL

SEQ ID NO: 71561 - protein, 249 aa, Gossypium hirsutum
  unsure (1)..(249): unsure at all Xaa locations
  Clone ID: GOSHI-09MAY01-C9835_1.pep
KNRLQTFASLLTSSGMLKTYKSAPRVRPPVRAPSDEAFKAEGVRGLSKLTNAEQVSLLEYHASPDYKPKGTLKTTKDPISTLATNGAGKYDLTVTTAGDXMTLHTGVGPSRVAEVVFDSSSVAIFTVDNVLLSSELFDKSPSSAPALEPVSSPSPTPYLSPSPSPMSKAASPLTASPRAPPTGTPVGSPADAPTGLLENNTSNNAAGHVSDSLLGTIIFTVFATVFFVTPLPHRNRVRGITGAYRIIIN

SEQ ID NO: 71562 - protein, 349 aa, Gossypium hirsutum
  unsure (1)..(349): unsure at all Xaa locations
  Clone ID: GOSHI-09MAY01-C9585_1.pep
FWRPSNPENWEEWFQGTADAVRQFVWVFEDAKAKDVEHVLILSGDHLYRADYMDFVQKHIDSNADITVSCLPMDDSRASDYGLMKIDGTGRIVQFAEKPXGPNLKAMQVDTSILGLSAQDAARYPYIASMGVYVFKTSVLLKLLTRSYPSCNDFGSEIIPSAVKEHNVQAYLFSDYWEDIGTIKSFFDANLALTEQPPLFEFYDPKTPFYTSPRFLPPTKVDECKIVDSIISHGCFLRECSVQHSIVGVRSRLESGVVLQDTMMMGADYYQTESEIASLLAEGKVPIGVGQNTKIKNCIIDKNAKIGKDVIISNTDAVEEAERPEDGFYIRSGITVIMKNATIRDGTVI

SEQ ID NO: 71563 - protein, 76 aa, Gossypium hirsutum
  Clone ID: GOSHI-09MAY01-C9555_1.pep
MDKAKLSEWGEKLRTGGAQMGRMVSGKMKEILQGPTSEWKVVDEATSETLEEPNWGLNMKICAMINSEEFNGTEIV

SEQ ID NO: 71564 - protein, 102 aa, Gossypium hirsutum
  Clone ID: LIB3493-060-P1-M1-E3.pep
MSSTSSYWCYSCTRLVRVVVLDSGSNDAVVCPYCDGGFIEEIESSDNHNRRFPAMYMITSNDNSRQNSNRARNLVFRRNRRGSVDRSNINPIIVLLGSTDDE

SEQ ID NO: 71565 - protein, 92 aa, Gossypium hirsutum
  Clone ID: LIB3166-015-P1-K1-H9.pep
MSSTSSYWCYSCTRLVRVVVLDSGSNDAVVCPYCDGGFIEEIESSDNHNRRFPAMYMITSNDNSRQNSIRARNLVFRRNRRGSSMMTDLGPV

SEQ ID NO: 71566 - protein, 136 aa, Gossypium hirsutum
  Clone ID: GOSHI-09MAY01-C9505_1.pep
MSCSLALSNSLVLSPPMSLCRDNTPSVSPSPEAVNLSLTHLKPSSSPSSPCSPFRLRLQKPPSGSLLSSSVSTSASSSDSGSTAGLGPRSASAILKRKRPTRLDIPMGHDGVAFWGPATPCEVMREVERRGMWIFC

SEQ ID NO: 71567 - protein, 118 aa, Gossypium hirsutum
  Clone ID: GOSHI-09MAY01-C9415_1.pep
MGTAQSREDRITDSESDEGYEEEEEEEEEQYDDALSDHQNTQSSSSTSTSSGTQKSLDDIDAKLKSLKLKYNSQQSSPNLKNPVKLYLHIGGNTPKAKWVISEKLTSYSFTKEMGDMM

SEQ ID NO: 71568 - protein, 144 aa, Gossypium hirsutum
  Clone ID: GOSHI-09MAY01-C9425_1.pep
MASACFSTSPSSLRFSSLLFSPNSSTNVDSNKLSLPFHPLRPRKLKKFLSNQKNAVNYQPKAVYAGEFWAPPTTSRQGIWSIRDDLQVPASPYLLAYAQGQGPPPMVQERFQSVVSQLFQHRIVRCGGAVDDDMANIIVAQLLY

SEQ ID NO: 71569 - protein, 117 aa, Gossypium hirsutum
  Clone ID: GOSHI-09MAY01-C9675_1.pep
MAFAESQNPLRVYRIPQSRYIDSVRWLSPVSPSDRFAAIAYFDADTNSPSIEIAYVDPNPQSSSPTLTPQSSWTSPSRISSLRTAHSTPQPLLAAATFSGSLHILASDLINGGVMES

SEQ ID NO: 71570 - protein, 53 aa, Gossypium hirsutum
  Clone ID: GOSHI-09MAY01-C9635_2.pep
TLMSTAREMMKEEMFGKLKELGNSVLGRFGMSIDNFKAVKDPNPGSYSISFQN

SEQ ID NO: 71571 - protein, 82 aa, Gossypium hirsutum
  Clone ID: GOSHI-09MAY01-C9635_1.pep
LLFDELETLYSSSSEDAGFNDFAISSSSLSERFFFLFYFLSMINENENEKKKRIKGTSTKIKGILIWGFWEIDLRINNWEKF

SEQ ID NO: 71572 - protein, 84 aa, Gossypium hirsutum
  Clone ID: LIB3166-016-P1-K1-E3.pep
SWECHHKQVADFGLSREEMVDKHAANIRGTFGYLDPEYISTRTFTKKSDVYSFGVLLFELIAGRNPLQGLMEYVELVRSLFLLC

SEQ ID NO: 71573 - protein, 103 aa, Gossypium hirsutum
  unsure (1)..(103): unsure at all Xaa locations
  Clone ID: uC-gsflnu33B066d03b1.pep
RGLEYLHDGAVSPVIHRDIKSSNILLDQSMRARVADFGLSREEMVDKHAANIRGTFGYLDPEYISTRTFTKKSDVYSSGASLFELIVGRNPXQGLMEYVELAP

SEQ ID NO: 71574 - protein, 193 aa, Gossypium hirsutum
  Clone ID: GOSHI-09MAY01-C9145_1.pep
LPFDEQKKSIYLGETYSVLVYGDHHHRCNYWITSNIVGRSAPNTPPGLGVFVYYPNHPRRSPPTTPPPPPLWNNTDPRLAQSHAIKARQGYIHTPPSRSDRVIVFLNTQNTINGNVRWSVNNVSFALPHTPYLIALKENLTHVFDQTPPPDGYDFQNYDIRIVQENRNATSSNGVYRLNFNSTVDIILKMPTS

SEQ ID NO: 71575 - protein, 103 aa, Gossypium hirsutum
  unsure (1)..(103): unsure at all Xaa locations
  Clone ID: AI054801.1.pep
RRSPPTTPPPPPLWNNTDPRLAQSHAIKARQGYIHTPPSRSDRVIVFLNTQNTINGNVRWSVXNVSFALPHTPYLIALKXNLPMGFDQTPLPDGYRFQIWISE

SEQ ID NO: 71576 - protein, 304 aa, Gossypium hirsutum
  unsure (1)..(304): unsure at all Xaa locations
  Clone ID: GOSHI-09MAY01-C9175_1.pep
MGVKSFVEGGIASIVAGCSTHPLDLIKVRMQLQGESHVPNPAVQTLRPALAFQTTTTTTSSAIHMPPPPARVGPVATGIKIFRTEGVAALFSGVSATVLRQTLYSTTRMGLYDILKQKWTDKETKTMPLSRKITAGLIAGGIGAAVGNPADVAMVRMQADGRLPVSQRRNYTSVVDAITRMTKQEGVTSLWRGSSLTVNRAMLVTASQLASYDQIKEMILENGLMKDGLGTHVAASFSAGFVAAVASNPVDVIKTRVMNMKVEAGQKPPYAGALDCAIKTGKSEGPMALYKXFIPTISRQGTIY

SEQ ID NO: 71577 - protein, 72 aa, Gossypium hirsutum
  Clone ID: LIB3166-019-P1-K1-H4.pep
AVMSASSAGLLACRLMCSCIRSLIRSWLWVEVPAVVEYMLHCTNPFAPIAALSKKISTQIFKNFTKISLQIN

SEQ ID NO: 71578 - protein, 128 aa, Gossypium hirsutum
  Clone ID: GOSHI-09MAY01-C9135_1.pep
MCRGSKSELGPSNFTMEGELQEHKIGALCKCSLLLELAASNDLVAFKNEVEEKGLDLGEASLWYGRRIWSRKMGFEERTPLIIASMFGSVDVLKYIIGSGKIDVNDACGTDGATALHCAVAGGSDSLV

SEQ ID NO: 71579 - protein, 147 aa, Gossypium hirsutum
  Clone ID: GOSHI-09MAY01-C9125_1.pep
MVFSSFLRITQFRNRLLYSFLNHSLKTQKKNLGFLFIFFVAGNMFGSPEKPMFKRTCSLLSQYLKEKGSFGDLTLGITCSHNVEKGMPEIVRPATETRTTTMDLFPQGAGFSADNGSRRVGVDVDPQNAAAPMTIFYCGQVIVFNDF

SEQ ID NO: 71580 - protein, 136 aa, Gossypium hirsutum
  Clone ID: LIB3166-010-P1-K1-D3.pep
PRVRHLFLVLLKITSLKKKCWAFSRRIQPPLHFFSSFLRITQFQNRLLYSFLNHSLKTQKKNLGFLFPQGAGFSADNGSRRVGVDVDPQNAAAPMTIFYCGQVIVFNDFPADKAKEIMALASKCSSENPNTNTFVP

SEQ ID NO: 71581 - protein, 274 aa, Gossypium hirsutum
  unsure (1)..(274): unsure at all Xaa locations
  Clone ID: GOSHI-09MAY01-C9095_1.pep
WPKNCLSMSDPDLXPLLVQEXYINYRPSSIGKDDSGIKRMNSIARAAESIGDGDIINVQIRRYRQWQLSQTSALSSCIIPAALLHGQRETLEQGERNFNRFGGWLGKNSTMGKNXRLLEDFHVHFLASRESCSGRETLRLEYLPILLKRLTDPLRDMPKDEAVKQVLEFMNAYSISQEDFDTIVELSKFQGYPNPMEGIPSAVKAALTKAYKEGSKTRIIRAADLVTLPGMKKAPKKRIAAILEPSDDVLRXENGDELPENDENTSDSEDFEGT

SEQ ID NO: 71582 - protein, 148 aa, Gossypium hirsutum
  unsure (1)..(148): unsure at all Xaa locations
  Clone ID: GOSHI-09MAY01-C9075_15.pep
MKVLSPILACLALAVVASHAALSXPEQYWSYKLPNTPMPKAVKEILHPELMEEKSTSVNVGGGGVNVNTGKGKPAGGTHVNVGRKGVGVNTGKPGGGTHVNVGGKGVGVNTGKPGGGTHVNVGGKGGGVSVHTGHKGKPVNGNVSPFL

SEQ ID NO: 71583 - protein, 178 aa, Gossypium hirsutum
  unsure (1)..(178): unsure at all Xaa locations
  Clone ID: GOSHI-09MAY01-C9075_11.pep
FFGLKAWTNAVNGGGDVWNNEHRFKIVRYLGEGGFAYVHLPRVRPPDSASRVRPRVRLAKKVKDPSHLSDDGTYAMQKVLVQNXEQLELVREEIRVSSLFSHPNLLSLLDHEAYLLFPVHLDGTLLDNSNAMKAKKEFFSTSDVLQIFRQLCAGLKHMHGLVPPYAHNDVMPGNVILT

SEQ ID NO: 71584 - protein, 224 aa, Gossypium hirsutum
  unsure (1)..(224): unsure at all Xaa locations
  Clone ID: GOSHI-09MAY01-C9075_8.pep
MKVLSPILACLALAVVASHAALSPEQYWSYKLPNTPMPKAVKEILHPELMEEKRTSVSVGGGGVNVNTGKGKPGGGTHVNVGRKGVGVNTGKPGGGTHVNVGRKGVGVNTGKPGGGTHVNVGGKGVGVNTGKPGGGTHVNVGGKGGRVSVHTGHKGKPVNVNVSPFVYNYAASETHIHEDPNVALFFPDKDLHPGXTMILHFTDHTEKSPFLPYQTAQKIPFFI

SEQ ID NO: 71585 - protein, 171 aa, Gossypium hirsutum
  Clone ID: GOSHI-09MAY01-C9075_6.pep
MGCSFSGLNALYDAVNGGGDVWINDNRFRIVRQLGEGGFAYVYLVKEVISDASSASSVGLAKKVKDPSHLSDDGTYAMKKVLVQNNEQLELVREEIRVSSLFSHPNLLSLLDHAIIAIKPTQEGSWNHEAYLLFPVHLDGTLLDNSNAMKAKKEFFSTSDVLQIFQQLCAG

SEQ ID NO: 71586 - protein, 136 aa, Gossypium hirsutum
  Clone ID: GOSHI-09MAY01-C9075_5.pep
MNHLEECKAYNPQHLQQEEMAASAGAMDGLAASALRSVLQRVHQTAERCGRESQRIHVVAVSKTKPVSVIRQVYDAGHRCFGENYVQEIVEKAPQLPDDIEWHFIGNLQSNKVKPLIAGVPKPAIVETVDDEKDAI

SEQ ID NO: 71587 - protein, 345 aa, Gossypium hirsutum
  unsure (1)..(345): unsure at all Xaa locations
  Clone ID: GOSHI-09MAY01-C9075_4.pep
MGCTFSGFNAMYDAANGGGDVWINDIRFKIVRQLGEGGFAYVYLVKEVTSDSSSISAGGLAKKVKDPSHLSDDGTYAMKKVLIQNNEQLELVREEIRVSSLFSHRNLLPLLDHAIISVKPTQEGSWNHEAYLLFPVHLDGTLLDSFKAMSAKNDFFSTSDVLQIFRQLCXGLKHMHGLEPPYAHNDVKPGNVLLTRRKGQAPLAILMDFGSARPARKQIRSRSEALQLQEWASEHCSAPFRAPELWDCPSDADIDERTDIWSLGCTLYAIMYGVSPFEYALGESGGSLQLAIINAQIKWPAGPKPPYPEALHQFVTWMLQPQAAVRPQLDDIIGHVDKLISKFSQ

SEQ ID NO: 71588 - protein, 315 aa, Gossypium hirsutum
  Clone ID: GOSHI-09MAY01-C9075_3.pep
MPLHSAVALFYAAASLFAIAGAEDPYRFYSWNVTYGDIYPLGVRQTGLLINGQFPGPDIHSVTNDNLIINVYNNLNESFLLSWNGVQQRRNSYEDGVFGTTCPIPPGKNFTYMLQVKDQIGSFYYYPSLGFHKAAGGFGGIRILSRPRIPGPLPDPAGDYTVLIGDWYKSNHTVLQAHLDGRTRRPFPDGVLINGRGPGGASFNVEQGKTYRLRISNVGLQNSLNFRIQNHRLTLVEVEGTHTLQTTYSSIDLHLGQSCSVLFTADQPAQDYYIVASTRFTNPVLTTTATLRYSNSAGPVSGPPPGGPTIQIDWF

SEQ ID NO: 71589 - protein, 327 aa, Gossypium hirsutum
  Clone ID: GOSHI-09MAY01-C9075_2.pep
GSNVGLQNSLNFRIQNHRLTLVELEGTHTLQTTYSSIDLHLGQSCSVLFTADQPAQDYYIVASTRFTNPVLTTTATLRYSNSAGPVSGPPPGGPTIQIDWSLNQARSIRTNLTASGPRPNPQGSYHYGLINTTRTIRLANSAGQVNGKQRYAVNSVSFVLPDTPLKLADYFKIGGVFRPGSISDNPYGGGIYLDTSVLNADYRAFVEIVFENTENIIQSWHLNGYSFFVVGMDGGQWTAASRNGYNLRDAVARCTTQVYPKSWTAIYVALDNVGIWNLRSEYWARQYLGQQLYLRVYTDSTSLRDEYPIPKNALLCGRAAGRSTRPL

SEQ ID NO: 71590 - protein, 335 aa, Gossypium hirsutum
  Clone ID: GOSHI-09MAY01-C9075_1.pep
MKVLSPILACLALAVVVSHAALSPEQYWSYKLPNTPMPKAVKEILHPELMEEKSTSVNVGGGGVNVNTGKGKPGGDTHVNVGGKGVGVNTGKPGGGTHVNVGDPFNYLYAASETQIHEDPNVALFFLEKDMHPGATMSLHFTENTEKSAFLPYQTAQKIPFSSDKLPEIFNKFSVKPGSLKAEMMKNTIKECEQPAIEGEEKYCATSLESMIDYSISKLGKVDQAVSTEVEKQTPMQKYTIAAGVQKMTDDKAVVCHKQNYAYAVFYCHKSETTRAYMVPLEGADGTKAKAVAVCHTDTSAWNPKHLAFQVLKVEPGTIPVCHFLPRDHIVWVPK

SEQ ID NO: 71591 - protein, 170 aa, Gossypium hirsutum
  unsure (1)..(170): unsure at all Xaa locations
  Clone ID: uC-gsflnu33B082h02b1.pep
SFTAQSHAPTGGITITDGGDPYRFYRWNXTYGDIYPLGGRQTGLLINGQFPGPDIHSVTNDNLIINVYNXLNESFLLSWNGVQQRRNSYEDGVFGTTCPISPGKNFTYMLQVKDQIGSFYYYPSLGFHKAAGGFGGIRILNRPRIPVPFPDPXGDYTVLIGDWYKSNHTV

SEQ ID NO: 71592 - protein, 145 aa, Gossypium hirsutum
  Clone ID: uC-gsflmaxxa097e09b1.pep
MGCSFSGLNALYDAVNGGGDVWINENRFKIVRQLGEGGFAYVYLVKEVVSDSSSALASGLAKKVKDPSHLSDDRTYAIKKVLIQNNEQLDLVREENRVSSLFSHPNLLPLLDHFIISVKPTQEGSWNHEAYLLFPVNLDGTVLGQ

SEQ ID NO: 71593 - protein, 66 aa, Gossypium hirsutum
  Clone ID: uC-gsronu33B019f07b1.pep
SWTAIYVALDNVGIWNLRSEYWARQYLGQQLYLRVYTDSTSLRDEYPIPKNALLCGRAAGRSTRPL

SEQ ID NO: 71594 - protein, 183 aa, Gossypium hirsutum
  unsure (1)..(183): unsure at all Xaa locations
  Clone ID: AI726957.1.pep
MKVLSPILACLALAVVVSHAALSPEQYWSYKLPNTPMPKAVKEILHPAHFGVFAELMEEKSTSVNVGGGGVNVNTGKGKPGGDTHVNVGGKGVGVNTGKPGGGTHVNVGDPFNYLYAASETQIHEDPNVALFFLEKDMHPGATMSLHFTENTEKSAFLPYQTAQKIPXSSDKLPEIFNKFSVK

SEQ ID NO: 71595 - protein, 77 aa, Gossypium hirsutum
  unsure (1)..(77): unsure at all Xaa locations
  Clone ID: AI726682.1.pep
CPVPNAVWEMLHPELMEEKSTSVDVGGGGVNVNTXKGKPGGDTHVNVGGKGIGVNPGNPXGGSQVNYPNPYSSHSEY

SEQ ID NO: 71596 - protein, 180 aa, Gossypium hirsutum
  unsure (1)..(180): unsure at all Xaa locations
  Clone ID: AI726131.1.pep
MKVLSPILACLALALVVSHAALSPEQYWSYKLPNTPMPNAVKXILHPELMEEKSTSVNVRCGGVNVNTGKGKPVGDTHVNVGRKXVGMNTGKPAGGTHVNVGDPLNYLYASSETQIHEDPNVALSSLENDIHPGATMIPHXPENTDKSXFLPYHTAPKITFFSHNLPKIFNHFSTEILHL

SEQ ID NO: 71597 - protein, 107 aa, Gossypium hirsutum
  unsure (1)..(107): unsure at all Xaa locations
  Clone ID: uC-gsflnu33B076h08b1.pep
RKSAKPTTHNIYNKKRWQLPRWLWTDWLHPLSAPFSRESTRPPSGVVVQFPGPEMHPVTNDNLIINVYNXLNESFLLSWNGVQQRRNSYEDRLFGTSCPIPPGMNFT

SEQ ID NO: 71598 - protein, 69 aa, Gossypium hirsutum
  Clone ID: LIB3197-019-Q1-M1-F7.pep
MNYIVSYWSYKLPNTPMPKAVKEILHSELMEEKSTSVNVGGGGVNVNTGKGKPGGDTHVNVGGKGVGVN

SEQ ID NO: 71599 - protein, 52 aa, Gossypium hirsutum
  Clone ID: LIB3189-006-P1-K1-G3.pep
MFYSVGCLALAVVVSHAALSPEQYWSYKLPNTPMPKAVFEILHPELMEEKST

SEQ ID NO: 71600 - protein, 203 aa, Gossypium hirsutum
  Clone ID: GOSHI-09MAY01-C9385_1.pep
MQRAVRAFSVHGNTVKNAILHRIRVVNPVIRPVMFSRSLTSASMEEHGFESTTISDVLKAKGKGADGSWLWCTTDDSVYDAVKSMTQHNVGALVVVKPGEQKSIAGIITERDYLRKIIVHGRSSKSTKVGDIMTEENKLITVTPETKVLQAMQLMTENRIRHIPVINEKEMVGMVSIGDVVRAVVSEHRAELDRLNAYIQGGY

SEQ ID NO: 71601 - protein, 125 aa, Gossypium hirsutum
  unsure (1)..(125): unsure at all Xaa locations
  Clone ID: LIB3166-013-P1-K1-G3.pep
LNTLSSWLWCTTGESVSDAGKSMTQHNVGALVVVKPGEQKXIAGIITERDYLRKIIVHGRSXKSTKVXDIMTEENKLITVTPETKVLQAMQLMTDNRIRHIPVINEKEMVGMVXIGDVVRAVVSE

SEQ ID NO: 71602 - protein, 113 aa, Gossypium hirsutum
  unsure (1)..(113): unsure at all Xaa locations
  Clone ID: GOSHI-09MAY01-C9365_2.pep
PNVDLEAIANMTDGYSGSDLKNLCVTAAHCPIREILEKEKKERALAAAESRPLPSLYNSADIRSLEMDDFKYAHEQVCASVSSESTXMNELLQWNELYGEGGSRKKKLLSSFM

SEQ ID NO: 71603 - protein, 286 aa, Gossypium hirsutum
  Clone ID: GOSHI-09MAY01-C9365_1.pep
GKTMLAKAVATEAGANFINISMSSISSKWFGEGEPSRPAVFSLASNIAPSVIFVGGVDSMLGRPENPGEHEAMRKMKNEFMVNWDGLRTKDKERVLVLAATNRPFDLDEAVIRRLPRRLMVNLPDAPNREKILRVILAKEDLSPNVDLETIANMTDGYSGSDLKNLCVTAAHCPIREILEKEKKERASAAAENRPAPTLYSSADVRPLKMDDFKYAHEQVCASVSSESTNMNELLQWHELYGEGGSRKKKPLSYFMLRRGGIFVYRRSFIIPFSFHSSLAPLRWPS

SEQ ID NO: 71604 - protein, 69 aa, Gossypium hirsutum
  Clone ID: GOSHI-09MAY01-C9335_1.pep
KWSTSCPVPFYIVRDFRFKFQARGSSAKSITLLTAFGIYKVAFWNYGMCRLQYIFGNVEFGYVIKAMLI

SEQ ID NO: 71605 - protein, 74 aa, Gossypium hirsutum
  Clone ID: LIB3166-013-P1-K1-B8.pep
DAWVNIPFSLFFRSQRLQERIWAMNPSRSRTKEIKFRSGKNESGRLVALFHFTSSEILDSSFKLGDRQQSLSHY

SEQ ID NO: 71606 - protein, 149 aa, Gossypium hirsutum
  Clone ID: GOSHI-09MAY01-C4965_1.pep
MKTQKFSNFINAFQLIAMSHDLDLSGLFEGQDGKRQRTTIGSKHTVNETIKKIEAAAMDVSLSVERMNSFKVIVVAPTNCVVEISKSAGEIAVYKEFCKSLSSLLIEKSDASSQIQGSKTVTNSTSILMNECSKEEKDRTEDQRGYFSS

SEQ ID NO: 71607 - protein, 141 aa, Gossypium hirsutum
  unsure (1)..(141): unsure at all Xaa locations
  Clone ID: GOSHI-09MAY01-C4935_1.pep
MDPSRISLRRFHLPDVDDFLKWASDDKVTRYLRWNTITSREEALSYLQKVAIPQTYRRSICLDDRSIGYVSIKPGSGNDKSRARLGYAVSAGYRGQGIATAALKRAVANAFTEFQGLVRXEALVEVENVGSQRVLEKVGFL

SEQ ID NO: 71608 - protein, 148 aa, Gossypium hirsutum
  unsure (1)..(148): unsure at all Xaa locations
  Clone ID: GOSHI-09MAY01-C4925_1.pep
MEALVSEFTFLXDQALQDKNFDPSTIEDLMKLFEIESYKAWAAMELEQEEEVKEAETSRQQAEGYLDSVMEAAMDEFRRLEEEXMERMAKAELKDLEDTADKARKMGNLMEKAAAIASKKYVEAALNSATASMKSAWKGLSSKKVHPS

SEQ ID NO: 71609 - protein, 147 aa, Gossypium hirsutum
  Clone ID: GOSHI-09MAY01-C4885_2.pep
MFKMAGVKRRIITDLDVRALHKELDEVSCPICMDHPHNAVLLLCSSHDKGCRSYICDTSYRHSNCLDRFKKFRANSSNGSQNLNETNSMAGGSEDNIREPTRNLDSQGEGIIEIADSYSFRGRSESEDVDAENFKSSLKCPLCRGNV

SEQ ID NO: 71610 - protein, 377 aa, Gossypium hirsutum
  Clone ID: GOSHI-09MAY01-C4885_1.pep
MFQMAGVKRRIITDLDVRALHKELDEVSCPICMDHPHNAVLLLCSSHDKGCRSYICDTSYRHSNCLDRFKKLRANSSKSPILPHPFPLNPPNSSAFDLNLALRTDFVEGNGSQNLNETNSMAGGSEDNIRESTRNLDSQGEGIIEIADSYSFRGRSESEDVDAENFKSRLKCPHCRGNVLRWEVVEEARKYLNSKKRTCSRESCSYSGSYQELRRHARRVHPTIRPSDIDPSRERAWRRLEHQREYGDIVSAIRSAMPGALVVGDYVIENGDRLAARRENSTGEASSPWWTTFFLFQIGSVDNVGESRARSRVWSRHRHPGGAVSERRFLWGENLLGLQDDDDEDDVRVISDVGEDASPSPRRRRRLTRSRSDEDQS

SEQ ID NO: 71611 - protein, 114 aa, Gossypium hirsutum
  unsure (1)..(114): unsure at all Xaa locations
  Clone ID: AI054903.1.pep
KQVPRTYESYRCSQFPNSRFNFPPPGRFSILXSXSQNXPXHVIQNPNPSHNSPKXSTPNLPXKRFLFIRINDPTTSVMNYRQKIKAPYWSYNRDQSVHQSKNKKAKNMKNNLTN

SEQ ID NO: 71612 - protein, 221 aa, Gossypium hirsutum
  Clone ID: GOSHI-09MAY01-C4815_1.pep
TLCSSKTERKNVANSRQVMESLCNVSRSSDDWQNMAIDCLLLLLKDPETRYGVIDIAASSLVDLVELRSLGESKMVGETISQTLLQDYYKIKFGFLKLKSQEAEKALEELWELRVENIKRDKLMSEQDMKERQALVGKLKKQGNQKFWTGKIEKACKPYSKALELCPLNFRKERIVLYSNRAQCYLLLKNPAAAINDTTRALCLSGTVSPHSKSLWRRSQA

SEQ ID NO: 71613 - protein, 429 aa, Gossypium hirsutum
  Clone ID: GOSHI-09MAY01-C4805_1.pep
LAATREVQSLVKFYETTNKAVAAVVHNLQKDLEDTRRVSEKAIEERDVCQSRVFKLESDVEALEESYREVTHKIDDYQAKEDIWKEKEVELLSLYNNMSMKEKEAKEPLLSATQLRTLLDKLSVIEIPLVESEDLEPHSSTDVKKLFSIINSFAELQNQINLLSYEKDELQSMLSQQSFEIEHLKEEIERHVRNKPELEGMKMELPEATFGLEKIIVGLGGKELIGSPNSVGMRALLPVLEKQVNALLLVAESSKSRAQELGTKLLGSQNAVDELLTKVKLLEDSLQGRTIQPEVVQDRSIFEAPSASTGSEISEIEDVGSHVKKTVSPVPSAAHVRIMQKGSADHLALNIDSETDRLINSEETDEDKGRMFKPLNTTGLIPKQGKSIADRVDGIWVSGGRVLSSRPRVRLGLIAYCLLLHLWLLGTIV

SEQ ID NO: 71614 - protein, 147 aa, Gossypium hirsutum
  unsure (1)..(147): unsure at all Xaa locations
  Clone ID: GOSHI-09MAY01-C4835_3.pep
MYHPQVPGEPTQTTTSLVETATGAIQSFRPIKQIHQHLCAFHFYGGDMTRQVEAHHFCAHQNEEMRQCLIYDTPEADAKLIGLEYIISENLFLTLPDEEKPLWHSHLYEVKSGVXLFMPRVPGPIERQDLDKVCQTYGETIHFWQVD

SEQ ID NO: 71615 - protein, 156 aa, Gossypium hirsutum
  unsure (1)..(156): unsure at all Xaa locations
  Clone ID: GOSHI-09MAY01-C4835_2.pep
TTTSLVETATGAIQGFRPIKQIHEHLCAFHFYGYDMTRQVEAHHFCAHQNEEMRQCLIYDTPEADAKLIGGEYMISEXLFLTLPDEEKPLWHSHLYEVKSGVLFMPRVPGPIERHGLDKVCKTYGKTIHFWQVDKGDNLPLGLPQLMMALTRDGQL

SEQ ID NO: 71616 - protein, 261 aa, Gossypium hirsutum
  Clone ID: GOSHI-09MAY01-C4835_1.pep
HASAHASAHASAHASAHASAHASGNHKAMSNHAQVPGEPTETTTSLVETATGAIQGFRPIKQIHEHLCAFHFYGYDMTRQVEAHHFCAHQNEEMRQCLIYDTPEADAKLIGLEYMISENLFLTLPDEEKPLWHSHLYEVKSGVLFMPRVPGPIERHGLDKVCKTYGKTIHFWQVDKGDNLPLGLPQLMMALTRDGQLDEELGRDVEKRFGVSFEKERAKRAELTGPTHGIHPLANGGGKGLIPKLREVDCKPADSVPRVFV

SEQ ID NO: 71617 - protein, 154 aa, Gossypium hirsutum
  Clone ID: GOSHI-09MAY01-C4535_2.pep
MTLGLINANPVVHAKKERVVRNEDPHGDDAVDPLEIYDFVRDIRDPEHPYSLEQLSVLSEESITVDEKLGRILITFTPTIQHCSMATVIGLCLRVKLKECFPPHFKVDIKVAPGSHADEESVNKLLNDKERVAAALENPTLRQLVDECLYSNEL

SEQ ID NO: 71618 - protein, 70 aa, Gossypium hirsutum
  Clone ID: AI732021.1.pep
MATVIGLCLRVKLKECFPPHFNENIKVAPGSHADEESVNKLLNDKERVAAALENPNLRQLVDECLYSNEL

SEQ ID NO: 71619 - protein, 67 aa, Gossypium hirsutum
  Clone ID: GOSHI-09MAY01-C4445_2.pep
RDKLPGQHKKEGEVTSPPPAAAAPTENDHHEGETKEKKGFLEKIKEKIPGYHSKTEDEKEKETTAPH

SEQ ID NO: 71620 - protein, 214 aa, Gossypium hirsutum
  Clone ID: GOSHI-09MAY01-C4445_1.pep
VAFSILVLSLVVVDKEKMAEEHTKVGGEEAVESKERGMFDFLGKKEDEKPQPQEEVVATQFEKVKIEEEHKEDEKKHSLLDKLHLSNSSSSSSSDEEEGEGGEKKKKKKKEKGKKEQDSAVPVEKCDEVATVHHSETPEKKGFMDKIKDKLPGQHKKDEEDTTQPPAAAAPIENDHHEGETKEKKGFLVKIKEKIPGYHSKTEDEKEKETTAPN

SEQ ID NO: 71621 - protein, 103 aa, Gossypium hirsutum
  Clone ID: LIB3146-020-Q1-K1-G9.pep
VVFSILVLSLVVVDKEKMAEEHTKVGGEEAVESKERGMFDFLGKKEDEKPQPQEEVVATQFEKVKIDEVHKEDEKKHSLLDKAYLSNSSFSSVITFFYFLAYY

SEQ ID NO: 71622 - protein, 135 aa, Gossypium hirsutum
  Clone ID: GOSHI-09MAY01-C4415_2.pep
LGTVLSFDTKTGNCTKGYAGLCFSNVDLIASLTLNEKGDSLNASYYHIVNPMTNTAVGAEVTHSFSTNENTITIGTQHALDPLTMVKARVNNAGKASALIQHEWRPRSLITISGEVDTKSIDKSAKVGLALALKP

SEQ ID NO: 71623 - protein, 276 aa, Gossypium hirsutum
  Clone ID: GOSHI-09MAY01-C4415_1.pep
MGKGPGLYTEIGKKARDLLYKDYQTDQKFTLTTSSPTGVSITSAGTKKGDLFLADVNTQLKSRNVTTDIKVDTSSNLFTTITVDEPAPGLKAIFGFRVPDQRSGKIELQYLHEYAGISSSIGLTANPIVNFSGVLGTNVLALGTDISFDTKTGNFTKCNAGFSFTNADLIASLALNEKGDSVNASYYHIVNPSTNTAVGAEVTHSFSTNVNTITVGTQHALDPLTTIKARVNNAGKASALIQHEWRPKSLFTISGEVDTKSIDKSPKVGLALALKP

SEQ ID NO: 71624 - protein, 102 aa, Gossypium hirsutum
  Clone ID: LIB3197-060-Q1-M1-H8.pep
PTRPGDSVNASYYHIVNPSTNTAVGAEVTHSFSTNVNTITVGTQHALDPLTTIKARVNNAGKASALIQHEWRPKSLFTISGEVDTKSIDKSPKVGLALALKP

SEQ ID NO: 71625 - protein, 116 aa, Gossypium hirsutum
  unsure (1)..(116): unsure at all Xaa locations
  Clone ID: LIB3582-005-P1-K1-A7.pep
VDTSSNLFTTITVDEPAPVLNAIFGFRVPDQRSDKIELQYLHEYVGISSSIGLTVNPIVNFSAVLGTNVIALGTDIXFDMKTGNFTKCNAXLSFTNADLIASLALHVVMFYIPIYG

SEQ ID NO: 71626 - protein, 66 aa, Gossypium hirsutum
  Clone ID: LIB3493-002-P1-M1-H11.pep
YRKGPKPPKKGQPEDAVYDFEDKINFAVIPYLHGGPHNHQIGVLAVVLKQSMTICMSMLGLAQALD

SEQ ID NO: 71627 - protein, 81 aa, Gossypium hirsutum
  Clone ID: LIB3146-054-Q1-K1-A4.pep
LFTTITVDEPAPVLNAIFGFRVPDQRSDKIELQYLHEYVGISSSIGLTVNPIVNFSAVLGTNVIAQGTKLEIISFGMFSRR

SEQ ID NO: 71628 - protein, 353 aa, Gossypium hirsutum
  Clone ID: GOSHI-09MAY01-C4405_1.pep
GCYAILSGGLPRNLSPTVQFKSEYRSAGNLDSMPVRKATTNSLQQSDQPASSSTSFQMAGISKSEIQKAAAPKPTEKLMTSQVPVMSRPSSAPLVPGPRPTTLVSTVQTTPFLARSVSAAGRLGPDPSPATSYVPQSYRNAIMGNHVSSSSAGFTHPNSRSSGVNSLPAYSQPPALVSAPVYIPHTPDRIEPNSVQSGFPFGMVTRDTLPSAPQWLESSRRGGSRSTHSDPSLLSEIQNLDLYKSERNETQEHVFAELPACTSGYHSQGVLADEFPHLDIINDLLDEENNVGRAVRVGTGFRSLGNCSHLFLPAISFPSNLGMSGEMGSSNGACRFDRAHKFNDDGFRQGYST

SEQ ID NO: 71629 - protein, 82 aa, Gossypium hirsutum
  Clone ID: GOSHI-09MAY01-C4705_2.pep
SPIALHHYMMYIISLLKSMTGTSSSCFFKKLDLLRSKNCIKSLVGPPSSCCFKKLDLLRSKNCIIVCECHALPVSFEHNRIR

SEQ ID NO: 71630 - protein, 224 aa, Gossypium hirsutum
  Clone ID: GOSHI-09MAY01-C4705_1.pep
STRNGIPENIRAPGYNLVSQTSSILNFPMNHASELPVDSFSLRSTPGMSDHTSKGAFHEDFNSEIKGSGGFLPTYDVFNDYQYKSQNWELQNAGMILEDSQHSNSLQGNLDLAQSVLVQQGFPSGQINGQNRSVPIVSKAMFSAGDSTEPGNLLNVNHHLNTIRAENTVRVKSGSVADGNPSNLFADHFGQEDLMIALLKQQQGIAPAENEFDFDGYSLDNIPV

SEQ ID NO: 71631 - protein, 186 aa, Gossypium hirsutum
  Clone ID: GOSHI-09MAY01-C4735_1.pep
EEMEAKYHEKAMETGSLIVSACGFDSIPAEMGVMFNTKQWVAPAVPNHVTAYVSLESDKRIVGNFATYESAVLGVANMDKLQQLRHSRPKKPRPVIPGPRLPKGPTIEYQEKIGLRALKLPSADAVVVRRTLVTLMENPHGLPGINESPEHIGKREAYWSSVKPAHFGVNIASKYLLGIYRILGVG

SEQ ID NO: 71632 - protein, 283 aa, Gossypium hirsutum
  Clone ID: GOSHI-09MAY01-C4695_1.pep
MDKFPAFLLLPFLCFFHSLFLSDADVTGNSSDPGLTLSADSLCAQLIEPNGYFCTEHTIQTKDGYLLALQRVSSRSGDLKVQQGHPVLLQHGLFMAGDAWFLDSTEQSLGFILADQGFDVWVGNVRGTRWSHGHISLLNTDKEFWEWSWQELALYDLAEMLHYIHAITSSKIFIVGHSQGTIMSLAALTQPDIVEMVEAAALLSPISYLEHVSAPLVLRMVAMHLHQMVLALGLHQLNFRSDVLVNLVDSLCDDHVDCTDFLSSITGQNCCFNKTRMNFYLEY

SEQ ID NO: 71633 - protein, 276 aa, Gossypium hirsutum
  Clone ID: GOSHI-09MAY01-C4655_1.pep
MCVAIKDDEVDIVIGALRSDLTTFMNEWRPMFSRFHLSPVKDPDLKEELKIPEGFNLDVYGKPDIDQVVGSSTSILFSGYSCRYFGYLVSRKKYIISVDDDCLPARDPKGFLVDAVAQHISNLTNPATPFFFNTLYDPYAEGADFVRGYPFSLRGGVKCALSCGLWLNLADHDAPTQALKARQRNSRYVDAVMTVPARSLIPISGINIAFEREAVGPALVPALKLAGEGKCRWETMEDIWSGLCVKIVCDHLGLGVKTGLPYIWRTDRGDPIASLK

SEQ ID NO: 71634 - protein, 131 aa, Gossypium hirsutum
  Clone ID: GOSHI-09MAY01-C4185_2.pep
TQAPCFVVGNRPPAKIPVPLPPSRSTKSEESLSRPLQLSEQGRILEAAIEAAVNAVMGMRDSLNDWDSKVGDGDCGSTMYSGATAILDDMKKYYPLNDAAETVNEIGSSGRRAMGGTSGVLYNIFSKAAYA

SEQ ID NO: 71635 - protein, 208 aa, Gossypium hirsutum
  Clone ID: GOSHI-09MAY01-C4185_1.pep
ETNYVPITRGNRVVLMINGLGATPVMELMIAAGKTVPKLQLEFGLAVERVYTGSFMTSLDMAGFSISIMKADQTLLQRLDAPTKAPHWPVGSAGNRPPAKIPVPLPPSRSTKSEESLSRPLQLSEQGRILEAAIEAAVNAVMGMRDSLNDWDSKVGDGDCGSTMYSGATAILDDMKKYYPLNDAAETVNEIGSSVRRAMGGTSGVLYN

SEQ ID NO: 71636 - protein, 63 aa, Gossypium hirsutum
  Clone ID: LIB3583-005-P1-K1-H8.pep
VMTTNKRLRNDIIISTHCVPKIKSLCTLYVLCVNTNWPKVTASTRPRITNRNMDYTKKLLVLG

SEQ ID NO: 71637 - protein, 223 aa, Gossypium hirsutum
  Clone ID: GOSHI-09MAY01-C4125_1.pep
MEAFSLLKYWRGAGGGSNGCVNARSAATAGGTTTIVTAVSTRQVVDTDDDDDDDGPFFDLEFAVPDEDETEGSEEKKEEDEDGNIEGDESEEQSDGDDAKSDDGSSDGDDREFNFTLSSGSSSDPCDPNLTLSPSDDLFFKGRLVPIEANSCLESKPPQFPVSLLKSATKFRVFLLRFKKSKLNSTEKTESGSANGPVSVPTTAKKQKHPRENTTEQLFTVKF

SEQ ID NO: 71638 - protein, 508 aa, Gossypium hirsutum
  unsure (1)..(508): unsure at all Xaa locations
  Clone ID: GOSHI-09MAY01-C4095_1.pep
MEDFDIPAAEDMMNEDMDLPDDSPILKVGEEKEIGNQGLKKKLVKEGEGWEYPEIGDEVEVHYTGTLLDGTQFDSSRDRGTPFKFTLRQGQVIKGWDEGIKTMKKGENAIFTIPPALAYGESGSPPTIPPNATLQFDVELLSWTSVKDICKDGGLFKKILIEGDKWENPKDLDEVLVNYEAKLEDGTAVAKAEGVEFTVKDGLFCPALARAVKTMKKGEKVLLTVKPQYGFGEKGKPATGAEGAVPPNATLLITLELVSWKTVTEVTDDKKVIKKILKEGEGYERPNEGAVVQVKLIGQLQDGTIFLKKGHNEGEELFEFKTDEEQVIEGLDRAVLNMKKGEVALLTIAPEYAFGSSESKQELAVVPPNSTVYYEVELVSFVKEKESWDLNTQEKIEAAGKKKEEGNVLFKAGKYVRASKTYEKAVKYIDYDTSFSEEENKQSMALKVACNLNDAALQMKLKDFKQAEKLCSKAIDIYSGYVEALYRMAQXYINLAYLDLAVLDSCKL

SEQ ID NO: 71639 - protein, 123 aa, Gossypium hirsutum
  Clone ID: GOSHI-09MAY01-C4045_1.pep
MVSSHLSSLNGSRLHKGFQNQLLFPTGQPDTPTSDHLEFDFSDVFGPASVQASTEISTEIPKNLIVATESNELLYDDPAVICSRSHSLVGPSTYVSHSLKHSKLTLREIGDSLELVEGAREEA

SEQ ID NO: 71640 - protein, 71 aa, Gossypium hirsutum
  Clone ID: LIB3165-006-P1-K4-A7.pep
IQEALLHPQSPANRETRTTFSSGLWLACFQVSSEPLLHTLTFRCLRTLNSALEGRCIFELLYNYSLKGFLK

SEQ ID NO: 71641 - protein, 391 aa, Gossypium hirsutum
  Clone ID: GOSHI-09MAY01-C4035_1.pep
MEINRGVLIVVLIVVSSAGLGLAGDFVHQDDVAPKRPGCANNFVLVKVPTWINGLEDNEYVGVGARFGPTLESKEIHANHTRLALADPPDCCSKPRNQLTGEVILVHRGNCSFTMKAPRAREAGASAILIINNQTELFKMVCESDADVNIKIPAVMLPQDAGSNLENYINNNTRVSVALYSPKRPAVDIAEVFLWLMAVGTILRASYWSAWTAREVAIEQDKLLKDASEEFLQVGSAGSSGFVDINTMSAVLFVVFASCFLVMLYKLMSFWFVEVLVVLFCIGGVEGLQTCLVTLLSCFRCFQRFAESFIKVPFFGAVSHLTLAVCPFCITFAVVWAVYRRISFAWIGQDILGIALIITVLQIVRVPNLKVGTVLLGCAFLYDIFWVFVSK

SEQ ID NO: 71642 - protein, 211 aa, Gossypium hirsutum
  unsure (1)..(211): unsure at all Xaa locations
  Clone ID: LIB3583-003-P1-K1-C5.pep
MEINWDVFIVILVVVLSARLGSAGDIVHIDNVAPKRPGCSNNFVLVKVPTWIEGLEDNEYVGVGARFGPTLESKEKHASHTKLALADPPDCCSKPRNKLTGEVILVHRGNCSFTVKANVAEEAGASAILIINNQTELFKMVCESDADVNIKIPAVMLPQDAGSRLEKYITNTTMVSVALYSPKRPAVDIAEVFLXLMAVGTILCASYWSAW

SEQ ID NO: 71643 - protein, 88 aa, Gossypium hirsutum
  Clone ID: LIB3146-051-Q1-K1-G7.pep
FVHSSAGLGLAGDIVHQDDVAPKRPGCANNFDLVKVPTWINGLKDNEYVGVGARFGPTMESKEKHAHHPRLALADPPDCRSKPRNQVF

SEQ ID NO: 71644 - protein, 296 aa, Gossypium hirsutum
  Clone ID: GOSHI-09MAY01-C4385_1.pep
MLRIGFRNIINGFICRASLPQSFYNRELSTQTGRLKGKIALITGAASGIGKAAAAKFISNGAKVVIADIQHQLGQATANELGPNATFIPCDVTKESDVSDAVDFTISKHKRLDVMYNNAGVPCYTPPSIVDLDLAVFDRVMGINVRGVLAGIKHASRVMIPSRTGSILCTASVTGMMGGLSQHTYSVSKSAVIGIVKSMAAELCQYGIRINCISPFAVPTPFALDELSPIYPQIDAEQLVKMIHSFGGLGKATLEPGDVADAAVYLASDDAKYVSGHNLVVDGGFTSFKRLGLPKS

SEQ ID NO: 71645 - protein, 275 aa, Gossypium hirsutum
  Clone ID: GOSHI-09MAY01-C4285_1.pep
MSGGYPQHPPGYGYGSPPAQPYTAAPYTAGAPPPPQPYGTPYAAAPYGAPSAPYSAPPGEKPPKDKHQAHGVGGAPPVHSGSYPPAGGYASPFASLLPSAFPPGTDPNVVACFQMADQDGSGFIDDKELQRALSSYNQSFSLRTVRLLMYLFTNTNTRKIGPKEFTSVFYSLQNWRAIFERFDRDRSGKIDANELREALLSLGFSVSPGVLDLLVSKFDKTGGKNKAIEYDNFIECCLTVKGLTEKFKEKDAMYSGNATFTYEAFMLTVLPFLIA

SEQ ID NO: 71646 - protein, 176 aa, Gossypium hirsutum
  unsure (1)..(176): unsure at all Xaa locations
  Clone ID: LIB3189-042-P1-K1-E2.pep
LKTFRVTVPVPNQLSLTQPFNTQLEHRRHLNRTVLHTPLHHTGHLLLPYSXPFRRRKPPKGQKHQGAMXXSVVAXXPXSTSRKGYFLSRREGFMXEPXXAIFLLXXSAFSQTGEQGXLXRPLPGAFXNGXXSRMEGXXFIGXXKGGLQKGRFSFRINPKASSLRNWFGLPHGILFT

SEQ ID NO: 71647 - protein, 67 aa, Gossypium hirsutum
  unsure (1)..(67): unsure at all Xaa locations
  Clone ID: LIB3147-009-Q1-K1-C6.pep
ADQDGSGFIDDKELQRALSXYNQSFSLRTVRLLMYLFTNTNTRKIGQFPFPSTFIVTLSMLFGPNCN

SEQ ID NO: 71648 - protein, 225 aa, Gossypium hirsutum
  Clone ID: GOSHI-09MAY01-C4255_1.pep
MASKLCDSCKSATATLFCRADSAFLCSNCDSKIHAANKLASRHARVWVCEVCEQAPAHVTCKADAAALCITCDRDIHSANPLARRHERLPVTPFYDSVNSVPAVKPNGVVNFLEERYFSDVDGDADVSREEAEAASWLLPNPNHKAVDSPDVNSGQYVFSEMDPFLDLDYGHGDPKMDAQEQNSSGTDGVVPVQSKNVQAPSANDHCFDLDFTGSKSFSYGYNPN

SEQ ID NO: 71649 - protein, 109 aa, Gossypium hirsutum
  unsure (1)..(109): unsure at all Xaa locations
  Clone ID: LIB3165-023-P1-K1-E2.pep
RGGPTRPPTRPPTRPKRYLQANWVVEGASKLCDSCKXPTATVSCRAASAVLCSNWDSKIQPSNRLASRHARVWVCGVCEAAPAHVTCKADAXALCITXCDRDIHSGNPC

SEQ ID NO: 71650 - protein, 192 aa, Gossypium hirsutum
  unsure (1)..(192): unsure at all Xaa locations
  Clone ID: GOSHI-09MAY01-C4245_1.pep
MDNTSNDDFTFCKVGLPTDQNGLEEKNLAADIGGIAIKDETSNCSDSSKNGGFPWKDKHPNNSTFVDQATVGSLTFNVIDASCLKSSGESSRQVAYVDAGASAVKSEKPRSSTRKSAPRTKVPFEKGYSQMDWLKLSQTHPDLAGLKGQSNRRLVSMSEVKQNQKEGSMWTVLKGRVYNISPXMKFHPGGID

SEQ ID NO: 71651 - protein, 117 aa, Gossypium hirsutum
  Clone ID: LIB3828-006-Q1-K6-E1.pep
ILVSPRSMDNTSNDDFTFCKVGLPTDQNGLEEKNLAADIGGIAIKDETSNCSDSSKNGGFPWKDKHPNNSTFVDQATVGSLTFNVIDASCLKSSGIAIKDNPQTAAIVVRMVNHQDK

SEQ ID NO: 71652 - protein, 71 aa, Gossypium hirsutum
  Clone ID: LIB3828-006-Q1-N6-E1.pep
YRMIRFVPRAIATDLIASSTALTITIDNMAEYQEAVLQCLGAFAIIQSTNQTFFQQEFSVYPSMVFVLYTS

SEQ ID NO: 71653 - protein, 95 aa, Gossypium hirsutum
  Clone ID: LIB3148-038-Q1-K1-D3.pep
PTRPPTRPPTRPWLKLTQMHPDLAGLKGQSNRRLVSMSEVKQNQKEGSMWTVLKGRVYNISPYMKFHPGGVDMLMKAVGKDSTSLFSILFLFLKK

SEQ ID NO: 71654 - protein, 168 aa, Gossypium hirsutum
  Clone ID: GOSHI-09MAY01-C4275_2.pep
MTILSNALVGPTSLPFQLSSSGSHLKTAGGASPTNSSFNSNGLGKLHLSSSRRPVVTVQASYSDGERPSSASIFVGGFILGGLVVGALGCVFAPQISKAVAGADRKDLMKRLPKFIYDEEKALEKTRKILTEKIAQLNSAIDDVSAQLRSEDAPNGVAVNSDEIETAI

SEQ ID NO: 71655 - protein, 162 aa, Gossypium hirsutum
  Clone ID: GOSHI-09MAY01-C4275_1.pep
MTTLSNSLVLSTNPPLQLFSGSHGSASSTNLAFNSSHLRKLHISTSRRPLTVQASYSDGERSSSANAFVGGFVLGGLVVGALGCVFAPQISKALAVADSKDLMKRLPKFIYDEEKALEKTRKVLTEKIAQLNAAIDDVSGQLRSEDAPNGVAVNSDEIEAAI

SEQ ID NO: 71656 - protein, 130 aa, Gossypium hirsutum
  unsure (1)..(130): unsure at all Xaa locations
  Clone ID: GOSHI-09MAY01-C4265_1.pep
DEFGTEAAQFLSEETLGSSLQFKAVIEERDTSGRXGKVKGQGTGTCLVVTLFTEDPEDSINAAMLKDGLARLEKRKKWESKERKVMLNKLEECQEEAKTGRRGMWQYGDVESDDEDLLPPVAAKKTGGRR

SEQ ID NO: 71657 - protein, 137 aa, Gossypium hirsutum
  Clone ID: GOSHI-09MAY01-C4215_2.pep
MDDYTREMMDLKTLVTRTLEKKGVLAKIRAELRASVFEAIEEEDRVIEKEEGLPPALLRSCNDHAKRLHASPLGRLLTALICEYLDWAQLNHTLKVYLPECNLQKDSWKAELEDFSGKSGYDLNRNGNSGPVLLDVL

SEQ ID NO: 71658 - protein, 262 aa, Gossypium hirsutum
  Clone ID: GOSHI-09MAY01-C4215_1.pep
MDDYTREMMDLKTLVTRTLEKKGVLAKIRAELRASVFEAIEEEDRVIEKEESLPPALLGSCNDRAKRLHASPSGRLLTALVCEYLDWAQLNHTLKVYQPECNLQKDSWKAELKDFSVKNGYDLNRNGDNPVLMDVLDCFLKFENLTQARGSGRRSQEIESSSSSESRNTRRPSSSTVAGGLPPLGRPVPASQSSDRRAGSSMSGYRKEEYSWRYDDDLPEDVIRASAALENLQLDRKARNLTSSWRHAGDSVSGDDDKVDHM

SEQ ID NO: 71659 - protein, 174 aa, Gossypium hirsutum
  unsure (1)..(174): unsure at all Xaa locations
  Clone ID: GOSHI-09MAY01-C4235_1.pep
METIVFIILYVILFLSTLLSYPFLRKQKRGFPIERYKLPPGSMGWPYIGETLQLYSQGRHSLFLTEQNRYGEIFKXRKILGCPCAMLASPEAARFVLVTHAHLFKPTYPKSKEMMIGPWALFFHQGEYHTRLRKLVQYSLAPDTIRKLIPGIEHIALSALDSWAALFLLSWKWI

SEQ ID NO: 71660 - protein, 65 aa, Gossypium hirsutum
  Clone ID: LIB3583-006-P1-K1-E11.pep
SFIIQNFFSDPHDFDPSRFEVVAPKPNTFMPFGNGVHACPGNELAKLEALILIHHLVTKFRYISL

SEQ ID NO: 71661 - protein, 188 aa, Gossypium hirsutum
  Clone ID: GOSHI-09MAY01-C5915_1.pep
KEALACCGSSQFAKQMALASPFPSVDHAISVAKDIWFDKVDVIGWLEAFAAHPQIGESPSSHTTSAQWSKGEQSTALATATDSGLQELSDWNARYRRKFGHVFLICASGRSAAEILGELKNRYSNRPIHELEIASQEHMRITELRLRTLFSARTKADSTGSQYSTAVASKAEKERVGIVGQHLTAPLK

SEQ ID NO: 71662 - protein, 52 aa, Gossypium hirsutum
  Clone ID: LIB3583-059-P1-K1-B1.pep
IMNFLLVFVVRSLEIIIIYLFIYRWSKGEQSTALATATDSGLQVEIMLHLNS

SEQ ID NO: 71663 - protein, 60 aa, Gossypium hirsutum
  Clone ID: GOSHI-09MAY01-C5885_1.pep
TCKCFRSLSIHVRQSSLPCTTWKICLQKNKTSSQKEINVNYYCSLIVTNKDGGERFEDWS

SEQ ID NO: 71664 - protein, 381 aa, Gossypium hirsutum
  unsure (1)..(381): unsure at all Xaa locations
  Clone ID: GOSHI-09MAY01-C5865_1.pep
HRGNHFFIQRRSEECFNSELLACPVDNTSATTVLIPHRASVKIQYIQLFSDHLAVSEREEGLPKITVYHLPEVEEPLVNLEGGKSVQFIDPVYSVDLSVSQFSSTILRFSYSSLRMPNSVYDYDMNTGESVLKKIETVLGGFDASNYVTERKWAXASDGTQIPISIGYQKNLVKLDGSDPMLLYGYGSYEICIDPDFEASRLSLLDRGFIFAIAHIRGGGEMGRQWYENGKFLKKKNTFTDFISCAEYLIEQKYCSKEKLCIEGRSAGGLLIGAVLNMRPDLWKAAVAGVPFVDVLTTMLDPTIPLTTSEWEEWGDPRKEEFYFYMNSYSPVDNVKAQNYPDILVTAGLHDPRVMYSEPAKFVAKLRDMKTDDNMLLLKCE

SEQ ID NO: 71665 - protein, 242 aa, Gossypium hirsutum
  Clone ID: GOSHI-09MAY01-C5555_2.pep
GAVPRYLRPGTRGFGAGRGNGGAPIGSHLPHQQGTQQNIGTMGSSFNFPLENPNSQPSVGGPLSQPGFVNNVQGPSQTFRDGFSMGGMSQDFLGDDFKSQGSHVPYNIADFSTQASQSGYAVDYVTQGAQGGFPGNFLNQNSQAGYSRFGSGNDFMSQDYMNHGSQGLFTQAGFNDPSHDDASQSHFGAANPNQLQSQGLMNSLYSQPFAHYNTQPLNLQSPQQQQPQQGQGSQNQNLRYNG

SEQ ID NO: 71666 - protein, 154 aa, Gossypium hirsutum
  Clone ID: GOSHI-09MAY01-C5555_1.pep
LLARPRVRPRVRGSLGSHGPYNIADFSTQGGYAVDYASQGAQSGFPGNFLNQNSQAGYSRFGAGNDFMTQDYMNHGSQGLFTQAGFNDPSQDDASQSHFGAANPNQLQSQGLMNSLYSQPFAHYNTQPLNLQAPQQQQPQQGQGSQNQNLHYNG

SEQ ID NO: 71667 - protein, 170 aa, Gossypium hirsutum
  Clone ID: GOSHI-09MAY01-C5575_1.pep
CRKTLRWFHLSVTERNQLNTGFVSSEFSQRDQLLTGTPNTAQALLTGKLGELAAFKYFTGTSGKKVKWVNKDNETGLPYDLVVEDERGHIEYVEVKATRSARKDWFNISAREWEFAAEEGDSFSIAHVFLLSEKDAEIAVYTNPIRLCQLGQLQLVVLMPTHRKDSPIVS

SEQ ID NO: 71668 - protein, 68 aa, Gossypium hirsutum
  Clone ID: LIB3583-027-Q6-K1-B3.pep
HNTETTSPVPILPDSEILDHQYGNTTNPTGSAVITTFLTVHSFARIACNPFSLMSGGGRPSNFFHFNF

SEQ ID NO: 71669 - protein, 81 aa, Gossypium hirsutum
  Clone ID: LIB3583-027-Q6-K1-B7.pep
IASGRDQLFKVSNHIHSHTSSDGPIAISTDMFMEHNTETTSPVPILPDSEIMNNQYGNTTNPTGSAVRTTFCTIDSRARIP

SEQ ID NO: 71670 - protein, 77 aa, Gossypium hirsutum
  unsure (1)..(77): unsure at all Xaa locations
  Clone ID: GOSHI-09MAY01-C5515_3.pep
MRLCTLRIGIHFLKDPGFRALVSLRDPFDDICCVEGISIXSDRLRKACGSNGTGESIQKRQFFXIILVFSILFFLFY

SEQ ID NO: 71671 - protein, 210 aa, Gossypium hirsutum
  Clone ID: GOSHI-09MAY01-C5515_2.pep
MAASASSSSTTKTIPARKRGWLSNISSISSRIYFFLIFLQIPLFRIPCRSGMCSTPIHVTSSQLIASDIFPVPVVKAILFPGAITNGLAKNWTVPSWDNLLNMYNLTSIKESSALPDLQRLEVLAGSYFCVAGALVGLLKPGRMSMFGTLLVIWGLVKEGIIGKPANTDPTKAVYVYPTMVLALICALSSIKYDVKKVMRTAPARPIAKP

SEQ ID NO: 71672 - protein, 77 aa, Gossypium hirsutum
  unsure (1)..(77): unsure at all Xaa locations
  Clone ID: GOSHI-09MAY01-C5515_1.pep
MRLCTLRIGIHFLKDPGFRALVSLRDPFDDLCCVEGISIXSDRLRKACGSNGTGESIQKRQFFXIILVFSILFFLFY

SEQ ID NO: 71673 - protein, 80 aa, Gossypium hirsutum
  unsure (1)..(80): unsure at all Xaa locations
  Clone ID: LIB3149-029-Q1-K1-C5.pep
CRSGMCSTPIHVGSNSVICLGRYHVXVVKANLCPGAIANGLAKNRTVPSWDNLLNMYNLTSSHSAFDRKINLIYFVPLAQ

SEQ ID NO: 71674 - protein, 51 aa, Gossypium hirsutum
  Clone ID: LIB3148-039-Q1-K1-A8.pep
RPLFFFFFFFFFFFLFFFFFFFFFFFFFFDFFFFFYFIPFHHSLSPIGLIL

SEQ ID NO: 71675 - protein, 174 aa, Gossypium hirsutum
  Clone ID: GOSHI-09MAY01-C5505_1.pep
VDMHCQACAEQLRKKILKMRGIQSAVTERTTGKVPVTGTMDATKLVDYLYRRTTKHARIVPHPEPEPQLEPEKQEEKKEGEEKPSEEAKPEENPDKKEEEKPAAEEEAKEEGNNEATGETKEGEDKKEDNNGSNNEDESMKKMIYYYQPLYVIERMPPAPQLFSDENPNACCIS

SEQ ID NO: 71676 - protein, 157 aa, Gossypium hirsutum
  unsure (1)..(157): unsure at all Xaa locations
  Clone ID: GOSHI-09MAY01-C5405_1.pep
IVSFGLLRLQQWSLGNVDTLTNLSQADVLRVKPPLVPLATLLGRELRNVKVEKPFVKFGQAALAKKGEDYFLIKPDCERVPGNPETSSSVFAILDGHNGLSAAIVAEENLLGNVLSAITQGINREEWLXALHRALGARLEMTDIAVXETGDTSGTTV

SEQ ID NO: 71677 - protein, 149 aa, Gossypium hirsutum
  Clone ID: GOSHI-09MAY01-C5725_1.pep
PRVRPRVRIHVTCALVYGPTPTRRIHRGVCSTWMKNAVSLEKNSDCSGAPIFIRQSNSKLPADPSIPIIMVGPGTGGAPFRGFLHERVVLKEDGAELGPSLLFFGCRNRKMDFIYEDELNNLVEQGALSELIVAFSREGPQKEYVQHKM

SEQ ID NO: 71678 - protein, 65 aa, Gossypium hirsutum
  Clone ID: GOSHI-09MAY01-C5625_3.pep
VCSMVGRTRNDNASYILCIFSCLRRAFRTLPWSVIGSNVKTLSTISLNSLVLVLCFVSWLEAIAW

SEQ ID NO: 71679 - protein, 222 aa, Gossypium hirsutum
  Clone ID: GOSHI-09MAY01-C5625_2.pep
GISLFIATNICENIIWKAFSPTTINSGRGAEFEGAVIAFVHNLLTRENKIRALREAFYRQNLPNVTNLLATVLIFLIVIYFQGFRVVLPVRSKSARGQQGSYPIKLFYTSNMPIILHSALVSNLYFISQLLYRRYSGNFFVNLLGKWKESEYSNGQSIPVGGLAYYITAPSSLAEMAANPFHALFYLGFMLSACALFSKTWIEVSGSSARDVAKQLKEQQMV

SEQ ID NO: 71680 - protein, 162 aa, Gossypium hirsutum
  Clone ID: GOSHI-09MAY01-C5625_1.pep
PRVRPASAQRAPSVRSEYSNGQTIPVGGLAYYITAPSSLAEMAASPVHALFYLVFMLSACALFSKTWIEVSGSSARDVAKQLREQQMVMPGHREGSLQKELNRYIPTAAAFGGMCIGALTVLADLMGAIGSGTGILLAVTIIYQYFETFEKEKASELGFFGL

SEQ ID NO: 71681 - protein, 137 aa, Gossypium hirsutum
  Clone ID: GOSHI-09MAY01-C5185_2.pep
PTRPPTRPGVALLYASKELDKLPTGNFDQKIGVQIIQNALKTPVHTIASNAGVEGAVIVGKLLEQDNPDLGYDAAKGEYVDMVKAGIIDPLKVIRTALVDAASVSSLMTTTEAVVVELPKDEKDVPAMPGSMGGMDY

SEQ ID NO: 71682 - protein, 182 aa, Gossypium hirsutum
  Clone ID: GOSHI-09MAY01-C5185_1.pep
HAYADAWAKLSGGVAVLKIGGASEADPRVRKDRVTDALNATKAAVEEGIVPGGGVALLYALKELDKLPTANFDQKIGVQIIQNALKTPVHTIASNAGVEGAVIVGKLLEQDNPDLGYDAAKGEYVDMVKAGIIDPLKVIRTALVDAASVSSLMTTTEAVVIELPKDEKDVPAMPGGMGGMDY

SEQ ID NO: 71683 - protein, 355 aa, Gossypium hirsutum
  Clone ID: GOSHI-09MAY01-C5155_1.pep
KVSPVKDGTKNSTKNDDEEVIGSPKSVKPNKQDSHKEGTPKTNSKRKHMPSKEKSSDSMEYGENLVGLKVKVWWPKDREFYEGFIHSFDSAKKKHKVRDDDGDEEILNLKREKWAVIEDESGSDEEGAANLPSPDGSSDIGRLPKKAAKTADPSSKKAKMDASPKRGGGTSSGKSKGSATKSGRKTKEDAKVDGKSKDGSKSVGKSGNDSVAKSKDPSTPKTGSKPVDNASKADKKSKNEESGETPKSAKSKDDGSATPKASSKVEQDISKTANSKQETPKISSQSKGKSLKSGGKSNSNGTGKSKSGSSKVKGSESVKESSTDSAKVVGSVKRKAPSLLKAQGSDSKSGKKRQR

SEQ ID NO: 71684 - protein, 161 aa, Gossypium hirsutum
  Clone ID: GOSHI-09MAY01-C5145_1.pep
MVGVGARLGRSSTRYGPATVFTGPVRKWKKKWVHVSPSNTGNSSNNNNNNRSHNNHQTTINGTSNGNNGSHLLLFKWTPLSQTQTNNNDNDNSSKDDAVAAPEEPPRRKFKYIPIAGLEEQRKEADENSDDEAKPSKADPSAVEPTSRNDGLDEKPDINDI

SEQ ID NO: 71685 - protein, 234 aa, Gossypium hirsutum
  Clone ID: GOSHI-09MAY01-C5175_1.pep
MAEEPVNVNGFRELARQTLPKMYYDFFTGGAEDQYTLKENEEAFHRITIQPRILVDTSSIDLSTMVLGYSISMPVMIAPTSRHKLANPSGEIATARAASTCNTIMVLSISSTCTLEEVAACCNAVRFFQLCVYKRRDITAKLVQRAENNGYKAIVLTGDSPRHGGREADIKNKIIIPELKNVEGLLSTKIVADKGSNLDALANQTRDPSFSWEDIGWLKSITKLPILIKGLLTH

SEQ ID NO: 71686 - protein, 165 aa, Gossypium hirsutum
  Clone ID: GOSHI-09MAY01-C5165_1.pep
KKLATQSYHTISSRLQAVKQKSGKSYNQIAEETGLTNVYVAQLLKRQAQLKTETAPKLRAALPELPEELLHEMMKPPLRSYDPNLIQEPTVYRLNEAVMHFGESIKEIINEEFGDGIMSAIDFYCSVDKVKGVDGKDRVVVTFDGKYLPYSEQKSEHMVSRLRLQ

SEQ ID NO: 71687 - protein, 337 aa, Gossypium hirsutum
  Clone ID: GOSHI-09MAY01-C5135_1.pep
QNATVPKKSFTVEIACGSFLIVFLVNYFTGKRENENLALAWAAKFATEGSIFEKNFSLLGVGEGEDSPLLLKEGQTVFKFYASGRRYCQGLLATMELKSRHDLISRLFNLVVPCKDEITFEVYMNDEAMDQVVFAVAKKKAAKGMQKEVRDLQRFAGLMPTPSGRKWVVDELSVISESKEVAGDLITETVLEQVFGDKSFEKYGKDFISMHFSDQHPGKHRKMLLFKFALPDANHMADMTRLVALVPYYIDLIGRYKLSSQARSKTEAARVKAAQEAYKELQNARLEALQRKKAERKKMLEEAEAKLSAEAARKREAKDRARQMKKAMPRMKMTRAH

SEQ ID NO: 71688 - protein, 85 aa, Gossypium hirsutum
  Clone ID: LIB3148-033-Q1-K1-E4.pep
PTRPYKLSSQARSKTEAARVKAAQEVYRELQNARLEALQKKKAERKKMLEEAEAKLSAEAIRKKEAKDRARQMKKAMPKMKMTRA

SEQ ID NO: 71689 - protein, 192 aa, Gossypium hirsutum
  Clone ID: GOSHI-09MAY01-C5095_1.pep
RMVLFIHLFLSLAWQRFEAFKLNRLQISVLEEAGDVYTTELQRFINFISEVFANSPFFISAEDASMLEMGKNDEYKEITVPAGKSYEVSLTVESINSYIAWDFSLVQGKLSMDIGFSVEYTNNGGEKTLILPYRRYESDQGNFSTCMAGNYKLIWDNSYSAFFKKALRYKVDCIPPVLEESEKGSERNEVEE

SEQ ID NO: 71690 - protein, 85 aa, Gossypium hirsutum
  Clone ID: GOSHI-09MAY01-C5065_1.pep
MEKEVGNGCSSLAYKLLFSCPFGLSQPQLSAVFDESYDRIPHSDSNLENSISQIWDQRVQKNGSLFNGKKFMYGRYSQKSGDGSK

SEQ ID NO: 71691 - protein, 208 aa, Gossypium hirsutum
  Clone ID: GOSHI-09MAY01-C5015_1.pep
MAYPEPQVADREMVKVNPTPRKPRVLLAASGSVAAIKFGNLCHCFSEWAEVKAVATKASLHFIDRASLPKDLKLYTDEEEWSSWGKIGDSVLHIELRRWADIMVIAPLSANTLGKIAGGLCDNLLTCVVRAWDYSKPMFVAPAMNTFMWSNPFTEKHLMTIDELGISLIPPVSKRLACGDYGNGAMAEPSLIHSTVRLFLESRPQPSD

SEQ ID NO: 71692 - protein, 239 aa, Gossypium hirsutum
  Clone ID: GOSHI-09MAY01-C5255_1.pep
EVYGKNYLSWTGSRAMLVITEPELSKELLKPTRPAFPKRTSRERKKEDDFVLKILGDGLVTSEGEKWAKKRKLANHAFHGETLKSMTPAVIASVETMLERWKLLEGKEIEVFGEFRLLTSEVISRTAFGSSYLDGEKIFDMLMKLSVITNRNMFKARFLVISKFWKSAVQIEADKLEKEIHNCVMKIVKKREEKVANGGANSFGTDFFGLLLNAYHDTDKKNNISQQELVDECKTFYFA

SEQ ID NO: 71693 - protein, 87 aa, Gossypium hirsutum
  unsure (1)..(87): unsure at all Xaa locations
  Clone ID: AI054806.1.pep
PSFTTVGLGKNYLSWTGSRAMLVITEPELIKELLKNSERAFPKRTSRERKKEDDFVLKILGDGLVTSXGEKWAKKRKLANHAFHGET

SEQ ID NO: 71694 - protein, 235 aa, Gossypium hirsutum
  Clone ID: GOSHI-09MAY01-C5235_2.pep
SSKSFKFLRINLPAGGHPIAVAFSDDASSIVVASQAMTGCSSDAWADAWPKTANGPKQQTKLPPQIKWEHHKIHEKQAILTLTGSTATYGTADGSTIIASCSEGTDITLWHGRTGKVLGHVDTNQLKNNMATISPNGRFLAAAAFTADVKVWEIVYSKDGSVKEVSKAMQLKGHKSAVTWLCFSPNSEQIITASKDGSIRIWNINVRYHLDEDPKTLKVFPIPLQDSSGSTLHYD

SEQ ID NO: 71695 - protein, 184 aa, Gossypium hirsutum
  unsure (1)..(184): unsure at all Xaa locations
  Clone ID: GOSHI-09MAY01-C5235_1.pep
MDPILSTAVLSLVIGAVIAFVFFRSYLLKQRSEVQTIAKPDLHSDPKKHSKPPQHVSRKSHSKSHAHAPDKDSNKRHHPLDLNTLKGHADSVTGLCFSPDARNLATACSDGVVRIFKLEDASSKSFKFLRINLPAGGHPIAVAFSDDASSIVVASQAMTGXSLDMYEEEKQKPAMDQAQTSSSK

SEQ ID NO: 71696 - protein, 98 aa, Gossypium hirsutum
  Clone ID: GOSHI-09MAY01-C6945_10.pep
MITRRIARPLCRRRILSYFFPSAGAFRGDVRSYLDPIIGHLAWARTPLLANIYTYFSYSGNPRDISLPYALFTSPSPVVWDQGRGYQNLFDAMLDSLY

SEQ ID NO: 71697 - protein, 148 aa, Gossypium hirsutum
  unsure (1)..(148): unsure at all Xaa locations
  Clone ID: GOSHI-09MAY01-C6945_3.pep
MEKPETNSPIMQTMAIFSTSRAAMLLLLGLFAANLDPTAAQIGVCYGMLGYNLPNSWEGIQLYKSNNIPRLRLYDPNQQALQALRGSNIEVMLXGVPNGQLQNLADPSKARIMGSINVVAYCRCSVPIHCCRNEVPIILELNSFAAYE

SEQ ID NO: 71698 - protein, 162 aa, Gossypium hirsutum
  Clone ID: GOSHI-09MAY01-C6945_2.pep
MATTTEKQAMVVGIDDSEHSTYALQWILDHFFAPFASNPPFKLVIVHAKPTASSAVGLAGPGAADVLPYVDADLRKIAARVVEKAKELCLSKSVHDAVVEVVEGDARNVLCDAVEKHHASVLAVGSHGYGAIKRAVLGSVSDYCSHHAHCSVMIVKRPKIKH

SEQ ID NO: 71699 - protein, 362 aa, Gossypium hirsutum
  unsure (1)..(362): unsure at all Xaa locations
  Clone ID: GOSHI-09MAY01-C6945_1.pep
MAIFSTSMAAMLLLLGLFAANLDPTAAQIGVCYGMLGNNLPNSWEVIQLYKSNNIRRLRLYDPNQQALQALRGSNIEVMLGVPNDQLQNLADPSKARSWVQSNVVAYWPSVRFRYIAVGNEVPHSSWLAQFVLPALVNVFNAVRSAGLESQIKVSIAIDMTLIGVSYPPSAGAFRGDVRSYLDPIIGHLAWARTPLLANIYTYFSYSGNPRDISLPYALFTSPSPVVWDQGRGYQNLFDAMLDSLYSALEKAGQGGLEVVVSESGWPSAGGFGTSIDNAATYLSNLIRHVQGGTPKRPGKAIETYLFALFDENFKPGPELERHFGLFSPNKQPKYQLHFGGGRXWDIASEEYMELFLLSLIL

SEQ ID NO: 71700 - protein, 101 aa, Gossypium hirsutum
  Clone ID: AI055402.1.pep
MAIFSTSMAAMLLLLGLFAANLDPTAAQIGVCYGMLGNNLPNSWEVIQLYKSNNIRRLRLYDPNQQALQALRGSNIEVMLGVPNDQLQNLADPSKARSWVQ

SEQ ID NO: 71701 - protein, 76 aa, Gossypium hirsutum
  unsure (1)..(76): unsure at all Xaa locations
  Clone ID: AI054799.1.pep
MAIFSTSMAAMLLLGLFAANLDPTAAQIGVCYGMLGNNLPNSWEVIQLYKSNNIRRLRLXXDPNQQALQALRGSNI

SEQ ID NO: 71702 - protein, 201 aa, Gossypium hirsutum
  unsure (1)..(201): unsure at all Xaa locations
  Clone ID: AI054513.1.pep
MAIFSSSMAAMLILGLLTANLDPTVAQIGVCYGMLGNNLPNAREVINLYKSNNIKRMRLYDPNQQALQALRGSNIEVILGVPNDQLQNLANPSKAQSWVRSNVVAYWPSVPFSYXIVLGNKTPLLYFIKLHFVLPALMNVFNAVRSAGLESQIKVLIAIDMTLIGCLYPSSTGAFRGDVRSYIDPIIGNLHENHTIVAKLN

SEQ ID NO: 71703 - protein, 127 aa, Gossypium hirsutum
  Clone ID: LIB3829-036-Q1-K6-F11.pep
MATTTEKQAMVVGIDDSEHSTYALQWILDHFFAPFASNPPFKLVIVHAKPSASSAVGLAGPGAADVLPYVDADLRKIAARVVEKAKELCLSKSVHDAVVEVGEGDARNVLCDAVEKHHASILAVGSH

SEQ ID NO: 71704 - protein, 63 aa, Gossypium hirsutum
  Clone ID: LIB3146-025-Q1-K1-A1.pep
RGDPRLPGRVGGHVGGTPGEKHHACMLAVGSRGYGAIKKAVLGRGREYWSHHAHCSVKIVERP

SEQ ID NO: 71705 - protein, 106 aa, Gossypium hirsutum
  Clone ID: LIB3166-006-P1-K1-D11.pep
MIHDGPPKLKKDQTDPLQFQDTRTKTHTTMATTTEKQAMVVGIDDSEHSTYALQWILDHFFAPFASNPPFKLVIVHAKPSASSAVGLAGPGAADVLPYVDADLRKI

SEQ ID NO: 71706 - protein, 68 aa, Gossypium hirsutum
  Clone ID: uC-gsflnu33B138h01b1.pep
MHPFQKSGIEARGHGISPLAIAVSTQLYGDSHQSGHFRRFIHINRVTFPLQVKRSNNPPHYFLNTSAE

SEQ ID NO: 71707 - protein, 190 aa, Gossypium hirsutum
  Clone ID: GOSHI-09MAY01-C6965_1.pep
MVLVSPTGRLHIPHRAPDLPPKFKAMPGPGKIQHIICTGNLCIKEVHDYFKTLCPDLHITRGEYDEDSRYPENKTLTIGQFKLGICHGHQVIPWGDLDSLAMVQRQLDVDILVTGHTHQFKAYKHEGGVVINPGSATGAYSSFTYDVNPSFVLMDIDGLRVVVYVYELIDGEVKVDKIDFKKTATAPPPH

SEQ ID NO: 71708 - protein, 231 aa, Gossypium hirsutum
  unsure (1)..(231): unsure at all Xaa locations
  Clone ID: GOSHI-09MAY01-C6585_1.pep
MFSWLARIALACWRPVSRYARMNKDYNNSNSEELEEDSSSLRDSLLWCRDLEKHSCGDFSFAVVQANEIIEDHSQVETGKDAIFVGVYDGHGGPDASRFISDHLFQNLITGLARANGTISEDILRNAFSATEDGFLALVRRSCGIKPLIAAIGSCCLVGVIWKGTLYVANLGDSRAVIRYLGRFNKNIAEXLTKDXYASIKEVRQTEVLPPDESHILVIKPWSVGLIKGFL

SEQ ID NO: 71709 - protein, 138 aa, Gossypium hirsutum
  Clone ID: GOSHI-09MAY01-C6485_4.pep
MASAVASVAKKKTAGSKKSKSAPSHPPFLEMISDAIVSLKERTGSSQYAIAKFIEEKYKQLPANFRKVLLVQTKKFVASGKLVKVKASFKLPSASAAAKKPKPKATTTKAKAKPAAKPTKVAKTAKESDMCASRRARK

SEQ ID NO: 71710 - protein, 216 aa, Gossypium hirsutum
  Clone ID: GOSHI-09MAY01-C6485_1.pep
MASAVASVAKKKTAGSKKSKSAPSHPPFLEMISDAIVSLKERTGSSQYAIAKFIEEKHKQLPANFRKVLLVQTRKFVASGKLVKVKASFKLPSAYAAAKKPAAVAKKPAAAKPKSAATTTAAKSKPKATKTASKPKAKAKVATPVKAKAKVAAKPKATTTKAKAKPAAKPTKVAKTAKKSSPGKKVKAPAKKTVAVKKPKSVKSPAKKAAPKKAKK

SEQ ID NO: 71711 - protein, 64 aa, Gossypium hirsutum
  Clone ID: LIB3145-024-Q1-K1-G9.pep
GVSRSSTYSCNTFFGSSGKSNAVLFFATEATAEAMTQFNYFTSRKRFGRLHFSDGVGGRVRSDP

SEQ ID NO: 71712 - protein, 118 aa, Gossypium hirsutum
  Clone ID: LIB3829-024-Q6-N6-B2.pep
EVVLGRATMDVDVDIDLGREGRANKISRRQAIIKMEGDGSFSLKNLGKSSIFLNGKEVSTGQLMGLVSSSLIEIRDMAFVFEINQNSVKRHLAKITPKKQEKKTAFDFPEEPKKVLHE

SEQ ID NO: 71713 - protein, 52 aa, Gossypium hirsutum
  Clone ID: LIB3147-052-Q1-K1-C1.pep
FILCYSVGVKNSVFRFQNKTKKKHEQKKKPKNKTKKNQLPLRSVLKTKKMDT

SEQ ID NO: 71714 - protein, 189 aa, Gossypium hirsutum
  unsure (1)..(189): unsure at all Xaa locations
  Clone ID: GOSHI-09MAY01-C6445_7.pep
QREVVKVGPGVTNFKAGDKVVATLHHFAGGGLAEYAVAKENLTVARPPEVSAAEGARLPVAGLTAHQALTQAAGVKLDGSGQQVNLLITAASGGVGHYAVQLAKLGNTHVTATCGARNLDFVKSLGARXLDYKTPDGAGLKSPSGRKYDAVIHCATGIPWSTFEPNLSSNGKVIDITPGPSALLTFAMK

SEQ ID NO: 71715 - protein, 106 aa, Gossypium hirsutum
  Clone ID: GOSHI-09MAY01-C6445_5.pep
APLLLNHRLCFSLVYPVGVFFRKIQIFPKDFPKDSAMEADDVDTPGSSTKASSLPTTSSPMPISSTTSKTILMTPISTKKTKKNRFKYSSIFFFPSYFRFLGSEIS

SEQ ID NO: 71716 - protein, 62 aa, Gossypium hirsutum
  Clone ID: GOSHI-09MAY01-C6445_4.pep
VLETILLCFFSRYRSHQNRRKRRRLRRRSPVCQHRRLPRLNLGRLGPSRIPSASASSFPPFL

SEQ ID NO: 71717 - protein, 315 aa, Gossypium hirsutum
  Clone ID: GOSHI-09MAY01-C6445_3.pep
MAENLMHALQYNSYGGGAAALKHVEVPIPTPNKGEILLKLEATSLNPIDWKIQKGILRPVLPRKFPHIPASDVAGEVVKVGPGVTNYKVGDKVVSLLDHLTGGLAEYAVATENLTVARPPEISVAEAAGLPMAGLTAHRAVTHGAGVKLDGSGQQLNLLITAASGGVGHYAVQLAKLGNTHVTATCGARNLDFVKSLGADEVLDYKTPDGAALKSPSGRKYDAVIHCASGIPWSTFEPNLSSNGKVIDITPGPSALLTFAMKKLTFSKKNLVPLLLSPKKENLEYLVNLVKDKKLKTVIDSKHPLSKAEEAWAKS

SEQ ID NO: 71718 - protein, 60 aa, Gossypium hirsutum
  Clone ID: GOSHI-09MAY01-C6445_2.pep
MRPMPMEFVTDPDDQGSAMEVDDVDTLEIFGEGVIASDNKLADADFFNNFEDDFDDSDID

SEQ ID NO: 71719 - protein, 55 aa, Gossypium hirsutum
  Clone ID: GOSHI-09MAY01-C6445_1.pep
GNPIFLKDSRPTIIPCLSFRQNLENQNNSGVFVFEAKESSCFPSPDRLILPLNLF

SEQ ID NO: 71720 - protein, 63 aa, Gossypium hirsutum
  Clone ID: uC-gsronu33B038e08b1.pep
RSSDSIETILVCCFSRYRSHQNRRKRRRLRRRSPVCQRRRLPWLNLGRLGPSRIPSATASSFP

SEQ ID NO: 71721 - protein, 60 aa, Gossypium hirsutum
  Clone ID: LIB3493-054-P1-M1-C8.pep
HTGDLRRRRRRFRQPARQCRFLQLKKQRRIVSSPWVQLHNTNPTSELHFSFKIKLRFDLF

SEQ ID NO: 71722 - protein, 124 aa, Gossypium hirsutum
  unsure (1)..(124): unsure at all Xaa locations
  Clone ID: uC-gsflnu33B064d11b1.pep
MAENLMHALQYNSYGGGAAGSKHXRVPIPTPRKGEILLKLEATSLNPADWKIQKGMLSPFLPRKFPYIPATDVAGEVVKDGPGVTNYKAGDKDESMLHHFTGGGLAEYAVANENLTVARSLEVS

SEQ ID NO: 71723 - protein, 55 aa, Gossypium hirsutum
  Clone ID: LIB3146-010-Q1-K1-G7.pep
GIQLLDFNSRIQLPDFVWISYITYPLRRVCYKTIKRTKTQRAKRKIIFIYTDLNL

SEQ ID NO: 71724 - protein, 84 aa, Gossypium hirsutum
  Clone ID: LIB3584-043-P1-K1-G3.pep
MAENLMHALQYNSYGGGAAGLKHVEVPIPTPNQGEILLKLEATSLNPVDWKIQKGMLRPFLPRKFPYIPASDVAGEVVKVGPGV

SEQ ID NO: 71725 - protein, 389 aa, Gossypium hirsutum
  Clone ID: GOSHI-09MAY01-C6465_1.pep
QVSLAKPVSIEVWNPNGKYRVISTKPMPGTRWINLLIEQDCRVEICTEKKTILSVEDIISLIGNKCDGVIGQLTEDWGETLFAALSRAGGKAFSNMAVGYNNVDVNAANKYGVAVGNTPGVLTETTAELAASLSLAAAKRIVEADEFMRAGLYDGWLPHLFVGNLLKGQTVGVIGAGRIGSAYARMMVEGFKMNLIYYDLYQSTRLEKFVTAYGEFLKSNGEQPVHWKRASSMDEVLREADVISLHPVLDKTTYHLINKESLATMKKEAILVNCSRGPVIDEVALVEHLKQNPMFRVGLDVFEDEPFMKPGLAEMKNAVIVPHIASASKWTREGMATLAALNVLGKIKGYPIWGDSNRVEPFLNESVPPPAACPSIVNAKALGLPVSKL

SEQ ID NO: 71726 - protein, 62 aa, Gossypium hirsutum
  Clone ID: LIB3120-021-Q1-K1-B3.pep
PVSIEVRHPNGKYRVISTGPMRGTRGINLLIEQHCRVQICTENKTILCGEDIIPLTANLTNG

SEQ ID NO: 71727 - protein, 55 aa, Gossypium hirsutum
  unsure (1)..(55): unsure at all Xaa locations
  Clone ID: LIB3165-031-P1-K1-H12.pep
KRAGKFFSWGRWINLLIEQDCRVEICTEKKTILSVEDXIISLIGNKCDGGIGQLT

SEQ ID NO: 71728 - protein, 126 aa, Gossypium hirsutum
  Clone ID: GOSHI-09MAY01-C6415_1.pep
MAATLSLLKSPLLPQKPHLLQSKLPLLSNPTKQFICNESFNPPKLFAETVHHLKSASLPLTTLAFPFLFDAEDALAVGGEFGILEGRSFALVHPIVMGGLFFYTLWAGYLGWQWRRVRTIQNEINE

SEQ ID NO: 71729 - protein, 231 aa, Gossypium hirsutum
  unsure (1)..(231): unsure at all Xaa locations
  Clone ID: GOSHI-09MAY01-C6405_1.pep
MAAVTAAVSVPSTKSTSLPARTSLVFPDRITFKKVPVYYRDVCSGGRVVSVRAQVTTEAPAKVVKESKKNDEGVVVNKFRPINPYIGRCLLNTKITGDDAPGETWHMVFSTEGEVPYREGQSIGVIPDGVDKNGKPHKLRLYSIASSALGDFGDSKTVSLCVKRLVYTNEKGELVKGVCSNFLCDXKLWAEVKITGPVGKEMLMPKDPNATIIMLATGTGIAPFRSFLWKM

SEQ ID NO: 71730 - protein, 111 aa, Gossypium hirsutum
  unsure (1)..(111): unsure at all Xaa locations
  Clone ID: LIB3165-030-P1-K1-G6.pep
MAAFLAAXSFPSTKATSLPARTSIVSPDRITFKKVPVYYRDVCSGGRVVSVRAQVTTEAPAKVVKESKKNDEGVVVNKFRPINPYIGRCLLNTKITGDDAPGETWHMVFNT

SEQ ID NO: 71731 - protein, 205 aa, Gossypium hirsutum
  unsure (1)..(205): unsure at all Xaa locations
  Clone ID: GOSHI-09MAY01-C6625_1.pep
MDSIKSHAVCLPSPAQGHINPMMQLAKLLHSRGFHITFVNSEFNHRRFIRSRGEEAVKGLPHFRFEAIPDGLPPSDSDATQSVPALCNSTRKNCLAPFLELLSKLNSSPHLPPVTCIVCDGTMNFGTKAAQLIGVPYVQLWTSSTVSFLGFLHYKELAQRGIVPFKDERFCSDGTLEMPIDWIPGMPNMRXDIPSFIRTTDPDDF

SEQ ID NO: 71732 - protein, 197 aa, Gossypium hirsutum
  unsure (1)..(197): unsure at all Xaa locations
  Clone ID: GOSHI-09MAY01-C6185_1.pep
MENNNSSDERPTVMVTNDDGIDAPGLRALVRVLISSNLFRVLVCAPVSEQSAVSHSITWRHPVSVKQVDINGAIAFAVFGTPADCTSLGISKELFSFVPDLVISGINMGSNCGYHVVYSGTVAGAREAFFNGIPAVSVSYDWVGGKNSVDDYMLAAEACLQIFRAILAEIKNKVXSSNGFLNIDIPTDIANHKGYYL

SEQ ID NO: 71733 - protein, 158 aa, Gossypium hirsutum
  unsure (1)..(158): unsure at all Xaa locations
  Clone ID: LIB3585-048-Q6-K1-D9.pep
SAVSHSITWRHPVSVKQVDINGAXAYAVSGTPADCASLGISKEPSLGISKELFSFVPDLVISGINMGSNCGYHVVYSGTVAGAREAFFNGIPAVSVSYDWVGGKSSVDDYTLAAEACLAIFRAILAEIKNKSYPLNGFLNIDPPTXIANHKGVKLTTH

SEQ ID NO: 71734 - protein, 124 aa, Gossypium hirsutum
  unsure (1)..(124): unsure at all Xaa locations
  Clone ID: GOSHI-09MAY01-C6155_2.pep
MQNQDGAVADREKESAVSIPISEVDDWANFADDDIMQQQSAIHAEEAKKIPFGGDKGPLSMLAAEYDSXSPILLEKIKXLDQQYAAIRSXRGDGNCFXRSFMFSYLXHILESQDXAELDRIRAC

SEQ ID NO: 71735 - protein, 304 aa, Gossypium hirsutum
  unsure (1)..(304): unsure at all Xaa locations
  Clone ID: GOSHI-09MAY01-C6155_1.pep
MQNQDGAVADREKESAVSIPISEVDDWANFADDDIMQQQSAINAEEAKKIPFVGDKEPLSMLAAEYESGSPILLEKIKVLDQQYAAIRRTRGDGNCFFRSFMFSYLEHILESQDRAEVDRIKGNVEECRKTLQSLGHTDFTFEDFFSLFLEQLECVLQGKEDSISQDELILRSRDQSISDYVVMFFRFVTSGEIRKRSEFFEPFILGVTNAXTVEQFCKSSVEPMGEESDHVHITALSDALGVPIRVVYLDRSSCDIGGVSVNHHDFLPTSGDKSNAKGGSTVPVKPFISLLYRPGHYDILYPK

SEQ ID NO: 71736 - protein, 75 aa, Gossypium hirsutum
  unsure (1)..(75): unsure at all Xaa locations
  Clone ID: LIB3585-006-P1-K1-D1.pep
SVFLLGIFHNKFGWLVAMFFRFVTSGEIRKRSEFFEPFILGLXNATGGQFCKSXVEPMGEESDHVHITALSDALG

SEQ ID NO: 71737 - protein, 284 aa, Gossypium hirsutum
  unsure (1)..(284): unsure at all Xaa locations
  Clone ID: GOSHI-09MAY01-C6145_1.pep
IQDWDPSAMLNNLSFLGQKIHQLQDLVYLIIARKGQVLGRPDELLVQQQQLVTADLTSIIVQLISTXAGSLLPSVKQTLSAATTSLGQCGEFGGVVFPSSAQGLNDGVQPQNAGGSKVSEPPNSVDITSNNGNEQSNHIIEEHELKDEEDAHAAENLLPGTSEILQLEKEEILAAHTHFCTICGKGFKRDANLRMHMRGHGDEYKTPGALAKPTKESSSEPTIIKRYSCPYAGCKRNKDHKKFQPLKTMLCVKNHYKRTHCDKSYICSRCNTKKFSVIADLKTH

SEQ ID NO: 71738 - protein, 88 aa, Gossypium hirsutum
  Clone ID: LIB3582-019-P1-K1-A11.pep
KPELKSIQAILNLRGYVVSYKRKFPKARLLLSSIHSISRSGKIHHPLQITAPGSSLLSRHSTRLLKLNLYCCVITKSKSLCKMVPSMT

SEQ ID NO: 71739 - protein, 243 aa, Gossypium hirsutum
  Clone ID: GOSHI-09MAY01-C6105_1.pep
MRQQYVFTTLTLLILFSLSCSTTLAQSPALAPAPSGPTNVTKILEKAGQFTLFIRLLKSTQVANQLLGQLNNSNNGMTVFAPTDNAFSSLKSGTLNSLTDEQKVQLVQFHIVPTYLTSSQFQTISNPLRTQAGDSGDGKFPLNVTTSGNSVNITTGLTNTSVSGTIYTDGQLAVYQIDQVLQPLQIFAPRPPAPAPAPAKSKNKKATTVADSPDVTPADNSKAATLQNVGLFGVAALVIALSL

SEQ ID NO: 71740 - protein, 65 aa, Gossypium hirsutum
  Clone ID: LIB3083-064-Q1-L1-G2.pep
KAPISYPIKTSINFCSRTTSSLPFYFVLVAITSPSNTTHNEATICLHYSHVAHPVFPQLFNNISP

SEQ ID NO: 71741 - protein, 101 aa, Gossypium hirsutum
  Clone ID: LIB3189-021-P1-K1-H5.pep
TDSGSSHASRVLTTLAQAPAPALAPSGPTNVTKILEKAGQFTLFIRLLKSTQVANQLLGQLNNSNNGMTVFAPTDNAFSSLKSGTLNSLTDEHKVELVQFH

SEQ ID NO: 71742 - protein, 168 aa, Gossypium hirsutum
  Clone ID: GOSHI-09MAY01-C6095_1.pep
MSDIKPKFLEVYSALKSELLDDPAFEFTDNSRQWVERMLDYNVPGGKLNRGLSVIDSFKLLKEGKELSDDEFFLACALGWCIEWLQAYFLGLDDIMDGSHTRRGHPCWFRLPQVGMIAISDALILRNQIFRILNKHFRGKPYYVYLLDLFNEVSLCCTDLRLPMFTRI

SEQ ID NO: 71743 - protein, 370 aa, Gossypium hirsutum
  unsure (1)..(370): unsure at all Xaa locations
  Clone ID: GOSHI-09MAY01-C6075_1.pep
QTRYKSRQLLSHGMFEIPXEANFTNIEQFLEPLKLSYKSLCSCGDRPITDGSLLDFLRQVSTFGLSLVRLDIKQESDCHIDVLDAITKHLEIGSYREWSEEQKQEWLLSELSGKRPLFGSDLPKTEEIADVLDTFNVLAELPADNFGAYIISMATAPSDVLAVELLQRECHVKQPLRVVPLFEKLADLEAAPAALARLFSIDWYRNRINGKQEVMIGYSDSGKDAGRFSAAWQLYKAQEELIKVAKQFGVKLTMFHGRGGTVGRGGGPTHLAILSQPPETIHGSLRVTVQGEVIEQSFGEEHLCFRTLQRFTAATLEHGMHPPVSPKPEWRALMDEMAVRATEEYRSIVFKEPRFGEYFRLVSELAYSHS

SEQ ID NO: 71744 - protein, 138 aa, Gossypium hirsutum
  unsure (1)..(138): unsure at all Xaa locations
  Clone ID: LIB3825-004-Q1-N6-G3.pep
LARLFSVDWYKNRINRKQEVMIGYSDSGKDVGHLSTAWKLYKAQDELIKVAKQFGMRLTIFHXCGGNVGRGGGPTHLAILSQPPETIEQSFGEEYLCFRTLQCFIAATLEHGMHPPVSPKLEWHALMDEMAIVATLKY

SEQ ID NO: 71745 - protein, 137 aa, Gossypium hirsutum
  unsure (1)..(137): unsure at all Xaa locations
  Clone ID: LIB3829-034-Q1-N6-H8.pep
VMIGYSDSGKDAGGLFAAWQLYKAQEELIKVAKQFGMKLTMFHGRGGTVGKGGGPTHLALLSQPPKTIHGSLRVIVQAEVIKQSFGEEHLCFRTLXRFTAATLEHGMHPPVSPKPKWRALMDEMAIVATEEYRYCWW

SEQ ID NO: 71746 - protein, 238 aa, Gossypium hirsutum
  Clone ID: GOSHI-09MAY01-C6025_1.pep
DLSLTEPEISRLGAIVKILKDKSHYHTSQFADVDIALLLKLLKTWPVAMIFPVIDMLRMTVLHPDGATVLFRHVEVNDAVMEMIMKATTDPALPANLLTSIRAVTNFFKNSSYYGWLQKHRSDILDAFSSCLASPNKNLQLAYSTLILNYAVLLIEKKDEEGQSHVLSAALEIAEQETLEIDSRFRALVAIGSLMLEGLVKKLAMDFDVGNIAKAAKASKEAKIAEIGADIELLTKQS

SEQ ID NO: 71747 - protein, 196 aa, Gossypium hirsutum
  Clone ID: GOSHI-09MAY01-C6395_1.pep
MTPLHFFLLLLVRLLSSAALISAAAATTAYPSIPGTDSTTDCGLSGGDENPVPIRREVYGNGKIFDISHRYTVDMPSWESKDGVGQFLWLPKSMKNGSLANNSEMKLPTHTGTHLDAPGHVIDRYFDAGFDVDTLDLEVLNGPALLIDVPRDKNITAEVMESLKIPKGVRRVLFRTLNTDRRLMFKKEFDTSYVGF

SEQ ID NO: 71748 - protein, 352 aa, Gossypium hirsutum
  unsure (1)..(352): unsure at all Xaa locations
  Clone ID: GOSHI-09MAY01-C6385_1.pep
MDNFYAPGKNHLFVPGPVNIPEPVIRAMNRNNEDYRSPAIPAMTKTLLEDVKKIFKTTTGTPFMIPTTGTGAWESALTNTLSPGDRIVSFLIGQFSLLWIDQQQRLKFNVDVVESEWGQGANLDVLAEKLAADRTHTIKAICIVHNETATGVTNNLATVRKLLDHYGHPALLLVDGVSSICALDFRMDEWGVDVALTGSQKALSLPTGIGIVCASPKALEATKTAKSVRVFFDWNDYLKFYKLGTFWPYTPSIQLLYGLRAALDLIFEEGLDNVIERHSRLGKATRLAVEAWGLKNCTQKEEWFSDTVTAVLVPPYIDSSEIVXRAWKRYNLSLGLGLNKVAGKXVFRIGHL

SEQ ID NO: 71749 - protein, 113 aa, Gossypium hirsutum
  unsure (1)..(113): unsure at all Xaa locations
  Clone ID: LIB3165-050-Q1-K1-D4.pep
MDDFYRPGRNHLFFTATVHIPEPDIRAMNRDNEDYRSPAIPRMTKTLVDNVQKIXKTTTGTPYMNPTTGTDAXERALTNTLCPGDRIISGLIEQCILLWIDQQQRLKDNVDVD

SEQ ID NO: 71750 - protein, 98 aa, Gossypium hirsutum
  unsure (1)..(98): unsure at all Xaa locations
  Clone ID: LIB3120-014-Q1-K1-E6.pep
LAADRTHTIKALGVVYNETATGVTNNLATVRKLLYHYGHPALLFVDGVSSICALDFPMDEWGVDVSLTGLQKALFSFNLESVFVCASXPKALEANQNC

SEQ ID NO: 71751 - protein, 164 aa, Gossypium hirsutum
  unsure (1)..(164): unsure at all Xaa locations
  Clone ID: GOSHI-09MAY01-C6335_2.pep
CVDHKGLFXDVLRTLKDCNIKIAYGRFSXELQGYRDLDLFIQQNDGKKIVDPDKQDGLCSRLRMEMLHPLRVIISNRGPDTELLVANPVELSGKGRPRVFYDVTQALKSLGICIFSAEIGRHSSSEREWEVYRFLLDDNCKFKFSSIGGRNQIVDRVRRLLMGW

SEQ ID NO: 71752 - protein, 166 aa, Gossypium hirsutum
  unsure (1)..(166): unsure at all Xaa locations
  Clone ID: GOSHI-09MAY01-C6335_1.pep
NTCVDHKVFSYDILRNXKDCNIKIAFGRFSPNSKGYRDLDLFIQQKDGKKFVDPEKQNGLCSRLKVEMLHPLRVIIANRGPDTELLVANPVELSGKGRPRVFYDVTLALKALGICIFSAEIGRYSSSDREWEVYRFLLDENCGFQLLSTLARNQIVDRVRRMLMGW

SEQ ID NO: 71753 - protein, 281 aa, Gossypium hirsutum
  unsure (1)..(281): unsure at all Xaa locations
  Clone ID: GOSHI-09MAY01-C6325_1.pep
MIACLGRIVHDSDAESKLDDDVSTIFNSLNLQGSIENGDVSGIASKDFGGLYSVKPLYLIRPSGAEDISRVVKAAAGTPHLTVAARGNGHSINGQAMADGGYVIDMRSTGENHFNLLTVNGSPCIDVSGGALWEDVLRRCVSRFGLAPRSWTDYLSLTVGGTLSNAGVSGQAFRYGPQTSNVTELEVVTGEGDITVCSETQNPELFFGALGGLGQFGIITRARVKLQPAPDMVRWIRVVYAEFEEFTRDAEFLVSQKEDESFDYVEGFVFCNNXDPVNGWP

SEQ ID NO: 71754 - protein, 82 aa, Gossypium hirsutum
  Clone ID: GOSHI-09MAY01-C6295_3.pep
QILEGVFADTALERFNFSLPSSFSLSITSSSSGFWSSRVSMAIEITGEIKRKLIRLFDDPYFKHQPKILLLLPPKEGQPKPG

SEQ ID NO: 71755 - protein, 114 aa, Gossypium hirsutum
  Clone ID: GOSHI-09MAY01-C6295_2.pep
MAAHIATAMKPKNNNSNSNNNSNCCSNGYSSDVSNGSDNNSPSPPPSPPKPRLTLSLSQCRRRLRSKTKSFVRRENLGSGLNFRRNLRYLLLLPLSYISGLLMCGGPVFMNFEN

SEQ ID NO: 71756 - protein, 195 aa, Gossypium hirsutum
  unsure (1)..(195): unsure at all Xaa locations
  Clone ID: GOSHI-09MAY01-C6295_1.pep
MASLLSPSAAISLRLKLNRSSAVSANTPSKICCTFPGNGRCQRLSFKTKAAGSVEGNVLDKESASISDKIDYGVVGIHHVGILCENLERSLEFYQNILGLEINEARPHDKLPYRGAWLWVGSEMIHLMELPNPDPLIGRPEHGGRDRHACISIRDVSKLQAILDKAGIPYTLSRSGRPAIFTRDPDAXALDFTQV

SEQ ID NO: 71757 - protein, 61 aa, Gossypium hirsutum
  Clone ID: LIB3493-018-P1-M1-B10.pep
MLLQFWMELHLSIVIDVDYGVVGIHHVGILCENLERSLEFYQNILGLEINEARPHDKLPYR

SEQ ID NO: 71758 - protein, 131 aa, Gossypium hirsutum
  Clone ID: GOSHI-09MAY01-C6285_2.pep
SRAQTMLVMSSTSVSTSHVVNLKRDHPLLHFQAQGLKPKPSSHFLFNPHSNTVAASSSKAFTTFALFKPKTKAAPKKAAPKPKPKVEDGIFGTSGGIGFTKQNELFVGRVAMIGFAASLLGEAITGKGILA

SEQ ID NO: 71759 - protein, 156 aa, Gossypium hirsutum
  Clone ID: GOSHI-09MAY01-C6285_1.pep
MAQTMLLMSSHAVSLKRDHPLLHFQAQGLKPKPASHLFFNPLSNGVHTSSKAFTTLAIFKSKTKAAPKRVEPKSKPKVEDGIFGTSGGIGFTKQNELFVGRVAMLGFAASLLGEAITGKGILAQLNLETGIPIYEAEPLLLFFILFTLLGAIGALG

SEQ ID NO: 71760 - protein, 203 aa, Gossypium hirsutum
  Clone ID: GOSHI-09MAY01-C6245_1.pep
MVGKKSYLAMRSEREATDLIASDFQDLIFATKKLANHAIKLGSWGFGTTLLEWIASFAAIYLLILDRTNWKTNILTALLIPYIFLSLPSFLFNILRGEVGKWIAFIAVVLRLFFPTRFPDWLELPGALILLIVVAPSLFSSTIRNDWIGVVICLGIACYLLQEHIRASGGFRNSFTQANGISNTIGIIILLVYPAWALVTAIL

SEQ ID NO: 71761 - protein, 124 aa, Gossypium hirsutum
  unsure (1)..(124): unsure at all Xaa locations
  Clone ID: LIB3149-024-Q1-K1-F3.pep
RXNILTALVIPYIFLNLPFFLVNILGGESGKWIGFIGSRLPLVFPSPLPKWLEPSGTMVPFIRGGTDLIXGPIRNDWMGVGICLGIPCYLLQDHIKASGGFRNSFTKANGLSTTMGIIFLLVNP

SEQ ID NO: 71762 - protein, 114 aa, Gossypium hirsutum
  unsure (1)..(114): unsure at all Xaa locations
  Clone ID: LIB3149-024-Q1-K1-F4.pep
LLXGRLWGEVGKWIDFIGVVLCLFFPTRDPDWLELPGALILVIVEVPSLFSSTIRYDWIGVEICLRIACYLLEEHITASGWFRNSLSIGNGVSNTIGIIIVLAYPAWALDTDIL

SEQ ID NO: 71763 - protein, 48 aa, Gossypium hirsutum
  Clone ID: GOSHI-09MAY01-C6265_1.pep
ENSRAATVQAKSHLVKAAKTQRSNSSLTCLLLVIFAIVILIVIIVLAA

SEQ ID NO: 71764 - protein, 179 aa, Gossypium hirsutum
  unsure (1)..(179): unsure at all Xaa locations
  Clone ID: AI728830.1.pep
QIGFCQMDSSTNDVIRDCPPFFKVYKDGRVERYFVTQPVPAGLDRTAGVQTKDVVISPAVKARIFMPQSTTPGQKLPLLVHYHGGGFSIGSAFDTVTYKVVAPLVKQANIVVVSIDYRLAPEHPLPIAHDDSWVWLQWVASHANGQGPEPWLNDNADPXRIFLAGESAGANIAHFVAVL

SEQ ID NO: 71765 - protein, 72 aa, Gossypium hirsutum
  unsure (1)..(72): unsure at all Xaa locations
  Clone ID: LIB3585-048-Q6-K1-G10.pep
PLDHASAPVPAGLDRTALYHTKDVVISPAVNARIFMPQXTTPGHNLTLLVHYHGKLLFFKSHFKKHQFILMS

SEQ ID NO: 71766 - protein, 146 aa, Gossypium hirsutum
  Clone ID: GOSHI-09MAY01-C6235_2.pep
MSLTIPTNLSKSLLKPKLNSKLTPKVSRSLVVCSTDKTSSPPSSASPLQAFSAALALSSILLSAPQPAVADIAGLTPCKESKQFAKREKQQIKKLESSLKLYAPDSAPALAIKATIEKTERRFDNYGKYGLLCGSDGLPHLIVSGD

SEQ ID NO: 71767 - protein, 226 aa, Gossypium hirsutum
  Clone ID: GOSHI-09MAY01-C6235_1.pep
MMSLTIPTNLSKSILKPKLETQVIPKASSRSLIVCSSSNPSSSDKSASSLQAFSAALALSSILLSAPLPAVADIAGLTPCKESKQFAKREKQQIKKLESSLKLYAPDSAPALAIKATIEKTKRRFDNYGKYGLLCGSDGLPHLIVSGDQRHWGEFITPGLLFLYIAGWIGWVGRSYLIAISDDKKPAMKEIIIDVPLATGLIFRGFIWPVAAYRELINGDLAVKDV

SEQ ID NO: 71768 - protein, 108 aa, Gossypium hirsutum
  Clone ID: LIB3165-012-P1-K1-C6.pep
MMSLTIPTNLSKSILKPKLETQVIPKASSRSLIVCSSSNPSSSDKSASSLQAFSAALALSSILLSAPLPAVADIAGLTPCKESKQFAKREKQQIKKLESSLKLYAPDS

SEQ ID NO: 71769 - protein, 57 aa, Gossypium hirsutum
  unsure (1)..(57): unsure at all Xaa locations
  Clone ID: LIB3165-004-P1-K1-H2.pep
LQAFLAAVALSFMLISAPLPAGADIAGLTPCKESKQFAKREKQXIKKLESSLKLYAP

SEQ ID NO: 71770 - protein, 178 aa, Gossypium hirsutum
  Clone ID: GOSHI-09MAY01-C7895_1.pep
METILSSHSLHPILNPKASGSKNLLLPSQQPRPASLFLSKPITCTLKKPTSQSVKPSLAEPRNWFVHAQQGLAALAISLALNFSPVLYTGNAIASEFDVINEGPPKESYVVDDANVLSRVTKSDLKRLLSDLESRKNFHINFITVRKLTSKADAFEYADQVLERWYPTLEEGSNKGIV

SEQ ID NO: 71771 - protein, 105 aa, Gossypium hirsutum
  Clone ID: LIB3165-022-P1-K1-E9.pep
MGCAHTQGLAPLAISMALNFSPVLYTANAIASEFDVINHGPPNESYVDDDTNALSPVTKSDLKRLLSDLESTKNLHINFITVRKLTSKADAFEYADQVLERWYPT

SEQ ID NO: 71772 - protein, 200 aa, Gossypium hirsutum
  unsure (1)..(200): unsure at all Xaa locations
  Clone ID: GOSHI-09MAY01-C7805_2.pep
MARTSNKNVQAKLVLLGDVGTGKTSLVLRFVKGQFSDFQESTIGAAFFTQVLSLNEATVKFDIWDTAGQERYHSLAPMYYRGAAAAIVVYDITNSESFERAKKWVQELQRRGNPNLIMFLVANKVDLEEKRAVGNEEGEVYAKENGLTFMETSAKTAQNVCELFYEIAKRLAKAAPSRTSGMKLHXRRQESGRRLFCCSS

SEQ ID NO: 71773 - protein, 137 aa, Gossypium hirsutum
  Clone ID: GOSHI-09MAY01-C7805_1.pep
MASAFAFASGTSPSFLPSNSLKPKHSPLRRPLAPINIRSESMATEKLGIKVETNPSESKLSQLGVRQWPKWGCPPSKFPWTYSSKETCYLLEGKVKVYPEGSNDFVEIGAGDLVEFPKGMSCTWEVSVAVDKHYKFE

SEQ ID NO: 71774 - protein, 149 aa, Gossypium hirsutum
  Clone ID: AI727928.1.pep
MARSRNKNIQAKLVLVGHMGTGKTSLVLRFVKGQFFDFQESTIGAAFFTQVLSLNEATVKFDIWDTAGQERYHSLAPMYYRGAAAAVVVYDVTSSETFERAKKWVRELQRQGNQNLIMFLVANKVDLEDKKKVGNEEGEQYAKENGLTF

SEQ ID NO: 71775 - protein, 133 aa, Gossypium hirsutum
  Clone ID: GOSHI-09MAY01-C7595_2.pep
MAASSALFTPIFSTVQKKNGIVTPSSISFHGLRPLSKGKSSSNAISFSRNSAASARLAIKAELSAQVVISVSTALSLFLGRFVFFNFQRENVAKQVPEQNGLTHSEAGDARAKEYVSLLKSNDPVGFNIVDVL

SEQ ID NO: 71776 - protein, 158 aa, Gossypium hirsutum
  Clone ID: GOSHI-09MAY01-C7595_1.pep
MASASALLTPIFTTTLQNKHGSRHNIATPSFQGLRPLRKAPSSKLAPLSCGRKVGGVKAELSAPVVISLSTGLSLFLGRFVFFNFQRENVAKQVPEQNGLTHFEAGDTRAKEYVSLLKSNDPVGFNLVDVLAWGSLGHIGAYYILATSSNGYDPKFFG

SEQ ID NO: 71777 - protein, 67 aa, Gossypium hirsutum
  Clone ID: GOSHI-09MAY01-C7505_2.pep
FFYNKLTRVYCCFLFQVYAFEAASSFLSSSVFASSLTASLVSEATTVSSSLPSLLLSPTLNLSRRSA

SEQ ID NO: 71778 - protein, 226 aa, Gossypium hirsutum
  Clone ID: GOSHI-09MAY01-C7505_1.pep
MATDAKADPEPHCREDDDNAPATAADDEDTGAQVAPIVKLEEVAVTTGEEDEDPILDLKAKLYRLASARAPGKERGVGNVKLLKHKVNGKVRLVMRQSKTLKICANHFVIPTMTVQEHSGNDKSCVWHAADFADGNLKEEMFCIRFPSVENCKTFMETVQEVAESQGKKEENKDATVTADLLDKLSVGEIKSDGKEDTVVASNTKEAVKDEAKTEEDKKDEAASKA

SEQ ID NO: 71779 - protein, 123 aa, Gossypium hirsutum
  Clone ID: LIB3165-017-P1-K1-C9.pep
MATDAKGDPEPHCREDDDNAPATAADDEDTGAQVAPIVKLEEVAVTTGEEDEDPILDLKAKLYRFDKEGNQWKERGVGNVKLLKHKVNGKVRLVMRQSKTLKICANHFVIPTMTVQEHSGNDK

SEQ ID NO: 71780 - protein, 187 aa, Gossypium hirsutum
  Clone ID: GOSHI-09MAY01-C7445_1.pep
MESRLLSRASVITGLPQLRPKLSPGIVNVSYASAKPIGAVGEGGNVIWRRQLRPSLLLECSSVSKREVLKPVSAAASSPAEGGSDSAGEGKIAPVGFFEKYPALVTGFFFFMWYFLNVIFNILNKKIYNYFPYPYFVSVIHLFAGVVYCLVSWAVGLPKRAPIDSNLLKLLIPVAVCHGLGHVTSNV

SEQ ID NO: 71781 - protein, 135 aa, Gossypium hirsutum
  Clone ID: GOSHI-09MAY01-C7475_1.pep
SHLPSFRQKNISPPTPRNLSPFTVATSTSSLLQSNTLNLKHYFPLHLPLPSPPRLSHFTGTLAFNGQRSAKFTVKCFFSSEQRKHLTSSSLGSNNQLSSSSNDKNPFDIIAQTMLKALNALKKPAIAAVLSRLLL

SEQ ID NO: 71782 - protein, 205 aa, Gossypium hirsutum
  unsure (1)..(205): unsure at all Xaa locations
  Clone ID: GOSHI-09MAY01-C7795_1.pep
MASTDKTAVPLSSPKSEATPPSAVAAAAKSPVNYSFVDVVLRVLLFAATLTSVVVMATSKETELVPVPGFPLVRIQLQAKFNHSPALVYFIAALSVTGFYSIITTLASLSIVLNPTYSKTFLLFFAFFDVVFAGIVASATGAAGAVGYIGVGGNTHVXGWTKICNVYDKFCRYTASSLALSLFAAILLVLLSMISTFTLYKKIRD

SEQ ID NO: 71783 - protein, 170 aa, Gossypium hirsutum
  Clone ID: GOSHI-09MAY01-C7655_1.pep
MGVAVLKPEDCLKLPNPMKQPQNPWHNPNPNTNRTNRSQGNRKKRSPNTSPPSRPTVGRPKAPAKNLVMGQVKILKRGEDLKPSKPDKHVRFAKENVDVDLVSTDCLGPDPGSVPTQIRLTESENNGSKVLPVSFYAGSAFITSPPPSSVPCAVSQEDGLLEDTSTCLRD

SEQ ID NO: 71784 - protein, 186 aa, Gossypium hirsutum
  unsure (1)..(186): unsure at all Xaa locations
  Clone ID: GOSHI-09MAY01-C7635_1.pep
MAPQRTKPSLPLKTRVFISLISAVTDASCRSDGSVNRRLLRLLDYQAPPNPKPSNSVSSSDPTVDASRNLWFRLFSPSLPSDLLLPVVVFFHGGGFTFLSPASQAYDAVCRRFARKFPAFVVSVNYRLAPEHIYPSQYDDGFDVLKFLNDNFATVLPXNADYHGFLAGDSAADHRSPRSSRAWELG

SEQ ID NO: 71785 - protein, 143 aa, Gossypium hirsutum
  Clone ID: GOSHI-09MAY01-C7135_1.pep
MDSLTCTASDLVPLLSSSANATALASFLCARFSTISSQLSDATHAVDNTYLLFSAYLVFAMQLGFAMLCAGSVRAKNTMNIMLTNVLDAAAGALSYYLFGFAFAFGAPSNGFIGRHFFGLKAYPSPDGDYRFFLYQRAFAIAA

SEQ ID NO: 71786 - protein, 126 aa, Gossypium hirsutum
  Clone ID: GOSHI-09MAY01-C7125_1.pep
MSPRQDLLKMTAFFISPEKPRDISVLITRTALLLCLFTSITLVLCVSFSNRPHPFSRFTSPNRKAFPRPPDNSPTNISHLLFGIGGSAKTWQERRALSSLWWDVNLTRGFFWLDEKPEATAVNSYG

SEQ ID NO: 71787 - protein, 140 aa, Gossypium hirsutum
  Clone ID: GOSHI-09MAY01-C7045_1.pep
PRVRDIWSWICEPPNNDDWGESDPHPPLAFTMASSEEGDSSSTRSIQLKAERTMGSDSEVCITFTISFQGFQSSPLWVSDPCSLSSEQPFLPLVLQLLQETISRSPAMPNTICPRSQLQKLKPEPISWIIESHSPESFSS

SEQ ID NO: 71788 - protein, 161 aa, Gossypium hirsutum
  Clone ID: GOSHI-09MAY01-C7015_1.pep
AQNIKTSETLAVPTLAPQPSLSPGLRTLQQPHTRVSVRQPSPVPERQRTCTCEEMDKPQQQIHTKKKRQQSSKWKGMKIVFLLFFLFGYKDLKNQCILVTNAIYTRILHTQTPHKHRNTHTKTKAIENNRFLKVIFQLKSRRRSFFFGLIFCPSVVFYSKA

SEQ ID NO: 71789 - protein, 170 aa, Gossypium hirsutum
  Clone ID: GOSHI-09MAY01-C7395_1.pep
MLSVSIASPATLTLPPKPKSSIPKTSFTGVRIQHLCPQRLPSQATCFWQPSPSSSVVMMAKREEEMKEIRAKTTEEINDEVVELKGELLMLRLQKSVRNEFKSSEFGRMRKRIARMLTVKRERELEEGINKRLSRKLDRQWKKSIVVKPPPSLIKLREQEAAEEAEKSAA

SEQ ID NO: 71790 - protein, 106 aa, Gossypium hirsutum
  Clone ID: LIB3145-040-Q1-K1-C3.pep
MLSVSIASPATLTLPPKPKSSIPKTSFTGVRIQHLCPQRLPSQATFFRQPSPSSSVVMMAKREEEMKEIRAKTTEEINDEVVELKGELLMLRLQKSVRNEFKSSEF

SEQ ID NO: 71791 - protein, 59 aa, Gossypium hirsutum
  Clone ID: GOSHI-09MAY01-C7375_2.pep
WNGSQFFICTANTEWLDVMHVVFGQVVEGMDVVKAIEKVGSSSGRTAKPLARADCGQLC

SEQ ID NO: 71792 - protein, 173 aa, Gossypium hirsutum
  Clone ID: GOSHI-09MAY01-C7375_1.pep
MASNPKVFFDMTIGGQPAGRIVMELFADVTPRTAENFRALCTGEKGVGRSGKPLHYKGSKFHRVIPDFMCQGGDFTAGNGTGGESIYGSKFADENFIKKHTGPGILSMANAGPGTNGSQFFICTAKTEWLDGMHVVFGQVVEGMDVVKAIEKVGSSSGRTAKPVVIADCGQLC

SEQ ID NO: 71793 - protein, 181 aa, Gossypium hirsutum
  unsure (1)..(181): unsure at all Xaa locations
  Clone ID: GOSHI-09MAY01-C7325_1.pep
MFKKFSSEDVSSQNQVKASVQRKIRQSIAEEYPGLEPVLDDLLPKKAPLIVVKCQNHLNLVLVNSVPLFFNIRDGPYMPTLRLLHQYPNIMKKFQVDRGAIKFVLAGANIMCPGLTSPGGALDDELEAETPVAIMAEGKQHALAIGFTKMSAKDIKASDEGFGVHNXHYLNDRLWKMEKLE

SEQ ID NO: 71794 - protein, 168 aa, Gossypium hirsutum
  Clone ID: GOSHI-09MAY01-C7205_1.pep
MGVLGKVVDGILLLTFVSMSVVPACLDAQVLLPKALFPDVLGRVYSWYTTTYQDYLLLDEPHFFMALMKLELVLVLPLAILNTYGLLTSKPWFNTTCLIFGSALVTSTTAMVGDMLGSDKPSAGKLASMYSPFIGFGFLAILRGLLSESPNASKTMANGPTSALKKKA

SEQ ID NO: 71795 - protein, 232 aa, Gossypium hirsutum
  Clone ID: GOSHI-09MAY01-C7235_1.pep
MSCNGCRVLRKGCSESCILRPCLQWIESPEAQGHATVFVAKFFGRAGLMSFISAVPESQRPALFQSLLFEACGRTVNPVNGAVGLLWNGNWHVCQAAVETVLRGGSLRSMPEFMAPTPASDEASEATCTDMWKLRETSTNLNSNCRFSNSRSRVSPKRKRVEEEFKKLQPSDLDLGLTPSFSGKRVTDNRRPGTPSMNSEESVTTTCFESVFADQQGQGSRGTDKKLLKLFV

SEQ ID NO: 71796 - protein, 111 aa, Gossypium hirsutum
  Clone ID: LIB3272-009-P1-K1-C11.pep
RTRGLMSFISAVPESQRPALFQSLLLEACGRTVNPVNGAVGLLWTGNWHVCQAAVETVLRGGSLRSMPELMSPTPASDKTFEAHFPGLVELAGAITDFNLHLWILKFRIQG

SEQ ID NO: 71797 - protein, 447 aa, Gossypium hirsutum
  Clone ID: GOSHI-09MAY01-C1985_1.pep
MREILHVQGGQCGNQIGSKFWEVVCDEHGIDPTGRYTGNSSLQLERVNVYYNEASCGRFVPRAVLMDLEPGTMDSVRTGPYGQIFRPDNFVFGQSGAGNNWAKGHYTEGAELIDSVLDVVRKEAENCDCLQGFQVCHSLGGGTGSGMGTLLISKIREEYPDRMMLTFSVFPSPKVSDTVVEPYNATLSVHQLVENADECMVLDNEALYDICFRTLKLTTPSFGDLNHLISATMSGVTCCLRFPGQLNSDLRKLAVNLIPFPRLHFFMVGFAPLTSRGSQQYRSLTVPELTQQMWDAKNMMCAADPRHGCYLTASAMFRGKMSTKEVDEQMINVQNKNSSYFVEWIPNNVKSSVCDIPPRGLSMASTFVGNSTSIQEMFRRVSEQFTAMFRRKAFLHWYTGEGMDEMEFTEAESNMNDLVSEYQQYQDATAEDELEYEDEDEEAVHEM

SEQ ID NO: 71798 - protein, 152 aa, Gossypium hirsutum
  unsure (1)..(152): unsure at all Xaa locations
  Clone ID: AI726113.1.pep
RPELTQQMXDAKNMMCAADLRHGCYLTASAMFRGKMSTKEVDEQMINVQNKNSSYFVEWIPNNVKSSVCDIPPRGLFMAFTFVGNSTSIQEMFRRVSEQFTAMFRRKAFLHWYTGEGMDEMEFTEAESNMNDLVSEYQQYQDGTRLECKHNE

SEQ ID NO: 71799 - protein, 143 aa, Gossypium hirsutum
  Clone ID: LIB3825-021-Q1-K6-G2.pep
IGFQVCHSLGGGTGSGMGTLLISKIREEYPHRMMLTFSVFPSPKVSDTVVEPYNATLSVHQLVENADECMVLDNEALYDICFRTLKLTTPSFGDLNHLISATMSGVTCCLRFPGQLNSDLRKLAVNLIPFPRLHFFMVGFAPL

SEQ ID NO: 71800 - protein, 101 aa, Gossypium hirsutum
  unsure (1)..(101): unsure at all Xaa locations
  Clone ID: LIB3585-008-P1-K1-G1.pep
MREILHVQCGQCGNQIGSKFWEVVCDEHGIDPTGRYTGNSSLQLERVNVYYNEASCGRFVSRPVLMDLGPRTIDSXVRTGPLWSISLSPNNFVLRANFGAG

SEQ ID NO: 71801 - protein, 98 aa, Gossypium hirsutum
  Clone ID: LIB3149-026-Q1-K1-F12.pep
GESLTFQGGHAGTQSGPKSWKGVGTNPGFALPDPFPGTSILHWNAVTVYSIKALGGRLAHPPWLLVLNPGTMVSVRTGPYGQIFRPNNFVFGQSGAGN

SEQ ID NO: 71802 - protein, 58 aa, Gossypium hirsutum
  Clone ID: GOSHI-09MAY01-C1945_4.pep
MKRSSYFGCSKKKKKKKKKKKKKKKKKKKKKKKKKKKKKKKKKKKKKKKKKKKKGRPF

SEQ ID NO: 71803 - protein, 75 aa, Gossypium hirsutum
  unsure (1)..(75): unsure at all Xaa locations
  Clone ID: GOSHI-09MAY01-C1945_3.pep
MSCCGGNCGCGSGCKCGXGCGGCKMYPTXTLPNDHNYTLVLGVHPKSTXEGSDMEFAXNRCKCGNNCTCTPCNCK

SEQ ID NO: 71804 - protein, 109 aa, Gossypium hirsutum
  unsure (1)..(109): unsure at all Xaa locations
  Clone ID: GOSHI-09MAY01-C1945_2.pep
RVDPSFCVFVFHTHLARGGGAKSLQFSLSLKKSCCGGNCGCGSGCKCGSGCGGCXMFPDLNVAEMTAAETLVLGVAPQKAHFEGAEMEFGAENGCKCGDNCTCNPCNCK

SEQ ID NO: 71805 - protein, 78 aa, Gossypium hirsutum
  Clone ID: GOSHI-09MAY01-C1945_1.pep
MSCCGGNCGCGSGCKCGSGCGGCKMYPDLNVAEMTTTETLVLGVAPQKAHFEGAEMEFGAENGCKCGDNCTCNPCNCK

SEQ ID NO: 71806 - protein, 93 aa, Gossypium hirsutum
  Clone ID: LIB3272-004-P1-K1-E9.pep
MSCCGGNCGCGSGCKCGSGCGGCKMYPDLNVAEMTTTGTFVLGGAPQKGPFEGAEMEFGLRTLQCETLPCTCNECRAKPALSKPLLKILLCMV

SEQ ID NO: 71807 - protein, 83 aa, Gossypium hirsutum
  Clone ID: LIB3145-008-Q1-K1-B6.pep
CILVSCASLFKVNNARGSKHGEIDERSSLFSSRQTLTSSIPIFIFYTILCISFQIFFILFFLKRNSRFFSFIRNMTHFLTLIM

SEQ ID NO: 71808 - protein, 72 aa, Gossypium hirsutum
  Clone ID: uC-gsronu33B134h03b1.pep
HSRISVRKIGSCIRAAPEGRRRAFTIHGNGRRLLLDLLDSLSDCKITFFYLKRNRSFFSFIRNLTHFLTLIM

SEQ ID NO: 71809 - protein, 53 aa, Gossypium hirsutum
  Clone ID: LIB3148-038-Q1-K1-F8.pep
HYFFLFFFYLVLFIIVFVYLFFSFFFFFFFFFFFFFFFFFLNEIGASSHSLGI

SEQ ID NO: 71810 - protein, 187 aa, Gossypium hirsutum
  Clone ID: GOSHI-09MAY01-C1975_1.pep
DRNVLDCPILFIDDLSVLMVDKKILVFDNACVSESIDRRLMHGMIMQLCEPCKSFQIPTCDDYVYHLIYYSQFIHGLWEQCETTECLKTCPSLFQIFDEAVVSKLDCLHGNLNLSIHMRYTCSVMLMIGLQACFRCYLLSHGYSFQWTQLPLVPFDRGKSSSFDFSDSRTNLFEEGGNDTSHKSPNS

SEQ ID NO: 71811 - protein, 59 aa, Gossypium hirsutum
  Clone ID: LIB3583-017-P1-K1-H3.pep
MPRHIGANVMMYSQVYPHTDQVKICDFGSAKKLVPGEPNISYICSRYYRAPELIFGVTE

SEQ ID NO: 71812 - protein, 52 aa, Gossypium hirsutum
  Clone ID: LIB3825-017-Q1-N6-B5.pep
EYYIELLYTIFFLLTFFSNFVQQFYLGLLFQFYLREIVIRVTKAQILEGEAQ

SEQ ID NO: 71813 - protein, 325 aa, Gossypium hirsutum
  unsure (1)..(325): unsure at all Xaa locations
  Clone ID: GOSHI-09MAY01-C1925_1.pep
FHASEDLEIYSIRYNAKHETVNVPGTGSLWPLSAQSPIGKCGEPNRCAPHLEWNPDLDCSCRDGEKCAHHSHHFSLDIDVGCTDLNEDLGVWVIFKIKTQDGHARLGNPARPPARPPARPALARVKRAEKKWRDKREKLEWETNIVYKEAKESVDALFVNSQYDQLQADTNIAMIHAADKRVHSIREAYLPELSVIPGVNAAIFEELEGRIFTAFSLYDARNVIKNGDFNNGLSCWNVKGHVDVEEQNNQRSVLVVPEWEAEVSQEVRVCPGRGYILRVTAYKEGYGEGCVTIHEIENNTDELKFSNCVEEEIYPNNTVTXCNDY

SEQ ID NO: 71814 - protein, 93 aa, Gossypium hirsutum
  Clone ID: GOSHI-09MAY01-C1895_5.pep
ADVETEVAAAGVPKKRTFKKFSFRGVDLDALLDMPTDELVKLFPARARRRFQRGLKRKPMALIKKLRKGVICLPFPLFISYVYQFWIYLRSKI

SEQ ID NO: 71815 - protein, 152 aa, Gossypium hirsutum
  Clone ID: GOSHI-09MAY01-C1895_3.pep
MAGVETEVAAAGVPKKRTFKKFSFRGVDLDALLDMSTDELVKLFPARARRRFQRGLKRKPMALIKKLRKAKREAPPGEKPEPVRTHLRNMIIVPEMIGSIIGVYNGKTFNQVEIKPEMISHYLAEFSISYKPVKHGRPGIGATHSSRFIPLK

SEQ ID NO: 71816 - protein, 152 aa, Gossypium hirsutum
  Clone ID: GOSHI-09MAY01-C1895_2.pep
MADVETEVAAAGVPKKRTFKKFSFRGVDLDALLDMSTDELVKLFPARARRRFQRGLKRKPMALIKKLRKAKREAPPGEKPEPVRTHLRNMIIVPEMIGSIIGVYNGKTFNQVEIKPEMISHYLAEFSISYKPVKHGRPGIGATHSSRFIPLK

SEQ ID NO: 71817 - protein, 152 aa, Gossypium hirsutum; identical to SEQ ID NO: 71816
  Clone ID: GOSHI-09MAY01-C1895_1.pep

SEQ ID NO: 71818 - protein, 133 aa, Gossypium hirsutum
  Clone ID: uC-gsronu33B124h11b1.pep
FSRPPTRPPTRPLLDMSTDELVKLFPARARRRFQRGLKRKPMALIKKLRKAKREAPPGEKPEPVRTHLRNMIIVPEMIGSIIGVYNGKTFNQVEIKPEMISHYLAEFSISYKPVKHGRPGIGATHSSRFIPLK

SEQ ID NO: 71819 - protein, 91 aa, Gossypium hirsutum
  unsure (1)..(91): unsure at all Xaa locations
  Clone ID: LIB3149-008-Q1-K1-B10.pep
NPKLSTKARGETEVAGGGVPKKRTFKKXASEAGSXDALLEMTTDERDKLFPARARRRFQRGLKRKPMAGRKKLRRAKREGPPGEKPEPGRT

SEQ ID NO: 71820 - protein, 106 aa, Gossypium hirsutum
  Clone ID: GOSHI-09MAY01-C1855_1.pep
GWFSTLPPNHHQFDGRRREIPDSADGGRNHGDLVSRFFPFLFFKKKSSNRISLFQKKKSKTSKWNVRPSPESPYFRDTWVFIGVVSGVSFFYAKKKHKQMRRETND

SEQ ID NO: 71821 - protein, 154 aa, Gossypium hirsutum
  Clone ID: GOSHI-09MAY01-C1805_4.pep
MSYSHNTMGSGSRTARRTFDFGRTHVVRPKGKHQATIVWLHGLGDNGSSWSQLLESLPLPNIKWICPTAPTRPVALLGGFPYTAWFDVSELSENGPDDWEGLDASAAHIANLLSTEPCDVKVGIGGFSMGAAMALYSATACALGSMGNGIIHIN

SEQ ID NO: 71822 - protein, 220 aa, Gossypium hirsutum
  unsure (1)..(220): unsure at all Xaa locations
  Clone ID: GOSHI-09MAY01-C1805_2.pep
MKHFPILILFLFCYSWSQLLESLPLPNIKWICPTAPTRGGGVLGGFPYTAWFDVSELSENXPDDWEGLDASAAHIANLLSTEPCDVKVGIGGFSMGAAMALYSATACALGRYGNGNPYNINLRAIVGLSGWLPGSRCLRNKIEVSHEAARRAASLPIMLGHGTCDDVVPYKHGEISAHSLNVAGFRNLTFKDYEGIGHYTIPKEMNEVCNWLTARLGLEG

SEQ ID NO: 71823 - protein, 72 aa, Gossypium hirsutum
  Clone ID: LIB3829-020-Q6-N6-G1.pep
GIWYTWIWRCFTTWGYLCRNKRSAEFLGIKVAVSNCISFYVVQHQYQYPHLRYFFIYLLLYIGLNVGGIHFG

SEQ ID NO: 71824 - protein, 53 aa, Gossypium hirsutum
  Clone ID: LIB3583-040-P1-K1-D1.pep
DTPLVDSTSRLPRMSEVLKRSTSIRWNKKRQSSFKSMKKKIQGATNEIRNVGR

SEQ ID NO: 71825 - protein, 72 aa, Gossypium hirsutum
  unsure (1)..(72): unsure at all Xaa locations
  Clone ID: LIB3493-038-P1-M1-C6.pep
YKRKTTPTRTVDLLAGFTYTIWLDVSDLSXNPPDDCEGLHASSAHIANLLSTEPCDVKVXIAGFSMGAAMSL

SEQ ID NO: 71826 - protein, 61 aa, Gossypium hirsutum
  Clone ID: LIB3146-055-Q1-K1-B12.pep
FSLYLVLSLELQPCCKPIADFIHLFRDCVMTNPRNLRLCRPQNMTVAISNLKECFNNQLAK

SEQ ID NO: 71827 - protein, 296 aa, Gossypium hirsutum
  unsure (1)..(296): unsure at all Xaa locations
  Clone ID: GOSHI-09MAY01-C1595_11.pep
MDEEYDVIVLGTGLKECILSGLLSVDGLKVLHMDRNDYYGGESTSLNLIQLWKKFRGNDKPPAHLGSSRDYNVDMVPKFMMANGTLVRVLIHTGVTKYLYLKAVDGSYVFNXGKVHKVXRLTWEALKAPXLLGIFEKRRARKFFIYVQDYDAKDSKTHEGMDLTRVSTRALIAKYGLDDNTVDFIGHALALHRDDRYLDEPALDTVKRMKLYAESLARFQGGSPYIYPLYGLGELPQAFARLKCCYGGTYMLNKPECKVEYDDEGKXCGVTXEGETAGVKSCCDPSTANRLEDASC

SEQ ID NO: 71828 - protein, 189 aa, Gossypium hirsutum
  unsure (1)..(189): unsure at all Xaa locations
  Clone ID: GOSHI-09MAY01-C1595_8.pep
YEYINEDIFGNTSDVLWKYNAAHKKVPALLHNGQSMVESVVILEYIEETWKHNLYLPHDPYDKATARFWIKFIDEKLXWSPENEREKVTNEACEYMKTLESALNGKKFFGGETIGMVDIVASSVGYFIRVTQEIMGLNLLSADKFPQLFQWSEDFANCSIVDESLPARDKLLPFVKGLIAKYQQDNAKA

SEQ ID NO: 71829 - protein, 149 aa, Gossypium hirsutum
  Clone ID: GOSHI-09MAY01-C1595_4.pep
MGEEVKVFGAWASPFSRKVELALRLKGVPYDYIEEDLNNKSSLLLQYNSVHKKVPVLLHNGKSIAESIVILEYIEETWKTYPILPQDPNDKAMARFWINFIDGKCSSAIRKVAFSPEEEREKAVEEACECLKTLARALNGKKFFGGDTI

SEQ ID NO: 71830 - protein, 444 aa, Gossypium hirsutum
  Clone ID: GOSHI-09MAY01-C1595_2.pep
MDEEYDVIVLGTGLKECILSGLLSVDGLKVLHMDRNDYYGGESTSLNLIQLWKKFRGNDKPPAHLGSSRDYNVDMVPKFMMANGTLVRVLIHTDVTKYLYFKAVDGSYVFNKGKVHKVPATDMEALKSPLMGIFEKRRARKFFIYVQDYDAKDPKTHEGMDLTRVSTRALIAKYGLDDNTVDFIGHALALHRDDRYLDEPALDTVKRMKLYAESLARFQGGSPYIYPLYGLGELPQAFARLSAVYGGTYMLNKPECKVEYDDEGKVCGVTSEGETARCKKVVCDPSYLPNKVRKIGKVARAIAIMSHPIPNTNDSHSVQIILPQKQLGRKSDMYVFCCSYSHNVAPKGKFIAFVSTEAETDHPESELKPGIDLLGPVDEIFFDIYDRYEPVNEPSLDNCFISTSYDATTHFESTVSDVLNMYTMITGKVLDLSVDLSAASAAEE

SEQ ID NO: 71831 - protein, 225 aa, Gossypium hirsutum
  Clone ID: GOSHI-09MAY01-C1595_1.pep
MGEEVKVFGYWASPYSYRAELALKLKGVSYEYINEDIFGNKSDLLLKYNPVHKKVPVLLHNGKPIVESLVILEYIEETWKHNPYLPQDPYDKATARFWIKFIDEKCFPTLWLAAWSAENEREKVTNEACEYLKTLESALNGKKFFGGETIGMVDIVASSVGYFIRVTQEIMGQNLLSADKFPQLFQWSEDFANCSIVKESLPPRDKLLPFVKGLIAKYQQDNAKA

SEQ ID NO: 71832 - protein, 164 aa, Gossypium hirsutum
  Clone ID: uC-gsronu33B124a06b1.pep
AGGVYAMKYCSLVAENSGRGWKLLALILSADRRFKDAETILEFALDESSGSDQLELLRLKAVLQIAQERPKQAIETYSILLSLIQAQREAQSNNSGHAKSSHTENIAGRNMEMADWQDLATVYTKFGSWPDAEICLNKAKSIDFYSPQGWHTTGLLFEAHHFIK

SEQ ID NO: 71833 - protein, 89 aa, Gossypium hirsutum
  unsure (1)..(89): unsure at all Xaa locations
  Clone ID: uC-gsronu33B147h09b1.pep
MGEEVKVFGYWASPYSYRAELALKLKGVSYEYXNEDIFGNKSDLLLKYNPVHKKVPVIIHIGKPIVESLVILEYIEETXKHNCYLSHDP

SEQ ID NO: 71834 - protein, 115 aa, Gossypium hirsutum
  Clone ID: uC-gsronu33B042e09b1.pep
YLLLKYNPVHKKVPVLLHNGKPIVESLVILEYIEETWKHNPYLPQDPYDKATARFWIKFIDEKCFPTLWLAAWSAENEREKVTNEACEYLKTLESALNGKKLFFGSILLVMVYYC

SEQ ID NO: 71835 - protein, 65 aa, Gossypium hirsutum
  Clone ID: uC-gsronu33B111e07b1.pep
SFPARYFRAKSGGPANFRIHSTGLDISPIAGLLRKACLHETNYFPLSKVSLPNISKIMLRPYLSQ

SEQ ID NO: 71836 - protein, 99 aa, Gossypium hirsutum
  Clone ID: uC-gsronu33B111e01b1.pep
VNLFFHSNIKASRSLHTKAANSFIGKMHSFNHCEIRTNRKRVLDHAIAFSVGLLLVHIIVLSLMKASFPYPLHNRKNVHSWSMNAEICPSATKLFSIIS

SEQ ID NO: 71837 - protein, 92 aa, Gossypium hirsutum
  unsure (1)..(92): unsure at all Xaa locations
  Clone ID: uC-gsronu33B031g01b1.pep
MGKWIALIEPEAGTNDPWGELKPGIDLLGPVDEIFFDIYDRYEPVNEPFFDNCFILTGFGGSTHFDXNVSDVLNMYTMITGKVFDLNVDLGA

SEQ ID NO: 71838 - protein, 57 aa, Gossypium hirsutum
  Clone ID: uC-gsronu33B124a12b1.pep
LITHKSSKYKKGKLHATIIVTGVHWESLGRLSAESINANSFQPLPEFSATRLQYFIA

SEQ ID NO: 71839 - protein, 58 aa, Gossypium hirsutum
  unsure (1)..(58): unsure at all Xaa locations
  Clone ID: LIB3145-025-Q1-K1-D9.pep
RIITLKHGICQCLCLFKLLNSVECCWWDLYLLHHVFFTTQDTIFNDLMIFKRXKKKNK

SEQ ID NO: 71840 - protein, 207 aa, Gossypium hirsutum
  unsure (1)..(207): unsure at all Xaa locations
  Clone ID: GOSHI-09MAY01-C1585_1.pep
FGEKLSPFLGGGKPVGLFDLENHFAFYGAYHSNPINIFIHTLFVWPIFFXLLVLSTLHPPVGDFSQSGNLALXFNHVLVFNYGFLFALIYGLFYVILDKKAGSLAALICLVCWVGATFLAAHLGYSLAWKVVLAAQLFCWTGRFIGHGVFEKRAPALLDNLVQAFLMAPFFVLLEVLQSLFGYEPYPGFHARVKAKIEAEIKEWEDK

SEQ ID NO: 71841 - protein, 206 aa, Gossypium hirsutum
  Clone ID: GOSHI-09MAY01-C1545_1.pep
MSSLAAARADNFYYPPEWDPSQGSLNKFHGQHALRERARKIDQGILIIRFEMPFNIWCGGCNSMIAKGVRFNAEKKQVGNYYSTKIWSFTMKSACCKHEIVIQTDPKNCEYVIISGAQRKTEVFDVEDAETLELPADEGYICSAERGKLADPFYRLEHQEEDLQKKKEAEPVLVRLQRVSDARHSDDYALNKALRAKLRSQKKRVF

SEQ ID NO: 71842 - protein, 151 aa, Gossypium hirsutum
  unsure (1)..(151): unsure at all Xaa locations
  Clone ID: LIB3583-008-P1-K1-E4.pep
MSSLAAARADNFYYPPEWDPSQGSLNKFHGQHALRERARKIDQGILIIRFEMPFNIWCGGCNSMIAKGVRFNAEKKQVGNYYSTKIWSFTMKSACCKHEIVIQTDPKNCEYVXISGAQRKTEVFDVEDAETLELPADEERGKLADPFYRLE

SEQ ID NO: 71843 - protein, 90 aa, Gossypium hirsutum
  Clone ID: LIB3197-013-P1-M1-A11.pep
MSSLAAARADNFYYPPEWDPSQGSLNKFHGQHALRERARKIDQGILIIRFEMPFNIWCGGCNSMIAKGVRFNAEKKQVGNYYSTKVSSFY

SEQ ID NO: 71844 - protein, 130 aa, Gossypium hirsutum
  unsure (1)..(130): unsure at all Xaa locations
  Clone ID: LIB3147-027-Q1-K1-E3.pep
TPPRGRRRSPEGEELFFSLALVKPNTFNYPPKWNPGQASLTRFNGHHPLKERPRKINQGFLIIRSEMPFNIWGGGGNSMIAKGVRFNPEKKQVGNYFSPKIWSFTMKSACCKHEIVIQTDPXNGEYVIIS

SEQ ID NO: 71845 - protein, 303 aa, Gossypium hirsutum
  Clone ID: GOSHI-09MAY01-C1575_1.pep
RLSFSLRAGRDGLSAHSLRVGKICNRQSGEGSSDENSLPSMPSLYVISFLCQACAEIHRIGGHALDKPMAQRFAWSLIEKVISIYKNCLSTREASGAQVSEKGILQVLLDIRFAADVLSGGDFNVNEELSIKPKSKSAFRRKQDHIQTKSAVRDSVDGLIYSFSQKLDPIDWLTYEPYLWENEKQSYLRHAVLFGFFVQLNRMYTDTVQKLPTNSESNIMRCSVVPRFKYLPISAPALSSRGNNGKPIMAASNDVTSRSSWKAYTNGELSQKGDLDDHQSFGVATPFLKIFHCRVGADSERAR

SEQ ID NO: 71846 - protein, 64 aa, Gossypium hirsutum
  Clone ID: GOSHI-09MAY01-C1565_2.pep
LTLEDGIIIFPLYLPLCCTGGEMLKSSKVESSVHSWLNPSFVVGVVQCGVCSAEDLLSSYFELT

SEQ ID NO: 71847 - protein, 104 aa, Gossypium hirsutum
  unsure (1)..(104): unsure at all Xaa locations
  Clone ID: GOSHI-09MAY01-C1565_1.pep
GGYGGNDGCXGNAGYGAAGGRSGGTPNSNAGAGGGDLQGSGGGYMGSGYGDVNGSSGYGSATWWSDSSQGSGNYGGAQANGPHGGQGGYGGGYGGAQGRQAQQQ

SEQ ID NO: 71848 - protein, 62 aa, Gossypium hirsutum
  Clone ID: LIB3148-051-Q1-K1-H12.pep
TLPNIRYWSSKTKRKKARQIKLHSVAQPNKGIYYASKLLIMANKIDTANYRVSSNPTDPKGI

SEQ ID NO: 71849 - protein, 43 aa, Gossypium hirsutum
  Clone ID: uC-gsflnu33B085a05b1.pep
ASSSFTVVMSSISASISFIVVVHFCIFIYFLFFSLLPNFPRLI

SEQ ID NO: 71850 - protein, 213 aa, Gossypium hirsutum
  Clone ID: GOSHI-09MAY01-C1505_1.pep
PTRPPTRPPTRPPTRPPTRPPETLLWKSLNHNGRTVFIEENRYYAAYFEEIHPEIDVFDVQYTTKMNETKELIASAKEQIHNECRPVQNLLFSDCKLGINDLPNHVYEVDWDVILIDGPRGNGPESPGRMQPIFTAGVLARSKKGGSLKTHVFVHDYYRDVEQMSGDEFLCRENMVERNDMLAHFMVERMEESSFQYCRNKNNASSSTKASVS

SEQ ID NO: 71851 - protein, 665 aa, Gossypium hirsutum
  Clone ID: GOSHI-09MAY01-C1495_1.pep
PTRPPTRPILETFGAEKAVEIKKLEKTLNKKEAEISELSETVEKLRNGLNGVKDLNDQLNYQVVIRSDLLKQKTIELSEADEKLQAAHNLNAELYQTLEELKREYEESKQIRENLERQIVELSEDNKEQKMEIEHLREANDNLGSKVVTLHKGNRRKKDVWTKTLGLELQEKSIEFKLWEAEAASFYFDFQASAVCEVLRENKVHELTEVCETLEEESAVKSAQIGQMKERVEFLESEIGGLKVSTSAYVPVIASLKDSIISLEQIALLQPKLCVPNGDEDKDVEMVDELYVMSSEKLEEGQSAFLTAGISDLQEMCTKVKAVEKAVVQEMNRLVKRKSNKNSHDIDASSKAINPSNSEMKKGMQVGDEVARKLKSKKMKPEISELRNGILLKDIPLDHVSDSSLYRRSKSKKETSTADDQMLELWESAEHECGVDSKTNDMQVRAFVPGEIIACHQSSDLEPENQSSLGALVEKELSVDKLEISTSIREPKKRAKNRKVLDRLASDAHKLMALQTSVKQLKKRMEIKKRKKAFDLEYGQVKEQLQEVEDAIKELCNVNGELTKDVEGSSSLDGTNSMELEGPGKGNLKNVREQAQKGSEKIGRLQFEVQSIEYVMLKLEDERKNKGKTRTGVLLRDFIYNGGRRGGRRKKGCFCGCARPSSSID

SEQ ID NO: 71852 - protein, 124 aa, Gossypium hirsutum
  Clone ID: GOSHI-09MAY01-C1455_1.pep
KQEDIILHKPSAKPPKNPPGQKPGPPNPGPQGPPGPGPQPGPPGPNPPGPPGPGPQPPGPPPHPPGPPGPPGPPPGPPGPILLTCYLAVSVHHFHHQEDVAEEIIRVVKHRYVRNSLKKNRKGG

SEQ ID NO: 71853 - protein, 76 aa, Gossypium hirsutum
  Clone ID: LIB3585-024-P1-K1-C12.pep
PGGPGGFGPGGPGWGPGPGGPWGPGFGGPGFWPGGFFGGFADGLCNMISSCFYCLCCCWLLQDCFGRRPGYGPRPF

SEQ ID NO: 71854 - protein, 389 aa, Gossypium hirsutum
  unsure (1)..(389): unsure at all Xaa locations
  Clone ID: GOSHI-09MAY01-C1445_1.pep
PTRPPTRPEVLDNSRDKYHELLFEXECRQQISNVLSNDSYNMMVMNKDSDYENNVLAFHLQTSDVMPAFPYIAPFSSMVPDCCRIVRSFIKSSVDYLSFGVNSNFYDAARKYLDKLLIDVLNEVVVTTVQSDGIAETQAMQIAENIPFLERSCDFFLQHAAHLCGIPVRSVERPQASLTAKVVFKTSRHAAYLAVVNSVNSKLDNFLALTENINWTAEEISENNSEYMNDAVFCLHTGFSTARQILPLDALYTVGCGALEHISNSIVAAFLSDSVKRFNANAVMVINQDLQKLESCADERFHSTRLSEVYEEGSFRSSLIEARQLINLLSSSQPENFADLVIREKSYNXLDRKKAASIVEILMDSADGIYGSLSIQNTXTSSRKKSMDM

SEQ ID NO: 71855 - protein, 173 aa, Gossypium hirsutum
  Clone ID: GOSHI-09MAY01-C1465_1.pep
MELMKSENIVQDRQPQPQEEEEIMQQEEEEEQRFHVLAVDDSVIDRKLLEKLLKASSYQVTCVESGEKALEYLGLLHHSSPASSSSQHHHQGHKVNLIMTDFSMPGTSGYDLLKRIKGSSWKDVPVVVMSSENVPSRISMCLEGGAEEFMLKPLQLSDLHKIQAHLLKSLPHS

SEQ ID NO: 71856 - protein, 141 aa, Gossypium hirsutum
  Clone ID: LIB3585-024-P1-K1-D10.pep
MELMKSENIVQDRQPQPQEEEEIMQQEEEEEQRFHVLAVDDSVIDRKLLEKLLKASSYQVTCVESGEKALEYLGLLHHSSPASSSSQHHHQGHKVNLIMTDFSMPGTSGYDLLKRIKGSSWKDVPVVVMSSENVPSRISIK

SEQ ID NO: 71857 - protein, 149 aa, Gossypium hirsutum
  Clone ID: GOSHI-09MAY01-C1415_1.pep
RIVEWEGGEKIGEKAASEWLYIVPWGLRKVLNYIARKYNNPPIYITENGMDDEEDNSLPLNEILDDKLRVHYFKGYLAAVAQAIKDGADVRGYFAWSLLDNFEWAQGYTKRFGLVYVDYKNGLTRHPKSSAYWFSRFLKGGEKKNGKEN

SEQ ID NO: 71858 - protein, 345 aa, Gossypium hirsutum
  Clone ID: GOSHI-09MAY01-C1405_1.pep
MLQYISTLQDTLKSRTPGRARDNKDIGLDRKEGAQNSRKTDLISNEEEWSIVQGALQILTVADCLTSRSSVFEASLRATLARLGATLSLSVFGSSLDNNQLHVANDDGNGEPPLGGRAALDVAAVRLVDVPEKAQKLFNLLDQSKDPRFHALPLASQRVAAFAEAVNELVYDVLISKVRQRLSEVSRMPIWSAAEEQNAFRLPTFSAYPQPYVTSVGEYLLTLPQQLEPLAEGISNSDANNDEAQFFATEWMFKVAEGSTALYMEQLRGIQYITDGGAQQLSVDIEYLSNVLSALSMPIPPVLATFQTCLGTPKDQLKNLLNSDNGNQLDIPTANLVCKIRRLNW

SEQ ID NO: 71859 - protein, 110 aa, Gossypium hirsutum
  Clone ID: LIB3083-116-Q1-L1-E4.pep
AIVQGALQILTVADCLTSRSSVFEASLRATLARLGATLSLSVFGSSLDNNQLHVAYDDGIGEPPLGVCSALDCFFVHLCFFIFLWLFFFFFFFFFFLFIFLFLFFFFFFF

SEQ ID NO: 71860 - protein, 160 aa, Gossypium hirsutum
  Clone ID: GOSHI-09MAY01-C1435_2.pep
FIIFQILSIFLYLNSLHSRIHEVLICRTLYESMMDSEDVLPVEGLEVALQNGVNRKLQVSEDDHGFSDNVTGNVEKTLETCLQNEMDDNGITYEDREGMSGFVDSNGLIDSKEGEVKDNVKQSKSHKVQGKTKNEKPSCPRNVSSALVKKSKDGKSAEAT

SEQ ID NO: 71861 - protein, 200 aa, Gossypium hirsutum
  Clone ID: GOSHI-09MAY01-C1435_1.pep
MMDSEDVLPVEGLEVALQNGVNRKLQVSEDDDGFSDNVTGNVEKTLETCLQNEMDDNGITKEDREGMSGFVDSNGLIDSKEGEVKDTVKQSKSQKVQGKTKNEKPSGPRNVSSALVKKSKDGKSAEATLTASKGGSLATNSRPKQPLQSSRSFNEKHGNASKHSEKSGAAFTKGTMEKPKLKPLKKGPIHKTEVDTELSS

SEQ ID NO: 71862 - protein, 94 aa, Gossypium hirsutum
  Clone ID: LIB3583-043-Q6-K1-A10.pep
ENLETCLQNEMDDNGITKEDREGMSGFVDSNGLIDSKEGEVKDNVKQSKSQKVQGKTNIEKPSGPRNVSSALVNKKYRWKKCIGNFDSFKGCVY

SEQ ID NO: 71863 - protein, 60 aa, Gossypium hirsutum
  Clone ID: LIB3197-047-Q1-M1-C4.pep
IDVTYLTPSLDHNQCIRSNHLLIFLVSISPFHLQQVSKLSHIPVTYLKTIVVLRHLKFPN

SEQ ID NO: 71864 - protein, 90 aa, Gossypium hirsutum
  Clone ID: LIB3583-028-Q6-K1-C1.pep
EFHVGFKCMMDSEDVLLVEGLEVALQNGVNRKLQVSEDDDGFSDNVNGNVEKTLETCLQNEMDDNGITKEDGEGMSGFVDSNGLIDFNEW

SEQ ID NO: 71865 - protein, 89 aa, Gossypium hirsutum
  Clone ID: GOSHI-09MAY01-C1785_1.pep
MNMSFSHDMGDEYEKFIRRMNPPRVVIDNEACKNATVIRVDCANEHGILLEVVQILTDLNLIINKAYISADGNWFMDGNISRLLTFGLV

SEQ ID NO: 71866 - protein, 358 aa, Gossypium hirsutum
  unsure (1)..(358): unsure at all Xaa locations
  Clone ID: GOSHI-09MAY01-C1755_1.pep
MSTSSQTQFRYTQTPSKVLHLRNLPWECTEEELVELCKPFGKIVNTKCNVGANRNQAFVEFVDLNQAISMVSYYASSSEPAQVRGKTVYIQYSTSHEIVNNKSPGDTPGNVLLVTIEGVEANDVTIETIHLVFSAFGFVHKIATFEKAAGFQALIQFTDAETASSARNALDGRSIPRYLLPGHVTSCHLRISYSAHTDLNIKSHASHRSRDYTNPYLPVNPTXAMEGLMQPVVGPDGKKQEPQSNVLLASIENMQYAVTVDVLHSVFSAFGTVQKIAIFEKNGGTQALIQYPDVTTAAVAKESLEGHCIYEGGYCXSDKSRDYTILDLSLLATQGPSMPCTPNAWQNPQNAPLYPGTD

SEQ ID NO: 71867 - protein, 160 aa, Gossypium hirsutum
  unsure (1)..(160): unsure at all Xaa locations
  Clone ID: LIB3582-044-P1-K1-H11.pep
MSTSSQPQFRYTQTPSKVLHLRNLPWECAEEELVELCKPFGKIVNTKCNVGANRNQAFVEFADLNQAISMVSYYASSSEPAQIRGKTVYIQYSNRHEIVNNKSPGDTPGNVLLVTIEGVEPNDVTIETIHLVFSAFGXVHKIATFEKAAGFQALIQFTDA

SEQ ID NO: 71868 - protein, 172 aa, Gossypium hirsutum
  Clone ID: LIB3584-047-P1-K2-F11.pep
TVQKIAIFEKNGGTQALIQYPDVTTAAVAKESLEGHCIYEGGYCKLHLSYSRHTDLNVKAYSDKSRDYTISDLSLLATQGPGMPATPNAWQNPQNAPLYPGTDYAASAAMQAQPSAGQVPAWDPSLQARPSYGSVPGTVPGQAYQASAVPTYMNAAPPAGSSPLSQPGATSM

SEQ ID NO: 71869 - protein, 161 aa, Gossypium hirsutum
  Clone ID: GOSHI-09MAY01-C1705_1.pep
MASSSGNSMSNSGSEEDLHNQRKRKRMESNRESARRSRMRKQKHLDELMAQVTQLVKDNNQILTTINFTTQHYINMEAENSVLRAQMMELSQRLESLNEILNYLNSGTNSNNSNDGFETSEGFETTSDESFTTIISNHNNNPFVIMNQPIMASSDMMMFQY

SEQ ID NO: 71870 - protein, 163 aa, Gossypium hirsutum
  Clone ID: GOSHI-09MAY01-C1695_2.pep
MSYHKELAAAKKAASLAARLCQNVQKALLQSDVQSKTDKTPVTVADYGSQALVSFVLQQELHAEFSLVAEEDSKDLRKDGAQEIVERITKLVNDSLTSDGSYNVTLSTEDVLTAIDSGISEGGCQGRHWVLDPIDGTKGFLRRDQYAIALALLDGGKSVLGVL

SEQ ID NO: 71871 - protein, 115 aa, Gossypium hirsutum
  unsure (1)..(115): unsure at all Xaa locations
  Clone ID: LIB3828-016-Q1-K6-D5.pep
MNIKTKAFFTVLVLSSCMVETKAFMLQSFTLILTKSLLLRKIISMASLLSGSQAVVSFVLQRELHAEFLLVAEEDSKDLRKDGAQEXVEHITELVNDSLTSDGSYNVTLSTKDVL

SEQ ID NO: 71872 - protein, 118 aa, Gossypium hirsutum
  unsure (1)..(118): unsure at all Xaa locations
  Clone ID: LIB3584-027-P1-K1-F5.pep
MILSFGLNVQKALLQSDVQSKTDKTPVTVADYGSXALVSFVLQQELHAEFSLVAEEDSKDLRKDGAQEIVERITKLVNDSLTSDGSYNVTLSTEDVLTAIDSGIFEGGCQGRHWVLNP

SEQ ID NO: 71873 - protein, 120 aa, Gossypium hirsutum
  unsure (1)..(120): unsure at all Xaa locations
  Clone ID: LIB3196-027-P1-M1-D9.pep
PTLSSSHQLSACFTCLHSLLASCISRQSDHYSLNEAWTACNRKHASLAARLCQNVQKALLQSDVQSKTDKTPVTAADYGSQALVSFVLQHELHAXFSLVAEEDSKDLRKDGASEIVERIT

SEQ ID NO: 71874 - protein, 136 aa, Gossypium hirsutum
  Clone ID: GOSHI-09MAY01-C1675_1.pep
MAKQPHPESLPTKEKPKAKAKKQKKSADEDGAKAEAAPEELAVADGGSHNKTVVVEHCKQCNSFKTRAFQVRDGLEKGVPWVKVLLNPEKPRRGCFEIREEGGETFISLLDMKRPFKPMKELDMEKVISDIIEKIK

SEQ ID NO: 71875 - protein, 150 aa, Gossypium hirsutum
  Clone ID: GOSHI-09MAY01-C1665_1.pep
MSSWRNLLLRIGDKSSEYSSSSDFKDHIETCFGALRRELGHSSAEILSFLLQCAEQLPHKIPLYGTLIGLLNLEDEDFVKQIVENTQNSFQDALDSGNCDGIRILMRFLTALMCSKVLQPTSLVVVFETLLSSAAITVDEEKGNPSWQAR

SEQ ID NO: 71876 - protein, 184 aa, Gossypium hirsutum
  unsure (1)..(184): unsure at all Xaa locations
  Clone ID: GOSHI-09MAY01-C1615_3.pep
MGPLAFALASDEIKPGDHIYTYRAVFAYSHHGIFVGGSKVVHFRPERNLDSSIDTSSNLLDPTFPQSTCPTFPDCGFRQPNSGVVLSCLDCFLRNGSLYCFEYGVTPSVFLAKVRGGTCTTAASDPLETVIHRAMYLLQNGFGNYDIFENNCEDFALYCTTGLLILDNLGIGXSGQASSVIGAP

SEQ ID NO: 71877 - protein, 165 aa, Gossypium hirsutum
  Clone ID: GOSHI-09MAY01-C1615_2.pep
MLVECQNHASHLGISVGGSLVAHFRPERNVDSSSDTSSNLLDPTFPQSTGPTFPDCGFRHPNSGVVLSCLDCFLRNGSLYCFEYGVTPSAFLAKVRGGTCTTAASDPLETGIHRAMYLLQNGFGNYDIFENNCEDFALHCKTGLLMLDNLGIGRSGQASPEIGAP

SEQ ID NO: 71878 - protein, 151 aa, Gossypium hirsutum
  unsure (1)..(151): unsure at all Xaa locations
  Clone ID: uC-gsronu33B012c02b1.pep
MRLGDVLLEQFLVWLNHVGIFVGGSKVVHFRPERNLDSSTEPSSDLYNPISPRSTCPTFPDCGFRQPNSGVVLSCLDCFLRNGLLYCSEYGVTPSVFLAIVRGGTCTTAMSDPPETVIHRAMYLLXNGFGXYDIFQNNCEDLHCMQNCLRL

SEQ ID NO: 71879 - protein, 73 aa, Gossypium hirsutum
  Clone ID: uC-gsronu33B081f12b1.pep
MGLLTNRVERNEIKPGDHIYTYRAVFAYSHHDPTFPQSTCPTFPDCGFRQPNSGVVLSCLDCFLRNGSLYCLE

SEQ ID NO: 71880 - protein, 163 aa, Gossypium hirsutum
  Clone ID: GOSHI-09MAY01-C1635_1.pep
QRLQRATTAIFFDAAFDSQNHRSASGLIVKNEEGRIVGAKSILHDNVASPFAAEAHAGFQATMLGAQLGYHTLDIIGDSRAVITKCQSENRDKSEIGPIISDIQSLKDFFQKVRFYFIPRFENIEAHRLAKRSLKKKEEQYLEGETLRSIWDESEPNCLGCSE

SEQ ID NO: 71881 - protein, 70 aa, Gossypium hirsutum
  Clone ID: GOSHI-09MAY01-C1155_1.pep
SNYQPDKCGVDLDKSQFKSIQPRDKQSLRGKICFRNHKNSSIQNMWIICPLSLLDLIVVKPLGSYIKMYI

SEQ ID NO: 71882 - protein, 80 aa, Gossypium hirsutum
  Clone ID: uC-gsronu33B018b08b1.pep
RDCFSPSSYIFIKFPLLYIQKSFKPKSSLFFLSSRSSFLLTLEQSNMVNAKKLIKLARKWQKMAVIRRKRITSSSATSDR

SEQ ID NO: 71883 - protein, 198 aa, Gossypium hirsutum
  Clone ID: GOSHI-09MAY01-C1145_2.pep
FMSGFTARWKYYFIWSISEASILISGLGFRGWTESSPPKPKWDRAKNVDIPGVEFAKSAVVLPLVWNIQVSTWLRHYVYERLITKGKKPGFFQLLATQTVSAVWHGLYPGYMLFFVQSALMIAGSRVIYRWEQASNVGLVKKTLVFINFAYTLLILNYSACGFLVLSLHESLAVDGSVYYVGTILPITLILLGYIIPA

SEQ ID NO: 71884 - protein, 269 aa, Gossypium hirsutum
  Clone ID: GOSHI-09MAY01-C1145_1.pep
PVYEMKDYLDWTEGKGIWAHSDKGPSPSPYVATLRALVQASFCMAMFLYLSPSHPLSWFTDPAYQEWGFWRKLSYQYMSGFTMRWKYYFIWSISEAALIISGLGFSGWTESSPPKPKWVRAKVVDILGFELAKSSVLLPLVWNIQVSTWLRHYVYERLVKKGKKPGFFQLLATQTVSAVWHGLYPGYIIFFVQSALMIAGSRVIYQWEKAVPTNMALVKKAFAVVNFAYTLLVLNYSCVGFMVLSKHETLASYGSVYYIGTIIPIALII

SEQ ID NO: 71885 - protein, 95 aa, Gossypium hirsutum
  unsure (1)..(95): unsure at all Xaa locations
  Clone ID: LIB3585-020-P1-K1-D4.pep
PAYQEWGFWRKLSYQYMSGFTMRWKYYFIWSISEAAMVISGLXFSGWTESSPPKPKWDRAKVVDILGFELAKSSVLLPLVLNIQVSTWLRHCECF

SEQ ID NO: 71886 - protein, 140 aa, Gossypium hirsutum
  Clone ID: GOSHI-09MAY01-C1165_4.pep
KRHKLHWPYSSVRAPAYPGAEHVGGDMFESVPKGDAIFMKWICHDWSDEHCSKFLKKCYEALPDSGKVIVAECILPDYPDPSLATKLVVHIDCIMLAHNPGGKERTEKEFEALARSAGFQGFQVKCCAFGTYIMEFVKRV

SEQ ID NO: 71887 - protein, 145 aa, Gossypium hirsutum
  Clone ID: GOSHI-09MAY01-C1165_3.pep
MPKNKGKGGKNRKRGKNEADDEKRELIFKEDGQEYAQVSRMLGNGRCEAMCIDGTKRLCHIRGKMHKKVWIAAGDIILVGLRDYQDDKADVILKYMPDEARLLKAYGELPENTRLNEGIAGGIDEEDDGAGDDYIEFEDEDIDKI

SEQ ID NO: 71888 - protein, 269 aa, Gossypium hirsutum
  Clone ID: GOSHI-09MAY01-C1165_2.pep
MGSTGETQMTPTQVSDEEANLFAMQLTSASVLPMVLKSAIELDLLEIMAKAGPGAFLSPKELASQLPTSNPDAPVMLDRILRLLATYSILTCSLRTLPDGKVERLYGLGPVCKFLTKNEDGVTLSALSLMNQDKVLMESWYYLKDAVLEGGIPFNKVYGMTAFEYHGTDPRFNKVFNRGMSDHSTITMKKILETYDGFEGLKTLVDVGGGTGATLNMIVTKHPSIKGINFDLPHVIEDAPAYPGVEHVGGDMFESVPKGDAIFMKVSLN

SEQ ID NO: 71889 - protein, 365 aa, Gossypium hirsutum
  Clone ID: GOSHI-09MAY01-C1165_1.pep
MGSIGETQMTPTQVSDDEANLFAMQLASASVLPMVLKSAIELDLLEIMAKAGPGAFLSPKEVASKLPTTNPDAPVMLDRILRLLASYNVLTCSLRTFPGGKVERLYGLGPVCKFLTKNEDGVTLSALSLMNQDKVLMESWYYLKDAVLDGGIPFNKAYGMTAFEYHGTDPRFNKVFNRGMSDHSTITMKKILDTYDGFQGLKTLVDVGGGTGATLSMIVSKYPTIKGINFDLPHVIEDAPSCPGVEHVGGDMFVSVPKGDAIFMKWICHDWSDEHCAKFLKNCYEALPDNGKVIVAECILPDYPDPSLATKLVVHIDCIMLAHNPGGKERTAKEFEALATGAGFQGFQITCSAFGTNIMEFLKSV

SEQ ID NO: 71890 - protein, 51 aa, Gossypium hirsutum
  Clone ID: uC-gsflnu33B016b04b1.pep
VSQYTSFNELLNEPLSHATVSCVYTTDFQTSGLYLLNVIFSVTVITYLELT

SEQ ID NO: 71891 - protein, 87 aa, Gossypium hirsutum
  Clone ID: LIB3584-045-P1-K2-A1.pep
NDCVYLFIFCRYLDQLCQTLIFIICIQHTKDAVLDNIQGIRFSVSQFSGEVIIEPSCWTVSRYYLKDAVLDGGIPFNKAYGMTAFEY

SEQ ID NO: 71892 - protein, 93 aa, Gossypium hirsutum
  Clone ID: LIB3585-059-P1-K1-G12.pep
IQHPLCLIKHDHMPKPDSGKVIVAECILPDYPDPSLATKLVVHIDCIMLAHNPGGKERTEKEFEALARSAGFQGFQVKCCAFGTYIMEFVKRV

SEQ ID NO: 71893 - protein, 146 aa, Gossypium hirsutum
  unsure (1)..(146): unsure at all Xaa locations
  Clone ID: uC-gsflnu33B112e12b1.pep
MGSIGQTQMTPTQVSDDEASLFAMQLASASVLPMVLKSAIELDLLXIMAQAGPGAFLSPKEVGFELPTTNPDAPVMLDRILRLLASYNVLSXALRTFPGGKVERLYGLGPVCKFLTKNEDGVTLSALSLMNQDKVLMESWYYLKDA

SEQ ID NO: 71894 - protein, 81 aa, Gossypium hirsutum
  unsure (1)..(81): unsure at all Xaa locations
  Clone ID: LIB3148-046-Q1-K1-C2.pep
GTXXIRIXXFXXSLXXCHXFEFNFKKYXXVIXXGXXGHAFIIAPMDCWIYCYYTXDLXFYYVNGIXFSLKKKKKNKKKKKL

SEQ ID NO: 71895 - protein, 118 aa, Gossypium hirsutum
  Clone ID: LIB3165-039-Q1-K1-B1.pep
MGSTGETEITPTQTSDEENNLLAMQITKDSLLAMGLNSDIQIDLLTIMSEPKTNATLYQKELSYHFLTINRDVTVMLDRMSLIMGIYCILTCSLRTISDGERERLYGLGPVCKFLTNN

SEQ ID NO: 71896 - protein, 117 aa, Gossypium hirsutum
  unsure (1)..(117): unsure at all Xaa locations
  Clone ID: LIB3585-045-Q6-K1-C1.pep
VRPRVRQFFFGSSITPDITRGSIGEAQMTPTXVLNNKPIFFSVNCASXDLPMVLKSAIELDLLEIMAKAGPGAFLSPKEVASKLPTTNPDAPVMLDRILRLLASYNVLTCYLRTFPG

SEQ ID NO: 71897 - protein, 481 aa, Gossypium hirsutum
  Clone ID: GOSHI-09MAY01-C1105_1.pep
GASSYSHDSLAIATFGAMEMGVFVSCSAGNGGPDPVSLTNVSPWITTVGASTMDRDFPGSVKLGSGRTISGVSLYKGRRLLQANKQYPLVYMGSNSSSPNPSSLCLEGTLDPHVVSGKIVICDRGINPRVQKGQVVKDAGGVGMILTNTAANGEELVADCHLLPAVAVGEMEGKAIKHYALTNGKPTATLAFLGTRLGVRPSPVVAAFSSRGPNFLTLEILKPDVVAPGVNILAAWTGELGPSSLPTDHRRVRFNILSGTSMSCPHVSGIAALIKARHPDWSAAAVKSALMTTAYVHDNIHNPLQDSSTAAASTPYDHGAGHINPLKALDPGLIYDISAQDYFVFLCTQKLTAMQLKAFSKHSNMSCHHNTLATPGDLNYPAISVVFPEDTAISTLTLHRTVTNVGPPASHYHVVVSPFKGVTIKVEPKTLNFTRRNQKLSYKISFTRKSPQTMPEFGGLVWKDGVHKVRSPIAITWLPPF

SEQ ID NO: 71898 - protein, 120 aa, Gossypium hirsutum
  Clone ID: LIB3146-034-Q1-K1-B5.pep
HRGIRAARQHASGGIAALINSRLPDWSAAAGKFALMTTAYVHDNIHNPLQDSSTAASSTPYDHGAGHINPLKALDPGLIYDISAQDYFFFLCTHKLTAMHLKAYSKHFNMFCHYNTSATT

SEQ ID NO: 71899 - protein, 134 aa, Gossypium hirsutum
  unsure (1)..(134): unsure at all Xaa locations
  Clone ID: LIB3189-021-P1-K1-H11.pep
PGTTPRVRPRVRNILAALSLELSPSSLATDHRRVRFNIPSGTSMSCPHVSGIACLIKARHPDWSPAAVKSALMTTAYVHDNIHNPLQDSFTAAGFTPYDHGAGYINPLKALDPXGLIYDISTQGLLFNFLCTQK

SEQ ID NO: 71900 - protein, 77 aa, Gossypium hirsutum
  Clone ID: GOSHI-09MAY01-C1125_6.pep
PIQLSFSFFICCLLQLLAIPISTVASESAFSMGKKVITPLRSSLKPKTVQAVVCLDDWMRAKGFSAEIGSKNDDDDA

SEQ ID NO: 71901 - protein, 140 aa, Gossypium hirsutum
  Clone ID: GOSHI-09MAY01-C1125_4.pep
MTMASSNTPIPVDDGFNEYESAAKRQKSTTSKVGDEMTKLECENKNELKAQCNHCKTIFSAKSSSGTSHLRRHLNSCLKKVNKDITQYTIATQPSLGGVPSIKNYKFDADECRQAVSTFLVCGKHSFRTVEEPGFRYMMR

SEQ ID NO: 71902 - protein, 89 aa, Gossypium hirsutum
  Clone ID: GOSHI-09MAY01-C1125_2.pep
QSLNARTDPLARPIATIASESAFSMGKKVITPLRSSLKPKTVQAVVCLDDWMRAKGFSAEIGCKKDDDDGEADDDDEDDEDGDVSSVAF

SEQ ID NO: 71903 - protein, 301 aa, Gossypium hirsutum
  unsure (1)..(301): unsure at all Xaa locations
  Clone ID: GOSHI-09MAY01-C1125_1.pep
MGLPNASGDLSTEVEVDAFRRLFPLRFYKKHLLESIRPDARPLGRARETTIALGAVASANGSXLAKIGSTTMLAAIKMEVMTPSLETPDEGCIAIDFHMPPICSPIVRPGRPAEAAPVVAKQLSDTILSSGMINLKELSLVSGKAAWMAYLDIYCLDADGALFDTALLSAVAAFSHLEIPVVSLNDDGXRIVLSEEQGLSDREPVNKEKRKINLSSVPFSLTCVLYKNYILADPTAEEESIMDTIVTVVLDSSSQLVSLQKPGGTVLAYTSAIQDCIALTRQRVKELQKILEEAISGMEVD

SEQ ID NO: 71904 - protein, 132 aa, Gossypium hirsutum
  unsure (1)..(132): unsure at all Xaa locations
  Clone ID: uC-gsronu33B130f10b1.pep
MGLPNASGDLSTEVEVDAFRRLFPLRFYEKHLLESIRPDARPLGRARETTIALGAVASANGSALAKIGSTTMLAAIKMEVMTPSLETPDEGLYXAIDFHMPSICSSIVRAGKPAWAAPVVAKQLADTILSSG

SEQ ID NO: 71905 - protein, 111 aa, Gossypium hirsutum
  Clone ID: LIB3272-020-P1-K1-B10.pep
MGLSNASGDLSTEVEVDAFRCLFPLRFYEKHLLESIRPDARPLGRARETTIALGAVASANGSALAKIGSTTMLAAIKMEVMTPSLETPDEGCIAIDFHMPPICSPIVRPGR

SEQ ID NO: 71906 - protein, 74 aa, Gossypium hirsutum
  Clone ID: LIB3197-001-P1-M1-F9.pep
PFFIFRDKSLTHSLPFFFPKSETHLARPTIPPAVTGPPRLHLRSNGASIESSLQRLQRNKFFSEAEKIASPGRT

SEQ ID NO: 71907 - protein, 120 aa, Gossypium hirsutum
  Clone ID: LIB3543-053-Q1-K6-F6.pep
IFITMASSKTPIPVDDGFNEYESSLKRQKSTTSKVWDEMKKLECENKNELKAQCNHCKIIFSTKSSSGTSHLRRHLNSCLKKVNKDITQYTIGIQPSPERVPSIKTTSLMLMSVVKLFLL

SEQ ID NO: 71908 - protein, 50 aa, Gossypium hirsutum
  Clone ID: uC-gsflnu33B075b11b1.pep
KSLSSHPIIQANNGLNRLWLKRTPHRCDNFLTHAKSRLGRVITLCLQFII

SEQ ID NO: 71909 - protein, 71 aa, Gossypium hirsutum
  unsure (1)..(71): unsure at all Xaa locations
  Clone ID: LIB3197-014-P1-M1-B2.pep
RNCPWLVEKLLGWHIWTCCVEVVGXXXGDTALLSAVAGLWGVFVGYVLSSGIVKDHRHTINYYLVLLKFXI

SEQ ID NO: 71910 - protein, 133 aa, Gossypium hirsutum
  unsure (1)..(133): unsure at all Xaa locations
  Clone ID: LIB3585-067-P1-K1-C12.pep
GAIASANGSALAKIGSTTMLAAIKMEVMTPSLETPNEGCLGLLPLAARFPVSLSLPKTYILSLVICHNFFFIFXIDFHMPSICSSNVRPGRPAEAAPVVAKQLSDTILSSGMINLKELSLVSGKAAWMAYLDI

SEQ ID NO: 71911 - protein, 94 aa, Gossypium hirsutum
  unsure (1)..(94): unsure at all Xaa locations
  Clone ID: LIB3197-037-Q1-M1-D1.pep
MGLPNASDDLSTEVEENPLKPLFPFGFFKNHLXKSFRPDARPFGKPKKTTFGLGAVDFANGXQLAKIGSTASLSLFLNTYTALIWQAINLEFNN

SEQ ID NO: 71912 - protein, 95 aa, Gossypium hirsutum
  Clone ID: GOSHI-09MAY01-C1045_11.pep
MNQFLAFLFKKKKKKKKKKKKKKKKKKKKIKKYIKKKKYKKKKKNNKKKTKKKQKKKKKQKKRGGPFKGPNFYSQYFDPYTSFLGTPNINFWALF

SEQ ID NO: 71913 - protein, 96 aa, Gossypium hirsutum
  Clone ID: GOSHI-09MAY01-C1045_8.pep
MKRRGKKEEDTSVPVEKCDEPVVQPETPEKKGFLEKIKEKLPGQHKKAEEASSPAPAPAAEPHHEEVSKEKKGILEKIKEKLSGYHSKSDEEKEKA

SEQ ID NO: 71914 - protein, 202 aa, Gossypium hirsutum
  unsure (1)..(202): unsure at all Xaa locations
  Clone ID: GOSHI-09MAY01-C1045_7.pep
PRVRPRFRPRVRPCVRFDFMGKKEEEKPQEEVIVTEFEKVNIEETNAEEEGEARPKHGLLEKLHRSDSSSSSSSSDEEEGEGEXRRRSKXKEKKGLEEKIEEKLEGEKKEEDTSVPVEKCDEPVVQPETPEKKGFLEKIKEKLPGQHKKADPGKFFREKLLKQGTVMPMPDIKDKMPVRSFLPRTIVSKLPFSFSKFGELKA

SEQ ID NO: 71915 - protein, 69 aa, Gossypium hirsutum
  Clone ID: GOSHI-09MAY01-C1045_4.pep
LGPGSPLEKIKEKLPGLHKKAEEASSTAPATAAEPHHEGESKEKKGILEKIKEKLHGKHSKSDEEKEKA

SEQ ID NO: 71916 - protein, 211 aa, Gossypium hirsutum
  Clone ID: GOSHI-09MAY01-C1045_3.pep
MAEEHTSKAPELESNVSGEGAVESKERGLFDFMGKKEEEKPQEEVIVTEFEKVNIEETKAEEEGEEKKKHGLLEKLHRSDSSSSSSSSDEEEGEGEEKKKKKKKEKKGLGEKIEEKLEGEKKEEDTSVPVEKCDEPVVQPETPEKKGFLEKIKEKLPGQHKKAEEASSPAPAPAAEPHHEEESKEKKGILEKIKEKLPGSPAKSDEEKEEA

SEQ ID NO: 71917 - protein, 306 aa, Gossypium hirsutum
  unsure (1)..(306): unsure at all Xaa locations
  Clone ID: GOSHI-09MAY01-C1045_2.pep
DSFQSYAKNSNGEKVDFSNYGQSFNEGTDKFTGYGQGAVGQSIGFKIYGRNNTFKDYAKKEGIVFGRYNNGSSSETAQVKGGSSAVSKWVEPGKFFREMLLKQGTVMPMPDIKDKMPVRSFWPGLLFRIPFFYPSLGMKXIHAGVTHTGNRNVDALKXERALSPVETKRCVVSTVDMIDFATSVLGRNVEVRTTENVKGSKQNIKIGSVKGINGGKVTKSVSCHQSLYPYLLYYCHSVPEVRVYEADILDPKSLEKINHGVAICHLDTSSWSSNHGAFLALGSGPGRIEVCHWIFENDMTWTISDS

SEQ ID NO: 71918 - protein, 212 aa, Gossypium hirsutum
  unsure (1)..(212): unsure at all Xaa locations
  Clone ID: GOSHI-09MAY01-C1045_1.pep
MAEEHTSKAPELESNVSGEGAVESKDRGLFDFMGKKEEEKPQEEVIVTEFEKVTIEETKAEEEGEEKKKHGLLEKLHRSDSSSSSSSSDEEEGEGEEKKKKKKKEKKGLKEKIEEKLEGEKKEEDTSVPVEKCDEPVVQPETPEKKGFLEKIKEKLPGQHKKAEEASSPAPAPAAEPHHEGXESKEKKGILEKIKEKLPGKHSKSDEEKEKA

SEQ ID NO: 71919 - protein, 141 aa, Gossypium hirsutum
  Clone ID: uC-gsronu33B178h11b1.pep
FFASGNVSGEGAVVSKERGLFDFMGKKEEEKPQEEVIVTEFEKVNIEETKAEEEGEEKKKHGLLEKLHRSDSSSSSSSSDEEEGEGEEKKKKKKKEKKGLEEKIEEKLEGEKKEEEKPQEEVIVTEFEKVNIEETKAEEEG

SEQ ID NO: 71920 - protein, 90 aa, Gossypium hirsutum
  Clone ID: AI054625.1.pep
ESNVSGEGAVEIKERGLFDFMGKKEEEKPQEEVIVTEFEKVNIEETKAEEEGEEKKKHGLLEKLHRSDSSSSSSSSDEEECEGEEKKKMI

SEQ ID NO: 71921 - protein, 137 aa, Gossypium hirsutum
  Clone ID: uC-gsronu33B148e05b1.pep
QSLIKKKNKKKQKQKRYLREEFEEEGEGEEKKKKKKKEKKGLEEKIEEKLEGEKKEEDTSVPVEKCDEPVVQPETPEKKGFLEKIKEKLPGQHKKAEEASSPAPAPAAEPHHEEESKEKKGILEKIKEKLPGYHSKS

SEQ ID NO: 71922 - protein, 128 aa, Gossypium hirsutum
  Clone ID: LIB3147-005-Q1-K1-H11.pep
LVKIKLENTKKREEKKKKKKKEKKGLKEKIEEKLEGEKKEEDTSVPVEKCDEPVVQPETPEKKGFLEKIKEKLPGQHKKAEEASSPAPAPAAEPHHEGESKEKKGILEKIKEKLPGKHSKSDEEKEKA

SEQ ID NO: 71923 - protein, 88 aa, Gossypium hirsutum
  Clone ID: uC-gsronu33B029e09b1.pep
CQKWPRSIPVRPLSWRATLAVKEQWRAWTEGCSFFLSSMYLIPILLYFNSFFNYNLTFLFYLSFYFFLFLIFSQYSYFYLYIFFSIYI

SEQ ID NO: 71924 - protein, 246 aa, Gossypium hirsutum
  Clone ID: GOSHI-09MAY01-C1035_1.pep
MAEDLVLDTAIRDWVLIPLSVVMVLIGILRYFVSKLMRSFQVPDPKIVKEGQVIVRARNLRGAANFIPPKSFRSRRVYFSNEENGLLFVPKGQAQNAQAQMFSDPNMAMDMMKKNLSMIIPQTLTFAWVNFFFSGFVAAKIPFPLTQRFRSMLQNGIDLSTVDVSYVSSRSWYFLNLFGLRGLFSLILGEENAMDDTQRMMQMGGFGFDPSKSLTAEKDGLDIVQHEWALPKFEHRAEAVLKKLVS

SEQ ID NO: 71925 - protein, 112 aa, Gossypium hirsutum
  Clone ID: LIB3585-019-P1-K1-A8.pep
MAEDLVLDTAIRDWVLIPLSVVMVLIGVLRYFVSKLMRSFQVPDPKIVKEGQVIVRARNLRGAANFIPPKSFRSRRVYFSNEENGLLFVPKGQAQNAQTQMFSDPNNAMDMM

SEQ ID NO: 71926 - protein, 137 aa, Gossypium hirsutum
  Clone ID: GOSHI-09MAY01-C1025_1.pep
MNNNWRRQKGEIHHHHQGMQGTRSYSRKPSLATWQPTVPSWEKKFCTLVGAVPWRKLLETKRFMYLYDNVVQWNDSAGEEAFHNAKNRFWAEINGLPCDIRLPDPDSYIDKIDWDSEIDPELLLDLERKPKVPDTKD

SEQ ID NO: 71927 - protein, 178 aa, Gossypium hirsutum
  Clone ID: GOSHI-09MAY01-C1395_1.pep
MVAFRFHQYQVVGRGLPTDADEHPKIYRMKLWATNEVRAKSKFWYFLRKLKKVKKSNGQVLAINEIFEKNPTKIKNYGIWLRYQSQTGYHNMYKEYRDTTLNGAVEQMYTEMASRHRVRFPCIQIIKTATIPAKLCKRDSTKQFHNSKIKFPLVSKKVRPPTRKLKTTYKATKPNLFM

SEQ ID NO: 71928 - protein, 128 aa, Gossypium hirsutum
  unsure (1)..(128): unsure at all Xaa locations
  Clone ID: GOSHI-09MAY01-C1385_1.pep
MGHCCSKNVSVNNEATSTVNQSQPRPVPASATPSVETNSYAVSPFASPLPAGVAPSPSPARTPGRKFRWPLPPPSPAKPIMAAIMRRKGSNQAAPTEGTIPEDGEGAVLDKNLGYGKNLXAKFELGKE

SEQ ID NO: 71929 - protein, 161 aa, Gossypium hirsutum
  Clone ID: GOSHI-09MAY01-C1355_1.pep
MEKSHELELTQMRKSVEKLGFSTEKYGDPTLMRFLIARSMDTDKASKMFVQWLKWRSSLVPNGCVVESEVPDQLEARKIFLQGLSKTGYPVMIVQACKHYPPKDHLQFKKFVVYLLDKTIASAVKGREIGNEKLIGVLDFQNITYRNVDARGLITGFQFLQ

SEQ ID NO: 71930 - protein, 255 aa, Gossypium hirsutum
  Clone ID: GOSHI-09MAY01-C1345_1.pep
MGFGCKTLLCLFFTVVVVLLQEASARQQQYYYNVSGLRNRKQVSGCNLFQGQWVFDPSYPYYDSSGCPFIDAEFDCLKYGRPDKQYLKYSWKPDGCNLPRFDGASFLAKWRGKKIMFVGDSLSLNIGRAGARVGHASVPNSKTTFVRKSPLSFVIFEDYGVTLYLYRTPYLVDIVKENVGDVLNLGSIKGGNAWIGMDLLIFNSWHWWTHKGKSEGWDYIRDGSALYKDMNRLEAYNKGLATWANWVDTNVDQTK

SEQ ID NO: 71931 - protein, 137 aa, Gossypium hirsutum
  Clone ID: LIB3135-047-Q1-K1-C10.pep
HASAHASAHASGWTHKGKGRGWDYIRDGSALYKDMNRLEAYNKGLATWANWVDTNVDQTKTKVFFQGISPTHYEGREWNQPKKSCYGEQEPLSGTTYQAGAPPAASIVNKILGSMNKPGYLLDITTFSQVRKRAQSL

SEQ ID NO: 71932 - protein, 158 aa, Gossypium hirsutum
  Clone ID: GOSHI-09MAY01-C1375_8.pep
HASAHASRTRGRTRGRTPITSGVESSDTIDHVKAKIQDKEGIPPDQQRLIFAGKQLEDGRTLADYNIQKESTLHLVLRLRGGMQIFVKTLTGKTTASGVESSDTIDNVKAKIQDKEGIPPDQQRLIFAAKQLEDGMILCRLLHSFCCLPFFLFFSICY

SEQ ID NO: 71933 - protein, 92 aa, Gossypium hirsutum
  Clone ID: GOSHI-09MAY01-C1375_7.pep
PRVRPRVRGRVGQIFVKTLTGKTITLEVESSDTIDNVKAKIQDKEGIPPDQQRLIFAGKQLEDGRTLADYNIQKESTLHLVLRLRGGFRMVF

SEQ ID NO: 71934 - protein, 87 aa, Gossypium hirsutum
  unsure (1)..(87): unsure at all Xaa locations
  Clone ID: GOSHI-09MAY01-C1375_6.pep
IQGATVHLQLQTVGGMHIFAKTLTGKTITLEVESSDTIDNVKAKILDKEGIPPDQRGLIFAGKXQLEDGRTLADYNIQKGSTLHLVL

SEQ ID NO: 71935 - protein, 112 aa, Gossypium hirsutum
  Clone ID: GOSHI-09MAY01-C1375_5.pep
GRTLADYSPRVRSTLHLVLRLRGGMQIFVKTLTGKTITLEVESSDTIDNVKAKIQDKEGIPPDQQRLIFAGKQLEDGRTLADYNIQKESTLHLVLRLRGGFKCCAEHLSSYC

SEQ ID NO: 71936 - protein, 293 aa, Gossypium hirsutum
  unsure (1)..(293): unsure at all Xaa locations
  Clone ID: GOSHI-09MAY01-C1375_4.pep
MQIFVKTLTGKTITLEVESSDTIDNVKAKIQDKEGIPPDQQRLIFAGKQLEDGRTLADYNIQKESTLHLVLRLRGGMQIFVKTLTGKTITLEVESSDTIDNVKAKIQDKEGIPPDQQGLIFAGKQLEDGRTLADYNIQKESTLHLVLRLRGGMLIFVKTLTGKPITLEGESSDTIDMAKAKIQDKEGIQPDQQRLIFAGKQLEDGRTLADYIIQKESTLYLVLRLRGGMQMWWYXIFVKTLTGKTITLEVESSDTIDNVKAKIQDKEGIPPDQQRLIFAGKQLEDGRTLADYN

SEQ ID NO: 71937 - protein, 165 aa, Gossypium hirsutum
  unsure (1)..(165): unsure at all Xaa locations
  Clone ID: GOSHI-09MAY01-C1375_3.pep
MQIFVKTLTGKTITLEVESSDTIDNVKTKIQDKEGIPPDHQRLIFAGKQLEDGRTLADYNIQKESTLHLALRWRGGFQILVRTLTGKTITLEVERSDTIDHVKGPDSRHKEGIPPDQHRLIFAGXKHLEDGRTLADYNFQKDSHSIGPPMRVVCKFCKTLPKDIH

SEQ ID NO: 71938 - protein, 203 aa, Gossypium hirsutum
  Clone ID: GOSHI-09MAY01-C1375_2.pep
MQIFVKTLTGKTITLEVESSDTIDNVKAKIQDKEGIPPDQQRLIFAGKQLEDGRTLADYNIQKESTLHLVLRLRGGMQIFVKTLTGKTITLEVESSDTIDNVKAKIQDKEGIPPDQQRLIFAGKQLEDGRTLADYNIQKESTLHLVLRLRGGMQIFVKTLTGKTITLEVESSDTIDNVKAKIQDKEGFPPDPPRLMFCSKPAS

SEQ ID NO: 71939 - protein, 457 aa, Gossypium hirsutum
  Clone ID: GOSHI-09MAY01-C1375_1.pep
MQIFVKTLTGKTITLEVESSDTIDNVKTKIQDKEGIPPDQQRLIFAGKQLEDGRTLADYNIQKESTLHLVLRLRGGMQIFVKTLTGKTITLEVESSDTIDNVKAKIQDKEGIPPDQQRLIFAGKQLEDGRTLADYNIQKESTLHLVLRLRGGMQIFVKTLTGKTITLEVESSDTIDNVKAKIQDKEGIPPDQQRLIFAGKQLEDGRTLADYNIQKESTLHLVLRLRGGMQIFVKTLTGKTITLEVESSDTIDNVKAKIQDKEGIPPDQQRLIFAGKQLEDGRTLADYNIQKESTLHLVLRLRGGMQIFVKTLTGKTITLEVESSDTIDNVKAKIQDKEGIPPDQQRLIFAGKQLEDGRTLADYNIQKESTLHLVLRLRGGMQIFVKTLTGKTITLEVESSDTIDNVKAKIQDKEGIPPDQQRLIFAGKQLEDGRTLADYNIQKESTLHLVLRLRGGF

SEQ ID NO: 71940 - protein, 114 aa, Gossypium hirsutum
  Clone ID: LIB3166-053-P1-K1-G12.pep
DGRTLADYNIQKESTLHWVLRLRGGMQIFVKTLTGKTITLEVESSDTIYNVKAMIQDKEWIPPDHLRLIFCGKQFVDGRTLACYHIQKDSTLHLVLPIEGRSFKIFGNVPFTCK

SEQ ID NO: 71941 - protein, 66 aa, Gossypium hirsutum
  unsure (1)..(66): unsure at all Xaa locations
  Clone ID: LIB3493-052-P1-M1-H8.pep
SDTIDNVKAKIQDKEGIPPDQQRLIFAGKQLEXXGRTLADYNIQKESTLHLVLRLRGGCRFCETLL

SEQ ID NO: 71942 - protein, 66 aa, Gossypium hirsutum
  unsure (1)..(66): unsure at all Xaa locations
  Clone ID: AI054644.1.pep
LKDHHLEVESSDTIDNVKAKIQDKEGIPPDQXAIFAGKQLEMGGPFRLQHPKESTLHLVLRLRGGF

SEQ ID NO: 71943 - protein, 54 aa, Gossypium hirsutum
  Clone ID: LIB3189-028-P1-K1-G4.pep
GFPPDQQRLIFAGKQLEDGRTLADYNIQKESTLHLVLHLRGGMQIFVKTLTGKT

SEQ ID NO: 71944 - protein, 82 aa, Gossypium hirsutum
  Clone ID: AW186875.1.pep
KTTKSVYKKQLFLLVSFPCLVASSHQHTTHKHNKLNTSTITGQVFGTTLKTTAEAKDQVQSGPLQITTSRRNPLCTAEAKDQ

SEQ ID NO: 71945 - protein, 134 aa, Gossypium hirsutum
  Clone ID: GOSHI-09MAY01-C1315_1.pep
MLSKGIGTMAARSLSIVHVPAFKPKWVFSPLSFCSSESKPRKLVLYSKPGCCLCDGLKEKLHAAFSLSGPDPLHDVVLQVRDITSNPEWEKAYQYEIPVLAKVLSDGSEEILPRLSPRLGAELVHKKIAAGFKQ

SEQ ID NO: 71946 - protein, 345 aa, Gossypium hirsutum
  unsure (1)..(345): unsure at all Xaa locations
  Clone ID: GOSHI-09MAY01-C1325_1.pep
MTEEMPSLRCIIATLFFALLLPPGSFPATTLSPSFYDETCPTVFSIIRGIIEQALLSDPRIGASLLRLHFHDCFVNGCDASILLDNSATIESEKEAAPNNNSARGFEVVDAMKIALEFECPGIVSCADILAIAAQEAVNLAGGPSWLVLLGRRDSTTANRTLANLAIPAAFETLDILKSKFAAVGLNTSTDLVALSGAHTWGRAQCTIVIEPLYNFNGTGKADPTLNATYLETLRKVCPQGRNGSVLVNLDPTTPNTFDRYYYTNLSSXEGLLQSDQELFSTSGADTVEIVERFSSNQIAFFESFVVSMLKMGNISPVTGTEGEIRLSCRRVHMDYTSSNKWSSS

SEQ ID NO: 71947 - protein, 167 aa, Gossypium hirsutum
  Clone ID: GOSHI-09MAY01-C1295_1.pep
MKWVKVIVSFILTLSFLSFPSCAFQSDELLVDDEEFGLEGAPQHRSPEPIPTRSPPVTSPTRKRHSDLDSDSKIQFSLDHAFGDSDFSPAGTFSARLKTWSHGGQTLTKLRFSRNSFSDVEKEKFKNLLESDDFYRIRLPSNVLNPPGRDFIISSVKARCFPRESLY

SEQ ID NO: 71948 - protein, 188 aa, Gossypium hirsutum
  Clone ID: GOSHI-09MAY01-C1285_1.pep
MASADVEYRCFVGGLAWATDDRALEEAFSVYGEIVESKIINDRESGRSRGFGFVTFRDEKSMRDAIEGMNGQNLDGRNITVNEAQSRRSGGGGGEGYGGGSGGYKRSGGGGGYGRREGGYGGGRREGVFGNGGGYDGGGGGGGYGGGGGGYGGGGGYGGGGGGGMGVDAEMVGLVTRGGGASDVSWKT

SEQ ID NO: 71949 - protein, 86 aa, Gossypium hirsutum
  unsure (1)..(86): unsure at all Xaa locations
  Clone ID: LIB3135-005-Q1-K1-G7.pep
MFYTHTSSNAVRWATYDRALQXAFSVYGYIVESKIINDRESGTSRGFGFVTFRDEKSMRDAIEGMNGQNLDGRNITVNESQSLRIG

SEQ ID NO: 71950 - protein, 211 aa, Gossypium hirsutum
  Clone ID: GOSHI-09MAY01-C1275_1.pep
YYETDPRLTDYNTLLENIHGLKAGKPVQVPIYDFKSSSRIGYRTLEVPSSRIVIIEGIYALSDKLRPLLDLRVSVTGGVHFDLVKRVLRDIQRAGQEPEEIIHQISETVYPMYKAFIEPDLETAHIKIINKFNPFTGFQNPTYILKSTRLVTLDQIKEVVSEEHKETIEETYDIYLLPPGEDPEACQSYLRMRNRDGKYNLMFEVRCFIFK

SEQ ID NO: 71951 - protein, 101 aa, Gossypium hirsutum
  unsure (1)..(101): unsure at all Xaa locations
  Clone ID: GOSHI-09MAY01-C1265_2.pep
MSEDMNLSINGQSQVPPGFRFHPTEEELLHYYLRKKVAYEKIDLDVIXEVDLNKLEPWDIQEKCRXGSTPQNEWYFFSHKDKKYPTGTRTNRATAAGFWKA

SEQ ID NO: 71952 - protein, 138 aa, Gossypium hirsutum
  Clone ID: LIB3585-041-P1-K1-G5.pep
MSEDMNLSINGQSQVPPGFRFHPTEEELLHYYLRKKVAYEKIDLDVIQEVDLNKLEPWDIQEKCRIGSTPQNEWYFFNHKDKKYPTGTRTNRATAAGFWKATGRDKIIYSGFRRIGLRKTLVFYKGRAPHGQKSDWIM

SEQ ID NO: 71953 - protein, 259 aa, Gossypium hirsutum
  Clone ID: GOSHI-09MAY01-C1215_2.pep
MGKATRWLKSLFGIKNTKECPSSGDRKDKKRCSIGHSGRGSTRPVPRVPPRVRPNISPAEVVWLRSFYNETEKEQNKHAIAVAAATAAAADAAVAAAQAAVAVVRLTSHGRGTMFGGGGHGKWAAIKIQSVFRGYLAKKALRALKGLVKIQALVRGYLVRKQASATLHGMQALIRAQATIRSQKARKSMEQYDDTRSERTVSFHSRRLSASLDTLNIEESPKIVEIDTGRPKSRSRRTNTSVSDFGDDPSFQILSTSVP

SEQ ID NO: 71954 - protein, 99 aa, Gossypium hirsutum
  Clone ID: GOSHI-09MAY01-C1215_1.pep
GTGQFPGRPTPVRLNRDPENQHISIRFRWTTPIISNPCLLRFQLDFRPPRFSGPDSHTDWGLTGDEWVGSQPSTKYPPRFINCCVSNGTGHTPAKKCMC

SEQ ID NO: 71955 - protein, 80 aa, Gossypium hirsutum
  Clone ID: LIB3196-032-P1-M1-H10.pep
MGKATRWLKSLFGIKNTKECPSSGDRKDKKRCSIGHSGRESSGGLCHNPTTIPPNISPAEVVWLRSFYNETEKEQNKHAI

SEQ ID NO: 71956 - protein, 82 aa, Gossypium hirsutum
  Clone ID: GOSHI-09MAY01-C2995_6.pep
MLKHVLGESVRGLPMKELKSLESRLEKRISRIRSKKNELLFAEIEYMQKKVKIVKCTVNDIPGDISFNQTAGLSALCFLEKV

SEQ ID NO: 71957 - protein, 220 aa, Gossypium hirsutum
  unsure (1)..(220): unsure at all Xaa locations
  Clone ID: GOSHI-09MAY01-C2995_3.pep
MVYPNESLEDSPQKKMGRGKIEIKRIENTTNRQVTFCKRRNGLLKKAYELSVLCDAEVALIVFSNRGRLYEYANNSVKATIERYKKASDSSNTGSVAEVNAQFYQQEADKLRNQIRNLQNTNRHMLGESVGGLPMKELKSLETRLEKGISRIRSKKNELLFAEIEYMQKKXIDLHNNNQLLRAKIAENERKQQSMNLMPGGSSNNFEAIHSQPYDSRNYF

SEQ ID NO: 71958 - protein, 98 aa, Gossypium hirsutum
  Clone ID: GOSHI-09MAY01-C2995_2.pep
FSPFRPYQNELLFAEIEYMQKREIDLHNNNQLLRAKIAENERKQQSMNLMPGGSSANFEALHSQPYDSRNYFQVDALQPATNYYNPQLQQDQIALQLV

SEQ ID NO: 71959 - protein, 246 aa, Gossypium hirsutum
  Clone ID: GOSHI-09MAY01-C2995_1.pep
MVYPNESLEDSPQKKMGRGKIEIKRIENTTNRQVTFCKRRNGLLKKAYELSVLCDAEVALIVFSNRGRLYEYANNSVKATIERYKKASDSSNTGSVAEVNAQFYQQEADKLRNQIRNLQNTNRHMLGESIGGLPMKELKSLESRLEKGISRIRSKKNELLFAEIEYMQKKEIDLHNNNQLLRAKIAENERKQQSMNLMPGGSSANFEAIHSQPYDSRNYFQVDALQPAANYYNPQQQQDQIVLQLV

SEQ ID NO: 71960 - protein, 142 aa, Gossypium hirsutum
  unsure (1)..(142): unsure at all Xaa locations
  Clone ID: LIB3829-027-Q6-K6-E11.pep
VRRVXVRNQIRXLQNANRHMLGESIGGLPMKELKSLESRLXEKGISRIRSKKNELLFAEIEYMQKREIDLHNNNQLLRAKIAENERKQQSMNLMPGGSSANFEALHSQPYDSRNYFQVDALQPATNYYNPQLQQDQIALQLV

SEQ ID NO: 71961 - protein, 164 aa, Gossypium hirsutum
  unsure (1)..(164): unsure at all Xaa locations
  Clone ID: LIB3829-002-Q1-K6-G10.pep
MVYPNESLEDSPQKKXGRGKIEIKRIENXTNRQVTFCKRRNGLLKKAYELSVLCDAEVALVVFSSRGRLYEYANNSVKATIERYKKASDSSNTGSVAEVNAQFYQQEADKLRNQIRNLQNANRHMLGESIGGLPMKELKSLESRLEKGISRIRSKKVSDNNLCN

SEQ ID NO: 71962 - protein, 285 aa, Gossypium hirsutum
  unsure (1)..(285): unsure at all Xaa locations
  Clone ID: GOSHI-09MAY01-C2985_1.pep
AEQTKLVSGFFVSEFFPSLQCLDVASGVKFRVEKTHAEADRILRSIVNDHKESRAKGRSEDEDQEDLVDVLLRLQEDGEFPLTDNNVKAVLLDVFTAGSETSATAVEWALSEMIKNPRVMTKAQAEVRQVFEGKGNVNETGVHQLKYLKCVIKETLRLHPVVPLLIPRESSKNCVVNGFEIPAKTRVIVNAWAIGRDPNHWVEPEKFEPERFVNSSVDFMGTNFELIPFGAGRRICPGILFAXPNVELPLAQLLFHFDWEIPGGMKQEDMDMTEKFGVSMKKKKK

SEQ ID NO: 71963 - protein, 98 aa, Gossypium hirsutum
  Clone ID: LIB3148-015-Q1-K1-H9.pep
MLIVNLITAQSVLPRQSDFSPGIFVNDHTESCAKGTCNDENKENLVDVLLRIQKDGEFPLTDNNVKAVILDIFSGGSETSAGAVEWALSEMINNPRVM

SEQ ID NO: 71964 - protein, 188 aa, Gossypium hirsutum
  Clone ID: GOSHI-09MAY01-C2975_1.pep
YNSLDSQPDVLKSLYSPLQPSSPLEDLRYHDGGRLSDQQMALLQYQRENLHFLSEEILRLQECLSKYEGSNDGSTPQVDLAHLLAARDQELRTVSAEMNQLQSELRLARSLIADTEAEVQCVRTTNNQYVEENERLRAILGEWSTRAAKLERALEVERMSNLELQKKISTFRNQTCTSSTESSEQRGA

SEQ ID NO: 71965 - protein, 339 aa, Gossypium hirsutum
  Clone ID: GOSHI-09MAY01-C2965_1.pep
PRVRVFPRTQRRILISNLQPCTEYTFRIVSYTEAGDLGHSEAKCFTKSVEIIHKNPTSAAVMCQKNVNHLTEGSSKELTAVGSSGFKVRDLGKILRLAFAQEQGCFEGFCSADIEKCCGAIKNIKPETREEDHMPSVSRGLDLNVVSVPDLNEELTPPFESSRDEDNGCTLELAVEADDDAASLEIEKNRLARSHGSGDSQTWTNGATGEVPAVDSHTELCRIRAAYSNEETHDCDSTLINGSPFRITNDSGSLDENFEYCVKVIRSLECEGHINQEFRLKLLTWFSLRSTEQERRVVNTFIQTLIDDPNSLAGQLVDSFSDIISSKRPRNGFCSKLWH

SEQ ID NO: 71966 - protein, 55 aa, Gossypium hirsutum
  Clone ID: GOSHI-09MAY01-C2905_12.pep
LNLCIIAINVNCLTCRDALDALGLVRYCCRRMLMTHVDLIEKLLNYNTLEKSETS

SEQ ID NO: 71967 - protein, 71 aa, Gossypium hirsutum
  Clone ID: GOSHI-09MAY01-C2905_11.pep
MIIPVRCFTCGKVIGNKWDTYLDLLQADYTEGDALDALGLVRYCCRRMLMTHVDLIEKLLNYNTLEKSETS

SEQ ID NO: 71968 - protein, 98 aa, Gossypium hirsutum
  Clone ID: GOSHI-09MAY01-C2905_10.pep
KLLPVLWSSSAEIMEQKLATQHVEMERLGTENQRTAATNGTLRQELAAAQHELQILHAQIGAVTSEREQQMTSLTDKIAKMEAELQAGHCYNRMFFQF

SEQ ID NO: 71969 - protein, 71 aa, Gossypium hirsutum; identical to SEQ ID NO: 71967
  Clone ID: GOSHI-09MAY01-C2905_9.pep

SEQ ID NO: 71970 - protein, 91 aa, Gossypium hirsutum
  Clone ID: GOSHI-09MAY01-C2905_8.pep
KFHHLKSLKCFWLINDQNNLSSPPWKNVLSSAVKVLYLFFSPLPSESSFLFFVPLPQVISSKGENGVLQNMNQTTATMKLPDEAPNFNFLC

SEQ ID NO: 71971 - protein, 63 aa, Gossypium hirsutum
  Clone ID: GOSHI-09MAY01-C2905_6.pep
KFYTYFFHIFAVKAPSCSLFLFRRDALDALGLVRYCCRRMLMTHVDLIEKLLNYNTLEKSETS

SEQ ID NO: 71972 - protein, 163 aa, Gossypium hirsutum
  unsure (1)..(163): unsure at all Xaa locations
  Clone ID: GOSHI-09MAY01-C2905_5.pep
MGSKGRIPPPHLRRPLPGPGMVHSDPFGLGIPLHPGPFAHFDMLPPPEIKEQKLVAQLVEMQRLGTENQRIAATHGTLRQELAVAQHELQILHAQIGAITSEREQKNEEPYGXTAKMEAELQAAKPVKVELQQAHSDAQNLVFSLCYKLDIVIIECSFNFKTV

SEQ ID NO: 71973 - protein, 77 aa, Gossypium hirsutum
  Clone ID: GOSHI-09MAY01-C2905_3.pep
LKTKEKKKKPNSRAEEEQRTGRSFRSENVKKMGIELSQQRKERFSKGEKTGYFGHLSAQSTSSFLDGEIFSFSIRRE

SEQ ID NO: 71974 - protein, 137 aa, Gossypium hirsutum
  Clone ID: GOSHI-09MAY01-C2905_2.pep
PELQTARRAQRHRTKGKAESDENAKSSVHLFKALPLNKKILQAPSLPLPKKSLPQPPEFQLFHLRTSERARQHASNHAMKVPSYVSTSRNENTGLRSFKPISSLKEEKHEAVNKFKACALNKKAISSKGEKRGPPRI

SEQ ID NO: 71975 - protein, 86 aa, Gossypium hirsutum
  Clone ID: LIB3582-030-P1-K1-D4.pep
LCTKKHQGNNISLKNPTKTAQSKQNLLLVLRNTLEFKSHGSPLYTKILSMSYSLRFKNQTSKNINFGSLLFILPIKSPTQSDKFYF

SEQ ID NO: 71976 - protein, 112 aa, Gossypium hirsutum
  unsure (1)..(112): unsure at all Xaa locations
  Clone ID: LIB3583-051-P1-K6-F10.pep
LHFXKKKRHEGGGCSPDEEVKIFSFSSAKVLLAGNFHFSPPKTVLPSGSLLEISSSLPLFLWLWFFVPLPPAAKKHLNQRIQNLDGKMETQKEILKSIQTSVSAHVFPSLTS

SEQ ID NO: 71977 - protein, 82 aa, Gossypium hirsutum
  Clone ID: LIB3584-013-P1-K1-F6.pep
NCMSKMKWTRILQRSNHFDNKYYLMKSSTYSLMFLSLSFKLDYRFNCIYCSLIVLCCMYVLKSPSIASISNCYSCHMMNGIV

SEQ ID NO: 71978 - protein, 71 aa, Gossypium hirsutum; identical to SEQ ID NO: 71967
  Clone ID: LIB3829-008-Q6-K6-D12.pep

SEQ ID NO: 71979 - protein, 229 aa, Gossypium hirsutum
  Clone ID: GOSHI-09MAY01-C2895_2.pep
MQIFVKTLTGKTITLEVESSDTIDNVKAKIQDKEGIPPDQQRLIFAGKQLEDGRTLADYNIQKESTLHLVLRLRGGMQIFVKTLTGKTITLEVESSDTIDNVKAKIQDKEGIPPDQQRLIFAGKQLEDGRTLADYNIQKESTLHLVLRLRGGMQIFVKTLTGKTITLEVESSDTIDNVKAKIQDKEGIPPDQQMLISAGKQLEDGRTLADYNIQKESTLHLVLRLRGGH

SEQ ID NO: 71980 - protein, 457 aa, Gossypium hirsutum
  Clone ID: GOSHI-09MAY01-C2895_1.pep
MQIFVKTLTGKTITLEVESSDTIDNVKSKIQDKEGIPPDQQRLIFAGKQLEDGRTLADYNIQKESTLHLVLRLRGGMQIFVKTLTGKTITLEVESSDTIDNVKSKIQDKEGIPPDQQRLIFAGKQLEDGRTLADYNIQKESTLHLVLRLRGGMQIFVKTLTGKTITLEVESSDTIDNVKSKIQDKEGIPPDQQRLIFAGKQLEDGRTLADYNIQKESTLHLVLRLRGGMQIFVKTLTGKTITLEVESSDTIDNVKSKIQDKEGIPPDQQRLIFAGKQLEDGRTLADYNIQKESTLHLVLRLRGGMQIFVKTLTGKTITLEVESSDTIDNVKAKIQDKEGIPPDQQRLIFAGKQLEDGRTLADYNIQKESTLHLVLRLRGGMQIFVKTLTGKTITLEVESSDTIDNVKAKIQDKEGIPPDQQRLIFAGKQLEDGRTLADYNIQKESTLHLVLRLRGGQ

SEQ ID NO: 71981 - protein, 81 aa, Gossypium hirsutum
  Clone ID: LIB3584-033-P1-K1-F1.pep
LRGGMQIFVKTLTGKTITLEVESSDTIDNVKAKIQDKEGIPPDQQRLIFAGKQLEDGRTLADYNIQKESTLHLVLRLRGGQ

SEQ ID NO: 71982 - protein, 214 aa, Gossypium hirsutum
  unsure (1)..(214): unsure at all Xaa locations
  Clone ID: GOSHI-09MAY01-C2845_1.pep
MTDLTKKKLAGKVAIVTGGASGIGEATARLFAEHGARMIIIADIQDQLGQQVATSIGSHNCTYSRCDVTDENQVKALVESSIQKYGQLDIMFSNAGIISKSDQSILDLDFRQFDRLMAVNLRGMSACVKHAARAMVEKKVRGSIVCTASVAASHGTKRRTDYCMSKHGVLGLVRXGRSKQLGMYGIRVNCVSPNGLATPMTCEVHEKSVEEVEE

SEQ ID NO: 71983 - protein, 308 aa, Gossypium hirsutum
  Clone ID: GOSHI-09MAY01-C2815_1.pep
MLKLCLMVSHGYPRGLGPVLHQEPGFSRMVKEFGSVFPGQLVKQDMVQIGSFDLRCNQFHFQEQPKPVTALCETKLIIDADPTVQNPVVIDKPDAYLDTARFSFRIAEKCTRHEKILKFLMSGSNELENGELDLSLLSDLMGLQPLMFGVHQQPYASSLMYPSSKIDYQVPLPDCLGEMIHYSKITVNSDGQVVLTATGTEMKDILSIVAEFYLSSNSTKSRNQFSLVPYFDRKRIAKARTSTNLSSPRSEVASIAPMESPKKIKQKPSPKKNASRKLASERDLYKKNYFHACECLLSLMVIRDSMAE

SEQ ID NO: 71984 - protein, 370 aa, Gossypium hirsutum
  unsure (1)..(370): unsure at all Xaa locations
  Clone ID: GOSHI-09MAY01-C2585_1.pep
GCSPSLSGAIRVNPWNIDAVAXDAMDCALAMAEAEKQLRHEKHYRYVSTHHVGYWAHSFLQDLERTCREHSRRRCWGIGFGLSFRVVALDPNFRKLSRGHIVSAYKRTTTRAILLDYDGTLMPQASIDKSPSSKSLDILNSLCRDRNNMVFIVSAKSRKTLTEWFSPCEKLGIAAEHGYFLRLKGDVEWETCVPAVDCAWKQIAEPVMKQYMETTDGSYIEDKETALVWCYEDADPDFGSCQAKELLDHLESVLANEPVTVKSGQNFVEVKPQGVSKGLVAKRLLSTMQERGMLPDFVLCIGDDRSDEDMFEVIISSVLGPLIDPRAEVFACTVGKKPSKAKYYLDDTVEICRLMQGLASVSDQMHSVLA

SEQ ID NO: 71985 - protein, 114 aa, Gossypium hirsutum
  Clone ID: LIB3149-040-Q1-K1-D11.pep
YFLRLKGDVEWETCVPAGDCAWKQIAEPVMKQYMETTDGSYIEDKETALVWCYEDADPDFGSCQAKELLDHLESVLANEPVTVKSGQNFVEVKPQVQKYISKYGTILFFFISPH

SEQ ID NO: 71986 - protein, 80 aa, Gossypium hirsutum
  Clone ID: LIB3048-013-Q1-L1-A7.pep
FLTCRKPFSECLSAISSANESHVVSISASQSVDPCLNSSSVSVVRHPFVHCCSENVFLNPGIIFRNPNKPIADRTDGTSN

SEQ ID NO: 71987 - protein, 262 aa, Gossypium hirsutum
  Clone ID: GOSHI-09MAY01-C2575_1.pep
TNPSRKEKKEKKKEMDPSKKVADRYLKREILGEGTYGVVYKAIDTKTGQTVAIKKIRLGKQKEGVNFTALREIKLLKELKDPNIIALIDAFPHKGNLHLVFEFMETDLEAVIRDRNIFLSPADIKSYIQMTLKGLAFCHKKWVLHRDMKPNNLLIGSNGQLKLADFGLARIFGSPDRKFTHQVFARWYSAPELLFGTKQYGAGVDVWAAACFFAVLLLRRPFLQGTSDIDQLGKIFAAFGTPTPSQWPDMVYLPDYVEYQYV

SEQ ID NO: 71988 - protein, 72 aa, Gossypium hirsutum
  Clone ID: uC-gsflnu33B059a02b1.pep
VFARWYRAPELLFGSKQYGSGVDVWAAACIFAELLLRRPFLQGTSDIDQLGKIFAAFGTPTSSQWPDMLYLP

SEQ ID NO: 71989 - protein, 98 aa, Gossypium hirsutum
  unsure (1)..(98): unsure at all Xaa locations
  Clone ID: LIB3584-004-P1-K1-G4.pep
MLKYXLLGEGYHPKLXSDFXLXAKLGPVGDKTHVSTRVMGTYGYCAPEYAMTGQLTLKXDVYCFGVVLLEIITGRKAXDNFGAGGGHNLVAWARSLVK

SEQ ID NO: 71990 - protein, 45 aa, Gossypium hirsutum
  unsure (1)..(45): unsure at all Xaa locations
  Clone ID: uC-gsflnu33B089h10b1.pep
RVMGTYGYCAPEYAMTGQLTLKSDVYSFGVDXLEIITGKKCCCQF

SEQ ID NO: 71991 - protein, 77 aa, Gossypium hirsutum
  Clone ID: GOSHI-09MAY01-C2515_2.pep
KNNSNSRLLLKGKKESETCEAGSLEILRMYVQFFCVNICCHPKRRGKMAKYISITHTYRQTFPFQFLIDVAFESSCF

SEQ ID NO: 71992 - protein, 226 aa, Gossypium hirsutum
  Clone ID: GOSHI-09MAY01-C2515_1.pep
ALATEPPTDHLMHRPPVGRREPLITKIMWRNLLIQAIYQVTVLLVLNFDGKKILHLEHESREHAKRVKNTLIFNAFVLCQIFNEFNARKPEEVNIFRGLSKNYLFIGIVAITIILQAIIVEFLGKFAKTEKLSWQLWLVSIGIGFISWPLAILGKFIPVPETPVSRVFSRMFYRRRNQSSQNLEDSNATSYKIWKRECLSICVCDTDVFCHFPPPFRMTTLLTQII

SEQ ID NO: 71993 - protein, 77 aa, Gossypium hirsutum; identical to SEQ ID NO: 71991
  Clone ID: LIB3147-060-Q1-K1-B4.pep

SEQ ID NO: 71994 - protein, 126 aa, Gossypium hirsutum
  unsure (1)..(126): unsure at all Xaa locations
  Clone ID: GOSHI-09MAY01-C2505_2.pep
VTSKASDDDGEFAELYVFKWTSLLIPPTTVLIINLVGIVAGVSYAINSGYQSWGPLFGKLFFAIWVIAHLYPFLKGLVGRQNRTPTIVIVWSILLASIFSLLWVXIDPFTSEATKAAANGQCGINC

SEQ ID NO: 71995 - protein, 530 aa, Gossypium hirsutum
  unsure (1)..(530): unsure at all Xaa locations
  Clone ID: GOSHI-09MAY01-C2505_1.pep
LNVDCDHYFNNSKALREALCFMMDPAYGRKTCYVQFPQRFDGIDLHDRYANRNIVFFDINLKGLDGIQGPVYVGTGASAHAXCCFNRLALYGYDPVLTEADLEPNIIVKSCCGSRKKGKSGNKKYIDKKRAAKRTESTIPIFNMEDIEEGVEGYEEERSLLMSQKRLEKRFGQSPVFIAATFMEQGGIPPSTNPATLLKEAIHVISCGYEDKTEWGKEIGWIYGSVTEDILTGFKMHARGWISIYCMPPRPAFKGSAPINLSDRLNQVLRWALGSIEILLSRHCPIWYGYKGRLRLLERLAYINTIVYPLTSIPLLAYCMLPAFCLLTGKFIIPEISNFASMWFILLFVSIFATGILELRWSGVSIEDWWRNEQFWVIGGTSAHLFAVFQGLLKVLAGIDTNFTVTSKASDDDGEFAELYVFKWTSLLIPPTTVLIINLVGIVAGVSYAINSGYQSWGPLFGKLFFAIWVIAHLYPFLKGLVGRQNRTPTIVIVWSILLASIFSLLWVRIDPFTSEATKAAANGQCGINC

SEQ ID NO: 71996 - protein, 64 aa, Gossypium hirsutum
  Clone ID: uC-gsflnu33B025h12b1.pep
SYERSLLMSQKRLEKRFGQSPAFIAATFMEQGGIPPSTNPATLLKEAIHVISCGYEDKTAMGHG

SEQ ID NO: 71997 - protein, 98 aa, Gossypium hirsutum
  Clone ID: LIB3147-006-Q1-K1-F8.pep
TSLLITPTTVLIINLVGIVAGVSYAINRRYQSRGPLFGKLSFAIWVIAHLYPFLKGLVGRQNRTPTIVIVWSILLASIFSLLWVHIDPFTLKATKAAA

SEQ ID NO: 71998 - protein, 73 aa, Gossypium hirsutum
  Clone ID: LIB3149-002-P1-K2-B7.pep
KNILCKITQHQHQTSSAIPRRRIEVNTKILGLLVLGPNLCYKTYKSPRRHKLISCTCMASDISFFLFGYAYAW

SEQ ID NO: 71999 - protein, 164 aa, Gossypium hirsutum
  unsure (1)..(164): unsure at all Xaa locations
  Clone ID: GOSHI-09MAY01-C2535_3.pep
MAHRMAFSVCVVSYFLFIGLISSEAFSVVGSEVDPLIRQVTDGQDDGVETQPLTAEHHFSLFKARFKKSYGSEEEHDYRFKVFRANLRRAARHQKLDPSATHGVTQFSDLTPGEFRKRFLGLRRLRLPKDANQAPIXLPTDNLPEDFDWREKGAVTPVKNQGSC

SEQ ID NO: 72000 - protein, 117 aa, Gossypium hirsutum
  Clone ID: GOSHI-09MAY01-C2535_2.pep
GANFSVVSLDEDQIAANLVKNGPLAVPINAVFMQTYIGGVSCPYICSKRLDHGVLLVGYGSAGYAPIRLKDKPYWIIKNSWGETWGENGFYKICRGRNVCGVDSLVSTVAAVNTNSE

SEQ ID NO: 72001 - protein, 373 aa, Gossypium hirsutum
  Clone ID: GOSHI-09MAY01-C2535_1.pep
MEYRNVFPIFVIFSFFIVGVICTETFSAEGFEVDPLIEQVTDGHEGAEPQLLTAEHHFSLFKKRFKKSYGSQEEHDYRFKIFQVNLRRAARHQKLDPSATHGVTQFSDLTPGEFRKAYLGLRRLRLPKDATEAPILPTDNLPQDFDWREKGAVTPVKNQGSCGSCWSFSTTGALEGANFLATGKLVSLSEQQLVDCDHECDPEEAGSCDSGCNGGLMNSAFEYTLKAGGLMREEDYPYTGTDRGTCKFDNTKVAAKVANFSVVSLDEDQIAANLFKNGPLAVAINAVFMQTYIGGVSCPYICSKRLDHGVLLVGYGSAGYAPVRLKDKPYWIIKNSWGENWGENGFYRICTGRNIRRVDSMVSPVAAVNTNSE

SEQ ID NO: 72002 - protein, 71 aa, Gossypium hirsutum
  unsure (1)..(71): unsure at all Xaa locations
  Clone ID: LIB3166-051-P1-K1-A9.pep
GANLLSTVKLVSLIEQQLEECDHXCYPEXAGSCDSGCKGGLKNIAFENTLKAGGLMRVEDYPYTFTVRWTC

SEQ ID NO: 72003 - protein, 126 aa, Gossypium hirsutum
  Clone ID: GOSHI-09MAY01-C2495_3.pep
MGGGREGESSDKGLFSHLAGYAAGHYPPPGSYPPQGYPPQGYPPQGYPPAGYPPPAGYPPHGGYPPAGYPPHGGYPHPPHGGYPPAGYPGHGSHGPGMGGLLAGAGAAAAALYRAPHLAQGLIILP

SEQ ID NO: 72004 - protein, 132 aa, Gossypium hirsutum
  Clone ID: GOSHI-09MAY01-C2495_2.pep
MGGGREGESSDKGLFSHLAGYAAGHYPPPGSYPPQGYPPQGYPPQGYPPAGYPPPAGYPPHGGYPPAGYPPHGGYPHPPHGGYPPAGYPGHGSHGPGMGGLLAGAGAAAAALYRAHHLSHGAHHVSHGGYYG

SEQ ID NO: 72005 - protein, 170 aa, Gossypium hirsutum
  Clone ID: GOSHI-09MAY01-C2495_1.pep
MGGGREGESSDKGLFSHLAGYAAGHYPPPGSYPPQGYPPQGYPPQGYPPAGYPPPAGYPPHGGYPPAGYPPHGGYPHPPHGGYPPAGYPGHGSHGPGMGGLLAGAGAAAAALYGAHHLSHGAHHLAHGGYYGHGHGKFKHRPRVRPRVRKRWKHGMFGKHKAKFFGRKWK

SEQ ID NO: 72006 - protein, 44 aa, Gossypium hirsutum
  Clone ID: LIB3584-012-P1-K1-H10.pep
INDLIVLLSLILTNVINLIRFYTVKKKVRKYHSIRSRTMLQTNK

SEQ ID NO: 72007 - protein, 41 aa, Gossypium hirsutum
  Clone ID: LIB3146-036-P1-K1-E1.pep
SYLQQGYPPEGYPPQGYPPVGYPPPAGYPPQWRIPTCRVSY

SEQ ID NO: 72008 - protein, 61 aa, Gossypium hirsutum
  Clone ID: GOSHI-09MAY01-C2445_1.pep
GRVGGRVGGRVGGRVGSHSACRPEAKAPKNGFKIRNVVPATEEEARRILERMDAEMPQQSQ

SEQ ID NO: 72009 - protein, 138 aa, Gossypium hirsutum
  Clone ID: LIB3584-003-P1-K1-B7.pep
PTRPRIFGGFLMHRAFELAFATAYVFAGLVPCFLEVDHVDFLRPVDVGDFLRLTSCVLYTKLENPDQPLINVEVVAHVTRPEIRSSEVSNTFYFTFSVRPEAKATKNGFKIRNVVPATEEEARRILERMDAEMPQQNQ

SEQ ID NO: 72010 - protein, 177 aa, Gossypium hirsutum
  Clone ID: GOSHI-09MAY01-C2405_1.pep
TYIEEVQLVGLVLLSNSLLHYPSFQVLEPNWHVMHGRLQTAKSIDEVIQHHDFFLDKCLKECLLLLPELIKKVEKLKSLCLQYAAATQWLISLSIDIPKLDEQSDGSVGSGKLKSKNPSQVQKVMTRNSAVTDSILKFEREFNAELQSLRPILSSSSQAEPYLTHLAQWILGAGNDQ

SEQ ID NO: 72011 - protein, 140 aa, Gossypium hirsutum
  unsure (1)..(140): unsure at all Xaa locations
  Clone ID: GOSHI-09MAY01-C2435_2.pep
MSRGSGGGYDRHITIFSPEGRLFQVEYAFKAVKAAGITSIGVRGKDSVCVVTQKKVPDKLLDQTSVTHLFPITKFLGLLATGMTADARXTLVQQARNEAAESRFRYGYEMPVDVSSKWTADKSQVYAQHAYMRPLGSCAM

SEQ ID NO: 72012 - protein, 246 aa, Gossypium hirsutum
  Clone ID: GOSHI-09MAY01-C2435_1.pep
MSRGSGGGYDRHITIFSPEGRLFQVEYAFKAVKAAGITSIGVRGKDSVCVVTQKKVPDKLLDQTSVTHLFPITKFLGLLATGMTADARTLVQQARNEAAEFRFRYGYEMPVDVLSKWIADKSQVYTQHAYMRPLGVVAMVLGIDEEKGPQLYKCDPAGHFYGHKATSAGSKEQEAINFLEKKMKNDPAFTYEETVQTAISALQSVLQEDFKATEIEVGVVKADNPVFRVMSTEEIDEHLTAISERD

SEQ ID NO: 72013 - protein, 88 aa, Gossypium hirsutum
  Clone ID: uC-gsronu33B047e09b1.pep
PANLAKKERKKTKRTGHKALAKFNGSLWGLKNKHQRVYGPVKGGVPFPIRVGKFLERPFGRAFLVFTPLGKRGFFSKQFRLGNPRVFT

SEQ ID NO: 72014 - protein, 170 aa, Gossypium hirsutum
  Clone ID: uC-gsronu33B108h10b1.pep
RVCGGGYYRHIGVFFSKGRGFQNEYAFKAVKAAGITSIGVRGKDSVCFVTQKKVPDKLLDQTSVTHLFPITKFLGLLATGMTADARTLVQQARNEAAEFRFRYGYEMPVDVLSKWIADKSQVYTQHAYMRPLGVVAMVLGIDEEKGPQLYKCDPAGHFYGHTATSAGSKE

SEQ ID NO: 72015 - protein, 66 aa, Gossypium hirsutum
  Clone ID: LIB3148-005-Q1-K1-A6.pep
PRVRNDPAFTYEETVQTAISAVQSVLQEDFKATEIEVGVVKADNPAFRVLSTEEIDEHLTAISERD

SEQ ID NO: 72016 - protein, 38 aa, Gossypium hirsutum
  Clone ID: LIB3147-046-Q1-K1-D1.pep
SLCLIGIERGLEVFTFYFFFILRVINLYIINFFYFFFY

SEQ ID NO: 72017 - protein, 161 aa, Gossypium hirsutum
  unsure (1)..(161): unsure at all Xaa locations
  Clone ID: GOSHI-09MAY01-C2425_1.pep
MLQIRLSKTPSSDAAGPVKPLPVETVTVACPDHLVIADLPVAKSIGAAISSSLVKTVGRKSRRQLGERVHFCVRCDFPIAIYGRLSPCEHAFCLDCARSDSICYLCDERIQKIQTIKIMEGIFICAAPHCLKSFLKTXEFESHIHESHAALIQPNAEKEDG

SEQ ID NO: 72018 - protein, 125 aa, Gossypium hirsutum
  Clone ID: LIB3120-009-Q1-K1-B10.pep
MLQIRLSKGSFLDAGGSDQPLPAETVTVACPDHLVLGDLPVAKSIGAGTSSCIVKTVGRRSRRQLGERVHLCVHCDFPIAIYGRLSPCEHAFCLDCARSDSICYLCDDRMHKIQTIKIMDGIYIC

SEQ ID NO: 72019 - protein, 357 aa, Gossypium hirsutum
  unsure (1)..(357): unsure at all Xaa locations
  Clone ID: GOSHI-09MAY01-C2795_1.pep
PRVRNSAVIVLGATNRSDVLDPALRRPGRFDRIVMVETPDRIGREAIIKVHASKKELPLGDDVDLGDIASMTTGFTGADLANLVNEAALLAGRNNKVAVERIDFIQAVERSIAGIEKKTAKLKGSEKAVVARHEAGHAVVGTAVANLLPGQPRVEKLSILPRSGGALGFTYTPPTNEDRYLLFIDELRGRLVTLLGGRAAEEVVYXGRVSTGALDDIRRATDMAYKAVAEYGLNQTIGPLSLATVSGGGMDESGGGVPWGRDQGHLVDLVQGEVRALLQSAHEVXLSVVRANPTVLEGLGASXLKKMRKLEGEQLQNWLKLGVAPKGLILLLEGKPDSLLPVQPGSGISVLPIACPH

SEQ ID NO: 72020 - protein, 124 aa, Gossypium hirsutum
  unsure (1)..(124): unsure at all Xaa locations
  Clone ID: LIB3543-038-Q1-K1-G7.pep
MAFKAVAEXGLNQTIGPLSLATVSGGGMDESGGGVPWGRDQGGGGDLVQGEVKALLQSAHEVALSVVRANPTVLEGLGAHLEENEKVEGEELQKWLKLVVAPKELIIFVEGKQESLLPVQAGSG

SEQ ID NO: 72021 - protein, 144 aa, Gossypium hirsutum
  unsure (1)..(144): unsure at all Xaa locations
  Clone ID: LIB3165-052-Q1-K1-D1.pep
RARPLLKGSTPWKPGGPLALRYIPPTNEDRYLLLIDELRGRLVTLLGGRAAEEVIYHXRGNTGALDDIRRATDMAYKAVAEYGLNQTIGPLSLATVSGGGMDESGGGVPWGRDQGHLVDLVQGEVKALLQSAHEVALSVVRANP

SEQ ID NO: 72022 - protein, 82 aa, Gossypium hirsutum
  Clone ID: GOSHI-09MAY01-C2765_2.pep
KRLCEYTIAQDVTLDNVSSMYELSEAFHAISLRHTCILFILEHFSQLSDRPGHSHLIQRIIPEIRNYFAKALTNPNPHNQRP

SEQ ID NO: 72023 - protein, 368 aa, Gossypium hirsutum
  unsure (1)..(368): unsure at all Xaa locations
  Clone ID: GOSHI-09MAY01-C2765_1.pep
KRVSLCFGEDTHNQAGIAHMGGLVPLLKLLDSKNGSLQHNAAFALYGLADNEDNVSDFIRVGGVQRLQDGEFIVQATKDCVAKTLKRLEEKIHGRVLNHLLYLMRVAEKPVQRRVALALAHLCSPDDQRTIFIDNNGLELLLGLLGSTSPKQQLDGAVALYKLANKAMTLSPMDAAPPSPTPQVYLGEQYVNNATLSDVTFLVEGRRFYAHRICLLASSDAFRAMFDGGYREKXRDIEIPNIRWEVFELMMRPRVRRFIYTGSVDVSLDIAQDLLGAADQYLLEGLKRLCEFTFAQDVTLDNVSSMYELSEAFHAISLRHTCILFILEHFSQLSDRPGHSHLIQRIVPEIRNYFAKALTNPNPHNQRL

SEQ ID NO: 72024 - protein, 88 aa, Gossypium hirsutum
  Clone ID: LIB3148-014-Q1-K1-A8.pep
AAPPSPTPQVYLGEQYVNNATLSDVTFLVEGRRFYAHRICLLASSDAFRAMFDGGYREKDARDIEIPNIRWEVFELMMRYYKFFDLDI

SEQ ID NO: 72025 - protein, 252 aa, Gossypium hirsutum
  Clone ID: GOSHI-09MAY01-C2725_1.pep
MAANFWTSSHFKQLLDPEEVDVVHQQDKDKGITLEEFKLIKMHMANYIMKLAQNVKVRQRVVATAVTYMRRVYTRRSMSEYDPRLVAPTCLYLASKAEESTVQARLLVFYIKKLSSDEKYRYEIKDILEMEMKILEALNYYLVVFHPYRTLSPLLQDAGMNDMSMTQLSWGLVNDTYKMDLILTHPPYLIALACIYIASVYREKDITTWFEELRVDMNVVKNISMEILDFYENKMIADERISTAFLKLALKP

SEQ ID NO: 72026 - protein, 226 aa, Gossypium hirsutum
  Clone ID: GOSHI-09MAY01-C2685_1.pep
LQLGNIDRCRKLYEKYLEWAPENCYAWSKYAELERSLAETERARAIFELAITQPALDMPELLWKAYIDFEISEGEYERTRGLYERLLDRTKHLKVWISYANFEASAMGGDDESSDLPQDGVQEYNHEAKKECVQRARRVFERAVNYYRTSAPELKEERAMLLEEWLKTESSFGELGDISIVQSKLPKKLKTRKQITSEDGGVTGYEEYFDYVFPEENRRRTSCFWE

SEQ ID NO: 72027 - protein, 229 aa, Gossypium hirsutum
  Clone ID: GOSHI-09MAY01-C2655_7.pep
MVHIPAKQQVRWRPRVRRRPRFRWQPRHKIASAGKPEELEQNITYMDASLYKAAAEGKIEVFNNYQELDLESQKTPNHDNVLHVNLATHELAAWFSNGILSSTRSLPKLYFFIFLFLWFFIIKKKSEKRSNLIGQILNKCPSLLLQTNAKGQTPLHVAAMNGHSAIVKLLIKSCAKARDGDLEMLEMGQVNAVREMLRITDQESNTALHLAVKYGDVEMVKELLEHEDP

SEQ ID NO: 72028 - protein, 265 aa, Gossypium hirsutum
  unsure (1)..(265): unsure at all Xaa locations
  Clone ID: GOSHI-09MAY01-C2655_5.pep
MRDLITIIRGEKRSDFIEQILSKCPSMLLQTNAKGQTPLHVAARYGHSAIVKLLIKSCAKARDGDLEKLGMDQVSAVRGMLRIRDQESNTALHEAARCGNVEVVKALLEFEDPDFPYSANKKQETPLYIAARRGDGGVLSVLLEKSKSTAHGGPHGRTALHAAAMAGDAEAIRVILKTKXTLTKERDEDGYTPLHYAAHLGYISVVEEVLKWDVSAAYIGDKKKGMTPLLMAARQGHFETVSKIHSLCPDCCEKVDNKGLSLLHY

SEQ ID NO: 72029 - protein, 145 aa, Gossypium hirsutum
  unsure (1)..(145): unsure at all Xaa locations
  Clone ID: GOSHI-09MAY01-C2655_3.pep
AQRDGYRKVTASLALLCALNILFFSLESARGSCPSANPKPKPKPNTEAITPTXPSPSSSATCPXDALKLGVCADLLRALLNVTIGTPPVQPCCSLIQGLADLEAADRLCTAIKANIMGINLNDPLSLRLLPNVCSKKVPSGCQCR

SEQ ID NO: 72030 - protein, 130 aa, Gossypium hirsutum
  Clone ID: GOSHI-09MAY01-C2655_2.pep
MASKRTASLALFFALNVLFFSLVSACGSCPSPNPKPKPTPSPSPSGKCPQDTLKLGVCAEVLGLVNVTVGSPPVQPCCSLLQGLADLEAVVCLCTALKANVLGINLNIPVSLSLLLNVCSKKVPSGFQCP

SEQ ID NO: 72031 - protein, 137 aa, Gossypium hirsutum
  Clone ID: GOSHI-09MAY01-C2655_1.pep
MGSKRTASLALFFALNILFFSLVSACGSCPSPNPKPKPKPKPNPTPSPSSSGKCPRDALKLGVCADLLGGLLNVTIGTPPVQPCCSLIQGLADLEAAVCLCTAIKANILGINLNVPLSLSLLLNVCSKKVPSGFQCR

SEQ ID NO: 72032 - protein, 139 aa, Gossypium hirsutum
  unsure (1)..(139): unsure at all Xaa locations
  Clone ID: LIB3543-019-Q1-K1-E5.pep
MGSKRTASLALLFALNILFFSLVSACGSCPSPNPKPKPKPKPKPNPTPSPSSSGKCPRDALKLGVCADLLRGLLNVTIGTPSVXPCCSLIQGLADLEAAVCLCTXIKANILGINLNVPLSLSLLINVCSKKVPFGLQCR

SEQ ID NO: 72033 - protein, 109 aa, Gossypium hirsutum
  unsure (1)..(109): unsure at all Xaa locations
  Clone ID: uC-gsronu33B015f10b1.pep
MDQVSAVREMLRIRDQESNTALHEAAGCGNVEVVSACGSCPSPNPKPKPKPKPKPNPTPSPSSSGKCPRDALKLGVCADLLRGLLNVTIGTPPVQPCCSLIQVXLILKL

SEQ ID NO: 72034 - protein, 96 aa, Gossypium hirsutum
  Clone ID: uC-gsflnu33B137d05b1.pep
MGSKRTASLALFFALNILFFSLVSACGSCPSPNPKPKPKPKPNPTPSPSSSGKCPRDALKLGVCADLLGGLLNVTIGTPPVQPCCSLIQGLADLEA

SEQ ID NO: 72035 - protein, 135 aa, Gossypium hirsutum
  unsure (1)..(135): unsure at all Xaa locations
  Clone ID: GOSHI-09MAY01-C2665_2.pep
GTPYTQXSYKVTDVFPFKWINKKWKEGFSVTSMTAAGNKWGIVMSRNAGYRLQVVELDFLYPSEGIHRRWEKGFRITSAAATEDQAAFILSAPKRKSQDVMQETLRTSAFPSTQVKDKWLLNLYISSICYGRTVS

SEQ ID NO: 72036 - protein, 532 aa, Gossypium hirsutum
  Clone ID: GOSHI-09MAY01-C2665_1.pep
DAFEVALKFEHQNGKGCSSGPPYEWQVYSTLNGCYGLPLVHYKGQLGGYYILVMDMLGPSLWDVWNSNNQMLTEEMVACIAVEAISILEQLHLKGFVHGDVKPENFLLGQPGTSKEKTLYLVDLGLASRWKEAASARHVDYDQKPDVFRGTVRYASVHAHLGRTGSRRDDLESLAYTLIFLLRGKLPWQGYIGENKGFLVCKKKMATSPEMLCYLCPPPFQQFLEIVTNMKFDEEPNYSKLISLFRNSIDFNSSICPIQIDGAIKLGQKRGRALFELEDGEQLKKKLRLGSPASQWISVYSSRTSMKQRYHFNVIDSRLNQHVEKGKEDGLYISCVASSLNLWAIVMDAGTGFTSQVYELSPIFLHKEWIMEQWEKNYYITSVAGACNGSALVVMSKGTPYTQQSYKVSDVFPFKWINKKWKEGFSVTSMTAAGSKWGIVMSRNAGYPTQVVELDFLYPSEGIHRRWEKGYRITAAAATEDQAAFILSASKRKSQDVMQETLRTSAFPSTHVKDKWLKNLYISSICYGRTVS

SEQ ID NO: 72037 - protein, 91 aa, Gossypium hirsutum
  unsure (1)..(91): unsure at all Xaa locations
  Clone ID: LIB3048-017-Q1-L1-H8.pep
QKPDVFRGTVRYARVHAHLGRTHNRRHDLESLAYTLTXLLLGNRPWLGHTDENXRYLRCAYKIAAHTDMLCYMSTTPFQRSIHIKTIMNSD

SEQ ID NO: 72038 - protein, 280 aa, Gossypium hirsutum
  Clone ID: GOSHI-09MAY01-C2635_1.pep
MSQAPTDHEKVSETKQPTSSTESTQPATLSSDYAPYPKLDPKDVAPPPENWTTVSMASQSDPSPDPVPISSSAATTMPAESNPYVSPAPVQSSSVKNKMESVKDVLGKWGKKAADDTKKAKEIAENMWQHLKTGPSFADAAVGRIAQTTKVIADGGYEKIFRTTFETVPEELLLKTYACYLSTSAGPVIGVLYMSTHKLGFCSDSPLAYQVGDQTQYSYYKVVIPLHQLRAVNPSASKANPAEKYIQIISVDNHEFWFMGFVHYDSAVKNLQGALQSRGS

SEQ ID NO: 72039 - protein, 115 aa, Gossypium hirsutum
  Clone ID: AW186934.1.pep
YSHLLRNINDSNCKNVFSFTILKIFSFSFWLFHKYIMSHPPTDHDKVSEITHPSSSTDSTPRATLSSDYPPYPKLDPIDVSPPPDNWTTVSMVFAIGFHSGSRPDLHLRCYLHVC

SEQ ID NO: 72040 - protein, 393 aa, Gossypium hirsutum
  Clone ID: GOSHI-09MAY01-C2625_1.pep
MTSSPEYNNMQKTVALLLIVCLDSYLILILRFDIQMADISNGSKGFAVKQGEPTRVLPAEETKKGLYYLGNLDQNIAVIIRTIYFFQSESKGNEDAAEQVKNGLSKILVHHYPLAGRLTISSEGKLIVDCTGEGAVFVEAEANCGIEEMGDITKPDPNILGKLVYEISGAQNLLEIPLLVIQVTKFKCGGFSIGMSMNHCMLDGIAAMEFVNGWGEVTRGLPLKTPPFLDRTILKPRNPPMIEFEHHEFDEIEDISNTNKLYEEEEMVYKTFLFDPDKLGQLKEQALEDGVLSKCTTFEVLAGFVWRAPCKALNLVPQQKTKLLFAADGRKRFIPPLPEGFAGNGIVLTYSISTAGELAEKPLSFAVGLIQQAVKLATDSFMRSAIDYFEVTR

SEQ ID NO: 72041 - protein, 128 aa, Gossypium hirsutum
  unsure (1)..(128): unsure at all Xaa locations
  Clone ID: GOSHI-09MAY01-C2195_7.pep
FIYIKDAIEAVLLMIEEADRANGHIFNVGNPNNEVTVRQLAEMMTKVYAKVSGXTVLESPTVDVSSKEFYGEGYDDSDKRIPDMTIINKQLGWNPKTSLWDLLESTLTYQHRTYAEAIKKSIAKPSAS

SEQ ID NO: 72042 - protein, 120 aa, Gossypium hirsutum
  Clone ID: GOSHI-09MAY01-C2195_6.pep
EAVLLMIENPDRGGGHIFNVGNPNNALAAGQLAEMMTKVYAKVSGEPSLESPTIDVSSKEFYGEGYDDSDKRIPDMTIINRQLGWNPKTSLWDLLESTLTYQHRTYAEAIKKSMVKPIAS

SEQ ID NO: 72043 - protein, 129 aa, Gossypium hirsutum
  Clone ID: GOSHI-09MAY01-C2195_5.pep
TFVYIKDAIVAVLLMIENPDRANGHIFNVGNPNNEVTVRQLAEMMTQVYTKVSGEPMLQSPSIDVSSKEFYGEGYDDSDKRIPDMAIINKQLGWNPKTSLWDLLESTLTYQYRTYAEAIKKSMAKPTAS

SEQ ID NO: 72044 - protein, 160 aa, Gossypium hirsutum
  unsure (1)..(160): unsure at all Xaa locations
  Clone ID: GOSHI-09MAY01-C2195_4.pep
MATRTDLDGRPIKPMTICMIGAGGFIGSHLCEKLMSETPHKVLALDVYNDKIKHLLEPDSLPWAGRIQFHRLNIKHDSRLEGLIKMADLVINLAAICTPADYNTRPLDTIYSNFIDALPVVKYCSENNKRLIHFSTCEVYGKTIGSFXPKDSPLRQDPAY

SEQ ID NO: 72045 - protein, 197 aa, Gossypium hirsutum
  Clone ID: GOSHI-09MAY01-C2195_3.pep
MAASRMDLDGRPIKPITICMIGAGGFIGSHLCEKLMSETPHKVLALDVYNDKIKHLLEPDSLPWAGRIQFHRLNIKHDSRLEGLIKMADLTINLAAICTPADYNTRPLDTIYSNFIDALPVVKYCSENNKRLIHFSTCEVYGKTIQSFLPKDSPLRQDPAYYVLKEDVSPCIFGSIEKQRWSYACAKHLNEKAHFAE

SEQ ID NO: 72046 - protein, 218 aa, Gossypium hirsutum
  unsure (1)..(218): unsure at all Xaa locations
  Clone ID: GOSHI-09MAY01-C2195_2.pep
MATTRTDLDGRPIKPMTICMIGAGGFIGSHLCEKLMSETPHKVLALDVYNDKIKHLLEPDSLPWAGRIQFHRLNIKHDSRLEGLIKMADLTINLAAICTPADYNTRPLDTIYSNFIDALPVVKYCSENNKRLIHFSTCEVYGKTMGSFLPKDSPLRQDPAYYVLKEDASPCIFGSIEKQRWSYACAKPFIERLIYAEGAENGLXFTIVRPXNWMGLGW

SEQ ID NO: 72047 - protein, 361 aa, Gossypium hirsutum
  Clone ID: GOSHI-09MAY01-C2195_1.pep
FGSHLCPRVRPRAPHKGLALDVYNDKIKHLLEPDSLPWAGRIQFHRLNIKHDSRLEGLIKMADLTINLAAICTPADYNTRPLDTIYSNFIDALPVVKYCSENNKRLIHFSTCEVYGKTIRSFLPKDSPLRQDPAYYVLKEDASPCIFGSIEKQRWSYACAKQLIERLIYAEGAENGLEFTIVRPFNWIGPRMDFIPGIDGPSEGVPRVLACFSNNLLRREPLKLVDGGQSQRTFVYIKDAIEAVLLMIENPGRANGHIFNVGNPNNEVTVRQLAEMMTKVYTKVSGESALETPTIDVSSKEFYGEGYDDSDKRIPDMTIINKQLGWNPKTSLWDLLESTLTYQHRTYAEAIKKSMAKPTSS

SEQ ID NO: 72048 - protein, 217 aa, Gossypium hirsutum
  Clone ID: LIB3583-022-P1-K1-G3.pep
LETLLTYSALETTAPVQQNPDSGNCSSDYEGSLLNDFSDFDSFSETEEIISPSSEEGRKLLHLTKMGYSEAEASVAMERCGPDSTIEELTDFICAAQIAKAADALFPLEDKKPFSNGSSHKKRRNWGYDLLLRKKKLKLEKRFDEDDDVVHLPNPMIGFGVPNEPDKITHRVLPEAALGPPYFYYENVALAPKGVWTTISRFLYDVEPEFVDSKFFC

SEQ ID NO: 72049 - protein, 162 aa, Gossypium hirsutum
  Clone ID: LIB3582-029-P1-K1-F6.pep
MSPSSEEGRKLLHLTKMGYSEAEASVVMERCGLCYLIHFCNIFLLMVGRMSKFHLDSIKDPRLFNCCIENGPDSTIEELTDFICAAQIAKAADALFPLEDKKPFSNGSSHKKRRNWGYDLLLRKKKLKLEKKVDEDDDAVHLPNPMIGFGVPNEPDQITNRV

SEQ ID NO: 72050 - protein, 110 aa, Gossypium hirsutum
  Clone ID: GOSHI-09MAY01-C2115_1.pep
LIFFLFLMICPRGIEMDSATVHEEIDSLFESTPPLKDSAKIIDKLNQVIQFDSPSGEGKGRRVEELLKRCPNLKKIIIFRVISKAKPHKECQMYFTIDSTFYVSFTIMLY

SEQ ID NO: 72051 - protein, 62 aa, Gossypium hirsutum
  Clone ID: LIB3583-022-P1-K1-D5.pep
TDQNSTIKQSFGLLNTQNIEWGFQVHSKNLRIAIQGRRCRMAIPTSPSNDPSFPLRKYPFLD

SEQ ID NO: 72052 - protein, 64 aa, Gossypium hirsutum
  Clone ID: LIB3584-008-P1-K1-D1.pep
KSPNSPFRGGGVEWLFQPLHRMTLLFPSEIPFLRLKFLNSFNFFFLLVIRQSQAQINLKGSKST

SEQ ID NO: 72053 - protein, 316 aa, Gossypium hirsutum
  Clone ID: GOSHI-09MAY01-C2125_1.pep
MADKPSRALILYGDGLARFIHPSHAHLHSLASTANCGFLSLPNAPPSESEDDRTVREFAVLVDAFETLNKNGQFSSEVKSQKSSLIPTMSERFMGMKAAILSNNSGLQSFGEKLGFNVLNLDGLFGNSNTPPVSSIDNLASKLLALLAFQEGKVTESNQFDLVILHGGSGENLSANSGNDVEFLNALLGAIMSIAKPGTEIRSRLLLSLVMSYGSVSKADELGLSILSTKYEKNPNLSALFPNQSYTMRGESQRNDVRQYGPMLFAQYQYAVTRKDMVETFSFEEFKECSGNLTIPADRLLHEIAFKLWKAPKYGA

SEQ ID NO: 72054 - protein, 190 aa, Gossypium hirsutum
  Clone ID: GOSHI-09MAY01-C2075_1.pep
MALMATTRTQLSRFLTRTLTRPGFIAFNGSIRRPDAPPLHRNFSSSAAAAAVVPQREPMGVKEYEDYRRSLYGDITHKALLVDAAGTLLAPSQPMAQIYREIGEKYGVQYSEAEILNRYRRAYAQPWGKSRLRYVNDGRPFWQYIVSSSTGCSDAQYFEEVYNYYTTDKAWHLCDPEAEKVFLALRRAGV

SEQ ID NO: 72055 - protein, 127 aa, Gossypium hirsutum
  Clone ID: GOSHI-09MAY01-C2395_2.pep
RERRAGPTRPVECKAVNKAVNMIPAPPEQVGGIYVVTADHGNAEDMVKRNKSGQPLYDKSGKLQILTSHTCQPVPIAIGGPGLAAGVRFRNDVPDGGLANVAATVMNLHGYVAPNDYEPTLIEVVSN

SEQ ID NO: 72056 - protein, 559 aa, Gossypium hirsutum
  Clone ID: GOSHI-09MAY01-C2395_1.pep
MGSSGQQVSWKLADHPTLPKGKTLALIVLDGWGEDKPDEYNCIHVAQTPTMDSLKQGAPEKWRLIRAHGKAVGLPTEDDMGNSEVGHNALGAGRIFAQGAKLVDIALASGKIYEGEGFKYISECFEKGTLHLIGLLSDGGVHSRLDQLQLLLKGASERGAKRIRVHILTDGRDVLDGSSVAFVETLESDLAKLRENGVDARIASGGGRMYVTMDRYENDWDVVKRGWDAQVRGEAPHKFANAVEAVKKLRENANDQYLPPFVIVDENEKAVGPIEDGDAVVTFNFRADRMVMLAKALEYQDFDKFDRVKVPKIRYAGMLQYDGELKLPGRYLVSPPEIDRTSGEYLVHNGVRTFACSETVKFGHVTFFWNGNRSGYFNPEMEEYVEIPSDVGITFNVQPKMKALEIGEKARDAILSRKFDQVRVNIPNGDMVGHTGDIQATVVACKAADEAVKMILDAIEQVGGIYVVTADHGNAEDMVKRNKSGQPLLDKSGELQILTSHTCQPVPIAIGGPGLAPGVRFRSDAPNGGLANVAATVMNLHGFVAPNDYETTLIEVADN

SEQ ID NO: 72057 - protein, 62 aa, Gossypium hirsutum
  unsure (1)..(62): unsure at all Xaa locations
  Clone ID: LIB3584-055-P1-K2-A1.pep
YLPPFVIVDENEKAVGPIEXGDAVVTFNFRADRMVMLAKALEYXDFDKLMRKGLNSLLMSKR

SEQ ID NO: 72058 - protein, 44 aa, Gossypium hirsutum
  Clone ID: LIB3148-035-Q1-K1-H5.pep
AAGVRFRNDVPDGGLANVAATVMNLHGYVAPNDYEPTLIEVVNN

SEQ ID NO: 72059 - protein, 95 aa, Gossypium hirsutum
  unsure (1)..(95): unsure at all Xaa locations
  Clone ID: LIB3189-027-P1-K1-H5.pep
DTIGDGDAVVTFNFRADRMVMLAKALEYQDFDKFDRVKVPKIRYAGMLQYDGELKLPGRYLGSSPRIXRTFGEYLVHNGVPTFACRETVKFGPWH

SEQ ID NO: 72060 - protein, 48 aa, Gossypium hirsutum
  Clone ID: LIB3146-033-Q1-K1-C8.pep
PTRPTTRPPTRPRFLYIGCVPIPKHQFRIRFKMLYFCSFFGQKTLYFC

SEQ ID NO: 72061 - protein, 181 aa, Gossypium hirsutum
  Clone ID: GOSHI-09MAY01-C2385_1.pep
PTRPLEQSAFNGRFPAQVRFKIYSACLPLHESSFRRAIENNYQKGFKFKQELNKQQVGSLLSMFRPLTTPVPGSMQPMLLQPVENQLRLTFPKDSFPQILESQKFQQTRLQQGICHPMDPNVTGLQLSYVQPVSEPSDIQHHVPFPEQHYFGSTENMGHSHPTMVKPSLFDTKSSILYGRC

SEQ ID NO: 72062 - protein, 238 aa, Gossypium hirsutum
  unsure (1)..(238): unsure at all Xaa locations
  Clone ID: GOSHI-09MAY01-C2345_1.pep
MPDTQALVNDFLNKLKKRKIEGSQATAKQTAELLRSVISQTRMPYTNQAAALIHSVKAVGERLIAANPVELAVGNVVRRVLHIVREEDLSLTTAAMAGLNLSAESDDEDDTDRDNHPALSAAAIAAASRSTLRPPSLQTLLEDVPDSAAVPHTSSSGGDSEGKSKSADKSSRSRKLKHDVIEAVNELIQDISTCHELIAEQAVEHIHQNEVILTXGSSRTVLEFLCAAKEKKRSFRVF

SEQ ID NO: 72063 - protein, 145 aa, Gossypium hirsutum
  Clone ID: GOSHI-09MAY01-C2375_1.pep
MAWDLIFWVVCFFINIALLASSFYQLLSLSDLEADHLNPFEASTRINSIVLPEFLLQGFLCISFLLTWHWFMFLFTLPIAAYHLMLYLNQKHLLDVTEIFRDLNTEKKYRFIKLAVYLLLFTVVLFRLVITAFNSLHDEVDVHAF

SEQ ID NO: 72064 - protein, 254 aa, Gossypium hirsutum
  unsure (1)..(254): unsure at all Xaa locations
  Clone ID: GOSHI-09MAY01-C2365_1.pep
HASGGDEEWMEGQHEKLEDDVNIDSHILSTPVIADIDNDGVSEMIVAVSYFFDHEYYDNPEHRKELGDIDIGKYVAGGIVVFNLDTKQVKWTKDLDLSTDTADFHAHIYSSPNVVDLDGDGNLDILVGTSFGLFYVLDHHGNVREKFPLEMAEIQSAVIAADINDDGKIELVTTDTHGXNVAAWTAQGKEIWQVHVKSLIPQVCWCSRSVCIYNLVLFCHFLFIPDKFHSLLSLLIIVAVRDMICSSLHAPGAC

SEQ ID NO: 72065 - protein, 465 aa, Gossypium hirsutum
  unsure (1)..(465): unsure at all Xaa locations
  Clone ID: GOSHI-09MAY01-C2285_1.pep
VKSGWKSMWMVGTTAAYDDHKNIVLLAFEIIEKIIRDYFPFITETETTTFTDCVNCLIGGANSRFNKDISLNAIAFLRFCATKLAEGDLGSSSKXKDNEFGKISPSSSNKGKDGTQDNGXLVDKDDHRYFWFPLGAGLSELSFDPRPEIRKSALQVLFETLRNHGHLFSLPLWERVFESVLFPIFDYVRXGRVGAIDPAGGDSPGQGIVNDMDELDQDAWLYETCTLALQLVVDLFVNFYNTVHPLLRKVLSLLVSFIKRPHQSLAGIGTAAFVRLMSNAGDLFSEEKWLEVGSSLKEAANATLPDFSCVVSGDIMAGTNGHALNSQGNEASAGSDTSHGGSESLRTQHIYASLSEAKCRAAVQLLLIQAMMEIYNMYRTHLSAKSTLVLYEAMHDVASHAHRINNNTILRSKLQEFGPMTQLQDPPLLRLENESYQFCLTFLQNLILDRPQXEEAEVESHLVDL

SEQ ID NO: 72066 - protein, 157 aa, Gossypium hirsutum
  Clone ID: LIB3583-056-P1-K1-C8.pep
LAEGDLGSSSKNKDNEFGKISPSSSNKGKDGRQDNGVLVDKDDHLYFWFPLLAGLSELSFDPRPEIRKSALQVLFETLRNHGHLFSLPLWERVFESVLFPIFDYVRHAIDPSGGESPGQGIVNDIDEHDQDAWLYETCTLALQLVVDLFVNFYNTVK

SEQ ID NO: 72067 - protein, 379 aa, Gossypium hirsutum
  unsure (1)..(379): unsure at all Xaa locations
  Clone ID: GOSHI-09MAY01-C2245_1.pep
MADCLDGNVLAAKSFARFGVTHMFGVVGIPVTGLANRAVQLGIRFIAFHNEQSAGYAASAYGYLTGRPGLLLTVSGPGCVHGLAGLSNAMINTWPMVMISGSPDQKDSGRGDFQELDQIEAVKPFSKFSVKAKDIKEIPDCVARVLDHAVSGRPGGCYLDLPTDVLHQKITESEAEKLLTEVEKGRVFEATKAPPSSEIAKAGSVLRXKAERPLIVFGKGAAYXRAGGGLKKLVERTGIPFWPTPMGKGLVNDDHELAASAARSLAIGKCDVALVVGARLNWLLHFGESPKWDKDVKFILXDVSEEEIKLRKPHXGLVGDAKKVLEMINNEIKDDPFWLGKCYXWWEAISKKVNVNVSKMEAXVAKDVCPLIFDSLTIL

SEQ ID NO: 72068 - protein, 226 aa, Gossypium hirsutum
  unsure (1)..(226): unsure at all Xaa locations
  Clone ID: GOSHI-09MAY01-C2265_3.pep
RKGPSNFNAYAFGGSHVMEYGNTSIKLEKLYLYQGFDPATVNLPPNELSPNTPMEAFNQRDADILFLWHMYKNSEDGSKKTEILKQITETKRHRIHLDGSIDLIGTLLYGPAKGSAILKSVRETGLPLVDDWQCLKSVVXVKFSFRDLTICALVLAYKLQPYLDSRXRLFETHCGSLTQYGMKHMRAFANICNSGVSQVLMQEACTAACNGHGPIQWHPSNQGYSA

SEQ ID NO: 72069 - protein, 498 aa, Gossypium hirsutum
  unsure (1)..(498): unsure at all Xaa locations
  Clone ID: GOSHI-09MAY01-C2265_2.pep
MAKHDSVFIKNPSLFFLILLLFEANHIEGAGRLNQWESGIRLPTDKNNEPEELDEQQVGTRWAVLVAGSSGYGNYRHQADVCHAYQLLRKGGLKEENIVVFMYDDIAMNELNPRPGVIINHPQGDDVYAGVPKDYTGEHVTAANLYAVLLGDKDALSGGSGKVIDSKPNDRIFMYYSDHGGPGVLGMPNMPFLYAMDFLDVLKKKHAAGTYKEMVLYVEACESGSIFEGIMPKDLDVYVTTASNAQESSWGTYCPGMEPPPPPEFITWLGDLYSVAWMEDSETHNLKRETVEQQYEMXSVKERTSNFNADAFGGSHVMEYGNTSIKLEKLYLYQGFDPATVNLPPNELSPNTPMEAFNQRDADILFLWHMYKNSEDGSKKTEILKQITETKRHRIHLDGSIDLIGTLLYGPAKGSAILKSVRETGLPLVDDWQCLKSVVRLFETHCGSLTQYGMKHMRAFANICNSGVSQVLMQEACTAACNGHGPIQWHPSNQGYSA

SEQ ID NO: 72070 - protein, 143 aa, Gossypium hirsutum
  unsure (1)..(143): unsure at all Xaa locations
  Clone ID: GOSHI-09MAY01-C2265_1.pep
RTRGRTRGRTRGRTRGKNSEDGLKKTEILKQITETXRHRIHLDGSIDLIGTLLYGPAKGSAFLKSVRETGLPLVDDWQCLKSVVRLFETHCGSLTQYGMKHMRAFANICNSGVSQALMQEACTAACNGHGPIQWHPSNQGYSA

SEQ ID NO: 72071 - protein, 173 aa, Gossypium hirsutum
  unsure (1)..(173): unsure at all Xaa locations
  Clone ID: LIB3583-050-P1-K6-H10.pep
NLAKPILFSSNPSLFFLILLLFEANHIEGAGRLNQWESGIRLPTAKXEPEELDEQQVGTRWAVLVAGSSGYGNYRHQADVCHAYQLLRKGGLKEENIVVFMYDDIAMNELNPRPGVIINHPQGDDVYAGVPKXLLGNKDALSGGSGKXIDSKPXDRIFIYYSDHGGPGVLGMP

SEQ ID NO: 72072 - protein, 170 aa, Gossypium hirsutum
  Clone ID: GOSHI-09MAY01-C2215_1.pep
KKTWGRSWSTVVPPSRGLHALTRPFLLCHIRWSETENFPFSDANQNGTFSFSFLLFAIYIFKKYSPLCILIDYGTFSVYICRNKLFIESVCVFPLKNRPLHPFDSGFLWPLKRKRKIFTIFDLFPAIFVSFLSFSFHFCRCSRRVDHRPRAARRLRHKVGPRITALMKGS

SEQ ID NO: 72073 - protein, 135 aa, Gossypium hirsutum
  Clone ID: GOSHI-09MAY01-C2235_1.pep
NLAPTRQPRGFGFVQYLDPADAADAKYHMDGYVLLGRELTVVFAEENRKKPSEMRARERRRRSPPSYSRSPRYARSYSRSPYYYSPPPRQRRYSRSISPGDKRYRERSYSRSPCGSRSPSRSFSRSRSQSLDYSR

SEQ ID NO: 72074 - protein, 131 aa, Gossypium hirsutum
  Clone ID: LIB3583-025-P1-K1-G11.pep
CRQPRGFGFVQYLDPADAADAKYHMDGYVLLGRELTVVFAEENRKKPSEMRARERRRRSPPSYSRSPRYARSYSRSPYYYSPPPRQRRYSRSISPGDKRYRERSYSRSPCGSRSPSRSFSRSRSQSLDYSR

SEQ ID NO: 72075 - protein, 186 aa, Gossypium hirsutum
  Clone ID: LIB3825-021-Q1-K6-D10.pep
MRGRSYSYSPSPPRDYGRRRHRSPSPRGRYGGRGRDLPTSLLVRNLRHDCRPEDLRGPFGQFGRLKDVYLPRDYYTGQPRGFGFVQYLDPADAADAKYHMDGYVLLGRELTVVFAEENRKKPSEMRARERRRRSPPSYSRSPRYARSYSRSPYYYSPSPRKRRYSRSISPGDKRYRERSYSSSPYG

SEQ ID NO: 72076 - protein, 167 aa, Gossypium hirsutum
  unsure (1)..(167): unsure at all Xaa locations
  Clone ID: GOSHI-09MAY01-C3995_1.pep
MATDPSPQIPMRASSKSSNNSIHPVDVETPPVRTPTPIIYREIKHFKKWIPWLVPAFVVANTVMFIITMYVNNCPKNSVSCVADFLGRFSFQPFKEIPFLGPPSPTLLKMGPLHVKEVFDGDQGWRLITCNWLHGGVFHLLANMLSLLXIGIRLERXFGFIRVGLIY

SEQ ID NO: 72077 - protein, 147 aa, Gossypium hirsutum
  Clone ID: GOSHI-09MAY01-C3955_2.pep
MDGGVPYNPRTVEEIFRDFKGRRAGMIKALTTDVEEFYQQCDPEKENLCLYGFPSEQWEVNLPAEEVPPELPEPALGINFARDGMQEKDWLSLVAVHSDSWLLSVAFYFGARFGFDKADRKRLFNMINDLPTVFEVVTGAAKKQTKE

SEQ ID NO: 72078 - protein, 253 aa, Gossypium hirsutum
  Clone ID: GOSHI-09MAY01-C3955_1.pep
MDGGASYNPRTVEEVFRDFKGRRAAMIKALTTDVEEFYKQCDPEKENLCLYGYPSEQWEVNLPAEEVPPELPEPALGINFARDGMQEKDWLSLVAVHSDAWLLAVAFYFGARFGFDKADRKRLFNMINDLPTIFEVVTGATKKQTKEKSSVSNHSSNKSKSNSKRRSESQPKYSKAAASKDEVEDGMEDEDDEEHGETLCGACGENYAADEFWICCDICEKWFHGKCVKITPARAEHIKQYKCPSCSNKRARP

SEQ ID NO: 72079 - protein, 128 aa, Gossypium hirsutum
  unsure (1)..(128): unsure at all Xaa locations
  Clone ID: LIB3543-038-Q1-K1-C2.pep
SVPGVMDGAVLPITPTYQSXESSLGRGARXXVEPGPMIKSPLTTGXVEXSSTKAXCDPQKREXXLCPFMGISPSEPQWEGXNLPWAEEGXXSXXXSXSPCTGGYQPFAQXMGCPRKGTWLXLWLAVHQ

SEQ ID NO: 72080 - protein, 162 aa, Gossypium hirsutum
  Clone ID: GOSHI-09MAY01-C3965_1.pep
MAPIAVGDVLPDGTLSYFDADDKLQQVSVHSLAAGKKVIIFGVPGAFTPTCSLKHVPGFIEKAGELKSKGVDEIICISVNDPFVMKAWTKTYPENKDVKFLADGSATYTHALGLELNLGDKGLGTRSRRFALLVDDLKVKAANVESGGEFTVSSADDILKAL

SEQ ID NO: 72081 - protein, 95 aa, Gossypium hirsutum
  unsure (1)..(95): unsure at all Xaa locations
  Clone ID: LIB3828-026-Q6-K6-E11.pep
PGSTHAVRFXRSRCPLSGGWGGGKHSSWXFIEXSXXELKSKGALMKLFLHXXVNGIPXXDEGHGTINFTLXNXXCARGAELXWFSNHTTXMPLXS

SEQ ID NO: 72082 - protein, 423 aa, Gossypium hirsutum
  unsure (1)..(423): unsure at all Xaa locations
  Clone ID: GOSHI-09MAY01-C3845_1.pep
MIADPKSCDVLLVFVLFAIISSSSALVSTPYPKAISDLKEAVVKGLGFQADDFKISGFDLRDALVGHSVAYEFDIEIDNKVIPFKLLEDVNRWEYVDLPIFRVEEPARPGVENGLVXHKRISDNGGPVLAPFQLAGPMELWIQDAKDMRISLPHDVDAGVLKKVMLADGAVVTVKGARSVSLRHPIDLPLPLNRTHNGFASGLMALAEHLRRASCGQDAPLLSRRIVGPAALTVPSSXNNKLKLKRLAPGLVELSSMSKTKTMDALSTIDLQGEAATVLTPKHFSTMWPFASINGSNANLIGFERLLSSVLDSKANKKGYFKLLKADVSAQTFVKIGFGIEKKLKERDGFNFEGFPEWRTKPEIVSMHFGVLAKVDGETVIPERXMQVNPVAAEDAIAPPVLARNMTMSSTPVVYTPSNPFTL

SEQ ID NO: 72083 - protein, 243 aa, Gossypium hirsutum
  unsure (1)..(243): unsure at all Xaa locations
  Clone ID: GOSHI-09MAY01-C3865_1.pep
DSKPEIKQKMASKLGLAGGIPERRVRPIWDAIDSRQFKNALKLTTTLLAGLPHSPYALALKALILERMGKTXQALSVCLNAKELLYKNESLVMDDLTLSTXLRIVFQRLDHLELATSCYEHACGKFPNNLELMMGLFNCYVREYSFVKQQQXIKMYKLVGEERFLLWAVCSIQLQVLCGNGGEKLLLLAEGLLKKHVASHGLHEPEALIVYFSILEQQAKYGDALDILGGKLGSLLMIEVDKL

SEQ ID NO: 72084 - protein, 50 aa, Gossypium hirsutum
  Clone ID: GOSHI-09MAY01-C3805_1.pep
RPCEPKLNPCGITPLMTSISSLGLAFQLKQIGLHMNNTYGLNIITKYGIL

SEQ ID NO: 72085 - protein, 281 aa, Gossypium hirsutum
  unsure (1)..(281): unsure at all Xaa locations
  Clone ID: GOSHI-09MAY01-C3545_1.pep
LLTSKREELGIKQSRQLIPVTPSMPKGSVLNSADKSKAKPAARISETNVAVKSGPQPQPLTHQGNQSPHGGHVKSDMPKTSGKLLVLKPGWENGVSSPTQKDIASSATITNNRVTTSQHAVAPIKSAPARNSNSPKLSSGELKAASINPIAGFTGEKRPSLAQTQSRNDFFXSLKKRTSTNTSAGLSDPDPHISTSTTEKSEVTKEVDGASATAHADENGTAAASNGDTCSDDGEKNMSATAMVYPDEEEAAFLRSLGWXRNTGEDEGLTEEEINAFIRST

SEQ ID NO: 72086 - protein, 158 aa, Gossypium hirsutum
  Clone ID: GOSHI-09MAY01-C3565_1.pep
MLTRLQSNKLFSKVLLSRYKNGFPNLISGSQFLRGFNEIAKHGFSVMSGDNLRSLSNSASPRNYRVVVAATREMGIGKDGKLPWRLPSDLKFFKELTVTTSDPEKKNAVVMGRKTWESIPLEFRPLPGRLNVVLTRFQSSDITTGENVVICGSIPSAF

SEQ ID NO: 72087 - protein, 85 aa, Gossypium hirsutum
  Clone ID: GOSHI-09MAY01-C3445_1.pep
APDPAQNMGNIIRLDPTLITKREPCLVQHNPPKSKPSKPKPGSQAMLCLLIVQGYRSPYQYWHFYVGYPSPTKGHHFTKSSLAYR

SEQ ID NO: 72088 - protein, 228 aa, Gossypium hirsutum
  Clone ID: GOSHI-09MAY01-C3475_1.pep
MPKSKRNKIVSLSKTKKKGKEHKESIVNAIREAAEDYNSIYVFSFENMRNLKFKEFREKLKPTSRFFLGSNKVMQVALGRSVSDEIRPGLYKVSKLLRGDAGLFLTNMPRDEVESCFNKFEENDFARTGTIATEKVELLEGPLDQFTHEMEPFLRKQGMPVRLNKGVVELVSDFVVCEEGKPLSPESARILRLLGIKMATFRLNLICRWSPEDFELYKGLDESDVECA

SEQ ID NO: 72089 - protein, 146 aa, Gossypium hirsutum
  Clone ID: GOSHI-09MAY01-C3415_3.pep
NLTGLCQWAGALGGFNAHASNIVTAIYIATGQDPAQNVESSHCITMMEAVNDGKDLHISVTMPSVEVGTVGGGTQLASQSACLNLLGVKGASKEVAGANSRMLATIVAGAVLAGELSLMSALAAGQLVKSHMKYNRSSKDVSNLSS

SEQ ID NO: 72090 - protein, 265 aa, Gossypium hirsutum
  Clone ID: GOSHI-09MAY01-C3415_2.pep
ENWLFGGCRSSRFGRLQGIKCAIAGKNLYIRFTCSTGDAMGMNMVSKGVQNVLDFLQTDFPDMDVIGISGNYCSDKKPAAVNWIEGRGKSVVCEATIKGDVVRKVLKTSVESLVELNMLKNLTGSAMAGALGGFNAHASNIVAAVYIATGQDPAQNVESSHCITMMEAVNGGKDLHVSVTMPSIEVGTVGGGTQLASQSACLNLLGVKGASKESPGANSILLATIVAGAVLAGELSLMSALAAGQLVKSHMKYNRSSKDVSKVSS

SEQ ID NO: 72091 - protein, 582 aa, Gossypium hirsutum
  Clone ID: GOSHI-09MAY01-C3415_1.pep
MEAHRLSSTKPVQSLKPTKKIPLEEDTGKASDALPLPLYLTNALFFTLFFSVVYFLLSRWREKIRTSTPLHVVTFSEIIAILSFFASFIYLLGFFGIDFVQSLVFQPSPDVWIAEEEDDEVLLAKEEARKVPCGQALDCSLPPLPPAAPIVTVQKVFDEKPVTVLTEEDEEIIKSVVAGTTPSYSLELKLGDCKRAAAIRREALQRLTGKSLSGLPLDGFDYESILGQCCEMPVGYVQIPVGIAGPLLVNGREYSVPMATTEGCLVASTNRGCKAIHLSGGATSVLLKDGMTRAPCVRFGTAKRAADLKLYLEDPDNFETLSVVFNRSSRFGRLQGIKCAIAGKNLYIRFTCSTGDAMGMNMVSKGVQNVLDFLQTDFPDMDVIGISGNYCSDKKPAAVNWIEGRGKSVVCEATIKGDVVRKVLKTSVESLVELNMLKNLTGSAMAGALGGFNAHASNIVAAIYIATGQDPAQNVESSHCITMMEAVNDGKDLHVSVTMPSIEVGTVGGGTQLASQSACLNLLGVKGASKETPGANSRTLATIVASAVLAGELSLMSAISAGQLVRSHMKYNRSSKDVSKAT

SEQ ID NO: 72092 - protein, 138 aa, Gossypium hirsutum
  Clone ID: AI730268.1.pep
GWSSGGFNAHASNIVAAIYIATGQDPAQNVESSHCITMMEAVNEGKDLHIFVTMPSIEVGTVGGGTQLASQSACLNLLGVKGASKETPGANARMLATIVAGAVLAGELSLMSAIAAGQLVKSHMKYNRSSKDVSKGSS

SEQ ID NO: 72093 - protein, 43 aa, Gossypium hirsutum
  Clone ID: LIB3135-004-Q1-K1-E5.pep
RNLHSALTYYKGICLLSMFLPWEIATFIPNIRSSLSCPGAILT

SEQ ID NO: 72094 - protein, 91 aa, Gossypium hirsutum
  Clone ID: GOSHI-09MAY01-C3795_1.pep
LFSTKIEGYAMESTSQEMNTTNQPGHKPSFSALIDAIALQEQCFEQSLASQQLWAKQLANEQEAKIKATVQKITVDAAEVDEILKGKNILT

SEQ ID NO: 72095 - protein, 179 aa, Gossypium hirsutum
  Clone ID: GOSHI-09MAY01-C3745_1.pep
MSLTCFAPLLFLSFILGCAARPFYPLPSKMSNQNRQPMQTSRPYNIAHRGSNGEIPEETAPAYMRAIEEGADFIETDILSSKDGVLICFHDVILDLTTDVANHKEFANRIWTYNVQGFNVTGFFTVDFTLKELKKLRVKQRYNFRDQQYNGKFSIITFEEFISIALDAPRSVGNYPRLK

SEQ ID NO: 72096 - protein, 100 aa, Gossypium hirsutum
  Clone ID: LIB3583-023-P1-K1-G10.pep
PTRPPMQTSRPYNIAHRGSNGEIPEETAAAYMRAIEEGADFIETDILSSKDGVLICFHDVILDLTTDVANHKEFANRKRTYNVQGFNVTGFFTGLEAYNF

SEQ ID NO: 72097 - protein, 165 aa, Gossypium hirsutum
  unsure (1)..(165): unsure at all Xaa locations
  Clone ID: GOSHI-09MAY01-C3715_1.pep
KIENLQALTRAIRNARAEYSVEPAKRITASIVGSEEVIQYISEEKEVLALLSKLDLDNIHFADSPPEDAKQSVHLIASGGLEAYLPLADMVDISAEVLRLTKRLSKMHTEYEGLKARLNSPKFIENAPKDVVCGVQEKAXHVSEQKINLTKNRLALLESTVMLSQ

SEQ ID NO: 72098 - protein, 85 aa, Gossypium hirsutum
  Clone ID: LIB3584-038-P1-K1-C4.pep
SALFTHLCHYKLHFDCSAYSTFRGFCSFLWLEAYYTQQLHIDSLTSSKIDVVPKFCTDNASPEHNWLGRIRRLEQYITSSGVEMP

SEQ ID NO: 72099 - protein, 326 aa, Gossypium hirsutum
  unsure (1)..(326): unsure at all Xaa locations
  Clone ID: GOSHI-09MAY01-C3735_2.pep
SASAWTIRRSVLNLQKRDPHFIPRCLLANKSQLVYWDGENRAPRAVARGKANSKVKAVDFDARSXTRYNERLREEDESMXRLNEKRVKEIEDMMELEKKAVDLQSKAEAEETEREGEGAGREETDEEKRMRVRKELDXVANEQAERRATAQLMFELGQKAYGKGMCGRAIXFLEGALTIIPRPTLFGGEIQIWLAMAYEANNRHADCIALYQQLEKKHPSVSIRRQAAELRYILQAPKLKISQEEMVTIPLIGSSYDSYAATWTDKYKDKDQKTSGSTTNQLRSSRDFLADFLVWRPPVGLEKNRAFWVALTLWFGLVGAAVLLQR

SEQ ID NO: 72100 - protein, 144 aa, Gossypium hirsutum
  Clone ID: GOSHI-09MAY01-C3735_1.pep
PRVRVVLGNLALLLDVTSARTVTTDRKSRPLAIDVVLNLQKRDPHFSHVSLPNKSQLDYWDGENRAPRAVARGKANSKVKAVDFDAASSDDDENGNGFEEEEEEYDWENEMRKRVKEIEEMRELEKKAEELQSKAEAEETEGER

SEQ ID NO: 72101 - protein, 222 aa, Gossypium hirsutum
  Clone ID: GOSHI-09MAY01-C3695_1.pep
MGFFVEDPGLIVTHLLYKTAVVLAVLRWVWSWALRFKDTSLFSFIFSSDSQNNTSSSLVSSQMIRDSLVLTTFEDAKERVPWVSDTCAVCLNQLKEGDEVRELRNCCHVFHKDCIDRWVDYDEDQDHDHHDYDHDQDDSNNHKTCPLCRAPLLTSSQCSVWPKNEPSWAVERLLYLFGTIFCLDLRPLSIFYSFFFLFNILFAQFIMEIELGAIIIVYLVVS

SEQ ID NO: 72102 - protein, 227 aa, Gossypium hirsutum
  Clone ID: GOSHI-09MAY01-C3615_1.pep
TPLKQIHPVNTWVGAVVGAIPPLLGWAAASGQISLNGLILPAALYFWQIPHFMALAYLCRDDYAAGGYRMFSLADASGRRTAAVAFRNCLYLIPLGFIAYDWGVASGWFCVESSVITLAISAAAFSFYRDRTTQKARRMFYASLLYLPVFMSGLLFHRLSDNPQCLAENPNSIVELPSFPEAVTESEEDDQKKKVRYVTAGPQGRAPVAYASIAPFPFLPVPSYVDQ

SEQ ID NO: 72103 - protein, 202 aa, Gossypium hirsutum
  unsure (1)..(202): unsure at all Xaa locations
  Clone ID: LIB3583-052-P1-K6-H5.pep
MLNDLIDSXRTNTNIKATISNTSQIDPVAAETGISLDNLDATIISSNFWPPIQDEALIIPEPVDQLLSDYARRFHQIKTPRKLIWKKNLGTVKLELQFEDKVMQFTVAPVHAAIIMQFQDQTSWTSKNLAAATGIPVDVLNRRISFWISKGVLTESLGTDPSNHVFTLVEGMIEAGKNSGITGNCEELLAGDEEAERSVASV

SEQ ID NO: 72104 - protein, 132 aa, Gossypium hirsutum
  unsure (1)..(132): unsure at all Xaa locations
  Clone ID: LIB3584-041-P1-K1-F6.pep
NFWPPIQDEALIIPEPVDQLLSDYARLFHQIKTPGKLIWKKNLGTVKWDLQCEDTVMQCTAAPVHAALIMPFHDQTTWTFXILAAATGIPVDVLNRRICLCLSKGVITESLATDPINHVFTLVEGMTAAGKN

SEQ ID NO: 72105 - protein, 164 aa, Gossypium hirsutum
  Clone ID: GOSHI-09MAY01-C3635_1.pep
SIKLFSQGGKEVFIKAVLQSIPTYSMAYFLLPKSLCADLEGIIAKFWWRKKRGRKGIHWCAWKDMCSLKEDGGLGFRRLDKFNIALLAKQGWRLVNYPNSLLARVLKAKYYVNSNFLNAPLGNSPSLTWKSIWSAKGLLEKGLCWRVGKGDSISDWTDLSGEYC

SEQ ID NO: 72106 - protein, 119 aa, Gossypium hirsutum
  unsure (1)..(119): unsure at all Xaa locations
  Clone ID: LIB3166-044-P1-K1-G11.pep
GIITKFWWRKNKDRKGIHWCAWKDLCSLKEDGGLGFRKLDNFNIALLAKQGWRLVNYLNSLLAHILKAKYYAQSSFLKARLGNSPSLTWKSIWSAKXLLERGLCWRVGKVASILLWSDL

SEQ ID NO: 72107 - protein, 313 aa, Gossypium hirsutum
  Clone ID: GOSHI-09MAY01-C3055_2.pep
MLGGNEGNPMLPICMDENGLPYQTNASNQLQLFGRLPVGCTVDVVNYFGNEHLAPMVPPNKKGHETEDILRQQKLQISLNYKIYKEEADCSGSIPNPHAVSTGLRLSYDDDERNSSMTSASGSMTHGPLMILALGDNVTTELDRQKEEFDQYIKMQEEHLTKGIRDMKQRHTASFLAAIEKGVSKKLREKDVELETVNRKNRELVDGIKQVTMEAQNWHHRAKYNESVVNVLKRNLEQVMSQSQGGEQQGKEGFGESEVDDAASYIDPNNLLSIPDVGGAKCVSRNRHGMICRACNAKEVSVLLMPCKHLCIC

SEQ ID NO: 72108 - protein, 138 aa, Gossypium hirsutum
  Clone ID: GOSHI-09MAY01-C3055_1.pep
MLMHFTCTKIRLLNLRKAQQQNWKPIKLKTLKRNLEQVMSQSQGGEQQGKEGFGESEVDDAASYIDPNNLLSIPDVGGAKCVSRNRHGMICRACNAKEVSVLLMPCRHLCICKDCDVLISVCPVCQVKKTARVQVYLS

SEQ ID NO: 72109 - protein, 73 aa, Gossypium hirsutum
  Clone ID: LIB3165-048-Q1-K1-E6.pep
DRKMQILNFGYSSKINHNSLGIDIGKCYEAMKVILCCPYAWMIMVFHIQTNALNQLQFFCKTTCWMYCRCGEL

SEQ ID NO: 72110 - protein, 336 aa, Gossypium hirsutum
  Clone ID: GOSHI-09MAY01-C3015_1.pep
MRIRPFRYNSSPEISVIEYASTFFCFLILILVITTGNFECSSCNMGYLNSVLQSSSQVHAEYGPVSGGGLSQNGKFSYGCASSPGKRSSMEDFYETRIDGVDGEIVGLFGVFDGHGGARAAEYVKQNLFSNLIRHPKLISDTKSAIADAYNHTDSEFLKSENNQNRDAGSTASTAILVGDRLLVANVGDSRAVICRGGNAFAVSRDHKPDQSDERQRIEDAGGFVMWAGTWRVGGVLAVSRAFGDRLLKQYVVADPEIQEEKIDSSLEFLILASDGLWDVVTNEEAVAMVKPIQDPEQAAKRLMQEACQRGSADNITCVVVRFLANQGGSSRTVPA

SEQ ID NO: 72111 - protein, 134 aa, Gossypium hirsutum
  unsure (1)..(134): unsure at all Xaa locations
  Clone ID: LIB3543-030-Q1-K6-C12.pep
AIAVSREHRXGESDERQRIENAGGFVMWAGTWRVGGVLAVSRAFGDRHLKQYVVADPEIQVWLXTWLKYAEFLRXMNYNLYXIKVSCSFTRISIDFEHFVIXMNXRLQEEKIDNSLEFLILASDGLWDVVSNEV

SEQ ID NO: 72112 - protein, 171 aa, Gossypium hirsutum
  Clone ID: GOSHI-09MAY01-C3035_1.pep
MLLGKRPRPPMKRTTSMTEITFDLNTTTTTNAEPPPSDPHNPFNNYPKQASPFGGAAPSVAVAGGGVGLEGLDQRLLATVSPRVHRRHSADFMETPHFLRSCGLCRRRLVPGRDIYMYRGDTAFCSLECRQQQMNQDEKKDKCSIASKKQAAASPAARSSVSTKGETVTAV

SEQ ID NO: 72113 - protein, 207 aa, Gossypium hirsutum
  Clone ID: GOSHI-09MAY01-C3025_1.pep
MDRSRLRSLTLLCTLVLLGSLASTQAKKSKEDLKEVTHKVYFDVEIAGKPAGRIVIGLFGKAVPKTAENFRALCTGEKGVGKSGKPLHFKGSAFHRIIPNFMIQGGDFTLGDGRGGESIYGEKFADENFKLKHTGPGLLSMANAGPDTNGSQFFITTVTTSWLDGRHVVFGKVLSGMDVVYKVEAEGRQSGTPKSKVVIADSGELPL

SEQ ID NO: 72114 - protein, 249 aa, Gossypium hirsutum
  Clone ID: GOSHI-09MAY01-C3395_1.pep
ICKCLPRSTNGQNNPLLMQMGQQQQQQQQSRGQILVDSTINHAPRLSSMGQPILSNGMAAAGASRSGIPENIRAPGYSQTPSMLNFPMNHASELPGNCFPLGSTPGVSILTSKGAFQEDVNSETKGSGGLMPSYDVFNDLDQHIPQSWELQNVGMAFDTSQHSNSLQGQPRSYTLGSAQNVNQHLSNLLVDNTIRVKSERVCDTSPANIFPDHFGQDDLMSALLKQQESVASSENEFDFDGYSMNNIPV

SEQ ID NO: 72115 - protein, 154 aa, Gossypium hirsutum
  Clone ID: GOSHI-09MAY01-C3355_1.pep
MKPTRGREAATMKDKKEAKKPAENKVVGKRKAASRADKSDRKRAKNIASSTNKDPNKPKRPATAFFVFMEEFRTSYKQEHPKVKAISAVGKAGGEKWKSMSNAEKAPYKVKATERKSEYEKLMAAYNKKQESSDDEEEAESESSKDDEESEDDD

SEQ ID NO: 72116 - protein, 133 aa, Gossypium hirsutum
  Clone ID: AI727102.1.pep
MKATRGREDATMKDKKEAKKPAENKVVGKRKAASRADKSDRKRAKNIASSTNKDPNKPKRPATAFFVFMEEFRTSYKQEHPKVKAISAVGKAGGEKWKSMSNAVMHKTSNAAPPDLAMYRSNVHRLGKLLWHG

SEQ ID NO: 72117 - protein, 172 aa, Gossypium hirsutum
  Clone ID: GOSHI-09MAY01-C3375_4.pep
KPGPTHASAHASAHSSFHSSAHASAHASVNIYRQIEIRVIEKNAMAQKMLMMAVLVILGTKIATFTAADPTCLQSLMSCAPYFNNATLLLAAARASPLRQAVATELTCLCSLINNSTLLSSFNINIPIPAALRITRGCGVTDKMNGCIPATLTPAPSPSATSPKAAPLITRR

SEQ ID NO: 72118 - protein, 136 aa, Gossypium hirsutum
  Clone ID: GOSHI-09MAY01-C3375_2.pep
QRLRFNLLVRGGADVQEVAEVVDGEEAALMQSLIISTTPALIGDPKSSNVGDVKRTKQRRQVEEAAKANKFSSDGLLERFTAIVWQLDISVVEVRSTRHQALQTSRICNRNGRHRRPQYHKNRHHQHLLSHCVFLN

SEQ ID NO: 72119 - protein, 128 aa, Gossypium hirsutum
  Clone ID: GOSHI-09MAY01-C3375_1.pep
MAQKMLMMAVLVILGTKIATFTAADPTCLQSLMSCAPYFNNATLQLKGDCCNPLRQAVATELTCLCSLINNSTLLSSFNINIPIPAALRITRGCGVTDQMNGCIPATPTPAPSPSATSPKAAPLITRR

SEQ ID NO: 72120 - protein, 53 aa, Gossypium hirsutum
  Clone ID: LIB3583-041-P1-K1-D8.pep
SFNIPSLQLLDHSGCGVTDQMNGDPRNSTPAPSHSYFPHCSSYQSESGVSTDT

SEQ ID NO: 72121 - protein, 443 aa, Gossypium hirsutum
  unsure (1)..(443): unsure at all Xaa locations
  Clone ID: GOSHI-09MAY01-C3365_1.pep
TGSEYACKSISKRQGISNDDVEDVRREIQIMHHLAGHKNIVTIKGAYEDTSYVHIVMELCSGGELFDPIIHRGHYSERKAAELTKIIVAVVEACHSLGVMHRDLKPENLLLVNNDDDFSLKAIEFGLSVFFKPGQVFTDVVGSPYYVAPEVLLKQYGPEADVWTAGVILYILLSGVPPFWAETQQGIXFDAVLKGHRDFDSDPWPLISDSAKDLIRKMLCSRPSERLTAHEVLCHPWICENGVAPDRALDPAVLSRLKQFSAMNKLKKMALRVIAESLSEEEIAGLREMFTSMDTDNSGAITFDELKAGLRRYGSTLKDTEIRDLMDAADVDNSGTIDYGEFIAATVHLNKLEREEHLVAAFRYFDKDGSGYITVDELQQACAEHNMTDVLLEDIIREVDQDNDGRIDYGEFVAMMQKGNAGIGRRTMRNSVNISMRDAPGAM

SEQ ID NO: 72122 - protein, 143 aa, Gossypium hirsutum
  unsure (1)..(143): unsure at all Xaa locations
  Clone ID: AI055228.1.pep
MLGQVFTDVVGSPYYVAPEVLLKHYGPEADVWTARVILYILLSGVPPFWAETQQGIFDAVLKGHIDXDSDPWPLISDSAKDPIRKNVCSRPSERLTAHEVLCHPWICENXVAPDRALDPAVLSRLXQFSAXNKLXKMALRVDS

SEQ ID NO: 72123 - protein, 119 aa, Gossypium hirsutum
  unsure (1)..(119): unsure at all Xaa locations
  Clone ID: LIB3583-050-P1-K6-B9.pep
LIETFINSNFKYELMEIKGIYAASIFCESNINLLLYSELITSTLLKVLQNLWHSINHQHLSNASNKQHQVTRPGACDEPKLFPDRFCHESSYSGSAVQSANKLKISPIGNKFTIXADAG

SEQ ID NO: 72124 - protein, 60 aa, Gossypium hirsutum
  Clone ID: LIB3148-008-Q1-K1-A8.pep
ICCFIVSLLILNNFNTSTLLKVLQNLWHSINQQHLSNASNKQHQVTRPGACDEPKPFPDR

SEQ ID NO: 72125 - protein, 162 aa, Gossypium hirsutum
  unsure (1)..(162): unsure at all Xaa locations
  Clone ID: GOSHI-09MAY01-C3305_1.pep
MRPHVRPRVRASDRAFGLSSLALYRGSTKTQXYSSETIGXALTGPLGQMDLRLRXWFSLDGIGELRLTELNYWPPQDRDVNHRSLSLPAAGLLAECLELRKLCIHGTAHEHFMMFLLKIPNLRDVQLREDYYPAPENDMSTEMRAGSCSRFEAALNRRHILD

SEQ ID NO: 72126 - protein, 225 aa, Gossypium hirsutum
  unsure (1)..(225): unsure at all Xaa locations
  Clone ID: GOSHI-09MAY01-C3325_1.pep
VQFFSVSPLASSLIHWVGGIVYMLQISIFVSLLRGVLRNGVLYFLRDPADPNYNPFRDXIDDPVHKHAPRVLLSVAXVYGSLIVMLVFLPVKLAMRMVPSIFPLDISVSDPYTEIPADMLLFQICIPFAVEHFKLRATIKSLLRYWFTAVGWALGLTDFLLPRPEENGGQDNVNVEPGQQDRLQVVQLGGQEQPMGAFAAADDPNRGLMASGSSNVAEEFDEDEQ

SEQ ID NO: 72127 - protein, 228 aa, Gossypium hirsutum
  Clone ID: GOSHI-09MAY01-C3275_1.pep
ASGLINSSDVSLHLNEEIESISYLGEYYELNSTKRNSYSCEVAVVATPLDEVNIRFSPAVSIPERKLQHTHATFVRGLLNPAYFGLRTVAEIPELVGTLEDPDLPFTCISVLKQLDENDTTYKIFSREPMSDALLDSIFSARLQTNRINWGAYPHYKAPELFAPFILDGQHLYYVNAFENAASTMETGAVAAENVARLILSRYFGEASLQSSNLQSFSPDADVSHFDL

SEQ ID NO: 72128 - protein, 89 aa, Gossypium hirsutum
  Clone ID: LIB3583-018-P1-K1-C1.pep
LLFSADIISARLQTNRINWGAYPHYKAPELFAPFILDGQHLYYVNAFENAASTMETSAVAAENVARLILSRYFSEASLQSSNLQSFSPD

SEQ ID NO: 72129 - protein, 45 aa, Gossypium hirsutum
  Clone ID: uC-gsflnu33B113b04b1.pep
YYVNAFENAASTMETGAVAAENVARLILSRYFGEASLQSSNLQRF

SEQ ID NO: 72130 - protein, 308 aa, Gossypium hirsutum
  Clone ID: GOSHI-09MAY01-C3215_1.pep
MTPSIEQPTPETTSEQAFNAKKKDKKKKKNKLPKPEGQIEENVKQSHQENEEIDLKKSKKDKKKRKKEKENNEGESEEVNHDESGEESKKEKKKKKHKKQKKEEENGDSIETANGKEDSVQFDDKEKVVVSGKNAEEAKYAPLKSFSNSKLPKNVLDCCKGFSSPSPIQAHAWPFLLDGRDFIGIAKTGSGKTLAFGVPAMMHVLNQRNGKSSRGKNPLCLVLSPTRELAEQIFNVLCNAGQACDVKSGWLYGRTAKGPQISSLKSGVDIVIGTPGRLKDLMNMEVCQLNEVSLVVLDEADRMLDMGF

SEQ ID NO: 72131 - protein, 166 aa, Gossypium hirsutum
  Clone ID: GOSHI-09MAY01-C5_3.pep
MENMGVLGKVVDYLLLLSFFSITLTAQLDIPESILPHAYNPFYQVYTTLTQDYLVLEQPAFFKALMTLELVYQLPLALLNIYGLLYSKPWFNTTCLLFGASIVASTTAMVGDILNSQKASANLMAMYYPPFLPLGVLAIVRGVVGQSSKAAPSIGNGPSSAVKKRA

SEQ ID NO: 72132 - protein, 151 aa, Gossypium hirsutum
  Clone ID: GOSHI-09MAY01-C5_2.pep
MSQLLEKAKDFVVDKVANIKKPEASVSDVDLKHVSRECVEYGAKVSVSNPYSHSIPICEISYNFKSAGRGIASGTIPDPGSLKAGDTTMLDVPVKVPYNILVSLAKDIGADWDIDYELELGLTIDLPIMGNFTIPLSQKGEIKLPTLSDIF

SEQ ID NO: 72133 - protein, 151 aa, Gossypium hirsutum
  Clone ID: GOSHI-09MAY01-C5_1.pep
MSQLLEKAKDFVVDKVANIKKPEASVSDVDLKHVSRECVEYGAKVSVSNPYSHSIPICEISYNFRSAGRGIASGTIPDPGSLKASDTTMLDVPVKVPYNILVSLVKDIGADWDIDYELELGLTIDLPIVGNFTIPLSQKGEIKLPTLSDIF

SEQ ID NO: 72134 - protein, 69 aa, Gossypium hirsutum
  Clone ID: AA659956.1.pep
ERERERERERERERERERERERARAEFGTRTVSSIRGSGYSARGGWTIEQGCSIHWQWTFVGCEKEGLN

SEQ ID NO: 72135 - protein, 88 aa, Gossypium hirsutum
  Clone ID: uC-gsflnu33B060d01b1.pep
IHRDARDVQSQLYDLWNFVYHLSIHSLNIYGLLYSKPWFNTTCVLFAASIAASTTAMVGDILNSQKASTNLMAMYFPPFFPLRVLAIV

SEQ ID NO: 72136 - protein, 248 aa, Gossypium hirsutum
  Clone ID: GOSHI-09MAY01-C55_1.pep
MAGIAFGRFDDSFSLGTVKAYLAEFISTLVFVFAGVGSAIAYNKLTTDAALDPDGLVAIAVCHGFALFVAVAIGANISGGHVNPAVTFGLALGGQITILTGIFYWIAQLLGSIVACFLLKAVTGGLTVPIHGLGAGVGAIQGVVMEIIITFALVYTVYATAADPKKGSLGTIAPIAIGFIVGANILAAGPFSGGSMNPARSFGPAVASGDFNGIWIYWVGPLIGGGLSGLIYGNVFMNSDHAPLSNDF

SEQ ID NO: 72137 - protein, 145 aa, Gossypium hirsutum
  unsure (1)..(145): unsure at all Xaa locations
  Clone ID: uC-gsronu33B147c11b1.pep
LVAIAVCHGFALFVAVAIGANISGGHVNPAVTFGLALGGQITILTGIFYWIAQLLGSIVACFLLKAVTGGLTVPIHGLGAGVGAIQGVVMEXIIITFALVYTGYATAADPKKGSLGTIAPIAIGFIVGAHILAAGPFSWIPKWCH

SEQ ID NO: 72138 - protein, 71 aa, Gossypium hirsutum
  unsure (1)..(71): unsure at all Xaa locations
  Clone ID: LIB3148-050-Q1-K1-B1.pep
PTRPANILAAGPFSGGSMNPARXSFGPAVASGDFNGIWIYWVGPLIGGGLSGLIYGNVFMNSDHAPLSNDF

SEQ ID NO: 72139 - protein, 94 aa, Gossypium hirsutum
  Clone ID: GOSHI-09MAY01-C75_16.pep
MGLTVTPKNYNDYLAVCGFQFILTHLDGRQLLIKTHPGEVVKPDQCKAINDEGMPMYQRPFMRGKLYIHFTVDFPDSLAPEQCKALEAVLPSRA

SEQ ID NO: 72140 - protein, 73 aa, Gossypium hirsutum
  unsure (1)..(73): unsure at all Xaa locations
  Clone ID: GOSHI-09MAY01-C75_14.pep
GISSNAMGIMTSFINDIFEKLAQEAXSRLARYNKKPTITSREIQTAVRLVLPAELAKHAVSEGTKAVTKFTSS

SEQ ID NO: 72141 - protein, 83 aa, Gossypium hirsutum
  Clone ID: GOSHI-09MAY01-C75_10.pep
ECPKATIQFDAAFDRRSSKSATGLVGWDQKGDLLVLKTVVHNNVSSSFVAEAYTCLESIKLGISLRMLSIKIMGDSRTVIKKC

SEQ ID NO: 72142 - protein, 147 aa, Gossypium hirsutum
  Clone ID: GOSHI-09MAY01-C75_9.pep
MAPKAEKKPAEKKPAEEKKTTVAEKSLAEKKPKAGKKLPKEGGAAGDKKKKKAKKSVETYKIYIFKVLKQVHPDIGISSKAMGIMNSFINDIFEKLAQEASRLARYNKKPTITSREIQTAVRLVLPGELAKHAVSEGTKAVTKFTSS

SEQ ID NO: 72143 - protein, 147 aa, Gossypium hirsutum
  Clone ID: GOSHI-09MAY01-C75_8.pep
MAPKAEKKPAEKKPAEEKKTVAEKAPPEKKPKAGKKLPKEGGAAAGDKKKKRTKKSTETYKIYIFKVLKQVHPDIGISSKAMGIMNSFINDIFEKLAQEASRLARYNKKPTITSREIQTAVRLVLPGELAKHAVSEGTKAVTKFTSS

SEQ ID NO: 72144 - protein, 147 aa, Gossypium hirsutum
  Clone ID: GOSHI-09MAY01-C75_7.pep
MAPKAEKKPAEKKPAEEKKTVAEKAPAEKKPKAGKKLPKEGGAAAGDKKKKRVKKSTETYKIYIFKVLKQVHPDIGISSKAMGIMNSFINDIFEKLAQESSRLARYNKKPTITSREIQTAVRLVLPGELAKHAVSEGTKAVTKFTSS

SEQ ID NO: 72145 - protein, 341 aa, Gossypium hirsutum
  Clone ID: GOSHI-09MAY01-C75_6.pep
MFGRAPKKSDNTKYYEILGVPKTASQDDLKKAYRKAAIKNHPDKGGDPEKFKELAQAYEVLSDPEKREIYDQYGEDALKEGMGGGGGAHDPFDIFQSFFGGNPFGGGGSSRGRRQRRGEDVIHPLKVSLEDLYNGISKKLSLSRNIICSKCKGKGSKSGASMKCSGCQGSGMKVSIRHLGPSMIQQMQHPCNDCKGTGETINDKDRCPQCKGEKVVQEKKVLEVNVEKGMQNGQKITFPGEADEAPDTVTGDIVFVLQQKDHPKFKRKGDDLFVEHTLTLTEALCGFQFILTHLDGRQLLIKTHPGEVVKPDQFKAINDEGMPMYQRPFMRGQLYIHFTDD

SEQ ID NO: 72146 - protein, 151 aa, Gossypium hirsutum
  unsure (1)..(151): unsure at all Xaa locations
  Clone ID: GOSHI-09MAY01-C75_5.pep
AHARPLHAVRFILTHLDGRQLLIKTXPGEVVKXPDQFKAINDEGECRFIRGPFMRGVNLLHLHFSLLLTSXDSLTPDQCKALEGCXFLPRGIGSALTDMELDECEETXTMHDVNIEEEXMRRKQRLKLXQEAYEEDEDMHGGAQRVQCAQQ

SEQ ID NO: 72147 - protein, 203 aa, Gossypium hirsutum
  Clone ID: GOSHI-09MAY01-C75_4.pep
PTRPPTRPPTRPPTRPPTRPITFPGEADEAPDTVTGDIVFVLQQKDHPKFKRKGDDLFVEHTLTLTEAVCGFQFILTHLDGRQLLIKTHPGEVVKPDQCKAINDEGMPMYQRPFMRGKLYIHFTVDFPDSLAPEQCKALEAVLPPRASVQLTDMELDECEETTLYDVNIEEEMRRKQAQAAQEAYEEDDDMHGGAQRVQCAQQ

SEQ ID NO: 72148 - protein, 335 aa, Gossypium hirsutum
  Clone ID: GOSHI-09MAY01-C75_3.pep
MAVDLMSFPKMDDQMAIQEAATQGMKSMEHLISLLSHQSNRLDCAEVADLTVSKFKKVISLINRTGHARFRRAPIQSSSSFSSPSSSAASLTVTDSHKALTRTPAPVEAPPLTVNPAPVEAPSTAPVSFVPSQPQSLTLDFTKPCLFSSNTKSTELEFTKESFSVSSNSSFMSSAITGDGSVSNGKQGSSLFLTPAAAVSAGKPPLSSAPFKKRCREHEHSENVSGNGKCHCSKRRKNRVKKVIRVPAISSKIADIPADEYSWRKYGQKPIKGSPYPRGYYKCSTVRGCPARKHVERATDDPSMLIVTYEGEHRHGEGAAQENMAPGVGLVFKST

SEQ ID NO: 72149 - protein, 147 aa, Gossypium hirsutum
  Clone ID: GOSHI-09MAY01-C75_2.pep
MAPKAEKKPAEKKPAEEKKAVAEKAPAEKKPKAGKKLPKEGGAAAGDKKKKRVKKSVETYKIYIFKVLKQVHPDIGISSKAMGIMNSFINDIFEKLAQEASRLARYNKKPTITSREIQTAVRLVLPGELAKHAVSEGTKAVTKFTSS

SEQ ID NO: 72150 - protein, 418 aa, Gossypium hirsutum
  Clone ID: GOSHI-09MAY01-C75_1.pep
MFGRAPKKSDNTKYYEILGVSKNASQDDLKKAYRKAAIKNHPDKGGDPEKFKELAQAYEVLSDPEKREIYDQYGEDALKEGMGSGGGGHDPFDIFQSFFGGNPFGAGGSSRGRRQRKGEDVIHPLKVSLEDLYNGTSKKLSLSRNVICSKCKGKGSKSGASMKCSGCQGSGMKVSIRHLGPSMIQQMQHPCNECKGTGETINDKDRCPQCKGDKVVQEKKVLEVIVEKGMQNGQRITFPGEADEAPDTVTGDIVFVLQQKDHPKFKRKGDDLFVEHTLALTEALCGFQFILTHLDGRQLLIKTQPGEVVKPDQFKAINDEGMPIYQRPFMRGKLFIHFTVDFPDSLTPDQCKALEAVLPPKASVQLTDMELDECEETTLHDVNIEEVMRRKQTQAQQEAYDEDEDMHGGAQRVQCAQQ

SEQ ID NO: 72151 - protein, 147 aa, Gossypium hirsutum; identical to SEQ ID NO: 72149
  Clone ID: LIB3543-048-Q6-K6-F5.pep

SEQ ID NO: 72152 - protein, 44 aa, Gossypium hirsutum
  Clone ID: uC-gsflnu33B136f09b1.pep
LILSLYDVNIEEEMLRKQAHAAQEAYVEDDDMHGGAQRVQCAQQ

SEQ ID NO: 72153 - protein, 127 aa, Gossypium hirsutum
  Clone ID: LIB3146-024-Q1-K1-C9.pep
RTRGSNYAFMSAARTGYGCFFNGKQGTTSIDDTGWRTRTDGKPPLSSAPFKKRCREHEHSESVSGNGKSHCSKRMKNRVKKVIRVTSISCKIADIPADEYTWRKYSQKPIKGLPYPRGYYKCSTARG

SEQ ID NO: 72154 - protein, 99 aa, Gossypium hirsutum
  Clone ID: LIB3145-011-Q1-K1-H6.pep
ICFQQFRFFIQDHHVYMFEIFYDLAFFSLGKFINISKEKTNLHSAPSTTLKYYKTLRLFVYQVDLNTTSPTPGAMFSCAAPSLCRCSPSYVTINIDGSS

SEQ ID NO: 72155 - protein, 105 aa, Gossypium hirsutum
  unsure (1)..(105): unsure at all Xaa locations
  Clone ID: LIB3585-017-P1-K1-A4.pep
AADAGAGDIVFVLQQKDHPKFKRKGDDLFVEHTLSLTEALCGFQFILTHLDGRQLLIKTQPVEVVKPDQFKAXNDEXMPLYQMPFMRGKLYIQFXVDFPDSLTPD

SEQ ID NO: 72156 - protein, 116 aa, Gossypium hirsutum
  Clone ID: LIB3189-030-P1-K1-D1.pep
WFHQYPCTHCKDAAFVEKGMQNGQRITFPGEADEAPDTVTGDIVFVLQQKDHPKFKRKGDDLFVEHTLALTEALCGFQFILTHLDGRQLLIKTQPGEVVKPDQFKAINDEGMPIYQ

SEQ ID NO: 72157 - protein, 68 aa, Gossypium hirsutum
  Clone ID: LIB3146-019-Q1-K1-G9.pep
PIIRLGLYFLLSLRNTPFGGTKAVPSLLILEKCDLWFVLRFYFNSQSRCFSVPLRIILLFCYMIPCVF

SEQ ID NO: 72158 - protein, 47 aa, Gossypium hirsutum
  Clone ID: LIB3149-051-Q1-K1-C7.pep
KLAKNKLQEIKLSLIALISTIAISGSSRSISLIQTIYQNKYAEISEK

SEQ ID NO: 72159 - protein, 147 aa, Gossypium hirsutum
  unsure (1)..(147): unsure at all Xaa locations
  Clone ID: uC-gsflmaxxa088g07b1.pep
MAPKAEKKPAEKKPAEEKKAVAEKAPAEKKPKAGKKLPKEGGAAAGDKKKKRVKKSVETYKIYIFKVLKQVHPDIGISSKAMGIMNSFINDIFEKLAQEASRLARYNKKPTITSREIQTAVRLVLPGELAKHAVSXGTKAVTKFTSS

SEQ ID NO: 72160 - protein, 157 aa, Gossypium hirsutum
  unsure (1)..(157): unsure at all Xaa locations
  Clone ID: LIB3189-041-P1-K1-B7.pep
LDRERLPYQIIFVRAPIKIGRGKYYEIWGVSKNASQDDLNKAYXKAAIKNHTDKGGNPEKFKEQAQAYEELNDPEKREIHDQYGEDALKERMGSGGGRHDPLENFQSFFGGNPFGAGGSNLGRRQKRGEDGIHPLKVSLEDLYNGTSKKLSLSRNVI

SEQ ID NO: 72161 - protein, 60 aa, Gossypium hirsutum
  unsure (1)..(60): unsure at all Xaa locations
  Clone ID: LIB3166-013-P1-K1-C5.pep
KLSKEGGAHGDKKDNXAKKSAETYTIYIFKVLKQVHPDIGISSKAIEIMNSCINYVIKKL

SEQ ID NO: 72162 - protein, 71 aa, Gossypium hirsutum
  Clone ID: LIB3825-026-Q6-N6-A11.pep
KRVKKSVHTSKIYIFKVLKQVHPDIGISSKAMGIMNSFINDIFEKLAQEASRLARYNKKPPITSREAFSQP

SEQ ID NO: 72163 - protein, 58 aa, Gossypium hirsutum
  unsure (1)..(58): unsure at all Xaa locations
  Clone ID: LIB3148-011-Q1-K1-D4.pep
GRPFFFFFXFFFFXNEIALFFCSVVNHSALLLYDSGCILKMDLLDPDLNMLELNAIKY

SEQ ID NO: 72164 - protein, 58 aa, Gossypium hirsutum
  unsure (1)..(58): unsure at all Xaa locations
  Clone ID: LIB3147-013-Q1-K1-D3.pep
KLPKEGGASGDTHKKYAKTSVGTYKSYRFKVLKHDHPDIGIXSMAMGIMNRVINDIFE

SEQ ID NO: 72165 - protein, 32 aa, Gossypium hirsutum
  Clone ID: uC-gsronu33B004d06b1.pep
MFGRAPKKSDNTKYYEILGVPQTASQDDLKNA

SEQ ID NO: 72166 - protein, 153 aa, Gossypium hirsutum
  Clone ID: GOSHI-09MAY01-C15_1.pep
MADRDRSYRFDQVVRGDRTNYQSGPSTTQVLTVLTLLPIGGTLLALAGLTLTGTVIGLCVATPLFVIFSPVLLPAAIAVFMAVAGFLSSGAFGLTGLSSLSYVFNRFRQATGTEQLDADRAKRGMQDMVGYVGQKTKEAGQTIENKAHEGGRT

SEQ ID NO: 72167 - protein, 155 aa, Gossypium hirsutum
  unsure (1)..(155): unsure at all Xaa locations
  Clone ID: LIB3582-054-P1-K1-D9.pep
SIGCRDQSYRXFDQVARGDRTNYQSGPSTTLFLTVLTLLGMGGTFLALAGLTLTGAXMGLCMATPLFVIFSPVLGPAAIADFMAVAGFLSSGAFGLTGLASLSYVFNRFRQATGTEQLDADLAKRGMQDMVGYVGQKTKETGQTIENKXHEGGRT

SEQ ID NO: 72168 - protein, 160 aa, Gossypium hirsutum
  Clone ID: GOSHI-09MAY01-C35_2.pep
DAWAQFEQKKEKASHEQSYKAGRAEGRAHEKGEQMKESMKEKAEAAKQKTMETAEAAKQKTMETAEAAKQKTMETTEAAKQKTRGAAETTNDKTKQTAGAARGKAEETKETETSGGILQQAGEKVRNAAQGATDAVKHTFGMADADEDEHNYPATITRKD

SEQ ID NO: 72169 - protein, 184 aa, Gossypium hirsutum
  Clone ID: GOSHI-09MAY01-C35_1.pep
MASTSNTCHKQDTCFIRNVPKFPINRNHTCNSKLPNKQLHNSERKEKKMASHEQSYKAGRAEGRAHEKGEQMKESMKEKAEAAKQKTMETAEAAKQKTMETAEAAKQKTRGAAETTNDKTKQTAGAARGKAEETKETSGGILQQAGEKVRNAAQGATDAVKHTFGMADADEDEHNYPATVTRKD

SEQ ID NO: 72170 - protein, 138 aa, Gossypium hirsutum
  unsure (1)..(138): unsure at all Xaa locations
  Clone ID: LIB3825-003-Q1-K6-A7.pep
KKEKASHEQSYKAGRAEXTHEXGEQMKESMKEKAEAAKQKTMETAEAAKQKTMETAEAAKQKTRGAAETTNDKTKQTAGAARGKAEETKETSGGILQQAGEKVRNAAQGATDAVKHTFGMADADEDEHNYPATVTRKD

SEQ ID NO: 72171 - protein, 571 aa, Gossypium hirsutum
  unsure (1)..(571): unsure at all Xaa locations
  Clone ID: GOSHI-09MAY01-C25_1.pep
MANPKLGRSPSMRDRVEDTLSAHRNELVALLSRYVAQGKGILQPHTLIDELENVVGDDKAREKLSDGPFSEVLKSAQEAIILPPYVAIAVRPRPGVWEYVRVNVHELSVEQLDVSEYLRFKEALADVGEDNHFVLELDFEPFNASFPRPNRSSSIGNGVQFLNRHLSSNMFRNKDSLEPLLNFLRAHKYKGHALMLNDRIQSIPRLQAALAKAEDHLAKLSPDAPYSEFEYELQGMGFERGWGDTAAHVLETMHLLLDILQAPDPSILETFLGRVPMVFNVVILSPHGYFGQANVLGLPDTGGQGGYILDQVRALENEMLLRIKRQGLDITPRILIVTRLIPDAKGTSCNQRLERVSGTEHTHILRVPFRSEHGVLRKWISRFDVWPFLETYAEDVASEIAAELQGIPDFIIGNYSDGNLVASLLAYKMGVTQCTIAHALEKTKYPDSDVYWKKVDEEYHFSWQFTADLVAMSNADFIITSTYQEIAGTKNTVGQLESHTAFTLPRLYXRVVHGIDVFDPKFNIVSPGADMCIYFPYSXKEKRLTALHGSIEELLFXPKQYDEHIGTLSDR

SEQ ID NO: 72172 - protein, 253 aa, Gossypium hirsutum
  Clone ID: GOSHI-09MAY01-C995_1.pep
DAWADAWDPHREKTAIKWMERLGREAHQHNIVVDILCAGTCPVRVPVLQPLANASGGVLVLHDDFGEAFGVNLQRASARAASSHGLLEIRCSDDILVTQVVGPGEEANIDTHETFKNDMAVSIQMLSVEETQCFSISMQNKHDIKSDYVFFQFAIQYSNVYQADIARVITIRLPTVDSGSAYLQSVQDEVAAVIIAKRTLLQAKSYSDAIDMQTTIDERVKDIASKFGSQVPKSKLYRFPKEISLLPELLFHL

SEQ ID NO: 72173 - protein, 284 aa, Gossypium hirsutum
  Clone ID: GOSHI-09MAY01-C975_1.pep
MASSISVPCPKISSFVKPKQTQKISFALPHCSKSCFSFGSSIKVPAFSGCQWHTEKKTMAFKARAKLNEVAAEKSSNSVPVVDMKSKAALPKEDDKSTGNTIPDVAAISAFMTQVSDLVKLVDSRDITELQLKQSDCELIIRKKEALQPPEQAPPVFMPQYMPHHAMFQTPFPAAAPTAPPAPSNPAPPPLALPSAASPAKTSSSSHPPLKCPMAGTFYQSPAPGEPPFVKVGDKVQKGQVICIIEAMKLMNEIEADQSGTITEILAEDGKPVSVDMPLFVIVP

SEQ ID NO: 72174 - protein, 115 aa, Gossypium hirsutum
  Clone ID: GOSHI-09MAY01-C915_15.pep
RVGRGGMQRFVKTLTGKTITLEVESSDTIDNVKAKIQDKEGIPPDQQRLIFAGKQLEDGRTLADYNIQKESTLHLVLRLRGGMQIFVKTLTGKTITLEVESSDTIDNVKAKIQDK

SEQ ID NO: 72175 - protein, 214 aa, Gossypium hirsutum
  unsure (1)..(214): unsure at all Xaa locations
  Clone ID: GOSHI-09MAY01-C915_11.pep
MQIFVKTLTGKTITLEVESSDTIDNVKTKIQDKEGIPPDQQRLIFAGKQLEDGRTLADYNIQKESTLHLVLRLRGGMQIFVKTLTGKTITFEVESSDTIDNVKAKIQDXEGIPPDQQRLIFAGXQLEDGRTLADYNIQKESTLHLGPSLRGGMQXFVKTLTGXTITSEVESSDRSTRESQIQTGGIARQHVISPEELGRRLTVHIRRSISLAGQ

SEQ ID NO: 72176 - protein, 80 aa, Gossypium hirsutum
  Clone ID: GOSHI-09MAY01-C915_9.pep
PKKMQIFVKTLTGKTITLEVESSDTIDNVKAKIQDNEGIPPDQQRLIFAGKQLEDGRTLADYNIQKESTLHLVLRLRGGF

SEQ ID NO: 72177 - protein, 199 aa, Gossypium hirsutum
  unsure (1)..(199): unsure at all Xaa locations
  Clone ID: GOSHI-09MAY01-C915_7.pep
WYACGYPRPNFPVETHARAFACAHASANFGENLRLARTITLEVESSDXIDNVKAKIQDREGIPPDQQRLIFAGEHLGDGRTLADYNIQKESTLHLVLRLRGGMQIFVKTLTGKTITLEGESSDTXIDNVKAKIQDKEGIPPDQQRLIFAGKQLEDGRTLADYNIQKESTLHLVLRLRGGMQIFVKTLTRKTITLEVESS

SEQ ID NO: 72178 - protein, 127 aa, Gossypium hirsutum
  unsure (1)..(127): unsure at all Xaa locations
  Clone ID: GOSHI-09MAY01-C915_3.pep
KAKIQDKEGIPPDQQRLIFAGKQLEDGRTLADYNIQKESTLHLVLAXGGGMQIFVKTLTGKTITLEVESSDTIDNVKAKIQDKEGIPPDQQRLIFAGKQLDDGRTLADYNIQKESTLHLVLRLRGGF

SEQ ID NO: 72179 - protein, 229 aa, Gossypium hirsutum
  Clone ID: GOSHI-09MAY01-C915_2.pep
MQIFVKTLTGKTITLEVESSDTIDNVKAKIQDKEGIPPDQQRLIFAGKQLEDGRTLADYNIQKESTLHLVLRLRGGMQIFVKTLTGKTITLEVESSDTIDNVKAKIQDKEGIPPDQQRLIFAGKQLEDGRTLADYNIQKESTLHLVLRLRGGMQIFVKTLTGKTITLEVESSDTIDNVKAKIQDKEGIPPDQQRLIFAGKQLEDGRTLADYNIQKESTLHLVLRLRGGF

SEQ ID NO: 72180 - protein, 305 aa, Gossypium hirsutum
  Clone ID: GOSHI-09MAY01-C915_1.pep
MQIFVKTLTGKTITLEVESSDTIDNVKAKIQDKEGIPPDQQRLIFAGKQLEDGRTLADYNIQKESTLHLVLRLRGGMQIFVKTLTGKTITLEVESSDTIDNVKAKIQDKEGIPPDQQRLIFAGKQLEDGRTLADYNIQKESTLHLVLRLRGGMQIFVKTLTGKTITLEVESSDTIDNVKAKIQDKEGIPPDQQRLIFAGKQLEDGRTLADYNIQKESTLHLVLRLRGGMQIFVKTLTGKTITLEVESSDTIDNVKAKIQDKEGIPPDQQRLIFAGKQLEDGRTLADYNIQKESTLHLVLRLRGGF

SEQ ID NO: 72181 - protein, 153 aa, Gossypium hirsutum
  unsure (1)..(153): unsure at all Xaa locations
  Clone ID: uC-gsronu33B141e03b1.pep
MQIFVKTLTGKTITLEVESSDTIDNVKTKIQDKEGIPPDQQRLIFAGKQLEDGRTLADYNIQKESTLHLVLRLRGGMQIFVKTLTGKTITLEVESSDTIDNVKAKIQDKEGIPPDQQRLIFAGKQLEDGRTLADYNIQKESTLXPCLRLRGGF

SEQ ID NO: 72182 - protein, 60 aa, Gossypium hirsutum
  Clone ID: uC-gsflnu33B025g10b1.pep
LRVRTIDNVKAKIQDKEGIPPDQQRLIFAGKQLEDGRTLADYNIQKESTLHLVLRLRGGF

SEQ ID NO: 72183 - protein, 83 aa, Gossypium hirsutum
  unsure (1)..(83): unsure at all Xaa locations
  Clone ID: LIB3148-002-P1-K1-C4.pep
KAITGHSPSRKTRRPTLRETLRLRTLREDEEQGEEWTPFEYCNQPKSFRFTPALPRKNNLCWIRWNSFFSEGWADGLVXPGXS

SEQ ID NO: 72184 - protein, 62 aa, Gossypium hirsutum
  Clone ID: uC-gsronu33B158a06b2.pep
GGGFFYTFGGVKANIQDKEGIPPDQQQVILAGKQLEDGTTLADYNIQKESTLHLGLRLRGGF

SEQ ID NO: 72185 - protein, 119 aa, Gossypium hirsutum
  Clone ID: LIB3149-064-Q1-K1-G7.pep
MLSSTLHLVLRLRGGMQIFVKTLTGKTITLEVESSDTIDNVKAKIQDKEGIPPDQQRLIFAGKQLEDGRTLADYNIQKESTLHLVLRLRGGMQIFVKTLTGKTITLEVESSDTIDNVKA

SEQ ID NO: 72186 - protein, 53 aa, Gossypium hirsutum
  Clone ID: LIB3189-016-P1-K1-E6.pep
NSRFTSCFLSNTQPISHFSHASVSNPNWLSILIIFKRSPLFTLFFVFVVGSKP

SEQ ID NO: 72187 - protein, 134 aa, Gossypium hirsutum
  unsure (1)..(134): unsure at all Xaa locations
  Clone ID: uC-gsronu33b112b12b1.pep
VRTLSDYNIQGESSIQLXLRLRGGMQTLLTTXTGKTITLEAKSVRHRSDNTXDHIQYRDGITAERQRIIYVXKQLEXGRTLADYNIQKESTLHLVLRLRGGMQIFVKTLTGKTXTLEVESSDTIDNVTAKIQDK

SEQ ID NO: 72188 - protein, 69 aa, Gossypium hirsutum
  Clone ID: LIB3165-027-P1-K1-H1.pep
SNCTQIFSRKSTESMDGAISKMHDKAGISPNQQRLIFAGKQLEDGRTLADYNIQKESTLHLVLRLRGGF

SEQ ID NO: 72189 - protein, 111 aa, Gossypium hirsutum
  Clone ID: LIB3146-007-Q1-K1-G1.pep
AGVPGRPTRRAACSPFDQEADLDKTLTGKTITLEVESSDTIDNGKAKIQDKEGIPPDQQRLIFAGKQLEDGRTLADYNIQKESTLHLVLRLRGGMQIFVKTLTGKTITLEV

SEQ ID NO: 72190 - protein, 66 aa, Gossypium hirsutum
  unsure (1)..(66): unsure at all Xaa locations
  Clone ID: uC-gsflnu33B075e10b1.pep
KFPFSIFYLARDKMQIFAKTLTGKTITLEVESFDTIDNTKAXKSTSXDGCHPDQQRLIFCGKQFLD

SEQ ID NO: 72191 - protein, 49 aa, Gossypium hirsutum
  Clone ID: uC-gsflnu33B068a09b1.pep
FVSQQKSTFADLVEFLFCAESSWWDLSLKVFLNVGFLVLREGLCPLMAF

SEQ ID NO: 72192 - protein, 228 aa, Gossypium hirsutum
  Clone ID: GOSHI-09MAY01-C905_1.pep
MCGIFAYLNYNVKRDRRFILEILFNGLRRLEYRGYDSAGISIDSSSSSDPNGQLSFSPLVFRQEGNIDSLVKSVYKDVASIKVNLEELFCVHAGIAHTRWATHGEPSPKNSHPQTSGAGNEFLVVHNGVITNYEVLKETLTRHGFNFESETDTEVIPKLAKYVFDKATEEGDQSVTFSLVVLEVMRHLEGAYALIFKSHHYPNELIACKRGSPLLLGVKELSEDMHSG

SEQ ID NO: 72193 - protein, 428 aa, Gossypium hirsutum
  unsure (1)..(428): unsure at all Xaa locations
  Clone ID: GOSHI-09MAY01-C935_1.pep
FANHDHARXVLYQAQKHSQQAIGFSTTNPNIRVDTLSHQMYYPQRPLFHTMTADCLGKSGFPLGQNRLDPKPELYNGQNAIVAVPRLRGYNQEDSLVMNRASIERGMFRTEHGRSYKAEVDNKEIQEKRRKAEDIVNSGKTESKIGRVDSLDDDGFPYIGASLQSGDIVIGRFAESGADHGVKLKHTERGMVQKVVLSSNDDGKNFAVVSLRQVRSPCLGDKFSSMHGQKGVLGFLESHENFPFTTQGIVPDIVINPHAFPSRQTPGQLLEAALGKGIACGGSKKHATPFSTLSIDAITEQLHRAGFSRWGNERVYNGRTGEMVRSLIFMGPTFYQRLVHMAEDKVKFRNTGPVHPLTRQPVADRKRYGGIKFGEMERDCLIAHGASANLHERLFTLSDCSQMHVCQNCKNAANVIEPTVAAGRKIRG

SEQ ID NO: 72194 - protein, 85 aa, Gossypium hirsutum
  Clone ID: GOSHI-09MAY01-C865_3.pep
VHLIIAETELLVNVKEHSLVPEHQVLTTEEKKTLLQRYTVKETQLPRIQVSDPIARYYGLKRGQVVKIIRPSETAGRYITYRYVV

SEQ ID NO: 72195 - protein, 206 aa, Gossypium hirsutum
  Clone ID: GOSHI-09MAY01-C865_2.pep
MVLSDDEIKRLFRIRKTVMQMLKDRGYFVGDFEINLSKQQFISKYGENMKREDLVINKTKRNDNSDQIYVFFPEEAKVGVKTMKTYTNRMKSENVFRAILVVQQNLTPFARTCINEISSKFHLEVFQEAELLVNVKEHALVPEHQVLTNEEKKTLLHRYTVKETQLPRIQVSDPIARYFGLKRGQVVKIIRPSETAGRYITYRYVV

SEQ ID NO: 72196 - protein, 207 aa, Gossypium hirsutum
  unsure (1)..(207): unsure at all Xaa locations
  Clone ID: GOSHI-09MAY01-C865_1.pep
MVLSDDEIRRLFRIRKTVLQLLKDRDYFVGDFEINMSREQFISKFGENMKREDLIINKAKRNDSSDQIYVFFPEEPKVGVKTMKTYTNRMKSENVFRAILVVQQNLTPFARTCINEISSKFHLEVFQETELLVNVKEHSLVPEHQVLTTEEKKTLLQRYTVKETQLPRIQVSDPIARXYYGLNRGQVVKIIRPSETAGRYITYRYVV

SEQ ID NO: 72197 - protein, 109 aa, Gossypium hirsutum
  Clone ID: GOSHI-09MAY01-C835_2.pep
KCRRRVAECSPCPPKQHPNLLSNPPLEKMIIQQNQRGEGKFSLELKVHLMLISHRQNLMASLQPLLVKVEKEKRQRMVERLMWPKNHSHWSSELNRVFTCLNYHTCLFQ

SEQ ID NO: 72198 - protein, 129 aa, Gossypium hirsutum
  Clone ID: LIB3582-049-P1-K1-H1.pep
MSEKGGRMFSLPTKTTPKSSLKSTAGKDDNSAKSKRGRKVQFGTEGSPDVNFSSPKSDGKFATPFGKGGKGEKAANGGKTHVAKESQSLELRVEQELPENVKCLMDCEAAGILEGIQDQMVILSSDPTN

SEQ ID NO: 72199 - protein, 91 aa, Gossypium hirsutum
  Clone ID: LIB3197-051-Q1-M1-B4.pep
GRVGLVLRSGSETLLKLERSLPLFAELPENIKCLMDCEAATILEGIQDQMVILSSDPTIKLPESFGSGLQYAKTGSYFTNPQSVRKVLQYP

SEQ ID NO: 72200 - protein, 155 aa, Gossypium hirsutum
  unsure (1)..(155): unsure at all Xaa locations
  Clone ID: GOSHI-09MAY01-C585_3.pep
SFEERALAFDECGRPFIILKEQDQKTRLRGIDAQKANISAGKAVARILRTSLGPKGMDKILQSPDGDVTITNDGATILEQMDVDNQIAKLMVELSRSQDYEIGDGTTGVVVMAGALLEQAERLLERGIHPIRIAEGYEMASXIAVEHXEHISQKF

SEQ ID NO: 72201 - protein, 197 aa, Gossypium hirsutum
  unsure (1)..(197): unsure at all Xaa locations
  Clone ID: GOSHI-09MAY01-C585_2.pep
MALAFDEYGRPFIILIEQDQKTRLRGIDAQKANISARAARARTLRPSLGPKGMDKILQSPDGDVTITNDGATILEQMDVELSRSQDYEIGDGTTGVXVVMAGALLEQAERLLERGIHPIRIAEGYEMASRIAVEHLEHISQKFXFGASNIEPLVQTCMTTLSXKIVNRCKRHLAEISVKAVLSGADLEREDVNLDMI

SEQ ID NO: 72202 - protein, 535 aa, Gossypium hirsutum
  Clone ID: GOSHI-09MAY01-C585_1.pep
MALAFDEYGRPFIILKEQEQKTRLSGLEAQKANISAGRAVSRILRTSLGPKGMDKMLQSPDGDVTITNDGATILEQMDVDNQIAKLMVELSRSQDYEIGDGTTGVVVMAGALLEQAERLLERGIHPIRIAEGYEMASRIAVEHLERIAQKFDFGASNIEPLVQTCMTTLSSKIVNRCKRPLAEISVKAVLSVADLERKDVNLDLIKVEGKVGGKLEDTELIYGITVDKDMSHPQMPKQIEDAKIAILTCPFEPPKPKTKHKVDIDTVEKFQTLRLQEQKYFDDMVQKCKDVGATLVICQWGFDDEANHLLMHRNLPAVRWVGGVELELIAIATGGRIVPRFQELTPEKLGRAGLVREKSFGTTKDKMLYIEHCANSRAVTIFIRGGNKMMIEETKRSIHDALCVARNLIRNNSIVYGGGSAEISCSIAVEAAADKYPGVEQYAIRAFADALDSVPMALAENSGLQPIETLSAVKSQQIKDNNPHYGIDCNDVGTNDMREQDVFETLIGKQQQILLATQVVKMILKIDDVISPSDY

SEQ ID NO: 72203 - protein, 139 aa, Gossypium hirsutum
  unsure (1)..(139): unsure at all Xaa locations
  Clone ID: LIB3197-030-Q1-M1-B2.pep
ASVLISLHPKHHRRPLRRLKEPDQRTRLQRIDVHXANIHAGXAVGRILQTYLGPKGMDXILQSPDGDVTITNDGASILEQMDVDNQIAKLMDELSRSQDYEIGDGTTGVVAMAGALLEQAERVFERGXHSIRIAEGVQM

SEQ ID NO: 72204 - protein, 65 aa, Gossypium hirsutum
  Clone ID: LIB3135-052-Q1-K1-B7.pep
NEHQVWNTYLFIFLLMFFFFICNTKGLSFYYQPTKSLAVEKYISKTCSSQVNNCFGVNHTKIKTG

SEQ ID NO: 72205 - protein, 307 aa, Gossypium hirsutum
  Clone ID: GOSHI-09MAY01-C555_1.pep
MDSQHFLGFFLLIFLQSCLVSADINGSVLKMKTGTSSVPFDPTHVTQLSWHPRAFIYKGFLSSDECDHLITLAKDKLEKSMVADNESGKSVESEVRTSSGMFLQKAQDEVVADIEARIAAWTFLPVENGESIQILHYEHGQKYEPHFDYFHDKANQQLGGHRIATVLMYLSDVESGGETVFPNAEGRLSQPQDDSWSACAKNGFAVKPRKGDALLFFSLHLDATTDSDSLHGSCPVIKGEKWSATKWIHVRSFDTAKWQSVNRDCVDENENCATWASAGECEKNPSYMIGSEDYYGYCRKSCKVCSS

SEQ ID NO: 72206 - protein, 87 aa, Gossypium hirsutum
  Clone ID: LIB3582-045-P1-K1-C11.pep
EWRGNCVSKCRGKHLIVESGFLPVFYYLFLLFDLAHCYFSILFSSLLFTFFLQGRLSQVQDENWSACAKNGYAGIKITLEIFSCLIF

SEQ ID NO: 72207 - protein, 118 aa, Gossypium hirsutum
  unsure (1)..(118): unsure at all Xaa locations
  Clone ID: LIB3146-053-Q1-K1-E11.pep
SIQILHYXQXLFYEPHFHYFHDKANQQLGGHRIATVLMYLSDVESGGETVFPNAEGRLSQVQDENWSACAKNGYAVKPRKGDALLFFSLHPDATTDTASLHGSCPVIKGEKWSATKWI

SEQ ID NO: 72208 - protein, 234 aa, Gossypium hirsutum
  Clone ID: GOSHI-09MAY01-C575_1.pep
GRVGGQRGRARGRTRGFENSAGPSKHQAVALRSGSDLSAFYKCSFVAYQDTLYVHSLRQFYRECDIYGTVDFIFGNAAVVFQGCNLYARKPNPNQKNIFTAQGREDPNQNTGISILNCKIAAAADLVPVKSSFKTFLGRPWKEYSRTVIMRSYIDDSVDPAGWLEWNGTFALSTLYYGEYLNRGPGSNTSARVTWPGYRVINSSTEATQFTIEPFIQGNEWLNSSNIPFALGLN

SEQ ID NO: 72209 - protein, 191 aa, Gossypium hirsutum
  unsure (1)..(191): unsure at all Xaa locations
  Clone ID: LIB3582-045-P1-K1-E1.pep
XDGIGKTVVKASRNVVDGFTTFRSATVAVVGEGFIAKGITFENSAGPSKHQAVALRSGSDLSAFYKCSFVAYQDTLYVHSLRQFYRECDIYGTVDXIFGNAAVVFQGCNLYARKPNPNQKNIFTAQGREDPNQNTXISILNCKIAAAADLVPVKSSFKTFLGRPWKEYSRTVIMRSYIDDSVDPARWXEWN

SEQ ID NO: 72210 - protein, 85 aa, Gossypium hirsutum
  Clone ID: LIB3146-028-Q1-K1-A3.pep
MPGSTHTRASSSHWLEWNGTFALSTLYYGEYLNRGPGSNTSARVTWPGYRVINSSTEATQFTIEPFIQGNEWLNSSNIPFALGLN

SEQ ID NO: 72211 - protein, 160 aa, Gossypium hirsutum
  Clone ID: GOSHI-09MAY01-C565_2.pep
GQCHGCGVHACEDGSKYVGEFKWGVKHGFGHYHFRNGDEYFGEYFSDKMHGFGVYQFGNGHRYEGAWHEGRRQGFGTYTFRNGETQSGHWQNGALDVLSAQNTRPRVLHAVQEAWRAAEKAREVAKIDKRVHKAVSAANKAANAARVVAVKAVPETNASS

SEQ ID NO: 72212 - protein, 225 aa, Gossypium hirsutum
  Clone ID: GOSHI-09MAY01-C565_1.pep
SSKAVVWSIGSKPKSEKKANSGTWVQVYSNGDVYEGEFHKGKCSGSGVYYPPRPPTRPGDWVDGRYDGYGVETWAKGSRYRGQYRQGLRHGIGVYRFYTGDVYAGEWSNGQCHGCGVHACEDGSKYVGEFKWGVKHGFGHYHFRNGDEYFGEYFSDKMHGFGVYQFGNGHRYEGAWHEGRRQGFGTYTFRNGETQSGHWQNGALDVLSAQNTRPRVLHAVQVSFI

SEQ ID NO: 72213 - protein, 273 aa, Gossypium hirsutum
  unsure (1)..(273): unsure at all Xaa locations
  Clone ID: GOSHI-09MAY01-C495_1.pep
MGEGSDRSSSLQLLHSGLKLNMYDGEHPYKDTTNSEGLNVINDHDSEIMFTEAAADAVNRRQSLRPRAPALEQNAWNHNLRVRVDHALAGTSENEEKTSLKTYNGIASEQWMSSSKHRDRSRSSRTKRGGGHDNDLKFSSGRKSNPSVRKLSWLMVSEQEEGYRYIPQLGDEVVYFRQGHQECIEEGFMKGTGPWSSRGHLSAVEICRVVDLAYSHVPGSGESCCKITLRFTDNSSCAFGEVFILTLPELIGLXDFLVEKTRYDAAMSREWDS

SEQ ID NO: 72214 - protein, 135 aa, Gossypium hirsutum
  Clone ID: GOSHI-09MAY01-C795_1.pep
MDRRDAMALTGSASYYIQQRGITGSGGHGSQDIHMLSSPNVQYQSSMSATTMGPVESSTPHSVNVGTPSAVPSSETTKRKRGRPRKYGPDGTVSLALTPPSVTNPRTLTPPSQKRGRGRPPGTGKKQQLASLGVW

SEQ ID NO: 72215 - protein, 137 aa, Gossypium hirsutum
  Clone ID: LIB3582-002-P1-K1-D4.pep
KKKRLASSQPSHKNGFFSPLAQFPIDFPLSFLSFQKTHFFFKASYFQKAAPLTTIQLIRCMDRRDAMALTGSASYYIQQRGITGSGVHGSQDIHMLSSPNVQGQSSMSATTMGPVESSTPHSVNVGTPSAAPSSETL

SEQ ID NO: 72216 - protein, 229 aa, Gossypium hirsutum
  Clone ID: GOSHI-09MAY01-C785_1.pep
MMERDSLRSNNNGNSANYNRERTGGDAGLLRSSSDPAKQTASSSDFVLQWGNRKRLRCMKIQVKDDQSGPVNRTTVRVDRRDSLRQTGVCYEKRGGNNNNYNHHSNNHDNHHHNNKSAASSETAQDSKKGGSSSGSGEIAPAPMVWPPKFVIALTNKEKEEDFMTFKGSKLPQRPKKRSKFIQRTLNLVSPGTWLCDLTLERYEVREKKITKKRPRGLKAMGNMESDSE

SEQ ID NO: 72217 - protein, 158 aa, Gossypium hirsutum
  Clone ID: LIB3829-001-Q1-K6-E11.pep
MRGQSNGGVRGFTSPDRGVHEKRGGNNNNYNHHSNNHDNNHHNNKSAASSETAQDSKKGGSSSGSGEIAPAPMVWPPKFVIALTNKEKEEDFMTFKGSKLPQRPKKRSKFIQRTLNLVSPGTWLCDLTLERYEVREKKVTKKRPRGLKAMGNMESDSE

SEQ ID NO: 72218 - protein, 153 aa, Gossypium hirsutum
  Clone ID: GOSHI-09MAY01-C755_2.pep
MDPHDETGRQASEGPILCVNNCGFFGSAATMNMCSKCHKAMILKQEQAQLVASSIDSIVNGSTSGNGKEPSVAAALAVQCGNFGSKIESSIDPSHMTFGGMKTKEGPNRCNACHKRVGLTGFSCRCGNIFCAAHRYSDKHNCPFDYRTAARDA

SEQ ID NO: 72219 - protein, 158 aa, Gossypium hirsutum
  Clone ID: GOSHI-09MAY01-C755_1.pep
MDPLDETGRQASEGPILCVNNCGFFGSAATMNMCSKCHMAMILKQEQAQLVASSIDSIVNGSTSGNGKEPSVAAALAVQCGNFGSKIESSIDPSHMTFGGMKTKEGPNRCNACHKRVGLTGFSCRCGNIFCAAHRYSDIHNCSFDYRTAARDAIAKAN

SEQ ID NO: 72220 - protein, 134 aa, Gossypium hirsutum
  Clone ID: LIB3146-053-Q1-K1-A12.pep
PTRPPTRPPTRPPTRPPTRACIDSIVNGSTSGNGKEPSVAAALAVQCGNFGSKIESSIDPSHMTFGGMKTKEGPNRCNACHKRVGLTGFSCRCGNIFCAAHRYSDKHNCPFDYRTAARDAIAKANPVVKAEKLD

SEQ ID NO: 72221 - protein, 190 aa, Gossypium hirsutum
  Clone ID: GOSHI-09MAY01-C745_1.pep
MEKIEHTTVTTNGIKMHVASIGSGPIILFLHGFPELWYTWRRQLLSLSSLGYRCVAPDLRGYGDSDAPPSPESYTVFHVVGDLVGLLDALGVDKVFLVGHDWGAMIAWNFCLFRPDRIKALVNLSVPYHPRNPKVKTVDGYRALFGDDFYICRFQVPGEAEAHFAQMDTAKVLKKFLTTRDPNPPCIPKE

SEQ ID NO: 72222 - protein, 172 aa, Gossypium hirsutum
  Clone ID: GOSHI-09MAY01-C725_4.pep
GPRSRSRTRTDKEPHIILTLLNKTLVPPSVIFIALLLPLPLLLAASSSARSQFSNRSALFYHAVALVLHAAKAEAAEEEEAPKPKPKNPLDLLPPSKMVLDDWKRLYSNTKTNFREVAIKGFWDMYDPEGYSLWFCDYKYNEENTVSFVTMNKVGGFLQRMDLARRYAFGKM

SEQ ID NO: 72223 - protein, 167 aa, Gossypium hirsutum
  Clone ID: GOSHI-09MAY01-C725_2.pep
RRRDVQRGRGGPFSPPSKMVLDDWKRLYSNTKTNFREGASKGFWDMYDPEGYSLWFCDYKYNEENTVSFVTMNKVGGFLQRMDLARKYAFGKMLVIGANPPFKVKGLWLFRGQEIPQFVIDECYDMELYEWKKVDLSDAAQKERVNQMIEDCEPFEGEPLLDAKCFK

SEQ ID NO: 72224 - protein, 421 aa, Gossypium hirsutum
  Clone ID: GOSHI-09MAY01-C725_1.pep
MALVLHAGKTNKNAFKALIAAEYSGVQVKMVENFEMGVSNKTPEFIKMNPLGKVPVLETPEGPVFESNAIARYVARSKVNNPICGSTLIDYGHIEQWIDFAAMEIDANIAKWLYPRLGYGVYLPPAEEAAIAALKRALGALNTHLASNTFLVGHFVTLADIIMTCNLYLGFSQIMTKSFTSEFPHVERYFWTLVNQPKIKKILGEVKQAVSLPPVPSKKPAAQPKETKPKAEPKKEAKKEVEKQAAKAEAAEEEEAPKPKPKNPLDLLPPSKMVLDDWKRLYSNTKTNFREVAIKGFWDMYDPEGYSLWFCDYKYNEENTVSFVTMNKVGGFLQRMDLARKYAFGKMLVIGANPPFKVKGLWLFRGQEIPQFVIDECYDMELYEWKKVDLSDAAQKERVNQMIEDCEPFEGEPLLDAKCFK

SEQ ID NO: 72225 - protein, 162 aa, Gossypium hirsutum
  Clone ID: uC-gsflmaxxa067g11b1.pep
FTCILLQRRAEKSVNLERPSGSEAVVFSFLLALINGETGLIAFLEPSVILMILAANAAVGVITETNAEKALEELRAYQADIATVLRNGCFSILPATELVPGDIVEVSVGCKIPADMRMIEMLSGQLRVDQAISERLRLKDSGTCMIPRDTHCGFVTTSTMRR

SEQ ID NO: 72226 - protein, 132 aa, Gossypium hirsutum
  unsure (1)..(132): unsure at all Xaa locations
  Clone ID: uC-gsronu33B148a01b1.pep
NSWTLVNQPKIKRILGEVKQAVSLPPVPSKKPAAQPKETKPKAEPKKEAKKEVEKQAAKAEAAEEEEAPKPKPKNPLDLLPPSKMVLDDWKRLYSNTKTNFREVAIKGFWDMYDPEGYSLWFXCDYKYNEEN

SEQ ID NO: 72227 - protein, 128 aa, Gossypium hirsutum
  unsure (1)..(128): unsure at all Xaa locations
  Clone ID: LIB3166-040-P1-K1-E4.pep
FREPLAFCTLFIQPKFKKILGELNQPVSLPPVPSKKPAAQPNETKPKAEPKKEAKKEVEKLAAKAEAADEEAPKPKPKNPLDLLPPSKMVLDDWKRLYSNTXTNFREVAIKGFWDMYDPRGYSLWFCD

SEQ ID NO: 72228 - protein, 67 aa, Gossypium hirsutum
  unsure (1)..(67): unsure at all Xaa locations
  Clone ID: LIB3493-045-P1-M1-D8.pep
KKRNFFFMVNVDKKKRYYLTHPLSKFFNHFDLHTXYILSNECLKGIFVCFSCMLDKSXGLIEKSATI

SEQ ID NO: 72229 - protein, 48 aa, Gossypium hirsutum
  Clone ID: LIB3197-041-Q1-M1-D6.pep
VVFRQAIGRMLLAQRLTTLYVGSTLIDYGHIEPWIDFQPWKLKLILPK

SEQ ID NO: 72230 - protein, 295 aa, Gossypium hirsutum
  Clone ID: GOSHI-09MAY01-C655_2.pep
MEFWGIEVKSGQPIKADPGANYVIHLSQASLGESKNKAESVPLYVNVDGKKLILGTLSHQICPQLSFDLVFDEEFELSHNSENGSVYFLGYKTFIPEEGDDFGMSSEEESEEEEEEELPVAAAAAAVNGKAKPDGKTAKANAGKPDAVKQSGKIAEPSSNKKSEDEDDDDESEDESGSDEEDDSDDDDESDEMSMDESSDDEDEETPKKVESSKKRPAEAATPASAKKAKSAVTPQKTDGKKGGHTATPHPAKQSGKNSAKSPKSGGQFSCGSCNKSFGSEGGLESHKKAKHGGK

SEQ ID NO: 72231 - protein, 305 aa, Gossypium hirsutum
  Clone ID: GOSHI-09MAY01-C655_1.pep
MEFWGIEVKSGQPIKADPGANYVIHLSQASLGESKNKAESVPLYVNVDGKKLILGTLSHQICPQLSFDLVFDEEFELSHNWKNGSVYFLGYKTFIPEEGDDFGMSSEEESEEEEDEELPVAAAAAAAAVNGKAKPDAKTAKANAGKPDAVKQSGKIAEPSNNRKSEDEDDDDESEDESGSDEEDDSGDDDESDEMSMDESSDDEDEETPKKVESSKKIPVESSKKRPAEAATPASAKKAKSAVTPQKTDGKKGGHTATPHPAKQSGKNSAKSPKSGGQFSCGSCNKSFGSEGGLESHKKAKHGGK

SEQ ID NO: 72232 - protein, 97 aa, Gossypium hirsutum
  Clone ID: LIB3828-019-Q1-N6-E11.pep
MDDSSDHEYEETPKKVESSKKIPVESSKKRPAEAATPASAKKAKSAVTPQKTDGKKGGHTATPHPAKQFGKNSAKSPKSFGSEGGLESHKKAKHGGK

SEQ ID NO: 72233 - protein, 116 aa, Gossypium hirsutum
  Clone ID: uC-gsflnu33B060d04b1.pep
KVYPGANYVIHLSRDSVGEAKNKAESVPLYVNVDGKKLILGTLSHQSCPQLSIDSEFDEEFELSHNWKNGSVYFLGYKTFIPEEGDDFGMSSEEQSEEEEEEELPVAAAAAAVNGK

SEQ ID NO: 72234 - protein, 79 aa, Gossypium hirsutum
  unsure (1)..(79): unsure at all Xaa locations
  Clone ID: LIB3189-021-P1-K1-A7.pep
MEFWGIEVKSGQPIKADPGANYVIHXSQASLGESKNKAESVPLYVNVDGKKLILGTLSHQICPQLSFDLVFDEEFTGTC

SEQ ID NO: 72235 - protein, 62 aa, Gossypium hirsutum
  Clone ID: GOSHI-09MAY01-C645_79.pep
LHPATTFPEDVAEMILSIPLAESPHEDFQVWSVEATGEFTTRSAYKLLQSIENNPEAYALQN

SEQ ID NO: 72236 - protein, 182 aa, Gossypium hirsutum
  unsure (1)..(182): unsure at all Xaa locations
  Clone ID: GOSHI-09MAY01-C645_78.pep
LAACTARTTGWTPILISLSAMVINKYTLRSNIKSFNLSGMGCSAGLISIDLARDLLQVHPNPRARPRGPEIITPNYYRGNERAMLLPNCLFRMGGAAILLSNRRSXRRRATYRLCXHVVRTHKGADDKAYRCVFEXEDKDGNXVGISLSKDLMAIAWRGFKNLTLPLIWSLYFLSCNSEATS

SEQ ID NO: 72237 - protein, 128 aa, Gossypium hirsutum
  Clone ID: GOSHI-09MAY01-C645_75.pep
NPICFKRCQILFGTTETHIFFPKAPLYFTTTSLSKSCLDSAISQDIGAKCIIRNNKHFITCTAAFALTCALYLVPKRPSMGSRWDLKCFANSIPTAFRPPGISNALGYVEGKKEASESHEKQIKYELF

SEQ ID NO: 72238 - protein, 124 aa, Gossypium hirsutum
  Clone ID: GOSHI-09MAY01-C645_60.pep
ALNQIASEILYSSCLIAHHVVLHLPQHCLCSDPSHFLHHHQYHRRRPQHRNPLALSIFLQVWKIATYFYQLHQDLKYSYEQISLLLFQIYHLFYAIYCSCLPRWPILQHKRFDVEESSSVRKPG

SEQ ID NO: 72239 - protein, 57 aa, Gossypium hirsutum
  Clone ID: GOSHI-09MAY01-C645_59.pep
RLSQHTHKRLSHFCLFLGFILSSFINLNFISPSQKSLDQVTFPIKIIQFFPLNVFVG

SEQ ID NO: 72240 - protein, 90 aa, Gossypium hirsutum
  Clone ID: GOSHI-09MAY01-C645_57.pep
GEEVPSVTNTYKDESGLPQTCFLNYGDQSCQILKGLVSKVGEKVSDLSELEFKAKSSTYRAWYDVDMFLSHRVTSSSETDLELRRMNGLT

SEQ ID NO: 72241 - protein, 104 aa, Gossypium hirsutum
  unsure (1)..(104): unsure at all Xaa locations
  Clone ID: GOSHI-09MAY01-C645_55.pep
KPNLKYVGIELWQVKSGTMFDNILVADDVEXAKKLAEETWGKQKDAEKAAFEEAEKKREEEASKDDPVDSDAEDEDDADDTEGHESDSDTKSDDEDKEDAHDEL

SEQ ID NO: 72242 - protein, 126 aa, Gossypium hirsutum
  Clone ID: GOSHI-09MAY01-C645_51.pep
MPEELEIVDDQKLSTQYLIIIARGLQMWNLFSTAWPCSNTFFYAHRCDVNLLLATLCTRTIQTCEGSIVKALDCNAVVASRDALTKTVYARLFDCTTIIYYYRWGLENTIKGKTSDMVIPSQPVAS

SEQ ID NO: 72243 - protein, 158 aa, Gossypium hirsutum
  unsure (1)..(158): unsure at all Xaa locations
  Clone ID: GOSHI-09MAY01-C645_48.pep
MAMQTGVGFSKILILAGAGYTGTILLKNGKLSDMLGELQSLVKGLEKXGDQSDDSDALLAQVRRLSTEIRQLASARQITVLNGDSGVKLTSLVIPAATLGALGYGYMWWKGISFSDLFWVTKRHMALAVENLTKHLDSVSDALSAAKKHLTPRIPHPG

SEQ ID NO: 72244 - protein, 168 aa, Gossypium hirsutum
  unsure (1)..(168): unsure at all Xaa locations
  Clone ID: GOSHI-09MAY01-C645_47.pep
MAEKSCFKRLQKEYRALCKEPVSHVVARPSPSDILEWHYVLEGSEGTPFAGGYYYGKIKFPPEYPYKPPGITMITPNGRGMTQKKICLSMSDFHPESWNPMWSVSSILTGLLSFMMDNSPTTGSVNTTAAEKQRLAKTSLAFNXCKNPTFRKLFPEYVDRHKKQQQLI

SEQ ID NO: 72245 - protein, 162 aa, Gossypium hirsutum
  Clone ID: GOSHI-09MAY01-C645_46.pep
MEGWDPNTKSTLTQIPLLTTKAGPRDGAAWTQRLKEEYKALIAYTQMNKSNDNDWFRISAANPEGTRWTGKCWYVHNLLKYEFDLQFDIPVTYPATAPELELPELDGKTQKMYRGGKICLTVHFKPLWAKNCPRFGIAHALCSGLAPWLAAEIPILVDTGTI

SEQ ID NO: 72246 - protein, 135 aa, Gossypium hirsutum
  Clone ID: GOSHI-09MAY01-C645_45.pep
APPTPIPFIFPPKFPKSAALCISSSSSSHFIRPKKHFYSSFIQTKNNGYTVASSSSFTMLHLASLFSIFVLVNARIPGVCTGGSWETAHVTFYGGMFTSRENQNQRTQNQETKETMGKRAKRDWKLKGTEWKGCQ

SEQ ID NO: 72247 - protein, 79 aa, Gossypium hirsutum
  Clone ID: GOSHI-09MAY01-C645_44.pep
NSPMDKKCPKSKNPEPGNQGNDEKKSKKGLRPTGRATRPEIFLKSITKDVTNVQITYPCRFFFLFLTSATYFVFYISPK

SEQ ID NO: 72248 - protein, 366 aa, Gossypium hirsutum
  unsure (1)..(366): unsure at all Xaa locations
  Clone ID: GOSHI-09MAY01-C645_43.pep
CWKVGRGTKISISRDYWIPGLPRDRLPVLNSNLNDSKVAELIDSSSRTWKQELIEYAFPEDVAEMILSIPLAESPHEDFQVWSIEATGEFTTSSAYKLLQSIENXPEAYALQTDSKDFYRKLWLLDLPSKIKITVWKISWNFLATRANMLLRRLTNTSVCPRCSSGTETMDHLFRECPGFSHKARLLSIESFVLQYGPSVKIWTKPVDKVVKINFDAAYDGRQSKAAIGVVARDKEGSVLLSCTEVHQRVPSAFGAEAIACRKALQIGVNMQWEKVIIEGDSLSIIRKCKTKRPDKSLISAYLHDIRQLLLKFKECRFEHIPRLANNLAHILANEALKSSRGAYLIGRVPEAAEIQAETGRAKEPD

SEQ ID NO: 72249 - protein, 120 aa, Gossypium hirsutum
  Clone ID: GOSHI-09MAY01-C645_42.pep
FTTRQQESEVKVPSVANTYKDESGLPQTCLLNDGGLSCQILKGLVSKVGEKVSDLSELEFEAKSSTHGAWYDVDMFLSHRVTSSGETEVRVRFVGFGAEEDEWVNVKKAVRGRSIPFNVV

SEQ ID NO: 72250 - protein, 127 aa, Gossypium hirsutum
  Clone ID: GOSHI-09MAY01-C645_38.pep
MAEKSCVKRLQKEYRALCKEPVSHVVARPSPNDILEWHYVLEGSEGTPFAGGYYYGKIKFPPEYPYKPPGIRMITPNGRFMTQKKICLSMSDFHPESWNPMWSVSSILTGLLSFMMDNSPTTGSVNT

SEQ ID NO: 72251 - protein, 216 aa, Gossypium hirsutum
  unsure (1)..(216): unsure at all Xaa locations
  Clone ID: GOSHI-09MAY01-C645_37.pep
MGELLELQRQFEFAQQAKSSIRLSERNVVELVQKLHELRIIDFEPPRPVSGKEYITPEQLRHEIAGEVKKLGRVSLIDLADTTGVDLYHVEKQAQHVVSEDPGLMLIQGEIISQSYWDSVAEEINERLQECSQIALAELAAQLYVGSELVASVLEPRLGTLVKGRLXEGGQSYTPAYIARVSAMARGASRGITEPTNLSDLGSSLQQLLQEMERAT

SEQ ID NO: 72252 - protein, 233 aa, Gossypium hirsutum
  Clone ID: GOSHI-09MAY01-C645_35.pep
CSRVRLVDNVGRQTGSLYTDWDLLPPKTHAAAEATAPAAGDDKEYIPDPEDKKPEGYDDIPKEIPDPDAKKPEDWDDEEDGEWIPSTIPNPEYKGPWNPKKIKNPNYKGKWKAPMIDNPDFKDDPDLYVFPSLKYVGIELWQVKSGTMFDNILVADDVEYAKKLAEETWGKQKDAEKAAFEEEEKKKEEEESKDEPVDSDAEDDDDDTDDGEGSESDSSKDSAEEDAVQHDEL

SEQ ID NO: 72253 - protein, 150 aa, Gossypium hirsutum
  Clone ID: GOSHI-09MAY01-C645_34.pep
KDTLNNSQPRYKGPWKPKKIKNPNYKGKWKAPMIDNPDFKDDPDLYVFPNLKYVGIELWQVKSGTMFDNILVADDVEYAKKLAEETWGKQKDAEKAAFEEAEKKREEESKDDPVDSDAEDEDDADDTEGHESDSDTKSDDDDKEDAHDEL

SEQ ID NO: 72254 - protein, 350 aa, Gossypium hirsutum
  unsure (1)..(350): unsure at all Xaa locations
  Clone ID: GOSHI-09MAY01-C645_33.pep
MSSSTPSSSAGGVGSADSAAPRRNSKRPKYSKFTQQELPACKPILTPRWVISAFMLVSIVFIPIGVVSLFASRDVVEIIDRYETACVPDGYKNDKVTFIQSNLTKQCNRTLTVKKRMKKPIYVYYQLDNFYQNHRRYVKSRSDSQLKENSSWDDVSSCKPEDMSKDQPIVPCGLIAWSLFNDTYNFSLNNQQLAVNKKGISWKSDRDSKFGKDVFPQNFQNGSLKGGATLNPSTPRREQEDLIVWMRTAALPTFRKLYGKIEQDLQPNDQIDGTLDNNYNTYSFNGKKKLGLSTTSWLXGGKNDSLGIANLTVGGVSFLLGLAFXVAYLAKPRQLGDPSYLSWNRNPGGH

SEQ ID NO: 72255 - protein, 159 aa, Gossypium hirsutum
  Clone ID: GOSHI-09MAY01-C645_32.pep
HFVRPRVREWSKAAWTQRLKEEYKALIAYTQMNKSNDNDWFRISAANPEGTRWTGKCWYVHNLLKYEFDLQFDIPVTYPATAPELELPDADGKTQKMYRGGKICLTVHFKPLWAKNCPRFGIAHALCLGLAPWLAAEIPILVDSGMIKHKDDAATSNES

SEQ ID NO: 72256 - protein, 107 aa, Gossypium hirsutum
  Clone ID: GOSHI-09MAY01-C645_30.pep
SLKQVDKEDKLLERQRLREKRIKKKMKLKKGQREEEDGEEEEDDLSGSEGEPDANRKRKRSKIYFHSDSDDGEKEEDKAGSASIKAESISLAEQEELALKLLNSMHS

SEQ ID NO: 72257 - protein, 104 aa, Gossypium hirsutum
  Clone ID: GOSHI-09MAY01-C645_29.pep
MHQLLSKRSATRILKKKKLKINVHRPVGTRVVFDEEGNTQAPLAMLADKTSGDILLDQDIEGVVEDSIASSWKSQGLSASSSRVLFNVALHGSIFINATKSYDL

SEQ ID NO: 72258 - protein, 56 aa, Gossypium hirsutum
  Clone ID: GOSHI-09MAY01-C645_28.pep
DLIGHSHGEAETFVAISEEVIGSLYIFWHIFRNFQALDKRSPVSDGLKEKFAEATR

SEQ ID NO: 72259 - protein, 116 aa, Gossypium hirsutum
  Clone ID: GOSHI-09MAY01-C645_26.pep
SRPAFELCCIHAGGRAVIDELQKNLQLSAEHVEASRMTLHRFGNTSSSSLWYEMSYIEAKGRMKKGDRVWQIAFGSGFKCNSAVWKCNRTIKTPKDGPWADCIHRYPVHIPEVVKL

SEQ ID NO: 72260 - protein, 175 aa, Gossypium hirsutum
  unsure (1)..(175): unsure at all Xaa locations
  Clone ID: GOSHI-09MAY01-C645_25.pep
NREQKGGGWDLTGGIASGESTVSSMCKHNHIPVVDADIIARDALKKNSGGYKKVVGGVGPDILQDDDQVDRLKLGRIGFSDASKRQLLNRLLAPYISSGIFLEIFKLWIKGHKVIVLDIPLLVEAKMDKWTKPIVGVWVDPETQLHXLMERDNSTGEDARNRINAQNGLDLKENP

SEQ ID NO: 72261 - protein, 87 aa, Gossypium hirsutum
  unsure (1)..(87): unsure at all Xaa locations
  Clone ID: GOSHI-09MAY01-C645_24.pep
QKEKFNYSTPKTIQHEIEGVQNDALRFGLHGVKSDLVGSHSLQSAYESXSLLPEQMKRKVLANTYGTAMPLKMDLDRQILLAMAVRF

SEQ ID NO: 72262 - protein, 221 aa, Gossypium hirsutum
  Clone ID: GOSHI-09MAY01-C645_23.pep
MAMQTGVGLSKILILAGAGYTGTVLLKNGKLSDILGELQSLVKGLEKSGEQADDSDALLAQVRRLSTEIRQLASARQITVLNGDSGGKLTSLVVPAATLGALGYGYMWWKGISFSDLFWVTKRNMAMAVENLTKHLDSVSDALSAAKKHLTQRIQNLDDKMETQKEISKSIQTSVEEAHMNLSNIEYDLDALQRMISGLDGKIGSLEYKQDLANAGGVGPS

SEQ ID NO: 72263 - protein, 176 aa, Gossypium hirsutum
  unsure (1)..(176): unsure at all Xaa locations
  Clone ID: GOSHI-09MAY01-C645_22.pep
MEIGYCLSTRESDKFLGYSPEQHPIVLQIGGSKLENLAKATELANAYNYDEINFNCGCPSPKVAGHGCFGVRLMLDPKXFVGEAMSVIAGNTNVPVSGKCRIGVDDHDSYNELCDYIYKVSSLSPTRHLIIHSRKALLNGMSPGXDTEEVPPLTYEDYYALLRDFSDLTFTINGGI

SEQ ID NO: 72264 - protein, 119 aa, Gossypium hirsutum
  unsure (1)..(119): unsure at all Xaa locations
  Clone ID: GOSHI-09MAY01-C645_21.pep
FWVLFVPYRFLIIILTIFQKRELVFENPKQKEEIEVSLSHRLCSATSHEGSRGLQEPGTFILRFPTSRSWPHPDAGSLVVTYVGTDYSLXHKLLSIDNVYRCAVLALLNFIGVLINCLY

SEQ ID NO: 72265 - protein, 188 aa, Gossypium hirsutum
  Clone ID: GOSHI-09MAY01-C645_20.pep
MLKQAIRKVLSKRVVSDSGDKLLLPCLYLPTTSFHAGQFHCSPRSFFGVEDFLDDDNSKPYTYQKGKKSKNPNKHVSFKQRTEAYMEPFTLDVFISKRFVSASVTHRVTCKQVAVAGTNSKDIKAVLRSRSDIPACLAIGRILAERAREADVYTASYTPRERDKFEGKIRAVVQSLIDNGIDIKVYLD

SEQ ID NO: 72266 - protein, 131 aa, Gossypium hirsutum
  Clone ID: GOSHI-09MAY01-C645_17.pep
DKFGLVRDVSFQHRIKIYFGAKFGSCQEAQKFRIYRNSTTFTLDGHLVIETSQEISDVPYGDYFRVEGLWDVERDNDGPQEGCVLQVYVNVAFSKKTVWKGKIVQSTLEECREAYATWIDMAHELLKQNID

SEQ ID NO: 72267 - protein, 124 aa, Gossypium hirsutum
  Clone ID: GOSHI-09MAY01-C645_16.pep
LRDLQRDLENKANDLSKLQKDIAKSHQVRKKYTIQLGENELVLKELDLLNEDANVYKLIGPVLVKQDLAEANANVRKRIEYISAELKRLDSSLQDLEEKQHSKREAILKVQQRIQSLQAGKAKA

SEQ ID NO: 72268 - protein, 185 aa, Gossypium hirsutum
  Clone ID: GOSHI-09MAY01-C645_15.pep
MSQSKVTMEVGNDGVAVITISNPPVNALAIPIIDGLKEKFAEATRRNDVKAIVLTGKGGRFSGGFDINVFTKVHGTGDVSIMPDVSVDLVTNAVEDCKKPIVAAVEGLALGGGLEFAMGCHARIAAPRTQLGLPELSLGVIPGFGGTQRLPRLVGLSKAIEMMLSSKPIMSEEGKKLGLIDALVP

SEQ ID NO: 72269 - protein, 174 aa, Gossypium hirsutum
  Clone ID: GOSHI-09MAY01-C645_13.pep
MEGWDPNTKSTLTQIPLLTTKAGPRDGAAWTQRLKEEYRALIAYTQMNKSNDNDWFRISAANPEGTRWTGKCWYVHNLLKYEFDLQFDIPVTYPATAPELELPELDGKTQKMYRGGKICLTVHFKPLWAKNCPRFGIAHALCLGLAPWLAAEIPILVDSGMIKHKDDATTSNES

SEQ ID NO: 72270 - protein, 105 aa, Gossypium hirsutum
  Clone ID: GOSHI-09MAY01-C645_12.pep
MQLQILIVILLTEACNQKNKKHVEILISVTVLLFATIMKNLKAFIPNTGRGIQGATSPCLGQNFAKMFEINFENEKGEKSMVWQNSWAYSTRTEVGERCESSNKG

SEQ ID NO: 72271 - protein, 139 aa, Gossypium hirsutum
  Clone ID: GOSHI-09MAY01-C645_11.pep
MEAPKTIQHEIGGVQNDALRFGLHGVKSDLVGSHPLQSAYESAKKTQEEMKRKVLANTYGTAMPLKMDLDRQILWRFQRPLLPSSMLGLEAVTGTLDDFGFEDYLNDPRDSETVRPLDLHHSMEVRLGLSKGPVCPSFM

SEQ ID NO: 72272 - protein, 64 aa, Gossypium hirsutum
  Clone ID: GOSHI-09MAY01-C645_10.pep
RKAFPVVLIAHVFTKVHDRDIEGAVEDSISSSWKSQGLALLQVERYLMLHSMVGHLSQNLNLCY

SEQ ID NO: 72273 - protein, 79 aa, Gossypium hirsutum
  Clone ID: GOSHI-09MAY01-C645_9.pep
CLIVGVVNFYGRKGILPSQQRKRQTLSLWLKASVQDLASRAASRAMAEAAKSISLQIQHINLRFPVEPYLVSVRYRLIF

SEQ ID NO: 72274 - protein, 76 aa, Gossypium hirsutum
  Clone ID: GOSHI-09MAY01-C645_8.pep
SFANQTRSATRILKKKKLKINVHRPVGTRVVFDEEGNKQAPLAMLAGKTSGDILLDQDIEGVVWRIQSLQAWKSQG

SEQ ID NO: 72275 - protein, 496 aa, Gossypium hirsutum
  Clone ID: GOSHI-09MAY01-C645_7.pep
MPPASPDFSSSVKLKYVKLGYQYVVDHFLTLLLVPVMVGILIEVLRLGPLEIVNLWNSLHFDLIQILCSCFFIIFIATVYFMSKPRSIYLVDYACYKPPVTCRVPFATFMEHSRLNLSNNPKSVEFQMRILERSGLGEETCLPPAIHYIPPTPTMEAARGEAEIVIFSAMDSLFKKTGLKPKDIDILIVNCSLFSPTPSLSAMVINKYKLRSNIKSFNLSGMGCSAGLISIDLARDLLQVHPNSNAVVVSTEIITPNYYQGKERAMLLPNCLFRMGGAAILLSNRRSERRRAKYRLVHVVRTHKGADDKAYRCVFEEEDKEGKVGISLSKDLMAIAGEALKSNITTIGPLVLPGSEQLLFLLTLIGRKVFNPKWKPYIPDFKLAFEHFCIHAGGRAVIDELQKNLQLSAEHVEASRMTLHRFGNTSSSSLWYEMSYLEAKGRMKKGDRIWQIAFGSGFKCNSAVWKCNRTIKKPTDGPWEDCIHRYPVHIPEVVKL

SEQ ID NO: 72276 - protein, 83 aa, Gossypium hirsutum
  Clone ID: GOSHI-09MAY01-C645_6.pep
RRKKKKLKINVHRPVGTRVVFDEEGNTQAPLAMLADKTSGDILLDQDIEGVVEDSISSSWKSQGLALLQVRALFNVAFHGHSS

SEQ ID NO: 72277 - protein, 344 aa, Gossypium hirsutum
  Clone ID: GOSHI-09MAY01-C645_5.pep
MPTTCPFSRFPFYFSWPYGSYWLWDVESDNDGQQEGCVLRVYVNVAFSKKTVWKEGRSPTISTMHTYEASENNTIEVGQGSLKLLYSADKGKLTRYVNTRNSVTAFAEQSYGYYSGNDGTDKDPQAAGAYVFRPNGTFSIKSENQTPLTGVRGPLLDEVHQELNSWISQVTRVYKGKEHAELEFSIGPIPVNDGIGKEIITQITTTMRTNKTFYTDSNGRDFIKRIRDFRKDWDLQVNQPIAGNYYPVNLGIYVQDDSTELSVLVDRSVGASSLADGQIELMLHRRVIHDDIRGVGEVLNETVCVSEGCDGLTILGKLYLRIDHIGEGAKWRSTVGQEIYSPLL

SEQ ID NO: 72278 - protein, 134 aa, Gossypium hirsutum
  Clone ID: GOSHI-09MAY01-C645_4.pep
KSTMPEEARNRRCKLLLVSLLLVTSYCLKFMVTNLLPRKLFIFLRIEAKLFTVELSSPALVSLFPVLYLPSIPGLPLLLLFVFISLSFILPKTPLTCHFFLKYRARLIFLSLGSSLNDATHATGSEKSKSFIQL

SEQ ID NO: 72279 - protein, 128 aa, Gossypium hirsutum
  Clone ID: GOSHI-09MAY01-C645_3.pep
KSIFFFFFSSHLSFPTPPCLLFFRDLTRILCRNPYRIMSGLDIGAREKQGNPKVDDGFKVAKEKITCIAASVDVDEGFESSGVEETRSPVTNGSRSHTNRRYHDKTASVTTNSGHSSKTALIRKQIRA

SEQ ID NO: 72280 - protein, 241 aa, Gossypium hirsutum
  unsure (1)..(241): unsure at all Xaa locations
  Clone ID: GOSHI-09MAY01-C645_2.pep
MLKAIQILGCSSGFISQRLKKPHSGDGFSLISSKTSYNSTPKSLSFRVIRMLSTPSQSNSDAPSSSSSSVAVHLAGNVRKIKFCQRCGGPPKHEIPDGEEKIRAICTLCGKIAYQNPKMVVGCLIEHDRKILLCKRNIEPSFGLWTLPAGYLEIGESAAERAIRETWEKAXAELEIISPFAQLDIPLIGQTYVIFLAKLKKPQPSPGPEAQPGVQCLFEWDVYQSHTILWHSGVVDICYWE

SEQ ID NO: 72281 - protein, 408 aa, Gossypium hirsutum
  unsure (1)..(408): unsure at all Xaa locations
  Clone ID: GOSHI-09MAY01-C645_1.pep
FPIFILLSLVAIASAEVFFEERFEDGWESRWVKSDWKKDENMAGEWNYTSGKWNGDPNDKGIQTSEDYRFYAISAEFPEVNNKGKTLVFQFSVKHEQKLDCGGGYMKLLSGDIDQKKFGGDTPYSIMFGPDICGYSTKKVHAILTYNGTNHLIKKEVPCETDQLTHVYTFILRPDATYSILIDNVEKQTGSLYTDWDLLPPKKIKDPEAKKPEDWDDKEYIPDPEDKKPEGYDDIPKEIPDPDAKKPEDWDDEEDGEWTPSTIPNPEYKGPWKPKKIKNPNYKGKWKAPMIDNPDFKDDPDLYVFPNLKYVGIELWQVKSGTMFDNILVADDVEYAKKLAEETWGKQKDAEKAAFEEAEKKXEEEESKDDPVDSDAEDEDGADDTEGHESDSNTKSDDEDKEDAHDEL

SEQ ID NO: 72282 - protein, 131 aa, Gossypium hirsutum
  Clone ID: LIB3582-040-P1-K1-A12.pep
MSSSSTALRELQQDLENKANDLSKLQKDIAKNHQVRKKYTIQLGENELVLKELDLLNEDANVYKLIGPVLVKQDLAEANANVRKRIEYISAELKRLDGSLQDLEEKQHSKREAILKVQQRIQSHQAGKAKA

SEQ ID NO: 72283 - protein, 85 aa, Gossypium hirsutum
  Clone ID: uC-gsflnu33B004d06b1.pep
FTRPEKKSKKGLEIEGYRVEGLSIGGHETCIIFPTLNLAFDIGRCPQRALSQDFLFISHGHMDHIVSFFLSLFLFLVFLFLLLVV

SEQ ID NO: 72284 - protein, 65 aa, Gossypium hirsutum
  Clone ID: LIB3582-017-P1-K1-D11.pep
MVRGKEKMRRIDNDTSRQVTFSKQRNGLLKKAFELSVLCDAEVALITFSPRGKLSEFASSRGFGM

SEQ ID NO: 72285 - protein, 108 aa, Gossypium hirsutum
  unsure (1)..(108): unsure at all Xaa locations
  Clone ID: LIB3145-006-Q1-K1-F5.pep
MAIQIFELIGWHQHKTLPTGYREIMESAIERAIRETWEEAGAEVEVISPFAQMDIPFIGQQTYVIFLAKLKKPQFSPGPESSECLLFELDNIPFXLEFSPIFVTLNLY

SEQ ID NO: 72286 - protein, 72 aa, Gossypium hirsutum
  Clone ID: LIB3829-023-Q6-K6-D9.pep
GKIYTKPNCLRDIAVLRAHHEHLPCHHHLLLILLHLCLYISPLIFLSSYSFVSPLPFSIFSFQVMNSHRYQI

SEQ ID NO: 72287 - protein, 101 aa, Gossypium hirsutum
  unsure (1)..(101): unsure at all Xaa locations
  Clone ID: AI729565.1.pep
FCLVCTCPRLLFTLDRDQVESTSESEGSASDEVLVVPYDNLXPMSCADITESKQLLDKLVVVKYNGALGKNMGFGGPKWGLENTIKGKTSDMVIPSQTVAS

SEQ ID NO: 72288 - protein, 117 aa, Gossypium hirsutum
  Clone ID: LIB3582-044-P1-K1-H8.pep
MMGASRYLPPLFSVAPMMEWTDNHYRTLARLISKHGWLYTEMLAAETIVYQQGNLDKFLGYSPEQHPVVLQIGGSKLENLAKATELANAYNYDEINFNCGGPSPKSAGHGCFGVRLM

SEQ ID NO: 72289 - protein, 58 aa, Gossypium hirsutum
  Clone ID: LIB3825-003-Q1-N6-D4.pep
MMGASRYLPPLFSVAPMMEWTDNHYRTLALLISKHAWLYTKMLVAETIVYQQGNLPLT

SEQ ID NO: 72290 - protein, 131 aa, Gossypium hirsutum
  unsure (1)..(131): unsure at all Xaa locations
  Clone ID: LIB3829-009-Q6-K6-A6.pep
TWKKDENMAXEWNYTCGKRNGDPNDXMLQTIEALHVVCYXAEFPHXNNKGKTVAFQFSVKHEQKLDCGGGYMKALRDDIDQKKFGGDTPDSIMFGTXYVGGYSTNKGHAILTYSGTNHSIKKEAPCETDQL

SEQ ID NO: 72291 - protein, 158 aa, Gossypium hirsutum
  unsure (1)..(158): unsure at all Xaa locations
  Clone ID: uC-gsflmaxxa027c08b1.pep
MSQSKVTMEVGNDGVAVITISNPPVNALAIPIIDGLKEKFAEATGRNDVKAIVLTGKGGRFSGGFDINVFTKVHGTGDVSVMPDVSVDLVTNAXEDCKKPIVAAVEGLALGGGLEFAMGCHARIACSRTQLGLPELALGVNPXFGRTQCLPRLVGLSK

SEQ ID NO: 72292 - protein, 87 aa, Gossypium hirsutum
  Clone ID: LIB3189-053-P1-K1-G11.pep
FSTKLEESRMTRCESFSTVLGATLSDLTLSNLLRNQQSLLPFVSLENIRDLILLFCLFICVCVSSYCVHYSDLKRTFEHSSSTALYL

SEQ ID NO: 72293 - protein, 42 aa, Gossypium hirsutum
  unsure (1)..(42): unsure at all Xaa locations
  Clone ID: LIB3584-006-P1-K1-F5.pep
QYFRVGKTFLMNQYVYNKFNQQYXATIGAEFVTKELQIDNKL

SEQ ID NO: 72294 - protein, 85 aa, Gossypium hirsutum
  Clone ID: LIB3829-010-Q6-K6-G7.pep
FPHLLPHISFVPKTFLFLFYTNKKHGYTVASSSSFTMLHLASLFSIFVLVNARIPAPVFTLVDPGKLLMSLSMAATFVNFVYLMS

SEQ ID NO: 72295 - protein, 105 aa, Gossypium hirsutum
  Clone ID: LIB3825-008-Q1-K6-B4.pep
NTSVCPRCSSGTETMDHLFRECPATIAVWRELSFHRFLQDNQMGFLQWLTWVFSQSSTPQHRIFCVAVWAIWGDRNNRLPKKHGKSGKEVGRFVHSYISDLDAVG

SEQ ID NO: 72296 - protein, 167 aa, Gossypium hirsutum
  unsure (1)..(167): unsure at all Xaa locations
  Clone ID: LIB3584-016-P1-K1-D12.pep
MAEKSCVKRLQKEYRALCKEPVSHVVARPSPSDILEWHYVLEGSEGTPFAGGYYYGKIKFPPEYPYKPPGITMITPNGRFMTQKKICLSMSDFHPESWNPMWSVSSILTGLLSFMMDNSPTTGSVNTTAAEKQRLAKTSLSFXCKNPTFRKLFSEYFDKYNKQQLLI

SEQ ID NO: 72297 - protein, 66 aa, Gossypium hirsutum
  Clone ID: LIB3148-053-Q1-K1-A11.pep
HHTVVATEVGEVFTWGSNRGWSNLTNWKKHDLSWNQIESFQSFKALMHGDNLHEKWHTGSISHTAF

SEQ ID NO: 72298 - protein, 75 aa, Gossypium hirsutum
  Clone ID: LIB3582-041-P1-K1-C6.pep
NLFVLRLKTLKWIKEVQNQRTQNQEIKETIISVCSLFFVLKLALFFPLLFNSEIFLVLCIICFFFDTFSSESLNL

SEQ ID NO: 72299 - protein, 181 aa, Gossypium hirsutum
  unsure (1)..(181): unsure at all Xaa locations
  Clone ID: LIB3825-024-Q6-K6-E1.pep
MATAASSSSFTMLHLASLISIFALTNARIPGVYTGGSWETAHATFYGGGDASGTMGGACGYGNLYSQGYGVNTAALSTALFNNGLSCGACYEIKCANDPRWCHPGSPSIFITATNFCPPNFALPSDNGGWCNPPRPHFDLAMPMFLKIAEYRAGIVPVFFRXVPCLKPRGIRFTITRFPFL

SEQ ID NO: 72300 - protein, 59 aa, Gossypium hirsutum
  Clone ID: LIB3189-024-P1-K1-D5.pep
IFQVYFKELIQPVSTLFFHSLARDIFSQHINVIIFGIPFISLQLSSFRQLLNLWPSFFS

SEQ ID NO: 72301 - protein, 41 aa, Gossypium hirsutum
  Clone ID: LIB3189-015-P1-K1-B12.pep
MGPYWESMGIHDLKRENGKRKRRDKLVGANKNTQGKCKGRN

SEQ ID NO: 72302 - protein, 120 aa, Gossypium hirsutum
  Clone ID: LIB3829-023-Q6-K6-B4.pep
MAEKSCVKRLQKEYRALCKEPVSHVVARPSPNDILEWHYVLEGSEGTPFAGGYYYGKIKFPPEYPYKPPGIRMITPNGRFMTQKKICLSMSDFHPESWNPMWSVSSILTGLLSFMMDNSP

SEQ ID NO: 72303 - protein, 70 aa, Gossypium hirsutum
  Clone ID: LIB3148-035-Q1-K1-H2.pep
HASATRVLKKKKLKINVHRPVGTRVVFDEEGNTQAPLAMLADKTSGDILLDQGITLSLLLAYVAAIFYYS

SEQ ID NO: 72304 - protein, 128 aa, Gossypium hirsutum
  Clone ID: LIB3197-028-Q1-M1-D4.pep
MAEKSCVKRLQKEYRALCKEPVSHVVARPSPSDILEWHYVLEGSEGTPFAGGYYYGKIKFPPEYPYKPPGITMITPNGRFMTQKKICLSMSDFHPESWNPMWSVSSILTGLLSFMMDNSPTTGSVNTT

SEQ ID NO: 72305 - protein, 77 aa, Gossypium hirsutum
  Clone ID: uC-gsronu33B132f03b1.pep
SLWNRLVSWSCTDSYISLKLEKELRIFWNWKYSQGYIATYKFAIINEVEKLLSKLHSCTVTETPFASNDAKYFPDAW

SEQ ID NO: 72306 - protein, 41 aa, Gossypium hirsutum
  Clone ID: uC-gsflmaxxa090a12b1.pep
YCISLLTGLLSFMMDNSPTTGRVNTTAVEKQRLAQTYHSYN

SEQ ID NO: 72307 - protein, 101 aa, Gossypium hirsutum
  Clone ID: LIB3197-034-Q1-M1-F11.pep
NRLQSSISVKIWTKPVDKVVKINFDAAYDGRQSKAAIGVVARDKEGSILLSCTEVHQRVPSAFGAKAIACRKALQIGVNMQWEKVIIEGDSLSIIRKCKTK

SEQ ID NO: 72308 - protein, 90 aa, Gossypium hirsutum
  Clone ID: LIB3145-015-Q1-K1-G9.pep
TQRLKEEYKALIAYTQMNKSNDNDWFRISAANPEGTRWTGKCWYVHNLLKYEFDLQFDIPVTYPATAPELELPELDGKTQKMYRGGGIKG

SEQ ID NO: 72309 - protein, 111 aa, Gossypium hirsutum
  unsure (1)..(111): unsure at all Xaa locations
  Clone ID: LIB3189-007-P1-K1-E9.pep
MPHFSNSVXKLKYVKLGYQYLVNHILTLTLIPVMAGVLIEVLRLGPAEIVNLWNSLHFDLVQILCSCFFIIFVATVYFMSKPRSIYLVDYACYKPPVTCRVPFATLMEHFR

SEQ ID NO: 72310 - protein, 68 aa, Gossypium hirsutum
  Clone ID: LIB3083-011-Q1-L1-D10.pep
YVGIELWQVESVTMFDNILVADDVEYAKKLAEETWGKQKDAEKASFEEADKKREEDSKDVPFDFYSFD

SEQ ID NO: 72311 - protein, 55 aa, Gossypium hirsutum
  Clone ID: LIB3149-020-Q1-K1-D8.pep
KSQGLARLQVERYLMLHSMVIHLSQNLNLVLWKQGFVATLCTSFFNHDGSLLRVL

SEQ ID NO: 72312 - protein, 69 aa, Gossypium hirsutum
  unsure (1)..(69): unsure at all Xaa locations
  Clone ID: LIB3135-022-Q1-K1-F8.pep
MLTGMLKNFSFGRCDVDLLLDTLCTRTIQIREGSIVKALDCNAAVASRDALAKTDYARLXGWLVDKINI

SEQ ID NO: 72313 - protein, 103 aa, Gossypium hirsutum
  unsure (1)..(103): unsure at all Xaa locations
  Clone ID: LIB3272-031-P1-K1-F3.pep
PYTPRVPNKIGIKRVQKEYRDTXSREPSNHVVARXNTSDILRTALTSVEGSEGTPLAGGYYYEKIKLPPEYPYKPTGITMITPNGRFMTQMKRCLSMSDSHPE

SEQ ID NO: 72314 - protein, 99 aa, Gossypium hirsutum
  Clone ID: LIB3197-022-Q1-M1-H11.pep
MSSSTPSSSAGGVGSADSAAPRRNSKRPKYSKFTQQELPACKPILTPRWVISAFMLVSIVFIPIGVVSLFASRDVVEIIDRYETACVPDGYKNDKVTFI

SEQ ID NO: 72315 - protein, 61 aa, Gossypium hirsutum
  Clone ID: LIB3146-058-Q1-K1-G12.pep
TLEFDIRRTLIETHTDGCYSTLRVYQLRLHPKYQLLFAKQTISLVTETSSQQWRIFLSKMT

SEQ ID NO: 72316 - protein, 141 aa, Gossypium hirsutum
  unsure (1)..(141): unsure at all Xaa locations
  Clone ID: uC-gsflmaxxa069c05b1.pep
EVFNKDKTLVFQXSVKHEHKLDCGGGYMKLLSGDIDQKKFGGDTLYSTLFVSPFSLFLSFFFLLSFLILFFHHFLLSFFTFFSHSFFSIVFFFFILFLLYFHYLIFSFLLLFPPSIFLSISYLPTYIFLLFLSYSFSSPLY

SEQ ID NO: 72317 - protein, 45 aa, Gossypium hirsutum
  Clone ID: LIB3149-036-Q1-K1-E11.pep
MILEILCLFGHWTCTTAWFFVSASPRNQSVLVLFEIFIDYFSFVP

SEQ ID NO: 72318 - protein, 50 aa, Gossypium hirsutum
  Clone ID: uC-gsflmaxxa095c11b1.pep
MGSSSTALRELQQDLENKANDLSKLQKDIAKNHQVRKKYTIQSGPIELVP

SEQ ID NO: 72319 - protein, 246 aa, Gossypium hirsutum
  unsure (1)..(246): unsure at all Xaa locations
  Clone ID: GOSHI-09MAY01-C665_1.pep
MHSFLFSGVACHGTTNPTFFSVCFCLLYRDSCLNFLFFIFLVHNNCTLLFDHKYVLWLGQYTRMSSSHNSAPEQLCYIPCNLCNIILAVNVPCSCLFETVTVRCGQCTNLCSVNLAASFQSRAGKDVQVPNYTSSEYRIDLGSSSRCKNKLPKRATTINTTTQERVVNRPPDKRHRAPSLYNQFIKEEIQRIKLNNPDITHREAFSTAAKNXWARFPHIHFGLMLETDNQPKLNDDSTEPFHQLLK

SEQ ID NO: 72320 - protein, 131 aa, Gossypium hirsutum
  Clone ID: LIB3828-012-Q1-K6-F6.pep
FLQVNVPCNSLFETVTVRCGQCTNLCSVNLAASFQSRAGKDVQVPNYTSSEYRIDLGSSSRCKNKLPKRATTINTTTQERIVNRPPDKRHRAPSLYNQFIKEEIQRIKLNNPDITHREAFSTAAKNWARFP

SEQ ID NO: 72321 - protein, 253 aa, Gossypium hirsutum
  unsure (1)..(253): unsure at all Xaa locations
  Clone ID: GOSHI-09MAY01-C635_1.pep
MSEHQEQTERRNGHPSMSRYPSPTATYEDVLQSPDLFWEKLKAFHISLGFKFKVPVVGGKALDLHQLFVEVTSRGGLEKVIKDRKWKEVIVGFRFPTTITSASFVLRKYYLSLLYHFEQVYYFRKQLSPVSTPGTASESLVTGSANAMEDASTNQLTAVGTQELQIGSSVTGIIDGKFDNGYLVTVRLGXSDQFKGVLYHIPQMHQLSQSSNTSDVPPRRRKRSRLAQDPSRPKSNRNGYNHFYAEHYAQLKP

SEQ ID NO: 72322 - protein, 125 aa, Gossypium hirsutum
  unsure (1)..(125): unsure at all Xaa locations
  Clone ID: LIB3582-051-P1-K1-C10.pep
MSEHQEQSESRNGHANMSRYPSPTATYEDVLQRGCVFWEKLKAFHISLGFKFKVPVVGGKALDLHQLFVEVTSRGGLEKVIKDHKWKEVIXGFRFPTTITSASFVLRKYYLSLLYHFEQXYYFRK

SEQ ID NO: 72323 - protein, 270 aa, Gossypium hirsutum
  Clone ID: GOSHI-09MAY01-C625_1.pep
AGYFTCSRRMPGSLGYEEQDAKTFASWGIDYLKYDNCNNDGSKPTQRYPVMTRALMKAGRPIFFSLCEWGDMHPARPGAPLGNSWRTTNDISDNWESMISRADQNEIYAEYARPGGWNDPDMLEVGNGGMTKDEYIVHFSLWAISKAPLLLGCDIRNMTRDTMDIITNREVIAVNQDPYGFQAKKVRMEGDQEIWSAPLSGYKIAVVLLNRGPVRYSTTARWDDIGLDPKTVVQARDLWEHKTLKTTFVGNLTATLRPHSCKLYVLKPIA

SEQ ID NO: 72324 - protein, 375 aa, Gossypium hirsutum
  unsure (1)..(375): unsure at all Xaa locations
  Clone ID: GOSHI-09MAY01-C185_2.pep
MRPIFCGNFEYDARQSDLERLFRKFGRIERVDMKSGFAFIYMEDERDAEDAIRALDRTEFGQKGRRLRVEWTKHERGIXGPRVGGGGSRRSAANTRPSKTLFVINFDPYHTRTRDLERHFESYGKIVSVRIRRNFAFVQYDSQDDATRALEATNMSKLMDRVISVEYAVRDDDDRRNGYSPERGRDRSPERGRDRRRSPSPFRRERGSPDYGRGSSRSPYRKERGSPDYGRGHGPSLYKRDRGSPEYGQITSRSPQRRERTSFDHARGSSRSPFRKERASPENIQGSSRSPYRKEKRSAENDRSPSRSPYRRERPTSDNGRAPSHSPYGRERISPENGRGSSPGSMPERTASPYGGEAESPVNERYGTQSPAAEV

SEQ ID NO: 72325 - protein, 51 aa, Gossypium hirsutum
  Clone ID: GOSHI-09MAY01-C185_1.pep
MRPIFCGNFEYDARQSDLERLFRKFGRIERVDMKSGKYWFSIYIILIIGSM

SEQ ID NO: 72326 - protein, 48 aa, Gossypium hirsutum
  Clone ID: LIB3585-048-Q6-K1-D11.pep
QIMLNNAYYSVYIHTDYIVDPIIICRFEMTKVTKRKLKLLNKQSLIFL

SEQ ID NO: 72327 - protein, 94 aa, Gossypium hirsutum
  unsure (1)..(94): unsure at all Xaa locations
  Clone ID: LIB3828-014-Q1-K6-C6.pep
MRPIFCGNFEYDARQSDLERLFRXFGRIERVDMKSGFSWDFITQGFAFIYMEDERDAEDAIRALDRTEFGQKGRRLRVEWTKHERGIRRPDGGG

SEQ ID NO: 72328 - protein, 102 aa, Gossypium hirsutum
  unsure (1)..(102): unsure at all Xaa locations
  Clone ID: LIB3583-047-P1-K1-B2.pep
SVRPASAQRPHTQHFFGAXISWXCNGELLXILFHACDELPLLAFXKITLIPMASSSLIFLGQWFLSFLMTFSQPQIQTCFKVETLLTSWQKLQKYGESTLIP

SEQ ID NO: 72329 - protein, 210 aa, Gossypium hirsutum
  Clone ID: GOSHI-09MAY01-C155_2.pep
IQCYLAPSLPFHFVKLFSRSILPKVLLTLEKRGGGELNLVNLSDKPQWFLEISPEGKGPGVKVGGGGVADSDVIVGILEDKFPQPSLKTPPEFAHVGSKIFGTFITFLKSKDANDGSEQALVNELKALDEHLKGHGPFIAGEKITAVDLGLGPKLYHLEITLGHLVKWTVPESLTYVHNYMKSIFGRESFVKTNAAKEHVIEGWAPKVNA

SEQ ID NO: 72330 - protein, 212 aa, Gossypium hirsutum
  Clone ID: GOSHI-09MAY01-C155_1.pep
MALEICVKAAVGAPNVLGDCPFSQRALLTLEEKKISYNMHLINISDKPQWFLEISPEGKVPVVKFDDKWVADSDVIVGILEEKYPQPCLKTPPQFASVGSNIFGTFVTFLKSKDANDGSEQALLNELKALDEHLKAHGPFIAGEKISAVDLALGPKLYHLEVALGHFKKWTVPESLTNVRNYMKSIFSRESFVKTRAAKEYVIAGWAPKVNA

SEQ ID NO: 72331 - protein, 165 aa, Gossypium hirsutum
  unsure (1)..(165): unsure at all Xaa locations
  Clone ID: uC-gsflmaxxa090c07b1.pep
SWTPWGPGPQYPGRHTTPRCFVGGRPVLEMWVKLTAGAAYILGDCPFCQRVLVTLEEKNVAYRQNLWDLNDKPEWCLEISPDRTVPLVKFDDKWGADSDVIVGIIEDRLPAPCLKTPPESAHVGSKIFGTSISFXKSMDANNGAKHDWVIELKALLEHLKGNGPF

SEQ ID NO: 72332 - protein, 93 aa, Gossypium hirsutum
  Clone ID: LIB3146-061-Q1-K1-C10.pep
PRVRPRVRPLVRPRVRAHGPFIAGEKISAVDLALGPKLYHLEVALGHFKKWTVPESLTNVRNYMKSIFTRESFVKTRAAKEYVIAGWAPKVNA

SEQ ID NO: 72333 - protein, 121 aa, Gossypium hirsutum
  unsure (1)..(121): unsure at all Xaa locations
  Clone ID: LIB3493-001-P1-M1-H10.pep
MALEICVKAAAGAPDILGDXPFCQRVLLTLEEKKVPYKLNLVNLSDKPQWFLEISPERKVPVVKFDDKWVADSDVIVGIIEDKFPEPFLKTPPEXAHVGSKIFGTFISFFEXQGAXNGSED

SEQ ID NO: 72334 - protein, 105 aa, Gossypium hirsutum
  unsure (1)..(105): unsure at all Xaa locations
  Clone ID: LIB3585-030-P1-K1-G4.pep
NCFPGPWGQKVLLTLEEKNVPYKLNLVNLSDKPQWFLEISPEGKVPVVKFDDTWVADSDVIVGIIEDKFPEPSLKTPPEFSHVGSKIFCTFXLTFLRSKHANRLD

SEQ ID NO: 72335 - protein, 277 aa, Gossypium hirsutum
  Clone ID: GOSHI-09MAY01-C145_1.pep
MFCEGSVHCLSLAYVADNVPEGRRASAFGILSGIGSSAFVCGTLSTRFLSTASTFQVATAMGMLSAVYMRVFLPDSIVNDNLSTPIMSEGKLDGIVNQDEESDKKIQMFKTLPSIEDMLVLLKSSLTFSQAAIVSFFSTLSDVGLHASLLYYLKARFHFNKDQFADLMVITGIAGTVSQLLLMPILAPVLGEAKLLSIGLFFNCVHMILYSIAWSFWVPYAAALFSLLYVFSQPCIRSIVSKQVGPCEQGKAQGFISGIGSFANVASPLLFSPLTAL

SEQ ID NO: 72336 - protein, 115 aa, Gossypium hirsutum
  Clone ID: GOSHI-09MAY01-C115_7.pep
RCILLFNIKFTGLTSGFKCGINYQPPTVVPGGDLAKVQRAVCMISNNTAVAEVFARIDHKFDLMYSKRAFVHGYVGEGMEEGEFSEAREDLAALEKDYEEVGAEGVEDEEDAEDY

SEQ ID NO: 72337 - protein, 156 aa, Gossypium hirsutum
  Clone ID: GOSHI-09MAY01-C115_6.pep
MREIISVHIGQAGIQVGNSCWELYCLEHEIHPDGTMPSDTSVGVAHDAFNTFFSETGSGKHVPRAVFVDLEPTVIDEVRTGPYRQLFHPEQLISGKEDAANNFARGHYTIGKEIVDLCLDRVRKLADNCTGLQGFMVFNAVGGGTGSGLGSLLLER

SEQ ID NO: 72338 - protein, 127 aa, Gossypium hirsutum
  Clone ID: GOSHI-09MAY01-C115_4.pep
TGPEDPAPAVATIKTKRTVQFVDWCPTGFKCGINYQPPAVVPGGDLAKVQRAVCMISNNTAVAEVFARIDHKFDLMYSKRAFVHWYVGEGMEEGEFSEAREDLAALEKDYEEVGAEGGDDEEEGEEY

SEQ ID NO: 72339 - protein, 159 aa, Gossypium hirsutum
  unsure (1)..(159): unsure at all Xaa locations
  Clone ID: GOSHI-09MAY01-C115_3.pep
PTRPPSRPPTPAAVFEPSSMMAKCDPRHGKYMACCLMYRGDVVPKDVNAAVATIKTKRTVQFVDWCPTGFKCGINYQPPTVVPGGDLAKVQRAVCMISNNTAVAEXVFARIXHKFDLMYSKRAFVHWYVCEGMEKEEFSEAREDLAALEXDYKKVGAEV

SEQ ID NO: 72340 - protein, 169 aa, Gossypium hirsutum
  Clone ID: GOSHI-09MAY01-C115_2.pep
MREIISVHIGQAGIQVGNSCWELYCLEHEIHPDGTMPSDTSMGVAHDAFNTFFSETGSGKHVPRAVFVDLEPTVIDEVRTGPYRQLFHPEQLISGKEDAANNFARGHYTIGKEIVDLCLDRVRKLADNCTGLQGFMVFNAVGGGTGSGLGSLLLERLSVDYGKKSKLGL

SEQ ID NO: 72341 - protein, 449 aa, Gossypium hirsutum
  Clone ID: GOSHI-09MAY01-C115_1.pep
MREIISIHIGQAGIQVGNSCWELYCLEHEIQPDGMMPSDTSVGVANDAFNTFFSETGSGKHVPRAVFVDLEPTVIDEVRTGTYRQLFHPEQLISGKEDAANNFARGHYTIGKEIVDLCLDRVRKLADNCTGLQGFLVFNAVGGGTGSGLGSLLLERLSVDYGKKSKLGFTIYPSPQVSTAVVEPYNSVLSTHSLLEHTDVAVLLDNEAIYDICRRSLDIERPTYTNLNRLISQIISSLTTSLRFDGAINVDITEFQTNLVPYPRIHFMLSSYAPVISAEKAYHEQLSVPEITNAVFEPSSMMAKCDPRHGKYMACCLMYRGDVVPKDVNAAVATIKTKRTVQFVDWCPTGFKCGINYQPPTVVPGGDLAKVQRAVCMISNNTAVAEVFARIDHKFDLMYSKRAFVHWYVGEGMEEGEFSEAREDLAALEKDYEEVGAEGGDAEEEGEEY

SEQ ID NO: 72342 - protein, 69 aa, Gossypium hirsutum
  Clone ID: LIB3828-007-Q1-K6-A3.pep
KLINSIVLDCSLGFFLLNLQVSTAVVEPYNSVLSTHSLLEHTDVAVLLDNEAIYDICRRSLDIERPTYT

SEQ ID NO: 72343 - protein, 55 aa, Gossypium hirsutum
  Clone ID: uC-gsflmaxxa040f09b1.pep
PRVRPRVRPRVRGRVGEGMEEGEFSEAREDLAALEKDYEEVGAEGGDDEEEGEEY

SEQ ID NO: 72344 - protein, 124 aa, Gossypium hirsutum
  unsure (1)..(124): unsure at all Xaa locations
  Clone ID: AI054514.1.pep
MREIISIHIGQAGIQVGNSCWELYCLEHEIQPDGMMPSDTSVGVANDAFNTFFSETGSGKHVPRAVFVDLEXTVIMKLXTGTYRQLFHPEQLISGKEDAANNFARGHYTIXKEMWDLCLDXCRK

SEQ ID NO: 72345 - protein, 117 aa, Gossypium hirsutum
  unsure (1)..(117): unsure at all Xaa locations
  Clone ID: uC-gsronu33B044g03b1.pep
PILPDFSAIKPGIAPDLKFGASGPFTDVPWGTGSGTGSHVMNLLSVDYGKKSKLGFTIYPSPQVPTAVGEPYNSGQGTYLPXLEHTXMWVVLLDNEAIYDICRKXLDIERPTYTNLK

SEQ ID NO: 72346 - protein, 125 aa, Gossypium hirsutum
  unsure (1)..(125): unsure at all Xaa locations
  Clone ID: uC-gsflnu33B136e02b1.pep
MHRYQTHTNSFFHALTNIPMHESSLRVHEIEFVFNAVGGGTGSGLGSLLLERSPEDYGKKSKLGFTMYPSPQVSTAVVEPYNRVLTTHSLVEHXTDVAVLLDNEAIYDICRRCLDFERPXYTNLN

SEQ ID NO: 72347 - protein, 68 aa, Gossypium hirsutum
  unsure (1)..(68): unsure at all Xaa locations
  Clone ID: LIB3493-030-P1-M1-F7.pep
ELYCLEHEIYPDVTFHYDTXDGISHDAINTLFCXAGSRKHVPRAVYLDLEPTDIYELRTGPYXQLFHP

SEQ ID NO: 72348 - protein, 68 aa, Gossypium hirsutum
  Clone ID: AI725754.1.pep
EKAYHEQISVPEITNAVFEPSSMMAKCDPRHGKYMACCLMYRGDVVPKDVNAAVAIIQTARCTLARSP

SEQ ID NO: 72349 - protein, 1250 aa, Gossypium hirsutum
  unsure (1)..(1250): unsure at all Xaa locations
  Clone ID: GOSHI-09MAY01-C125_1.pep
MTPSAGSFSGDRDDDGDATKKKKKQRKVPLLKLFSFADFYDHVLMGLGSLGACVHGASVPVFFIFFGKLINIIGMAYLFPKEASHKVAKYSLDFVYLSVAILFSSWIEVACWMHTGERQAAKMRMAYLKSMLNQDISLFDTEASTGEVISAITSDIIVVQDALSEKVGNFMHYISRFIAGFSIGFARVWQISLVTLSIVPLIALAGGIYAYVATGLIARVRNSYVKAGEIAEEVIGNVRTVQAFAGEERAVKSYKDALMNTYTYGKKAGLTKGLGLGSLHCVLFVSWALLVWFTSIVVHKNIANGGDSFTTMLNVVISGLSLGQAAPDISAFIRARAAAYPIFEMIERNTVSKTSSKTGRKLSKVEGNIELKNVSFSYPSRPDVVIFDRFCLNIPTGKIVALVGGSGSGKSTVISLIERFYEPLAGEILLDGNNIKGLDLKWLRQQIGLVNQEPALFATTIRENILYGKDDATVDEITRAAKLSEAIAFINNLPDRFETQVGERGIQLSGGQKQRIAISRAIVKNPPILLLDEATSALDAESEKSVQEALDRVMVGRTTVVVAHRLXSTIRNADVIAVVQNGKIVETGTHDELISNPNSTYSSLVQHQETSPLQRYPSQGPTLSRPLSVSYSRELSRTRTSFGASFRSERDSVSRAGADGIDAGKQPYVSPGRLYSMIGPDWYYGFFGTVTALIAGAQMPLFALGVSQALVAYYMDWETTCHEVKKIAILFCCASVITVIVHAIEHLCFGIMGERLTLRVREGMFSAILKNEIGWFDDLNNASSMLASRLETDATFLRGVVVDRTSILIQNVGLVIAAFIIAFILNWRITLIILATFPLIISGHISEKLFMQGYGGNLSKAYLKANMIAGEAVSNMRTVAAFCAEEKILDLYARELIEPSERSFKRGQIAGIFYGISQFFIFSSYGLALWYGSVLMGKELASFKSVMKSFMVLIVTALAMGETLALVPDLLKGNQMVASVFEIMDRKTQVVGDAGEELTNVEGSIELKGVHFSYPSRPDVVIFKDFDLKVRSGKSMALVGQSGSGKSSVLALILRFYDPTSGKVMIDGRDVKKLKLKSLRKHIGLVQQEPALFATSIYENILYGKEGASESEVVEAAKLANAHSFISSLPEGYSTKVGERGVQLSGGQKQRVAIARAVLKNPEILLLDEATSALDVESERVVQQALDRLMRNRTTVMVAHRLSTIKNADRISVIQGGRIIEQGTHSSLIENRNGPYFKLINLQQQQQMEQ

SEQ ID NO: 72350 - protein, 221 aa, Gossypium hirsutum
  unsure (1)..(221): unsure at all Xaa locations
  Clone ID: GOSHI-09MAY01-C395_1.pep
GRVGGSIIGYVDGTLDKPAYTYFKFXIIHIAIGNIANVALVLSASLWXDTCNSFRDAETCCNQGTAYISFGPAVAPVILYTYVFHMLAPPPEGTFDNEDGNVPLKIPQKDGSPENVPLLEQEASSMDSDNSNKGKILAMVIGAVPVLKKIIFTRDAPLYFFTDSCIILGKAMIPCILLALGGNPVDGPGPGSSRIGVRTLVAIIIGRLILVPPARLGIVTL

SEQ ID NO: 72351 - protein, 172 aa, Gossypium hirsutum
  Clone ID: GOSHI-09MAY01-C355_1.pep
MAASVDPLVVGRVIGDVVDMFVPTVTMSVYYGSKHVSNGCDIKPSMAINPPKVAIDGLPDQFYTLVMTDPDAPSPSEPTMREWVHWIVSDIPGGTNPTRGKEILAYMGPRPPVGIHRYILVLFQQKGPLGAVQQPATRANFSTRFFADHLNLGLPVATVYFNAQKEPVSRRR

SEQ ID NO: 72352 - protein, 102 aa, Gossypium hirsutum
  Clone ID: LIB3196-050-P1-M1-D4.pep
MGSLVRCFPPPLVFEKIFCNHVADHFVNHHAICFRRCFRIVSDIPGGTNPTRGKEILAYMGPRPPVGIHRYILVLFQQKGPLGAVQQPATRANFSTRFFADH

SEQ ID NO: 72353 - protein, 95 aa, Gossypium hirsutum
  Clone ID: GOSHI-09MAY01-C345_3.pep
PAVPILSVVVPVLTTDSFDWTCSDEGPARHSLIYRGLVPILAEGSAKATDAESTEVILEAAMKSATEKGLCKPGDAIVALHRIGAASVIKICIVK

SEQ ID NO: 72354 - protein, 317 aa, Gossypium hirsutum
  Clone ID: GOSHI-09MAY01-C345_2.pep
SYDDILGWGVPNRTDVAALSFVRKGSDLVNVRKVLGPHAKKIQLMSKVENQEGVINFDEILRETDAFMVARGDLGMEIPVEKIFLAQKMMIYKCNLAGKPVVTATQMLESMIKSPRPTRAEATDVANAVLDGTDCVMLSGESAAGAYPELAVKIMARICIEAESSLDYGAIFKEMIRSTPLPMSPLESLASSAVRTANKAKAKLIVVLTRGGTTAKLVAKYRPAVPILSVVVPVLTTDSFDWTCSDEGPARHSLIYRGLVPILAEGSAKATDAESTEVILEAAMKSATEKGLCKPGDAIVALHRIGAASVIKICIVK

SEQ ID NO: 72355 - protein, 312 aa, Gossypium hirsutum
  Clone ID: GOSHI-09MAY01-C345_1.pep
MANIDIDGILKELPNDGRIPKTKIVCTLGPASRSVPMIEKLLRAGMNVARFNFSHGSHEYHQETLDNLRSAMHNTGILCAVMLDTKGPEIRTGFLKDGKAVQLKEGQEITVTTDYEIKGDEKMICMSYKKLAVDLKPGNTILCADGTITLSVLSCDPAAGTVRCRCENTAMIGERKNVNLPGVVVDLPTLTEKDKEDILGWGVPNSIDMIALSFVRKGSDLVNVRKVLGPHAKKIQLMSKVENQEGVINFDEILRETDAFMVARGDLGMEIPVEKIFLAHKMMIYKCNLAGKPVVTATQMLESMIKSPRQPG

SEQ ID NO: 72356 - protein, 141 aa, Gossypium hirsutum
  unsure (1)..(141): unsure at all Xaa locations
  Clone ID: LIB3583-012-P1-K1-G1.pep
MPTIFVDGISSEVPSAGHVPKTKTVSTLGPAPRSYFTNXKRSEAYTINLLCHTSHCCNQYRQXTRVSLRTAMHNIRILCAVMLDTKGPEIRTGFLKDGKAVQLKDGQEITVTTDYDINGYEKMISMSYKKLAVDLKPANTI

SEQ ID NO: 72357 - protein, 138 aa, Gossypium hirsutum
  Clone ID: LIB3585-004-P1-K1-H6.pep
HQETADIDIDGILKELTNDGRIPKTKIVCTLGPASRSVPMIEKLLRAGMNVARFNFSHGSHEYHQETLDNLRSAMHNTGILCAVMLDTKGPEIRTGFLKDGKAVQLKEGQEITVTTDYDIKGYEKMISMSYKKLACDL

SEQ ID NO: 72358 - protein, 119 aa, Gossypium hirsutum
  Clone ID: LIB3147-009-Q1-K1-G5.pep
DAWADAFAVAWADAWAGEKIFLAQKMMIYKCNLAGKPVVTATQMLESMIKSPRPTRAEATDVANAVLDGTDCVMLSGESAAGAYPELAVKIMARICIEAESSLDYGAIFKEMIRSTSLS

SEQ ID NO: 72359 - protein, 144 aa, Gossypium hirsutum
  Clone ID: GOSHI-09MAY01-C375_1.pep
MFENGKLFIGGISWDTNEGHLKEYFNTFGEVIEAVIMKDRTTGRARGFGFVVFADPIVAERVVKEKHSIDGRMVEAKKAVPRDDQNVMSRSTSSIHGSPGPGNARQIFVGGLASTVTESDFKKYFDQFGNITDVVVMYDQNTQR

SEQ ID NO: 72360 - protein, 190 aa, Gossypium hirsutum
  Clone ID: GOSHI-09MAY01-C315_1.pep
MASVTESIAALSFPTTSRSRTSFSRPAMMISQPAVSSYSCRGLPEFKGLKVQSYSLFSFASTNSRYPRVSKHSGRIVCEAQETAIDIPAVTDETWQSLVLNADGPVLVEFWAPWCGPCRMIDPVIGELAQQYAGKLKCFKLNTDDSPSIASQYGIRSIPTLMIFLNGEKKVPLIGAGPKTTLSASIERFL

SEQ ID NO: 72361 - protein, 40 aa, Gossypium hirsutum
  Clone ID: GOSHI-09MAY01-C305_2.pep
DAPIICLSSQDVPTPYAGTLEEWTVVQPAQIVAAVEQLCQ

SEQ ID NO: 72362 - protein, 408 aa, Gossypium hirsutum
  Clone ID: GOSHI-09MAY01-C305_1.pep
MAAIFQGVGAAAALSSSPSNSFDSKKFVSSPCRPFSVRKGASFAVVRSDGRVNLNPKGRRAQQLISNAVATKSDSAAASSSSKPGHELLLFEALQEGLEEEMERDPRVCVMGEDVGHYGGSYKVTKGLAKKFGDLRVLDTPIAENSFTGMGIGAAMTGLRPVVEGMNMGFLLLAFNQISNNCGMLHYTSGGQFTIPIVIRGPGGVGRQLGAEHSQRLESYFQSIPGIQMVACSTPYNAKGLMKAAIRSENPVILFEHVLLYNLKERIPDEDYICNLEEAEMVRPGEHVTILTYSRMRYHVMQAAKTLVNKGYDPEVIDIRSLKPFDLYTIGNSVKKTHRVLIVEECMRTGGIGASLTAAITENFHDYLDAPIICLSSQDVPTPYAGTLEEWTVVQPAQIVAAVEQLCQ

SEQ ID NO: 72363 - protein, 51 aa, Gossypium hirsutum
  Clone ID: LIB3583-052-P1-K6-G11.pep
LRLPGRGRGYLDAPIMCLSSQDVPTPYAGTLEEVTVVQPAQIVTAVEQLCQ

SEQ ID NO: 72364 - protein, 117 aa, Gossypium hirsutum
  Clone ID: LIB3197-022-Q1-M1-D8.pep
HYIRHESYFQSIPGIQMVACSTPYNAKGLMKAAIRSENPVILFEHVLLYNLKERIPDEDYICNLEEAEMVRPGEHVTILTYSRMRYHVMQAAKTLVNKGYDPEVIDIKSLKPFDLYT

SEQ ID NO: 72365 - protein, 182 aa, Gossypium hirsutum
  Clone ID: LIB3543-028-Q1-K6-G3.pep
MERDPRVCVMGEDVGHYGGSYKVTKGLATKFGDLRVLDTPIAENSFTGMGIGAAMTGLRPVVEGMNMGFLLLAFNQISNNCGMLHYTSGGQFTIPIVIRGPGGVGRQLGAEHSQRLESYFQSIPGIQMVACSTPYNAKGLMKAAIRSENPVILFEHVLLYNLKERIPDEDYICNLEEAEMVR

SEQ ID NO: 72366 - protein, 135 aa, Gossypium hirsutum
  unsure (1)..(135): unsure at all Xaa locations
  Clone ID: uC-gsronu33B141f06b1.pep
SIFLFQKKKKKKKKKKKKKKKKKKKKKKKKKKKKKKKKKKKKKKDKNGLRQKKKKMNMGFLLLAFKKISNNCGMLHYTSGGQFTIPIVIRGPGGXVGRQLXTKNSQRLESYFQSVPGIXKAACLSPYNAKGLMKA

SEQ ID NO: 72367 - protein, 53 aa, Gossypium hirsutum
  Clone ID: LIB3146-046-Q1-K1-E3.pep
LIAAITENFYFYLDAPIMWLCSQDVPTPYAGTLEEETVVHPAQIVTAVEHLCQ

SEQ ID NO: 72368 - protein, 321 aa, Gossypium hirsutum
  unsure (1)..(321): unsure at all Xaa locations
  Clone ID: GOSHI-09MAY01-C335_1.pep
KIRQLQSEDMLKGKELPVAFVTFKSRWGAAMAAQTQQHTNPLLWITEMAPEPSDVSWRNLSIQYKILPVYKIGGILAATLLTIFFAVPVTAVQGIAKFEKLKKWFPPAMAIEFMXELFFFSFHYLLDSTLSLRYGDVSGTGILFLWFFELTYFIEPXPGLSSVVTGYLPSAVLKGFIYIGPFAMLGIAKLGGSISKSKEEIKACNMVFYFLVGNVFFPSSISGSLLDEIGEYVSYPKNLPKHLAALVSSEADFFMTYILTEGLSGFSLEVLXPRLLIWDFIKSLTYWRXKEKDLYLYSLXYYRVNHIVYLSILIGIVYADI

SEQ ID NO: 72369 - protein, 173 aa, Gossypium hirsutum
  unsure (1)..(173): unsure at all Xaa locations
  Clone ID: LIB3582-021-P1-K1-H12.pep
HACSKQEVCEACKSRWGAAMAAQTQQHTNPLLWITEMAPEPSDVSWRNLSIQYKILPVYKIGVILAATLLTIFFAVPVTAVQGIAKFEKLKKWFPPAMAIEFXLSSVVTGYLPSAVLKGFIYIVPFAMLGIAKLGGSISKSKEEIKACNMVFYFLLGNVFFLSLISGSLLDEI

SEQ ID NO: 72370 - protein, 311 aa, Gossypium hirsutum
  Clone ID: GOSHI-09MAY01-C255_2.pep
PTRPSTSEQDGSGKGGEEEDDDSDNDDAAEAEDADESDLDLAWKMLDVARAISEKQQLGDTMEIADILSALAEVALEREDIESSLGDYQKALSILLRLVEPDHRQIAELNFRICMCLEIGSKPQEAVPYCQKAISVCKSRLERLRNEVNNSLESASSVAASELDNGVQQSSNGYQTVSSVKDKEAEINTLAGLAEDLEKKLEDLQQLVSNPKSIVADPRGRASARAWGGEKSPSPSVLSSSQMAPANSDGHFDSPTVSTANTSGVPAVTHLGIVGRGVKRVLTSTAMVESNPIKKPAIEPSSDKGDSSSAS

SEQ ID NO: 72371 - protein, 236 aa, Gossypium hirsutum
  Clone ID: GOSHI-09MAY01-C255_1.pep
EAGFAAEGAERGSRAFKEDDFAEAADCFSRALEIRVAHHGELATECIKAYYLYGRALLGEAQEEADPLGSVPKEGEAQQDAKKEGSFKSALTRETSVASVSSTSEQDGSGKGGEEEDDDSDNDDAAEAEDADESDLDLAWKMLDVARAISEKQQLGDTMEIVDILSALAEVALEREDIESSLGDYQKALSILLRLVEPDHRQIAELISIDGLELLNPKQSSFKTYIASGEAKMIPF

SEQ ID NO: 72372 - protein, 72 aa, Gossypium hirsutum
  Clone ID: GOSHI-09MAY01-C265_1.pep
KAWECWKMCLIVQNSIFEVDELTAFRSFFIFDDSGFGVIGEPSLTLHAQKQNWHISDTRAPFLVLRELCGDG

SEQ ID NO: 72373 - protein, 287 aa, Gossypium hirsutum
  Clone ID: GOSHI-09MAY01-C215_1.pep
MEGQGEDVRLGANKYRERQPIGTAAQTQDTKDYKEPPAAPLFEPAELSSWSFYRAGIAEFVATFLFLYITVLTVMGVAKSSTKCSTVGIQGIAWAFGGMIFALVYCTAGISGGHINPAVTFGLFLARKLSLIRAVFYMIMQCLGAICGAAVVKSFQKTQYERLGGGANTVSSGYSKSSGLGAEIVGTFVLVYTVFSATDAKRNARDSHVPILAPLPIGFAVFLVHLATIPVTGTGINPARSLGAALIYNKDQAWDDHWIFWLGPFIGAALAALYHQIVIRAIPFKSK

SEQ ID NO: 72374 - protein, 634 aa, Gossypium hirsutum
  Clone ID: GOSHI-09MAY01-C235_1.pep
MGKSSKKSNPKVEAAPAVAAPKSGKKGKRDAEETPEKQVAAKKQKKNDGVAQAIVKKEVEAKTQKKKEETSSSSDDSSESEDEPAPVKKQAAVVKNGSVPAKKAKQASSSDSSDSSSEDEEAPAKNTKPVVAKKAAVPAAKTVKADSSSDSSSDDDSDEDDEPAAKKEVAAAKNGAAPVKKAESSDSSDADSSSDEDDEKSKPAPKKAPTAVNKKESSDSSESDSSSDEDVKPPPKNVPSATAKAKTESSDSSSEEDSDVEDVQKAPAVKKASAPPPKKVEDSSSDSSDDSESEDEEAPKKEAKVAKKASSSEEEESEESDDDEESDEEEAPKKKDTDVEMVDATTPAKQDLKSAKKAPQTPVTPQTQSTGSKTLFVGNLSFQIEDADVRNFFKGAGEVVEVRFSSDAEGNFKGYGHVEFATAEAAQKALELNGEYLMNRAVRLDLARERGAYTPYSGNGNNSFQKGGKGQSRTIFVKGLDASLDEDTIRNSLQEHFGSCGEISRVAIPTDRDSGAVKGFAYLDFKDEGSLNKALELDGSKLNNQSLSVDEAKPKGDFGSGRGGGRSGGWSGGRDGSGRGGRGGRGGRDGGGPGGRRGGGGRFGGGRGGRGTPYNKPNLAAAGTGRKTTFNDED

SEQ ID NO: 72375 - protein, 86 aa, Gossypium hirsutum
  Clone ID: AI055389.1.pep
MGKSSKKSNPKVEAAPAVAAPKSGKKGKRDAEETPEKQVAAKKQKKNDGVAQAIVKKEVEAKTQKKKEELGSSSDDSSDPKMNLNQ

SEQ ID NO: 72376 - protein, 344 aa, Gossypium hirsutum
  unsure (1)..(344): unsure at all Xaa locations
  Clone ID: GOSHI-09MAY01-C225_1.pep
LFLRACERDASXMSSFEGCLFPSLQTILANDVTEFLPYAFQLLAQLVELNKPPISPSYMQIFVLLLSPDSWRRSSNVPALVRLLQAFLQKAPNEVNQEGXLNQVLGIFNMLVSSASSDEQGFYVLNTVIENLEYGVISPYMGNIWNVLFMRLQNNRTVKFQKSLVIFMSLFLIKHGATNLVDTMNAVQDNIFLVILEQFWIPNLKLITGAIELKLTAVASTRLICESPVLLDPAAARLWGKMLDSIVTLLSRPEQDRVEEEPEMPDIAENVGFTATFVKLYNAGKREEDPLTDVKDPKQFLVASLAKLSALTPGGYPQIINENLEPANQAALLQLCGIYNCQIV

SEQ ID NO: 72377 - protein, 64 aa, Gossypium hirsutum
  Clone ID: GOSHI-09MAY01-C38996_1.pep
AGSTSLSTPEGEVNSLMQQVADDYGLEVSVGLPNPAAQAVPTKTEEKGDEDDLSRRLAELKARG

SEQ ID NO: 72378 - protein, 170 aa, Gossypium hirsutum
  unsure (1)..(170): unsure at all Xaa locations
  Clone ID: GOSHI-09MAY01-C38956_1.pep
MKVTKKKSDATAQRAWRLLRLFLLWTRKSGVLRRRLMMELRLVPKFLKGLGHTSPSPPGQIYFKERQLXSFDETPIFQVKMHRPASMRFLLPCMSTQDVDFDYDFGIDGEDGVYGYDSGIKSHSCEKQGEEQGNDKDRERTACTLPLEEEEIDSKAGKFIANSYEQMKLL

SEQ ID NO: 72379 - protein, 116 aa, Gossypium hirsutum
  unsure (1)..(116): unsure at all Xaa locations
  Clone ID: AI055128.1.pep
MKVTKKKSDATAQRAWRLLRLFLLWTRKSGVLRRRLMMELRLVPKFLKGLGHTSPSPPGQIYFKERQLSFDETPIFQVKMHRPASMRFLLPCMSTXDVDFDYDFGIDGEGRSLRVR

SEQ ID NO: 72380 - protein, 124 aa, Gossypium hirsutum
  unsure (1)..(124): unsure at all Xaa locations
  Clone ID: LIB3829-023-Q6-N6-C4.pep
FKERQLSFDETPXFQVKMHRPASMRFLLPCMSTQDVDFDYDFGIDGEDGVYGYDSGIKSHSCEKQGEEQGNDKDRERTACTLPLEEEEIDSKAGKFIANFYEQMKLQRQISYLEYTEMLNRGAC

SEQ ID NO: 72381 - protein, 266 aa, Gossypium hirsutum
  unsure (1)..(266): unsure at all Xaa locations
  Clone ID: GOSHI-09MAY01-C38916_1.pep
MVPWGGLTCCLSAAALYLLGISSGRDAQILKTVTRVNQLKELAQLLHIESRVIPLIVTISGRVGSETPINCEHSGLRGVIVEETAEQHFLKHNDAGSWIQDSALMLSMSKEVPWYLDDGTGRAYVVGARSAAGFALTVGSALAADSGRSIVRGTLDYLQGLKMLGVKRIERVLPIGSSLTVVGEAVKDDVGTIRIQKPHKGPFYVSPKSIDQLISNLGKWARLYKYASFGLTIFGAFLXKITKHAILYFLERRHRRELQRRVLAAA

SEQ ID NO: 72382 - protein, 86 aa, Gossypium hirsutum
  Clone ID: LIB3543-052-Q1-K1-A1.pep
REGNSKRNPNFTINQHQILPKKIEKEKEKKANRIPDNECLKTNESRVKQEYRKEKENERKKESKSEGEWVKKGPRHKKLVKLKAFI

SEQ ID NO: 72383 - protein, 125 aa, Gossypium hirsutum
  Clone ID: GOSHI-09MAY01-C38866_1.pep
GRVGSLDAHAQKALDCPCVSELRNGACGTQFTEAFLCFLKSTAEEKGSDCVHPFVALQTCIKGNPDAFPKNIIEDKEVKKEEEPIQEYKIYPPIWFKESHKPKPKPKPELYHSCSFFFIAYAIFD

SEQ ID NO: 72384 - protein, 83 aa, Gossypium hirsutum
  Clone ID: LIB3147-001-Q1-K1-C2.pep
SKLCHAMQSLTCPVWDILIYTRESYSIKKKKKKKKKEQKKKKKRKKKKEKNKINLSRKINTNLKVWTKKKGGALLRVPSLLTL

SEQ ID NO: 72385 - protein, 49 aa, Gossypium hirsutum
  Clone ID: LIB3147-001-Q1-K2-C2.pep
IKTRLCCKPTNINMMLRHKAGTKVKTELKMNSTLTPPKPMCIHFIRTRG

SEQ ID NO: 72386 - protein, 112 aa, Gossypium hirsutum
  Clone ID: GOSHI-09MAY01-C38706_1.pep
KKGFFQISRLWFANFLSIFRSKPAFILFIYKQPRLCLCPRKKKEPKKKTNEKLIAKFCMGYEQMGMWIFLQTPMQGHSSIHYYHIHEVGNCNGINNLGPSSSGALFFREALE

SEQ ID NO: 72387 - protein, 46 aa, Gossypium hirsutum
  Clone ID: GOSHI-09MAY01-C38736_1.pep
GDHDVTPTVFLKKKQPFLLLVTLIQKLAQGINPENMSTVQIYGHQK

SEQ ID NO: 72388 - protein, 54 aa, Gossypium hirsutum
  Clone ID: GOSHI-09MAY01-C38646_1.pep
VASLTSNKKSVRNHCLPPILKKCNRNQFQKALQSCFRTWDFVCCRFKHVHLFFP

SEQ ID NO: 72389 - protein, 184 aa, Gossypium hirsutum
  Clone ID: GOSHI-09MAY01-C38196_1.pep
GILCRHVLRVLSSNNCFHIPDPYLPSRWRLNSSSSINPLSNATREHSEKIQLLESLTSALIAESVETKERLDVACEQTAMVLSRIKDLPRTTQSANDIVFNCPSDLILPEVEDADGIVQSFTMGTSHEPLTSGKLKDRRPRDGIDITLKRRHYSDSCCGHFEHDSSDCPMMEGVNLNGDALGYI

SEQ ID NO: 72390 - protein, 51 aa, Gossypium hirsutum
  Clone ID: GOSHI-09MAY01-C38136_2.pep
ALMVDHISQCEDAFEEAKINSPIPELHSLLGKMIFNSINIGVDMVDFENKN

SEQ ID NO: 72391 - protein, 209 aa, Gossypium hirsutum
  Clone ID: GOSHI-09MAY01-C38136_1.pep
MEMKLLTLLILFSFSAYTAAPLVALASSPSESQSPSSSEVQPPQTVSKIPSNANPKLKKICQEVNHPTECVTTAGPFLGETADISPVTVLQAEIEAIDSKAKEAFAKATKLAADPTTSKTITFPLNICIDGYKAILKNKQAILDAISKRDADDLNMELSSNVDHISQCEDAFEEAKINSPIPELHSLLGKIIFNSINIGVDMVDFENKN

SEQ ID NO: 72392 - protein, 151 aa, Gossypium hirsutum
  unsure (1)..(151): unsure at all Xaa locations
  Clone ID: GOSHI-09MAY01-C38086_1.pep
IGVGYALMIAPVYTAEVSPASSRGFLTSFPEVFINGGILLGYVSNYAFSKLPTDLGWRFMLGVGAIPSVFLAVGVLAMPESPRWLVMQGRLGEAKKVLDKTSDSIEEAQLRLSEIKEAAGIPQVCTDDVVKVXKKRSHGKGVLKEILLYPT

SEQ ID NO: 72393 - protein, 237 aa, Gossypium hirsutum
  unsure (1)..(237): unsure at all Xaa locations
  Clone ID: GOSHI-09MAY01-C38076_1.pep
PPVPPIIAALCFEHAHLIXWDEVHSGQAFDPDNPDHMKWVYDEAVKRAELFGIPGVTYSLTQGVVKNIIPAIASTNAIISAACTLETLKIASGCSKTLSNYLTYNGVEGLHTKVTEFVKDKDCLVCGPGVLIELDTTVTLKKFIDMLEEDPRVLMTKASITYHGKNLYMQAPPVLEEMTRSNLELPLYDLMDKIPKDVLHATGTINKDDKKSSGLRKLRVVFKGIDGVADMDMAGGA

SEQ ID NO: 72394 - protein, 144 aa, Gossypium hirsutum
  Clone ID: uC-gsflmaxxa090d06b1.pep
MQPIYCCMYLWKLLKDCTQDAVKTLSNYLTYNGVEGLHTKVTEFVKDKDCLVCGPGALIELDTAVTLKKFVDMLEEDPKVLMTKASITYHGKNLYMQAPPVLEEMTRSNLELPLYDLMDKTPKDVLHATGTINKDDKKSSGLRK

SEQ ID NO: 72395 - protein, 93 aa, Gossypium hirsutum
  Clone ID: GOSHI-09MAY01-C38396_1.pep
QEQNSDKTLWKLGTLPVGLLAFYGLTEPLDRRWHVLGLGYDLNIDNRLIESAAVIHFNGNMKPWLKLAIGRYKPLWERYINLSHPYLQECVTS

SEQ ID NO: 72396 - protein, 93 aa, Gossypium hirsutum
  unsure (1)..(93): unsure at all Xaa locations
  Clone ID: LIB3584-048-P1-K2-F1.pep
KAILVQGLKDVGFKVFPSSGTYFVVVDHTPFGLENDIAFCEYLIKEVXVVAIPTSVFYLNPDDGKNLVRFTFCKDEETLRSAVERMKEKLKKK

SEQ ID NO: 72397 - protein, 46 aa, Gossypium hirsutum
  Clone ID: LIB3145-053-Q1-K1-E12.pep
GVVAIPTSVFYLNPDDGKNLGRFTFCKDEETLRSAIERMKEKLTKK

SEQ ID NO: 72398 - protein, 105 aa, Gossypium hirsutum
  Clone ID: GOSHI-09MAY01-C38306_1.pep
FKLSHVLKVLGFNPMVCIYKKPFDFHKLCISVPHIVTISSTDYCHHHTLCRQIPSTTLLHTPASTKVPRQCSVISTLQQEEVDVSKIFRKKEDSSSTARFLVCLS

SEQ ID NO: 72399 - protein, 139 aa, Gossypium hirsutum
  Clone ID: GOSHI-09MAY01-C38236_1.pep
MADGYWNRRQPNPPMLSSGGMLKRPRTDYDAPPSGPRSALEMPSYLARDDDHGGHLSVRDTNSIGSAYDRYLQSAKLSSFTSGEASAFGGSGRAVGGAMPVHPIADPPLMGRLGSAAPDLSPNGHNIGYSGQHPVDAIA

SEQ ID NO: 72400 - protein, 73 aa, Gossypium hirsutum
  Clone ID: GOSHI-09MAY01-C39816_1.pep
PPLGGARDIFAIQRKHIYIDGAKPVRWMYLAYRSHIHYVDTTATIFKRSNTSPLNRFDRALLLHCLQEAEPSS

SEQ ID NO: 72401 - protein, 282 aa, Gossypium hirsutum
  Clone ID: GOSHI-09MAY01-C39516_1.pep
LKRILTIPLANSRPQDALVWRGDNTGTYTAKSGYRWLITEGGTRIHNELPTNFFTKLWELQVPCKIRIFMWRIANNYLPTLHNLKARQLAVNPLCPVCRSEEESVDHLFRECSFTQQVLRGSEMPFSTCNREANWKTWLVADFENKSLEACKIKSIAYWAIWYNRNKLYHERVREQVHEVVGFIKAYYTEISSMGEILQNTHDMKDSVWKPPDNDTIKINFDASFNRITRSSISGIIARDKEGLPMAACTFPWDNISDPFMAEARACLQAIVMAEELGFQDV

SEQ ID NO: 72402 - protein, 104 aa, Gossypium hirsutum
  Clone ID: GOSHI-09MAY01-C39536_1.pep
QMNSLDSTYREISDIYDVNGGKGLSRSCIQKLPMQEFHSIERIKSREESYCSICIQGLVRGEMARNLPRCGHVFHLKCIDEWLSRQGTCPMCREHVLDDDGEEV

SEQ ID NO: 72403 - protein, 117 aa, Gossypium hirsutum
  unsure (1)..(117): unsure at all Xaa locations
  Clone ID: LIB3147-010-Q1-K1-F5.pep
KNEYVSLEQYIRSPLLNCFEISKSCYKTLVQWSMTLYIHRISGQKRRTQYFVNQHFLIYTSSPSSSRTCSLHMGQVPCMISQSSMHFKRNTRPRLSVFHAKTRRSRGRTRGRXRGRP

SEQ ID NO: 72404 - protein, 173 aa, Gossypium hirsutum
  unsure (1)..(173): unsure at all Xaa locations
  Clone ID: GOSHI-09MAY01-C39526_1.pep
MGLISGILLGIIFGISLMAGWRHMMRYRSTKRIAKAADIKVLGALNRDDLKKICGDNFPEWISFPVYEQVKWLNKQLSKLWPSVAEAASAVIKESVEPLLEEYRPPGITSLKFSKLSLGTVAPKIEGVRVQXLKKGSITMDIDFRWGXGDXSIILGVETALVASIPIQLKDLH

SEQ ID NO: 72405 - protein, 79 aa, Gossypium hirsutum
  Clone ID: GOSHI-09MAY01-C39486_1.pep
RPKPLTLSLFHQKIKPNPNSIQPQPAPQPPGLSARVCQRLSPSTHATHVSSSAPGFGRHSRWLHGGHDGGGMRVLGSKP

SEQ ID NO: 72406 - protein, 79 aa, Gossypium hirsutum
  Clone ID: LIB3147-009-Q1-K1-H3.pep
DAWAEGKGFSARVATLAPSCRRRRAHREAIASGARNQVNRFFASYYDFLKKCDTKRGQTKDDNSEKKGQQRPSNRSLIL

SEQ ID NO: 72407 - protein, 84 aa, Gossypium hirsutum
  Clone ID: GOSHI-09MAY01-C39756_1.pep
LPLNIKHAFLFPNFLSPIYLCNKPTPPLPWESAKPATPPPIIFNPSPNSYMHIFIYLYSRIYITLQGQFTLKTLTLQPIYILRF

SEQ ID NO: 72408 - protein, 141 aa, Gossypium hirsutum
  unsure (1)..(141): unsure at all Xaa locations
  Clone ID: GOSHI-09MAY01-C39776_1.pep
LKKRCFTSRRRARVPKGNRLLVSITVLGSAGPIRFVVNEEDXVSSVIDTALKAYAREGRRPVLGSAISGFFLYCPSAGSDALNPWETIGSQGARNFILCRKPSNEKMEDDGRSANSVTGKGSGNWKAWINKSLNLKISSHY

SEQ ID NO: 72409 - protein, 46 aa, Gossypium hirsutum
  Clone ID: GOSHI-09MAY01-C39156_2.pep
IETATGAKKDCFGFIEVIVHKDDTSKELLEWGSRVSAANSRPPNPQ

SEQ ID NO: 72410 - protein, 281 aa, Gossypium hirsutum
  unsure (1)..(281): unsure at all Xaa locations
  Clone ID: GOSHI-09MAY01-C39156_1.pep
AGPIYNDYSSVGCCLLLKKEKAIIVQPDRVVIGNGPAFGCVLMKDFLRELAKRLKHNNTAYENYHRIFVPEGQPLKAAPKDPLRVNVLFQHIQKMLSSDSXVIAETGDSWFNCQKLKLPAGARAAFQMQYGSIGWSVGATLGYAQAVPEKRVIACIGDGSFQVTAQDVSTMLRCGQKTVIFLINNGGYTIEVEIHDGPYNVIKNWNYTALVDAIHNGEGKCWTAKVFCEEELIEAIETATGAKKDCXCFIEVIVHKADTTKDLLEXGSRVSAAISRPPNPQ

SEQ ID NO: 72411 - protein, 167 aa, Gossypium hirsutum
  unsure (1)..(167): unsure at all Xaa locations
  Clone ID: GOSHI-09MAY01-C39106_1.pep
RRKNIGICVLTGSGTVSNVTLRQPSSATPGATITFHGRFDILSLSATFLSQTTSCHVPNRFSISLAGPQGQIVGGFVAGSLVAAGNVFIVAATFNNPSYHRLPVEEEARNAGSSGGAGGQSPPLSGGGGDSSHGGGADSCGVSMYNNHMGGXNVIGAPTVKPPPRPY

SEQ ID NO: 72412 - protein, 175 aa, Gossypium hirsutum
  unsure (1)..(175): unsure at all Xaa locations
  Clone ID: GOSHI-09MAY01-C39086_1.pep
MGVAVLKPDDCLKLPNPVKQRNSLCLNPNRSNRSHPNRKTRSPTTSPPSQSAGPKVPPKDLVMGQVKILKRGEVLKKPTPEKSVRFEKENIDVADLGSTNRLGPEPGSVPTQIRLTKSNNNXKVVPASFYAGSAFITSPPPSSVPMPVFCTKKISVTVKNDDATSDLRRILRLDL

SEQ ID NO: 72413 - protein, 61 aa, Gossypium hirsutum
  Clone ID: GOSHI-09MAY01-C39076_2.pep
CGRDHMAYRSAYFPVKDVIDGDLCEQFPTLPLDLQRKIADELDRTPGEILKKLEEARNKII

SEQ ID NO: 72414 - protein, 213 aa, Gossypium hirsutum
  Clone ID: GOSHI-09MAY01-C39076_1.pep
DIQESFHFCKYRRDENQLYIFADDVGPRWLTASYHIDFDTMAGADKFGNVYFVRLPQDVSDEIEEDPTGGKIKWEQGRLNGAPNKVEEIVQFHIGDVVTCLQKASLIPGGGECVLYGTVMGSLGALLPFTSRDDVDFFSHLEMHMRQEHPPLCGRDHMAYRSAYFPVKDVIDGDLCEQFPTLPLDLQRKIADELDRTPGEILKKLEEIRNKII

SEQ ID NO: 72415 - protein, 141 aa, Gossypium hirsutum
  Clone ID: GOSHI-09MAY01-C39006_1.pep
FDGGIYNFFSDVVFETLGRELTSVQGLSDWLDSAYSYLAMVNYPYPSNFLMPLPGHPIREVCKKIDGSPAGSSILEHIFNGVSVYYNYTGEVDCFQLDDDPHGMDGWNWQACTEMVMPMSSDRNTNMFPAYDWDYSAFREG

SEQ ID NO: 72416 - protein, 107 aa, Gossypium hirsutum
  Clone ID: GOSHI-09MAY01-C39316_2.pep
PDILNTMGTLAFRVGGRVGFWAAAFSTHQLEAVEGWEQIASTAFEHFEQEGNRVISIEELARELNVGPSAYSFLKDWIRVSDGKLSLLGYTKFLHGVALRSSNTRHH

SEQ ID NO: 72417 - protein, 336 aa, Gossypium hirsutum
  unsure (1)..(336): unsure at all Xaa locations
  Clone ID: GOSHI-09MAY01-C39316_1.pep
SFCHLXGVVHRDLKPENFLFTSGGENADMKLIDFGLSDFIRPDERLNDIVGSAYYVAPEVLYRSYSMEADIWSIGVITYILLCGSRPFWARTESGIFRSVLRSDPNFDDMPWPSVSPEAKDFVKRLLNKDHRKRMTSVQALAHPWLRDDSRPIPLDILIYRLLKSYLHASPLKRAALKALSKALTEDELVYLRAQFRLLEPNRDGSVSLENFKMALAQNATEAMGESRVPDILNAMGLLAYRKMYFEEFCAAAISTHQLEAVEGWEQIASAAFEHFEQEGNRVISIEELARELSVGPSAYSFLKDWIRISDGKLNFLGYKKILHGVTFRSSNTRLH

SEQ ID NO: 72418 - protein, 138 aa, Gossypium hirsutum
  Clone ID: GOSHI-09MAY01-C39266_1.pep
SLKSAVDFNSVQVPPSHPLNFDETILEDNARPLPSTEVDESQEVISDEPMASEEHDAEKAKSKSTTSKQNEKLYAVEGMFNPKMKRAEKKRKKKAKNKSTLGGDAMDDEGDYDFGVDYVKGKGQNTCGVPMSGIEVDE

SEQ ID NO: 72419 - protein, 151 aa, Gossypium hirsutum
  unsure (1)..(151): unsure at all Xaa locations
  Clone ID: GOSHI-09MAY01-C34916_1.pep
AERVYRELSTILEGEADLEWACIMVQALNLILLTSSELSVLRELLKQSLVNAAGKDLFVXSLYASWCHSPMAILSLCLLAQAYQHASARVQSLVEEDINVKFLVHLDKLIRLLETPIFAYLRLQLLEPGRYIWLLKALYGLLMLLPQQSAA

SEQ ID NO: 72420 - protein, 95 aa, Gossypium hirsutum
  Clone ID: GOSHI-09MAY01-C34906_1.pep
FHFQMDWQGQKLAEQIMQVMLLVFAVVSFGAGYVLGSFQMMMLVYAGGVTLTALITIPNWPFFNRHPLKWLDPSEAEKHPKPQVAVSSKKKSSKK

SEQ ID NO: 72421 - protein, 88 aa, Gossypium hirsutum
  unsure (1)..(88): unsure at all Xaa locations
  Clone ID: GOSHI-09MAY01-C34856_1.pep
MQVNNSWSVVKRLPVRADSSYSWGLAFKAGGNNLLVIGAGGHGGHDDGVNVLHSXNPEERNRDGQEWNVLAVKARAGAFVYNCAVMGC

SEQ ID NO: 72422 - protein, 51 aa, Gossypium hirsutum
  unsure (1)..(51): unsure at all Xaa locations
  Clone ID: LIB3147-006-Q1-K1-C6.pep
XLKAITRNEFNAKVQDKWNQSLLSLRLMLTIEGSTQSADNFKKLIRGQLFF

SEQ ID NO: 72423 - protein, 257 aa, Gossypium hirsutum
  unsure (1)..(257): unsure at all Xaa locations
  Clone ID: GOSHI-09MAY01-C34836_1.pep
ASSKNPNHKSLVGIDSKPSTLSVGLVNSNGDFKEPKAGTNQEMIHNSVAYFADICRKENQMMKQALLANLAYVELELENPLKALSAARSLLELPGCSRIYIFLGHVYAAEALCLLNKPKEAVEHLSIYLSGPNKVESPFSQEDCEQWLTEKPIDCEEPNGGGGGAATAAKNPSPEGMQEFMFLKPEEACGTLYANLAAWYATQGELDRAHQXTTQALSLLPNRAEATMXAIYIDLVLGKAQEALSKVKRCSHVRFLS

SEQ ID NO: 72424 - protein, 116 aa, Gossypium hirsutum
  Clone ID: GOSHI-09MAY01-C34566_1.pep
PSKSTSLVVYSARAMCSIDFGKAVDEDDESQLVHEAWVKLQGSITNKKLKYLLIDGRQTESKHTSRKNNFEIIGFRDPVLFIGHLSKNSILMVDKPWMEVVKSFDTAPVQRHIYGT

SEQ ID NO: 72425 - protein, 212 aa, Gossypium hirsutum
  unsure (1)..(212): unsure at all Xaa locations
  Clone ID: GOSHI-09MAY01-C34796_1.pep
TWCLEENIKLRSQPALVPLAVNDELAFVAGIPCSLNTPSSSPEKMLEKRQLLRDAVRKEMGWEDNDMLVMSLSSINAGKGQLFLLEAAHLFIDQYPLQTGSEVKKSLDIRHDHSTLGVKHHLRGLVLKSSNGDLSSRDLRTRNSHRRKMLFDSQGTEEQXLKFLLGSVGSKSNKISYVKEILEFCLSMLSCRVCTLTLHYTSCFLFNNRSYV

SEQ ID NO: 72426 - protein, 121 aa, Gossypium hirsutum
  Clone ID: GOSHI-09MAY01-C34726_1.pep
NIEGFFPYGSGCPKTFPAARARLVFSMISLTTRESGLIFGDNPVYTNRVVQWAEWEIEFFVRLVKENAPPSETISALRAASICVQDSLNYCLLLESQGLKLSKLLLVLLRPYLEEVLELNF

SEQ ID NO: 72427 - protein, 314 aa, Gossypium hirsutum
  unsure (1)..(314): unsure at all Xaa locations
  Clone ID: GOSHI-09MAY01-C34636_1.pep
CLCVRFILDCHSDIFVWVGQQVDTKNKLXALTIGQKFLEHDFLLEKLSREAPIYIVMEGSEPPFFTRFFSWDSAKSSMHGNSFQRKLTIVKTGGTPTVDKPKRRTPVSYGGRSSSVPDRSQRSRSMSFSPERVRVRGRSPAFNALAAAFENPNARNLSTPPPVVKKLYPKSVTPDSAKKSAAIAALTASFEKQPPPARETIIPRSVKVSPPTPKTTPTPEPNSKENSMSSKLESLTIQEDAKEGEAEDEEGLPIYPYERLKITSTDPVSEIDVTRRETYLSSEEFKEKFGMKKDAFYKLPKWKQNKLKMALQLF

SEQ ID NO: 72428 - protein, 45 aa, Gossypium hirsutum
  Clone ID: LIB3147-004-Q1-K1-B9.pep
EIDVTRPETYLSYDEFKEKFMMKKDAFYKLPKWKHIKLKMALQLF

SEQ ID NO: 72429 - protein, 65 aa, Gossypium hirsutum
  unsure (1)..(65): unsure at all Xaa locations
  Clone ID: LIB3147-004-Q1-K1-B11.pep
NAFSYTVSVRIKITSTDPDSEIDVTRRETYLSFEEFKEKFGMKKDAFYKXPICKQNNLIMALQLF

SEQ ID NO: 72430 - protein, 123 aa, Gossypium hirsutum
  Clone ID: GOSHI-09MAY01-C34626_1.pep
DSSQQYSRLWGFEKLLFRESRTGIRRDRKYAIQAKNAFATGVHMSENVIGKTLHKTETKIRYYHYHNTITVHQELCREYLPPSAKNNVTWFNKLPYVYDDNMKKLANTIKEFEHKTIGDLGSL

SEQ ID NO: 72431 - protein, 181 aa, Gossypium hirsutum
  unsure (1)..(181): unsure at all Xaa locations
  Clone ID: GOSHI-09MAY01-C34176_1.pep
MEGCGTVERSIRAVEESIGSHGKNQLEKCLHEALEYLNQIPPVQLYAAIAVLLISTLLLLSIRLFKHAKSNTVMLTGLSGSGKTVLFYQLRDGSVHQGTITSMEPNESTIVLNSDSNKKRKSKPVHIVDVPGHSRLRPKLDEFLPRAAXAIVFVVDSLEFLPNCHLASEYLYDILTKASVV

SEQ ID NO: 72432 - protein, 74 aa, Gossypium hirsutum
  Clone ID: GOSHI-09MAY01-C34166_1.pep
RHLAQDYSCWSSGMPDLLLWRFHGDYKGEAKLVEVKGPRDQLSEQQRAWLLLLMDWGFNAEVCKGSPTGSSPCG

SEQ ID NO: 72433 - protein, 125 aa, Gossypium hirsutum
  unsure (1)..(125): unsure at all Xaa locations
  Clone ID: GOSHI-09MAY01-C34116_1.pep
MSMEKQYLDCLLVPMGILLMVAYHLWLLYRILKHPTKTVIGVNAINRRFWVQAMMEDGSKGVLAVQSLRNNIMASTLLASTAIMLSSLIAILMTSGSSNRSSWFLFXDRSDVAFSIKYFAILRCF

SEQ ID NO: 72434 - protein, 126 aa, Gossypium hirsutum
  Clone ID: GOSHI-09MAY01-C34376_1.pep
MVDAWWSLLGAAIPAVIAGQAFRMKKKHAEEERIKSARGREKTSDDIFVCERVCTSKRMLKKVGAFSKDPIPDTCVTVCGVSELDACSDACARTVCVNQHQVPNWNDICLRRCQSECLRLSASHSS

SEQ ID NO: 72435 - protein, 75 aa, Gossypium hirsutum
  unsure (1)..(75): unsure at all Xaa locations
  Clone ID: uC-gsronu33B134d12b1.pep
MADAWWSLLGAAIPAVIAGQASRMKKKHAEEERIKSAXRGREKSSDDILCCERVCTXSKRMLKKVGACSKDPIPD

SEQ ID NO: 72436 - protein, 115 aa, Gossypium hirsutum
  Clone ID: GOSHI-09MAY01-C34216_1.pep
PTIFQICFGSDSTRCEERDLGIKDGRSLRYSNSVYGECTYKITTQRLGIYMGLNNLEIMGDSKTVIKKCQSTDFDKLAIGALIRDIQSKKAEFQEIGFHFIPKIENNMPSFCEKG

SEQ ID NO: 72437 - protein, 82 aa, Gossypium hirsutum
  Clone ID: GOSHI-09MAY01-C34206_1.pep
SNAAFIQVFLLCHFPPINGDSGKNNKVPGNGWRIKMQISITSKTNNLYTWIEKNREKMKKKELGPLGLNKSHHNYLVKRYLS

SEQ ID NO: 72438 - protein, 166 aa, Gossypium hirsutum
  Clone ID: GOSHI-09MAY01-C34226_1.pep
MAASLASRCSRVGRSLMDGLRNNFSNLPITSRETTFGSFLYQQQRTFIQMRTVLKVVDNSGAKKVMCIQALKGKKGARLGDTIIASVKEAMPNGKVKKGKVVYGVVVRAAMQRGRCDGSEVKFDDNAVVLVDKQGQPIGTRVFGPVPHELRQKKHVKILTLAGHIA

SEQ ID NO: 72439 - protein, 101 aa, Gossypium hirsutum
  unsure (1)..(101): unsure at all Xaa locations
  Clone ID: LIB3135-028-Q1-K1-G8.pep
VTLIFHFILQQQRTFIQMRTVLKVVDNSGAKKVMCIQALKGKKGARLGDTIIASVKEAMPNGKVKKGKVVYGVVXRAAMQRSRCDGSEVKFDDNADVLVDK

SEQ ID NO: 72440 - protein, 137 aa, Gossypium hirsutum
  Clone ID: GOSHI-09MAY01-C35986_1.pep
LVPVREVNFLRFCKRHAEGVWAVVDVSIDTLRETSGAPTTYVKCRRLPSGCVVQDMPNGYSKVTWVEHVEYDESQVHHLYRPLLSSGIGFGAQRWVATLQRQCECLAILMSSTVPTGDHTAITASGRRSMLKLAQRM

SEQ ID NO: 72441 - protein, 41 aa, Gossypium hirsutum
  Clone ID: GOSHI-09MAY01-C35976_2.pep
RIKVHLNALKKYTYGKHIVARVEKLVAAGERRIAAQSVHPS

SEQ ID NO: 72442 - protein, 110 aa, Gossypium hirsutum
  unsure (1)..(110): unsure at all Xaa locations
  Clone ID: LIB3829-002-Q1-N6-G5.pep
SIHWRXGKNQWPHLNINSSPQANILYSGGYHINWAHHFLNFYTLKNSYNHSISSACSILLCPTTETSGLLDSMYTILSYKMYSFRYKQQLLLFPYRSYLSKKIGRSIALR

SEQ ID NO: 72443 - protein, 65 aa, Gossypium hirsutum
  unsure (1)..(65): unsure at all Xaa locations
  Clone ID: LIB3148-059-Q1-K1-D5.pep
IFIFYIFFLYFLFFFXXWISTAETLSFGSISMYKPLSYTMYSSFSWYKASNTFIFIQFLLTCLRR

SEQ ID NO: 72444 - protein, 119 aa, Gossypium hirsutum
  Clone ID: GOSHI-09MAY01-C35916_1.pep
MISTTISGNAYQILVEALAPAPIYWSATLLVTVACNLPYMAHISFQRCFHPLDHHIIQEIKFYKKDVEDQGMWSRERSKARQETKIGFTARVDAKITQLKGKLQRKQPSMEIQSPHRQS

SEQ ID NO: 72445 - protein, 96 aa, Gossypium hirsutum
  Clone ID: GOSHI-09MAY01-C35906_1.pep
RINPVYGVDSHLLSSHKLLLQLPFHMLHFFDHKIDYCTDNILTTFPVPLESPDSVQSLLFFPSFAVQVERLLFLFPVAFSISDSAFILAAYSAARI

SEQ ID NO: 72446 - protein, 59 aa, Gossypium hirsutum
  Clone ID: GOSHI-09MAY01-C35926_2.pep
MPRMSISHRPETKKEKKDKFKCVAQGTTLETIPGCSDDWNSMEVGDRNPIANKRKESRG

SEQ ID NO: 72447 - protein, 87 aa, Gossypium hirsutum
  Clone ID: GOSHI-09MAY01-C35926_1.pep
GLNIEFGRPFFIYTFFVNFLFFLSFFFFFIFFYFFFFRKKDKFQISCTRYNFKTIPRCSDDWNSIEVGDRKPFVNKRNIKERKAGLI

SEQ ID NO: 72448 - protein, 41 aa, Gossypium hirsutum
  Clone ID: LIB3146-053-Q1-K1-C7.pep
KTSIINLTNAGINSKEQNQRTFWIWKKITKKLLCACNLKFR

SEQ ID NO: 72449 - protein, 183 aa, Gossypium hirsutum
  Clone ID: GOSHI-09MAY01-C35866_1.pep
ISLPITKNDRASIVGDAIDYIKELLGTVRELQLLVDKKRCGQDRSKRLKTEDAASAADAGDVEFKSLGDPDQCYNTSLRSSWLQRKSKDSEVDVRLVDDEVTIKLVQRKKINCLLFVSRLLDELQLDLLHVAGGNIGDYYSFLFNTKIYEGSSVYASAIANKLINVVDKQDAAAAPPTSSTCL

SEQ ID NO: 72450 - protein, 137 aa, Gossypium hirsutum
  Clone ID: GOSHI-09MAY01-C35806_1.pep
CFVLFLHETASVWVPQPSSFRSRLIEIRNYSHQSPMIVAESIPIEIPNIMACNPAYASAANEDETLLLRTVFNARISPIRPRTTRLEVDLEFFFCQKLHQTKSSPSYSLLVVCGFYPYLRLTIKHSKKVSTIYKYPS

SEQ ID NO: 72451 - protein, 129 aa, Gossypium hirsutum
  Clone ID: LIB3825-019-Q1-K6-E2.pep
ISQIIAPITDLSGFVVWHFLMIVRESPMIVAESIPIEIPNIMACNPAYASAANEDETLLLRTVFNARISPIRPRTTRLEVDLEFFFCQKLHQTKSSPSYSLLVVCGFYPYVRLTIKHSKKVSTIYKYPS

SEQ ID NO: 72452 - protein, 72 aa, Gossypium hirsutum
  Clone ID: GOSHI-09MAY01-C35596_1.pep
INQIYVKIVKLLKFGYIYSYRIFYADSRVDVAEYLRKAKLMYPSFHILLTTSAAHSPKCTRLKHHRIPSHLF

SEQ ID NO: 72453 - protein, 160 aa, Gossypium hirsutum
  Clone ID: GOSHI-09MAY01-C35526_1.pep
MSTVMRPVSLVDSTCLVSLPSLFTTSSKLPSLLSLPSKPINLVLLSSSTQPTLSSLKTKTHFPSLVAFLAQTSDWAQQEEENDTTLTIDDQGTESEGGESTWENEESDGAEASLSDWEPQGEVTGSGSADEDASEPSEEAKLFVGNLPYDVDSQKLGYAF

SEQ ID NO: 72454 - protein, 180 aa, Gossypium hirsutum
  Clone ID: GOSHI-09MAY01-C35446_1.pep
LFLSISNRAWVLSESVPQKSIHEFTVKNSKGQDVDLSMYKGKVLLVVNVASKCGFTDSNYTQLTELYNKYKDKGLEILAFPCNQFLKQEPGTSQEAEEFACTRYKAEYPIFKKVRCNGPNTEPVFKFLKAKKSGFLGSRIKWNFTKFLVDKDGNVLSRYSPTTTPLAIEGDIKKALGVDT

SEQ ID NO: 72455 - protein, 134 aa, Gossypium hirsutum
  unsure (1)..(134): unsure at all Xaa locations
  Clone ID: GOSHI-09MAY01-C35406_1.pep
MAVQSVKVGNVXSLGASDQDIKEFFSFSGDIEHVEMHGNNERSQVAYVTFKDPQGAETAVLLSGATIVDQSVTIELAPDYKPPATASATPATQNKEAGQAESAVQKAEDVVTSMLAKGFILGKDAVNKAIAFYE

SEQ ID NO: 72456 - protein, 139 aa, Gossypium hirsutum
  unsure (1)..(139): unsure at all Xaa locations
  Clone ID: GOSHI-09MAY01-C35716_1.pep
PIRVSAIDDPALATFCEPVEKSNSSHSFTAGLAHSVGLRKQPLRVYSMVKYAAIARGDAEIFMKFARTGYKEKIWDHAAGVIIIQEAGGVVTDAGGSPLDFSKGIFLEGLDRGIIACGGAXLHERITKSVDARWNCSSL

SEQ ID NO: 72457 - protein, 114 aa, Gossypium hirsutum
  Clone ID: GOSHI-09MAY01-C35736_1.pep
AWLVQVREQGQQKGEASPILSELLRLEEQAKQQYVGRWSKVPGATEASIWDLPSSAISDPNNLDVMGLLATNKGKPMEGIMEQVRDGSTIRVYLLPDFQFVQVFVGGIQSPSMG

SEQ ID NO: 72458 - protein, 85 aa, Gossypium hirsutum
  Clone ID: GOSHI-09MAY01-C35686_1.pep
RIRMFNARTWLTGNGMCARNLEVTNRLLFSVLIISPHQRWWIIIALVQIHTYLPSPSAPYLPMATGEHLFLIYSHWSLFLPWSLQ

SEQ ID NO: 72459 - protein, 122 aa, Gossypium hirsutum
  Clone ID: GOSHI-09MAY01-C35646_1.pep
RHPDVLSQVARGIANFAKCESRASTNGIRSGRSLLIDEGALPWIVQSANNDAAPIRRHIELALCHLAQHEANAKDMMSGGALWELVRITRDCSREDIRSLARRTLNSSLLFRSEMRRLRIEL

SEQ ID NO: 72460 - protein, 230 aa, Gossypium hirsutum
  unsure (1)..(230): unsure at all Xaa locations
  Clone ID: GOSHI-09MAY01-C35676_1.pep
PRVRGYPGLFCLDHSFLSASSAGTHHAQVAWKKFTRKCSLSCHPFPYIRMAQAVSLALSRSHLIVPGIFGLGGGRLALAQRKVAETDHYPSPNSLDSRAQDGHAFVSSILLSVIEGVILLVRAIYLTILFSPSIIMAPFADSCGLKFRKIWLEVVHRTLETAGPXAFIKWGQWAATRPDLFPKDLCTKLSELHSTAPEHSFAFTKKTIERAFGRKLSEIFDSYEEEPVAY

SEQ ID NO: 72461 - protein, 104 aa, Gossypium hirsutum
  unsure (1)..(104): unsure at all Xaa locations
  Clone ID: GOSHI-09MAY01-C35616_1.pep
DGDNWIHVPPIKGSLVINVGDALQIMSNGKYKSVEHRVVANGSNNRISVPIFVNPRPSDMIGPLPELIENGEKPIYKQVLYSDYVKHFFRXAHDGKKTVALAEL

SEQ ID NO: 72462 - protein, 157 aa, Gossypium hirsutum
  Clone ID: GOSHI-09MAY01-C35606_1.pep
ITRIVLSEARKLTLLIQRDTNWVVRICGRTLTWERHTKGNGDRMQEKFMAFPNQIKTPSDFNVENSEKTNKPSVSKRLKYDLPLPLTYKRRKPQARNTSDLTNSLRTGIDIRTSSSKESNQPLGNRVNAFKFKILGSYEQGSLNSMSRNKNVITSLV

SEQ ID NO: 72463 - protein, 126 aa, Gossypium hirsutum
  Clone ID: GOSHI-09MAY01-C35196_1.pep
RPTRPICICFISNSFFKQKQISMAKIALLLVFSLVLILSINSAVGHDAPAPSPEQTNQETSEYADATGQNEEGLDEIVDAMSPEMAPASSPTMAFEGSFGPGPAMTIEDGAAEGEGEAEAEGAPES

SEQ ID NO: 72464 - protein, 113 aa, Gossypium hirsutum
  unsure (1)..(113): unsure at all Xaa locations
  Clone ID: GOSHI-09MAY01-C35186_2.pep
SSSSVSSHCFDNHGIRGSPTSTVIGPSKHRHSTLGDPDFVENYFQGDIHVQYSDLLGLFEYGXFPPHANYLFLGDYVDRGKQSLETFGDNREVEHGLSVKLPVQKLILQATSH

SEQ ID NO: 72465 - protein, 394 aa, Gossypium hirsutum
  unsure (1)..(394): unsure at all Xaa locations
  Clone ID: GOSHI-09MAY01-C35186_1.pep
EDYAFLLKGHEDLRQDERVMQLFGLVNTLLENSRKTAEKDLSIQQYAVIPLSPNSGLIGWVPNCDTLHHLIREYRDARRITLNQEHKYMLSFAPHAAHLPLISKVEVFEYALLNTEGNDLARVLWLKSRTSEVWLERRTNYTRSLAVMSMVGYLLGLGDRHPSNLMLRRSSGKILHIDFGDCFEASMNREKFPEKVPFRLTRMLVKAMEVSGIEGNFRSTCENVMQVLRSNKDSVMAMMEAFVHDPLINWRLFNFNEVPQISMFASNHAPAVINTEETAQSKELGQPQRGARERELLQAVNQLGDANEVLNERAVVVMARMSNKLTGRDFSSSCSSIPACSMQNVVDHSTLTSGDNREVEHGXLSVKLQVQKLILQATSHENLCQNYVGWCPFW

SEQ ID NO: 72466 - protein, 160 aa, Gossypium hirsutum
  Clone ID: GOSHI-09MAY01-C35166_1.pep
TQESHLRSDNAVTYESPYPLYAMALSSTPAVTHLNYQRIALGSFIEDYTNRVHIISFDPESLTLITHPSLSFDHPYPPTKLMFQPHRKSPFSSSSDLLASSGDYLRLWEVGHSSIELISVLDNSKTSEFSAPLTSFDWNDVEPNRIGTSSIDTTCTIWDI

SEQ ID NO: 72467 - protein, 127 aa, Gossypium hirsutum
  Clone ID: GOSHI-09MAY01-C35106_1.pep
KVCLAESGFSLKAYFLVALGVFDISCMVFIKDVEAAGECGKTPFRSAAVSLSPCLGAAGNAKAKVPPACCSKVGALLKASPRCLCAILLSPLAKQAGIKPGIAIGIPKRCNIRNRQAGKKCGSYTVP

SEQ ID NO: 72468 - protein, 227 aa, Gossypium hirsutum
  unsure (1)..(227): unsure at all Xaa locations
  Clone ID: GOSHI-09MAY01-C35136_1.pep
LSASGLRALRYAREVEGIGQVVALDNDKGAVEACXQRNIMFNGSVACSKVESHLADARVYMLTHPKEFDVVDLDPYGSPSVFLDSAVQSVVDGGMLMCTATDMAVLCGGNGEVCYSKYGSYPLRGKYCHEMALRILLACIESHANRYKRYIVPVLSVQMDFYVRVFVRVYTSASAMKNTPLKLSYVYQCIGCDSFHLQPIGRTVSKNTSVRYLPGFAPVVPQECSHC

SEQ ID NO: 72469 - protein, 203 aa, Gossypium hirsutum
  Clone ID: GOSHI-09MAY01-C35126_1.pep
DISLEAPLSSSCNSLKSLSIRNCRGFGTASLAMVGRLCPQLQHVDLSGLCAITDAGLLPLPARRAAGPVKVGLSGCLNWTDEVVLHLTKLHGATLELLNLNGCRRITDASLAAAAENCVFLSDLDVSSCAITDVGIAALSHAEQLNLQVLSFSGCSGVSNKSMTFLKKLGKTLVGLNLQHCNSISTQTIELLVESLWRCDILV

SEQ ID NO: 72470 - protein, 299 aa, Gossypium hirsutum
  Clone ID: GOSHI-09MAY01-C35356_1.pep
MSESEQTQTQTQNPDPKTPEPKVRAVGLAEYSWCRAVPGGTGITVLSLLLSNVPDISFLEALLCRLQVSHPILRSRVRFDASCNTFYLVTPSNPHVQIQSFDLQSTSHILQSSLGDSHIDSHHVLLEHELNRNSWNRTDGDQADWDVFFASLYTIRDARWFLVFRLHTSACDRAAAVGLLRELLEMVGGGRAKAEEEIEQEVGIEDLIPSGKANKPLWARGVDLLGYSLNSFKLANLNFIDANSARHSQVVRLKMNPDDTDRLVAGCKSRGIKLCGALAAAGMIATRSTKPFPDHQKEK

SEQ ID NO: 72471 - protein, 172 aa, Gossypium hirsutum
  unsure (1)..(172): unsure at all Xaa locations
  Clone ID: LIB3543-039-Q1-K1-B2.pep
TFLEKSIRVIMGCLLFACFSASKNEKDQHVVDGTSSIDQKPEANEAVQSSKEDFGIPFNPIIVKKEKLGELLNNSGEEKLSFDLYVKTHEELAVESSEKLLKNDEGKESEETVVFKPQNNRYQNSAESEDELNDLDLEINDLDDGNEDDGIEKAKNESQLVIXESSESLFSL

SEQ ID NO: 72472 - protein, 55 aa, Gossypium hirsutum
  Clone ID: LIB3145-013-Q1-K1-B5.pep
VMVIQFQTLFCKLLFMFMHVLICLFHVNLCREKLGELLNNSGQEKLSFDLYVKTH

SEQ ID NO: 72473 - protein, 75 aa, Gossypium hirsutum
  Clone ID: GOSHI-09MAY01-C35266_1.pep
KTCLFTLSGHILSLKYSQRLTCLPSEMKYMIAPSFTPIQTVFLRYSGSSLKYMDDRTGAVQNQPHIYRSQANRYH

SEQ ID NO: 72474 - protein, 62 aa, Gossypium hirsutum
  Clone ID: GOSHI-09MAY01-C35206_1.pep
CNKKLQNLDLGNNLISQWAEVKALDSLVHLKNLNLQGNPIAEKDKLAKKVKRLLPNLHIFNA

SEQ ID NO: 72475 - protein, 123 aa, Gossypium hirsutum
  Clone ID: GOSHI-09MAY01-C36976_2.pep
MLSKGIMDVRLGLLFLFVLGASWVCDARQLEAAPVVLSGASVVQTNQGQDEEVVENIVWKDNVCTLCEEFATEAINFLSQNKTQTEIVEVLHKSCSRIPSFEQQCITLVDYYVPLFFVEISLI

SEQ ID NO: 72476 - protein, 248 aa, Gossypium hirsutum
  Clone ID: GOSHI-09MAY01-C36976_1.pep
MTCCIMDVRLGLLFLFVLGASWVCDARQLEAAPVVLSGASVVQTNQGQDEEVVENIVWKDNVCTLCEEFATEAINFLSQNKTQTEIVEVLHKSCSRIPSFEQQCITLVDYYVPLFFVEISLIQPEVLCKEVNLCQKFALISTQIREDCCGVCHHAVSEVLTKLKDPDTQLEIIELLLKGCDSVQNYVKKCKSLVFEYGPLILANTENFLETTDVCTILHACNGAKQHWWQIHNCSLKPQGNAVCKISF

SEQ ID NO: 72477 - protein, 175 aa, Gossypium hirsutum
  Clone ID: GOSHI-09MAY01-C36926_1.pep
MSRVYVGNLDPRVTERDLEDEFRIFGVLRSVWVARRPPGYAFIEFDDRRDAIDAIRELDGKNGWRVELSHNSKGGGGRGGRRGGGEDLKCYECGEPGHFARECRSRYGSRGLGSGRRRSPSPRRRRSPSYGHGRRSYSPGRSPRRRSISPRRGRSYSRSPPYRYSLRDSPYANGD

SEQ ID NO: 72478 - protein, 167 aa, Gossypium hirsutum
  Clone ID: GOSHI-09MAY01-C36546_1.pep
MAGEMTLENPEPINAVPKSEAVPKLAEQDANSGKIGMASDLTSTISSSPYESSGAKAESHQDLVGEPGFNQSTSFENYYYPGYDGSFTQSDDKGYFLTDGSLTGVQSENGSLVYYLPGYNPYATGALMGVDAQCLGQQPYYSSGYFQPPVSYASEAMPCYSWDSTYA

SEQ ID NO: 72479 - protein, 115 aa, Gossypium hirsutum
  unsure (1)..(115): unsure at all Xaa locations
  Clone ID: GOSHI-09MAY01-C36576_1.pep
CKVALSSGDARNKKNSVMAKPLKEQAFATPEAVAELVQKVHSAIQRELPVVIAKMKLYLRGXSTRTILFKPIKTNIVEAHIQIQSLLKAEYSPEEKRTINMVSIEELESQLDNLL

SEQ ID NO: 72480 - protein, 255 aa, Gossypium hirsutum
  Clone ID: GOSHI-09MAY01-C36516_1.pep
IIFLDPCFFRSGTKPLLSDWTSDQGKARQINSELTDKCVVSDALKSTFTGAWVLFGLISGTVFLLCTGFFFRLYGWEFLHEALLYHLTRTDPRHNFSIYFYHIYLNYERELSVLEKLVSFLPQFIVQLVLILCFAKDLVFCFFVQTVAFVAFNKVITAQYFVWFFCLLPLILPWSNMKLKWKGLCCILLWMGAQTHWLLWGYLLEFKGKNVFLQLWMASLLFLAANTFILIVLIRHHNYGPVFRQHTDLKTTKTT

SEQ ID NO: 72481 - protein, 113 aa, Gossypium hirsutum
  Clone ID: LIB3146-053-Q1-K1-E8.pep
RTRGSGTVFLLCTGFFFRLYGWEFLHEALLYHLTRTDPRHNFSIYFYHIYLNYERELSVLEKLISFLPQFIVQLVLILCFAKDLVFCFFVQTRAFVAFNKVRYANLTSLTSFY

SEQ ID NO: 72482 - protein, 170 aa, Gossypium hirsutum
  Clone ID: GOSHI-09MAY01-C36776_1.pep
MAMAEEKESTSIPLSQAENGSTDPEDPAKSPPSSPNSSTRKACCFVLQSWFSKKFMTGCVVLFPVAVTFFITWWFIQFVDGFFSPLYERLGVDIFGLGFITSLLFVFFVGVFVSSWMGAAVFSVGEWVIKQMPFGRHIYSASKQISAAISPDQNTTAFKEVAIIRHPRVG

SEQ ID NO: 72483 - protein, 75 aa, Gossypium hirsutum
  Clone ID: GOSHI-09MAY01-C36766_1.pep
EAAVLKKFKSLKHVPIWKQERPKSIRGGDELKIYRVYPVGLTQRQALYTFKFKGDADLRSHIENNPCPKFEVIVR

SEQ ID NO: 72484 - protein, 44 aa, Gossypium hirsutum
  Clone ID: GOSHI-09MAY01-C36706_1.pep
FGVVSQIVDREVTLEAAHASAYTFGIPEAIVSPWLQFQTLLAFM

SEQ ID NO: 72485 - protein, 111 aa, Gossypium hirsutum
  Clone ID: GOSHI-09MAY01-C36736_1.pep
FFINFSSFLSAIKPDFESWYFFYATPKPKIQISNPKKSPPIFEGNFPIQTSGRSFFLSIVLGFCFFSSKVNKAKRKGFTFANELSETTSPSLKIEIGDGTSGLKSINTVLE

SEQ ID NO: 72486 - protein, 75 aa, Gossypium hirsutum
  Clone ID: GOSHI-09MAY01-C36726_1.pep
PRVRFYMNPQRATTIWYVPRKKSIFSQQDDILTAAENYIEEHGTHEFERLITKAEKEERIRRSNNYMIFDDDYIY

SEQ ID NO: 72487 - protein, 182 aa, Gossypium hirsutum
  Clone ID: GOSHI-09MAY01-C36166_1.pep
MLFLSCKLSSGPILEALHVDPASGVSLDKEKSNKVSKPAVSGLPTLAKLTKASASGGPSKQGQIEKKETPQERLKRIMNRQLNKQIKKDTAAEMAKKREQERQRLEKLAETSRLSRQRHRSRSRSYSRSPPRRYRRSRSPSRSRSSRRYYSRSRSRSRSHSYSRSRSRSNSRSPRVRSRSRY

SEQ ID NO: 72488 - protein, 99 aa, Gossypium hirsutum
  Clone ID: LIB3146-023-Q1-K1-A6.pep
FDELSASIVKKDTAAEMAKKREQERQRLEKLEDTSRLSRQRYQIHSRSRSNSRSPPRRHRRSRSSSRSRNRRYVSRSRSRSRSRSYSRSHSRSKSRSPR

SEQ ID NO: 72489 - protein, 102 aa, Gossypium hirsutum
  Clone ID: GOSHI-09MAY01-C36106_1.pep
FRRLELNSEATFKVPKFLVIGHRGHGMSGLQSSDSRMKAIKENTILSFNSAAKFPIDFIEFDVQVTKDDCPVIFHDDFIFSEENGTVFEKRVTELSLEEFLC

SEQ ID NO: 72490 - protein, 188 aa, Gossypium hirsutum
  Clone ID: GOSHI-09MAY01-C36036_1.pep
VFMDNKACNKMQTVVSKAKKKQVKDELERIKQAEKKKRRLEKALATSAAIRSELEKKKQKKKEEQQRLDEEGAAIAEAVALHVLLGEDSDDSANIMLNKEEGFNCWGYGIYMDGGRAYLPHQLHPNCQGWVSNAYRTGDGDWSFSYGREVQAPFLENGRLGSGGLPVGLIAAQAISALQITEDAKVLH

SEQ ID NO: 72491 - protein, 85 aa, Gossypium hirsutum
  Clone ID: GOSHI-09MAY01-C36306_1.pep
QMSKFSLYSDDRQKSGLDAISDIYSILRDEAARANKMDVSYAHALNWISRKGYSEAQLKECLEEYAALNVWQIHPHTFDIRFIDA

SEQ ID NO: 72492 - protein, 167 aa, Gossypium hirsutum
  unsure (1)..(167): unsure at all Xaa locations
  Clone ID: GOSHI-09MAY01-C36326_1.pep
LTHKEAETTEITDSVLNRILTSRGLRGEQTAVVSLDDVDLRPSSTNGTDVMSSRVHSLFRQRQSQLXRVARFTSLSSGLNSTERIVEAYLRSNLMGRNQEQPPQVDDRDSFSSIAAVINSENQMDTAVEIDSEVSLSASSSRRRNDSFRVSDVDSGDSRAHRRRRLN

SEQ ID NO: 72493 - protein, 228 aa, Gossypium hirsutum
  Clone ID: GOSHI-09MAY01-C36256_1.pep
MVVEAEIDRLPIDLLAHILVMITSFTDLAQASGVCRKWKQGVKQALARRHTLSFAGCKMDDDSTSRLVRHAYSLEELDISRSRWGCQITDNGLYQISLAKCVSNLTSVSLWGMTGITDKGVVQLITRANSLKHLNIGGTFITDESLSAIAHSCPHLKSIVLWSCRHVTESGLFVLVNKCRKLESINVWGTRVPLDCFIGLLTIRPALQIKPQGLPLNIGAVATMLPVV

SEQ ID NO: 72494 - protein, 366 aa, Gossypium hirsutum
  Clone ID: GOSHI-09MAY01-C36206_1.pep
GIESHFGERLRLDQHRVAWSPQRVLASPGQTDISSSAVRPAPSSLEIPKHSRDTGGSDTNLPSPTPNQNPSGGNKGQAFESKWSPTPGQSSGPLPVPNPFRGGAVGLQPPTVVSESGSPAAPVVHSHPMVSSESLRRQVNVQASVNLGADLKNAGVSIQNLVQSLSSNNPPAETHGPGSVSVSRQEAVAVPSMPATGTQRWTNASTQKLEPNPSLAMPAQPAAYSHWNDASQAGQFPGVFQTPGQPNMVPSESWRPAVPVQSNVQLPAPPNLPWGMTVPDNQGATALRQAPGNQNPGWGPIPGNQNMGWGALVPANTNMNWGPSSQGSASVNPNQNWAPPGQRQVPGNVNPGWSAPGNTIQGWTPP

SEQ ID NO: 72495 - protein, 173 aa, Gossypium hirsutum
  Clone ID: GOSHI-09MAY01-C37916_1.pep
LKETIEWGGRNMDKKKSKLGGIVDDDHQTDNRFKDIRIERTDEFGRIVTPKEAFRMLSHKFHGKGPGKMKQEKRMKQYQEELKLKQMKNSDTPSLSVERMREAQAQLKTPYLVLSGHVKPGQTSDPASGFATVEKDFPGGLTPMLGDRKVEHFLGIKRKAEAGNSGPPKKPKP

SEQ ID NO: 72496 - protein, 238 aa, Gossypium hirsutum
  Clone ID: GOSHI-09MAY01-C37816_1.pep
MKASLKFREEKRPVLRAKIPLSIFGSPFQSGLLAGETKELTLDLSTFFESGPSIKVAYRPNDTWNPFSLIVKTGTGPFGSPISSSMLMSAEFNLLGHGNPSFMLHFKPQFGDFSIKKSQSSLFDKAVKPRDGVVLEDASSIEVMDMPAVNGDSIRFFAEKRKLADLSSRDIAGILSGIKVAARTTVPVKGKALVNFRWGMRIPSEMKSGVCGNRDPKTGVSLTKIPFLVMDKIGIEHV

SEQ ID NO: 72497 - protein, 158 aa, Gossypium hirsutum
  Clone ID: GOSHI-09MAY01-C37486_1.pep
RTRGQRARSMPVSRFVSSWVHFKRMDAMEKGPNVKADYNSDSPDDENGEDEEDGQDQEFYDDGYKNGSLNTRSVQKLYRNGIGNNGGSVSGDGNSGGFRIRIPTGVSIAQPGPRFYGKIDHKYGANPNPNPNINANSHSQYRVILVGPAPDRLMGLGF

SEQ ID NO: 72498 - protein, 301 aa, Gossypium hirsutum
  unsure (1)..(301): unsure at all Xaa locations
  Clone ID: GOSHI-09MAY01-C37466_1.pep
MVLNCHVNEAALVLPKNVTVTAVFVFGDSIVDPGNNNNLPTIAKGNFLPYGRDFKDGPTGRFSNGRVPSDLIAEEFGVKGLVPAYLDPKTQLQDLLTGVSFASGAAGYDPLTAKTANVIPMSGQLELFKECIKKIKGGVGEERAATIISEAIYIVCTGSNDISNTYFSTPFRRPHYDINGYAEFNARYANQFLQDLYGLGARRIXLLGLPPIGCVPSQKTIGGGXKQDCYEAEKQLAIAYNAKLSGVIDSLKAVYTLPDTKLIFLDIYYPLLSLIQNPAKYGFEVATKGCCGTGLIKTIIF

SEQ ID NO: 72499 - protein, 105 aa, Gossypium hirsutum
  Clone ID: LIB3145-042-Q1-K1-E3.pep
KIIFLFAAEEFGVKGLVPAYLDPKTQLQDLLTGVSFASGAAGYDPLTAKTANVIPMSGQLELFKECIKKIKGGVGEERAATIISEAIYISSTPAMLISSCKTYMD

SEQ ID NO: 72500 - protein, 156 aa, Gossypium hirsutum
  unsure (1)..(156): unsure at all Xaa locations
  Clone ID: GOSHI-09MAY01-C37426_1.pep
MEVGVKMGMKGGGDEVGGKEKEKMGYEETELRLGLPGDGEVVRKRDFSHTVDLKLNLISTSPTDDKDKNIVPSHLDPAKPPPAKAQVVGXWATGPVISEKNMLATQKSSASEDSGEKAAFVKVSMDGAPYLRKVDLRMYKTYQQLFDALAKMVSLH

SEQ ID NO: 72501 - protein, 189 aa, Gossypium hirsutum
  Clone ID: GOSHI-09MAY01-C37696_1.pep
LRTTHFQQLKQQQLMKQQNALAWGGLKQQQQNHVVQNRGRYANRTLGLAPSAWPPLQQQQQQQQQQPQPLNGSGMRAVFLGNPNGKRECAGTGVFLPRRVGSFSDPRKKTACPTVLVPARVAQALNLNLDEIGAQPQLQHPRFNPSFTSDAAALRLRSGGNFVGNQKPRSLRPQQEMSHEVLLPQEWTY

SEQ ID NO: 72502 - protein, 66 aa, Gossypium hirsutum
  Clone ID: LIB3145-045-Q1-K1-C9.pep
NPNRFIFVYILFNCLVIWFLDLYVIVDAAALRLRSGGNFVGNQKQRSLRPQQEMSHEVRLPLEWTY

SEQ ID NO: 72503 - protein, 344 aa, Gossypium hirsutum
  Clone ID: GOSHI-09MAY01-C37686_1.pep
MATTPPTRSPELRKDPVTNQWVIFSPARAKRPSDFKSKSPQNPNNNSSSCPFCIGNEHQCAPEIFRAPPHPSGKLRGIENLYPALSRKLDHPNGQNDDSSSELSGLGWVVAGFGFHDVVIETPVHSVQLSDLDPSEIGDVLIAYKRRIEQIKQFDSIKYIQVFKNHGASAGASMSHSHSQMLSLPIVPPSVSTRLNSMKEHFNRRGKCSLCKVQSKDLLINETSHFFSIAPYASSFPFEIWIIPRDHSSHFDELDNKKAVDLGGLLKLILKKMALQLNNPPFNFMIHTSPIQITDSEIPYSHWFLQIIPQLTGVGGFELGSGCYINPVFPGDAAKILRELNVPI

SEQ ID NO: 72504 - protein, 66 aa, Gossypium hirsutum
  Clone ID: GOSHI-09MAY01-C37656_1.pep
KREGNNQILNHLFENCFFSNSLLIPIFYYYLLLLLQNKTERTHKSKEKEQPLGFEFDFSFKIASFF

SEQ ID NO: 72505 - protein, 55 aa, Gossypium hirsutum
  Clone ID: GOSHI-09MAY01-C37646_1.pep
GIVSTFGAFYVTRNKGRRANILVGADSFFLGGASNAGAVNITMLIIGRILLGASI

SEQ ID NO: 72506 - protein, 339 aa, Gossypium hirsutum
  Clone ID: GOSHI-09MAY01-C37676_1.pep
MLGGSAIDDDWEFTSPSNGIKTVVLVGRTGNGKSATGNSILGKKSFKSRASSSGVTSSCELQKTVLKDGQILNVIDTPGLFDFSAGSEFIGKEIVKCIDLAKDGIHAVLVVFSVRTRFSQEEEAALRSLQTLFGSKIVNYMIVVFTGGDELEENEETLEDYLGRECPQPLKDILGLCGNRLVLFDNKTKDETKRVTQVQDLLTLVNMVIEQNGGQPYTDELFAELKKGATKLRDQQEVVAALKGYSKREISEFKEQIERSYEEQLMRITEMVESKLKETTVRLEQQLAEEQAARLKAEELAQLAQMKSNDEIRKLRENLERAQKETEELRKQAARCAIL

SEQ ID NO: 72507 - protein, 175 aa, Gossypium hirsutum
  Clone ID: GOSHI-09MAY01-C37626_1.pep
MTKTSLIILVSLALGILSSLNLAYGAASDQNKFTVVGLVYCDTCRVEFQTSISEPISGATVKLECRNRTSEKITFQSPEITTDAAGSYKIEVTGDYEDSDCDVNLVKSPRADCNDPTEAWRKARVELTALDGVTGPIRFANNLGFKKKEALPGCKKVLTDMGYYELKDELGSEAV

SEQ ID NO: 72508 - protein, 102 aa, Gossypium hirsutum
  unsure (1)..(102): unsure at all Xaa locations
  Clone ID: GOSHI-09MAY01-C37196_1.pep
MGICLGARLNESPCNTGLSSKYVCSDGKDTSSTSSKASSFSAPLTPRSEGEILQSPNLKCFSFAYLKMATRNFRPDSVLKEGRFXSEFKACIDENSLAGVKP

SEQ ID NO: 72509 - protein, 198 aa, Gossypium hirsutum
  Clone ID: GOSHI-09MAY01-C37176_1.pep
SQGLPVPRNVLIPRTKGFGSAVSHMRSFVPAIYDMTVAIPKSSPSPTMLRLFKGQSSVVHVHVKRRLMKELPETDEDVAQWCKDLFVEKDKLLDKHIAEDTFSDQPLQDIGRPIKSLLVVASWACLVAYGAYNFLQWSSLLSSWKGIALSAVGLAIVTILMQIMILFSQSERSTPAKVAPGKPKNNSESSEARRDKQQ

SEQ ID NO: 72510 - protein, 144 aa, Gossypium hirsutum
  unsure (1)..(144): unsure at all Xaa locations
  Clone ID: GOSHI-09MAY01-C37086_1.pep
QDLHLDWPTRFNICLSTARGLAYLHEESMPRIVHRDVKASNILLDAELCPKISDFGLAKLDDDKKTHITTRAAGTIGYLAPEYAMRGHLTEKVDVFGFGVLALQIISGGPNSYYSAENVRIYLLXWAWTLLDISQISSSSRSHI

SEQ ID NO: 72511 - protein, 77 aa, Gossypium hirsutum
  Clone ID: GOSHI-09MAY01-C37066_1.pep
KIQGPHLKTKMTRQLVVLALVLIALAGLVSVDASSASGSPASAPTEASIDGSTASSSPPSQATAPSRSSGVTFDLDR

SEQ ID NO: 72512 - protein, 250 aa, Gossypium hirsutum
  unsure (1)..(250): unsure at all Xaa locations
  Clone ID: GOSHI-09MAY01-C37036_1.pep
MQSLKLLVTSRRCDSLIRLKRNLSSLPINSSADDLQNQVLVEGKASSRVAILNRPSSLNALNTNIGARLHELYASWEDDPNIGFVVMKGSGRAFCAGGDIVALYHLINEGKIEKCKGFFRTLYSFIYHLGTYLKPHVSILNGITCGXGGAGISIPGTFRLATDRTVFATPETQIGFHPDAGASFHLSRLPGHLXEYLGLTGAKLIGAEMVSCGLATHYSXTDKLPLIEEELGNLVTDDPSVIESCLENIV

SEQ ID NO: 72513 - protein, 130 aa, Gossypium hirsutum
  unsure (1)..(130): unsure at all Xaa locations
  Clone ID: GOSHI-09MAY01-C37396_1.pep
LNMAVCSLKLKRWEXAIGHCSIVLSEDENNVKAMFRRGKARAELGQTDAAREDFLKARKYAPEDKAIARELRMLAEQDKAIYQKQKEIYKGIFGPRPEPKPKRGNWLIRLWHWLVSLFYYMFRRERVKAD

SEQ ID NO: 72514 - protein, 215 aa, Gossypium hirsutum
  Clone ID: GOSHI-09MAY01-C37236_1.pep
RISDRHHEEVSLGNLRRFQFRELQVATHNFSSKNILGKGGFGNVYKGVLQDGTIVAVKRLKDGSAAGGEIQFQTEVEMISLAVHRNLLRLYGFCITPTEKLLVYPYMSNGSVASRLKGKPVLDWSTRKRIALGAGRGLLYLHEQCDPKIIHRDVKAANILLDDYCEAVVGDFGLAKLLDHHDSHVTTAVRGTVGHIAPEYLSTGQSSDKTDVFGF

SEQ ID NO: 72515 - protein, 254 aa, Gossypium hirsutum
  unsure (1)..(254): unsure at all Xaa locations
  Clone ID: GOSHI-09MAY01-C30876_1.pep
PRVRPRVRPRVRPEIVELVGNASAKQVLDIDKQDGAEKVKYALRSVFTQLMSASKEMATKSIAKLKSRLHAESQLRCLTEKEQLVLHLEKQYPGDIGVISAFFFNYVKLNPGEALYLGANEPHAYLSGECIECMATSDSVVRAGLTPKHRDILTLCSMLTYKQGYPDILKGFPLSPYITRYLPPFEEFEVDSCILTKGASTVFPAIPGPSIFLVFIGKGTFRIGSREDIXTEGDVLFAPFNTEITITTSSELQL

SEQ ID NO: 72516 - protein, 84 aa, Gossypium hirsutum
  Clone ID: LIB3148-044-Q1-K1-F11.pep
EPHAYLSGECIECMATSDNVVRAGLTPKHRDIITLCSMLTYKQVQLFDQGFDNFLFESKNNLLRVIPHIGFSFSVLAELLLYEL

SEQ ID NO: 72517 - protein, 60 aa, Gossypium hirsutum
  Clone ID: GOSHI-09MAY01-C30496_1.pep
SPSFHESQLACSNHFEIFNELRYMTTSTEPNEQFRAPPGPHTFRDETSPINYWFLHVRII

SEQ ID NO: 72518 - protein, 125 aa, Gossypium hirsutum
  unsure (1)..(125): unsure at all Xaa locations
  Clone ID: GOSHI-09MAY01-C30446_1.pep
GLDYLGNPNLVHAQSILAVLGFQVVLMGLVEGFRINGLPGVGEGNDLYPGGQYFDPLGLADDPVTFAELKVKEIKNGWLAMFSMFGFXVQAIVTRKGPLENLLDHLDNPVANNAWVYATKFVPGS

SEQ ID NO: 72519 - protein, 130 aa, Gossypium hirsutum
  unsure (1)..(130): unsure at all Xaa locations
  Clone ID: GOSHI-09MAY01-C30736_1.pep
APQWYDAGKFEYFASSSPLGVIEFILFHYVEIRRWQDIKNPGCVNQDPIFKQYSLPPHECGYPGXIFNPLNFAPTLEAKEKELANGRLAMLAFLGFIIQHNVTGKGPFDNLLQHLSDPWHNTIINTIRGY

SEQ ID NO: 72520 - protein, 99 aa, Gossypium hirsutum
  Clone ID: LIB3146-046-Q1-K1-B11.pep
QIIFYKLMIINVHFNFLQKSILVYILEDLGVTFQPIPIKAMLKTNYKEKKRKFIYRSLYHVKQETLARYQIPSEKLHCWVNSITIKGTSRKSLDPDSYL

SEQ ID NO: 72521 - protein, 164 aa, Gossypium hirsutum
  Clone ID: GOSHI-09MAY01-C30656_1.pep
MSISMALFSPPCPTSSVNPNFTHKPTLFLPLKKPFLSLSTPKSLPDNGAGVSASVPAVEDPKPSQNDPVLEKAVEGSSGPNGAATSTEIEVLSKFEDPRWIGGTWDLKQFQKNGTTDWDAVIDAEVRKRKWLQDNPETTSNDDPVVCDTAIIPWWAWMKRFHLT

SEQ ID NO: 72522 - protein, 245 aa, Gossypium hirsutum
  unsure (1)..(245): unsure at all Xaa locations
  Clone ID: GOSHI-09MAY01-C30676_1.pep
SCRHEENGSGQTCFKGSLKAADLDKDVSAKEKLILLWREAFMKSYKAMDKELRSHPNLDCFCSGSTAVTIVKQGSNLFMDTSGILXAVMGSKDNNDLMVAIQLTVDLKPDLPREAERIKRCKGRVFALQDEPEVCRVWLPFDDPPGLAMARAFGDFCLKEYGVISMPEFSHRLLTEKDQFIVLPSDGVWDVLSNEEVVEIVSSAPSRSSAARMLVVSAAREWKLKYPTSKMDDCAVVCFSFGWEN

SEQ ID NO: 72523 - protein, 142 aa, Gossypium hirsutum
  Clone ID: GOSHI-09MAY01-C30186_1.pep
PRVRLSKNTRIDFNIYSRNTSSTSSTVPCSSDKCEQQRKCSSPSSNCPYQVIYLSNGTSSIGVLVEDVLRLTTDDDKTNKPVDAKITFGCGKIQTGSFLNGAAPNGLFGLGMDNISVPSILAKENVTSNSFSMCFRSDGIGR

SEQ ID NO: 72524 - protein, 194 aa, Gossypium hirsutum
  unsure (1)..(194): unsure at all Xaa locations
  Clone ID: GOSHI-09MAY01-C30386_1.pep
VEPWLLSPILRTIRATSVSAPSPKLPPSISSPQRFPFLTKPLRPNAFNLSTSSSAPDQKWRVNVSFFPAFFNKGKDAKVLKQDLLDCIAPLDRGADATPVDQQRVDQFASKLGAVNPTKQPLKSDLLNGKWELIYTTSKSILQTQRPKFLRSSTNYQAINVDTFRXQNMESWPFFNQVTADLTPLNARTVAVKF

SEQ ID NO: 72525 - protein, 69 aa, Gossypium hirsutum
  Clone ID: GOSHI-09MAY01-C30366_1.pep
RSIITSIRQLIYGIRIRKGRAQESLSGAKSNHSSSGHHTDSSHFDTITITQFSTLVKIKTIQPLYPGGD

SEQ ID NO: 72526 - protein, 136 aa, Gossypium hirsutum
  Clone ID: GOSHI-09MAY01-C30296_1.pep
MQMRTLNAATPSLTPLSVLSETRTEARKAPLLPIASPLKLPNSPAFIKTQPALHQCLSRTLHGGLLLLPSLLPNGFAKALSYEEALQQTTGFSSSVDFDPNGILDTVVSFVTENPTVIAGGTVALAVPLILSRLLK

SEQ ID NO: 72527 - protein, 183 aa, Gossypium hirsutum
  Clone ID: GOSHI-09MAY01-C30286_1.pep
MSEREEDYDSDAPEEFSNQQGIKQDENIRKIQKENKARVRREGKERRRLWAQRKTPRQSTKVEKVQEDVETDEESQAKKGLLPTNIVEMLASREKQVFLSDSEDEKAEVNPIPRKKKKKNSGVEPVILNDMPPPQCLQSSLEFLKKGKMQVPRSSLVLKNSNQVLRLSCAISTSGLRESCKRL

SEQ ID NO: 72528 - protein, 167 aa, Gossypium hirsutum
  Clone ID: GOSHI-09MAY01-C31966_1.pep
MLSSLYISTSLSVSPISPPSTSRSKFRPPRSAATYTSQQQKGSTNGYLSRQGMATCTSLYEVLGIPVGASNEEIKSAYRRLARVCHPDVAAIDRKDSSADEFMKIHAAYSTLSDPQKRAVYDSKLVWRNQRPLTSGSRASGYRGGSLGEPISARKPESTQSRYRGGR

SEQ ID NO: 72529 - protein, 75 aa, Gossypium hirsutum
  Clone ID: uC-gsflnu33B093a01b1.pep
LYTICGCPRCGASTCRSKFRSPRSAATYTSQQQKGSTSGCPSQRGMGEMRLTRLSLRGSRWRCYRGSNISSNSIS

SEQ ID NO: 72530 - protein, 165 aa, Gossypium hirsutum
  unsure (1)..(165): unsure at all Xaa locations
  Clone ID: GOSHI-09MAY01-C31876_2.pep
PTRPLNEDQDLEFESEERDRNDEEDEEDDDGGYGSENGEEGSPKNLDSEVVAENTEVKNVKLPNLTVKEKKELASYAHGLGKKLKCQLVGKSGVTDNVIFSFLETLEANELLKIKIHRTCPGQLQDVVSQLEQATRSLVVGQIGRTVIIYXPSLTKMKAEEKKKE

SEQ ID NO: 72531 - protein, 190 aa, Gossypium hirsutum
  Clone ID: GOSHI-09MAY01-C31876_1.pep
MRKRARGFEQRGLTQPDITSTWRAMEALYDSRKARAIGVSNFSCKKLEDLLEVARIPPAVVQVECHPIWQQPKLHALCKSKGVHLTGYSPLGSPGTGFVKKEVLKNPVANMVAQKLGMSPAQVALRWGLQKGHSVLPKSTNEVRIKQNFDVFDWSIPEDLLAKFAEIEQERLIKGSVFVHETLGAYRSID

SEQ ID NO: 72532 - protein, 244 aa, Gossypium hirsutum
  Clone ID: GOSHI-09MAY01-C31506_1.pep
MEMSLTQIAKPPPCLVNKNSLFTNKNRVKSTVEALRNSYPKRATLSSNWDVSNLSPLSSSSTTPTWFPRFEELDTTNMLLRQRIIFLGSQVDDMTADLIISQLLLLDAEDSEKDIKLFINSPGGSVTAGMGIYDAMKMCKADVSTICLGLAASMGAFLLATGTKGKRFCMPNSRVMIHQPLGTAGGKATEMSIRIREMVYHKVKLNKILSRVTGKPEDQIEVDTDRDNFMNPWEAKEYGLIDGV

SEQ ID NO: 72533 - protein, 126 aa, Gossypium hirsutum
  unsure (1)..(126): unsure at all Xaa locations
  Clone ID: GOSHI-09MAY01-C31486_1.pep
MAAETALRGSRSSSTGCNLNGFQRRPTPLSSSTRFLGLRPRASSSSISSSLSHFMGKCHNWLKTSYFXRQHKGKRRNFSLFAMAADESKRAVPLKDYPNIGIMAHIDAGKTTTTERILYYTGRNYK

SEQ ID NO: 72534 - protein, 143 aa, Gossypium hirsutum
  unsure (1)..(143): unsure at all Xaa locations
  Clone ID: GOSHI-09MAY01-C31796_1.pep
GIENCDLRLLACKDPIDYGTRSMVRDRARLVWAENTQARSACIDSPDSYDYGAYKWTVQLVTNDSXRLEKILFPILWGLMTLSTFGNLESTTEWLEGVFNIIVLTRGLLLVTMLIGNINXFLHATTXRKQAMQLKMRNINWWM

SEQ ID NO: 72535 - protein, 253 aa, Gossypium hirsutum
  unsure (1)..(253): unsure at all Xaa locations
  Clone ID: GOSHI-09MAY01-C31186_1.pep
ICSITGIDCMGGFHPSLDAILEGLGYAAPPIMALLFILDDEVVKLSPHARAIRDVEDEELRSFFYGMAPWQFILMVAASSVGEELFYRAAVQGALADIFLRGTELVSDARGMAALTGVLPPFVPFAQAFAAVITAALTGSLYYVAASPKDPTYVGAPVQRSRSAREDLKKLFAAWYETRQMKKIYSPLLEGILXFYLGFEWIETNNILAPIITHGIYSAVILGHGLWKIHDHRRRLRQRIQQLKSEGKNSTKL

SEQ ID NO: 72536 - protein, 117 aa, Gossypium hirsutum
  unsure (1)..(117): unsure at all Xaa locations
  Clone ID: LIB3148-057-Q1-K1-G8.pep
FLRGTELVSDARGMAALVYMLFYELYMLIXTGVLPPFVPFAQAFAAVITAALTGSLYYVAASPKDPTYVVAPVQRSGSAREDLKKLFAGAHSTHKTSFIQWYFSIVKFQEAHLYPWP

SEQ ID NO: 72537 - protein, 133 aa, Gossypium hirsutum
  Clone ID: GOSHI-09MAY01-C31166_1.pep
MGAHEEEAGGEEYLFKIVLIGDSAVGKSNLLSRFARNEFDNNSKATIGVEFQTQCVEIDGKEVKAQIWDTAGQERFRAVTSAYYRGAVGALIVYDITRRSSFDSIKRWLDELTTHCDTTLTRMLVGNKCDLEN

SEQ ID NO: 72538 - protein, 119 aa, Gossypium hirsutum
  unsure (1)..(119): unsure at all Xaa locations
  Clone ID: LIB3145-039-Q1-K1-E9.pep
SNALAVAVIASVAWITYEICLKATDPWNXXWQXAWIITAFWDILSLXLLWGICYLWAPSQSSQRYAYSEDVGEEFDDEEAQSLTRGQSNGDVSLVKQEQKNGNAAISDEEDESEEDKRE

SEQ ID NO: 72539 - protein, 67 aa, Gossypium hirsutum
  Clone ID: LIB3146-051-Q1-K1-E2.pep
SVFSLLIPLIVRYAYSEDVGEEFDDEEAQSLTRGQSNGDVSLVKQEQKNGNAGISDEEDESEEDKRE

SEQ ID NO: 72540 - protein, 107 aa, Gossypium hirsutum
  unsure (1)..(107): unsure at all Xaa locations
  Clone ID: LIB3120-015-Q1-K1-F4.pep
RISVKLDIYRKFSNALAVAVIASVAWITYEVVLSRFQFLSWLEFSRMVDLIRSALQIYFKATDPFNERWQSAXIITAFWDILSLALLWVIGYLWPPFKTSHRAALFL

SEQ ID NO: 72541 - protein, 141 aa, Gossypium hirsutum
  Clone ID: GOSHI-09MAY01-C31046_1.pep
RQANKNTHHFINNPTLKKPISMATFSPPPLPTSFSVRPHLTHNSTLSLPFKRPFLLLSTIPKSLPDNGAGVSASVAAVEDPASNQIENAAEVSAGSNGAAMATSAANAEVLSKFDDPRWIGGTWDLQPVCKRWNHRPGCWY

SEQ ID NO: 72542 - protein, 94 aa, Gossypium hirsutum
  Clone ID: LIB3272-044-P1-K1-C5.pep
PIHLGSSNLLKTSAYQAHVAKAAPLDTAETSAAFSIWLNAGSSTAATEAETPAPLSGKDLGIVDSKRKGLLKGRERLELWVKCGLIPPPNYGPP

SEQ ID NO: 72543 - protein, 61 aa, Gossypium hirsutum
  Clone ID: GOSHI-09MAY01-C31296_1.pep
AQRRWGDSILISFHFKLISATDSGWKIRLSEECNCGDNRVHAFQFHRHALHLTARVDIYST

SEQ ID NO: 72544 - protein, 204 aa, Gossypium hirsutum
  unsure (1)..(204): unsure at all Xaa locations
  Clone ID: GOSHI-09MAY01-C31276_2.pep
SLDHLPPSEQLCYVHCNICDTVLAVSVPCTSLFKTVTVRCGHCTNLLPVNMRGLLMPSANQFHLPHNFFHSXHNLLEEISNPSPNILLNQGNTSDITLPTRGVVDELPRPPVINRPPEKRQRVPSAYNRFIKDEIQRIKAGNPDITHRGAFSAAANPPARFPHIHFGLMPDQPAKRTNVRQQESEDVLMKDGFFASANVGVTPY

SEQ ID NO: 72545 - protein, 58 aa, Gossypium hirsutum
  Clone ID: GOSHI-09MAY01-C31276_1.pep
LAVDGQLRTEKNSLLKFGYSVVAINYYNPLATAEPAFILSWLDIKLAISNNACNFSLR

SEQ ID NO: 72546 - protein, 205 aa, Gossypium hirsutum
  unsure (1)..(205): unsure at all Xaa locations
  Clone ID: GOSHI-09MAY01-C32836_1.pep
SSSHLLFLSKTLTKGTCFSSLSTMSINLNAHAFAGNPIRSKTPKAHDPLSPSSAFRPLKTHLLQIHNSPPFHXPPKSPLFKVLPFRKGRPLASSSITGNNDDDVPIWHLGWISLPDCKNFLGKCGVDLTEDSLVYLGSKVEDDVVYWAVDVSGESRLVPELGDKQFCFVELRTLMVATDWSDSIAMGELAIAGHARALLEWHNLS

SEQ ID NO: 72547 - protein, 189 aa, Gossypium hirsutum
  unsure (1)..(189): unsure at all Xaa locations
  Clone ID: GOSHI-09MAY01-C32506_1.pep
PTRPNHSYDDHIHHHFHSNISQRHQHSTTTILPLNSIIIIIISIISLVLILSIFLIIVRLRGLKSGKKHGSCKENSGIHNTSSRFIAPTTIDFNASPDVKGNCLYGGSMRKPASAYRGVQVFTYKELEFATDNFSEANVIGNGGSSVVYKGVLADGTVAAIKRLHRDRKQGERAFRMEVDLLXRLNSPY

SEQ ID NO: 72548 - protein, 149 aa, Gossypium hirsutum
  Clone ID: GOSHI-09MAY01-C32496_1.pep
EIPNEDKNFTTRMRIIDFGSSIDGFTLKHLYGSAGPSRSEQTHDYSPPEALLNASWYQGPTSTSLKYDMWSVGVVILEMILGTPNVFQISALTRTLLDHHIEGWNEDLKELAYKLRSFMELCILITGSSSKHHHAMNQAGMSPASWKCS

SEQ ID NO: 72549 - protein, 78 aa, Gossypium hirsutum
  Clone ID: GOSHI-09MAY01-C32476_1.pep
MAGGSSRRQEGSLVINNTNVFAALETLRRKKKSDKDRGSSKKSSFKSQQQPEKEAEPQVFWSPAPLTGKSWADVDDDH

SEQ ID NO: 72550 - protein, 180 aa, Gossypium hirsutum
  Clone ID: GOSHI-09MAY01-C32186_1.pep
MHGFSIQISSNLINRLAEDDEKLKKRTKKTKPRVPREPRQPQTKVDQTQIPDDSEKQNKTTGSGWPVPPPMFLPVNQPPYSATAQLDPIRAVVKESENVVEKLRKQEDNMVQEVTQRAKDLHEKEFKIPEQKPMPCLVENNACMECFKENVKDVTKCAPLAQNYADCARRVRQLVKSSGK

SEQ ID NO: 72551 - protein, 280 aa, Gossypium hirsutum
  Clone ID: GOSHI-09MAY01-C32016_1.pep
MESLSRSLSISISNLRETYPILNSHLPSSSFSLIKAPNQRIGFLKFNSETSQFHRFYLQALPREVPVDEGEDQLQPLTLNNGFRLVSEDSQSVYQGDSNQSKSSEKDVDKLIKVELHGSGATGGSRAGLFRTPISGGVHSATSAHGLPRPALAVRNLMEQARFAHLCTVMSRMHHRREGYPFGSLVDFAPDSMGHPIFSFSPLAIHTRNLLADPRCTLVVQIPGWSGLSNARVTIFGDVYPLPEHEQEWAHKQYIAKHQQGPSQQWGNFYYFRMQNISDI

SEQ ID NO: 72552 - protein, 95 aa, Gossypium hirsutum
  Clone ID: LIB3543-008-Q1-K6-G6.pep
TVMSRMDHRREGYPFGSLADFMPDSMGHPIFSFSPLAIHTRNLLADPRCTLVVQIPGWSGLSNARVMIFGDAYPLLKHQQLKSIENQGWTGEKRK

SEQ ID NO: 72553 - protein, 120 aa, Gossypium hirsutum
  Clone ID: LIB3120-026-Q1-K1-F7.pep
EFCQSWCTDFINEVANTETARCVFDPKGLYVFPMESLSSSLSISISNLRETYPILNSHLPSSSFSLIKAPNQRIGFLKFNSETSQFHRFYLQALPREVPADEGEDQLQPLTLNNGFRLLS

SEQ ID NO: 72554 - protein, 106 aa, Gossypium hirsutum
  Clone ID: LIB3582-017-P1-K1-C2.pep
WLSHSPTDIESYIRPGCIVLTIYLRQAEAAWDDLCSNLSFSLSRLLDCSDDTFWRTGWICIRVQDQIAFIYNGQVLVDTYLPLGSVRYSKIVNVKPIAVSATERAQ

SEQ ID NO: 72555 - protein, 102 aa, Gossypium hirsutum
  Clone ID: LIB3120-033-P1-K1-A1.pep
SRTDRIVFKLFGKEPNDFPLGLRAQILDWLSHSPTDIESYIRPGCIVLTIYLRQAEAAWDELRYDLSFSLSRLLHWSDDTFWRTGWICIRVLDQIAFIYNGQ

SEQ ID NO: 72556 - protein, 97 aa, Gossypium hirsutum
  Clone ID: GOSHI-09MAY01-C33956_2.pep
MVSATIDLLKKELPVEEGSLVLSKDVKTGLVLVDVVNGFCSVGAGNLAPVKPDKQISYMVKESARLAKLFCGEKWPAFAFLDYHHADIPEPSYPPHC

SEQ ID NO: 72557 - protein, 66 aa, Gossypium hirsutum
  Clone ID: AW187300.1.pep
MVSATIDLLKKELPFEEGSLVLSKDVKTGLVLVDVVNGFCSVGAGNLAPVKPDKQISYMVKESARI

SEQ ID NO: 72558 - protein, 87 aa, Gossypium hirsutum
  Clone ID: GOSHI-09MAY01-C33586_1.pep
PKPNKPSLLSKPTVATQNPKAVLKAKYKSPYPVTSIQQTQTQTDPGLKRPNWPKLLQTQAGNPRVSALFLLAPQRLLEASRSVCLAP

SEQ ID NO: 72559 - protein, 193 aa, Gossypium hirsutum
  Clone ID: GOSHI-09MAY01-C33446_1.pep
MSLICGGGVFAMAVKKLGLSSNLEFEPHEADCKINGSLLPSHLLLLLWMCWAMLWRGGALKSSERKGNLLLLDINHLALSAVVACAELDSSFDLWNCDIVGLDVQLPVGKFLNWAITTAPILSDCLTQYVNRRLQISVLAEDEAGSSESISGDLSPNASHALLLTRGRAWAISLAPRNTITEEILKLCFSADI

SEQ ID NO: 72560 - protein, 110 aa, Gossypium hirsutum
  Clone ID: GOSHI-09MAY01-C33646_2.pep
ASDRQSEETAKIPATSGEETTSGPVALHEETLAIPTTLAEGSPTMTAKLDEETPTSPTNLAEETLTSPTSSGVEASTVLATNSEETSAVSTTTEMETLPPAGAESVEPAT

SEQ ID NO: 72561 - protein, 76 aa, Gossypium hirsutum
  Clone ID: GOSHI-09MAY01-C33646_1.pep
MIIYYTSRSTREGQYTQYCIILPKKESEHKTRVAPDEPSATCLLSSMATRIIPTKPHTDIRTTGRILPYNNSEISK

SEQ ID NO: 72562 - protein, 64 aa, Gossypium hirsutum
  Clone ID: LIB3135-007-Q1-K1-A1.pep
VVVETEDVSSMLVVRSVEASTPEDVGVVIVSSDKFVGLVGVSSYNFVVIVGLTSYKVVGIVRVL

SEQ ID NO: 72563 - protein, 163 aa, Gossypium hirsutum
  Clone ID: GOSHI-09MAY01-C33616_1.pep
MATYEGKVFTEEQEALVVKSWTVMKKNAAELGLKFFLKIFEIAPSAKKLFSFLRDSNVPLEQNTKLKPHAMSVFVMTCESAVQLRKAGKVTVRESNLKKLGATHFKYGVVDEHFEVTKFALLETIKEAVPDMWSDEMKNAWGEAYDRLVAAIKIEMKACSLAA

SEQ ID NO: 72564 - protein, 54 aa, Gossypium hirsutum
  Clone ID: LIB3135-055-Q1-K1-G6.pep
QRQTWHGASAECFAAMEHMSLSRMTMSFLADGTVSNMYKKFFYPKREAILGFSA

SEQ ID NO: 72565 - protein, 89 aa, Gossypium hirsutum
  Clone ID: GOSHI-09MAY01-C33196_1.pep
TQKWRIPHVLLAASREPQALSSSDGATTARPGERSTPYASNGMRFLESVGISNPIPDHYRSEDSYSDFLCNHLKTDTVRRGHITCFTTV

SEQ ID NO: 72566 - protein, 235 aa, Gossypium hirsutum
  unsure (1)..(235): unsure at all Xaa locations
  Clone ID: GOSHI-09MAY01-C33096_1.pep
HLGLSDSVEEKNDLFVLGTEDGVDEEDDDKDDDADESEGLTGFQNILQDVVPGAKVKVVKVTSPGKVDQDFVSKVIEQIIDEEDEEKDVDIESIEVDDEIKSDNDQERDKIEMDTDNGVIDSDRQSEIAVKVVVGGLVQKLSGNXPAFESLRVPAKLVKKGHLAFSFSIEKDVSQQDTSLKAKGLIDRKAKGQGQRTADEIMIDLANFXRQRAVXLKVLKDVGELINLTLSQVKN

SEQ ID NO: 72567 - protein, 343 aa, Gossypium hirsutum
  unsure (1)..(343): unsure at all Xaa locations
  Clone ID: GOSHI-09MAY01-C33396_1.pep
KSCSSLKVLEVPPDNEFEKRIRPEVIPAKEIDVTFADIGALEETKESLQELVMLPLRRPDLFKGGLLKPCRGILLFGPPGTGKTMLAKAIAKEAGASFINVSMSTITSKWFGEDEKNVRALFTLAAKVSPTIIFVDEVDSMLGQRTRVGEHEAMXRKIKNEFMAHWDGLLTRQNERILVLAATNRPFDLDEAIIRRFERRIMVGLPGAENREKIFRTLLGKEKVEDGLDFAELALMTEGYTGSDLKNLCTTAAYRPVRELIQQERLKDLERKQRVVEVQNKEDGTDERVITLRPLSMEDFRQAKNQVAASFASEGAGMNELKQWNDLYGEGGSRKKEQLSYFL

SEQ ID NO: 72568 - protein, 54 aa, Gossypium hirsutum
  Clone ID: LIB3135-003-Q1-K1-D1.pep
MEDDFNHGFSVKILLEVSVTVKPDAWADAWANACPDAWADAWADAWADAWADAW

SEQ ID NO: 72569 - protein, 114 aa, Gossypium hirsutum
  Clone ID: LIB3828-026-Q6-N6-D10.pep
LSDDNNCYIAWLCTSAGSNAIVFHFSSFQDHPINIGFFDRPFLHESYIRSQFIRKQTMKYMYIINNSHYYNFLMEMVQRRSQSDCTVTFSSLTIFDVLTRPPNSIAVLSAPPIC

SEQ ID NO: 72570 - protein, 128 aa, Gossypium hirsutum
  unsure (1)..(128): unsure at all Xaa locations
  Clone ID: LIB3135-002-Q1-K1-H11.pep
PRVRXNLCVLVVGALGGRFDHEMGNLNVICRFSSMRIVLLSNDSLIHLLPRTYCHEIHIQTSVEGPHCGLIPIGTPSKSSTTTGLQWDLNNTAMEFGGLVSTSNIVKEEKVTVQSDCDLLWTISIKML

SEQ ID NO: 72571 - protein, 113 aa, Gossypium hirsutum
  Clone ID: GOSHI-09MAY01-C33306_1.pep
IPIIEDARHPAKYRMLVGMVDVIFSDVAQPDQARILALNASFFLKAGGHFVISIKANCIDSTVPAEAVFQSEVKKLQQEQFKPFEQVTLEPFERDHACVVGGYRMPKKQKAAT

SEQ ID NO: 72572 - protein, 102 aa, Gossypium hirsutum
  Clone ID: uC-gsflnu33B055a09b1.pep
FYVKKLQQEQFKPFEQVTLEPFERDHACVVGGYRMPNKQKAAHKGFGGLVLSPKFRGFGLEVMNMFWDQTSFFFVLKIKFISTKEKGLLIRQTKHKNRVFYF

SEQ ID NO: 72573 - protein, 59 aa, Gossypium hirsutum
  Clone ID: GOSHI-09MAY01-C28456_1.pep
MSGGYSNSKKTDDIYEKVCGQQASFAALTMSRLRCMLRGIDIRICIVLLIAIPVFMFGI

SEQ ID NO: 72574 - protein, 171 aa, Gossypium hirsutum
  Clone ID: GOSHI-09MAY01-C28476_1.pep
LISPYRRERPQSPFRGGGFLGMPKEAEKYKANMMVKYTRSNNNSQELVPYQSSRQGSGPLSPAVEKTLYVDTVNEMASSNSNSSDTKVQMDSIGKHSNTSEVNKVLEEPATMESPLQDTKGLSLLDGKAILEYETAGSVKSSRSSFFNKPDLRGQAEMIDCFTQNGDLIKN

SEQ ID NO: 72575 - protein, 225 aa, Gossypium hirsutum
  Clone ID: GOSHI-09MAY01-C28776_1.pep
MSDHLVLGVDRLMKPEESDAGPSTEVPGSSCLLESKEKGVVNGEEEEEPLIQSAECRICQDEDSIKNLETPCACSGSLKYAHRKCVQHWCNEKGNIKCEICHQPYEPGYTALPRTQTEETSIDIGGVWTISGTPLDLRDPRLLAIAEAERQFLETEYDEYAASNASGAAFCRSAALILMGLLLLRHALNVPDPDSDEDLSTFFSLFFIRAAVFLLPCYIMACAIM

SEQ ID NO: 72576 - protein, 166 aa, Gossypium hirsutum
  Clone ID: GOSHI-09MAY01-C28686_1.pep
MPGARSIGVAMDFSASSKNALKWAIDNLADKGDALYIIHINNNSLDESRNALWAKSGSPLIPLTEFRVPEIMKKYDVETDIEVLDMLDTASRQKEINVVSKIYWGGDAREKILDAIEDLKLDSLVMGSRGLGTVRRIILGSVSNYVVTHATCPVTIVKEQSSSSKH

SEQ ID NO: 72577 - protein, 121 aa, Gossypium hirsutum
  Clone ID: GOSHI-09MAY01-C28306_1.pep
YLVDGDSSDSPLSVLSTISNSMEARFDLKYEEPLAFLGAPAAMETDRSGYSTAKSDTLVENGVAVEHTSPGQERTFEGEKFQVPRISIEKKPFFSKNDDQPCLCQTKERSFQGFALNYHES

SEQ ID NO: 72578 - protein, 141 aa, Gossypium hirsutum
  Clone ID: GOSHI-09MAY01-C28206_1.pep
PFNFLVKERTIGPWKNAPRFIPSSSSEMLSRYNSAKNVPGYLRLRAKAKVVGTWDDHDYGLNDAGKELSAKTTNQRLLLDFLDEPQDSPRRKQDGVYTSYTFGPPGKQVKIVLLDTRYHRDPLSSDGSVLGDSQWSWLGKE

SEQ ID NO: 72579 - protein, 215 aa, Gossypium hirsutum
  Clone ID: GOSHI-09MAY01-C29296_1.pep
MTCVTSQVTFPAKLRFCFFNLKMAVDLMSFPKMDDQMAVQEVASQGLKGMEHLIRLLSHQSKNVDCTDLADLTVSKFKKVISLLNRTGHARFRRGPIQPLSSSSSPSTSSSASLSVPNSQNNLTLTSAAISTPANINTALVGTSVISPSSFVQSQPQSLTLDFTKPNLFGSNGKSTELEFTKESLSVSSNSSFMSSAITRDGSVSNGKQGSSLFL

SEQ ID NO: 72580 - protein, 156 aa, Gossypium hirsutum
  unsure (1)..(156): unsure at all Xaa locations
  Clone ID: GOSHI-09MAY01-C24996_1.pep
MASTTTTTTGAYSSAEENPKKTLDAASPSMDKSDPPSASTLSDAEVSVKEGEGLKTTGTAVGLAAGESSGPADDIQKKIRRAERIGLPIQLSEQEKRNSRAERFGTAPSSKGSEESKQSEELKRKARXAERFGIAAPTTATDEDAKKKARLARFAP

SEQ ID NO: 72581 - protein, 79 aa, Gossypium hirsutum
  Clone ID: GOSHI-09MAY01-C24936_1.pep
NREEVRCLRCSQDEEDSIHVFQIWVFSKGTNEQCMGFWCGLWGILATSTRPRQRIRRANKPIFFDAAFDHKPTDKPDAW

SEQ ID NO: 72582 - protein, 68 aa, Gossypium hirsutum
  Clone ID: LIB3146-011-Q1-K1-B10.pep
NREEVRCLRCSQDEEDSIHVFQIWVFSKGTNEQCMGFCCGLWGILANSTRPTHKDSKRTRASHRDSLG

SEQ ID NO: 72583 - protein, 282 aa, Gossypium hirsutum
  Clone ID: GOSHI-09MAY01-C24926_2.pep
SLTRPVDKHVDLQNSSAKRMIGKVAVVTGGARGIGAATAKLFAENGAYVVIADILDETGTMLADSIGARYIHCDVAKESDVESAIQLAITWKGKLDILFSNAGIGGTASSITSLPMRPVKHLVSINLLGNVHAIKHAARAMLRCNTKGSIICTSSSAGIMGGLASHPYSLSKAGIVGLMRTAACELGVHGIRVNCISPHGVPTDMLISGYRMFRGNETTPEEVKKLVGDQGSLLRGKAATVEDVAQAAVFLASDDTGFITAHNLIIDGGYTSAISSLSFIYK

SEQ ID NO: 72584 - protein, 52 aa, Gossypium hirsutum
  Clone ID: AI055665.1.pep
IRCHLRQGTLGLGHIFNSGSFPRNRLLDHRPVSSLFRCCSFPGHFIPLMTYL

SEQ ID NO: 72585 - protein, 202 aa, Gossypium hirsutum
  Clone ID: GOSHI-09MAY01-C24846_1.pep
AYFQAKEERLLVYDYFPNGSLFSLIHGTRTNGGGKPLHWTSCLKIAEDLASGLLYIHQNPGLTHGNLKSSNVLLGPDFESCLTDYGLTLFRDPESPEEPGAATFFYRAPECRDIRKSSTQPADVYSFGVLLLELLTGKTPFQDLVQEHGSDIPQWVRSVREEETESGDEPTSGNETSEGKLQSLLNIAMACIARAREPSMMR

SEQ ID NO: 72586 - protein, 356 aa, Gossypium hirsutum
  Clone ID: GOSHI-09MAY01-C24866_1.pep
TLLQDSVCPILQVVSSIPSCKLIKETCERNFAMHFDYRTTASLDFISLDETTFRNIIQHPDLTVISEERVLDAILMWYMKSEKLCGWEVVNELITNSTLECVFKDRLKLVNDLLASVRFSLLPYPLLKKLEKTSLSTQISAFGDLVKEAINYIECGAATHGNDQNERFQHRRSSYKELQYICDGDSNGVLYFSGTSYGEHPWVNPVLSKRITITASSPASRHTDPKVLVSRTYQGTCFAGPRMENGNICAWWMVDIGKDHQLMCNYYTLRQDGSRAYIRNWKFQGCMDGKTWIDLRVHENDQTMCKPGQFASWPVTGPNALLPFRFFRVLLTGPTTDASNPWNLCICFLELYGYFR

SEQ ID NO: 72587 - protein, 306 aa, Gossypium hirsutum
  Clone ID: GOSHI-09MAY01-C24816_1.pep
FASGRDVPHLPSPRVRNDLGEEDEEDLDDDGDKSQHALAPEYKRLIAIHAGKPKGGLEECLRVDPDKVRRLSMSEQQLENAAITHGKEIVRFTQRNILRVYPRGTRVDSSNYNPLIGWMHGAQMVAFNMQGYGRSLWLMHGMFKANGGCGYLKKPDFLLNPNKVFDPNVKLPVKKILKVTMYMGEGWYYDFHHTHFDAYSPPDFYARVGIAGVPFDSVMKKTKTLEDNWVPCWNEESEFHLTVPELALLRVEVHEYDMSEKDDFGGQTCLPISELRSGIRAVPLNSRKGEKYSSVKLLMRFEFIDP

SEQ ID NO: 72588 - protein, 111 aa, Gossypium hirsutum
  Clone ID: LIB3146-005-Q1-K1-E7.pep
PTRPDPRVRPRVRGIAGVPFDSVMKKTKTLEDNWVPCWNEEFEFHLTVPELALLRVEVHEYDMSEKDDFGGQTCLPISELRSGIRAVPLNSRKGEKYSSVKLLMRFEFIDP

SEQ ID NO: 72589 - protein, 95 aa, Gossypium hirsutum
  Clone ID: GOSHI-09MAY01-C24806_1.pep
NSEGFPPFCIAGVLLPKKKKKENKEVLGLPYQNSFSQYFLPANIFFVTFSRIQQLLWFNIGGGGTFMTSSTFDGIHVGKRKQFTMAALGFHFGGS

SEQ ID NO: 72590 - protein, 468 aa, Gossypium hirsutum
  unsure (1)..(468): unsure at all Xaa locations
  Clone ID: GOSHI-09MAY01-C24506_1.pep
MATPDRILANFTPLEVADSLAHLSLDSQSKTTKAPEPVKKDFYGDNGSYMYPQTYGYMSYAPYSIPSPPLPAMGHDGQLHALQEYYYPSPYYQPPLQTSQANAPQVDVSSFGATDQSSLSVDTNKGNSNGITSGGSGSLKPTLKSSSLNPNAFYKGGGLPTGNLSQGYQDPRFSYDGNQSPIPWLDISMSPNGQSEQTANGGFSSYTNNLSSGRNQNLHPFPHVMNMHNARPSSGVGQSYGYMNHMYPNNVTYGHYGNAIRGGSGFGSYGYDARKKGLGWYNVGNNKSRFRGYGKENIDGFNELNKGPRVKGYKNKDGSGNATLAVKDQNLPLIKSNDEDIVSLVPDTEQYNREDFPESYSDGMFFVIKSYSEDDVHKSIKYNVWASTSNGNKKLDAAFREAKEKSDGCPVFLLFSVNTPARPVGLAEXMVGPVDFNRTVEYWQQDKWTGCFPVKWHIVRMSKCLLGT

SEQ ID NO: 72591 - protein, 239 aa, Gossypium hirsutum
  Clone ID: GOSHI-09MAY01-C24436_1.pep
TVAITSTGIIICELLLADVSGELNNNNITTNVKVDTKSTLFATVTVDEPAPGLKTIFSFIVPDQRSGKVELQYQHEYAGISTSIGFNANPLVNFSGVVGNNCVSLGTDLSFDTASGNFTKLNAGLNFTHSDLIASLTLNDKGDTLNASYYHIVSPLTNTAVGAELTHSFSSNENTLTIGTQHALDPLTTVKARLNNYGRASGLIQHEWRPKSLFTISGDVDTRAIEKSAKVGLALALKP

SEQ ID NO: 72592 - protein, 121 aa, Gossypium hirsutum
  Clone ID: LIB3083-120-Q1-L1-C3.pep
KRPGLYFDIGKKARDLLYKDYQAYHKVTGTTYTFHGVAITSTGTKKGELLLADVNTQLKNKNITTDVKFDSRSNLFTTVTIDEPAPRLKTIFSFVVPDQKSGKVELQYRHEYAGISTGIGL

SEQ ID NO: 72593 - protein, 79 aa, Gossypium hirsutum
  Clone ID: LIB3083-049-Q1-L1-F8.pep
NKGALNFTGQLTFDNMKLVQQNCMPLEIQQKQIAKVCHSQLFLQSMRAMTINVKSVKSTLFLSKSPPIKFMAFPSTAQQ

SEQ ID NO: 72594 - protein, 53 aa, Gossypium hirsutum
  Clone ID: GOSHI-09MAY01-C24796_1.pep
TRSPETEFRPPMSEVVQALVRLVQRASVVKRRSSDECGFSYRTPDHEIIDLSF

SEQ ID NO: 72595 - protein, 191 aa, Gossypium hirsutum
  Clone ID: GOSHI-09MAY01-C24756_1.pep
KEEFDQYIKIQEEHLTKGIRDMKQRHMASFLAAIEKGISKKLREKDMELETMNNKNRELVERIKQVTAEAHNWHYRAKYNESVVNVLKSHLQQVISQGAQHGKEGFGDSEVDDAASYIDPNNFLSIPLGAAKCVSKGMKEHIICRACNAKEVSILLMPCRHLCLCKDCDLSINVCPVCQVTKTAGVQVYLS

SEQ ID NO: 72596 - protein, 146 aa, Gossypium hirsutum
  Clone ID: GOSHI-09MAY01-C24766_1.pep
METKSRTLEITVLSAEDLRSDNKPVKKNAYVVVSVDPFNNKATKVDGEGGSYPSWNDKLVMEMPLQTRFVTLLVKCKGSRGEKTVGLARIPVMDFVGGYSPATCLQFLSYRLRDPKGLKNGIINVSLRVKEPLQDCSSQAAAAGVW

SEQ ID NO: 72597 - protein, 117 aa, Gossypium hirsutum
  Clone ID: GOSHI-09MAY01-C24656_1.pep
GSVTPFSSFPFTPSHHTSGVRLLRNYRREVDSLHTSPRRSNFDIELSDTDSLSPSPPNYTEGSSTSHHHVNMEDQVQVDYIDNDINELNFNERRELTQHEINIELKDSSFDRRTTSI

SEQ ID NO: 72598 - protein, 78 aa, Gossypium hirsutum
  Clone ID: GOSHI-09MAY01-C24636_2.pep
MAPPAKPITSPVSDAWYPTLALLMLSIGLVVTASFFIYEATSSKRNRSLAKELITGGVASVFLGFGSLFLLLSAGVYV

SEQ ID NO: 72599 - protein, 79 aa, Gossypium hirsutum
  Clone ID: LIB3146-002-P1-K2-H2.pep
SHKQLLIASPFYIVRNKIPFDTILFRPDITFGKFYFKKKCFFPTNMQLRSNFFEEKSMSCQGAYHWRNGINLPGLRVNC

SEQ ID NO: 72600 - protein, 197 aa, Gossypium hirsutum
  Clone ID: GOSHI-09MAY01-C24146_1.pep
GKECIKYLKEQRLPPQTFIPLQSVRVKPIIERLRTLGGTAKLIFDVIQFDPALEKAVLFAVGNTLVCDDLEEAKVLSWTGERFKVVTVDGILLSKSGTMTGGTSGGMEARSNKWDDKKIEGLKKKKEQFESKLEELGSIREMQLKESETSGRISGLEKKIQYADIEKKSIEDKLKNLKQEKKNIKDRIGHITPEIQS

SEQ ID NO: 72601 - protein, 267 aa, Gossypium hirsutum
  Clone ID: GOSHI-09MAY01-C24166_1.pep
AGNEDWDDSVLPKEEIEARMQRKGDPASARERAMAYAYSHQLWKTTPKTVHADIRTRGFPWWWNWLERQLSSSNTPESQGIKNFPLTPPRPNSELKPSPEPPLSSKQHQFMFDNMDTPTPKSTRSTTRPMQTPPSRILQGSSSGLSKYSRPRASGADSPFDLPLKDDDSLTSCPPFSVPNYMTPTVSAKAKARANSNLKEMFMGTPGSESSKRRLSFPLTQGIGSFKWSKGSLFAGKDSSSQKGLDKNQSLQSIGNLSVDSTVSMPA

SEQ ID NO: 72602 - protein, 54 aa, Gossypium hirsutum
  unsure (1)..(54): unsure at all Xaa locations
  Clone ID: LIB3543-054-Q1-K6-E6.pep
MTPNKFQRKAKARANSNLKEMFMGTPGSESSKRRLSFPLTQGXGSFKWSKGSLF

SEQ ID NO: 72603 - protein, 194 aa, Gossypium hirsutum
  unsure (1)..(194): unsure at all Xaa locations
  Clone ID: GOSHI-09MAY01-C24036_1.pep
QTLESLSTSLVCTVGEISTWPSASNVIPGQARNSSVNESQCQRKQKMLISSKIXTLMQVTFTVDLRAIDDVGREAVVYELSNQMYKICDRRSVSCIIERKHDANAVICDQELSSRLKSAAYSAVNKMVGQIHEEVPVLMSGAGHDAMAISHLTKVGMLFVRCRGGISHSPEEHVLEDDVWAAGLAVLQFLESHM

SEQ ID NO: 72604 - protein, 202 aa, Gossypium hirsutum
  Clone ID: GOSHI-09MAY01-C24216_1.pep
MPDSSLSIAEQPKKLDDAKGESVSLIVADSPQIGQEPLEGTSDLQRELDSETGNQAYRLSPEASPGSQMIVPASQGTPSSEVSVKAKKKRTDKSSQKRKSLSADKSSPSTPAHDSGARSSTEQLPKAQKNGKIRNSLASTRPENIDDEPRDSDNSTSLPHFMQATESARAKVMQITHQDQVPMCKTRDIYIKKRHSLPACNG

SEQ ID NO: 72605 - protein, 145 aa, Gossypium hirsutum
  unsure (1)..(145): unsure at all Xaa locations
  Clone ID: GOSHI-09MAY01-C25976_1.pep
QPSTTPTVIKKPRPRGRAPQVDYDHLNWVLIKWLILATLPPSTLEGKWVANSFKFLNPSIXYWPGEKDKGSIXPEVFRTLREDVRAXLEQVSSKVSIALDFWTSYEQIFYMSITCQWIDENWSFRKVLLDICQVPYPCSDSEIYN

SEQ ID NO: 72606 - protein, 98 aa, Gossypium hirsutum
  Clone ID: GOSHI-09MAY01-C25856_1.pep
FIWKLKEQTSESYCTSTDFYNHLNSRTSSYKPTVLEPSTDFLRQETNWLKPKQGDSTIVYSDCSLPSSKMQEQPKGNAALGSGKITPPTACSQSSLCI

SEQ ID NO: 72607 - protein, 119 aa, Gossypium hirsutum
  Clone ID: GOSHI-09MAY01-C25846_1.pep
ALAIRCDALGDDQDNSMGLENRAKLEARLRALEGKELGRSAGSAKGKPKIEVYDKDRKKGAGLITPAKTYNPAADSLIGQITNSTALEEQDTVPKKKKKAEAKPALVEEAVDAPAHEAK

SEQ ID NO: 72608 - protein, 183 aa, Gossypium hirsutum
  Clone ID: GOSHI-09MAY01-C25556_1.pep
TFSELPNGRLKCVETGHEMVVKDKDSYAHSKRCRLGLIDFALSHSKPPLNMFKQDPLARSKLICKLTGDTVNKSEEHIWKHINGKRFLNKLEQKEMEKELNDETMCEEGEKKPKKVKNKKKMKKEKEKAVEEIISEVRDSAENESESEELEFWIPPVGDRWDFDDGGDRWGSGSESDESDDEN

SEQ ID NO: 72609 - protein, 164 aa, Gossypium hirsutum
  Clone ID: GOSHI-09MAY01-C25536_1.pep
KIRLLHNRGVVQSKVCLKMEHQFKQTRKQNWFQKQFSSRNGEDNRPKPGAHEAAIAAAAFAIQSVEEAKAAKLKRGSFKKDNSRNGVLHSNRITTQFSLKKTKSAVENSKDKPMKHKCKEVERVHSYSKPSSQSATIPIAPGDEWYDKLKSVVCGGDKLPKTYG

SEQ ID NO: 72610 - protein, 153 aa, Gossypium hirsutum
  Clone ID: GOSHI-09MAY01-C25486_3.pep
MGVSGTLEYLSDVVSSSGHNHKKRKQLQTVELKVRMDCDGCELKVKKALSSLNGVKSVNINRKQQKVTVTGYVEANKVLKKAKSTGKKAEIWPYVPYNLVAQPYAVTAYDKKAPPGYVRKVDNNVSSTATVTRYEDPYITMFSDENPNACSVM

SEQ ID NO: 72611 - protein, 158 aa, Gossypium hirsutum
  Clone ID: GOSHI-09MAY01-C25486_2.pep
TKEKTLGVSGTLEYLSDLMSSSGHKHKKRKQLQTVELKVRMDCDGCELKVKKALSSLNGVKSVNINRKQQKVTVTGYVEANKVLKKAKSTGKKAEIWPYVPYNLVAQPYAVTAYDKKAPPGYVRKVDNNVSSTATVTRYEDPYITMFSDENPNACSVM

SEQ ID NO: 72612 - protein, 137 aa, Gossypium hirsutum
  Clone ID: GOSHI-09MAY01-C25486_1.pep
MGVSGTLEYLSDLMSSSGHKHKKRKQLQTVELKVRMDCDGCELKVKKALSSLNGVKSVNINRKQQKVTVTGYVEANKVLKKAKSTGKKAEIWPYVPYNLVAQPYAVTAYDKKAPPGYVRKVDNNVSSTATVTRYSVM

SEQ ID NO: 72613 - protein, 255 aa, Gossypium hirsutum
  Clone ID: GOSHI-09MAY01-C25456_1.pep
AKLLISEYGLDASSLKASGPHGTLLKGDVLAAIKSGKGSPKISPSEESKPSPQTSSQKSPSARPESKAPQQSDSFEDLPNTQIRKVIARRLLESKQTTPHLYLSSDVVLDPLLSFRKELKEKHDTKVSVNDIVIKAVAVALKDVPEANAYWDVEKGEIILCDSVDISIAVATEKGLMTPIVRNADQKSISSISSEVKQLAEKARAGKLLPNEFQGGTFSISNLGMFPVDQFCAIINPPQAGILAVGKGNKFVEPV

SEQ ID NO: 72614 - protein, 169 aa, Gossypium hirsutum
  unsure (1)..(169): unsure at all Xaa locations
  Clone ID: GOSHI-09MAY01-C25406_1.pep
MQGLVLLSVLLCASCHISLSLTNSTASNGTVAGGLLENGNFENAPNATNMKGTVVVGRYTIPGWVNEGFVEYIKSGQKQGDMLLVVPEGAYAGRLGNEASIXQKLKVIKGMYYSITFSAARTCAQEERLNVTVAPDSGVLSIQTVYSCSGWDNFAWAFKAIFDGAELII

SEQ ID NO: 72615 - protein, 258 aa, Gossypium hirsutum
  Clone ID: GOSHI-09MAY01-C25436_1.pep
MTIKLMATHTILTMFALLMAAHFKSISSTNLPPKDDQDLRLAMEEMQKANYFTFVMLLNMLPLDPKFLANVTFLMPNDRMLSKTVIPENAVSNFLHRHSIPSPLIFEHLLYIPTGSVLPSLMPEYLMNVSNGGGRRSFVLNNVKIISPNICTIGSSIRCHGIDGVLNPESNISLHTCSNTMVPVPPPPSLVAPPPLLPPPPPSPVPFFSSPEDDFPVPAPLPADSSQHISGSSKLSLGRKVLKSMATILVPLMIGVSI

SEQ ID NO: 72616 - protein, 148 aa, Gossypium hirsutum
  Clone ID: GOSHI-09MAY01-C25796_1.pep
VEGEQGAAIHIVLVDSNTARVVTTGPEASMKLDVVVLEGDFSNEDDEDWTQEEFDSHLVKERPGKRPLLTGDLQVTLKEGVGTLGDLTFTDNSSWIRSRKFRLGLKVASGYCEGIRVREAKTEAFTVKDHRGELYKKHYPPALNDEVW

SEQ ID NO: 72617 - protein, 159 aa, Gossypium hirsutum
  Clone ID: GOSHI-09MAY01-C25786_1.pep
RYSHHNLLRSIHCNTIVSRDPNPCRSRTSLYFLKRDGGCRLIRRKPRSTAVKAVLDSATIEELGLKESDMRNPAISSTYRRSMLPKPNQTVLEAQARICTGPTQTRPLSEEQAFKVLDTILISVRGELKDEEQVSKAQIGAFFAGMTIRANSFPEETQW

SEQ ID NO: 72618 - protein, 50 aa, Gossypium hirsutum
  Clone ID: GOSHI-09MAY01-C25756_1.pep
PCKGTELKNMDVLDQMIFFQVDRYTIVDFLTCHNLSKRKFRGNHGPKRMN

SEQ ID NO: 72619 - protein, 114 aa, Gossypium hirsutum
  Clone ID: GOSHI-09MAY01-C25776_1.pep
DSTSSSKLESVIWPGGTMNIPRGWSLHGKRLRIGVPANNGFREIISVTRDPRTNETTVTGYCVDVFKEAVQSLGYEVHYDFIPVEDASGKIAGTYDDLILQVYYKNYDACVGDT

SEQ ID NO: 72620 - protein, 344 aa, Gossypium hirsutum
  unsure (1)..(344): unsure at all Xaa locations
  Clone ID: GOSHI-09MAY01-C25716_1.pep
WEVLEVGLRIRLKXQWSDIMGLKANCPDNGPGTFXLCLARQPLFFXRKTNPQPRKHTLWQTTSDFTDGQASIHRQHFLQCPQGLLNKHFEKLVQCDMRLNCLSRQPEIILDSPYFESRSSVFEDPRSTSSGFQNIASPVAAHSSSLEIEKGDSAVITSENMSREAPSPSSGSGVCEAVDSKGPRNWDQIKVPGLHPSMSMSDLMNHIGHRLSEHMTSENPSSENRPDCQEMLEDIAQYLLSDTQFTTASDEKSLMSRVNSLCCLLQKDNTTGTSSQANGENYDGGDDGKDAFEGETKEVSSSRQAPGMSRKDSFSELLLHLPRIASLPKFLFNISEEDGERQAR

SEQ ID NO: 72621 - protein, 148 aa, Gossypium hirsutum
  Clone ID: GOSHI-09MAY01-C25726_1.pep
FSEAKGQRRKMQRLLSLKQASSSALSSSCSSLLHSLPYKTFSSVASLTPQNHFISSAFSNQWRSKPCFTGETQGFLSYPNFPKRFWFYFSNTHQKFSSKSLLGCRVRFFRPQIPKSRFGFGPNRGLLKSRWRLWLQRFSASDMVLGPV

SEQ ID NO: 72622 - protein, 147 aa, Gossypium hirsutum
  unsure (1)..(147): unsure at all Xaa locations
  Clone ID: LIB3048-006-Q1-L1-G4.pep
RDFLEAPKGSKYRKDARGAXXSTGNQAXSSSAXLSKVPGFFTFLHVAFPYQXTFSSRRPALYPSNNPLYXSSAFSNQLADRSPCFTGGNSGFSLIRQIFQKRXLVLXSQIPIXKFFKPKVFLGCKKFXFSDPQIPKSRFGFGPNRGL

SEQ ID NO: 72623 - protein, 133 aa, Gossypium hirsutum
  Clone ID: GOSHI-09MAY01-C25626_1.pep
RELTALKAVIKCIEEHELEEQYPVDPLQKRVLLLEKAKADKKRATEVAKPQPKRPRANGAGYGPRVTNIAADKTFYPRVTDRYMQYVYDRPYVYAGPADNHSHSLLASATYNFSPSHGNYFGNGYQYQTPYLH

SEQ ID NO: 72624 - protein, 75 aa, Gossypium hirsutum
  Clone ID: GOSHI-09MAY01-C25176_1.pep
QKKKYPSSNIRLHRSLPHLSSLPLQAPHTLLLPLSSHGEQGSKFVSFSSLRIGYLLESTRREWKKETSHLRSYIS

SEQ ID NO: 72625 - protein, 68 aa, Gossypium hirsutum
  Clone ID: LIB3582-006-P1-K1-D9.pep
TIKIIKINLKSFNKKESTHQATLGYLDLCLIFLLFLFKRLIRFFFHLALMVNRVRNSFPFAVSGSGIF

SEQ ID NO: 72626 - protein, 40 aa, Gossypium hirsutum
  Clone ID: LIB3146-027-Q1-K1-E4.pep
FCIFVEPFFHLHEQCFLFRTKCLSFFMLALRWVSLLSAAH

SEQ ID NO: 72627 - protein, 86 aa, Gossypium hirsutum
  Clone ID: GOSHI-09MAY01-C25166_2.pep
ANMWGIVKSIVDLCMKLNEGKYVLVKDPSKPQVRIYEVPADAFENDYVEEPLPEEEQVQPPAEDTEAGEPNGTTNDVEAKETETQT

SEQ ID NO: 72628 - protein, 282 aa, Gossypium hirsutum
  unsure (1)..(282): unsure at all Xaa locations
  Clone ID: GOSHI-09MAY01-C25166_1.pep
RSQLDLLSVHETSQXPLPEAKDDINSAYSFIVXIGFFNPNFARRVLVWDGNKVSFDEPNPFANEGDQVASVAYRYRRWKLDGDMYLVARCEVQSVVEVNNKNSFVTLNALNEFDPKYSGVDWRQKLETQRGAVXLATELKNNANKLAKWTAQAILASADLMKLGYVTRVHPRDHFNHVILGVVGYKPRDFASQINLNTSNMWGIVKSIVDLCMKLNEGKYVLVKDPSKPQVRIYEVPADAFENDYVEEPLPEEEQVQPPAVDAEGVEANGTTTDDKEIEAQT

SEQ ID NO: 72629 - protein, 120 aa, Gossypium hirsutum
  Clone ID: GOSHI-09MAY01-C25046_1.pep
TPPVYPSPPVVKPPPVETPCPPPPPVLYPPPPAQQTCPIDTLKLGACVDVLGGLVHIGIGSSAKDTCCPVLQGLLDLDAAICLCTTIKAKLLNINIIIPIGLQVLIDCGKTPPPGFQCPA

SEQ ID NO: 72630 - protein, 156 aa, Gossypium hirsutum
  unsure (1)..(156): unsure at all Xaa locations
  Clone ID: GOSHI-09MAY01-C25076_1.pep
ATKLFLLLAICVLPVLVNANNKAFQIXGWVYCDACRAGFETSKSTYIQGARVEIKCFDRSTLKLKYSIGAETDETGTYNIVVEDDHEDQICYATLVSSPIPSCSIVDPRRNKATAILTRSNGAISNLHYTNAMGFLQDTVADGCQELLLKLLQDDE

SEQ ID NO: 72631 - protein, 168 aa, Gossypium hirsutum
  Clone ID: GOSHI-09MAY01-C25356_1.pep
PRVRGRVGEFDKSGNYVAVGDRGGRIVIFETKDGKNTADQHYSRNQLEQLDYVSLNHPEYRYKTEFQSHEPEFDYLKSLEIEEKINKLKWCTSLSGSLFILSTNDKTIKLWKVKDRKVKKAREIDSPHQLLSSENTLLSERSSMNEQGIPSFANGNHVESGADSIFPS

SEQ ID NO: 72632 - protein, 214 aa, Gossypium hirsutum
  unsure (1)..(214): unsure at all Xaa locations
  Clone ID: GOSHI-09MAY01-C25376_1.pep
MAKVSKVRKSDSQHKRVPYPLPSHPKRAGKGSRKKRCSKALEKKDWEAAKCSVCLEFPHNAVLLLCSSYDKGCRPYMCATSKRFSNCLEQYKKAYTKVTSVDSMDVEQPTEKMEVPELLCPLCRGKVKGWTVVKPVRKYLNRKKRSCMQEKCSFVGTYKELKKHVRXKHPLARPRAGDPVREEKWKKLENERERNDVISTIMHQHQEQWVGDYG

SEQ ID NO: 72633 - protein, 147 aa, Gossypium hirsutum
  Clone ID: LIB3829-018-Q6-K6-F10.pep
MAKVSKVHKSDSQHKRVPYPLPSHPKRAGKGSRKKRCSKASEKKDWEAAKCSVCLEFPHNAVLLLCSSYDKGCRPYMCATSKRFSNCLEQYKKAYTKVTSADSMDNSSLTSGVEQPTEKMEVPELLCPLCRGQVKGWTVVEPVRKYL

SEQ ID NO: 72634 - protein, 116 aa, Gossypium hirsutum
  Clone ID: LIB3272-029-P1-K1-D12.pep
TEVAAPESSPPQKLSGAATSTGGSFHSLPSSLRIPVLSLSKKFQINSEISRFKLPMAKVSKVRKSYSQHKRVPYPLAYYPNRSGKDSRKNRCSKAMENKDWVAAKRSVCLEYLTQC

SEQ ID NO: 72635 - protein, 325 aa, Gossypium hirsutum
  unsure (1)..(325): unsure at all Xaa locations
  Clone ID: GOSHI-09MAY01-C25366_1.pep
DILQNNSYEMPDVIFDSLKANQNVLPYVPELPVLSASSMLMKGLGSSQYCGFHATXIHRQKRLRESPAFSPGYTAAVKNDCPCVRQFQEDISGQXAQSFGLSFPIEPDPATKNSLPFGVFPGSHALSNGNFSASEPPLEAVKLELPSLQYPETELGNWGTFSCPPPLLESVDAFIQSPPPTSIAESDSLSPRNSGLLDALLHEAKTLSSAKNHASEKSSYSATPGDIAESSTFNICETEWENCGEPLSPMGHSATSLLSECISASGSTLDEQPPAETFTESHVKSEPADYVFTPEIQNEAPIRLDSCHPDTLLASNGLGARFWLR

SEQ ID NO: 72636 - protein, 67 aa, Gossypium hirsutum
  Clone ID: LIB3196-056-P1-M1-C5.pep
LKGPISTFARQNGKIVVRLFLLCVIRQLLSSVKVSVQVAVAVHLDEQPPAETFTEPSYKIRIIGFMF

SEQ ID NO: 72637 - protein, 142 aa, Gossypium hirsutum
  unsure (1)..(142): unsure at all Xaa locations
  Clone ID: GOSHI-09MAY01-C25306_1.pep
MKGIQALDNAYSNQIIAQHGKVLYGLGKDINLQKSVSAGKFKGYSISISSYLNSMESGNSLDCGGRMRPTVSIIDTENISCTDLGEYGVVIIPDFVLSIDDYLQILTRMARHTVNGVLHSFLNXDDSQHAGPLIEILEQCGQ

SEQ ID NO: 72638 - protein, 132 aa, Gossypium hirsutum
  Clone ID: GOSHI-09MAY01-C25276_1.pep
GPVLTGRADARGVFGVLAMSRSIGDRYLKPWIIPEPEVMFIPRAREDECLILASDGLWDAISNEEAGEVARRRILLWHKKNGVPSLVERGIGIDPAAQAAAEYLSMLAIQNGSRDNISVIVVDLKAQRKFKS

SEQ ID NO: 72639 - protein, 340 aa, Gossypium hirsutum
  Clone ID: GOSHI-09MAY01-C25236_1.pep
ILIANVLNYFFAKIKGGWGWRLSLGGAMVPALIITVGSLVLPDTPNSMIERGQTEEARAKLKKIRGVDDVDEEFKDLVAASDASKLVHHPWTNLLQRKYRPHLTMAILIPFFQQLTGINVIMFYAPVLFNTIGFGDDASLMSAVITGIVNVGATLVSIYGVDKWGRRFLFLKGGVQMLICQAVVAACIGAKFGVSGNPGDLPKWYAIAVVLFICIYVAGFAWSWGPLGWLVPSEIFPLEIRSAAQSVNVSVNMIFTFAVAQVFLSMLCHLKFGLFLFFAFFVVVMSIFVYYFLPETKGIPIEEMNQVWRSHWYWSRFVEEADYSNGGMEMSKGNHVPKNV

SEQ ID NO: 72640 - protein, 125 aa, Gossypium hirsutum
  unsure (1)..(125): unsure at all Xaa locations
  Clone ID: GOSHI-09MAY01-C26956_1.pep
TQEGDKVVISRVLGVRSSNNLERYPGLPNMMGRKKKMSFQTLKDRMKQRIDNXSVRHLSQGGKEVFIKAILQAIPTYTMACSLIPKSLCVELEGIMARYWWQKNRDQKGIQWRTWKNLCSLKEDG

SEQ ID NO: 72641 - protein, 104 aa, Gossypium hirsutum
  Clone ID: GOSHI-09MAY01-C26976_2.pep
FIFLVWFTAQSNLLKSSILVVGAGGLGSPALLYLAACGVGRLGIADHDVVELNNMHRQVIHTEAYIGQPKVKSAAAACRSINSTIQIVEHKQALRTCNALEILS

SEQ ID NO: 72642 - protein, 151 aa, Gossypium hirsutum
  Clone ID: GOSHI-09MAY01-C26976_1.pep
MESNGGGASPIRREIEALKEERARIEQRISVLEAQLQEEASLAPQQQQNDGVCNGFCPSETSSVDANLAHGLSADSIYRYSRHLLLPSFGVQAQSNLLKSSILVVGAGGLGSPALLYLAACGVGRLGIVDHDVGELNNMHRQVIHTEAYIG

SEQ ID NO: 72643 - protein, 94 aa, Gossypium hirsutum
  Clone ID: GOSHI-09MAY01-C26866_1.pep
MDHAADAHRTDLMTITRHVLNEQTKYPESRGDFTILLNHIVLGCKFVCSSVSKAGLAKLFGLAGETNIQGEEQKKLDVLSNEVFAKALISSGRT

SEQ ID NO: 72644 - protein, 148 aa, Gossypium hirsutum
  Clone ID: GOSHI-09MAY01-C26586_1.pep
DLKCDNIFVNGHLGQVKIGDLGLAAILRGSQQAHSVIGTPEFMAPELYEEDYNELVDIYSFGMCVLEMLTSEYPYSECSNPAQIYKKVTSGKLPEAFYRIQDEEARRFIGKCLENGSKRLPAHELLLDPFLAPNEGNLLSVPRVLSQK

SEQ ID NO: 72645 - protein, 75 aa, Gossypium hirsutum
  Clone ID: GOSHI-09MAY01-C26566_1.pep
NITWTNKLALWLKGCVPYICKCFHFLNFCSKLLGESHVFRITSYLKKCFDLWYHIYALFEMCFLLRNDLGTRFYL

SEQ ID NO: 72646 - protein, 173 aa, Gossypium hirsutum
  Clone ID: GOSHI-09MAY01-C26506_1.pep
MMSIPSPPRMGTPPHMPTASSIHETRSDMDSPLHIDLHQDLFPDYYGGPASIPSIPKEEPSRNDFPNGDNGFPPVIKENDFPTPPVPPCTSGEGLPYAPMDWPNPGDVWSWRVGRRVNNAGFYSDRFFSVPNSLLFLNSPIMFAIKLCLERFICLFLSRPADVCRVFCLPPCF

SEQ ID NO: 72647 - protein, 188 aa, Gossypium hirsutum
  unsure (1)..(188): unsure at all Xaa locations
  Clone ID: AI731485.1.pep
MMSIPSPPRMGTPPHMPTASSIHETRSDMDSPLHIDLHQDLFPDYYGGPASIPSIPKEEPSRNDFPNGDNGFPPVIKENDFPTPPVPPCTSGEGLPYAPIDWPNPGDVWSWKMGXXVXXXXFXXDXFXXVXXXLXFXXXPXLFXXXPXLGRFXLSRFPAXDVFAFFASFVWGIPAPWXPPCRVSLAVG

SEQ ID NO: 72648 - protein, 111 aa, Gossypium hirsutum
  Clone ID: GOSHI-09MAY01-C26746_1.pep
MDFSTFSIFRIFILPLLCPSLGSSSAVRDPESVVAEVHKSINASRRHLGYLSCGTGNPIDDCWRCDPNWESNRQKLADCGIGFGKDAIGGKTGRIYVVTDAGDDDPVNLKP

SEQ ID NO: 72649 - protein, 71 aa, Gossypium hirsutum
  Clone ID: GOSHI-09MAY01-C26726_1.pep
PLISLNADLQKWLRQYSSRSFSFGMTNVSFLSVLQSMKTNTFEIHGCSSQQQFYLQGLNLSSLPRVHYTFL

SEQ ID NO: 72650 - protein, 190 aa, Gossypium hirsutum
  unsure (1)..(190): unsure at all Xaa locations
  Clone ID: GOSHI-09MAY01-C26186_1.pep
MSLMNNLSTSMISSSSSTFLAPTSFNSRTQSVSVPLKNINIVKCVATPQEQQNAYKTKVSRNANIAKLQAGYLFPEVARRRAAHLLKYPNAQVISLGIGDTTEPIPDVITSAMAKRSHALSTLEGYSGYGAEQGEKALRAALASTFYRNLGIXDDDIFVSDGAKCDISRLQVVFGSNVTMAVQDPSYPAY

SEQ ID NO: 72651 - protein, 277 aa, Gossypium hirsutum
  Clone ID: GOSHI-09MAY01-C26126_1.pep
MGVEPACPVLLLFLAGIIIWVVEAEVHYYDFVLAEKNFTRLCKTKSMLVVNGQFPGPTIYVHKGDTVFVNVHNHGDYGLTVHWHGVKQPRNPWSDGSAYITQCPIEPGHNFTYEVVFSEEERTLWWHANSDWTRNTVHGAIVIYPPHGFSYPFPTPAGEQILILGTWFTYDVNKVIKEILRTGKDVPVSDAYIINGQPGDFCACSKEMAYRWQVDYGKTYLIRLVNALMNEEFFFAIAGHDLIVVGIDGSYLKPFTTSYVMLSNGQTMDVLVKTNRS

SEQ ID NO: 72652 - protein, 119 aa, Gossypium hirsutum
  Clone ID: GOSHI-09MAY01-C26096_1.pep
IWFTATFAVMQSAGAQIQQEYASTMGLLLSYALNITSLLTAVLRLASLAENSLNAVERVGTYIELPSEAPLIIDNSRPPTAWPSFGSIKFEDVVLRYRPELSPVLHGLSITISPTDKVC

SEQ ID NO: 72653 - protein, 402 aa, Gossypium hirsutum
  unsure (1)..(402): unsure at all Xaa locations
  Clone ID: GOSHI-09MAY01-C26086_1.pep
MVFLKGVSALSRLRSRVKQHSSLSNSVRWLQMQSSSDLDLHSQLKELIPEQQERLKKLRAEHGKVQLGNITVDMVIGGMRGMTGLLWETSLLDPDEGIRFRGLSIPECQKLLPAAKPDGEPLPEGLLWLLLTGKMPSKAQVDALSQELRDRAVVPDYVFKAIDALPVSAHPMTQFATGVMALQVQSEFQKAYEKGISKLKYWEPTYEDALSLIARVPLVASYVYRRMYKDGKFIPMDDSLDYGGNFSHMLGFSSHQMHELMRLYVTIHSDHEGGNVSAHTGHLVGSALSDPYLSFAAALNGLAGPLHGLANQEVLLWIKSVVDECGENISKEQLKDYVWKTLNGGKVVPRFGHXGVWRKTDPRYMCQRERALKHLPDDPLFQLVSRLYEVVPPIPTELGEGN

SEQ ID NO: 72654 - protein, 158 aa, Gossypium hirsutum
  unsure (1)..(158): unsure at all Xaa locations
  Clone ID: AI054878.1.pep
MVFLKGVSALSSLRSRVKQHSSLSNSVRWLQMQSSSDLDLHSQLKELIPEQQERLKKLRAELXKVQLGNITVDMVIGGMRGMTXLLWETSLLXPDGGIRFXGLVIPXCQKLLPAANLMENLRXGLYGFFAEKVPSXSDAYLNCTAGCPDTFQAMMLTC

SEQ ID NO: 72655 - protein, 81 aa, Gossypium hirsutum
  unsure (1)..(81): unsure at all Xaa locations
  Clone ID: uC-gsronu33B090h06b1.pep
FFWVQMQSSSGVDFNSQVEELIPEQQERLKKLRAXHGKSELGNITADMVIGGMRGMTGLLWETLLLDPDEGIPFRACQSPV

SEQ ID NO: 72656 - protein, 97 aa, Gossypium hirsutum
  Clone ID: GOSHI-09MAY01-C26066_1.pep
GSSQNSCCLLRELATSCSPRMPKFPPLNRMLDGTASEEIVIHALKRLPESPCHSCLRWFDGRLLDIEHCRCIDWLEDAMGFLDKKAFEDLITTLWNG

SEQ ID NO: 72657 - protein, 351 aa, Gossypium hirsutum
  unsure (1)..(351): unsure at all Xaa locations
  Clone ID: GOSHI-09MAY01-C26006_1.pep
RAVGSIDISLGDQKFGGXSISLWGGSVLNLGTXKKHLYKYFDGIXDNGGGSLVAFAMTELHHGSNVQGLQTVATFDPITDEFIIDTPNDGAIKWWIGNAAVHGKFATVFARLVLPTHDSKGVSDMGVHAFIVPIRDLKTHQPLPGIEINDCGPKIGLNGVDIGALGFRSVRIPRDNLLNRFGDVTRDGKYTSSLPTINKRFAATLGELVGGRVGLAHSSVGILKIAVTIAVRYSLLRQQFGPPKQPEVSILDYQSQQHKLMPMLASTYAFHFATQYLVEKYSEMKKTHDEQLVGDVHALSAGLKSYVTSFTAKSLSTCREACGGHGYAAVNRFGTLRNDHDIFQTFEGDNT

SEQ ID NO: 72658 - protein, 104 aa, Gossypium hirsutum
  Clone ID: GOSHI-09MAY01-C26356_2.pep
DRVNTGCSHYRRRCKIRAPCCNEVSYCRHCHNESKNSPESSPLKQHDIPRHEVEKVICSLCDTEHDVQQSCINCGVCMGQYFCGNCQFFDDDGPLNPYHCVECG

SEQ ID NO: 72659 - protein, 145 aa, Gossypium hirsutum
  Clone ID: LIB3584-056-P1-K2-E1.pep
MEGVCETKSCTTELKSVEFGNHENGSLMETGLGNYGCSHYRRRCKIRAPCCNEVFYCRHCHNESKNSPESSPLKQHDIPRHEVEKVICSLCDTEQDVQQYCINCGVCMGKYFCGKCKFFDDDVSKNQYHCVECGICRTGGKENFF

SEQ ID NO: 72660 - protein, 140 aa, Gossypium hirsutum
  Clone ID: LIB3582-013-P1-K1-C4.pep
MEGVCETKSCTTELKSVEFGNHQNGSLMETGLGNYGCSHYRRRCKIRAPCCNEVFYCRHCHNESKNSPESSPLKQHDIPRHEVEKVICSLCDTEQDVQQYCINCGVCMGKYFCGKCKFFDDDVSLFFHFFAVNLGLKIFK

SEQ ID NO: 72661 - protein, 33 aa, Gossypium hirsutum
  Clone ID: GOSHI-09MAY01-C26366_1.pep
MVVVCGGSYRRGKASCGDLDIVITHPDGKRFKF

SEQ ID NO: 72662 - protein, 147 aa, Gossypium hirsutum
  Clone ID: GOSHI-09MAY01-C26336_1.pep
LRKVCVIKMLSSATLDKVYSLRRQEVRETIGYLYSKAGSPVNVGEQMFLTILNVVTNMIWGGSMEGEARASLGAEFRQVISEVTELLGLPNVSDFFPALAPLDLQGAVKRVRKSTEKLDAIIDKIINQRLEEKQSGHTVEEFKDFLQ

SEQ ID NO: 72663 - protein, 61 aa, Gossypium hirsutum
  Clone ID: LIB3048-046-Q1-L1-E11.pep
LRKVCVIKMLSKAGLDKVYGLRRQEVPETIGFLYRTARSAVNVGKQMLPTTANRGTHIIRG

SEQ ID NO: 72664 - protein, 126 aa, Gossypium hirsutum
  Clone ID: GOSHI-09MAY01-C26236_1.pep
FELMSPVESVKRVLNILRGIFHPKGIVVPDPVQAVCTRWGKDRFTYGSYSHVAIGSSGDDYDILAESVGDGRVFFAGEATNKQYPATMHGAFLSGMREAANMLRVARRRSLVLSDKVYNDLEKCDT

SEQ ID NO: 72665 - protein, 115 aa, Gossypium hirsutum
  Clone ID: GOSHI-09MAY01-C27996_1.pep
MENYQMFFPISAPSTAAQSLPLNMAPNSQAFNSFHGNSVDGFLGLKSTEDLIQKPEAKDFMKSSQKMEKKIRKPRYAFQTRSQVDILDDGYRWRKYGQKAVKNNKFPRSYYRCTH

SEQ ID NO: 72666 - protein, 103 aa, Gossypium hirsutum
  unsure (1)..(103): unsure at all Xaa locations
  Clone ID: AI054919.1.pep
FFFFIIFFCSFLSQREIVLQINKPWKQQQHLYLDPISSIVIIDFQGSINRRRYIASGSRYFSNSDLNTQNLGVFKGPXLXXVPNSKEKFEAYNECFLGXFVLS

SEQ ID NO: 72667 - protein, 133 aa, Gossypium hirsutum
  unsure (1)..(133): unsure at all Xaa locations
  Clone ID: LIB3048-029-Q1-L1-B5.pep
MEAAAASLSGSNIFHRISRSIIRSRYIASGSRYFSNSDLNTQNHSVFKGPNLSNVQIQKRNLRLQTNCALGVCTFPENVMESYHSHVVEEKLGVLLLNLGGPETLNDVQPFLYNXFADPDIIKVPSLFEVLQR

SEQ ID NO: 72668 - protein, 195 aa, Gossypium hirsutum
  Clone ID: GOSHI-09MAY01-C27856_1.pep
MDAAESWSRTKWVFHFMLIFAHFSLLSLAEDGLVANGDFETPPSGGFPSEAISDGAPEIPSWSTNGTVKLVSAGEKVSGGMLLIVPRGRHAVRLGNDAEISQEVTVEKGSAYAVTFSAARTCAQMESLNVSVPPASQTVDLQTLYNVQGWDPYTISFEAQEDKARLIFRNPGMEDDPECGPIIDDIAIKKLITPD

SEQ ID NO: 72669 - protein, 109 aa, Gossypium hirsutum
  unsure (1)..(109): unsure at all Xaa locations
  Clone ID: LIB3582-059-P1-K1-H6.pep
MLLMNPKVSTMEKTNHPEISQEVTVEKGSAYAVTFSAARTCAQMESLNVSVPPASQTVDLQTLYNVQGWDPYTISFEAQEDKARLIFRNPGMEDDPXCGPIIXDDIAIK

SEQ ID NO: 72670 - protein, 120 aa, Gossypium hirsutum
  Clone ID: GOSHI-09MAY01-C27846_1.pep
MEKNAVAQKMMMMAVLVILGTMMAAFTVAQETCAQSLVPCAPYLNNATAQPQDDCCNPIRQAVDTQLTCLCNLFNDPTLLSSFNVSVSEALRIARECGVTTGLNACNNANFSPVCSTPAR

SEQ ID NO: 72671 - protein, 136 aa, Gossypium hirsutum
  Clone ID: GOSHI-09MAY01-C27826_1.pep
LMRASAELLGRGTVGTTYKAVLDNRTVVTVKRLDAGKLAATTKEMFEQHMESVGGLRHPNLVPLRAYFQAKEERLLIYDFQSNGSLFSLIHGSKSTRAKPLHWTSCLKIAEDVAQGLSYIHQAWRLVHGNLKSTNV

SEQ ID NO: 72672 - protein, 158 aa, Gossypium hirsutum
  unsure (1)..(158): unsure at all Xaa locations
  Clone ID: GOSHI-09MAY01-C27456_4.pep
CLKGVQENGRENDESSEKPGQTECKYYLRTGGCKFGXACRYNHSRAKSSTDPILELNFLGLPIRQGEKECPYYMRNGSCKYGANCRFNHPDPTTTGACAPPAAYGNGGSVSSQAASQVSMASWSSPRAFNETATATFMPIMFSPTPGVPTSNSEWNGY

SEQ ID NO: 72673 - protein, 391 aa, Gossypium hirsutum
  unsure (1)..(391): unsure at all Xaa locations
  Clone ID: GOSHI-09MAY01-C27456_2.pep
RGEATRCRRNAAEDEDGENEEERNDNEIDGENVKKSEGKRSHYPVRPDAESCAYYMKTGLCKFGYNCKFNHPIRRTTQAVKEKVKEEVESTEKPSQTECKYYLRTGGCKFGNACRFNHSTAKSSTSPILELNFLGLPIRQGEKECPYYMRNGSCKYGPRGRFNHPDPTAAGACDPTSGYGNGGSVSPQAASQVNMVPWSSPRALNETAAYIPIMFSPPQVVPPPNPEWNGYQATVYPPPERSLHPAPAYVMSSXATETAVYTQNQPQMVVDEFPVRPGQPECSYFLKTGDCKFKSNCKYHHPKNRLAKPAPCALSDKGLPLRPDQSICSHYSRYGICKFGPACKFDHSMQAAPSTAVSELEQPPPFSHSAPLEQTGIAGSNGTDTAVQQPV

SEQ ID NO: 72674 - protein, 171 aa, Gossypium hirsutum
  Clone ID: GOSHI-09MAY01-C27456_1.pep
MSQSEETPVPDAMPTDSTSHLGLQSPDPGSTSSPDLSPYDLNHSAVETEHEESSLQQQLQNLDLKEEEVKTDRKDDGERESNNDADGNAAEDEDGENEEERNDNEIDGENVKKSEGKRSHYPVRPDAESCAYYMKTGLCKFGYNCKFNHPIRRTTQVFFSNLLISHRLYMC

SEQ ID NO: 72675 - protein, 184 aa, Gossypium hirsutum
  unsure (1)..(184): unsure at all Xaa locations
  Clone ID: LIB3584-008-P1-K1-B11.pep
ITLFKGGPVRGEENDESTEKPGQTECKYYLRTGGCKFGKXCRYIXHXKGNNXFNRXPILENLGGGGLSVXLQGEKECPYYMRNGSCKYGANCRFNHPDPTTTGACAPPAAYGNGGSVSSQAASQVNMASWSSPRALNETATATFMPIMFSPTPGVPPPNPEWNGYQATIYPPPERDLHPTPAYV

SEQ ID NO: 72676 - protein, 103 aa, Gossypium hirsutum
  Clone ID: GOSHI-09MAY01-C27466_1.pep
HHPHHHHHPHQHAKRMKYKGVRMRSWGSWVSEIRAPNQKTRIWLGSYSTPEAAARAYDAALLCLKGSSANLNFPITSSHYIPDPDTPLSPKSIHRVAAAAANS

SEQ ID NO: 72677 - protein, 183 aa, Gossypium hirsutum
  Clone ID: GOSHI-09MAY01-C27696_1.pep
FTVLYHCLHIMPEQKAGPDASVKKTDLWVPGSTKNPEAYILKDQETRYLQRYLDLMLNLQVRHIFKTRSKIISYVRSFLDNLDFLEVETPMMNMIAGGAAARPFLTHHSELNMKLYMRIAPQLYLKVPVFGGLYRLYDFGIHILIEDTYSTHIFLFTITKFYISFTYSHYIFSLYLSYFSLIF

SEQ ID NO: 72678 - protein, 156 aa, Gossypium hirsutum
  Clone ID: GOSHI-09MAY01-C27626_1.pep
LAIMTAWISILSDYLVDTIEGASDAWDVPIAFISVILLPIIGNAAEHASAIMFAMKDKLDISLGVAIGSSTQISMFGIPFCVVIGWMMGQEMDLNFQLFETATLFITVIVVAFFLQEGTSNYFKGLMLILCYLIVAASFFVHEDPPTDDQSKQPGT

SEQ ID NO: 72679 - protein, 134 aa, Gossypium hirsutum
  Clone ID: GOSHI-09MAY01-C27036_1.pep
AGFGDDGVFGGVGGSGGVAFGGMGLADGLMEGLFGGVMQPNNGFINVGGELSQMFAGEAECSNVAGNGIHGFLDETLVAGLGNERKQAMGKRGMPKGPKTNISYTMKTIGPEHTIEGLRDNMAAMQDPLKPKRG

SEQ ID NO: 72680 - protein, 58 aa, Gossypium hirsutum
  Clone ID: GOSHI-09MAY01-C27316_1.pep
TLSIGPHICKRTIYSLLMLMLEGKSGVNMRSMVLVVLFVNYHILIFLQDITWLKSITN

SEQ ID NO: 72681 - protein, 161 aa, Gossypium hirsutum
  Clone ID: GOSHI-09MAY01-C27306_1.pep
ALEQWIPSGCGITNRGRGFTQTYGIDFTETWAPVAKLNTIRVLLSLAVNCDWKLHQLDVKNAFLNGKLEEEVYMQLPPGSKSIEGSNKVCKLNKSLYGLKQSPRAWFERFTKVILQNGYKQSLADHTLFIKVTSTNKKAILIVYVDDIILTGDDEEEISNL

SEQ ID NO: 72682 - protein, 82 aa, Gossypium hirsutum
  Clone ID: GOSHI-09MAY01-C27336_3.pep
QRQCLSVTPNTSRSIISACALEDQTNYVHKYKAPNLFVSPIYTTKGNFLQHFLPLSSGFVEPTRFLCVPFSANGATASKKNR

SEQ ID NO: 72683 - protein, 74 aa, Gossypium hirsutum
  Clone ID: GOSHI-09MAY01-C27336_1.pep
QRQCLSMTPNPSRSITPAYALEDQTNYVHKYKAPYLFVSPIYTTKGNFLQLFLPLSSGIVKPAKLTQHLQLYFL

SEQ ID NO: 72684 - protein, 77 aa, Gossypium hirsutum
  Clone ID: LIB3148-048-Q1-K1-E7.pep
QRQCLSITPNTSRSITSAYALEDQTNYVHKYKAPYLFVSPIYTTKGNFLQLFLPLSSRNRAACKTYPTPVIVFSLKI

SEQ ID NO: 72685 - protein, 70 aa, Gossypium hirsutum
  Clone ID: GOSHI-09MAY01-C20946_1.pep
MKMGDMLPTKLDEEQMAQLREIFSSFDRNNDGSLTQLELGSLVRSLRLKPSLDQEVALIQKADSNNNGLI

SEQ ID NO: 72686 - protein, 90 aa, Gossypium hirsutum
  Clone ID: GOSHI-09MAY01-C20816_1.pep
IVLCYFQLCSEDYLWWWRSYLTSGSSALYLFLYATFYFFTKLEITKLVSGMLYFGYMLVASYAFFVLTGTIGFYACFWFTRLIYSSVKID

SEQ ID NO: 72687 - protein, 135 aa, Gossypium hirsutum
  Clone ID: GOSHI-09MAY01-C20466_1.pep
IIFQKAKKKTQNLLKSCSGCFPPRMSDCRHRRANHQPSCTIDTRIHATPSSKTTSPVSDSAQRGRGGSSSFGSSSVWETLAVELASKGVKNPISRGPDHRLQWKPRWLQGGMTMAAMMGFKPLEEKTKRWGQSRL

SEQ ID NO: 72688 - protein, 118 aa, Gossypium hirsutum
  Clone ID: GOSHI-09MAY01-C20086_1.pep
MPEEDLVDIKFRIYDGSDIGPFRYSATSTVDMLKQRIVSDWPKGKTIVPKSVNEVKLISSGKILENNKTVGLCKVPFGEVPGGAIIMHVVVQPSLAKAKTEKKIDDSPRKTVCSCSIL

SEQ ID NO: 72689 - protein, 75 aa, Gossypium hirsutum
  Clone ID: LIB3149-023-Q1-K1-A3.pep
NFRQDISGLAILAYPQFFFIYIYSLWFFCFFFLLVTDSILYKGIYPSNLVYISSLCGVVYTTLQIIQSQYLKPTR

SEQ ID NO: 72690 - protein, 144 aa, Gossypium hirsutum
  Clone ID: GOSHI-09MAY01-C20066_2.pep
MFSSHSKKASWFSTSSTSLDSKASSSSKKFPVLTFDFWGKPLVVPDQNGSRNCTTKPENKFSVQAETNCVSRCIRWWEKNLKPNMVKIHSAQELVCSLQNAGDRLVIIDFYSPGCGGCKALHPKVCLRAVLFPNAKVLVYFPCV

SEQ ID NO: 72691 - protein, 114 aa, Gossypium hirsutum
  Clone ID: GOSHI-09MAY01-C20066_1.pep
QLRMASFSLKCGSYFSVFNETMLSSHSKKASWFSTSCTSLDSKASSSSKKFPALTFDFWGKPLVVPDQNGSRNCTTKPENKFSVQVCQKTLLYFWILKGFLFWVQFCLIDWAGS

SEQ ID NO: 72692 - protein, 297 aa, Gossypium hirsutum
  unsure (1)..(297): unsure at all Xaa locations
  Clone ID: GOSHI-09MAY01-C20016_1.pep
MPIPGPRPYECVRRAWRLRKXHKPVRGSIIQQILRLAIETHSTATKKNKEWQVKIITVIVKAEEIMYSIAVSEAEYTNPETLWDRANDAINTIIRRDESTETGELLPPCVEAALNLGCYPVRASRSQRHSNPRTYLTPRAPETVPATPRILDNGSEDRYPQLSQVQSGSQLARIATNVNSNTSVSQANRHNYPFLPQNCPSGHDQLMRMETNTPSNSGQVYPLYYGIHYQNAESQTGSPVQENLVSDTIIVGRPIGSSRLEPAEMGSLQNFFSSSKLILVASELGSKISDTLMRSYL

SEQ ID NO: 72693 - protein, 89 aa, Gossypium hirsutum
  Clone ID: LIB3585-043-P1-K1-E9.pep
KLFQEQFGLIDCSTCVVLAALNLGCYPVRASRSQRHSNPRTYLTPRAPETVPATPRILDNGSEDRYPQLSQVQSGSQLARIATNVNSNT

SEQ ID NO: 72694 - protein, 161 aa, Gossypium hirsutum
  unsure (1)..(161): unsure at all Xaa locations
  Clone ID: GOSHI-09MAY01-C20356_4.pep
LWQQQPNVDHITGNKIRNSFMFSRGKLPGPLRQLQMDLRKLMLPYTALKLKEKKRNNLKDFLNVAGPMGVTHFLVLSKIKTSPVLRVAKTPQGPTXQLPPRCPQDLFKNPPLIVLFGFAAADEQLXLTTMVFKDIFPDIDINTVKLSSCQRIVLINYNKNV

SEQ ID NO: 72695 - protein, 305 aa, Gossypium hirsutum
  unsure (1)..(305): unsure at all Xaa locations
  Clone ID: GOSHI-09MAY01-C20356_2.pep
MCLIVTSMKMFVPVPDEEVEKMHKKGFAQRSVCIFPGKPSPRVRKVLSNLDGDSKDENLTQKTSSTQHHDAPDDAQGERIIRKSTRTSVIARQAERDAIPAALQATMKIVLSGFAAADEHLRLTTMVFKNIFPDIDINTVKLSSCHRIVLLNYIKDTKLIDCRHYSIRLHPVGVSRRRREVVQNHQVPGLRILQDXGYGSESEADEEAATVTLTSDLSRVNRASTKSAVKLQEIGPRMTLQLTKIEGGLCSGEVMFSEYGNGGNKKEPGNEGNEKEDGDNDGQMEDSDEDDEADNEEDMEESEED

SEQ ID NO: 72696 - protein, 237 aa, Gossypium hirsutum
  Clone ID: GOSHI-09MAY01-C20356_1.pep
FVFSRGKLPGPLRQLQMDLRKLMLPYTALKLKEKKRNNLKRVRNVAGPMGVTHFLILSKTETSPVLRVAKTPQGPTLTFKIHEYSLAVDISQSQLRPRCPQDLFKNPPLIVLSGFAAADEQLRLTTTMFKNIFPDIDINTVKLSSCQRILLLNYNKDTKLIDFRHYSIRLQPVGVSRRIRKFVQNHQVPDLRNLQDVSDFVTKAGYGSESEVDEETATVTLTSDLSRVNRASTKSAV

SEQ ID NO: 72697 - protein, 76 aa, Gossypium hirsutum
  unsure (1)..(76): unsure at all Xaa locations
  Clone ID: LIB3829-001-Q1-N6-E7.pep
KSAVKLQEIGPRMTLQLTKIEGGLCSGEVMFSEYEAMXGNKKKPGNEEGNEKEDGEDSDDDDEADNAEDMEESEED

SEQ ID NO: 72698 - protein, 277 aa, Gossypium hirsutum
  Clone ID: GOSHI-09MAY01-C20346_1.pep
EESLRKLGVEKLGKDDVQKMQWEVLEAKIGNWIHFMRIAVKLLFAGERKVSDEMFEGFDSLSDQCFAEVTASSVSVLLSFGEAIARSKRSPEKLFVLLDMYEIMRELHSEIETIFKGKACNEIRESALGLTKRLAQTAQETFGDFEEAVEKDATKTAVLDGTVHPLTSYVINYVKFLFDYQSTLTQLFQEFETGDGTVSQLASVTMRIMQALQTNLDGKSKQYRDPALTHLFLMNNIHYMVRSVRRSEAKDLLGDDWVQRHRRIVQQHANQYKRNAW

SEQ ID NO: 72699 - protein, 74 aa, Gossypium hirsutum
  Clone ID: GOSHI-09MAY01-C20336_1.pep
SLSICFVNSPKILPTANQFSTQHRQMQQMDTLHKQSKRPMNLNSTFSYKLRSVSTRSMTSNALIRLISKSNERN

SEQ ID NO: 72700 - protein, 187 aa, Gossypium hirsutum
  Clone ID: GOSHI-09MAY01-C20266_1.pep
SSHQHEPQRDFHQPFYQPYRQDLPPHMPVNYPPHESSASYSFANFQSYPSFTESSLPAAPSHYPSSYQGSETPYNPPQSAPSHYPSSYQGSETPYNPPQSAPPTTSYSSTTAQYSSSSRNGKIAEPSPPTSEKYQYDSNYQPPPEKIAEAHKAARFAVGALAFDEVSTAVEHLKKSLELLTNPSASH

SEQ ID NO: 72701 - protein, 60 aa, Gossypium hirsutum
  Clone ID: uC-gsflnu33B114e04b1.pep
PPLSEKYQYDSNYQPPPEKIAEAHKAARFAVGALAFDEVSTAVEHLKKSLELLTNPSASH

SEQ ID NO: 72702 - protein, 224 aa, Gossypium hirsutum
  Clone ID: GOSHI-09MAY01-C21966_1.pep
ADEALADPYWRGLSKIEREPSCQPISKLEFEFERRRVTKEDVRELIYREALEYHPQLLKDYLNGHEGSNFLYPSPVGQFKKQFAYLEENGGRSAPVFPLERKHVSLPRSTVHSNGITPNTQSTSVSYENRQDREADARKAMDVISSKPKPTRPPPRVPSAKPGRVVGSVVPYEDVKNIKDGYDTKNFYRNAVPPQNAPPHCFLLNQEKSEHRPTGILQPNRNNS

SEQ ID NO: 72703 - protein, 181 aa, Gossypium hirsutum
  Clone ID: GOSHI-09MAY01-C21936_2.pep
NKLQSMATRLIYSRLSLSRLFAMGGPKNGRFLSTESNKIDEPFKVEEAETVNVPPPPSEKLLVLGGNGFVGSHICREALNRGLAVASLSRSGGSSLHDPWAKNVTWHKGNLLSSDSWKEALDGVTSVISCIGGFGSNSYMYKINGTANINAIRAAGDKGVKRCVYISAADFGLANYLLRGH

SEQ ID NO: 72704 - protein, 277 aa, Gossypium hirsutum
  unsure (1)..(277): unsure at all Xaa locations
  Clone ID: GOSHI-09MAY01-C21936_1.pep
NKLQSMAKRLIYSRLSLSRLSAMGGPKNGRFLSTESNKIDEPFKVEEAVTVNVPPPPSEKLLVLGGNGFVGSHICREALNRGLAVASLSRSGGSSLHDSWAKNVTWHKGNLLSSDXISCIGGFGSNSYMYKINGTANINAIRAAADKGVKRFVYISAADFGFANYLLKGYYEGKRAAETELLTKFPYGGVILRPGFIHGTRTVGSMKLPLGIIGSPLEMVLQHAKPLNQLPLVGPLFTPPVNVTAVAKVAVRAATDPVFPPGIVDVYGIQRFSQQMS

SEQ ID NO: 72705 - protein, 162 aa, Gossypium hirsutum
  unsure (1)..(162): unsure at all Xaa locations
  Clone ID: GOSHI-09MAY01-C21856_1.pep
GTAGLAVVGRLCPQLQHVDLSGLCGITDAGLLPLLESCEAGLVKVNLSGCLNLTDEVVLALTRLHGGTLELLNLDGCRRITDASLMAIAESCVFLSDLDVSRSAVTDSGVAALSRAEQLNLQVLSFSGCSXYQTKLAFLEKTRQVTVGVKSPALQFNQQSNL

SEQ ID NO: 72706 - protein, 86 aa, Gossypium hirsutum
  Clone ID: GOSHI-09MAY01-C21846_1.pep
TILASVIMFKDWDRQTPTQIITEMCGFITILSGTFLLHKTKDMVDDYVQSGPSLTTSISMRSLKHEEEDGFDEGVPLKRQDTSRIP

SEQ ID NO: 72707 - protein, 181 aa, Gossypium hirsutum
  Clone ID: GOSHI-09MAY01-C21546_1.pep
MSSKKSIQNLGETIHSLLGFKSHLTSTWVKSVCEIVKKLPSGNEKDDESAAKEISKIKEEMAALTHCINQSNIQRRQLLHDLLDLKGNIRVFCRVRPFTLEESIGGGIGAVVALDTSNLLLKLGDNKTKRYTFDNVFQGSSQDGVFSEVEPVIKSVLDGYNACIFAYGQTGTGKTFTMEGT

SEQ ID NO: 72708 - protein, 99 aa, Gossypium hirsutum
  Clone ID: GOSHI-09MAY01-C21496_1.pep
KMPMFLVDRNDPNKLIFFYQGSGMQLGAEGFAVGFLYTIVGLLLAFVTHLLVYVKNAKAKRVAMVFAICVSFWAVQKVIFLDNWKTGYGIHGFWPSSWN

SEQ ID NO: 72709 - protein, 84 aa, Gossypium hirsutum
  unsure (1)..(84): unsure at all Xaa locations
  Clone ID: LIB3148-029-Q1-K1-G6.pep
AQYFAQSTLKHLKLISNSHLNRNHSSNYISLKEVTKYFIPFIHDYCRKTLVXFLQQKLEAFSAFTSFKAFVENEIGKTIQALRT

SEQ ID NO: 72710 - protein, 155 aa, Gossypium hirsutum
  unsure (1)..(155): unsure at all Xaa locations
  Clone ID: GOSHI-09MAY01-C21476_2.pep
LFLVGEIGGNDYNYAFFLGGSIKQLQSMVPSVVGAIANATSALIEEGAVELMVPGNFPIGCSAVYLTLFESPKKDDYDRHGCLKAFNGFAKYHNXSLNNALDTLRQKYPHVRIFYADYYGAAMRYVHAPLHHGFYGGTLKACCGGGGPYNFNISP

SEQ ID NO: 72711 - protein, 125 aa, Gossypium hirsutum
  unsure (1)..(125): unsure at all Xaa locations
  Clone ID: GOSHI-09MAY01-C21476_1.pep
EAIEAVRRYRNDEIRQAVDTGRQKYPHDRIVYGDXXEAAMRYVHAPVHHGLYGGTRKACCGGGGPCNFNISARCGHPGSEACKDPSVYSNWDGIHLTEAAYRHIALALINGSSSLPPLISSPLSD

SEQ ID NO: 72712 - protein, 87 aa, Gossypium hirsutum
  Clone ID: GOSHI-09MAY01-C21776_1.pep
LKTCSSCGRAKRTCVKQPSITLDRSRMDNLQLKVSSSDRYLVRRNGDLGLDPVVRRIRDLTMFGSSHERERTIPFSGNGCNHKQVIE

SEQ ID NO: 72713 - protein, 512 aa, Gossypium hirsutum
  Clone ID: GOSHI-09MAY01-C21736_1.pep
VLGFQRTGGCGLKEQLAKTTLNNVRSQGHTYVELREDGKRFIFFCTLCLAPCYSDSVLLDHLKGSLHTERLAAAKVTLLGSNPWPFNDGVLFFGATNGEEKQLEVVNDNQNRLLEFLNSDNNLAIVEYVGSQASSCNKEVNGRAGESDLVIPGVLIKDKISDLKVSFTGFGRIAARFCENDGISNGISRIWSEWLGKEAPINDDRFKVPKHEFAVVTFPYNCDLGRKGLLDDVKSLLTSGSTTELGNGEAAIRKRKKSFSDPEDISGSLSNQYDSSGEDSSASNGDSSRLALDRYDDQLLLTRFISSRTIRRELRRQQRIAAERMCDICRQKMLPDKDVATLMNLNTGKLVCSSRNVNGAFHVFHTSCLIHWILLCELERIENHSVNPKSRRRSRRKNRTKCKKMGKEGETKPTGTLINSVLCPECQGTGIEVEGDELEKPDVSLSQMFRYKIKVSDARRAWMKNPEILENCSTGFHFPSQSAEMIQEKVMPLKLLHFYSADKLESGTSYLG

SEQ ID NO: 72714 - protein, 200 aa, Gossypium hirsutum
  unsure (1)..(200): unsure at all Xaa locations
  Clone ID: GOSHI-09MAY01-C21696_1.pep
EIQLKNAMASNETSQEHLNEMETVIDSLKVSIYEAESRAESAEAKVSELTDANLELTEELNFLKGNNEKSTKKVTSLEKQLRESEIQLQHAKASSEASQEQQNMLYSAIWDMETLIEDLKSKXSKAESRTEGVEEQCIELSESNFELNNELGILRHEIECLETSLNQANFEKEANAKEISHRTKLITDMVAQLATERERI

SEQ ID NO: 72715 - protein, 67 aa, Gossypium hirsutum
  Clone ID: GOSHI-09MAY01-C21116_1.pep
AIDASIVRIMKSRKVLGHQQLVMECVEQLGRMFKPDFKAIKKRVEDLITRDYLERDKENPNVFRYLA

SEQ ID NO: 72716 - protein, 128 aa, Gossypium hirsutum
  Clone ID: GOSHI-09MAY01-C21126_1.pep
HASEKVEEFSAVEGVDCIQMGPLDLSASLGYLWDPGHKKVREMLRTAEREVLKSDRKDGGAFLAGFAMPHDPPEALGKRGYHMVSGAVDVGLFRNAVVEDVRKFKISLNADSDYSDDDKDSDEKYWSE

SEQ ID NO: 72717 - protein, 89 aa, Gossypium hirsutum
  Clone ID: GOSHI-09MAY01-C21366_1.pep
NSLSRSCSTRHRPVQFLRRGSGGFCLLPFAFSLKASSFYSSSFVWCFLRSPQYRITKPFSLQCQLSFCSGVVACFTFHAEWPSSVHLFV

SEQ ID NO: 72718 - protein, 388 aa, Gossypium hirsutum
  Clone ID: GOSHI-09MAY01-C21336_1.pep
MAEESKQRRNVKPVKVQTASSSEERRSNNNLPNFLLSVRLKYVKLGYYYVISNAMYLMLVPLLGIASVHLSTLTIQDFVRLWDQLKFNLVSVTLCSGLLVFLATLYFMSRPRKVYLVNFACYKPEADRICTREIFMERSGLTGSFTGVNLAFQKKILERSGLGQKTYLPEAVMRVPPNPCMAEARKEAETVMFGAIDELLDKTGVKAKDIGILVVNCSLFNPTPSLSAMVVNRYKLRGNILSYNLGGMGCSAGLISIDHAKQLLQVHPSSYALVVSMENITLNWYFGNDRSMLVSNCLFRMGGAAILLSNRSSDRHRSKYQLIHTVRTHKGADDKCYNCVFQREDDTKRIGISLSKELMAVAGETLKTNITTLGPLFLPMSEQLLFFV

SEQ ID NO: 72719 - protein, 56 aa, Gossypium hirsutum
  Clone ID: LIB3083-089-Q1-L1-F2.pep
NNTLPNFFLSVRLKYVELGYHYVISNAMYLMLVPLLRIAAVHLSTPTLLYYVRLWN

SEQ ID NO: 72720 - protein, 184 aa, Gossypium hirsutum
  Clone ID: GOSHI-09MAY01-C21276_1.pep
MAEAQTETPPSLSEQYSLKEKAEKSDVATKVADAEEVENSASTSSKEVVTEEVETPAPLVESTEVPPAVAEENTEANPVAENSVEDAQVAAEESNERTKESSGDAEETPEIKLETAPADFRFPTTNQTRHCFTRYIEYHRCVAAKGEDASECDKFAKYYRALCPGEWIDRWNEQRENGTFPGPL

SEQ ID NO: 72721 - protein, 118 aa, Gossypium hirsutum
  Clone ID: LIB3149-020-Q1-K1-G10.pep
PGRTHASAAFFSWPAAVYHQREASLPGGAEAQTETPPSLSEQYSLKEKAEKSDVATKVADAQEVENSASTSSKEVVTEEVETPAPLVESTEVPPAVAEENTEANPVAENKGEDAQVAA

SEQ ID NO: 72722 - protein, 154 aa, Gossypium hirsutum
  unsure (1)..(154): unsure at all Xaa locations
  Clone ID: GOSHI-09MAY01-C22946_1.pep
PMHEMAHIAKGQXHGNCVSLLRASAMNANQSSMLILQETCIDAAGSLVVYAPVDIPAMHVVMNGGDSAYVALLPSGFAIVPDGPGSHGPISNGHVSGNTGGGSSSVGGSLLTVAFQILANSLPTAKLTVESVETVNNLISCTVQKIKAALQCES

SEQ ID NO: 72723 - protein, 141 aa, Gossypium hirsutum
  Clone ID: GOSHI-09MAY01-C22976_1.pep
PCSQRPFREGPIFPGLKGPKEFFQRFKKPPEPFTHHLLNPMFVGPFLQHLPHKTALISPTKLWETPKNPIFPHFPHSSQKKMIGERKSPGSSHNFLLLFQDPHLPFLLQNPKSPSLLDSLINEDSLITEVVIFFSGFSWGY

SEQ ID NO: 72724 - protein, 516 aa, Gossypium hirsutum
  Clone ID: GOSHI-09MAY01-C22906_1.pep
MALNQSYDLFFIFNLSLLFALLPFSFSQTVADAPSPAADTCNGIFLSYAYTSGTKLKPTDPKHQPYRFESVLTVLNNGDEKLKSWRVFVGFKNDEYLVSASNAVLADGTSLPANVGNGTVFAGYPMTDLKTAIETAGDLNQIQVQVKLLGTQFGVAAPSVPLPETIHLANDGFLCPKPSLQGPRVRQVCCTNDPKFKTNVAVEDEFLPRQSGDLTIMYDVTRTYDSNYWAQVTISNHNPLGRLDNWKLSFDWMRDEFIYTMKGAYPYVVDSSDCIFGPQGQHYRDLDFGNVLNCERRPTIIDLPLTKANDTTMGMIPKCCRNGTILPPTMDPSKSSSVFQMQVFKMPPDLNRSELSPPQNWKINGTLNPNYKCGPPVRVSPSQFPDPSGLPSNTTVVASWQVVCNITRPKNASPKCCVSFSAYFNESVVPCPTCACGCPRNSANTCRANATAVLVPPEALLVPFENRTAITRAWADLKHFTVPNPMPCGDNCGVSINWHLYSDFSRGWCAWITIFN

SEQ ID NO: 72725 - protein, 329 aa, Gossypium hirsutum
  unsure (1)..(329): unsure at all Xaa locations
  Clone ID: GOSHI-09MAY01-C22846_1.pep
VRPASGNFRPESXLGEGGFGCVFXGWIEENGTAPVKPGTGLTVAVKTLNIEGLQGHKEWLAEVDFLGNLLHPNLVKLVGYCIEDDHRLLVYEFMPRGSLENHLFRRSLPLPWSIRMKIALGAAKGLAFLHEEAERPVIYRDFKTSNILLDADYNAKLSDFGLAKDGPEGDKTHVSTRVMGTYGYAAPEYVMTGHLTSKSDVYSFGVVLLEMLTGRRSMDKNRPNGEHNLVEWARPHLGDKRRFFRILDPRLEGHFSVKGALKAAQLAAQCLSRDPKARPRMSEVVETLKPLPNLNDMASSSYYFQSMQSDRSRSSNIPCQNGIECRQDS

SEQ ID NO: 72726 - protein, 162 aa, Gossypium hirsutum
  unsure (1)..(162): unsure at all Xaa locations
  Clone ID: AI054963.1.pep
FSLVITTFCTEGSLPLPWSIRMKIALGAAKGLAFLHEEAERPVIYRDFKTSNILLDADYNAKLSDFGLAKDGPEGDKTHVSTRVMGTYGYAAPEYVMTGHLTSKSDVYSFGVCLLEMLTGGMSMDKNRPNGEHNLVXWARTDLETRDGLPILEPSLEGNFLS

SEQ ID NO: 72727 - protein, 201 aa, Gossypium hirsutum
  Clone ID: GOSHI-09MAY01-C22816_1.pep
LVVREVYRAITGYMKMMKSASGKKQTVFDADNSMNNMKLPLIYLMDCTLNDCSLILKSVNQREVYPALMLFPAETEAVISYNGDVSVANIIKFIAHHGSNSHHLYGEKGILLTTTEAVKNQAILKDSSGVSANEEGQFAKDKFHEVILKNQNPKRVAYSKYNGGKSRSPMSVGSHKATSKVVVGSILTATDKLLEVIPFDN

SEQ ID NO: 72728 - protein, 370 aa, Gossypium hirsutum
  unsure (1)..(370): unsure at all Xaa locations
  Clone ID: GOSHI-09MAY01-C22416_1.pep
MREPTMVVGADSNAAGAAVGGADGSPLPPPTSSPPQSLVERLKDYGQEHVFALWDELSPDERLHLVKDIQSLDLSRIDRIIRCSLRSQGLPVAAIEPVPESCVSSVEERTMEERERWWKMGLKAISEGKLAVLLLSGGQGTRLGSSDPKGCFNIGLPSGKSLFQLQAERILCVQRLAAQAINEGSVTIHWYVMTSPFTDDATRKFFESHKYFGLEADQVTFFQQGTLPCISKDGRYVMETPFKVAKSPDGNGGVYTALKSSRLLEDMAARGIKYVDCYGVDNALVRVADPTFLGYFIDKXCTAAAKVVRKAYPQKXVGVFVRRSKGGPLTVVEYTELNQSLASAVNXQTGRLXFCWSNVCLHMFTLDFLN

SEQ ID NO: 72729 - protein, 280 aa, Gossypium hirsutum
  Clone ID: GOSHI-09MAY01-C22426_1.pep
FNFGPKPAKPKIKGVKPAPLEVLDRVKMNNTLETPRATIKGLLQVPKQAEMSFSRENLRKVEDQLKRAFVEFFPLLRLLKSYSFLNTLAFSKIMKKYDKITSRSASRSYMKMVDNSNLGSSDDVTKLLERVEATFIKHFSNANRTKGMNILRPKAKRDRHRVTFSTGFLAGCMASLLLALIMIVRLRTIMDSRGRTIYMETMFPLYSLFGFIVLHMLMYAIDIFYWRKYRVNYAFIFGFKPGTELGYREVLLLSFGLGILALAAVLCNLDMEMDPKTKDY

SEQ ID NO: 72730 - protein, 115 aa, Gossypium hirsutum
  unsure (1)..(115): unsure at all Xaa locations
  Clone ID: GOSHI-09MAY01-C22736_1.pep
IEPYFNGCPHLVXLKAMKCRGVTPEGADWLRANRGSLSVNLDMGEHLDVTANDGVVQDNGDGIPPVVAGQIGAXGIASSSTARSTSFKLSGILGGRSFMACTLRRLASSNGSSRS

SEQ ID NO: 72731 - protein, 58 aa, Gossypium hirsutum
  Clone ID: GOSHI-09MAY01-C22196_1.pep
TGEVEALLPVVGMLLQFSPKEMQKCQQAYRTYTDVPSSPANEASGGPTLSLFSRFSFS

SEQ ID NO: 72732 - protein, 117 aa, Gossypium hirsutum
  Clone ID: GOSHI-09MAY01-C22076_1.pep
EAKRVHKVAAINFPRPLTNFKRNNFGKDFSPEKSINASRKDTFFAAMVECCKDDNDEESRSNLWSGVKVTRSISDRLGFINLYSSCKRTCAVSESVVYLPRSSRAANYGILTTRRST

SEQ ID NO: 72733 - protein, 97 aa, Gossypium hirsutum
  Clone ID: GOSHI-09MAY01-C22016_2.pep
MNSPQLPQTRGRVLSSSEINKSPAGSGGDLESSLIQIYHHHHHNSLKLRDQAEKAKKDAIKKAGRVSDLLVEAVNGGVQESFINEKRIEAEIRALAS

SEQ ID NO: 72734 - protein, 108 aa, Gossypium hirsutum
  Clone ID: GOSHI-09MAY01-C22016_1.pep
LISLKELIGTEKAKKDAIKKAGRVSDLLVEAVNGGVQESFINEKRIEAEIRALASTIARFMKQTDQWLAASHAINTSVKEIGDFENWMKSMDFDCKSINAAIRNIYQQ

SEQ ID NO: 72735 - protein, 202 aa, Gossypium hirsutum
  unsure (1)..(202): unsure at all Xaa locations
  Clone ID: GOSHI-09MAY01-C22036_1.pep
LEFHLHGKGRPTMDWPTRMIIALGSAKGLAYLHEDCNPKIIHRDIKAANILLDFKFEAKVADFGLAKFFSDVNTHVSTRVMGTFGYLAPEYASSGKLTEKSDVFSFGVMLLELISGHRPVGSSYAEDSLVEWARPLLSRALEDGTFNNLIDPRLQKEYDHNEMARMVACAAACVRHSXERRPRMSQIVRALEGESSLSDLNE

SEQ ID NO: 72736 - protein, 81 aa, Gossypium hirsutum
  Clone ID: AI725951.1.pep
KCCFQVADFGLAKFSSDANTHVSTRVMGTFGYLAPEYASSGKLTDKSDVFSFGVMLLELITGHRPVGSSYREDSLVDWVSY

SEQ ID NO: 72737 - protein, 151 aa, Gossypium hirsutum
  Clone ID: GOSHI-09MAY01-C22306_1.pep
MRTPHHLFTLALFFTFISVSVEALNVGIQAADTAISVSKECSRTCESEFCSVPPFLRYGKYCGLLYSGCPGEKPCDGLDACCMKHDACVQAMNNDYLSQKCSQSFIKCMKDFQKGGGRSFKGNKCQVDQVVDVISVVMKAALIAGGVLHKP

SEQ ID NO: 72738 - protein, 62 aa, Gossypium hirsutum
  Clone ID: GOSHI-09MAY01-C22296_1.pep
LEKNVSRIADLVSAYIGLDRDLKIYIYEAGWLVVFWWEQQQTRSCLGGSSSKPGGVSKPGGV

SEQ ID NO: 72739 - protein, 99 aa, Gossypium hirsutum
  Clone ID: GOSHI-09MAY01-C22286_1.pep
HHHLLPRRFLFPWKPCNFFKCLFFFSQLAGYVVDARIRFLQSPFLNLSTVTNRIRNFMRANHKIMIKEKIRSSKKKFSKNSAKIYSGHTCFSTKYAIPI

SEQ ID NO: 72740 - protein, 193 aa, Gossypium hirsutum
  Clone ID: LIB3585-034-P1-K1-E7.pep
KDVMMPIHRASFNDVYLVYELMDTDLHQIIKSPQPLSNDHCKYFIFQLLRGLKYLHSANILHRDLKPGNLLVNANCDLKICDFGLARTSRGNEQFMTEYVVTRWYRAPELLLCCDNYGTSIDVWSVGCIFAEILGRKPIFPGTECLNQLKLIINVLGSQQEADLAFIDNPKARRYIKSLPYSRGIQFSHLYPH

SEQ ID NO: 72741 - protein, 89 aa, Gossypium hirsutum
  Clone ID: LIB3083-080-Q1-L1-B11.pep
LLRGLKYLHSANILHRDLKPGNLLVNANCDLKICDFGLARTIRGNEQFMTEYVVTRWYRAPELLLCCDNYGTSIDVWSVGCIFAEILGR

SEQ ID NO: 72742 - protein, 73 aa, Gossypium hirsutum
  Clone ID: GOSHI-09MAY01-C22216_1.pep
PIGAGAEIDEDELEAGLEELEGAELEEQLLQPATTAPAAPVQVPAGRQPARPIPQKRTAEEDELAALQAEMAL

SEQ ID NO: 72743 - protein, 156 aa, Gossypium hirsutum
  Clone ID: GOSHI-09MAY01-C22206_1.pep
LIKNQIFFILFKNSHGRYCSNRYPKAGVYEVCNWCLNQEEHSKEKSQNSLNSSASSKGKNEDDNNNKIKGDNHHGAGFKGNRRNTNSLKQQQLMKIPIKKPKLEEKMKRKRIIKNAYLEEKLRRTKLEEISKNGVITRHFFRNKVRRYKLLDEVSS

SEQ ID NO: 72744 - protein, 231 aa, Gossypium hirsutum
  Clone ID: GOSHI-09MAY01-C22226_1.pep
LETAAMKEYYFKADNPTKSASSNLKYRNPKYLSMLNHLRFYLPQVYPKLDKILFLDDDIVVQNDLTRLWSVDLHGKVNGAVETCGESFHRFDKYLNFSNPHISRNFDPNACGWAYGMNMFDLKEWKKRDITGIYHKWQNMNEDRALWKLGTLPPGLITFYGLTHPLEKSWHVLGLGYNPSVDKKEIEHAAVIHYNGNMKPWLELAMTKYRSYWTKYIKYDHPYLRSCNLSE

SEQ ID NO: 72745 - protein, 204 aa, Gossypium hirsutum
  Clone ID: GOSHI-09MAY01-C23556_1.pep
MQAWFSGSSSVGDGQGKEGSSLLADWNSYAAARESEDGSAFGFDLESAMRSANDTVSGTFNVVSKGVRDIPGNFQSATSSVPSGKALLYFGLFLASGVFFVFIAFTMFLPVMVIMPQKFAICFTLGCGFIIGSFFALRGPQNQLAHMSSKERLPFTLGFIGSMVGTIYVSMVRHRYILSVLFSVLHVLALAYYAISYFPGGSAG

SEQ ID NO: 72746 - protein, 97 aa, Gossypium hirsutum
  Clone ID: GOSHI-09MAY01-C23576_1.pep
YRDIVRQFIKGTDGLSGAFAECLCGSPNLYQEGGGKPWNSVNFICAHDGFTLADLVTYNNKHNLANGEDNNDGESHNYSWNCGHVYEIGTEDRICPA

SEQ ID NO: 72747 - protein, 367 aa, Gossypium hirsutum
  unsure (1)..(367): unsure at all Xaa locations
  Clone ID: GOSHI-09MAY01-C23516_1.pep
KSAKVRQQAADLISRIAVVMKQCQEEQLMGHLGVVLYEYLGEEYPEVLGSILGALKAIVNVIGMTKMTPPIKDLLPRLTPILKNRHVKVQENCIDLVGRIADRGAEFVPAREWMRICFELLEMLKAHKKGIRRATVNTFGYIAKAIGPQDVLATLLNNLKVQERQNRVCTTVAIAIVAETCSPFTVLPALMNEYRVPELNPPRPVLKSLSFLFEYIGEMGKDYIYAVTPLLEDALMDRDLVHRQTAASAVKHMALGVAGLGCEDALVHLMNYVWPNIFETSPHVINAVMEAIEGMRVALGAAIVLNYCLQGLFHPARKVRXEVYWKIYNSLYIGSQDALVAAYPILEDEQSSEQNNIYSRPELMMFV

SEQ ID NO: 72748 - protein, 62 aa, Gossypium hirsutum
  Clone ID: GOSHI-09MAY01-C23536_1.pep
MGLSKASLILVLVAVCALMGSAVAAEAPAPSPTSGTASISPSFVSVFFAAVTALLFGSTLRI

SEQ ID NO: 72749 - protein, 67 aa, Gossypium hirsutum
  Clone ID: LIB3584-019-P1-K1-B2.pep
PRVRPRVRPRVRDVWTYLFQYDYGLISFALVRKTTSLDSRIFIYIGTPRYTKTPYKIHPSQKLNLYK

SEQ ID NO: 72750 - protein, 139 aa, Gossypium hirsutum
  Clone ID: GOSHI-09MAY01-C23496_1.pep
LDVVTVCPTLILGPLLQSTINASSKVLINLLKGEYDSLENKIRKIVDVRHVAQALLLVYEKPAAEGRYICTAHTIKARDLVDKLRSMFPQYNYPKSFTAGGEEDTVSSEKLQRLGWSYRPLEETLVDSIESYKKAGILD

SEQ ID NO: 72751 - protein, 270 aa, Gossypium hirsutum
  unsure (1)..(270): unsure at all Xaa locations
  Clone ID: GOSHI-09MAY01-C23406_2.pep
FRINFGKNREKIKKEIVEFPTKIKGLFFAGFSFCRPEIFGRIALAVASDETTRICNHCDRAIPSSNIDLHYAHCSRNLEKCNVCGDMVPIRHAEEHFLNTHAPVACSLCSATMEREILPIHKGENCPQRIVTCEFCEFPLPAIDLAEHQEVCGNRTELCHLCNRYVRLRERYNHESRCNGIPEDHVGSSRNVRPVEREQGAPRRQPPEYSRKRLLFTVAIXGIAVLLGSLFFHKTAGAGPVLYPSRGCSLACVYQPGELTYFIFVSQDIL

SEQ ID NO: 72752 - protein, 92 aa, Gossypium hirsutum
  Clone ID: GOSHI-09MAY01-C23406_1.pep
VFGRLPSPSSLLPFNWPNIPKHRSQSIKLNPHTWYNSLQTMQKKRATFRYGFQIIKTYVPNVKTVKHHHNRSQDLSRSVLQNRNRFGSYPVR

SEQ ID NO: 72753 - protein, 96 aa, Gossypium hirsutum
  Clone ID: LIB3825-007-Q1-N6-A9.pep
EHQEVCGNRTEMCYQCNRYIRLRERYNHASRCTGIAENNVESSRNVRAPEREQGAPRRQPPEYSRKRLIFTIAVTGIAVLFGSLFFQKKAEASQVH

SEQ ID NO: 72754 - protein, 102 aa, Gossypium hirsutum
  Clone ID: GOSHI-09MAY01-C23776_1.pep
MYVEHAFSISDEDIMMDTPHAINNRPPYKEIGLAVALLVFGTLGIILGIFMAVNKVGGDRAHGLFFAILGSILFIPGFYYTRIAYYAFKGYKGFSFSNIPPV

SEQ ID NO: 72755 - protein, 147 aa, Gossypium hirsutum
  Clone ID: GOSHI-09MAY01-C23766_1.pep
MESTVTNPLPNSNSDPVRRKKKKKTSAAAATATLKTNQQRQNQNQSYNHTRWKSEAQQQIYSSKLIQALSQVNLNGNHSSPSAPRRGRAVREAADRALAVAAKGRTRWSRAILTSRVKLKFRKEKGQRSGSVSAATVTGVIGRNRSR

SEQ ID NO: 72756 - protein, 335 aa, Gossypium hirsutum
  Clone ID: GOSHI-09MAY01-C23686_1.pep
METLLRHISGGKLLLELNRVLRPGGYFIWSATPVYQKLPEDVGIWQEMSRLTKSMCWDLVTVKKDRLNAVGAAIYQKPASNDCYYKRSKNAPPLCEESDDPNAAWNVSLQACMHKVPEDSTERGSLWPVQWPERLEQPPYWLNSQIGVYGKAAQEDFTADYNHWKTVISESYLKGMGIDWSSVRNVMDMKAVYGGFAAALKDLKVWVMNVVPIDGADTLPVIYERGLFGIHHDWCESFNTYPRTYDVLHADHLFSSIQNRCKLVAVIAEVDRILRPEGKLIVRDKAETISAVESMAKSLQWEIRMIYSKDGEGLLCVRKKFWRPTVEEPIKPAIV

SEQ ID NO: 72757 - protein, 159 aa, Gossypium hirsutum
  unsure (1)..(159): unsure at all Xaa locations
  Clone ID: LIB3145-034-Q1-K1-C2.pep
HEYCLASCSNNGSLYRFFHGGTPEFLANTKQSFTVFRINHSDLHIVEIIANALPPALYRFXVLFFVQIKLSLSGPQRFDQTSCNYPVTNCAPCSEYVEKRVIVHEDTSXCLSGYGIKXIHTKSSMYSEPIHGSLEYWKXVSAGRRLEXRTASGSXPXXS

SEQ ID NO: 72758 - protein, 208 aa, Gossypium hirsutum
  Clone ID: GOSHI-09MAY01-C23636_1.pep
MVSLSTWCRYLVHKIEYSFTLGWKSYKRGQISDRELQDAVWKNVFQGKLTYLHWSKGEAMAPTIGEQGGTLLVRKIPSADPGRVFVGDVIVMKDPDDSDNYLVRRLAATEGYEMVSKDEKDEPFVLEKDQCWVLADNEKLKPKVLNEAKDSRLFGPVPMTGIVGRVIYCLRTAVDHGPVQNSHYRMRKDSPVLEVELDVDDMVKNHKS

SEQ ID NO: 72759 - protein, 70 aa, Gossypium hirsutum
  Clone ID: LIB3582-032-P1-K1-C12.pep
KSYKRGLISDRELYDTVWKNVFQGKLTYLHWNKGEAMAPTIGEQASTLLVRKIPIADPTILRVVILGTVP

SEQ ID NO: 72760 - protein, 47 aa, Gossypium hirsutum
  unsure (1)..(47): unsure at all Xaa locations
  Clone ID: LIB3147-033-Q1-K1-H11.pep
RXHGERVTVLYRRHFESPPICLYYTFFPLWASFQFNIEIKERIKKNI

SEQ ID NO: 72761 - protein, 161 aa, Gossypium hirsutum
  Clone ID: GOSHI-09MAY01-C23186_1.pep
NCSMELKGDAAELCCVLFANTRIRSTMAAARCVEPLVSLLVTEFSPAHHSVVRALDKLVDDEQLAELVAAYGAVIPVVGLLDGKNYMLHEAVSRALVKLGKDRPACKMEMVKAGVIESVLDILHEAPDFLCAAFVELLRILTNNATIAKGPSAAKVVEPLF

SEQ ID NO: 72762 - protein, 251 aa, Gossypium hirsutum
  Clone ID: GOSHI-09MAY01-C23106_2.pep
MEETNWESLLFEFDCPNLGNILQNESESVTPPISTHSPDEKPIWTSSIGEIEKLLMEDDRFDDKVETQPIPNEFLADLLVDSSPSGCGDEVIDDTAFDKQNQTLFNVDNDDPIDKKQRRKLRNRDAAVRSRERKKMYVKDLEMKSTYLEGECTRLNCLLQWSIAENQALRFTLNQRCAFDASSAKQESAVLLLESLLLGSLLWFLGIMCLFTLPRLPKSLLENEEKRGPERVAHSNLVGQSFAKTRRCKAS

SEQ ID NO: 72763 - protein, 251 aa, Gossypium hirsutum
  Clone ID: GOSHI-09MAY01-C23106_1.pep
MEEINWDTLLLEVDLPDFGNILDNEPVTEPPPQPCSTQNPDEEPAVSSWIGAIEKVLMEDDNFDPRVETQPVSDDDFLADLLVDSPPSSGGDVAGVDGADLHKQSQTHTDVDKDDPIIKKQRRQLRNRDAAVRSRERKKMYVKDLEMKSRYLEGECRRLSRVLQCFIAENQALRLTLHKGCAFDTSSTKQESAVLLLESLLLGSLLWFLGIMCLFTLPILPRSVLEAAPMANEETQGPERVAPRGAGSNRV

SEQ ID NO: 72764 - protein, 85 aa, Gossypium hirsutum
  Clone ID: LIB3829-035-Q1-K6-B1.pep
IGQEIIIVDRLSLTPRIKIIILHQNLLDRPDPRRHTGSSSGLWVEQGLAGGSVTGSLSKIFPQSGKSTSSMKGIPIHFLHANPKI

SEQ ID NO: 72765 - protein, 131 aa, Gossypium hirsutum
  Clone ID: LIB3582-030-P1-K1-F5.pep
MEEINWDTLLLEVDLPDFGDILDNEPEPVTEPPPQPCSTQNSDEEPAVSSWIGEIEKVLMEDDNFDHRVETQPVSDDDFLADLLVDSPPSSGGDVAGVDGADLHKQSQTHTDVDKDDPIAKKQRRQLRNRD

SEQ ID NO: 72766 - protein, 93 aa, Gossypium hirsutum
  Clone ID: LIB3272-038-P1-K1-D6.pep
ILLDVNFPFHNLWVFMEEINWDTLLLEVDLPDFGDILDNEPEPVTEPPPQPCSTQNFDEEPAVSSWIGEIDKGVIYCGLKTIEVVTQHCGALC

SEQ ID NO: 72767 - protein, 227 aa, Gossypium hirsutum
  Clone ID: GOSHI-09MAY01-C23126_1.pep
PRVRPRVRPRVRPRVRSYADGVFDSRFNRYITVMEDRRVSRTNSTTTIVAVPLDGNIQEPNVLVSGNDFYAFPRLDSKGERMAWIEWSHPNMPWDKSELWVGYISENGDIHNRVCVAGYDPKIVESPTEPKWSPTGELFFITDRKNGFWNLYKWVESKNEVLPLYPLNAEFARPLWIFGMNSYEFVKNEAGKTLIACTYRQNGKSYLGILDDVQGSFSLLDIPFTDI

SEQ ID NO: 72768 - protein, 160 aa, Gossypium hirsutum
  Clone ID: GOSHI-09MAY01-C23096_1.pep
PTRPPTRPPTRPPEDNWYCDGCRPVATGSASSQVQDSLPDHRIINNLYNRFSPMVNFGEGLDSIVGPSPLMPSIPNFVGYSSPRFPAVDIPVVSPASGAGAPTLTGRRWLHRQIQNLRSINRMNFMAGRTDGILSANMGTDFVNSHTDQSTETTVQQART

SEQ ID NO: 72769 - protein, 340 aa, Gossypium hirsutum
  unsure (1)..(340): unsure at all Xaa locations
  Clone ID: GOSHI-09MAY01-C23046_1.pep
KFGDSPHEAILSYRRALLHQWNLDAETTARIQKQFAIFLLYCGGEASPPNLRCQIDSSFVPRNNIKEAILLLMILLWKVSLKRIEWDPSILDHLSFALSMSGDLRALANQIEELLPGVISRKERYNFLALCYYGAGEDLVALNLLRKLLQSNEDPHCVPALLMASRICGGKPNLAEEGIKFAHRALESLDEECSELEGTGNLLLGLARSTHSKSALSDSERVSRQSEALQALERAWKITSMKDPNILYYLCLENAEQRKLEAALYYAKYLLKLEGGSNIKGWLLLARILSAQKRFVDGEIVLNAALDQTGKWDQGELLRTKAKLQXAQGQLKSAIETYSQ

SEQ ID NO: 72770 - protein, 177 aa, Gossypium hirsutum
  Clone ID: GOSHI-09MAY01-C23066_1.pep
MESCPSIKNILLLDSEGNRVAVKYYSDEWPNNSVKEAFEKSLFSKTQKTNARTEAEIAMFESHIIVYKFVQDLHFFVTGAENENELILVTVLQGFFDAVGLLLRGTVDKKEALENLDLILLCLDEIVDGGIILETDANVIAGKVASHSIDAAAPLSEQTISQALATAREHLARSLLK

SEQ ID NO: 72771 - protein, 145 aa, Gossypium hirsutum
  unsure (1)..(145): unsure at all Xaa locations
  Clone ID: GOSHI-09MAY01-C23036_1.pep
MISRRQPGAEDLVSSDNPNAWIFDDYGLLEDIPVPGGDLPSLDPSAPIWSSPSLTCSTPLSVEFTESFGNSDNLNETGSRKRMRSGSSSASGAKACREKMRRDXLNDRFXMGSILKPESLPMDKVVXIEAARMVTQLRDEGQKLR

SEQ ID NO: 72772 - protein, 71 aa, Gossypium hirsutum
  Clone ID: LIB3083-095-Q1-L1-A3.pep
CLSPIYLSVVVCFVCCSFCIKHLPLSGITESSPGKMISRRHPASEDPAYSRQSYSHGSLHSLVLIHTARLI

SEQ ID NO: 72773 - protein, 238 aa, Gossypium hirsutum
  unsure (1)..(238): unsure at all Xaa locations
  Clone ID: GOSHI-09MAY01-C23256_1.pep
MGTEKGTAYLLSSFFFSIILTIVCERTVKAQSLPPAKHDGFLYTNHRVDSDTIMIEAFFDPVCPXDSRDAWPPLKQAIHHYGSRVSLIVHLLPLPYHDYAFSTSRALHIVNLLNPSATFRLLESFFEYQGRFYNAQTSNKSRDTVVDEIIKLAAETVGNSYYSAIESGFNDRKTDLKTRISFKYSASRGVFGTPTFYINGFAVPDSGSAIDYKQWRSFIDPLLLAQSRKRDDLPHLSL

SEQ ID NO: 72774 - protein, 129 aa, Gossypium hirsutum
  unsure (1)..(129): unsure at all Xaa locations
  Clone ID: GOSHI-09MAY01-C98736_1.pep
PRVRWFQGLIFNKQIRWDALDELEEGLEFLKXAPVSFGGPVLRRGMPFVTLSRRVSEVQYVEVLPGIYFLAQFATVANIEKLKAGNQPMSDYWFFFGYTGWGWHQLNQEIREGAWTVSDDNESLDWPLN

SEQ ID NO: 72775 - protein, 88 aa, Gossypium hirsutum
  Clone ID: GOSHI-09MAY01-C98646_1.pep
SQYSCPVCSKSFCDMTRVWERLDRDVASTGMPQIYQNRRVWILCNDCGENSEVNFHFVAHKCPICSSYNTKLTRGRIATGSSEIMKTV

SEQ ID NO: 72776 - protein, 65 aa, Gossypium hirsutum
  Clone ID: LIB3828-023-Q6-N6-G11.pep
PDMQLIQYQADTWTHCYGLIRDYENSLMMASSMFISHFSVSCFSSIVNSYGMGKFHFGAAEGTSQ

SEQ ID NO: 72777 - protein, 61 aa, Gossypium hirsutum
  Clone ID: GOSHI-09MAY01-C98666_1.pep
KKRTIRTYMHNHTTPYKRPLKGAFKANLFACSFAYAIYSTSKKRRYAQTKGQKKKVKIGTQ

SEQ ID NO: 72778 - protein, 83 aa, Gossypium hirsutum
  Clone ID: uC-gsflnu33B036c04b1.pep
HHSHHIKALKKLWLNPLMTAYMKKRTIRTYMHNNTTPYKRPLKGAFKANLFACSFAYAIYSTSKERRYTQTKGKKKKVKIGTQ

SEQ ID NO: 72779 - protein, 172 aa, Gossypium hirsutum
  Clone ID: GOSHI-09MAY01-C98196_1.pep
VSLRPSLAASAGVISKFFHSCPDNAFQVALHGTSYSLLQRLGAVMRNGAKLFAVGTTSSLVGTAATNALINAKKAVDKSSVDEIENVPILSTSVAYGVYMAISSNLRYQVLAGVIEQRMLEPLLHQHKFLLSTICFAIRTGNTYLGSLLWVDYARLVGIQKPQEEENPVLVS

SEQ ID NO: 72780 - protein, 243 aa, Gossypium hirsutum
  Clone ID: GOSHI-09MAY01-C98176_1.pep
QGGGLPRAHGSNGKPSSRKWRSGLRAGLDKQSMPVEAAVVTATGAVQGAAMGALRGTLTKDVSSSFPTPPQASLNHQAMASLKQAQALSGAPWVQARNFAVMTGVNAGLACVMKRLRGKEDVQSSMVAAFGSGAMFSLVSGMGGPNQAANAVTSGLFFALIQGVLFQFGQKLSQPAVEDMYYSRTRSMLNSLGLQNYEKNFKKGLLTDNTLPLLTDSALRDVKIPPGPRLLILDHVQSFSSPF

SEQ ID NO: 72781 - protein, 136 aa, Gossypium hirsutum
  unsure (1)..(136): unsure at all Xaa locations
  Clone ID: GOSHI-09MAY01-C98216_1.pep
VAAYGKXFVRASQDTWALFEREEMEPIVDSDMMSAICFLTGVCSGSICVIVVAAWTAKVHQPFTATISLLAFFIGYLMTRIAMALPHACVSCYYVCYAENPENRLFDKTIKERLELIKAGRDVVVPTPRVPRRFTR

SEQ ID NO: 72782 - protein, 190 aa, Gossypium hirsutum
  Clone ID: GOSHI-09MAY01-C99926_1.pep
MAKGRRLSTSRSERYLGSFGYGHNQGETVTDETELGEDDVWSMVDTVSDRPDQGDGNPRSEWTTRVEHESNGNGHLGRRRIPRDERHVGGLSLAFEDSSSTKPRIVHQFRGHDKVAAAASPRGHKMATSAPVNVPDWSKIYRVDSVESIHDSDDGESEEMMPPHEYLAREYARSKKSGGASVFEGVGRTL

SEQ ID NO: 72783 - protein, 155 aa, Gossypium hirsutum
  unsure (1)..(155): unsure at all Xaa locations
  Clone ID: GOSHI-09MAY01-C99856_1.pep
QQRVLALGESDVSXGWGRLFLKNSVGKHEYLGEYTGELISHREADKRGKXGGGRENSSFLFNLNDQFVLDAYRKGDKLKFANHSPDPNCYAKVIMVAGDPRVGIFAKERINAGEELFYDYRYEPDRAPAWARKPEASGSKKEEVAPSSGRAKKLA

SEQ ID NO: 72784 - protein, 188 aa, Gossypium hirsutum
  unsure (1)..(188): unsure at all Xaa locations
  Clone ID: GOSHI-09MAY01-C99866_1.pep
ISVPFQAPQEVHFFNEEAETNMLLMSPKTXWKPHTTGLHQRGVETGKIVTEWKFGKEGXEITMRDIANDSKGAQLDPSGATFLGLDDNRLCRWDMRDRNGIVQNLATSTPVLNWTQGHQFSRGTNFQCFATTGDGSIVVGSLDGKIRLYSITSMRQAKTGFPGLGSPITHVDVTFDGKWILGTTDTYL

SEQ ID NO: 72785 - protein, 134 aa, Gossypium hirsutum
  Clone ID: GOSHI-09MAY01-C99816_1.pep
MENQVVSPPHVDAFRPSLGFPLGTALLLIIIFSLSGIFSCCYHWDKLRSLRRSPADRTDPHPDIEASPSKPMPDFLDLKKNQSQSLPVLMPGDEIPKFIALPCPCQPPRQDKVEVKIEKPPKPARCPVPFGLAI

SEQ ID NO: 72786 - protein, 55 aa, Gossypium hirsutum
  Clone ID: GOSHI-09MAY01-C99516_1.pep
HTRVKLGFSSVGSYNYDPFSFSSSYDFLRKSFGRTCNVLFNVLNNSKYNLSFSCD

SEQ ID NO: 72787 - protein, 102 aa, Gossypium hirsutum
  Clone ID: GOSHI-09MAY01-C99626_1.pep
VLTELSVCTSVILGGTDDLSEEVSSGDTLSSSRIHGEDSLPSKELRRRQIKLSDPINQLSLENSVRENLQTCSALHGESFNSAMARMHPAAFTQLKQALKMP

SEQ ID NO: 72788 - protein, 124 aa, Gossypium hirsutum
  Clone ID: GOSHI-09MAY01-C99056_1.pep
MSKNTSPDEKEAAFALAALMEIPFQYKAVMELGILGHRTGKAKKVVPRPPPAPYRAAARSEPAPTTVSSSPALDDRTQACPICLTSAKDLAFGCGHMTCRECGSRVSNCPICRQRITNRLRLFA

SEQ ID NO: 72789 - protein, 85 aa, Gossypium hirsutum
  unsure (1)..(85): unsure at all Xaa locations
  Clone ID: GOSHI-09MAY01-C99376_1.pep
CRPKFSSWTVNKTKXFEKALAVYAKXTPDRWDNVAKAVGGKTAEEVKRHYELLVKHVKQIVSGKVPFPNYRTAGGSNARGWKIRS

SEQ ID NO: 72790 - protein, 352 aa, Gossypium hirsutum
  unsure (1)..(352): unsure at all Xaa locations
  Clone ID: GOSHI-09MAY01-C94976_1.pep
TYKADLQKLKKEKEEEEIRRLEALKMERQKRIAARGSSVPAQSSVASQSKKQLPSKLSPSTHKGSKFTDGEPGPSSPLQRSIKPASVGSPSSLYAPQPSKLNGGTPSRGNRLSHSVSSLLEPKKDIGGVTPDSKASMARIRRLSEPKTSSSPLVSSVKARHSEPNREXSSGVPESKKISAIMNHVSRPIASLPELKIKTTKDPNVTDNKSGGNGMTQKVSGSTSSTIDVAEPSRNTDKGSLNIDGDDGTVIEKTVVMLESIPTVNSSEATTLEQKENNGIFKIGRETEMVSDYAAIRAPVSSSNLDAVDKEHQIQPKPQAYEIQKGNVSNTDKELSKFTSTCVTEQQYQAPL

SEQ ID NO: 72791 - protein, 155 aa, Gossypium hirsutum
  Clone ID: GOSHI-09MAY01-C94506_1.pep
MDAETSDTMNLDLNLGPAPETGSGSLLNEGVNLNALVENPFDRIRAAVRRRRWRWHQVQLPAATQSLSVEFDQFTGNSDGPNTLQAGEGSVTAEERTSDVPKVCETTNGFLEDEVLEDKKDVIEKGVSNDGSFFDCNICLDLAREPVVTCCGHLF

SEQ ID NO: 72792 - protein, 142 aa, Gossypium hirsutum
  Clone ID: GOSHI-09MAY01-C94406_1.pep
LHGYFVPFLQTYIPKTLDHVKNVEEDVIRITSGKDTGDLYYKTITGLKEALPKDQSSPMEKQQGDTNTRPVEGSMGNLSGHSNSQESESESESPSGSETDGDEENLSGSEGKGPLSDSSAQVDKKAARKENKKKVKEEKREA

SEQ ID NO: 72793 - protein, 292 aa, Gossypium hirsutum
  unsure (1)..(292): unsure at all Xaa locations
  Clone ID: GOSHI-09MAY01-C94756_1.pep
MSSSADSERKKRIAIIVVSSFLLVAVVVAVTVGVTIQEEDSDYDDGTTDGNKHAQVTSSKKAIKMICQPTTFKKTCEEQLQHEAGNKTDVKDLIQAAFKAAMKYVEQAQANSTLLRDLEISXEGTRSALDACKILLSSTMSEFNKSXELVDKIEVNTVNKLLGDMKIWLSATISNQQACIDGFEKTKSNSEAGEKMKKFLNITMQLSRNGLAISCELSEQLKQVELAGLFERRRVLQDEDQLPVVGHSDWTSFLERNKEWNRSRLLQDEDGLPVIGHSDWTSFIERNKEWNR

SEQ ID NO: 72794 - protein, 112 aa, Gossypium hirsutum
  Clone ID: GOSHI-09MAY01-C94716_1.pep
MEARRLAILYSHLCPFRSASVPSLSSIVSPSSCAPQSKETFPHDCVFCQIIRGDSPAFKLYEDDMCLCILDTRPLSPGHSLIIPKSHFPSLDTTPPSERSGGSCDVFKSAFY

SEQ ID NO: 72795 - protein, 77 aa, Gossypium hirsutum
  Clone ID: GOSHI-09MAY01-C94736_2.pep
NKEASFIIPSHVQNPIFPIGSSKAKAEISSMNEVSEQQCYHHQHACNPLVYRIPSVACWGRGLGLNGRRQGDNSTAN

SEQ ID NO: 72796 - protein, 118 aa, Gossypium hirsutum
  Clone ID: GOSHI-09MAY01-C94736_1.pep
TQKKTLKLFFTPAERERKRDQAFYIQIVFKSKRKNNGSSSHGLFSRYIRCYCLLCYYHLACFHSSPVLFPNKRRREFDRPRDCMHVDGGGIVAHLPHSCYWKNRVLCWLLFFNLIILF

SEQ ID NO: 72797 - protein, 65 aa, Gossypium hirsutum
  Clone ID: GOSHI-09MAY01-C94166_1.pep
MWILFCRLRSSLWLQFKPHHIAAGAAYLAAKFLNFDLASYHDIWLEFQTTPAILQDVSQQLMELF

SEQ ID NO: 72798 - protein, 52 aa, Gossypium hirsutum
  Clone ID: uC-gsflnu33B050a10b1.pep
YASREMRNLMSSVHMLHLHPLSHKQGLSQSALWNLALNLHSEQAEELMDAWI

SEQ ID NO: 72799 - protein, 139 aa, Gossypium hirsutum
  Clone ID: GOSHI-09MAY01-C94016_1.pep
PSLESDEWRIGSGCDPKSTPWSYHNGGSWPTLLWQFTLACIKMGKPELAQKAVALVEERLAVDQWPEYYDTRSGRFIGKQSRLYQTWTVASFLTSKMLLQNPEKASLLFWDRHYELLETCVCGLSKNGRRKCSRLGPRS

SEQ ID NO: 72800 - protein, 240 aa, Gossypium hirsutum
  Clone ID: GOSHI-09MAY01-C94356_1.pep
HSPICKWNSFQRKLTIMKTGVPPITDKPKRRGIASIGGRSSGAPEKPQRSRSVSFSPDRPRVRGRSPAFNALASRFENPSSRNLSTPPPMVRKVYPKSGTPDSGTKAAAIAALTESFDRPSARETLMPRIVKKAASPAATKTTSPEPNTKENSMSSRLESLTIQEDMKEGETEDEEGLPIHPYERLTTSSTDPVTDIDVTKRETYLSATEFKEKFGMKKVEFYKLPKWKQNKLKMGLQLF

SEQ ID NO: 72801 - protein, 153 aa, Gossypium hirsutum
  unsure (1)..(153): unsure at all Xaa locations
  Clone ID: GOSHI-09MAY01-C94346_1.pep
MREYGREISNIFSTDDARKILRIPLARTPHDDLLVWGGEYSGEFSVRSAYKLLQTXRKFLELTLYKSAIRISTKKLWLLNLPNKIKVTIWRISWNYLPTRANMQHHQIVSNTNYPRCGERADIVDHVFRECPGFLSSSPRTRGASSVVDCGLS

SEQ ID NO: 72802 - protein, 210 aa, Gossypium hirsutum
  Clone ID: GOSHI-09MAY01-C94366_1.pep
HASGLLPWEEEKNTKRKHRCYQSKPRGRHITKRALKNKALSVSFNEKDLRDYVTGFHKRKKKRRKEAHKKQEQAERRKRIEQRKKRKLEKEFALYGGALPKTSSGPDGIDENNEDDEQREPSASVSGTTMYDGGNMTVTVITSEISHEEEDFTSAKTQTTMLRSVGDKVDKKLALPVSKSKPFKRVAKHRPKPPSKREKNKGKKRSKNSH

SEQ ID NO: 72803 - protein, 167 aa, Gossypium hirsutum
  Clone ID: GOSHI-09MAY01-C94206_1.pep
NQKAVVGLPYALASLSYCQTFNLDLLRASATLTLAELWLSLGSNHAKTALTLLHGAFPMILGHGGLELCARAYITEAKCYLSDPSFSVSKNPELVLDPLRQAADELQALEHHELMAEAFYLMAIVFDKLGQPEQREEAACSFKNHVMSLDHPHDVEDPIQSDTLLNA

SEQ ID NO: 72804 - protein, 212 aa, Gossypium hirsutum
  Clone ID: GOSHI-09MAY01-C95726_1.pep
SRVENAAFTDIEDVVPFVKWLDDELSYLVDERAVLKHFEWPEQKADALREAAFGYCDLKKLESEASLFRDDPRQPCAPALKKMQTLLEKLEHGVYNLSRMRESATSRYKGFQIPMDWMLETGIVCQIKLASVKLAMKYMRRVSAELEAVGGGPEEKELIVQGVRFAFRVHQFAGGFDVETMRAFQELRDKVSSCHVQCQNQEQNPICRSTSC

SEQ ID NO: 72805 - protein, 214 aa, Gossypium hirsutum
  Clone ID: GOSHI-09MAY01-C95116_1.pep
FHASGLQMRLSYSPVAHFFLFLVQWTDCHLAGALGFLRILIYKAYADGKTTMSIHERKASIREFYGVIFPSLLQLSRGITDVDDRKQKEICASKFSKRDELNKGKVSEIDLEREEECGICMEVRSKIVLPTCNHSMCMKCYRTGRIRSQSCPFCRDSLDRVHSGDLWIYTSKNEIVDLASISRDNMKRLFMYIEKLPQIVPDPKIVSYDPQHQR

SEQ ID NO: 72806 - protein, 197 aa, Gossypium hirsutum
  Clone ID: GOSHI-09MAY01-C95006_1.pep
MTDGHLFNNISLGGRGGTNPGQLKISSGGILWKKQGGGKAVEVDKSDILGVTWMKVPRTNQLGVRIKDGLYYKFTGFRDQDVASLTSFFQNNCGIAPEEKQLSVSGRNWREVDLSGNMLAFMTGTKQAFEVSLADVSHTQLQGKNDVILEFHVDDTTGANEKDSLMEISFHIPNSNTQFVGDENRPPAQFFVKKHVS

SEQ ID NO: 72807 - protein, 160 aa, Gossypium hirsutum
  Clone ID: GOSHI-09MAY01-C96976_1.pep
SSQVLDTAEPSGVLNLDISVVLESENENTSKNCSTDTGFASEDHVNLEIVADLGHEAKVVDSSMAELLETSQNHLTTPPNGDGQPSTEVAARETDDCGDKELLSNKEPSTTNSESVEDGRCDSKEIHESVTNDQNGAVDMEIVSEEAAIDFTISAGSHKR

SEQ ID NO: 72808 - protein, 80 aa, Gossypium hirsutum
  Clone ID: GOSHI-09MAY01-C96856_1.pep
PSIPQDQVAYQIFKTDCEPISSTSQASGAEGLSKSEPAAAAASFSQHPVKSNDKWQGQIRAPNHFITKASSNFNFKVISK

SEQ ID NO: 72809 - protein, 95 aa, Gossypium hirsutum
  Clone ID: GOSHI-09MAY01-C96756_1.pep
MAESKSKFESIREWVVDHKLRTVGCLWLSGIGGSIAYNWSQPHMKPSVKIIHARLHAQALTLAALAGAAVVEYYDHRSKPKGDPYAKYLPHSHKE

SEQ ID NO: 72810 - protein, 45 aa, Gossypium hirsutum
  Clone ID: GOSHI-09MAY01-C96726_1.pep
GPLPFFLDGEIKYVALIDLMNRCVACTNLHIYLFTYVDFVHILVL

SEQ ID NO: 72811 - protein, 119 aa, Gossypium hirsutum
  Clone ID: GOSHI-09MAY01-C97956_1.pep
GSTSRPGYCSSCRLSIKKCDATQIKRLQGYRDAMLKALSMFQRNEEGGMFINSGFSHCQTSYSAWHSPNSPRITNKPMAESVGDWYSNRKESKLIDCPYPCNPPCNNDDYTSPVLSAAV

SEQ ID NO: 72812 - protein, 71 aa, Gossypium hirsutum
  Clone ID: GOSHI-09MAY01-C97506_1.pep
LQSKYNASRGNMSLITTQDQYGTVEVSSQTKDESANNNLPQANVREDKGLIDFNLTYLMKGYKAISIVIWF

SEQ ID NO: 72813 - protein, 75 aa, Gossypium hirsutum
  Clone ID: GOSHI-09MAY01-C90476_1.pep
FFMRNRQHRYTIHILNTKKKQRKVIIRHWLSFPVCFPFLFLFFDATYCYFEHKKGEGKQRGLPIQTNRRNSSPSL

SEQ ID NO: 72814 - protein, 245 aa, Gossypium hirsutum
  unsure (1)..(245): unsure at all Xaa locations
  Clone ID: GOSHI-09MAY01-C90466_1.pep
PRPPRVRAACAHASAHASAHASAHASAHASALSGKEHLELFASVKGLLPSTINSVVQKSLEEVRLTDAAKVRAGSYSGGMKRRLSVAVALLGDPKLVILDEPTTGMDPITRRHVWDIIESAKRGRAIVFTTHSMEEADVLSDRIGIMVKGRLSCLGTSIRLKSRFGTGFIANVSFTGNNNGLSPPNGDAADTTHQRESVKHFFKKHLDLVPXVVSQYFLTFAIPHDREKLLTGFFKELEERAGAF

SEQ ID NO: 72815 - protein, 54 aa, Gossypium hirsutum
  Clone ID: uC-gsronu33B027c09b1.pep
GIPGPTPRCLAPHRIREAVVLSDRIGIMVKGRLSCLGTSIRLKSRFGTGIIANV

SEQ ID NO: 72816 - protein, 92 aa, Gossypium hirsutum
  Clone ID: GOSHI-09MAY01-C90706_1.pep
MSGLLNSSINGSASNLPDSSGRSFGTSFSSQSGAASPVFHHAGTIQGLHNIHGSFNIPNMPGTLTSRNSTLSNVPTGGVQQPTGSLSGGRFA

SEQ ID NO: 72817 - protein, 216 aa, Gossypium hirsutum
  Clone ID: GOSHI-09MAY01-C90356_1.pep
TPQLSREQTWGTWEELLLACAVHRHGSNSWDSVAMELQKRTSTFQHLFFTPLSCQQKFQDLKRRFAENGDDGETTNNNISTSAVPWLDELRRLRVAELRREVQQYDLSIVSLQLKVQKLKEEREQSLTENGKETEKSDLEREKGSEKKEDNETENITRRPVNSREESERENRSVNESNSTDPKEEDPGTGPDEAKENWNLSNRMEVKRGKGAEREA

SEQ ID NO: 72818 - protein, 382 aa, Gossypium hirsutum
  Clone ID: GOSHI-09MAY01-C90376_1.pep
VDPSFVLPALVHLVCLSEEKARPAASEALFRVLKHHNQKPEVICMMLDSLRNLSQDQADAEAGVCIGKGSNFDCNRVLRLIPEWSKTVQDWNTLIGPLIDKMFAEPSNATIVRFLSYINEQLAEAADVVLSRVVFQMKGQKGIDEDFFSRWETKTCPSDDSMRMQQSLFERLCPLLIVRLLPLRVFNDLNSSVVYGQLRNAPFMHEYGDVSVTVDDSVVAFLVNRAFSKFEFEDARKLAAELCGRIHPQVLLPLGGSQLEHATESRDILKIIACLFSVCTSLVVRGKESLVHPFILQIWRTIKVILLWPSSDGDQVSKAQHGCIDCLALMTCAELQAPESFEDCTSWRRNIAGKKGNRGNAITEFCALRNVISQLINDESDI

SEQ ID NO: 72819 - protein, 79 aa, Gossypium hirsutum
  Clone ID: GOSHI-09MAY01-C91966_1.pep
RTRGFHWEHCNNKDEIFMDSETNIRLLAARRYISYEALKRNNVPCSHQGRSYYECSTGKPVNPYTRGCTYATRCRRYTA

SEQ ID NO: 72820 - protein, 79 aa, Gossypium hirsutum
  Clone ID: GOSHI-09MAY01-C91936_1.pep
FLSFFLLFIPWLLFSFSFFRFASVDRLLGKKAVKERRNVPCDEILAISVVIGLWARFENRLYALSTKRRRVHLILFRFF

SEQ ID NO: 72821 - protein, 72 aa, Gossypium hirsutum
  Clone ID: GOSHI-09MAY01-C91866_1.pep
NSGAATRPEISRVLPTPNGNTDDEFRRLKRRFETWKKEYKLRLKETKARLHKRGYESDKTRRKWWEKLGSRS

SEQ ID NO: 72822 - protein, 99 aa, Gossypium hirsutum
  Clone ID: GOSHI-09MAY01-C91476_1.pep
DNLLQNKTAFTTKKDYGREEREAQWATAQRTLHGLQAPGAEEILNEKSSYRELSEIAEQAKKRAEVARLRELHTLKGHVDSVVKLKGLDIETINQNYTV

SEQ ID NO: 72823 - protein, 56 aa, Gossypium hirsutum
  Clone ID: GOSHI-09MAY01-C91186_1.pep
EQVNAGDLIRSLPCLHQFHANCIDPWLRQQGTCPVCKFRAGSVWQEPGGIDASYMV

SEQ ID NO: 72824 - protein, 238 aa, Gossypium hirsutum
  unsure (1)..(238): unsure at all Xaa locations
  Clone ID: GOSHI-09MAY01-C91166_1.pep
QKRAELSEANISRTAQSLLSAAGHVTEKQLRLEVLGAISSLSENTNEXIVFNEVLTAAARDIVTKDISRLRGGWSMQDAFHAFSQHIVLSVLFLEHLISVLNQTRVTKSDPGKGENSILLSETQLADEILQAAIFALTAFFRGGGKVGKRAVEQRYSSVLAALILQFGKCHGLANSGQHEPLRPLVTALQALCXGKILARDSEQNEKEKWINLIGDLAGCISMKRPKEVENLCKIFTK

SEQ ID NO: 72825 - protein, 168 aa, Gossypium hirsutum
  Clone ID: GOSHI-09MAY01-C91026_1.pep
PASVQNTKNPLQKTLSFKRKRNPNKSANHELRGSNNHQRGRGKSKAKAVSRSSKAGLQFPVGRVARFLKKGRYAERVGSGSPVYLSAVLEYLAAEVLELAGNAARDNKKNRIIPRHIQLAVRNDEELSKLLGGVTIANGGVLPNIHQNLLPKKASKGKGEIGSVSQEF

SEQ ID NO: 72826 - protein, 47 aa, Gossypium hirsutum
  Clone ID: GOSHI-09MAY01-C91266_1.pep
DNLKSSWKKVAVVNIVFLIFLIVVYSVGCCAFRNSRRDNDYHQGWKP

SEQ ID NO: 72827 - protein, 94 aa, Gossypium hirsutum
  Clone ID: GOSHI-09MAY01-C92936_1.pep
SSANHNNNTSIRNTAFFFSFFLPKARTHTCAPSCHMIPLQGLRKFEIFKKCNANISKRNMALHRSIFKTFNKSHFLMMFRACPQNLEVPTYRSI

SEQ ID NO: 72828 - protein, 93 aa, Gossypium hirsutum
  Clone ID: GOSHI-09MAY01-C92806_1.pep
SPGGSDIDGVETRWTALTLVSSEPEINHHNSGSSLWCFAALSKALTKCSLEGLEAIANHLLFSIIHCSNDGQCETCNIPYFVHLCMGHICLNR

SEQ ID NO: 72829 - protein, 304 aa, Gossypium hirsutum
  Clone ID: GOSHI-09MAY01-C92596_1.pep
FLSATDASAAVADASVRENVNGGGEQTEVNCNAKRKLLEKPVDKKEANKPPDSWFQLKVNTHVYVTGLPDAVTAEELVEVFSKCGIIKEDPETKRPRVKIYVDKETGRKKGDALVTYLKEPSVALAVQILDGTPLHPDGKIPMSVSQAKFEQKGDKFIAKQVDSRKKKKLKKVEERMLSWGGRDDAKVTIPATVVLRNMFTPAEMRADENLCSELEEDVKEECLKLGLLDSVKVCSNNPQGVVLVKYKDRKDAQKCIELMNGRWFGGRQIHASEDDGVVNHALVRDLDEDAARLEQFGAELEAE

SEQ ID NO: 72830 - protein, 76 aa, Gossypium hirsutum
  Clone ID: GOSHI-09MAY01-C92056_1.pep
RFSRSISIVVLLMLVLLTTEMGPVVADGDKICESPSNAFKGLCLRDDNCDIVCKTEGFPNGDCKGFLRKCVCTKPC

SEQ ID NO: 72831 - protein, 237 aa, Gossypium hirsutum
  unsure (1)..(237): unsure at all Xaa locations
  Clone ID: GOSHI-09MAY01-C92246_1.pep
MENQQLHLHHHHLEYQQQQRQPNSIKSRFRRVCVFCGSSPGKNPSYQHAAVQLGQQLVERNIDLVYGGGSIGLMGLVSQAVFDGGRHVLGVIPKTLMPREITGETVGEVRAVSGMPQRKAERARQADGLXLPLPGGKGTGEELLEGITWAQLGIHAKPVGLLNVDGNYNSLLSFIDNAVDEGFIAPAARDIIVSAQTAQELMCKLEEHEPKHSGVASKLSWEMEQQLGFTSKSDIAR

SEQ ID NO: 72832 - protein, 180 aa, Gossypium hirsutum
  unsure (1)..(180): unsure at all Xaa locations
  Clone ID: GOSHI-09MAY01-C92276_1.pep
MWGAPAEPADSYYEVRPECTDVPNTKFKIRPGKTLSVRRWKAAFSPDGRLDIAKTLDRIHRGGIHPTIRGEVWEFLLGCFDADSTYEERDQIRQQRREQYAKMKSDCREIFPVVGSGKYITAPVITEDGQPISDPLVLAETSQDDNTDSMCEGTXSRDPLDNKVIQWLLTLHQICLVVRR

SEQ ID NO: 72833 - protein, 220 aa, Gossypium hirsutum
  unsure (1)..(220): unsure at all Xaa locations
  Clone ID: GOSHI-09MAY01-C92236_1.pep
NEEYSWPIDEFSGYYDSSSPDGAASSVAAKNIVSERNRRKKLNERLFALRAVVPNMGKMDKAGIIKDAIDYIQELHNQEGRIQAEISELESGKLKKNPGFEYDQELPGLRSKKTKLDNIFDYGGSRACPIEVLELKVTHMGERTMVVSITCSKKTDTMVRLCEVFESLKLKIITANITAVSGKLLKTVFVEADERXKDELKVQIETAIAALNDPQSPMSM

SEQ ID NO: 72834 - protein, 280 aa, Gossypium hirsutum
  Clone ID: GOSHI-09MAY01-C93966_1.pep
KDDCKIITEQSIFDHIREKAKNFPLLTPNNAYSPSSDQEKSKIRQHILLGPLPESKGLEQIADDHNNYLTGKHHITAGSSVTINLTDESGYLPSEPEAFSFKSLTEEAIFDHIRKKSKHFPVINMPKPIDTDCCICTEEHNSVNQPGSGNATLGTSKDAMVISEPEPGEVNRDACGTKAGTKTKNNVLQGSSSGANGESAVSPKVSSTKTATLSVQMLSFDISMAKNSKHLADLGSSIQDGRKDKPSPSDSKRQSRSLASTDQAREVGSFLGFQSVFSFL

SEQ ID NO: 72835 - protein, 179 aa, Gossypium hirsutum
  Clone ID: GOSHI-09MAY01-C93936_1.pep
MAKKRKQRSSAVEPTKETADPQPIKEEEQQQHQEYIPEDPKPKVEEEQKLQEVEEEVEEEVEEEEEVELEEEEEEEEEEEENEEDDDDEEAENQTLVGSSNAAVQNGAPKGTSQDEELDDEPFEKLLEPFGQDQLITLIKKAVEKHPEFISSVRELADVDPAQRKIFVHGLSWDTTAET

SEQ ID NO: 72836 - protein, 93 aa, Gossypium hirsutum
  Clone ID: GOSHI-09MAY01-C93836_1.pep
METISMAGYLRFSPPNRPHITLVVSKPRNSSSPSRCPSHPPISDIRNLSLWILTREPSFEAGKGSLENIRKCLPHNILYIVNICIHKWICITG

SEQ ID NO: 72837 - protein, 130 aa, Gossypium hirsutum
  unsure (1)..(130): unsure at all Xaa locations
  Clone ID: GOSHI-09MAY01-C93506_1.pep
SDYLSYIESYLQSTDRPSTTQRTDREQYPGPTQLNWLDIHPSSAGWLTNKXAPTDRPNKHAPRLDSETHPPWAHSSRAVGGVLTPRPTHSLATYLPPLPFAFFPFFLPTSAGPAKLSINGWLHGCDRLID

SEQ ID NO: 72838 - protein, 273 aa, Gossypium hirsutum
  unsure (1)..(273): unsure at all Xaa locations
  Clone ID: GOSHI-09MAY01-C93406_1.pep
MTYSCAVFKDRREDXKMHITEKISLLXIEKARIDSKHRXFLEIGCGWGSLSIEVVKRTGCKYTGITLSEEQLKLAXNKSEGKLALQVXIRLQLCDYRQLPNTYKYDRIISREMIEAVGHEYMEDFFSXLRIXLADDGLLVLQFISIPEERYNEYRRSSDFIKEYIFPGGCLPSLARITTAMNAASKLCVEHVENIGLHYYQTLRYWRNYFLEKQSKIHALGFNDKFIRTWEYYFDYCAAGFKSNTLGNYQVVFXRPGNVVALGNPYKDFPSAF

SEQ ID NO: 72839 - protein, 116 aa, Gossypium hirsutum
  Clone ID: GOSHI-09MAY01-C93676_1.pep
LGVEVDPKGGPRIQEAAMRLYSEKQEGNKVFLVQALQAIEGALKRFFYGYKQVLVVVMGSLEAKGNRVVAGSGSVDSLSQVFLEPAYFPSLDAAKTFLGEFWNRELGGSGLTRWKN

SEQ ID NO: 72840 - protein, 132 aa, Gossypium hirsutum
  Clone ID: LIB3825-018-Q1-N6-E3.pep
EITKMSKELKHKVPFILGVEVDPKGGPRIQEAAMRLYSEKQEGNKVFLVQALQAIEGALKRFFYGYKQVLVVVMGSLEAKGNRVVAGSGSVDSLSQVFLEPTYFPSLDAAKTYLGEFWNHELGGSGLTRWKK

SEQ ID NO: 72841 - protein, 127 aa, Gossypium hirsutum
  Clone ID: GOSHI-09MAY01-C93626_1.pep
PRKSGGTWCSGRISEILPNGCLVVEFPGRFVLGNEPNRFLADPNEVESVSFYTCPGIVEKYHHVEDFHWAVRPLAIAFGLFTAMKLTILMGRGISARLKKNRPNSQDSGDRKSGWRRIFRDASSTTK

SEQ ID NO: 72842 - protein, 127 aa, Gossypium hirsutum
  Clone ID: GOSHI-09MAY01-C93186_1.pep
MKAIRSVRAQPPAVFTPSLRASLSHHKSSVISFRPIITSCSKQPESMEQKDEKPEQKPGDVMSESFGEGYATRSDEEGFGGIYGENESISDIKKNKEIHGSHPAYDKTQGSEVKEKEKARNQTHASS

SEQ ID NO: 72843 - protein, 166 aa, Gossypium hirsutum
  Clone ID: GOSHI-09MAY01-C93046_1.pep
FMGFLLRVKRAEQDAKANGVWDNPHPWLNLFVSKSDIVEFDRTVFKKMVKNGIGGPMLIYPLLRSKWDSRTSVALPEGEIFYIVALLRFAPKGPSVEKKVAENREIVKWCIKEGLDFKLYLPHYRAKEDWKRHFGNQWTRLEKRKANFDPMSILAPGQRIFKRTNQ

SEQ ID NO: 72844 - protein, 257 aa, Gossypium hirsutum
  Clone ID: GOSHI-09MAY01-C93076_1.pep
GKPLVSGAALGLEGQLTVYNYKGGPCYRCLFPTPPPTTACQRCSDSGVLGVVPGIIGCLQALEAIKIASDIGEPLSGRMLLFDALSARIRIVKIRGRSLQCEVCGENTTFNQQQFKELDYEKFTQSPLSTSPPKLKLLAPDSRITSKEYKERIISGEPHVLVDVRPELHYKIVSMPNSLNIPLASLEARLPEISSALKEQQKESTGSGANLYVICRRGNDSQRAVDYLRNKGFDLAKDIVGGLDSWANDVDPNFPMY

SEQ ID NO: 72845 - protein, 208 aa, Gossypium hirsutum
  Clone ID: GOSHI-09MAY01-C93396_1.pep
MIRTNDDASSAWSWHQDKLFERALVMFSNDESSDRWEKIAAQVPGKSAADVRRHYEDLEHDVLEIESGRVELPSYEGELESASWVNESGRSQVWVGSKGKERESERRKGVPWTEEEHRLFLIGLQKYGKGDWRSISRNAVVSRTPTQVASHAQKYFLRLNSVNEKNKKRSSIHDLKMGDDNSMDPQSKFFNEQGSSFVNNHGYEFPLL

SEQ ID NO: 72846 - protein, 52 aa, Gossypium hirsutum
  Clone ID: GOSHI-09MAY01-C93326_1.pep
FFFFFFFFFFFFFFFFFFFFFFFFFFFFFFFFFFLIIIKPKVQIYALLNKSK

SEQ ID NO: 72847 - protein, 240 aa, Gossypium hirsutum
  unsure (1)..(240): unsure at all Xaa locations
  Clone ID: GOSHI-09MAY01-C93246_1.pep
MFGMGFKDNHNPEMDSSLFPVSSRKRKRRDGLSVADTLKLWSENSEAKQSRKAPAKGSKKGCMKGKGGPQNQNCNYRGVRQRTWGKWVAEIRAPNKGKRLWLGTFPXTAVEAASAYDEAAKAMYGDKAILNLPQGSDSDSVATPSHGFSQATTTTTTTATCGGSESAMDGPVDSEAPSTSGAMDMKGEGGEVDRRGDDTDYSWLEGLESLQFFDDIPMDYVGNNSVWDNCEFFDIDEFLA

SEQ ID NO: 72848 - protein, 109 aa, Gossypium hirsutum
  Clone ID: LIB3828-011-Q1-K6-E12.pep
GQVLTLLKMSSFVAEARACGRLIFFAVDMGFRRIILEGDSLIVIKKLKTSAKDKSILSSIFHNIRSTEKSFESVSYLFSLGRLTGRFLLLFWKKKDGKSRASGLMAFSN

SEQ ID NO: 72849 - protein, 155 aa, Gossypium hirsutum
  Clone ID: LIB3825-006-Q1-K6-D5.pep
SWRFARTFSKIRAYPKNSLILEPNRSIHNSHLLHQFENAINPDARDLPSFFFQNKSRNRPVNLPRKKDVLSFFITIRESPSKIIRRKPMSTAKKISLPQARASATKDDIFNNVSTCPYNFTLVVSSQNCSNRSSRVPLKRRIKVYFDKPIIRWFP

SEQ ID NO: 72850 - protein, 67 aa, Gossypium hirsutum
  Clone ID: GOSHI-09MAY01-C88446_1.pep
FNLSNSRVPVKSKGFSCWVRIEWGNEGNNNNNKGSITAFCDVVRLSCQSKDYLFTWRFHIPTIGKTS

SEQ ID NO: 72851 - protein, 207 aa, Gossypium hirsutum
  Clone ID: GOSHI-09MAY01-C88466_1.pep
FEPVKMRSVDGQTSCVAVDGGLAMSNPTAAAMTHVLHNKQEFPFVRGVEDILVLSLGTGALLEKSYEYEKVKNWKVKDWAHPLARISGDGSADSVDQAVAMAFGQSRSSNYVRIQANGTSFRRCGPNVDTDPSPSNVKMLIAIAEEMLKQKNVESVLFGGKRLADQTNFEKLDGFAAQLVLEHQRRSCRIAPTVAFKQSNNPKPTTP

SEQ ID NO: 72852 - protein, 85 aa, Gossypium hirsutum
  Clone ID: uC-gsflnu33B051e05b1.pep
GVVGLGLLDDLKNDNGSNPTTAAMTHVLHNKQEFPFVRGVEDILVLSLGTGSLLKISYEYEKVKNWKVKNWAKPMARIPRVRPRV

SEQ ID NO: 72853 - protein, 139 aa, Gossypium hirsutum
  Clone ID: GOSHI-09MAY01-C88616_1.pep
GNDQYVYRHANGLCVVGLASTHLAFKDKGGITAVDFNVGKSDRSGMKVTGKRKKNAQHFESNTALCKVCTNGDSYIVRCCVKGSLLEVNERLIKQPELLHSSADREGYIAIIMPKPADWLKVKASLLSLEEFKKLRALC

SEQ ID NO: 72854 - protein, 88 aa, Gossypium hirsutum
  Clone ID: GOSHI-09MAY01-C88626_1.pep
LSIHFVHFVLFSHKLYSAAIKQLNRGGHVQIHLVGCVFTEFLCFGIIFPLYSTLPFLFDSVTLLGTRICVFVHSFTKNKCCEFESCCL

SEQ ID NO: 72855 - protein, 135 aa, Gossypium hirsutum
  Clone ID: GOSHI-09MAY01-C88086_1.pep
PTRPRTRGRMAQAGAVKYLVQLMDPDSGMVDKAVALLSNLSTVAEGRVAIVREGGVPLLVEILESGSQRGKENAASVLLQLCLNSPKFCTLVLQEGAVPPLVALSQSGTPRAKEKAQQLLSHFRNQREGATGKSK

SEQ ID NO: 72856 - protein, 80 aa, Gossypium hirsutum
  Clone ID: GOSHI-09MAY01-C88386_1.pep
RRKFIRAYIASSGNEPSDAEVEQLLVDAEKYTLANHLFWGLWGIISGHVNKIEFDYLEYARQRFQQYWFKKTLALESLTL

SEQ ID NO: 72857 - protein, 50 aa, Gossypium hirsutum
  Clone ID: LIB3831-002-Q1-N6-D9.pep
AEKYTLANHLFWGLWGIISGHVNKIDFNYLEYARQRFQQYWLTKPLLLSS

SEQ ID NO: 72858 - protein, 219 aa, Gossypium hirsutum
  Clone ID: GOSHI-09MAY01-C88336_1.pep
GRVGGRVGGSLPYSISTMVTLTYLNVSHNSLSPSVGDVFANLTDLGTLDISFNNFSGDLPVSFSSLTTLSALYMQNNQFSGSLNVLSGLPLNTLNVANNNLSGWIPQELFSLPTFICDGNSFANGPAPLPLPYSPPPPGRSRHKHKTRPGTRGARDSDAQSSDSDKGPSAGQIVGIVLGSLLLLVLVLLAAVFCVHHNKRKVSGARASKGSFSAGLLCW

SEQ ID NO: 72859 - protein, 103 aa, Gossypium hirsutum
  Clone ID: GOSHI-09MAY01-C89946_1.pep
MFTPFRSAIQPPPFHHYNRWMIAGDEIIPFPHSKSCLKRSDFSLENLSQVSISTKKIRPPMAHLKVSFFFYLFYAETHMKNKKYGPKLGKANMRHSKSPFNNF

SEQ ID NO: 72860 - protein, 74 aa, Gossypium hirsutum
  Clone ID: LIB3543-051-Q6-K6-H9.pep
LAPQQWTWPLAIRFQRKFRECARAAPEGRAPTSKFSRLAFTSQGSSPPYNHASNEPLEAVSSLLKSKLEIPPRG

SEQ ID NO: 72861 - protein, 231 aa, Gossypium hirsutum
  unsure (1)..(231): unsure at all Xaa locations
  Clone ID: GOSHI-09MAY01-C89466_1.pep
PASAHASGGQQLLHLPWDTVDSTCLSHKSRQEKGATILEMKHQDYCYGGGVKDWNKLLQKRLILDDLRVQSLQARIKNMASTQTRDVSDDRLPLTSGVELGTLNYIVTVEIAGRKMTVIVDTGSDLTWVQCQPCKSCYSQKEPLFNPTASPSYRTVPCNSSECQSLAFATGNTGICGENPPTCNYVVSYGDGSYTRGELAHDXLNLGKTPVDNFIFGCGRNNNGLFGGTSG

SEQ ID NO: 72862 - protein, 131 aa, Gossypium hirsutum
  Clone ID: GOSHI-09MAY01-C89116_1.pep
MASNFFEQKPFKPPFEIIARRTKTLDVKYKECKRNHAPQLGINVVDGCGEFAPKGMSPSSETGHVVDFDCEACGCHRNFHRKEVTKQVSITFIDNEGANLYRFQPRSPQLNNEQEAVENGELDGGMKKPKK

SEQ ID NO: 72863 - protein, 114 aa, Gossypium hirsutum
  Clone ID: GOSHI-09MAY01-C89056_1.pep
HHRDMRLDIEDMSYEELLALGERIGNVNTGLSEEMIRRKLKTRSYSTFATNINLEEAAPVEQEPDFCTICQEDYKNQEKIGTLDCGHEYHASCLRKWLLVKNVCPICKSEALAT

SEQ ID NO: 72864 - protein, 205 aa, Gossypium hirsutum
  unsure (1)..(205): unsure at all Xaa locations
  Clone ID: GOSHI-09MAY01-C89346_1.pep
MKASLKFREEKQPVLRAKIPLSILGLPFQSGIVAGEPKELTLNLSTFFESGPSIKIAYRPTDTWNPFSLIVKTGTGPFGSPMSTSLLMSAEFNLLGRGNPSFMLHLKPQFGDFSIKKSQSSAFDKVVEDDEXAVADVDSSARGDFAGXLRRVXKLGTLNSGDIARILSGMEVAARTSVPVKGKAMLKFRWGMRIPSEMNNGVGGA

SEQ ID NO: 72865 - protein, 160 aa, Gossypium hirsutum
  Clone ID: GOSHI-09MAY01-C89366_1.pep
MECFHFSGNDKNDEPKTTKSISVRSSESVSISTDHDMRRSGSEFNSQNVSDFSTESSTKNSFAALSQRQSNLREFTFLELKAATKNFSRSLMIGEGGFGGVYRGVIRISDDYHKKLDIAVKQLSRRGLQGHKEWVTEVNVLGVVEHQNLVKLVGYCAEDD

SEQ ID NO: 72866 - protein, 210 aa, Gossypium hirsutum
  Clone ID: GOSHI-09MAY01-C89316_1.pep
GVDVLAASSYAVLLLHLLAIGTIASVVEERSIYLILMEGEPVAFHGDVLSSQQGRRFDPKSEAYKVHANKLVDSHDQVLESTLDKGSYNKLYSFKHVLNGFAVHTTPSQAKKLQLAQGVKLVERDRRAKSMTTYTPEFLGLPQTVWTQEGGDRNAGDGIVMGFVDTGINPFHPSFAYDILNPLTSNLSHFSGACETGPLFPPFSCNGKIV

SEQ ID NO: 72867 - protein, 95 aa, Gossypium hirsutum
  Clone ID: GOSHI-09MAY01-C89336_1.pep
MTSFCRTALMAASRSLSSRPKSLNLRTLTPKPISSPFSSPSTRTLPCASRIVSALGGVESMMPLHSAIASARLQSNIAVDSSFWSWLSQDFAVPR

SEQ ID NO: 72868 - protein, 299 aa, Gossypium hirsutum
  unsure (1)..(299): unsure at all Xaa locations
  Clone ID: GOSHI-09MAY01-C84596_1.pep
RSPSVRRLFQVFNRIEPPXLLKILKCINHLSTDPNCLENLQRADAIQYLIPNLQLKDGPLVSQMQHEVLNALFNLCKINKRRQELAAENGIVPHLMSFIMSDSPLKQRALPLLCDMAHASRNSREQLRAHGGLDVFLSLLDDELWSVTALDALAVCLAHDSDNRKVEQALLKRAAVQRLVKFFQCCPEQHFVHILEPFLKIITKSSRINTTLAVNGLTPLLISRLDHQDAIARLILLKLIKAVYEHHPRPKQLIVENDLPQKLQNLIEERRDGQRSGGQVLVKQMATSLLKALHVNTVM

SEQ ID NO: 72869 - protein, 196 aa, Gossypium hirsutum
  unsure (1)..(196): unsure at all Xaa locations
  Clone ID: LIB3829-023-Q6-K6-G6.pep
PSVLGKVAXLLLGVGQAXTTVKSYMCSQSLLNRLFQMFDRIDPPILLKILKCINYLSTDPNCLGEVQRADAIKYLIPNLELKDGPLVSQMQHEINKKRQEQAAENGIVPHLMSFIISDSPLKQHALPLLCDMAHASRNSREQLRVHGGLDVFLSLLDDELWSVTALDALAICLANDSDNRKVEQALLKKDAVHRLV

SEQ ID NO: 72870 - protein, 155 aa, Gossypium hirsutum
  Clone ID: GOSHI-09MAY01-C84536_1.pep
MQMGQAPPKPKPTEIHDVVFGIAASSKLWQQRKEYIKIWYKPNQLRGVVWLDDRVKYSAQDNRTLPPFRVSSDTSKFPYTNRKGHRSAIRISRIVTETLRMKMDNVRWVVMGDDDTVFITAYLVRILRKYDHTQYYYIGSLSESHIQNIFFSYGM

SEQ ID NO: 72871 - protein, 162 aa, Gossypium hirsutum
  Clone ID: GOSHI-09MAY01-C84656_1.pep
YIVRLRVSPSHRRMGIGLKLVLRVDEWFVQNGTEYSYLATENDNQASVNLFTDKCGYSKFRTPSILVNPVFAHRLPVSNRVSLIKLSPSDAESLYRRRFSTIEFFPRDIDSVLNNRLSLGTFLAVPRGCCYTHETWAGCDKFLSDPPESWAVLSVWNCKDVV

SEQ ID NO: 72872 - protein, 266 aa, Gossypium hirsutum
  Clone ID: GOSHI-09MAY01-C84676_1.pep
MPRPGIPGSLLGADQHNVGPYAISELREHFLNGYLTESTLAWSEGRSQRQPLSSIPEFVAVISHEANNFSATGGDHASAHAFGHAGDSNAVPSNDGDGSDEFEKWQREIREAEAETERLKTGSVSRSTGDAFGFDDQDRPLTPPEGEDEFTDDDGTRYKWDRNLRAWVPQDDMSTQNGNYGVEEMTFLEEDEVFPTISATDASAAVPDASVRENVNGSGEQTEVNCNAKKKLWKKPVDKKEANKPPDSWFQLKVNTHVYVTGLPDD

SEQ ID NO: 72873 - protein, 139 aa, Gossypium hirsutum
  unsure (1)..(139): unsure at all Xaa locations
  Clone ID: LIB3828-016-Q1-K6-C11.pep
MLSSDGSDNHPQSVAGVGWYILGEDQQNVGPYAISELREHFLNGYLTESTLAWSEGRSQWQPLSSIPEFVSVISHQANNFSATVSSGDDDAFLNSMKEGDNSNAEPSNDGDGSDEFEKWQREIREAXAETECLKTGSVS

SEQ ID NO: 72874 - protein, 85 aa, Gossypium hirsutum
  Clone ID: uC-gsflmaxxa009e11b1.pep
ILGEDQQNVGPYAISELREHFLNGYLTESTLAWSEGRSQWQPLSSIPEFVSVISHQANNFSATGGDDAFLNSMKEGDNSKCSGSQ

SEQ ID NO: 72875 - protein, 146 aa, Gossypium hirsutum
  Clone ID: GOSHI-09MAY01-C84636_1.pep
FGSYQQILQMASRTVSLIQDQNLNVQFNGKANISKAPRKASTGGRKPLGDLSNSVNPTAKQISKKENSKIITFTEKETVAFKLPNDSSRKKNVPKASEKVQASGRKALSDISNSGKPHLQGTSKNQTAKLCIPEDISEEGFLAHHE

SEQ ID NO: 72876 - protein, 167 aa, Gossypium hirsutum
  Clone ID: uC-gsflmaxxa041e08b1.pep
SPTRPPTRPPTRPPTRPGESSESQERQLKASHCQPQSSQLQHNVDIEHSHTSLTDSALRAIRCALRYSASPKTNKSNQENQGPLGCTKSQPEQSPQRPEQRQFTKKRKGRGPTRCLFLNDLADGERIFVHINKFGQPVGPNSSKLSSFLGTVARNGHRAPLNFIDWR

SEQ ID NO: 72877 - protein, 159 aa, Gossypium hirsutum
  Clone ID: LIB3493-039-P1-M1-B10.pep
QQSPLSRSESSEPQQLHPKTSHCRPQSSQLQDNLDIDSALRGIRCALEYSARPTTNKSNKADQDQLASVNLQPEQTPQSPEHPQRITKKKRGRGPTRCRFLNDLADGERIFVHFNKFGQPVGPESSKLSSFLGTIARNGHKAPLNFVHWRAMPDSYKEE

SEQ ID NO: 72878 - protein, 79 aa, Gossypium hirsutum
  Clone ID: LIB3825-022-Q1-K6-C7.pep
MDFESNKRWKSMSVVPRLLKNKSASRCFLPKVKPASSDPGYTPVYLNVYDLTPMNGYFYWAGLGIYHSGVEVHGVEYAF

SEQ ID NO: 72879 - protein, 112 aa, Gossypium hirsutum
  Clone ID: AI730308.1.pep
MDFESNKRWKSMSVVPRLLKNKSASRCFLPKVKPASSDPGYTPVYLNVYDLTPMNGYFYGAGLGIYHSGVQVHGVEYAFGAHDYPTSGVFEVEPRQCPGFKFRKSIFIGTTS

SEQ ID NO: 72880 - protein, 73 aa, Gossypium hirsutum
  unsure (1)..(73): unsure at all Xaa locations
  Clone ID: LIB3582-037-P1-K1-A2.pep
MDFESNKRWKSMSVVPRLLKNKSASRCFLPKVKPASSDPGYTPVYLNVYDLTPMNGYXYXAGXXIYHSGVEVH

SEQ ID NO: 72881 - protein, 215 aa, Gossypium hirsutum
  Clone ID: GOSHI-09MAY01-C86996_2.pep
MDISHWVFVVSVLLLFLASGSFSIDNFHQPFPIVEPDPGHTKLRLSREGLEAISRINTPIAAVAVIGPYRSGKSFLLNLLLSLSCDEGFGAGHMRDTYTKGIRVWGTPLEVDIDGVRTSVFYLDTEGFESVGKSNVYDDRIIALATVMSSVLIYKLPETTREADISRLSFAAELAEEFYGRVKGQDIGLEPGELLWLIQRDFLQGKSVKDMVDDA

SEQ ID NO: 72882 - protein, 199 aa, Gossypium hirsutum
  unsure (1)..(199): unsure at all Xaa locations
  Clone ID: LIB3828-001-Q1-K6-C8.pep
CLHSSVLGIWVWGTPLEVDIDGVRTSVFYLDTEGFESVGKSNVYDDRIFALATVMSSVLIYNLPETIREADISRLSFAVELAEEFYGRVKGQDIAFEPAKLLWLIQRDFLQGKSVKEMVDEALRHVPNSDGDKNIDQVNQIRDSLAVMGDNSTAFSLPQPHLMRTKLCDLKDDDLDPMYVKKRXIEKAVASIIRPKIVQ

SEQ ID NO: 72883 - protein, 123 aa, Gossypium hirsutum
  Clone ID: AI728277.1.pep
MEISYWIFVFSILLVFLVSGSSSIDNFHQPFPIVEPDPGHTKLRLSREGLEAISRITTPISAVAVIGPYRSGKSFLLNQLLSLSCDEGFGVGHMRDTKTKGIWVWGTPLELDIDGVRTSVFYL

SEQ ID NO: 72884 - protein, 96 aa, Gossypium hirsutum
  Clone ID: GOSHI-09MAY01-C86986_2.pep
ILTQQIKMARQVMLVVALVLIAVVGAYAADVPKTSSSSSPSTSPASSPSSSISTSSSPPTPDGGALAPSPSSAVSLKASSFVGAVTAVAGLGLFYF

SEQ ID NO: 72885 - protein, 96 aa, Gossypium hirsutum
  Clone ID: GOSHI-09MAY01-C86986_1.pep
NLTQQIKMARQVMLVVALVLIAVVGAYAADVPKTSSSSSPSTSPASSPSSSIGTSSSPPTPNGGALAPSPSSAVSLKASSFVGAVTVVAGLGLFYF

SEQ ID NO: 72886 - protein, 103 aa, Gossypium hirsutum
  Clone ID: GOSHI-09MAY01-C86876_1.pep
MVLVVEPHPAYGSSRGGWFGRNQGAATPLVNGICAASVTIHGYKCEEHQVKTQDGYNLSMQRIPEGRIGGNISGNKKQPVLIQHGVLVVSPFFFFFFSFYHIG

SEQ ID NO: 72887 - protein, 173 aa, Gossypium hirsutum
  Clone ID: GOSHI-09MAY01-C86586_1.pep
LGELGPEEDEEDFQSCCEDDEVWKDNEEVAKEEEKKELDEFSVKMFFKGISLAETGDSSSGFSGIGVVMERSASSPVIQVQKKLDFYVEESVADYLALMDGLTEAMQNKIRRVYAFTDSALLHDQITCEENLDNPLLMALRERVMEHSRNLEEFVLKLVPSTDLLRPLQLAQV

SEQ ID NO: 72888 - protein, 81 aa, Gossypium hirsutum
  Clone ID: LIB3583-013-P1-K1-C5.pep
MEDQEVLPDNISVALVRGVRAEEDEEDFQSCCEDDEVWKDNEEVAKEEEKKELDEFSVKMFFKGISLAETGDSSFGFSGIG

SEQ ID NO: 72889 - protein, 278 aa, Gossypium hirsutum
  unsure (1)..(278): unsure at all Xaa locations
  Clone ID: GOSHI-09MAY01-C86316_1.pep
MGCLVSTPKDSGGNRRRPGSIGEVSVYVPGLRIPKPVDFSQSLGGHVSKTLVERLTALRTRIVVMAGQEAPTITRTRRKTATQHGRSTLADLHQALEDYLPVLLGLVTDGSQLQYKVQFIWVNQEDDAEETAMFNAWYEVLSVLHLMAMLLLSQANLLLLPRTSADGYQPKVSEESRRASIDIFLKAAGYLDCAVRHVLPQLPSELRXRNLPVDLAEGVLRALCLQALGQGVDIQLGMAIDSTKATLAVKRRLACEMVKYWQQAQDNIMNLPLSNGWG

SEQ ID NO: 72890 - protein, 105 aa, Gossypium hirsutum
  unsure (1)..(105): unsure at all Xaa locations
  Clone ID: AI054493.1.pep
MGCLVSTPKDSGGNRRRPGNIGEVSVYVPGLRIPKSADFFQSLGGHLSKTLVERLTALRTRIVVMAGQEAPTITRSRRITASQHGGSTLADLHRLFXDYLPVLLG

SEQ ID NO: 72891 - protein, 179 aa, Gossypium hirsutum
  Clone ID: GOSHI-09MAY01-C87696_2.pep
KQSNYNGKATEYKDYAAEDPRVPKDVTAEKTKQGTEYAAEKAKEGKDTTVSKLGELKDSAADAAKRAMDFLTGKTEETKQKASETAQNTKETLSETTESARQKMEEMKLRGDEGRRKTYDDDVKRQGREGLSETIVIKVEESPAGAVDATVRSSDETFNDVGRVGEEGAIRDRSSKTKM

SEQ ID NO: 72892 - protein, 492 aa, Gossypium hirsutum
  Clone ID: GOSHI-09MAY01-C87696_1.pep
MATRQEKERRAEAAARQAADDLRDINSGREYEERVVYQEELDRSSQQQQQRLPEESFAYKEEWGRETSPQQQQQRPGVIGTVLRAVQGTYEHAKEAVVGKSHEREGVYGGGGKTWGTTDEGDGPVGFAERQRHYHGKAGEYKDYASEKAYQSADKAKQMKDTTKEKAAEYTDYAAQKAKETKNSAAQRTKETKDTVTGKASEYTDYAAQKAKDAKDTTAKKASEYTDYAAQQTKGAKDATTGKATEYKDYTAEKAKEARDTTAQKASEYTDYAAQKAKDAKDTTAQKASEYTGYAAQKTKDAKDATMGKATEYKDYTAQKAKEARDTTAQKASEYTDYAAQKAKDAKDAAIGKATEYKDYAAEKAKGAKDTTAQKAPELTDYAAQKAKEAKDTTMEKATEYKDYAAEKAKEAKDVTAEKTKQGTEYAAEKAKEGKDTTVSKLGELKDSAADAAKRAMDFLTGKTEETKQKTSETAQNTRVMTLFIPTFFLYK

SEQ ID NO: 72893 - protein, 73 aa, Gossypium hirsutum
  Clone ID: GOSHI-09MAY01-C87686_1.pep
NTKQRNLAAKSAAATTSPTPQHRPTFSTLRTSSTTFIHAKKVAYGVEGSSFRRRNGWIWSGRKGRLRQTPRVR

SEQ ID NO: 72894 - protein, 157 aa, Gossypium hirsutum
  unsure (1)..(157): unsure at all Xaa locations
  Clone ID: uC-gsronu33B074a10b1.pep
VLFFFFFLFFFFFFXFFFFFFFXFFFFFFFFFIYYLYIFFYILIIFLLFYYIFLFLLFFFFLIFFIFXYYFFYYIIIYIIYIIFFKYLLIYFLFFIFYLIFICIYCFIYLFFKYYILIILFYYYVIIINYFFFKYINILFIIFNYFLLFFIIFIYQY

SEQ ID NO: 72895 - protein, 77 aa, Gossypium hirsutum
  Clone ID: uC-gsronu33B039e01b1.pep
RTRGRTRGVCRSLPVLPLQIHPLRRRNEDPSTPYATIFACMKVEEDVRKVLNVGRRCGVGEVVAIADLVGRLMCFVF

SEQ ID NO: 72896 - protein, 348 aa, Gossypium hirsutum
  unsure (1)..(348): unsure at all Xaa locations
  Clone ID: GOSHI-09MAY01-C87166_1.pep
IAFGQLXRFAWRELQLATDSFSEKNILGQGGFGKVYKGVLSDNTKIAVKRLTDFESPGGDAAFQREVEMISVAVHRNLLRLIGFCTTPTERLLVYPFMENLSVAYRLRELKPGELVLDWPQRKRITLGAACGLEYLHEHCNPKIIHRDVKAANVLLDEDFEAVVGDFGLAKLVDVRRTDVTTQVRGTMGHIAPEYLSTGKSSERTDVFGYGIMLLELVTGQRAIDFSRLEDEDDVLLLDYVKKLEREKNLDAIVDHNLNKNYHMEDVEAMIQVALLCTPASPEDPPAMXSEVVRIPEETGLPQRWEAMGPRPGPPFGVSCHLTAPGYFPGGIDCLLHRGSPSIGSARS

SEQ ID NO: 72897 - protein, 103 aa, Gossypium hirsutum
  Clone ID: GOSHI-09MAY01-C87386_1.pep
LESSGAVDALTKVLVALYEQNEKPSSALEFIQQKLGGPTIYEYEKLQAEISDLQTKYNELLCKHEDACKELEELKNMHSSVSPSTKETNDGEPLKDEHVEKNS

SEQ ID NO: 72898 - protein, 214 aa, Gossypium hirsutum
  unsure (1)..(214): unsure at all Xaa locations
  Clone ID: GOSHI-09MAY01-C80146_1.pep
LFYDPDPNPXNEEQAVARAHRIGQTREVKVIYMEAVVDKISSQQKEDELRSGGTVDFEDDFAGKDRYMGSIESLIRNNIQQYKIDMADEVINAGRFDQRTTHEERRMTLETLLHDEERYQETVHDVPSLHQVNRMIARSEEEVELFDQMDEELDWTEEMTCHEQVPKWLRASVREVNAAVATLSKKPSKNILFTAGGGTESKETDTGKRRPSHL

SEQ ID NO: 72899 - protein, 84 aa, Gossypium hirsutum
  unsure (1)..(84): unsure at all Xaa locations
  Clone ID: LIB3585-051-P1-K1-C5.pep
PTRPEKSMVKPRTGSVGPISAXSIVRNIRSPTAGSVSKDVRPTQQTTHQPWPNQPAHLSNEQVGWANPVKKLRTDTGKRRPSHL

SEQ ID NO: 72900 - protein, 226 aa, Gossypium hirsutum
  unsure (1)..(226): unsure at all Xaa locations
  Clone ID: GOSHI-09MAY01-C80176_1.pep
HASALPLPPGAAMASSSAARSPSXTKPEPLPMNCQWQKGKLIGRGTFGSVCGAWDRETGALCAMKEVEICPDDPKSAECIKQLEQEIKVLSHLKHPNIVQYYGSEIAEDKFYIYLEYVHPGSINKYVRDHCGAITESVVRNFTRHILSGLAYLHSTKTIHRDIKGANLLGDASGVVKLADFGMSKHLSGQRADLSLKGSPYWMAPELLPAVMQKDNRXELALAVDI

SEQ ID NO: 72901 - protein, 221 aa, Gossypium hirsutum
  Clone ID: GOSHI-09MAY01-C80076_1.pep
PRVRVFEAVAEMKNAYVRLQEGHCPCDPERITAADVAVVGELTRLGVFRERFRRGTRAGGGRRKGHVAMLKEVVAPYEAAVEDWKREVKVKEVEIENLKEKLNTVTCLSNGGKKGRSLSKRKVSCRQVLGAAPVPTPELFEATMCQVKEASKSFTSLLLSLMREARWDIAAAVRSIEAATAAHDTTAYTTTITPSVIANHHAKYALESYVSRKIFQGFDHE

SEQ ID NO: 72902 - protein, 94 aa, Gossypium hirsutum
  Clone ID: GOSHI-09MAY01-C80026_1.pep
MWRIQRVPLKNRVQFIGLDNLGIHTGRPVHEDGVRIWLNNLGLGRYAPLFEIHEGDDEVLPLLTLEDLKDMGINAVGSRRKMFCAIQKLSKGFS

SEQ ID NO: 72903 - protein, 261 aa, Gossypium hirsutum
  Clone ID: GOSHI-09MAY01-C80326_1.pep
PRVRPRVPGEFQIGNNIKPLNPNTVASVVRYGRSRVPLTDEASGYSLVYNQLYPFEGLQNYTSGIIHHVRLTGLKPSTLYYYRCGDPSIPAMSGIYHFRTMPVSGPRSYPNRIAVVGDLGLTYNTTDTIHNLKSNKPDLVLLVGDVSYANLYRTNGTGSDCYDCSFPETPIHETYQPRWDYWGRFMQSLISRTPIMVIEGNHEIEEQAGKQSFVAYSSRFAFPSEESKSSSPFYYSFNAGGIHFIMLGAYVDYSKSGSICP

SEQ ID NO: 72904 - protein, 83 aa, Gossypium hirsutum
  Clone ID: LIB3585-054-P1-K1-D12.pep
PTRPVPLTDEASGYSLVYNQLYPFEGLQNYTSGIIHHVRLTGLRHSGYLTLTQYHMDFNLESSMPLCLVPPDFFLFQQCDDSI

SEQ ID NO: 72905 - protein, 130 aa, Gossypium hirsutum
  unsure (1)..(130): unsure at all Xaa locations
  Clone ID: GOSHI-09MAY01-C81686_2.pep
MNVLRGIGVPESNILMLLYRQPRPLLYGPVRLKEIVEEVKGMGFDSSTKKFLAAVIALSSMSKSTLEKKFDVYRRGGWXRTKRFVKLFTGYPSCVAVSEDKIMARMDFLVNKMGYSSTLVAKQSSFLRQS

SEQ ID NO: 72906 - protein, 167 aa, Gossypium hirsutum
  unsure (1)..(167): unsure at all Xaa locations
  Clone ID: AI725695.1.pep
PVPAVSFSSPVLWRKFLILSLGSHKRGWFGLRRLWREFKKMGFDSSTKKFIDVVIALSSMSKSTLKKKFDVYRRWGWSDQEIHEAFQRYPMCMAVSEDKIMAVMDFLVNKMXIIPISLPKHPIILRQTXKKKIFPRALFAQKLLSQGLVTDFKLSVLSHTSEKVFVD

SEQ ID NO: 72907 - protein, 139 aa, Gossypium hirsutum
  Clone ID: GOSHI-09MAY01-C82986_2.pep
SQQRMQSGIQGKDMLYEEKLKPKKDAELKPMNDIFGDNLNIIKDTELKPKTDAELKPMNDIFGDNLNIIKDTELKPKNNSFNSKELKPVKDEESKPMEDILETEELKPVKDYKVKTLKTDEDLKFAKDMEEMKSKLSDP

SEQ ID NO: 72908 - protein, 298 aa, Gossypium hirsutum
  unsure (1)..(298): unsure at all Xaa locations
  Clone ID: GOSHI-09MAY01-C82986_1.pep
SGAPPDMICRDKFLIQSTVVPVGTTDEDITSATFVKDSGRXIEENKLKVALVSPPDSPVLSPINGTMNQGMDYDRVLTIEESKMRNTEDLKPTKDVEWNSRKDTLYEEKLKPKKDAELKPMNDTFGDNLNIIKDTEPKPKKDAELKPMNDIFGDNLNIIKDTELKPKNNSFNSKELKPVKDEESKPMEDILETEELKPVKDYKVKTLKTDEDLKFAKDMEEMKSKLSDLESKLGKAEATISKLTEERRLTVQERKTLQEELALLRKKSDVRRVQVGFPLLFVCMVAVGSMFMGYQMQQ

SEQ ID NO: 72909 - protein, 110 aa, Gossypium hirsutum
  Clone ID: LIB3582-060-P1-K1-C2.pep
LHNKVGKSAKEIGTFVSSYISELDSVAKTSRQSSTTGKKWVKPTDSFIKINFDAAFVRGQNKAAIGVVARNEEGSVLLSCSEVYQWVPSAFGAEAITCRKAPKIYKWPCA

SEQ ID NO: 72910 - protein, 155 aa, Gossypium hirsutum
  Clone ID: LIB3582-027-P1-K1-A5.pep
CSASLRRIFCVAVWAIWGDRNTRLHNKAGKSCSEVYQWVPSAFGAQAITCRKALQIGVHMKWDRVIIEGDSLSIIEKCKTQNPDKSLVSAFIHDIHQLSVYFKECKFEHTPRSTYGLAHNLASEAMKSSRGVYLVGRAAGVAEIQAEIDRVREPD

SEQ ID NO: 72911 - protein, 173 aa, Gossypium hirsutum
  Clone ID: GOSHI-09MAY01-C82146_1.pep
MEANICDINHLDADVLLPPRKRLLAGFKKQASNANGASDQPAVASSSSSPPSPSPSPSPSPSPSHSPSTSSSDVNDHLKNLLMSSHLYNPNLSPEEILEASRAAATSAAKAAEAARAAAEEKAAIAAKAVAAAKNALDMVAKFSEDTINKERHLKKNKLKKHVPVQLLYKKHE

SEQ ID NO: 72912 - protein, 225 aa, Gossypium hirsutum
  unsure (1)..(225): unsure at all Xaa locations
  Clone ID: GOSHI-09MAY01-C82096_1.pep
STTRPDDKNVHATPSTVTNTGPSSSTEANEQNLSYVRSSPRNLSDDDTGTARGSVPRTLPGLINDIMSKGRRMTYEELCNAVLPHWPNLRKHNGERYAYSTHSQAVLDCLRNRQEWAQLVDRGPKTNSSKKRRKADAEDSDDNEFRQGKKYERGRKAKASSHRKKRSPKAKRKAEEAQXRLALQGRGIKDVRRRRKVDFSDDDAGPFSNSSEESMFSDDEIQILL

SEQ ID NO: 72913 - protein, 132 aa, Gossypium hirsutum
  Clone ID: LIB3585-003-P1-K1-E12.pep
MARFPRSAVPRLLYTFFSSKTRRFYPSPTAALLLGNFEVRQFSAGNVARAKDAKEPWWKESMERLRNIGISAHIDSGKTTLTEWILYYTGRIHEIHEVRGKDGVGAKMDSMDLEREKGITIQSAATYCTWKD

SEQ ID NO: 72914 - protein, 146 aa, Gossypium hirsutum
  unsure (1)..(146): unsure at all Xaa locations
  Clone ID: uC-gsflmaxxa046b09b1.pep
RTFTLFLLKCREFQRRLLTPARGWEFRSGKDGVGAKMDSMDLEREKGITIQSAATYCTWKDYQINIIDTPGHVDFTIEVERALRVLDGAILVLCSVGXGVQSQSITXVDRQMRRYEVPRLAFINKLDRXGSDPXKVLNXARSKLRH

SEQ ID NO: 72915 - protein, 165 aa, Gossypium hirsutum
  unsure (1)..(165): unsure at all Xaa locations
  Clone ID: GOSHI-09MAY01-C82226_1.pep
KPLGVRLPPDEKLEEFLRHLMGDHCTVDRNEMAQLPEASLNXMHHEKLPVPLIKCCNVIVLSATNATELEKQWDCLIELTGSDGFLVTIESYSSKRLTTNLTDVETAQPLSKLCLEFPDLYIGCFRRSRQGPLVISFEGKDPSRVQAGVEALCKKFNAGAFSEVN

SEQ ID NO: 72916 - protein, 116 aa, Gossypium hirsutum
  Clone ID: LIB3543-022-Q1-K1-A11.pep
MNWKNDNWPQNESEKNGHHQGSNQGNKGWNSTSGGQSSSGGNSNSRTSSSWDDWDTKDNRKEGTTEVTTSHSNDAWAGWDEAKDDGYDNFYNGTSNKRAVGDNGKSDVTWSGGGFL

SEQ ID NO: 72917 - protein, 88 aa, Gossypium hirsutum
  Clone ID: LIB3585-040-P1-K1-C7.pep
WNATSRRQSSSGGNSNSRTSSSWDDWDTKDNMKEGTTEVTTSHSNDAWAGWDEAKDDGYDNFYNGTSNKRAVGDNGKSDVTWSGGGFL

SEQ ID NO: 72918 - protein, 254 aa, Gossypium hirsutum
  Clone ID: GOSHI-09MAY01-C83616_1.pep
TVDFTARIGLNLGGRTYFSSAEDDFVNRLYRRSRPGDLSSTNSPRCQAEGCNADLTHAKHYHRRHKVCEFHSKASTVIAAGLTQRFCQQCSRFHLLSEFDNGKRSCRKRLADHNRRRRKSQQQQPNATQEHQKHLPLESGGNPSCDNPPRSPPDSGVQSSSSVTVAASPARISLDCFRQRPHNATVSSSSSGTLFFSKWVTVNNGVASQGISKLKTSRLCYILISDPPSLFNIQMVLAYTDIKKFGLIYRTIYI

SEQ ID NO: 72919 - protein, 61 aa, Gossypium hirsutum
  Clone ID: LIB3584-042-P1-K1-B11.pep
LFNNVQTIEKLIDTGDSEQIFQKAIQEQGRGRVCLKFPFSSFIIIVFFLSNFRKLIFFFHP

SEQ ID NO: 72920 - protein, 145 aa, Gossypium hirsutum
  unsure (1)..(145): unsure at all Xaa locations
  Clone ID: LIB3083-062-Q1-L1-A8.pep
QTLRETIHQEYRDVVGRRVYAVTGTRPDEETIEKLIDTGDSEQIFQKAIQEQGRGRIMDTVSEIHERHEAVRDLEKKLLDLQQIFLDMAVLVDAQGDMLDNIESQVSSAVDHVQSGNTALQRAKSLQKNSXKWMCIAIIXLLLIV

SEQ ID NO: 72921 - protein, 186 aa, Gossypium hirsutum
  Clone ID: GOSHI-09MAY01-C83296_1.pep
KVVHRDVKSSNILLDRQWYPKVSDFGLAKLLCSERSYVTTRVMGTFGYVAPEYACTGMLTEKSDVYSFGILIMEVISGRSPVDYTRPQGEVHLVEWLKPMVGNRKAEEVIDPKLPVMPASKALKRVLLVALRCVDPDATKRPKMGHVIHLLEADDLLFRDERRITKEPWDSHSGDRQPNHNATKLS

SEQ ID NO: 72922 - protein, 128 aa, Gossypium hirsutum
  Clone ID: LIB3584-044-P1-K1-G9.pep
SFCPFFSSYVAPEYACTGMLTEKSDVYSFGILIMEVISGRSPVDYTRPQGEVHLVEWLKTMVGNRKAEEVIDPKLPVMPASKALKRVLLVALRCVDPDATKRPKMGHVIHLLEADDLLFRDVSFVFIY

SEQ ID NO: 72923 - protein, 190 aa, Gossypium hirsutum
  Clone ID: GOSHI-09MAY01-C58985_1.pep
PQQDPYGICKMEGSIPRDIAPYKNLAIFTSSSMDPKCISSSSSIPLLKKLRVLMSNLQKVDLRALTYQQKLAFWINMYNACIMHGYLRYGPPDTSEDLLAMTNKATLDVRGNKISAQAMEHHILGKQSTGLKIQEGSDKEDDREATIRKLYGLELTDRNVMFALCCGTRSSPAVRIYTGDGVSAELEKLK

SEQ ID NO: 72924 - protein, 91 aa, Gossypium hirsutum
  Clone ID: GOSHI-09MAY01-C58975_1.pep
FLKQIKSENSIRRPTNFVTFNYIFRSASTNTLPCVLSCIYDLLLSTNIQALWLLFIMCRTPKHLLCMKSTHRAHASASSVPVKLQQFQRHA

SEQ ID NO: 72925 - protein, 88 aa, Gossypium hirsutum
  Clone ID: LIB3149-057-Q1-K1-E3.pep
QIKSENSIRQTINFVTFNYIFRSSSTNTLPCVLSCIYDLLLSTNIQALWLLFIMCRTPKHLLSIIFIIQALSISSTISWNLSHFPPNA

SEQ ID NO: 72926 - protein, 197 aa, Gossypium hirsutum
  Clone ID: GOSHI-09MAY01-C58895_1.pep
MGEEVMMSMTEKETAAMNNPHFVLVHGIGGGAWCWYKIKCLMENSGYKVSCIDLKGAGTDRSDANSIVSFDDYNKPLMDFMSALPHSEQVIMVGHSAGGLSVTHATHKFANKIRLAVYVAATMLKSGFLTDQDIKDGVPDLSQFGDVYEWGFGLGAEQPPTTAIVKKEFQRKIIYQMSPQEDSTLAAMLLRPGPILA

SEQ ID NO: 72927 - protein, 75 aa, Gossypium hirsutum
  Clone ID: GOSHI-09MAY01-C58875_1.pep
LIFQQKEKTAAASLYHARRHTKHDPQLARCSPTSLHVFTICNLSKRIGRNRLYLAIKPSNFDCKRVCCFFFREIK

SEQ ID NO: 72928 - protein, 129 aa, Gossypium hirsutum
  unsure (1)..(129): unsure at all Xaa locations
  Clone ID: GOSHI-09MAY01-C58775_1.pep
KNAACEGSFKSFCLLNAWGDLMMLPSEMLADRSTGKEPXFSVSLIIRVLNDFVPDEFNPNPASQAVFEALEKDLSEGGEESITNYPCMATPIVYSPPSATSLTNIIGSQVMERSKSLVLRKSYTSDDEL

SEQ ID NO: 72929 - protein, 146 aa, Gossypium hirsutum
  unsure (1)..(146): unsure at all Xaa locations
  Clone ID: GOSHI-09MAY01-C58765_1.pep
NFGAKMSDVIQRKCKNVISKLQRRIDKEGQHIVPLLTDLWKRIEDSGYTGGSGSNQLDFRKIDQRXVDRLEYSGVMELVSEVQLVLKSAMHFYGFSHEVKSDAXVHDLCFDIVEDSIYRYRFPEARNSLSFFSPASTSTSGPSLDR

SEQ ID NO: 72930 - protein, 90 aa, Gossypium hirsutum
  Clone ID: uC-gsronu33B011c12b1.pep
VYAEMRGIEMEEFEKASIVGAENGVTLKLLDTTRMSMLRPDGHPGPYRQFQPFAKDKNVKVQNDCLHWCLPGPIDSWNDILMEMVIRGAH

SEQ ID NO: 72931 - protein, 62 aa, Gossypium hirsutum
  Clone ID: LIB3149-051-Q1-K1-B11.pep
IGPYGDVKKISNYKQLGYHDPFLLNKNLKLKKNKNKNKSILATPVPHKMAKLLMCPSNYHLH

SEQ ID NO: 72932 - protein, 133 aa, Gossypium hirsutum
  Clone ID: GOSHI-09MAY01-C58245_1.pep
PILSAFKSTICLLLPRNPTRLGGSTNLVDASTRLRLSLKLVFPHSPLFSLFLGFCIFLSVICPTNMCISVVEEMEKNNLCSSALKNNMPYRSAALKTTTVLMTPPIIPLIPILLSPHPKSFSKNKNLLLRLCY

SEQ ID NO: 72933 - protein, 167 aa, Gossypium hirsutum
  Clone ID: GOSHI-09MAY01-C58265_1.pep
PRVRPRVRANQGFDIPSAIVSFPNFHARVVFLENDSLNKSPLLSKFQEKSPVMSYTEVLLVPLTTPDFSMPYNVITITCTVFALYFGSLLNALRRRVAEEERFLKDKAAKKMGRIPLLLTKLFAKLRGRHLEGPQAPPASSSFINSKSVLKVILIAGLAACWQYYFS

SEQ ID NO: 72934 - protein, 192 aa, Gossypium hirsutum
  unsure (1)..(192): unsure at all Xaa locations
  Clone ID: GOSHI-09MAY01-C58235_1.pep
PASAQRPVQKTKDFENDLIMSIAEFIQLEAEGSGTLEGSVDGRMAVVRXSEKFGKRLEISELERNGEASSSMPPTILNSSKSHILQYLQSTYEMESPGSTLRRRVRFKLQPDMNYRDPNVKDERPELVEAMQSGVAYVLGHSHIRAKVNAPCLKRFVIHVAYLFLRKNCRAPAVVLNIPQTCLIEVGMNYYL

SEQ ID NO: 72935 - protein, 141 aa, Gossypium hirsutum
  Clone ID: GOSHI-09MAY01-C59475_1.pep
MSQVGERSGQTPQRYLAELDFSPTGGLSLTASLPATAGLHHSGSLMAATCEISNIFSNYVSAMYSSEDSALAPVPPAAAFGADDLVLTLSNPQMSLEGTEKTSWSGEQPQFWSKTQVLDWISYQVEKNKYDASAIDFSRCD

SEQ ID NO: 72936 - protein, 98 aa, Gossypium hirsutum
  Clone ID: GOSHI-09MAY01-C59005_1.pep
STRPTITTQAPLQVQVPTTSSRLQVSSSTTTPLCLLFTSSSSPLLSDDGFDHTPRRREDCDSNKATKDGLKRNLEGIIKKKIGSPAYLVSAFEVNNVR

SEQ ID NO: 72937 - protein, 155 aa, Gossypium hirsutum
  Clone ID: GOSHI-09MAY01-C59355_1.pep
MSRVFKGLRALLASPASSSSSAAAAAKFSSSSAFTATAGKSATSKAAQKTPKKPIASKPKTEKPPTPRTTTRPSGIFKLTPVSPALARFLGAPEASRSDAVKQIWSYIKSQNLQNPANKKEIFCDEKLKTIFDGKEKVGFLEIGKMLSRHFVKSS

SEQ ID NO: 72938 - protein, 57 aa, Gossypium hirsutum
  Clone ID: GOSHI-09MAY01-C59205_1.pep
ANAFLKKLKILLFVLRIYPWIGTFFYWKCLLTFRLNGTSLINFVPCFPWSTLPGLMH

SEQ ID NO: 72939 - protein, 154 aa, Gossypium hirsutum
  Clone ID: GOSHI-09MAY01-C54975_1.pep
HASAKPTLGVVPRKGAISGVSASILIPQFILGGLTEAFASIGLIEFYYKQFPENMKSIGGSLFYCGLAGSNYFSSLLIFIIHRTTNRTATGNWLKEDLNKGRLDYYYYIIAGLGILNLGYFLVCASWYKYKGNSDNTPELELHVNGEKQQLDKP

SEQ ID NO: 72940 - protein, 188 aa, Gossypium hirsutum
  Clone ID: GOSHI-09MAY01-C54965_2.pep
MASPSDRKATIIDGKAIAQTIRSEIADEVRHLSQKYGKVPGLAVVIVGNRKDSLSYVGMKRKACAEVGIRSFDVNLPEEVPESELISKVHELNANPDVHGILVQLPLPKHINEEKVLGEISLEKDVDGFHPLNIGKLAMKGREPLFQPCTPKGCLELLSRSGVSVKGKNAVVVGRSNIVGLPVSLLLL

SEQ ID NO: 72941 - protein, 192 aa, Gossypium hirsutum
  unsure (1)..(192): unsure at all Xaa locations
  Clone ID: AI055541.1.pep
SNEDDECPQRKDATSRSATNDVKNEEVPESDLISKVHELNANPDVHGILVQLPLPKHINEEKVLGEISLEKDVDGXFHPLNIGKLAMKGREPLFXPCTXRXCLELLXRSGVXCKGKNAXXCGPKYIVGWPVSLLLLKXDATVSIGHSRTPDPEXLVREADIVIAAAGQAMMIKAVGSTWCSVMMFEPCCDDH

SEQ ID NO: 72942 - protein, 137 aa, Gossypium hirsutum
  Clone ID: GOSHI-09MAY01-C54845_1.pep
VNGSRSHLLCLSRFSKRVGLSGSPGSVRAHVNGGGDDTNNSKNNDKKKKKKVVVVGSGWAGLGAAHHLCKQGFDVTVLDGGDGIGTPDNVGIQGFWYPYKNIFSLVDELAIKPFTSWTRSAQYSWEGLEVEFPVYQE

SEQ ID NO: 72943 - protein, 250 aa, Gossypium hirsutum
  unsure (1)..(250): unsure at all Xaa locations
  Clone ID: GOSHI-09MAY01-C54825_1.pep
VGVLALXGSFNEHIAALRRLGMKGVEIRKPEQLQSISSLIIPGGESTTMAKLAEFHNLFPALPRFRPRGRPVWGTCAGLIFLANKAVGQKDGGQELVGGLNCTVHRNYFGSQIQSFEAELLVPELASQEGGPETFRGVFIRAPAVLEVGPEVEVLADYPIPSKKVLYSSSAVEIQEESAVPEKKVIVAIKQGNLLGTAFHPELTADTRWHSYFLKMVRDVGEGTSNTTVAVSEAASSFDRQTKYDLPIFR

SEQ ID NO: 72944 - protein, 118 aa, Gossypium hirsutum
  Clone ID: LIB3165-038-Q1-K1-B4.pep
MAVVGVLALQGSFNEHIAALRRLGMKGVEIRKPEQLQSISSLIIPGGESTTMAKLAEFHNLFPALREFVQMGKPVWGTCAGLIFLANKAVGQKDGGQELVGGLNCTVHKNYFGSQIQS

SEQ ID NO: 72945 - protein, 176 aa, Gossypium hirsutum
  Clone ID: GOSHI-09MAY01-C54185_1.pep
MCGGGGSPPTTAHSLSSKFSHFNQNSEPKPPLSPFASYDPLNVLRSTLFSPKVSSSSVSPSFTSSNDDTDKAKLAQVSKRLENTSRYFKRLGNLGFWGQLVCTVVSAVILSFSVVFPGKITSPATFYATASGIVAAFISVFWSFGYIRLSEKLRRTANDPSKAPPRADVVKSLKNA

SEQ ID NO: 72946 - protein, 119 aa, Gossypium hirsutum
  Clone ID: GOSHI-09MAY01-C54085_1.pep
MRKCELCGRLARMHCESDQANLCWDCDFKVHGANFLVAKHNRTLLCHVCQSPTPWLASGRNLGSAVSVCDSCVVNGNNKCESSEREYGEEEEEEEEEGDYDNDAVEESGEEEEAEIEDA

SEQ ID NO: 72947 - protein, 156 aa, Gossypium hirsutum
  unsure (1)..(156): unsure at all Xaa locations
  Clone ID: GOSHI-09MAY01-C54075_1.pep
DGPFFAEVDMGGDASVPTVRATVVQASTIFYDTPATLDKAERLLAEAAGYGSQLVVFPEAFIGGYPRGSNFGVTIGNRTAKGKEEFRKYHAPAIDVPGPEIERLAAMAGXYKVYLVMGVIERDGYTLYXTVVFFDSQGRFLGKHGEIMPTVLKRII

SEQ ID NO: 72948 - protein, 138 aa, Gossypium hirsutum
  Clone ID: GOSHI-09MAY01-C54225_1.pep
MAFSSSALSHTSSSCLSSFPHAFTTRKTHLRFPSFLLIKASSEPDKGNPTATQTKNAEGSSNAQPQPQATPAAAAKPPPKKPVYSMKKGQIVRVDKDKYLNSINYLSVGHPPYYKGLDYIYEDRGEVLDVRIFETGEH

SEQ ID NO: 72949 - protein, 116 aa, Gossypium hirsutum
  Clone ID: LIB3825-017-Q1-K6-H2.pep
GIQAIGEEALCFGLKISEDLDRLIMAEREPKRVDRLTVFETRTASVRHRFRNEGEGITADDWVRFGSDNCKCKFAATFTTICYKIRLCAAKQSLKIKKIKTFSGKKITFFLSKFKP

SEQ ID NO: 72950 - protein, 77 aa, Gossypium hirsutum
  Clone ID: LIB3165-055-P1-K1-B12.pep
GLALINVNANLLLHLLPFVTKFGYEPPNRALRLKKKKTFFSFKIQTLNFFLNLFENGEKSDLETGKLIEIRDFLTKH

SEQ ID NO: 72951 - protein, 212 aa, Gossypium hirsutum
  Clone ID: GOSHI-09MAY01-C55905_1.pep
MQIAGVATEVLIAIPSAGTLNFRHWHPNHFFLSSPFFKRCPTLCIPKLGMVPDKYRGGRCLTMRASGESGDNLSPMAPVELESPVGRLLAQILRTHPHLLPAAVDQQLDNLQSDKNDQTEETPQSQDLLYKRIAEVKEKERQKTLEEIIYCLIVQKFVDNDISMIPKVTETSDPTGRVDFWPNQEQKLEFVHSPEAFEMIQSHLSLVLGDRM

SEQ ID NO: 72952 - protein, 223 aa, Gossypium hirsutum
  Clone ID: GOSHI-09MAY01-C55895_1.pep
DKALGNSQLTVIPCRKRAIEMASNPDETTVKAPKPKKSRFKKKMLKTKFLGKKADRSQDNPTSNLAIGSDDSQKPESIQTDSFTAIGSETLGAEATRNLKDTKITSDSSEREMPSADVALAPEVSDDSKNEQLMAAYPLHSNHEVPDVENSSMVCDDQTDSVKLPNGDDVASKITDPTSSQMEASKIMPGLDQVVEKPHANAGQAQVLEKIDIGSVPGIQFRN

SEQ ID NO: 72953 - protein, 168 aa, Gossypium hirsutum
  Clone ID: GOSHI-09MAY01-C55465_1.pep
MASPSQSTNFPTIIFILFSFVLIRTINAVPFIVLHGISDKCSGHGVTRFTKLLSSWSNSQGYCVEIGDGSWDSWTMPLLEQTSIACEKVKNMTELSQGYNMVGLSQGSLIGRGIIEFCDGGPPVKNFISLAGPHAGIASIPFCESTVICIFLDSLIKSEVYSNFVQEH

SEQ ID NO: 72954 - protein, 74 aa, Gossypium hirsutum
  Clone ID: LIB3189-015-P1-K1-F8.pep
TSSKKLAIHFHHLLKTFLKVGKLIKERAAFLHICLPPMASPSQSTNFPTIMSILFSFFLILTINALPFIILYFF

SEQ ID NO: 72955 - protein, 134 aa, Gossypium hirsutum
  unsure (1)..(134): unsure at all Xaa locations
  Clone ID: GOSHI-09MAY01-C55645_1.pep
MERELLHLFDAAKKAADLAASDAVSSNAPEXVSRCVDALNHLKDFPVTYDTLVSTQVGKKLRPLTKHPREKIKTVASDLLXELWKKIVIVETTKSKKNGTTSAVKVEKLPKPSAVKSEKLYNTESVKVERSKGD

SEQ ID NO: 72956 - protein, 153 aa, Gossypium hirsutum
  Clone ID: GOSHI-09MAY01-C55015_1.pep
PVEKPARPHPSGKNQCRLYLLLPFGPPFSAGVHLLPALSVLISLSVLSFSLPPSLPTILAPPLLAVSATAHHSTKEMKQTSLDSFHLHLFYKGSNPSTGTLTDPNNSFTTPTAAAEIPDSGAVFHISFQQQTSETETTPEPVPTHLDRSPSVL

SEQ ID NO: 72957 - protein, 241 aa, Gossypium hirsutum
  unsure (1)..(241): unsure at all Xaa locations
  Clone ID: GOSHI-09MAY01-C56985_1.pep
QKEIYVWIGRHSTIKSKQEALNLGLKFLQTNILEEELSLEAPIYGITEXGHGPPFFTWFFGWDPSKANMPGNSFXRNLPPLKGKPSRGTAPSKIALKPRSREATPDGLRSRSSSSNGWERSFSPASTVSGSHLKFSDNYSVSSPTPVARKLFTGSSPYQDSPVIEPSSPSTNEKSXQIDANETSADSLIYPYQRLTVSSTEPVSGIDVTKREAYLSEGEFAEKXGMPKGAFYKLPKWRQTT

SEQ ID NO: 72958 - protein, 262 aa, Gossypium hirsutum
  unsure (1)..(262): unsure at all Xaa locations
  Clone ID: GOSHI-09MAY01-C56825_1.pep
LESLEKIKFKKIVLLHGEGFGAWCWYKTIAQLEEVGLQPTALDLTGSGIDLTDTNTVTTLAEYSKPLIKYLENLPVDETVILVGHSSRGACLSYASEHFPEKISKAIFLCATMVSNGQETXDVFAEELGSAERFMKESQFLIYGNGKDKPSTGLMFEKQLMNGLYFNQSPTKDVALAMVSMRSTPLGPIMEELSLTPEKFGTGRRFYVQTLEDRALSPDVQEKLVRENPPERVFKVKGSDHCPFFSKPQSLHKILIEIVQIP

SEQ ID NO: 72959 - protein, 55 aa, Gossypium hirsutum
  Clone ID: GOSHI-09MAY01-C56535_1.pep
TYVVLSIFAQCVGKIFGLHCADFEKTGSNVEMICTMRSFYDCSKFLMPKAWIIFV

SEQ ID NO: 72960 - protein, 142 aa, Gossypium hirsutum
  Clone ID: GOSHI-09MAY01-C56485_1.pep
VLFFDQVRATSSAENSTSDLPGSIRALLPGGSHGSSRSTTTNTEEDWDSVPTADDIKALKGELATLRLGSNDSGNEAAKSDVEKVAASRMKGLVMSKIFSKLWSSKERHGEISSSDTSDSHGSVNAEETKSTPSRSRRHSLS

SEQ ID NO: 72961 - protein, 88 aa, Gossypium hirsutum
  Clone ID: GOSHI-09MAY01-C56475_1.pep
RNDARVSPSDPSIALGPEFEKISDFKRRFETIPSIVKLDSLEVNGDVWFGADIVLKGKVVIDACPGLTLRIPGGVVLDDEEINGPADI

SEQ ID NO: 72962 - protein, 186 aa, Gossypium hirsutum
  Clone ID: GOSHI-09MAY01-C56705_1.pep
IRCVQTASEVVAALCAVDVEANAKSSADVIKFDPSKVKVSIEYGLCEMLNKEAIRVDVAPKDGNFGFDVPLLETMFPSGTLDPSLGRVYGKMPQWEETVVESRSRYKQIIKALADKYPSENLLLVTHGEGVGVSISGFLEHTTVVEVEYCGYAELKRLMTCKNGSTTAGNFLVLTKSGQSGITYFD

SEQ ID NO: 72963 - protein, 217 aa, Gossypium hirsutum
  Clone ID: GOSHI-09MAY01-C56625_1.pep
MQAPAEKRHVFALELQRAGNAGAKVLRELGQKVEKMEKLSPGDILREVHEAGEDLQMKIDEKSYLLVNSESWATAPPLSELEESGSMADVKDNEHKVIKSLSDMWEVQHTIDPRAPDLITSESMLQKPSWPRLSFTAEALLQQQESKIYESASALSLATFASLLIEFVARLQNLVDAFQELSEKANFKVPVDQSPQKEAPGFWRRLRNCFQSKELIL

SEQ ID NO: 72964 - protein, 207 aa, Gossypium hirsutum
  Clone ID: GOSHI-09MAY01-C56175_1.pep
VDGGPSGDPVHYFYDEPLLLIPECDGVRILSNTSLEFLQRVPDSTVSIFKIGSTSPAALLYDALDHFDRRSAKADENLRLIQSSLPEAVEACIDAAGHEFDVSRQRTLLRAASHGQAFCSTFQRDRIQEMCKTLRVLNAVRDPEIGILLSINQYKLLTPSVLIARLINAHRHLLALRISEYVGMNQEVVIMHWACSKNSFISNSRCH

SEQ ID NO: 72965 - protein, 184 aa, Gossypium hirsutum
  unsure (1)..(184): unsure at all Xaa locations
  Clone ID: GOSHI-09MAY01-C56105_1.pep
NPGGPTRPPLPELIADLFDARSMSFGGTHEYLAPEIIKGEGHGSAVDWWTFGIFLYELLFGKTPFKGSGNRATLFNVVGQPFRFPESPIVSFAARDLIRGXLLVKEPQHRLAYKRGATEIKQHPFFEGVNWALXIRCATPPEIPKPVELERVPASPASTSEKVAVNAAAYNQKGSDNYLEFDFF

SEQ ID NO: 72966 - protein, 142 aa, Gossypium hirsutum
  Clone ID: GOSHI-09MAY01-C56095_1.pep
MGTTLFSGWRSFSWQQLSLSCSFAHSSSSENGISRPKAVPTSRGGGLVVLEKDNSLGISSRRSLLITGISVASSSVLGFPGEGMAVVKQGLLAGRIPGLSEPDEQGWRTYRRPDDKSGGHGVGWSPIIPYSFSVPQDFEEVP

SEQ ID NO: 72967 - protein, 113 aa, Gossypium hirsutum
  unsure (1)..(113): unsure at all Xaa locations
  Clone ID: GOSHI-09MAY01-C56045_1.pep
AKSRSSHFKSPGCLPYGGNSFNSYDGHNRNMGAYRTEGWDTEKXGSDLQSGNQFEYHAFPQTLDELELEFKIEAMELGRIRDKEEDEENYKYRKVRCLSCLTIVCAFGAKWFL

SEQ ID NO: 72968 - protein, 115 aa, Gossypium hirsutum
  Clone ID: LIB3829-034-Q1-K6-H8.pep
SSARSRSSYSKSSGRLPYGGNSFNSYDGHNRNMGAYRTEGWDTERRGSDLQSGNQFEYHAFPQTLDKLELEFKREATELGRIRDKEEDEENYKHREVRCLSCLTIVCAFGAKWFL

SEQ ID NO: 72969 - protein, 184 aa, Gossypium hirsutum
  unsure (1)..(184): unsure at all Xaa locations
  Clone ID: GOSHI-09MAY01-C56005_1.pep
DPPFAFGPPFQTEKGWERSCRRWPRRWPEWKRSEHLQREKVEQLLLESTTSYPIICDNLKKIYPARDGNPAKIAVRGLSLALPRGECFGMLGPNGAGKTSLINMMIGLTKPTSGTTYLQGLDILTSMDIIYTSMGVCXAPDLLWETLTGREHLLFYGRLKNLKASALNQAVEDSLKSVNLFHGG

SEQ ID NO: 72970 - protein, 147 aa, Gossypium hirsutum
  Clone ID: GOSHI-09MAY01-C56365_1.pep
MEDFWKRAKSFAEEAAKRSQTLTSPNKLADLVAETAKKSKELAVEATKKADELKTAALKQADQIQIQSISKSISDFIPPQLSSLSISSPASTSSDPPPIPDSELRKFGLTDDLRDFVQGFTSTTFQNFPSPVQDEPNRPIRLLRGPI

SEQ ID NO: 72971 - protein, 65 aa, Gossypium hirsutum
  Clone ID: GOSHI-09MAY01-C56305_1.pep
MSDPKYAYPYPAQGYYQGPPGVAPPQYAAPPPRREPGFLEGCLAASCCCCLIDECCCDPSIIFIS

SEQ ID NO: 72972 - protein, 60 aa, Gossypium hirsutum
  unsure (1)..(60): unsure at all Xaa locations
  Clone ID: LIB3149-014-Q1-K1-B3.pep
LYXLFLAVLQXXCXCVLLMNXAVIHPIILSAENNXNISVSTIIXDARVNLEIIFYHYNIL

SEQ ID NO: 72973 - protein, 131 aa, Gossypium hirsutum
  Clone ID: GOSHI-09MAY01-C56275_1.pep
MFEMYSVTSTGLSPEIAYFHTKDYFESGLDGGNNSAEYVSDIIIKHADRHNLWRPETGESLFGLYRITQDPKYREWGWRIFESFERYTKVESGGYSSLDDVTTVPSSKRDRMETFFLGETLKYMYLLFGDS

SEQ ID NO: 72974 - protein, 136 aa, Gossypium hirsutum
  Clone ID: GOSHI-09MAY01-C56215_1.pep
LSRLLGNSETHATTGVAGTFGYVAPEYAMTCRVSEKADVYSYGVVLLELISDKKALDPSFSSHANGFNIVSWACMMLRQGQAKDVFTARLWDSGPHDHLVQLLHLAITCTVDSLSARPTMRQVVRRLKRIQPSSVR

SEQ ID NO: 72975 - protein, 145 aa, Gossypium hirsutum
  unsure (1)..(145): unsure at all Xaa locations
  Clone ID: GOSHI-09MAY01-C57495_1.pep
ASEFFFGLLLGSFSTYFKSQPIPGDNNASVLAVVGKTFDDLVLNSPKNVLLEVYTPWCINCETTSKQVEKLAKHFKGLDSLIFAKIDASANEHPKLQVDNYPSLFLYKAGDKDNPIKLSTKSGSKELAAFINKQVRXQDQAAKDE

SEQ ID NO: 72976 - protein, 152 aa, Gossypium hirsutum
  unsure (1)..(152): unsure at all Xaa locations
  Clone ID: GOSHI-09MAY01-C57015_1.pep
MWWMMNEGGGHYCSKKTDDICGDVCGQESSRLSMSRIRCILRGIDLKTYIFLFILVPTCIFGIYIHGQKISYFLRPIWESPPKPFHDIPHYFHENVSMDALCELHGWRIREFPRRVYDAVSLSNEVDILTIRXWKEVYPYITHFVLLESNST

SEQ ID NO: 72977 - protein, 79 aa, Gossypium hirsutum
  unsure (1)..(79): unsure at all Xaa locations
  Clone ID: AW186838.1.pep
MWWMMNEGGGHCPKKSDDIYGDVCGQGLSRLSMXRIRCILRGIDLRTCILLFVLVPTCIFGIYIHGQKISYFLRPLWES

SEQ ID NO: 72978 - protein, 176 aa, Gossypium hirsutum
  Clone ID: GOSHI-09MAY01-C57395_1.pep
ILSLSYTRHAEDIRHARSFLSKLGELNQTQIFAKIENIEGLTHFDEILQEADGIIFSRGNLGIDLPPEKVFLFQKAALYKCNMMGKPAVVTRVVDSMTDNLRPTRAEATDVANAVLDGSDAILLGAETLRGLYPVETVSTVGKICAEAKKVFNQDLYCQKTVQNVGEPMSHLESIG

SEQ ID NO: 72979 - protein, 72 aa, Gossypium hirsutum
  Clone ID: LIB3829-003-Q6-K6-E5.pep
IYLAGISTKNRRNSGCFRWVTSVQLNLLGWHFNQEQEKQWLLSMGNYGMLIPFHLQERLSMAGLEKSIKRNF

SEQ ID NO: 72980 - protein, 50 aa, Gossypium hirsutum
  Clone ID: LIB3146-022-Q1-K1-F4.pep
NQRIAFSKIKENSVQLNLLGWHFNQEQEKQWLLSMGNYGMLIPFHLQERH

SEQ ID NO: 72981 - protein, 184 aa, Gossypium hirsutum
  Clone ID: GOSHI-09MAY01-C50585_1.pep
IDLKNLEETWRYRCEALTAENEASSGEDIRKELEETKLQYKRLKEEHASRPDLADKMIEEKDKEGCILLDDNKNLQRSLESRQLVDHTDNYNTATHKQDAPNLNTSAAEQQILLLARQQAQREEELAQSQRHILALQEEIDELERENRLHSQQEALLKEELLDMERSKRREGVEFTYLKNVIIK

SEQ ID NO: 72982 - protein, 170 aa, Gossypium hirsutum
  Clone ID: GOSHI-09MAY01-C50565_1.pep
AAGFHLLPEMAKRKHLEIQFIGEGEGGTSCMGTHSTVSASGRFLRNKRRVNARNTRQQGMLNSKQFSDCFEKIWKIFPDNQRASFTYLDCLWFSWYMDELFKEKVLVWISRKHIFTKKYVFVPILHWRHWNLLIFCNFDKPLQSKTQTTCMLLLDSMQMSGPRRLEPTIR

SEQ ID NO: 72983 - protein, 218 aa, Gossypium hirsutum
  Clone ID: GOSHI-09MAY01-C50115_1.pep
SVLFPLVRNCGSSQISAAMAPIARLLLLALLSTALTISSGSGDGYTINGRVKIPQGLGTKGFALPGKTSNVKVILNGGQIVTYLRPDGYFSFQNIPAGTHLIEVAAIGYFFSPVRVDVSARNPGKVQAALTENRRGLSELVLEPLRDEQYYEIREPFSIMSVVKSPMGLMVGFMLVVVFLMPKLVENMDPEEMRRAQEEMRNQGVPSLASLLPGGGRN

SEQ ID NO: 72984 - protein, 89 aa, Gossypium hirsutum
  Clone ID: LIB3493-005-P1-M1-E11.pep
SPGSSQPNVKSGDGYTINGRVKIPQGLGTKGFALPGKTSNVKVILNGGQIVTYLRPDGYFSFQNIPAGTHLIEVAAIGYFFSPGRVDVV

SEQ ID NO: 72985 - protein, 181 aa, Gossypium hirsutum
  unsure (1)..(181): unsure at all Xaa locations
  Clone ID: GOSHI-09MAY01-C50095_1.pep
KERGKMVILLVYVNDLLITGNNIDKIADLKGXLNRNFKMKGGGELRYFLGIEILRSPEGILLNQLKHAQELIQDTGLSDAKVALTPLEQNQKLTTAEFDEVTQQHXEDKLLEDKTVYQRLIGRLIYLTHTRPEITFAVTHPSQFMQNPKQSHMEAALRVVRYIKRDPGLGIFLKANNKHQL

SEQ ID NO: 72986 - protein, 208 aa, Gossypium hirsutum
  Clone ID: GOSHI-09MAY01-C50025_1.pep
VIFSAAIGIMASGQANTFSGVHCYNKATGFGGTGIYLKLPGLTQTRIVNSYLDYTGIVAEDPVQLHISSSFFLGDAFILLKSINGVANGVTIVDNMFSGSNKGVDIVQLEGPFTQIDQVVVDRNSAKGMNIKATVARGSVEGNSSSWTVDFNPVLLFPNLIKHVQYSLSSSRGSSFPSHALRNVSENQVVIESDLAVPANVFVTVDQA

SEQ ID NO: 72987 - protein, 120 aa, Gossypium hirsutum
  unsure (1)..(120): unsure at all Xaa locations
  Clone ID: LIB3493-038-P1-M1-A7.pep
XPTLICGTDTHHLTTTFGSTETYLKPSGITQTLIVNSYLHYNGIVAGNPQQLYMSSTFFLGHAFILLKSINGVTNGVTVVDNMFSGSNKGVDIIQLEGPFTEIYQVVIDRNSAKGMNIKA

SEQ ID NO: 72988 - protein, 67 aa, Gossypium hirsutum
  Clone ID: LIB3146-011-Q1-K1-C12.pep
GNSSSWTVDFNPVLLFPNLIKHVQYSLSSSRGSSFPSHALRNVSENQVVIESDLAVLANVFVTVDQA

SEQ ID NO: 72989 - protein, 206 aa, Gossypium hirsutum
  Clone ID: GOSHI-09MAY01-C50385_1.pep
ARERGWKGKVTKPGRVIRPGAIRINGKCPLTPLEVGLMLRGMGFDNNTYIFLASGKIYNSEKTMAPLLEMFPNLQTKEMLASEEELVPYKRFSSRMAAIDYTVCLHSEVFLTTQGGNLPHFLMGHRRYRYGGHSKTIRPDKRRLALLFDNPNIGWRTFKRQMLNMRSHSDTKGFELKRPNDSIYTFPCPDCMCRTNKSEAARSSAT

SEQ ID NO: 72990 - protein, 90 aa, Gossypium hirsutum
  Clone ID: GOSHI-09MAY01-C50275_1.pep
LMILKNRIIITKTICHTGESIASMIQGKSPNHPMKCKNKKNRPLVLQLHRLKTSSFNTILNMPYISPSTMISPCLWLQAPNSPSHELSQS

SEQ ID NO: 72991 - protein, 78 aa, Gossypium hirsutum
  Clone ID: GOSHI-09MAY01-C51995_1.pep
MHIKITKEETIYHSSIRKGLNTPKVLATINEFTKENKARVSLYLKTIIFPFPKGRWCFDFFHILLHLRYEVMLVKKAF

SEQ ID NO: 72992 - protein, 64 aa, Gossypium hirsutum
  Clone ID: GOSHI-09MAY01-C51935_1.pep
GPVIGSVANLAALHHQSHVAKINGLHLFSVWPTVHNFLLAGPLFSRAFQPHPKQFQTSVSIFAA

SEQ ID NO: 72993 - protein, 159 aa, Gossypium hirsutum
  Clone ID: uC-gsflnu33B059f03b1.pep
HSSAHASEDRNNEDSRNRDESKEKIPDRDRDREHGQDKVKTTDNQKLLDAKQLIDMIPKTKEELFSYEINWNVYDQHALHERMRPWISKKITEFLGEEEKTLVDYIVSGTQEHVKASQMLELLQSILDEEAEMFVLKMWRMLIFEIKKVETGLALRSRS

SEQ ID NO: 72994 - protein, 89 aa, Gossypium hirsutum
  Clone ID: LIB3146-036-P1-K1-A4.pep
HASDRNDEDSRCSCNSTERSRARNRDREHGQDRVKTTVNQMLLDAKQLIDLIPMTKEELLSYEINWNVYDQHALYERMRPWISKKIMEF

SEQ ID NO: 72995 - protein, 111 aa, Gossypium hirsutum
  Clone ID: GOSHI-09MAY01-C51875_1.pep
NVSNTDRGLNIGSFLKNLSKFAVDSAINVSLKGFTGGKKLYQTFLQEKLKDEASNVKLMKEETQSTKMEDIANKAVGGTEPVKKKKMVPQDSKEMELEDPKRKTIFIRSRL

SEQ ID NO: 72996 - protein, 117 aa, Gossypium hirsutum
  Clone ID: GOSHI-09MAY01-C51585_1.pep
EAEEDDGEMYDEFGNLKKKFRAKTQQAEAARVLPRSGRAGWEVGELGVIDRDGRERSRDRGRERDDRESSKNREREDRERRRSRSRERDRGKDRSRDYDYERDRDYGRDRDRGRYFY

SEQ ID NO: 72997 - protein, 291 aa, Gossypium hirsutum
  Clone ID: GOSHI-09MAY01-C51505_1.pep
LSTSLVRYPEPDVYEENRKYSPRDHVSKRDLGYFNSDIRYNRYKDQQRPNSQSFKYQPGDSRGRAYRRASRSPEADTNPHCGRSIDSRKHRERRGASPLERSWKRERSPSKSTSQRYCHEDSSFGRSGSFRYQSGDDTGRNYHTVYQRPTDVDIPHDSRFIDSRKHRERSGSSHMERNWKMKRRSPSKPKHQSYFDKDSHSFRCQPGDSRTKSYDSNPHHGRSIDSKKHREKRGASPLEIGRSHKSRHLSAEDRKDGYRDNGDEKISEPTGGRSGCQSKPTVGETWEKTLY

SEQ ID NO: 72998 - protein, 62 aa, Gossypium hirsutum
  Clone ID: LIB3146-032-Q1-K1-F3.pep
KNMKAYNKRQAEGPKDEDVESDKSVSEVNDEDDDEENTILGTRKIKRHICASLCRFKATFRP

SEQ ID NO: 72999 - protein, 59 aa, Gossypium hirsutum
  Clone ID: GOSHI-09MAY01-C51485_1.pep
ETEDSFSALIFLLRQSCALASKLYLWVIVGLRPKHHHRGKKIENGKFILIVERDKFQKA

SEQ ID NO: 73000 - protein, 55 aa, Gossypium hirsutum
  Clone ID: GOSHI-09MAY01-C51795_1.pep
ALRFVVDNPGVWAFHCHIEPHLHMGMGVIFAQDAHRVGQIPKEALACGLTGNKQN

SEQ ID NO: 73001 - protein, 58 aa, Gossypium hirsutum
  Clone ID: LIB3829-003-Q6-N6-B10.pep
GWTALRFVADNPGVWAFHCHIEPHLHMGMGVIFAQGVHRVGQIPKEALACGLTGNKQN

SEQ ID NO: 73002 - protein, 568 aa, Gossypium hirsutum
  unsure (1)..(568): unsure at all Xaa locations
  Clone ID: GOSHI-09MAY01-C51195_1.pep
VKCLLELFRKCYSSPYPPIVHLGGMLGIVNAFGAGAGNLVDFHPFNSSVQTGYDQKEPSHISGPILVNPVCEDHSTSLMQEIFLVAQNPDDNQLQQYAAWAISFLRQRLWSREISNSAGGTQTESAGSKSISQGVPEDSAVMKLGLWLKSFXSFQGTSTHVCTVTAILRCLXLAPRLPTLDWGAIVRRCMRYAQVTQLPAPNITLKGGILREECLQFALVHAKQFDPPPAFLDELSDLSRFRTLEISLQSCLLNHLADLIKLFSGSRLEKLLDDVSNYFSSLTTDQVLKSEERSSLRSSCWKGLNQCLDEASLDSLEYIKNIGRCMEVLFSLLPLPQAPVIVQVNQLDSVEWSEAVRCLAKARPGWLLDFLHVSHPDSVTRDVQFVEVLKKIQAKAKLVRIGSIPLTELGKSKSYLLNSEPLGTWGVLLEVVATLQHVEGSVKRQWLVDAIEISCVSSYPSTAMQFIGLLSGSCCKYMPLLIADRSYVLNDIPVTLTSLLSDPNWEVVAESCTSYLLSSTERIYSWATKLSSKSGDNRSPSSESIDESEKGMAQXLLLVMHHACVCLK

SEQ ID NO: 73003 - protein, 103 aa, Gossypium hirsutum
  Clone ID: GOSHI-09MAY01-C51095_1.pep
PEFSFVASASSLLEKIVRFHILPRKLTYMELASLPANATLCTLAPDHDLEISKAVNITQELMINQVKIVAPNMFESKKFVIHGISQAFKLGELPNTFQMNAFL

SEQ ID NO: 73004 - protein, 189 aa, Gossypium hirsutum
  unsure (1)..(189): unsure at all Xaa locations
  Clone ID: GOSHI-09MAY01-C51085_1.pep
SDCLKYESYFSQPELIEFPTVVPGQNAYAYYYPPTNPLYQASLREKPPLLLKSHGGPTAETRGILNLSIQYWXTSPGWAFGDGNYGGSTGYRREFRERLLDRWGIVDVDDCCSCAKFLLENGKADKERLCITGGSAGGYTTLAALAFRDTFKAGASLYGVADLNLLKAETHKFESRYLDKLVGDDKAFF

SEQ ID NO: 73005 - protein, 109 aa, Gossypium hirsutum
  Clone ID: GOSHI-09MAY01-C51255_1.pep
DDIFSDSDGEESGASPSRPTQPAAGAGPTISSNLLNPAAEQKGTSKPSVKNQELSSNNSSKDIAINGVGKHSTGLELPSMELMGASDTRPIAADASVFSFGDDEDYDSE

SEQ ID NO: 73006 - protein, 159 aa, Gossypium hirsutum
  Clone ID: GOSHI-09MAY01-C51215_1.pep
FYFHSIQKKACDKFDPSFYPRFKKWCDDYFYIKHRGERRGLGGIFFDDLNDYDQEMLLSFATECANSVVPAYIPIIEKRKDTPFNESQKAWQQLRRGRYVEFNLVYDRGTTFGLKTGGRIESILVSLPLSARWEYDHKPEEGSEEWKLLDACINPKEWI

SEQ ID NO: 73007 - protein, 258 aa, Gossypium hirsutum
  Clone ID: GOSHI-09MAY01-C52965_1.pep
GKVGREKELEAALLCLRGDKADISDEAIEIKNHVESLKSSSRGGIVRIFQKKYVRPLLTVVGMMLLTNLGGINAFAYYSGAIFVSAGISSMVGLITLAATQTVVGILGTTIIDKLGRRPLLLVSSAGLCFSSFLTGVSFFLKDFNWWDQGSPILAFIGLWMYMGSYALGGGLPWLLLSELFPINVKGSAGSICNFMGNSTGWVVAYYFNFLTEWSSAGIFFISSAFSSANFILTATMVPETKGRTLEEIRASITHSSD

SEQ ID NO: 73008 - protein, 65 aa, Gossypium hirsutum
  Clone ID: GOSHI-09MAY01-C52905_1.pep
AQIRVIGSYGARARQDLPKLVKLAETGIFNLNNAVSRKYKFEEGNKAFQDLNQGRIVSRGVIEIM

SEQ ID NO: 73009 - protein, 109 aa, Gossypium hirsutum
  unsure (1)..(109): unsure at all Xaa locations
  Clone ID: GOSHI-09MAY01-C52925_1.pep
MAWIESFATVFNIGVAKALDIGLQMVYVGKNNARERVKKITGLIKENKLSHAWEXAMCGFFWNRLESMLFSKTHHGKAIENDVLKQEVMTLLAYDGSEKWMDSVLHWFI

SEQ ID NO: 73010 - protein, 198 aa, Gossypium hirsutum
  Clone ID: GOSHI-09MAY01-C52885_1.pep
MAPVPSLPIKVGHIDDVQELRKAKPATVPERFIRDMADRPKVVPNLSSSLDIPIIDLSKLMKTDKDEVMQLKTACEEWGFFQVLNHGIDLNVVEDIEKVAEDFFMLPLQEKQKYPMAPGTVQGYGQAFVFSENQKLDWCNMFALGVEPPCIRNPKLWPSKPVNFREALEIYSREVRKLCKTLLKYIAVSLGLKGVGEC

SEQ ID NO: 73011 - protein, 94 aa, Gossypium hirsutum
  Clone ID: GOSHI-09MAY01-C52845_1.pep
GISSYLNYESAVESADQQMSWVLFATPVVLILLARWLSSMEVSGMLFGSSPWERIRRTHHHPSEGTSPWVVAAFIVLLLVLLQYQSIFRESWMV

SEQ ID NO: 73012 - protein, 127 aa, Gossypium hirsutum
  Clone ID: GOSHI-09MAY01-C52515_1.pep
ICVNGGSDAEEINIHGLLESLNQRKDESKTIPTCISSVVTKLSANGIGTVFGRLFIGAAEKIPPSELVDTTGAGDAFIGAVVYALCAGMPPEKMLPFAAQVAASGCRALGARTGLPHRTDPRLATFL

SEQ ID NO: 73013 - protein, 61 aa, Gossypium hirsutum
  Clone ID: GOSHI-09MAY01-C52525_1.pep
KFFIVIYSPFLRFFFKLCSYIILYGVCSEKKIFFLSSFILIYLYSSLYYQTTSLIFSLKVL

SEQ ID NO: 73014 - protein, 91 aa, Gossypium hirsutum
  Clone ID: GOSHI-09MAY01-C52455_2.pep
YRGKEDSFSTGSSGTGSPQISTDEFRDQMKAQLAQAYAQEFLETVRGKCFEKCISKPGTSLSGSESSCISRCVDRYIEATGIVGRALFTSR

SEQ ID NO: 73015 - protein, 87 aa, Gossypium hirsutum
  Clone ID: GOSHI-09MAY01-C52455_1.pep
MDSFSTGSSGTGSPQISTDEFMDQMKAQLAQAYAQEFLETVRGKCFEKCISKPGSSLSGSESSCISRCVDRYIEATGIVGRALFTSR

SEQ ID NO: 73016 - protein, 155 aa, Gossypium hirsutum
  Clone ID: GOSHI-09MAY01-C52415_1.pep
MANSHQPFVALIVGVTGMAGLSLAEALKSPNALGGPWKVYGSASRPIPTWFPSSLLDKYIAFDATDAGNTADTLTPISSEVTHVFWVAIQVRESEQVTVTVNATMLSNVLDVLKSGPGGNGTGSRLSHVTGQTGTQHYMGPTLSDESARSRTMTT

SEQ ID NO: 73017 - protein, 156 aa, Gossypium hirsutum
  Clone ID: GOSHI-09MAY01-C52425_1.pep
QNYSSSAPYVGPGAPSSMYMGVPPYGSSLFNGPSIPPYEAPFSGGSAYHYNYGNRLPGGSPFQPLHMSGPPPYSSGSMIGNGIGGMYGMPPLMDRYGLGLPMGPPPMGPRPGFFPDDKSQKKGADATRDNDWTCPKCGNINFSFRTGCNMPECNTP

SEQ ID NO: 73018 - protein, 56 aa, Gossypium hirsutum
  unsure (1)..(56): unsure at all Xaa locations
  Clone ID: uC-gsronu33B089g02b1.pep
ILNTYQKYVWXXKKKKKKKKKKKTLKNKKKRKLIYKKVLFLILKGEPQHGYSGGLF

SEQ ID NO: 73019 - protein, 41 aa, Gossypium hirsutum
  Clone ID: LIB3146-048-Q1-K1-F4.pep
KKKYFFFYYFFYFFFIFFFFFFFFFFFFFFFFLVQNVQSSA

SEQ ID NO: 73020 - protein, 61 aa, Gossypium hirsutum
  Clone ID: GOSHI-09MAY01-C52725_1.pep
DEPDLSWVQSLVKESPTEIKDKIAAPVSGEGSSRNSDTVDNAMLGAWLEQMQLDQLVAQQN

SEQ ID NO: 73021 - protein, 127 aa, Gossypium hirsutum
  Clone ID: LIB3828-023-Q6-N6-H9.pep
PSRSVDTGSAPVFSEQPKLASLVKPADAEQLPPVQLDNPAGNYPPSSMFNQRHQFFEQQHGYTGSSSHSINGFDSSYDSLVGQTQNLSINSKIPTQEVNPEDAFFRDLLDFAKAMPSSPSKSNNKPC

SEQ ID NO: 73022 - protein, 54 aa, Gossypium hirsutum
  Clone ID: LIB3146-039-Q1-K1-B12.pep
LCKVFYIYMKYFTQLGNGKIHEHKKIQIASSIGEDQHGLLLDLDGEDGMAFTVS

SEQ ID NO: 73023 - protein, 146 aa, Gossypium hirsutum
  unsure (1)..(146): unsure at all Xaa locations
  Clone ID: LIB3146-038-P1-K1-C7.pep
FVEDPRDAEDAIRGRDGYKFNGNRLRVELAHGGRRPSSSVDRYSSYSGSSSRGPSRRSDYRVLVTGLPSSASWQNXKGMIGIVDYTNYDDMKYVIRKLDDSEFRNPFSQAYIRVEYDSRYDSRRSYFRSPSRSPYSRNPNLELNLS

SEQ ID NO: 73024 - protein, 68 aa, Gossypium hirsutum
  Clone ID: LIB3146-056-Q1-K1-H3.pep
IYASATLLDSVSNCLFFQVEYDSRYDSRRSYFRSPSRSPYSRNPNLELNLSILFQQLILPICKHILSL

SEQ ID NO: 73025 - protein, 182 aa, Gossypium hirsutum
  unsure (1)..(182): unsure at all Xaa locations
  Clone ID: GOSHI-09MAY01-C52245_1.pep
NKKEQLSFLCLFQAKIPPRRPHNATARTHSGVISELHTSPWHSPVPYLFGGLAAMLGLIAVALLVLACSYWKLLGYNENDGEGATARDLHAADGNRXAARPAMEPKALVIMAGDIKPTFLATPIGVNGSYYFGDNSEKRCCCSDQKGEEGKQDEKEVCRGGDGGGDGGAETTVTQQSSSDDH

SEQ ID NO: 73026 - protein, 379 aa, Gossypium hirsutum
  unsure (1)..(379): unsure at all Xaa locations
  Clone ID: GOSHI-09MAY01-C53805_1.pep
CFVQETDTSSSEDVVSARESLCSEGRSPDAEFSDEPSSILLAGDGSSRRITNADVSALNSESSDSDSSEDPEVIQGSPTLDGREDNDLDVASERNVPPSSTEGISKLRATEDFSTWQRIIRLDAVRANAEWMPYSTSQALVSDGRARRSAEAVGLKDYDLLEPCRIFHAARLVAILEAYALYHPVIGYCQGMSDLLSPIVSVIPDDYEAFWCLVGFIKKARPIFXLDEVGIRRQLNIVSKIIKCKDSHLYRHLEKLHAEDCFFVYRIVXVVLFRRELTFEQTMCLWEVMRADQATIRAGLSKSTWSRIRQKAPPTDDLLLYAIAASVLQRRKLIIEKYSSMDEILRECNSMAGQLDVWKLLNDAHDLVVTLHDKIESSF

SEQ ID NO: 73027 - protein, 158 aa, Gossypium hirsutum
  Clone ID: GOSHI-09MAY01-C53505_1.pep
MSVIRTSANMIMKQLLHHPPLSFISFSGRPLLPCSRNPLIRLTPNRGISCSPIRCAAPDADADRKVSARLSQMQQLLQEAEERASSAGNGPTPQITLDHVTVSFARSGGPGGQNVNKVNTKVDMRFNVKQAYWLSDRIRERIMQMEKNRINKDGEVVI

SEQ ID NO: 73028 - protein, 143 aa, Gossypium hirsutum
  Clone ID: GOSHI-09MAY01-C53495_1.pep
ESCVASIIGYLDPPQICKLAGLNRAFRAASWADFVWESKLPPNYETLVGEVLSFVPEKLGKRDIYTRLCRVNTFDGGTKKIWLDKSTGGVCMSISSKGLQITGIDDRRYWNHIPTEESRFGSIAYLQQIWWFEGDGEGGFSFS

SEQ ID NO: 73029 - protein, 334 aa, Gossypium hirsutum
  Clone ID: GOSHI-09MAY01-C53725_1.pep
MSHGACGIPPLLTGNKASHQSKDSHVKFSIKSFRIPELYIEVPESATVGSLKRTVMEAVTALLGGGIRVGVLLQGKKVRDDSRTLSQTGISCEENLDSLGFTLEPGPAKAPPPVCSEEPHLLMSCEKGPQQLTSLPATPVVDTAIPDATPDPLLLTDTAHPVDSNHEPVSSQTDVLTDQSLSESRAIVPVPAMNVEALAVIPASPKVRKTELAQRRTRRPFSVLEVEALVQAVEELGTGRWRDIKLRAFENADHRTYVDLKDKWKTLVHTAKISPQQRRGEPVPQELLDRVLAAHAYWSQHQAKQQGKQQPGTLRITDTEPDRNRLATVPTVPM

SEQ ID NO: 73030 - protein, 129 aa, Gossypium hirsutum
  unsure (1)..(129): unsure at all Xaa locations
  Clone ID: GOSHI-09MAY01-C53665_1.pep
MAGKAAQSVVKAVGEYQYPWREKLAKYKVELSKGVWGYWELGAWKPLGISARHRARLRKEMLLAGQDWPYDPEKKEMRSXMKGHKCDRIAAERREITANLMQKMPEMLLAYKKRRWEKKMKEEEKAKDK

SEQ ID NO: 73031 - protein, 58 aa, Gossypium hirsutum
  Clone ID: GOSHI-09MAY01-C53165_1.pep
YFVFAHSDLWLTKHTQRRVDYSENIHTLTHSLTSFKENGPMKPNTFHNPNSFTPFFII

SEQ ID NO: 73032 - protein, 128 aa, Gossypium hirsutum
  Clone ID: GOSHI-09MAY01-C53375_1.pep
AIFSKAYVEAATKMNMTRVETVAPFGLCFSSKGPLVPEIDLVLQSEMVKWRIQGRNSMVKVSEESMCLGFLDGGLEQSSPIVIGGLQMEDNLLEFDIGSSMLGFSSSLLLKETTCSSSLLDSTLKQFF

SEQ ID NO: 73033 - protein, 159 aa, Gossypium hirsutum
  Clone ID: GOSHI-09MAY01-C48965_1.pep
GLSVIFRVFFTMKRVREDREIEAMAMANCLMLLSKVGQFDPPKHNTIHQRGVFACKTCDKRFSSFQALGGHRASHKKPRFTDADLPASPKKPKTHECSICGLEFPIGQALGGHMRKHRVVSNEGMVVTRPVTGKLNGDDADNDGGLCLDLILAPCGIDL

SEQ ID NO: 73034 - protein, 229 aa, Gossypium hirsutum
  Clone ID: GOSHI-09MAY01-C48895_1.pep
LVFDVQLVLKSAMQFYGFSHEVRSEARIVHDLFFDLLKIVFSDNDFREARNALSFSSPVSTSTSGPSARQVAVIKRQKPINEVESDPDLTQKASQRGFPHAGEETRVRGHMPQKESRLGKGSGIIKEHQQDDSPLTHPGELVICKKKRKEREKSIAKPRSGSVGPVSPPRVRVQVSVSKDASLTQQSSHQQGLPNQPGHPSKGCGGSVGWANPVKKLRTDAPRSRPSLL

SEQ ID NO: 73035 - protein, 368 aa, Gossypium hirsutum
  unsure (1)..(368): unsure at all Xaa locations
  Clone ID: GOSHI-09MAY01-C48825_1.pep
TQLVLKAHKEAVNSLSGNGSAKLGTVATVVAAANSTARECSKEIEAAMQISLRNALGLVTNVPTDGPMDDLTIMKETLRVKDEELQNLARDLRARDSTIREIADKLSETAEAAESAASAAHIMDEQRRIACAVIERLTKDSENQKEAFMLKLRESEEKLGSLSKERDQLIRQRDTAMQEAHMWRTELAKARESAVILEAAVVRAEEKVRVAEMDAEARIKDAAQKEAAAVKEKQELLAYVNVLQAHLQRQQXDAKQIFEEKTESSNTSNSPPDTKNVDLSENVDKACLTVSRAVPVPGESVVRMAVDQVNIQPVGEGEWSDXIQATEARIADVREIAPETEGSSHDICVDNQAIDKHHEPGASSFRQP

SEQ ID NO: 73036 - protein, 281 aa, Gossypium hirsutum
  Clone ID: GOSHI-09MAY01-C48585_1.pep
PPPAPAQNQHPPSQYLTSDPQYRPPQIQVFSRMPTQPTQARGYQVQSFPQYQQQWPQQLSQQVQPQQQSSMQPQMRAPSTPAYSPYPPTQSTNQSQPEALPNSMAMQVSYSGLPQPVSSRADTITYGYGVPGRTAPQQPPQQIKGTFGAQPTDRYTGPGSNPTFPPGSAYMVYDSEGGRTHHPSQQPNFTQGGYPPAANVSLQTQPGAGPNVMVRNTNHPQFVRNHPYSELIEKLVSMGFSGDHVASVIQRGGESGQPPDFNAVLDRLNAHSSGGSQRGGW

SEQ ID NO: 73037 - protein, 58 aa, Gossypium hirsutum
  Clone ID: GOSHI-09MAY01-C48525_1.pep
QRNVQWWGKALARSFPWDFFPRQERSERKERKAVVRAVSGLVRKVIRLSPLLVPSLHT

SEQ ID NO: 73038 - protein, 101 aa, Gossypium hirsutum
  Clone ID: GOSHI-09MAY01-C48485_2.pep
SGDIKSGFNGVPVFLARPLVVRKKTNRSCPLYFIKEDFEKDLSKVSRPSRGPGVSHQIMVGSLEDVLKKMEMTEKNSGWEDLIFIPPGKSYSQHLQDVVKV

SEQ ID NO: 73039 - protein, 241 aa, Gossypium hirsutum
  Clone ID: GOSHI-09MAY01-C48485_1.pep
MEFPKPPPFPSNPLLSLSTFIHRLGAELATRLHHTNRLASNFAAGFSPSATSHHRPLFASVSQPKAAVAAAATLNPEQVAKTLAGTAVYTVSNSNNEFVLISDPNGAKSIGLLCFRQEDAEAFLAQVRLRRRELRSNAKVVPITLDQVYSLKVEGIAFRFLPDPIQIKNALELKSGDIKSGFDGVPVFQSDLLVVRKKNKRYCPIYFNKEDIEKELSKVSRASRGPGQVGSLEDVLEKMEM

SEQ ID NO: 73040 - protein, 406 aa, Gossypium hirsutum
  Clone ID: GOSHI-09MAY01-C48725_1.pep
MFLVKPFYLELNLLLHQIEHMWLRNTFFFSPIIFLLLINTSANNHMFCLCILFVLYQEMVIKDYQNFKFQQPYQQAMYYCSLILKDQTRSWVERLDVLPHLNVEDLTKFAPMMLSQAFLERSRAGNIEREEAETMVQHVEDVFFKGPNPICRPLFPSQFLTNRVVKLERGMNYCYSKEGLNPSDENSALVHYIQVHQDDFILNVKLQLFALVAKQPAFHQLRSVEQLGYITVLMQRNDSGICGVQFIIQSTVKGPAHIDSRVEAFLKMFESKLYEMTNDEFKSNVNALIDMKLEKHKNLREESRFYWREITDGTLKFDRREAEVAALKKLTQQELIEFFNENVKVGATRKKTLSVQVHGNQHLAEYHSQKSEAVKPNTIQIDDIFSFRRSQPLYGSFRGGIGHVKL

SEQ ID NO: 73041 - protein, 68 aa, Gossypium hirsutum
  Clone ID: GOSHI-09MAY01-C48185_1.pep
IALGSHGICSQKAMSELVKNNTSYRLPLRGHPIKLERKNGYPLMLDEYALIVQTNYVNNGYTPKYKLG

SEQ ID NO: 73042 - protein, 117 aa, Gossypium hirsutum
  unsure (1)..(117): unsure at all Xaa locations
  Clone ID: GOSHI-09MAY01-C48385_1.pep
EKLKRTVNYPLKAPPLANGVGSFKNGIILNLLGMGALFLXMQATVGLLLSKALTSSTTPYYQGIAPGSGPVLALDVFLVQASANTILSHFLGLVFSLELLRSVTLPNTQSIPIPKLA

SEQ ID NO: 73043 - protein, 250 aa, Gossypium hirsutum
  unsure (1)..(250): unsure at all Xaa locations
  Clone ID: GOSHI-09MAY01-C48235_1.pep
MEKELDGLGYLPLRIILSKLSPSDIIKVSCANKRLRGSASDDSLWAQICYQELQLSTPQDDHGNPLPCFMLAYQLWREAFSMYPWPLVKRVKRCWDKLKKWFNNNFPEAEATLRRGASESDIEQLQTLLKVKLPLPTRLLYRFHDGQELPDIMNPKTASSSWLGIIGGYSFYQNSVNVYLLPLHQVIAKTXYVIRYLGFSSRSKCIIVASSFASSRKLFFLNCTNGQLFVSTRKPLTDNEMIPCVRIHLF

SEQ ID NO: 73044 - protein, 192 aa, Gossypium hirsutum
  Clone ID: GOSHI-09MAY01-C49945_1.pep
PHSRSTPRPPTSATVDLSSGDIQQIQGLSKYTCRLTRRRKVGSSEAALLAKLGIRPFSYGLVVLSVYDNGSVFSPEVLDLTEEDLIEKFATGVSMVTALSLAISYPTLAAAPHMFINAYKNVLSVAVATEYSFPHADKVKEYLADPSKFAVAVPAVATDAGAAPAAAAAAAEEKKPEPEEESDDDMGFSLFD

SEQ ID NO: 73045 - protein, 110 aa, Gossypium hirsutum
  unsure (1)..(110): unsure at all Xaa locations
  Clone ID: LIB3149-047-Q1-K1-C5.pep
TCFFQVLNIPTKINKGTVXRITPVELMEKGVKVGSSEAALLAKLGIKPFSYGLVVLSAYDNGSVFSPEVLDLTDEDLIEKFATGVSMVTALSLAISYPTLAASPHMFINA

SEQ ID NO: 73046 - protein, 178 aa, Gossypium hirsutum
  Clone ID: GOSHI-09MAY01-C49865_1.pep
WNFKPQSLSPFCLAFSFVFTKMEIFKTPNPCLLLCLVVLCFTIPIALTKAEATTTSLPENEANNAEPVSNNAPFAKLVGNNGKQSQLGYQQQKDPNYPQQGINQPLSSGLNQPYSATNQPYSAGFNQPFSSISQPFGGTNQRGSMENVAFENGVKKEKTGIPSVALVCLFTLMVCFGF

SEQ ID NO: 73047 - protein, 80 aa, Gossypium hirsutum
  Clone ID: GOSHI-09MAY01-C49545_1.pep
QVPAWDPNFQARLPYGSVPGQTYQSLTAPTYVNAARPAGSSPLSQPGASSMPMQQQQQPPWANVRQGGAAVLGRPPYYSR

SEQ ID NO: 73048 - protein, 56 aa, Gossypium hirsutum
  Clone ID: LIB3146-043-Q1-K1-H4.pep
SVASPSFLYGARTGRSLTLSQPGAFFIPIPQQQQPAWAYGRQGSATELGQPSYYNR

SEQ ID NO: 73049 - protein, 87 aa, Gossypium hirsutum
  Clone ID: GOSHI-09MAY01-C49575_1.pep
FAKRNKNRQKILTGELQGGVWSSLLKVEILFISSKICCSIQSLSFSDVWWENPVLKETTELLLIESSLMVMMMLMMIKWTVGMMTDR

SEQ ID NO: 73050 - protein, 212 aa, Gossypium hirsutum
  unsure (1)..(212): unsure at all Xaa locations
  Clone ID: GOSHI-09MAY01-C49535_1.pep
TSAACHVDDEKGLLTFKSGITQDPSGMLSSWKSGTDCCNWAGINCRENNRVTTISLYGQVDKPDSYLTGTISSSPVNVQNLDGIYWVDLRNISGPFPDLLFRLPKLLYAYIENSKLSGSLPVNIGXLKQLXEALSLEGNSVXTGSIPSSISELTQLTLLVLGKNEFSGHFPAGIKQIRNLSSRCFQPSEGTFGFSNLKDLILTSQGILESLL

SEQ ID NO: 73051 - protein, 345 aa, Gossypium hirsutum
  Clone ID: GOSHI-09MAY01-C49415_1.pep
STPLLLPPFGTGTLNLQSSPPPPQSSNVASDSLTSLNQDRASALTLPTAAPSSSLPLVPPSSTALDKTAVVLPFSEKTKTVPDPVMPFKGMPDSASSTIGTTSSVLNDGMLPSLVTPGQLLQPGLVPASLPMSSQTAQKDVEVVHVSSPELTTSAPALAPGPAKASQPVLAQAPQSLSAQAAPPLLAQAPPQPSKTEGQEPILPSPSPSDHKLHGAPMHAHQYHNYRGGRERGRGRGRGRGNEISRSATKFTEEFDFTAMNEKFNKDEVWGHLGRSSRAKEDADDLQNEDSVESSQVEVKPVYVKDDFFDSLSCDSLGGGSRNGRTRFSEQMRRDTETFGDFPRH

SEQ ID NO: 73052 - protein, 117 aa, Gossypium hirsutum
  Clone ID: GOSHI-09MAY01-C49435_1.pep
FHSLLFFRFNTIFASPIRLFEFFFFQKMVQGFMEKLEWASSYGKKQCRNLFWKMKAALKRRSKRQFKFHYDPSSYALNFDDGYCHCGVGTSTVQLARLQGFSECENVIWGYVFGIKL

SEQ ID NO: 73053 - protein, 214 aa, Gossypium hirsutum
  Clone ID: GOSHI-09MAY01-C49425_1.pep
VSTSSSTSQLLQDFLPNFHSRKLLLHYTQSNQSSAPPPYPQNSSFDHNVLMVLSIILFGLIFSLGINLIMIRCVLRGSNGVDSDSIRNPSAAIVNSGIETKAIKTFPVVNYSAQMNLPGQDSECLICLSEFTAGERLRFLPKCSHGFHVRCVDKWLKSHTSCPKCRHCLLETCQKIMGFDQSSSPESCVPAQDIIVHIQSLEPEGVARDIRGVS

SEQ ID NO: 73054 - protein, 63 aa, Gossypium hirsutum
  Clone ID: GOSHI-09MAY01-C49615_1.pep
KIFFFISISKKLSFIFFVQKKNKKFCFSLIFFFFFFLYFFFFHTKVKTHSLKSYEFHYIRKSG

SEQ ID NO: 73055 - protein, 286 aa, Gossypium hirsutum
  unsure (1)..(286): unsure at all Xaa locations
  Clone ID: GOSHI-09MAY01-C49135_1.pep
HASGTLFQNFTHDYNSEDASGFFVSLLFGLGPLLGGLILVAFAVAFCLKHALLMGAASGXAFILGAWRPLQLLVFSKMGFFPLVSLLAIGAAFVHVSSSSILKIMCNKRASSNNLPSVTGFPVSVLTLQSVLACGTVAFYALAEGLALGVAAXPEAYGLGRHMVVPVSLHGIPRGAAVASCIFGATESWHGSLAAAALIAFVGPISAIGAILAGIDYSGLDHVLVLACGGLIPCFVRIVERAIRFDVRKTSCGVAIGIGFASLCLTCTKLVCLHTPYCDSAPEAVR

SEQ ID NO: 73056 - protein, 219 aa, Gossypium hirsutum
  Clone ID: GOSHI-09MAY01-C49005_1.pep
HDVEYEHHDDADRKLHALGFNEEAENMIQKVKKALDNGEGCRVYGVLDVQRVAGNFHISVHGLNIYVAQMIFGGATHVNVSHMIHDLSFGPKYPGLHNPLDGTVRILHETSGTFKYYIKIVPTEYRYIWKEVLPTNQFSVSEYFSPMKEYDRSWPAVYFLYDLSPITVTIKEERRSFLHFITRLCAVLGGTFALTGMLDRWMYRLIEEVTKASGARAYR

SEQ ID NO: 73057 - protein, 103 aa, Gossypium hirsutum
  unsure (1)..(103): unsure at all Xaa locations
  Clone ID: GOSHI-09MAY01-C49305_1.pep
RSQQRRLFDMGKTDRSFWLMKCPVVVAKSWKSQLASSSSSSSSSSSDSQPLAKVVFSLXPLKPDDPSLHQFTMEVAGLETERIPKSYSLNMFKDFVPMCVFSE

SEQ ID NO: 73058 - protein, 194 aa, Gossypium hirsutum
  Clone ID: GOSHI-09MAY01-C49285_3.pep
GTCQVVHPSADQSNLASILELSQDMVKDQTYFLSHLSQFQLKQLIFPLGCLSKDEVRQLAAKFDLPNKGRKDSQGICFLGKIRFSDFVARHIGEMEGIILEAETGDFLGKHRGFWFYTIGQRQGLRLPGGPWYVVQKDVKNNAVFVSRYYFSLDKRRRVFRVGSLRWFSGSPPNHIDQLQCKVRHGPGFYNCNF

SEQ ID NO: 73059 - protein, 105 aa, Gossypium hirsutum
  Clone ID: GOSHI-09MAY01-C49285_2.pep
IGAFMDAIYNMDYDYFASGHYANVVHPSADQSNKASILELSQDMVKDQTYFLSHLSQFQLKQLIFPLGCLSKDEVRQLAAKFDLPNKGRKDSQGICFLGKVYNES

SEQ ID NO: 73060 - protein, 211 aa, Gossypium hirsutum
  Clone ID: GOSHI-09MAY01-C49285_1.pep
SRQLAAKFDLPNKERFSDFVARHIGEMEGIILEAETGDFLGKHRGFWFYTIGQRQGLRLPGGGGYVVQKDVKNNVVFVSRNYFSLDKRRRVFRVGSLKWFSGSPPNHIDQLQCKVRHGPGFYNCNFKMEHGEDGNDDIAVAQLSEDDQGLAAGQFAAFYERQTCLGSGVILESWDDRGFPVCAKALEIARMEDKSELGKPVKVMTKPGTLA

SEQ ID NO: 73061 - protein, 147 aa, Gossypium hirsutum
  unsure (1)..(147): unsure at all Xaa locations
  Clone ID: LIB3583-020-P1-K1-E9.pep
IRFSDFVARHIGEMEGIILEAETGDFLGKHRGFWFYTIGQRQGLRLPGGPWYAIXTIELSYQYVVQKDVKNNVVFVSRNYFSLDKRRRVFRVGSLKWFSGSPPNHIDQLQCKVRHGPGFYNCNFKMEHGEDGNDDIAVVQLYEDDQG

SEQ ID NO: 73062 - protein, 106 aa, Gossypium hirsutum
  Clone ID: GOSHI-09MAY01-C44885_1.pep
MAAAVIKKFFIASMFMWIAPLAILYGFNHNLLPGSTNLSPHALTLVSGFVAVISVNIVIAFYIYMAMKEPVDKHEPDPKFLADAKASVSQPTGEAPTSSESIKKRE

SEQ ID NO: 73063 - protein, 112 aa, Gossypium hirsutum
  unsure (1)..(112): unsure at all Xaa locations
  Clone ID: AW186685.1.pep
MFLPLSFRLNMAAAVIKKFFIASMFMWIAPLAILYGFNHNLLPGSTNLSPHAMTLVSGFVAVISVNILIAFYIYMAMKEPVDXHEPDPKFLADAKASVSQPTGESPTSSESI

SEQ ID NO: 73064 - protein, 154 aa, Gossypium hirsutum
  Clone ID: GOSHI-09MAY01-C44585_1.pep
TTRKWYLNILEADKVQPPKKTEEGKLYTPAAVDLFRILGEQVQIVRDNSTDAMLYRIALAIIQVMIDFQAAEKQRLEEPASDIGLEPLCAMINNNLRCYDLALELSNSIIEALPQNYADQVNFEDTCKGFLEVAKEAVRQTVNVIFEDPGVQEL

SEQ ID NO: 73065 - protein, 79 aa, Gossypium hirsutum
  Clone ID: GOSHI-09MAY01-C44505_1.pep
GAPGAAGLESLMNMFGGLGAGSLSVPNQPDVPPEELYAPQLSQLQEMGFYDTVENIRALRATAGNVHAAVERLLGNPGQ

SEQ ID NO: 73066 - protein, 124 aa, Gossypium hirsutum
  unsure (1)..(124): unsure at all Xaa locations
  Clone ID: GOSHI-09MAY01-C44665_1.pep
LPREIAKQAPVYFKKAIDEAEDEWSQPNAKKLIDTSEKGLHGSIPKNFPYFHVEFGLNKGFVHVIDDESQFKSSLGLNVIRGMLQLPAEVMYPRRRHQSVEEQKXAVASLVRDWEAFDWTKQLD

SEQ ID NO: 73067 - protein, 249 aa, Gossypium hirsutum
  unsure (1)..(249): unsure at all Xaa locations
  Clone ID: GOSHI-09MAY01-C44145_1.pep
AFAQRPGNSGGACSAEKKLEXLQERGQIXEKPFQRKQMKIRFPERGRSGRSVVTIKNLEFGXREELLVDRASLSIERGEKIAIIGPNGCGKSTLLKLIMGLENPSGGEVLLGEHNVLPNYFEQNQAEALDLDKTVLQTVEDVAEDWRIDDIKGLLGRCNFKADMLDRKVSLLSGGEKARLAFCKFMVKPSTLLVLDEPTNHLDIPSKEMLEEAIREYSGTVITVSHDRFFIKQIVNRVVESKDGHLQDY

SEQ ID NO: 73068 - protein, 143 aa, Gossypium hirsutum
  Clone ID: GOSHI-09MAY01-C44165_1.pep
APLWAALLPHVPRVHRPRLASRPDPSACPCTNPSHHFCLDQQTKQENSRETSKVKKENSKQQIEEGSKINRGNRLYLGDFWKTKKMVFSHAYEKSKAKTKKKRLFLDSMLFSFFFLSIFFLIFGFKSILKEINKKKRGTYLGV

SEQ ID NO: 73069 - protein, 80 aa, Gossypium hirsutum
  Clone ID: GOSHI-09MAY01-C44055_1.pep
MGCFAGCFSGFDGGNKEQRQEQDRLASAEARAKAAEAAQKRQEQFEQSAAGRAARAQVQAAAKQSANSNKGEPVLKWQLG

SEQ ID NO: 73070 - protein, 144 aa, Gossypium hirsutum
  Clone ID: GOSHI-09MAY01-C44295_1.pep
SMDGARDSEIAMGAYQPYHLSIRQPARGQVHGFRLALWYEHLGILHDGFLTPESKECVKKVNQMADKYWDLFSKDDLDQDLPGHLLSYPIAISNDGNVSELPNFENFPDTKARILGAKSDYLPPVRDHLMNGTMYRIKTRTTHG

SEQ ID NO: 73071 - protein, 48 aa, Gossypium hirsutum
  Clone ID: GOSHI-09MAY01-C44225_1.pep
QSPSSKFWAPLVKEMMEKIISCKLIFLITYNLNCRRFILTNIFQKIYS

SEQ ID NO: 73072 - protein, 175 aa, Gossypium hirsutum
  Clone ID: LIB3829-001-Q1-K6-G1.pep
AMSTTPPSTAPNGRSRVFSESDEIQILKCLIRATKSIPPPITTVGTSTINRIIKRLDHRFTVSQITDKIRRLRDKHHNHARNRALVRNHHDRRIFKLSKRIWGKKATPRKKNSKSEDQGAIEMGGDGVEKLDKFPYLVAEFSKVLPENEVWKQKMKRVEEEKLRKMDQEWVMLKV

SEQ ID NO: 73073 - protein, 79 aa, Gossypium hirsutum
  Clone ID: LIB3148-045-Q1-K1-E6.pep
TDKIRMLRDMHHNHARNRAGVRNHHDRRIFKLSKRIWGKKATPRKKNSKSEDQGAIEMGGDGVLWSSASFIVNRNNLLD

SEQ ID NO: 73074 - protein, 66 aa, Gossypium hirsutum
  Clone ID: GOSHI-09MAY01-C45555_1.pep
CLLPFVLKRQCYVVYFLFCFSPCSCLGPVLLFSIIVFSFYFFIFIYILFFLIIFFLFFFSYIFFYI

SEQ ID NO: 73075 - protein, 87 aa, Gossypium hirsutum
  Clone ID: LIB3196-059-P1-M1-C4.pep
AEAEKNNKASDGSPKSEPLAGRVLSLSDILYRTEGNSDASQDGPRSDREDSDYDEELELDFETSISGDEGHDVESNMLHGRLNLRIH

SEQ ID NO: 73076 - protein, 98 aa, Gossypium hirsutum
  Clone ID: LIB3148-041-Q1-K1-F5.pep
KHKEALNFAVAAQCVSPFDTMAAEKVENLKKQLAVAEAEKNNKASDGSPKSEPRAGRVLSLSDILYRTEGNSDASQDGPRSDREDSDYDEELELDFET

SEQ ID NO: 73077 - protein, 104 aa, Gossypium hirsutum
  unsure (1)..(104): unsure at all Xaa locations
  Clone ID: AW187415.1.pep
NSSVVLHDFLKVARPIWCSAIKDILEGYAKEPSDTNXAKIARLTRMGSFKGSTPLSCGKDLIDRCLASWLTAEEQQNDEFEAIRLKLSHATINLSGVQVPIETK

SEQ ID NO: 73078 - protein, 74 aa, Gossypium hirsutum
  Clone ID: LIB3148-040-Q1-K1-G6.pep
EPSDTNLAKIARFTRMGSFKGTCPSSCGKDLIDRCLASWLTAEERQNDEFEAIRLKLSHATINLSGVQVPIETK

SEQ ID NO: 73079 - protein, 105 aa, Gossypium hirsutum
  Clone ID: LIB3828-032-Q6-N6-G10.pep
KKVEQFHPLDKTGVDESCIIVNEAELHCHPHRQGKHSPYQKKIRDAISSRMRSARKMEYKQLAKWYGDVGKCDEDSKGSSMSAQTREATRRSSTQDLLDSEWELL

SEQ ID NO: 73080 - protein, 101 aa, Gossypium hirsutum
  Clone ID: LIB3148-039-Q1-K1-H1.pep
DSSGSAVGRKDSGTVPPLDKTGVDESCIIVNEAELHCHPHRQGKHRPYQKKIRDAISSRMRSARKMEYKQLAKWYGDVGKCDEDSKGSSMSAQTREVTRRS

SEQ ID NO: 73081 - protein, 98 aa, Gossypium hirsutum
  Clone ID: GOSHI-09MAY01-C45415_1.pep
SSPSASKYGEDYSNCCQGTAFFPLQSCMNHSCCPNAKAFKREEDRDGQATIIALRPICNGEEVTISYIDEDLPFEERQALLADYGFRCRCPRCLDEEP

SEQ ID NO: 73082 - protein, 142 aa, Gossypium hirsutum
  Clone ID: GOSHI-09MAY01-C45435_1.pep
ESINHLHWLFNDINPAKSSCKAWNDACDAKFQRYWALVIGTPKENEGLIRSPLSKILLHDGKTERVILAQNVGLEPSQEAVTEYRVLGPMINGCSWVELRPLTSRKHQLRVHCAEALGTPIGGDYKYGWFGHPKWKQMPRVD

SEQ ID NO: 73083 - protein, 50 aa, Gossypium hirsutum
  Clone ID: GOSHI-09MAY01-C45685_1.pep
GEGFIEINSWVPSESLPQWNLLARKQLGNFVYNCAVMDAREIDFGGISCG

SEQ ID NO: 73084 - protein, 59 aa, Gossypium hirsutum
  Clone ID: LIB3148-054-Q1-K1-C5.pep
KGPPRKNLKRKWLICKNLKIFYKVESIVIKVIIVVVFNFHFFFFFFFFFFFFFFFFFFF

SEQ ID NO: 73085 - protein, 61 aa, Gossypium hirsutum
  Clone ID: LIB3146-001-P1-K2-E1.pep
QPPELISSLEDNSKKIKEEETHMTSSVFLKSFQPTFSTIMTQSTTEHLKNENHSTLDCREC

SEQ ID NO: 73086 - protein, 283 aa, Gossypium hirsutum
  Clone ID: GOSHI-09MAY01-C45605_1.pep
PGFDPRRPDVSCPSMGTNAQTMAWILDEYSKFHGHSPAVVTGKPIDLGGSLGREAATGRGVVYATEALLAEYWKAVKGLTFIIQGFGNVGSWVARLIHERGGKVIAVSDVTGAVKNQNGIDIPQLLKHKEATGSLTGFSGGDSLDPSELLVHECDVLVPCALGGVLNRENAAHVKAKFIIEAANHPTDPEADEILSKKGVIILPDIYANAGGVTVSYFEWVQNIQGFMWDEEKVNQELKKYMTKAFHNIKNMCQSHDCNLRMGAFTLGVNRVARATILRGWEA

SEQ ID NO: 73087 - protein, 81 aa, Gossypium hirsutum
  unsure (1)..(81): unsure at all Xaa locations
  Clone ID: LIB3825-028-Q6-N6-G8.pep
YPIXYANAGGVTVSYFEWVQNIQGFMWDEEKVNQELKKYMTKAFHNIKNMCQSHDCNLRMGAFTLGVNRVARATILRGWEA

SEQ ID NO: 73088 - protein, 192 aa, Gossypium hirsutum
  Clone ID: GOSHI-09MAY01-C45385_1.pep
SVMTMLIDAESQQQALMVEAPSSANLVSQQSVDSPTERSTPVYRPSTSRGRGRGRSSSMRFQCQLYGKIGHLVDRCYYRFDSSYKSTNYRPHPQANVCMAAPPMVPYSNWTYQVTHPSSWPNSFVGNPVQQVPSMAVSAPQPHAMVTTPDTVGDAAWYPDSGVTHHLTHSVESLGDNTSRHGPVHQKQSSDV

SEQ ID NO: 73089 - protein, 70 aa, Gossypium hirsutum
  Clone ID: GOSHI-09MAY01-C45355_3.pep
TRSDSDSDGAKQVTMAPTLVYGREGAHVRSCGRVQAEGVVPGGGVARLGGATRVRGKPGSVAALEAYPSC

SEQ ID NO: 73090 - protein, 90 aa, Gossypium hirsutum
  Clone ID: GOSHI-09MAY01-C45355_2.pep
DAWAENKSPPPFAPFCGAVVRKGNLNPCSKSDYDGEKQGPANRYGCMRACVRRGPWWWRGSARRRYTRADATRARGKPGSVAALEAYLSC

SEQ ID NO: 73091 - protein, 103 aa, Gossypium hirsutum
  unsure (1)..(103): unsure at all Xaa locations
  Clone ID: LIB3493-016-P1-M1-B6.pep
ILAQNPITTERSKVRLTGSFLFLPSFSLYMYSMRLRAKQRRKKNHWKRKAKRKKKTFFSKFXTDPLFGVSYKKFSPLQIFDMALYCKKKKEKKCPPNPFLHXS

SEQ ID NO: 73092 - protein, 46 aa, Gossypium hirsutum
  Clone ID: GOSHI-09MAY01-C45315_1.pep
EFHTFEGHICITMSRCVRILDISTNNNSQSHKFDTSRIEKKSGGLG

SEQ ID NO: 73093 - protein, 79 aa, Gossypium hirsutum
  Clone ID: GOSHI-09MAY01-C45305_1.pep
REMPLFEQNQYATLEHQKYSQQVRKIDPRIVLFRNIHTASTQHHTTLFCSLALRRWTHDKSKDPCPSLIAYSNFLYIKN

SEQ ID NO: 73094 - protein, 63 aa, Gossypium hirsutum
  Clone ID: LIB3083-062-Q1-L1-E2.pep
FSSKMTFFLNCSVSVPSLNGVPIFFQLQLFLKSWVTTNLIFSPLVFLIFSPVACDLYAKAPKN

SEQ ID NO: 73095 - protein, 140 aa, Gossypium hirsutum
  unsure (1)..(140): unsure at all Xaa locations
  Clone ID: GOSHI-09MAY01-C46995_1.pep
MVSFEMNDRKKXGLGLTGFGIFFSFLGIIFFFDKGLLAMGNILFISGVTLTIGLKSTMQFFMKPQNFKGTISFGVGFFFVGVGWPIFGMILETYGFVVLFSGFWPTLAAFLQRIPILGWLFQQPYIRSLLDRYTGRRVPV

SEQ ID NO: 73096 - protein, 147 aa, Gossypium hirsutum
  Clone ID: GOSHI-09MAY01-C46805_1.pep
VGSNRRTLVQVLTEPKNALGTQYKKMFQINGVKLHITENALKLIARKAINKNTGARGLRAILENILMDAMYEIPDVRTGDDVIDAVVVDEEAIGSEDHRQGAKILYGKGALDRYLSQQKLRDLETTVDGLDGELEVEAELRSVVASM

SEQ ID NO: 73097 - protein, 110 aa, Gossypium hirsutum
  unsure (1)..(110): unsure at all Xaa locations
  Clone ID: GOSHI-09MAY01-C46595_2.pep
MGRGKFKAKPTGQRHFSTPEEMLAGTSSRPRTFKRQEAAYKEEEESEEVSGQESGEESEDETEQKRKGTQGVIEVNNPNLVKPKNFNARDLEACXTTELVMCERDELENY

SEQ ID NO: 73098 - protein, 161 aa, Gossypium hirsutum
  Clone ID: GOSHI-09MAY01-C46595_1.pep
MGRGECLAKPTGQRHFATPEEMLAGTSSRPRTWKRQEAAYKEEEESAEESGQESGEESEDETEQKRKGTQGVIEVNNPNLVKPKNLKARDLDAGKTTELSRREREELEKQRAHERYMRLQEQGKTEHARKDLERLALIRQQREEAAKKREEENAAREQDEG

SEQ ID NO: 73099 - protein, 79 aa, Gossypium hirsutum
  unsure (1)..(79): unsure at all Xaa locations
  Clone ID: GOSHI-09MAY01-C46585_1.pep
RDLVDDVITVYDTEIIKAMRLCYEILKVAVEPSGAIGLAAVLSDSFRTNPAWKDCNQIGIILSGGNVDLGSXLWNSFSK

SEQ ID NO: 73100 - protein, 98 aa, Gossypium hirsutum
  Clone ID: GOSHI-09MAY01-C46465_1.pep
GKRGRVYKHRHNPKHAQFSQQTLAVNMQNSKFLRHFLSGLSSTSKILAKVVVELKSAGRVTSSLRAALAVGGMVAARTTAIIAKTKVNFFQNSILNFE

SEQ ID NO: 73101 - protein, 82 aa, Gossypium hirsutum
  Clone ID: GOSHI-09MAY01-C46645_2.pep
FHLFIPIVSFMASAAPCAKASICCPAWCIESICRLCSSPSHVLPSDWSSPELGPEPGQLGSYCYGIGTFFLYNAKKNTEIEK

SEQ ID NO: 73102 - protein, 66 aa, Gossypium hirsutum
  Clone ID: GOSHI-09MAY01-C46645_1.pep
MNQSQFSSHQAGQKMGQAQEKTSQMADKARETAQSAMDSMQQAGQQMQAKAQGATDAIKDTMGMNK

SEQ ID NO: 73103 - protein, 60 aa, Gossypium hirsutum
  Clone ID: LIB3543-028-Q1-K6-D8.pep
VSQLPNKKETVYGALDKWVAWETEFPLIAAVKALQIFKKRSQWLRVIQVYSVYWYSYFVF

SEQ ID NO: 73104 - protein, 51 aa, Gossypium hirsutum
  Clone ID: LIB3148-049-Q1-K1-H10.pep
GKGRKVEELLKRCPNLKKIIIFRVISKAKPHKECQGSVCSIHCWSFSYCCN

SEQ ID NO: 73105 - protein, 62 aa, Gossypium hirsutum
  Clone ID: GOSHI-09MAY01-C46125_1.pep
MAMVPMVLPDGRIGYVLQQPGVQMPTPRPRRVDRGNGPGGGAGRSGNSGGVEGNRSRRYRPY

SEQ ID NO: 73106 - protein, 191 aa, Gossypium hirsutum
  unsure (1)..(191): unsure at all Xaa locations
  Clone ID: GOSHI-09MAY01-C46025_1.pep
MADWTKKTMRRNEALQKYIYETSAYPKELEQLKELREATVQKYNDLSVMNVPVDEAQFLTMLLKLMNAKKTLEIGVFTGYSLLTTALTLPEDGKVIAIDPDKEAYEGEEGSFDFVFVDAYKSDYLKFHELTLKLVKVGGIVAYDNTLWYGSVAQSEKEVVEDXLRRYRNFVIEFNSFIAADLRVEVKKLSI

SEQ ID NO: 73107 - protein, 55 aa, Gossypium hirsutum
  Clone ID: uC-gsronu33B086d08b1.pep
SSRPGSFDFVFVDAYKSDYLIFYELTLKLVKVEGIVALLKHIFFCFYYFIYYYII

SEQ ID NO: 73108 - protein, 86 aa, Gossypium hirsutum
  Clone ID: GOSHI-09MAY01-C46395_1.pep
PKEHQNFRNPNSPCLSVAAAGAATAPSRCARRSRTSRPSPPRISRLPRTQYLSLESPSCCRLRRDWGSGIRLNGGHLGVEETLRKQ

SEQ ID NO: 73109 - protein, 115 aa, Gossypium hirsutum
  Clone ID: GOSHI-09MAY01-C46255_1.pep
ENQKPQSHQNLPSSPNKSIPEIESNAASDFSGHQRVRFPNPPDLTNPDPSTLRDQWRYAIRQYSRWYSHAWGTAILAGVSFFALGWVIKGSNPLPSFNSDTNKNDSDTNKNDNSK

SEQ ID NO: 73110 - protein, 155 aa, Gossypium hirsutum
  Clone ID: GOSHI-09MAY01-C46235_1.pep
DLLRPLRDLNDGPNLCIYLESAFYTLRKPVASTINTLAGALYKVFSASPDQARKEMRQACFDYLSLGGVFSTGPISLLSGLNPRPLSLVMHFFAAATYGIGRLLVPFPSPKRIWIGARLITGASGIIFPIIKSEGVRQMFFPATVPAYYRAPPLK

SEQ ID NO: 73111 - protein, 112 aa, Gossypium hirsutum
  Clone ID: GOSHI-09MAY01-C47915_1.pep
MSAMETKPSSKIPLFFPILFLLLSTLTQPPLSSSIDTIIINGKDPSISLRRRILLASQRNNKMNHIPNCGERVSRSQCLQNPKCRWCRSEALDDMCFKKAEAWRLPQQVLSL

SEQ ID NO: 73112 - protein, 161 aa, Gossypium hirsutum
  unsure (1)..(161): unsure at all Xaa locations
  Clone ID: GOSHI-09MAY01-C47925_1.pep
DPRTKLNCGQRCTASARVTERIRKALEAYDGEPPLNVQKYLLDECRKWNLVWVGRNKGAPLEADEVERLLGFPKNHTRGGGMSRTDRYKSLGNSFQVDTVAYHLSVLKDMFPGGINLLSLFSGIGGAEVALHRLGIPLKNVVSVEISDVNRNIVRXWWEQT

SEQ ID NO: 73113 - protein, 206 aa, Gossypium hirsutum
  Clone ID: GOSHI-09MAY01-C47555_1.pep
FLAKLLETKLLQLLRFKHGQIYSASVSEFIHGDLPCLTPARPPARPIDFSCDPKISLKLVDMALNEILRLQEEGPADQDVETILEIEQRAHENGLQENYYWLNLILGSYQSRIYSGDIGTSFKILDETRSKVRNSLTPLTMQLALRRIMPRNNPHTVVILMPQTSWLKRIKSFSQWTLHGIDMKILAAIAGFTVLALSLKRYSKRS

SEQ ID NO: 73114 - protein, 126 aa, Gossypium hirsutum
  Clone ID: LIB3493-016-P1-M1-F2.pep
GQIYSASVSEFIHGDLPCLTGDIGGDIQIDFSCDPKISLKLVDIALNEILRLQEEGSSDQDVETILEIEQRAHENGLQENYYWLNLIIGSYQSRIYSGDIGTSFKILDETRFKVRNSLTPLTMQLA

SEQ ID NO: 73115 - protein, 234 aa, Gossypium hirsutum
  unsure (1)..(234): unsure at all Xaa locations
  Clone ID: GOSHI-09MAY01-C47565_1.pep
LAPVPWIKNKLQKFRKNDMLQLVPENTEEYPLENQNLNNLRRPLXPESLFDSPRMGDIDIPGQDLSVYPISSRTSPIPKQKFDFAQYYAFNLTIFALTLIYSSFAPLVVPVGAVYFGYRYVVDKYNFLFVYRVRGFPAGNDGRLMDTVLSIMRFCLDLFLISMLLFFSVKGDSTKLQAIFTLGXLVIYKLLPSDSDSFQPALWKXMQNIDSIIDGPIDYEVFSQPRFDWDTYSL

SEQ ID NO: 73116 - protein, 176 aa, Gossypium hirsutum
  unsure (1)..(176): unsure at all Xaa locations
  Clone ID: GOSHI-09MAY01-C47535_1.pep
KTNPIRMTIYEQLNQISRWGDSFNRGDSPNTGSSTIVEGDVRLENKAGYISCDQVEPSRSDQETNKPIDKTQRRLAHNREAARKSRLRKKAYGQQLESSRLQLAHLEQELERTRQQGIYISSPSDTGDFGLPGTVNSGSTAFEMXEYRHCVEVQNKQTCELRSALQAHITDIELQI

SEQ ID NO: 73117 - protein, 167 aa, Gossypium hirsutum
  Clone ID: GOSHI-09MAY01-C47425_1.pep
GRVGGRVGGRVGLLLKSSQDKRFVCEAAERALEVMTTSVFPMSLLPKLQPYLKNRNPRIRAKASMCFSRSVPRLGVEGIQEYGIDKLIQVAASQLSDQLPESREAARTLLLELQTVYEKSNGLSTTIPEQPEMNSWEHFCQSKLSPLSAQAVLRVTNIAREGLVIGS

SEQ ID NO: 73118 - protein, 140 aa, Gossypium hirsutum
  unsure (1)..(140): unsure at all Xaa locations
  Clone ID: GOSHI-09MAY01-C47065_1.pep
KARADRRVRRPDNSHVAYVAKMTHVRGSKPRERQAVNDCIENMGDTPDRLSQSVKELSHMRRAGGEGFMLHMSNVQTWVTAALTDENTCLDGFAGRVMDGNVKVAVRRRVVHVAQVTSXALALVNRYAARHRAAIPTEKP

SEQ ID NO: 73119 - protein, 245 aa, Gossypium hirsutum
  Clone ID: GOSHI-09MAY01-C47025_1.pep
QFAAAFSFPRKFAVCLSSSSGSNGVVIFGDGPYNLLPDIDVSKSLMYTPLILNPVSTSSASFQGDPSADYFIGVNGITINTKPVSFNKTLLSINKEGQGGTKISTVTPYTVMQTSIFRAVVNAFIKQTSKVARVPAVAPFSACYNAKSLGSTRVGPAVPQIDLLLPNKVVWRIFGADSMVPGNKDVLCLGFVDGGLEPTTSIVIGGHQIEDNLLQIDLAASKLGFSSSLLFRRTTCSNFNFTSTA

SEQ ID NO: 73120 - protein, 54 aa, Gossypium hirsutum
  Clone ID: GOSHI-09MAY01-C47385_1.pep
APITGILFPIILFFRGPLPIENIVGRSVFRYWPPSKVSATIYDSNVGKNAVAVS

SEQ ID NO: 73121 - protein, 123 aa, Gossypium hirsutum
  Clone ID: GOSHI-09MAY01-C47345_1.pep
GTRITPMVQWPDKSFTLGLSQALAWKQSGLMMRPSVQFSLFPTFGGSNPGLRTEVIHTVKEDLNLICGCALVPHPSAFASISFGRSKWNGNVGKSGMVVGVDTPLSSVGRPSFSVQINNVIEF

SEQ ID NO: 73122 - protein, 69 aa, Gossypium hirsutum
  Clone ID: GOSHI-09MAY01-C47315_1.pep
MDALDNVVDPLRDFAKDSVRLVKRCHKPDRKEFTKVAFRTAIGFVVMGFVGFFVKLIFIPINNIIVGSA

SEQ ID NO: 73123 - protein, 87 aa, Gossypium hirsutum
  unsure (1)..(87): unsure at all Xaa locations
  Clone ID: GOSHI-09MAY01-C40515_2.pep
MLSGLMNLLRACFLPRSDRHVHTSSQTGGRQDGLLWYKDSGQHFNGXEFSYGSGXQANNLLEDQSQLESGCLSLHESGPYGTFVGCI

SEQ ID NO: 73124 - protein, 397 aa, Gossypium hirsutum
  Clone ID: GOSHI-09MAY01-C40515_1.pep
MLSGLMNLLMACFLPRSDRHVHTSSETGGRQDGLLWYKDSGQHFNGEFSMAVVQANNLLEDQSQLESGCLSLHESGPYGTFVGVYDGHVGPETSRYINDHLFQHLKRFTSEQQGMSVDVIRKAYQATEEGFLSLVTKQWPMKPQIAAVGSCCLVGVICNGTLYVANLGDSRAVLGRAVKATGEVLAIQLSAEHNVCIESVRREMQSLHPDDSQIVVLKHNVWRVKGLIQISRSIGDVYLKKTEFNREPLYPKFRLREPFRKPILSADPSISVHELQPHDQFVIFASDGLWEHLSNQEAVNIVQNHPRSGSAKRLVKTALQEAAKKREMRYSDLKKIDRGVRRHFHDDITVIVVFLNSNLMSRASSAKGPNLSVRGGGVNFPPNILAPCATPTEPGGT

SEQ ID NO: 73125 - protein, 116 aa, Gossypium hirsutum
  Clone ID: GOSHI-09MAY01-C40475_1.pep
GETGKVYRANFHDRDGRTVLILRPGKQNTTSLDNQLRHLVYMIENAILNLPEGQEQMVWLIDFTGWSLSTSVPIKSARDTINVLQNHYPERLAMAVLYNPPRIFEAFWKVLNSNAL

SEQ ID NO: 73126 - protein, 137 aa, Gossypium hirsutum
  unsure (1)..(137): unsure at all Xaa locations
  Clone ID: GOSHI-09MAY01-C40725_2.pep
MSNKLEGKVAIITGGAXGIGAATVHHFAVHGARMIVIADIQDEXGQKGVEAIGSNKCSYMHRDVTDEEQVKXNLVQSTVQNYRSLDIMFSNPGTVSNSIQTVLELDFAAFDRLFTDNVRGMAACVKHAARAMVELNV

SEQ ID NO: 73127 - protein, 253 aa, Gossypium hirsutum
  Clone ID: GOSHI-09MAY01-C40725_1.pep
MSNKLEGKVAIITGGASGIGEATVHRFALNGARMIVIADIQDELGQKVVESIGSNKCSYMHCDVTDEEQVKNLVQSTVQNYGSLDIMFSNAGTVSNSIQTVLELDFAAFDRLFTVNVRGMAACVKHAARAMVELNVRGSIICTASTTASCGSERDTDYNMSKHAVIGLMRSASKQLGEHGIRVNSVSPFIVGTPLLYHYLGTEAEVEQLFEPYARLKGVVLKAKHVADAVVFLASQDSELITGHDSVVDAGFL

SEQ ID NO: 73128 - protein, 123 aa, Gossypium hirsutum
  Clone ID: GOSHI-09MAY01-C40695_1.pep
AFSERNKSTSPNKDLKSTLVLCYKQDNILKEQEHNTKRNLQTLMPFFSFFFSLEVAWDALKMPTKRKPHLSFQCKTLFELFEFDDGGKQPLEGDSCEVFCCFDTEARQLKGDLIFFFSLSCGS

SEQ ID NO: 73129 - protein, 43 aa, Gossypium hirsutum
  Clone ID: GOSHI-09MAY01-C40185_1.pep
AYHKKTKRAPKVEVGTRAPDASLDEWLQGTAYTQSASKSKKKK

SEQ ID NO: 73130 - protein, 143 aa, Gossypium hirsutum
  unsure (1)..(143): unsure at all Xaa locations
  Clone ID: GOSHI-09MAY01-C40045_1.pep
MEFSDATSSDWSLFTSSDEASFTTESARDSFSTGDYCRCNAYGDTXFSIFNNWINXAESSSYNTVSCRMFSTSRPYTRFALEETGYVYDSYSSMQPEFRFHENLEQVSDSLSEFSLASDYGLFVKYGNNPKNSLDRTANYEPY

SEQ ID NO: 73131 - protein, 60 aa, Gossypium hirsutum
  Clone ID: GOSHI-09MAY01-C40075_1.pep
PCWLLETRVLIPIKIHSVPYTYIYNTLHLIQFYLIYKHFCLSSLYSLVFHMLLLDRCFRV

SEQ ID NO: 73132 - protein, 147 aa, Gossypium hirsutum
  unsure (1)..(147): unsure at all Xaa locations
  Clone ID: GOSHI-09MAY01-C40395_1.pep
MSSSSLSNPALSTPFIGHNLRLNQNTKDGINCFPSLRRHGVPRCAVDMPYGGNAPTFPRIRVWDPYKRLGISPYASEEEIWSARNFLLEQYAGHERSEESIEAAFEKLLMASFQHRKKTKINLKSRLKKKVEESPPWIKXLLNFVEL

SEQ ID NO: 73133 - protein, 68 aa, Gossypium hirsutum
  Clone ID: LIB3585-044-P1-K1-A7.pep
RPRVRWDPYKRLGISPYAGEEEIWSARNFLLEQYAGHDRTGHFVLHFLITVRESPSKITDCHPLSDPI

SEQ ID NO: 73134 - protein, 108 aa, Gossypium hirsutum
  unsure (1)..(108): unsure at all Xaa locations
  Clone ID: GOSHI-09MAY01-C40285_1.pep
MSRPMEEDTVKNEEEEFNTGPLSVLMMSXVKNNTQVLINCRNNKKLLGRVRAFDRHCNMVLENVWEMWTVVPKTGXGKKKALPVYKDRFISKMFLKGDSVIIVLRNPK

SEQ ID NO: 73135 - protein, 228 aa, Gossypium hirsutum
  unsure (1)..(228): unsure at all Xaa locations
  Clone ID: GOSHI-09MAY01-C41915_1.pep
EKVLRIYDLNRPDAPPREVDGSPGSVRTVTWMHSDQTILSSCTDMGGVRLWDVRSGKIVQTLETKSSVTSAEVSQDGRYITTADGSTVKFWDANHYGLVKSYNMPCTVESASLEPKYGNKFVAGGEDMWVRVFDFHTGDEIACNKGHHGPVHCVRFSPGGESYASGSXRDGTIRIWLTGPLTHDGTEPFAANGSVGKVKVTAEDVSRKIEGFQIAEEGKTKEKETGKE

SEQ ID NO: 73136 - protein, 110 aa, Gossypium hirsutum
  Clone ID: GOSHI-09MAY01-C41855_1.pep
MVNMWAITHDPKVWKDPVEFKPERFLEAEVDVRGGDLRLAPFGAGRRVCPGKNLGLVTVQLWVAKLMQGFKWVQDSVAHPVDLSEVLKLSCEMKFPLHAIAVEREDTLLP

SEQ ID NO: 73137 - protein, 52 aa, Gossypium hirsutum
  Clone ID: GOSHI-09MAY01-C41425_1.pep
CLSIEQGGKRIFLKPYCEGIRKRANRILQSQQLTINTIAANFSRTKGYRTRE

SEQ ID NO: 73138 - protein, 177 aa, Gossypium hirsutum
  Clone ID: GOSHI-09MAY01-C41795_1.pep
SIEQNGDGDSITFTESVISNLQLQFEKVAAEVGLNSDVATACDLPKVNGAVSKKRKRAKGASGRKPQNGELTGEADGEGDGTAKTCENSTKRVRFSMKSNLVWKPHSPLPPLRGRLPPSVTPRGSALKQGIPPGPIKEMAPMTKKGKKAKSVKKARKVIKSMYPLVKRTKKLKSTSS

SEQ ID NO: 73139 - protein, 187 aa, Gossypium hirsutum
  Clone ID: GOSHI-09MAY01-C41775_1.pep
GDRSKKSWTQVETGSAITWKYPSVVLEGDNTVGEFYSVALTNNYQQADTGTKMIHKGKNTRSRIISKGISVGHSRNCYRGLVQVQSKAENARNSSQCDSMLIGDNAAANTYPYIQVKNPSARVEHEASTSKIGEDQLFYFQQRGIDYEKAMAAMISGFCREVFNELPDEFGAEVNQLMSLKLEGSVG

SEQ ID NO: 73140 - protein, 169 aa, Gossypium hirsutum
  Clone ID: GOSHI-09MAY01-C41765_1.pep
MVVTCLHPNLNPCFKPLISFPSQNPNSFPFKSLIASPKTFSFAKPIISLQVKANSPALSDELPLDASPSQSSSGKEKLGVVVKPLEKPRVVLKFIWMEKDIGMALDQVIPGHGSIPLSPYYFWPRKDAWEELKVLLESKPWISHMQRIHLLNQATDIINLWQTSGGNLT

SEQ ID NO: 73141 - protein, 57 aa, Gossypium hirsutum
  Clone ID: GOSHI-09MAY01-C41155_1.pep
FLDKFERKFVTQGAYDTRNIFQSLDLAWTLLRIFPRELLHRIPAKTLDQYYSRDATS

SEQ ID NO: 73142 - protein, 223 aa, Gossypium hirsutum
  unsure (1)..(223): unsure at all Xaa locations
  Clone ID: GOSHI-09MAY01-C41145_1.pep
HQQGCCRNNLPMIVKXSGGSGFCAWGGCPSARARQCPSELRVGDGDACKSACEAFGSPEYCCSGAYSTPATCKPSVYSEMFKAACPRSYSYAYDDATSTFTCTGADYTVTFCPSSPSQKSSRDATPATEATPVTGSTSQGSGTQPGFTYSGNGYGYSVSGYGYPGSGSSTGSGSGQTMLTDGSWLAGLAMGDSPRTIPSPTFLVPFALMASTALCFLFSLVHL

SEQ ID NO: 73143 - protein, 114 aa, Gossypium hirsutum
  Clone ID: AW187212.1.pep
MGSQEPKAVTINVTGFKKFQGIAHNPTETIVNNLKNFVESKGLLPAGVTLRSCTVLETAGNGALPVLLKVLESGISGIDTKNELVIWLHLGVDGGAQKFTLEQQAVNETSFFCP

SEQ ID NO: 73144 - protein, 87 aa, Gossypium hirsutum
  Clone ID: LIB3147-037-Q1-K1-C9.pep
MYKRILFLPAGVTLRSCTVLETAGNGALPVLLKVLESGISGIDTKNELVIWLHLGVDGGAQKFTLEQQAVNEASFFCPDELGWQPMR

SEQ ID NO: 73145 - protein, 79 aa, Gossypium hirsutum
  unsure (1)..(79): unsure at all Xaa locations
  Clone ID: LIB3147-037-Q1-K2-C9.pep
MYRSKWLLPAGVTLRSCTVLETAGNGALPVLLKVLESGISXIDTKNELVIWLHLGVDGGAQKFTLEQHAVNEASFFCPD

SEQ ID NO: 73146 - protein, 146 aa, Gossypium hirsutum
  Clone ID: GOSHI-09MAY01-C41295_1.pep
MVTTICSYGLPWFATCIPCPIVTTESCPNTELSGNYKSFQCPPNHYNDLASLFLNTNDDAIRNLLSPSPTKEFHISSLFIFFIAIYCLGVITYGIAIPSGLFIPVILAGAGYGRLIGRLFEPAHYSQVGLFALLGAASFLGGTMKM

SEQ ID NO: 73147 - protein, 107 aa, Gossypium hirsutum
  Clone ID: GOSHI-09MAY01-C42925_2.pep
RTTKTLKMISRAPNMTNPRKARPKARPQTEDPPRPGSHLQDHLTKVQCISERYLNTKLMMKRHMAPSYFTIGYKWKDSLIIELSWSMPRKEVLWCPLTLSLSLQTSL

SEQ ID NO: 73148 - protein, 71 aa, Gossypium hirsutum
  Clone ID: uC-gsflnu33B141b01b1.pep
TFPSIEDQLTWLLMMMSTWLGFSQRSGSTKLDSREMIRLISDYGDFKDVCRERDNVSGHQRTSEAYSNSTQ

SEQ ID NO: 73149 - protein, 61 aa, Gossypium hirsutum
  Clone ID: GOSHI-09MAY01-C42885_1.pep
PRVAHASAAAQLPGDWVSIGHSEQWLWYSVYASKQVSWRTRALVVSDWIRRFIFGRDTSGI

SEQ ID NO: 73150 - protein, 494 aa, Gossypium hirsutum
  Clone ID: GOSHI-09MAY01-C42855_1.pep
KAVGPNGESLDAEEAFRVAGIDSGFFVLQPKEGLALVNGTAVGSGLASMVLFEANILAVLSEILSAIFAEVPNGPPEFTDHLTHKWKHHPGQMEAAAIMEHILDGSSYVKAAKKLHEMDPLQKPKQDRYALRTSPQWLGPQIEVIRFATKSIEREINSVNDNPLIDVSRNKALHGGNFQGTPIGVSMDNTRLAIAAIGKLMFAQFSELVNDFYNNGLPSNLSASRNPSLDYGFKGAEIAMASYCSELQYLANPVTNHVQSAEQHNQDVNSLGLISSRKTAEAVDILKLMSSTYLVALCQAIDLRHLEENLRNTVKNTVSQVAKKTLTTGNNGELHPSRFCEKDLLKAVDREYVFAYIDDPCSATYPLMQKLRQVLVEHAFANGDNEKDTHTSIFQKITAFEDEFKAALPKEVEGTRVSLENGNATIPNKIKGCRSYPLYKFVREELGTGLLSGEQGKSPGEEFDKVFIAMCERKIIDPMMECVKGWNGAPLSIS

SEQ ID NO: 73151 - protein, 134 aa, Gossypium hirsutum
  Clone ID: GOSHI-09MAY01-C42405_4.pep
KLKHNWYSSRFSVPVKHKLIKSTKTSINIIDNQTTEHALHLLTKIAGPLIPNPSQQTRISSLNPKNVLQHVLQNLVRVRRLELRVTRVRSRGVTVPRLVGNELKIRRRRLLPLVVLRHLLRPDAWADAQEKEDK

SEQ ID NO: 73152 - protein, 115 aa, Gossypium hirsutum
  Clone ID: LIB3543-063-Q6-K6-B8.pep
DNRTEQMSEDDERQQSPPSDLEFVSNKARNCNATGSGSGHPEFQSTYPDQVLENVLENVLHFLTSRRDRNAASLVCKSWYRVEALTRSELFIGNCYAVSPGRATARFTPVKALHL

SEQ ID NO: 73153 - protein, 91 aa, Gossypium hirsutum
  unsure (1)..(91): unsure at all Xaa locations
  Clone ID: LIB3584-008-P1-K1-G9.pep
MTIIISRAFSINIYRYSVCCMFHIIVNDFLQLFLSACLFEFSELMXGKMSCLMINDIDAGLGRFGNTQMTVNNQIVVGTLMNLSDNPTRIS

SEQ ID NO: 73154 - protein, 111 aa, Gossypium hirsutum
  Clone ID: LIB3829-009-Q6-K6-G7.pep
LLHLLTKIARPLVPIPNPSQQTRTSFLNPKNVLQHVLQNLVRVRRLELRVTRARSHGVTVPCLVGNELKIRRKKLLPLVVLRHLLRPSTPPSSSLPLFFSESNWKPNQDCC

SEQ ID NO: 73155 - protein, 56 aa, Gossypium hirsutum
  Clone ID: LIB3147-056-Q1-K1-F7.pep
NISSPNLPIPASMSLIIRQLILLCISLENSNKHGIKNNCRKSLTMMWNIHQHTEYL

SEQ ID NO: 73156 - protein, 166 aa, Gossypium hirsutum
  Clone ID: GOSHI-09MAY01-C42785_1.pep
MAKASQRALVSMAICLLSSLVGFAYASSLGNKFVVLGKVYCDTCRVEFETKLSEPIPGAKVKLECRKEGDETVTYSHEAETDANGVYKIPVEGDHEEQICAVSTVSSPRADCNEKMEAFEKAQVELTSDDGLAEPSRKANNLGFKKKVAVPGCAQVLKEMGFPLTE

SEQ ID NO: 73157 - protein, 403 aa, Gossypium hirsutum
  unsure (1)..(403): unsure at all Xaa locations
  Clone ID: GOSHI-09MAY01-C42695_1.pep
YISIGCNLPGIPHPTFARDPVPFFLAPKVSNELGLEAAVEATANFLNKAVKPVLVGGPKLRVANAKDAFVELADACGYPIAVMPSGKGLVPEHHPHFIGTYWGAVSTSFCGEIVESADAYVFIGPIFNDYSSVGYSLLIKKEKAIIVQPNRVTIGNGPSFGWVFMADFLSALAKKLKKNTTAVENYRRIFVPPGMPLKHGNDEPLRVNVLFKHIQDMLSKDSAVIAETGDSWFNCQKLHLPENCGYEFQMQYGSIGWSVGATLGYAQAAKGKRVIACIGDGSFQVTAQXIPTMIPCGQKSIIFLINNGGYTIEVEIHDGPYNVIKNWNYTAFVDAIHNGEGRCWTAKVRTEDELIDAIAAATGEKKDSLCFIEVFAHKDDTSKELLEWGSRVSSANSRPPNPQ

SEQ ID NO: 73158 - protein, 98 aa, Gossypium hirsutum
  Clone ID: GOSHI-09MAY01-C42115_1.pep
NPRTNIAASSARVFSATEPQASSTSSPRAFSSVQSNLQEENSRLTTRNRLTANRSKGKFLVLLLLLFFLFGYKKPMKWNAKGVFGEKGNTRTRGRTRG

SEQ ID NO: 73159 - protein, 213 aa, Gossypium hirsutum
  unsure (1)..(213): unsure at all Xaa locations
  Clone ID: GOSHI-09MAY01-C42395_1.pep
DQSLDEIKLLKYVNKHDPADKHHLLRLYDYFYYREHLLIVCELLKANLYEFHKFNRESGGEVYFTMPRLQSITIQCLEALQFLHGLGLVHCDLKPENILVKSYSRCEVKVIDLGSSCFETDHLCSYVQSRSYRAPEVILGLPYDKKIDIWSLGCILAXELCTGNVLFQNDSPATLLARVIGIIGPIRQDMLAKGRDTYIYFTKNYMLYERYRR

SEQ ID NO: 73160 - protein, 105 aa, Gossypium hirsutum
  Clone ID: uC-gsronu33B098g07b1.pep
LFFIFQEHLLIVCELLKANLYEFHKFNRESGGEVYFTMPRLQSITIQCLEALQFLHSLGLVHCDLKPENILVKSYSRCEVKALDLGMQLFCDSLFMIPCSNSLSY

SEQ ID NO: 73161 - protein, 140 aa, Gossypium hirsutum
  Clone ID: GOSHI-09MAY01-C42255_1.pep
IFPASKTEDLLPIDRFVVEEALLDVLLFFNGCRKECAAFMVGLPVPFRYEYLMAETIFSQLLLLPQPPFKPIYYTLVIMDLCKALPGAFPAVVAGAVRALFVKIADLDMECRTRLILWFSHHLSNFQFIWPWEEWAYVLD

SEQ ID NO: 73162 - protein, 79 aa, Gossypium hirsutum
  Clone ID: GOSHI-09MAY01-C42215_1.pep
QLYLIYFFFFFKLYIKPFHFCKKRRRDSVTSIEIIRKTVIESKEQVSFHFSPFFCFSFFFIIQKSIKRRKSNVPCSQIR

SEQ ID NO: 73163 - protein, 77 aa, Gossypium hirsutum
  Clone ID: LIB3147-054-Q1-K1-C3.pep
FLFSFFSFFFFFSFFFIFFFFFCFFFLKIRMPKFILPLSLVAASSRRPQTPQQSPVAASFGLHACRFHHVRLQNGLK

SEQ ID NO: 73164 - protein, 116 aa, Gossypium hirsutum
  Clone ID: GOSHI-09MAY01-C42235_3.pep
GARVRPRGRGLMMMMILLKPISGREAVLVLRSNATYQCNGLLGGCVIREELESELDLLMIDSTVIRILQQGSGHISIEALNANKAAAKPCPENYSNCITKSKSGKHNCNGNNLFCR

SEQ ID NO: 73165 - protein, 126 aa, Gossypium hirsutum
  Clone ID: GOSHI-09MAY01-C42235_2.pep
HASEKKMGFRELCVGLMMMMILLKPISGRDAVLVLRSNATYQCNGLLGGCVIREELESELDLLMIDSTVIRILKQGSGHISINTFIKGKPAVNQNDCGPSYGNCISKPKPNGHNSNCNGNSPYCKQ

SEQ ID NO: 73166 - protein, 126 aa, Gossypium hirsutum
  Clone ID: GOSHI-09MAY01-C42235_1.pep
GETKEKKMGFRELAGLVMMMILRKRISGRDAVLVLRSNATYQCNGFLRGCGIREELESELDLLMMDSTAIRILGVDKTVGKIYSTLTKDKPAVKQKDCGPSYSKCLPPPNPDNHNKNGKGNSPYCR

SEQ ID NO: 73167 - protein, 254 aa, Gossypium hirsutum
  Clone ID: GOSHI-09MAY01-C43515_1.pep
HASAHASVLMKEFPSMFGVSVSHTTRAPRGNEKNGVHYHFTDRSVMEKDIKDGKFLEFASVHGNLYGTSIEAVEAVADSGKRCILDIDVQGARSVRASSLDAIFIFICPPTMRELEERLRARGTETEEQILKRLRNAEAEIEQGKSSGIFGHILYNDNLEECYENLKELLGLNGSAPTNHKPSPKGIDLPSNHSVSKIDNKILINCETPELEKASKNLIALDVSSLKGGAPGRTRGLNVYALDSFSDGLNEKLS

SEQ ID NO: 73168 - protein, 132 aa, Gossypium hirsutum
  Clone ID: GOSHI-09MAY01-C43465_2.pep
HASGGNSLKRVEAVTECRVYGRGKGSVKDSVKEEKLKDKPGFEHLNEPLHVLVEAELPEDVINSRLDYAVAILENLLKPVDESLDNYKKQQLRELALLNGTLREESPRMSPTMSPSMSPFDGTGMKRAKTGR

SEQ ID NO: 73169 - protein, 171 aa, Gossypium hirsutum
  Clone ID: GOSHI-09MAY01-C43465_1.pep
WPGLPRAPTTPIVKRVVRLDVPVDKYPNYNFVGRILGPRGNSLKRVEALTQRPAYIRGKGSVKDSVKEEKLKDKPGYEHLNEPLHVLVEAEFPEDMVNSRLEYAVAILENLLKPVDESLDSYKKQQLRELALLNGTLREESPSMSPSMSPSMSPGMSPFNSTGMKRAKTGR

SEQ ID NO: 73170 - protein, 49 aa, Gossypium hirsutum
  Clone ID: LIB3583-035-P1-K1-C8.pep
PRVRDTISFGGDRVVKREQKRKGPGRTSETPSSPAGAHKRPRKMKASDL

SEQ ID NO: 73171 - protein, 68 aa, Gossypium hirsutum
  Clone ID: LIB3148-012-Q1-K1-B9.pep
AKWVKNTCWFFWILMLYAYSFKKMSFFLLDYTNLQSLVKGLKKKRERERENLVVKNYGTSSSASNDQW

SEQ ID NO: 73172 - protein, 144 aa, Gossypium hirsutum
  Clone ID: GOSHI-09MAY01-C43735_2.pep
MADDDYNDMDMGYEDEPPEPEIEEGAEEDLENNNNDDVPLEPIETEDNVDQDAKDKTTRKTSKYMTKYERARILGTRALQISMNAPVMVELEGETDPLEIAMKELRERKIPFTIRRYLPDGSYEDWGVDELIVEDSWKRQVGGD

SEQ ID NO: 73173 - protein, 322 aa, Gossypium hirsutum
  Clone ID: GOSHI-09MAY01-C43735_1.pep
GRVGKNLKSLDLSINSLTGSIPSSFGSLINIEKLQLSSNYLSGSIPLSLSSLKALKVLNVSDNNLSGSIPVQFSNLSKLLELDLSKNSLYGSLPVEFTMLKSLQKMIIENNRLDGRLPVDLFSNLVELQVVDLSGNKLDGNVNGSFWSMPNLTFFDVSNNNFSGHLPAPSSNHSVAPGAVFNLSNNQFYGTLDFSLGMFKFIDVSGNYLQGIVNDGERNASVNMNCFYRPNQRSLDDCRIFYNERGLHFDNSGAPPSTAAKSSSGSRRWIFILAGVLGGLGFILVLVLVLVLLLRRYNTGLMNQRRSTDIGPVRESDSAPQL

SEQ ID NO: 73174 - protein, 44 aa, Gossypium hirsutum
  Clone ID: LIB3148-016-Q1-K1-D3.pep
IFYKFFFFFFIFILIFFFFFFFFFFFFFFFFFFFFSQNSHYNLR

SEQ ID NO: 73175 - protein, 219 aa, Gossypium hirsutum
  Clone ID: GOSHI-09MAY01-C43615_1.pep
MMSKLAMFPYYFPEEIFLEIFCKLPVKSLGKCMCVSKSWNSLIKNPYFISSHVSHQSKLRRTNDNNLFFVMTGRHEVEYSLHSDDQEFRKYAQLEYMPFDNHHSIVGACNGLLCLMDFQFSFDSIFILCNPIIRKSITLPKPCLSSLPYKISVGFGFDSAQNDYKLLKITKKGVLDKYVEVELYSLKRNCWKILAPPKFDLYFDDLMVYVNETFIGLLI

SEQ ID NO: 73176 - protein, 103 aa, Gossypium hirsutum
  Clone ID: GOSHI-09MAY01-C43635_1.pep
TVKGRSNIFAIGDITDVPELKLGHAAIHHAYLVAKNLKLLMGGGKESKMSVYKPGPEVAMVSLGRKHAVAQFPFATVGGRIPGLIKSGDMFVGRTRKNLGLEP

SEQ ID NO: 73177 - protein, 242 aa, Gossypium hirsutum
  unsure (1)..(242): unsure at all Xaa locations
  Clone ID: GOSHI-09MAY01-C43185_1.pep
HPALVAWGYFPEDETGIKGKSYEGGIITSFHRIVSKKSNNVHAIIQAPALGPASFAAISPWVSGRELXERMVRYPRLAHLFTLIRDQGSGEVMEEGKIKYRLSEVDKENLKIGLRQVLRVLIAAGAVEVGTYRSDGQRIKCKGLTEESLQEFLDNVPVVGGLSSKDEYWTLYITAHQIGSCRMGATEEEGAVDENGQSWEAEGLFVCDASVLPTAIGVNPLITIQSTSYCISNKIAQLLKKE

SEQ ID NO: 73178 - protein, 201 aa, Gossypium hirsutum
  unsure (1)..(201): unsure at all Xaa locations
  Clone ID: GOSHI-09MAY01-C43095_1.pep
HASVGLGSCNYEEIEAERSXIEKDVKERMEKTIETVRANFNSIRTGRANPSMLDKVEVEYYGTPVSLKSIAQISTPESSSLLIQPFDKSSLKAIEKAIVNSDLGMTPNNDGEVIRLSLPQLTTERRKELSKVVAKQAEEGKVAVRNIRRDALKAYGPPARPKKLSEDNVKDLSSDLQKLTDEYMKKIDGVYKQKEKELLTV

SEQ ID NO: 73179 - protein, 116 aa, Gossypium hirsutum
  Clone ID: GOSHI-09MAY01-C43275_1.pep
KKSILVWFSNLKMVSTRGKQPQGERCQNEVHRSIAEIDGKEERPSTLGDNRRQRQNTRSTIATMYFDATFDNEYSRSTSGMVVRGEMNEFLASKSALHSTISSPFIAKANAGGRVG

SEQ ID NO: 73180 - protein, 49 aa, Gossypium hirsutum
  Clone ID: GOSHI-09MAY01-C43235_1.pep
ILLKRYRSWLRCFSGPKYDLAMAHLFLWCGMSPLLPYYQPWISLGILYE

SEQ ID NO: 73181 - protein, 234 aa, Gossypium hirsutum
  Clone ID: GOSHI-09MAY01-C78965_1.pep
RIQFLEKSIRKLDFRPGGICTIGQVNDLKNSPGPARWELRQATKQALHLLQDNYPEFVARQVFINVPWWYLAVNKMINPFLTQRTKSKFVFAGLSKSADTLFRYITAEQVPVKYGGLSKDSEFATTETVTEITVKSAAKHTVEFPVTEACLVRWEVRVIGWGVSYGAEFVPSGENSYAVIIQKARKVAASTEEPVVCDNFKVGEAGKVVLTIHNPSSKKKKLLYRFKSHPTTSH

SEQ ID NO: 73182 - protein, 89 aa, Gossypium hirsutum
  Clone ID: LIB3582-004-P1-K1-F1.pep
QNDSQDLVCSAHIRSLISRKEHLFQMERDYNEMTATLQGLINGLIAQINSKDSYLWGWELQYNAILRQLKGKNAVLLLAFAVQIRKGKA

SEQ ID NO: 73183 - protein, 150 aa, Gossypium hirsutum
  Clone ID: LIB3582-004-P1-K1-F7.pep
LKVSSFSFSNFSSKRTAQHSILALQLSHDYIILKLPTPQITVLGVNFCYEAIDESLKSCGHLVIVTFHLGQLFFSAINLVYETANKPAIILQLLLVVGILHFNGRFKCHFSICACHPCAGAMLIFSVSFQFYRMSPKGQLCAASFAGRVG

SEQ ID NO: 73184 - protein, 238 aa, Gossypium hirsutum
  Clone ID: GOSHI-09MAY01-C78505_1.pep
MGKNVSALCVIAPLLLLGAVSSAPTTSSPARILNGFFSNALSASLKWLWSLKTTTKTAITGRPMVKFEGGYTIETVFDGRKLGIEPHTGEVLPNGELLILDSANSNLYRISASLSLYTRPRLVAGSPEGYPGHVDGKPRDARMNHPKGLAVDDRGNIYISDTMNMAIRKISDAGVTTIAGGKWNRGGRHVDGPSEDARFSDDFDVVYVGSSCSLLVIDRGNRAIREIQLRFDDCAYQY

SEQ ID NO: 73185 - protein, 81 aa, Gossypium hirsutum
  Clone ID: GOSHI-09MAY01-C78535_1.pep
MGGGLLSHKGNGSGSGHKGRPYVLMLLLAFGAALLGVMVLHTFRERRIFNLLIGDKNRQLLSLQLLVPEGREYTKDMRRKA

SEQ ID NO: 73186 - protein, 122 aa, Gossypium hirsutum
  Clone ID: GOSHI-09MAY01-C78785_1.pep
MPLLYSDHHPILLNTLGFVVSFQETCGLLDSKLPGLLVWTFKEIFTEWMVNSSNITQAIEVATRAVKEWKSSFGNIFVRKWSLIKRLQGIQNSPRYMFSSYLQQLEARRIIVASEISFRLDF

SEQ ID NO: 73187 - protein, 251 aa, Gossypium hirsutum
  unsure (1)..(251): unsure at all Xaa locations
  Clone ID: GOSHI-09MAY01-C78765_1.pep
SGFITGARSSTFTIINKCSYTVWPGVLSSAGIPPLSPTGFVLQQGESKSIDVPTSWSGRLWGRTLCTQPSSGKSTCLTGDCGSSTIECSGAGAIPPATLAEFTLNGASGLDFYDVSLVDGYNLPMMVSPHGGKGGNCSSAGCAAELNGNCPLELKVVDGSEGVACNSACNAFGDPKYCCSGAYSTPNTCKPSXVLEIFKGGRPTWYSYAYDDGTSXLTCAGADYVITFCPTTPSTVSRLLTHGGDISASSR

SEQ ID NO: 73188 - protein, 164 aa, Gossypium hirsutum
  unsure (1)..(164): unsure at all Xaa locations
  Clone ID: uC-gsronu33B108f08b1.pep
MAALQLTIVLVMFVFLQLFSGARSSTFTIINKCSYTVWPGVLSSAGIPPLSPTGFVLQQGESKSIDVPTSWSGRLWGRTLCTQDSSGKFTCLTGDCGSSTIECSGAGAIPPATLAEFTLNGASGLDFYDVSLVDGYNLPMMVSPHGGXGGNCSSAGCAAELNSN

SEQ ID NO: 73189 - protein, 271 aa, Gossypium hirsutum
  unsure (1)..(271): unsure at all Xaa locations
  Clone ID: GOSHI-09MAY01-C78015_1.pep
RIPVRRHAYAHASDEMRLQFLRCRETWLTGILEDLDQRNAYEYLKGTISCHRMHLFDVVNQYRAIFADDTSGSEENYDGGLLFSWAMHQITSHLXTLKVMLPKITEGGSLSNILDQCMYCAMGLGWVGLDFRGLLTPLFEEAPLNLFSKNMNTAVENFQLVLDSHRWVPLPAVGFSATSISEESQEDVTPPSYLMEHPPLAVFVNGVSAAMNELRSCAPVSLKNVLSQELIKGLQAVSDSLLXYNVSWMLRENDXLGFFLSLCRAIIEAVF

SEQ ID NO: 73190 - protein, 271 aa, Gossypium hirsutum
  unsure (1)..(271): unsure at all Xaa locations
  Clone ID: GOSHI-09MAY01-C79975_1.pep
EVKKWPLQLRRSVPDGMPANTNGTSLDQQEMSLIQERTLPSSPSPLYSSHTKASFMKGGLGQPAARKQLLSGQTSVDNSRGLLQWVQSISFVSVSVDHSLHLVLQADSPSSGTHSGTGPGQSSYIEGFTPVKSLGATAASYMLIPSPSMRFLPPTPLHLPTCLTAESPPLAHLLHSKGSAIPLSTGFVVSKAVPSMRKDYRNHPQEECPSVLTVSLIDYYGGYKVTQDKVILGIAKQAGRTSTSLSIYSKIYNHFYLPSLATLSXALSWMT

SEQ ID NO: 73191 - protein, 126 aa, Gossypium hirsutum
  Clone ID: GOSHI-09MAY01-C79835_1.pep
IPSLFLKPYSSPFSLTLNSDLISPSLLKPQTEDLNFLGLGQIFSLFFPMDFQRKRVQLLGFIVGVIVLSYTAEKCRHLVGEEASSQSGQFTLLNCFDMGSGSVACAVNEGVKLYFYNMGAVYVEKA

SEQ ID NO: 73192 - protein, 261 aa, Gossypium hirsutum
  Clone ID: GOSHI-09MAY01-C79435_1.pep
VHACAAGLKSITTSATADAMEECRKLCGGHGYLSCSGLPELFAVYIPNCTYEGDNIVMLLQVARFLMKTISRLVSGKMPVGTAAYLGRVEHLMQCHCEVQRAEDWLKHSIILEAFEARSARMSVACAESLSRFSTPEEGFGEISADLVEAAVAHCQLIIGSKFIEKLQQDIPGKGVKTQLENLCNVYALVFFYTHIVGHFASTGCITPQQGALANDQLRSLYSQVRPNATALVDAFNHTDHYLGSALGCYDGKCYQKLYEE

SEQ ID NO: 73193 - protein, 100 aa, Gossypium hirsutum
  unsure (1)..(100): unsure at all Xaa locations
  Clone ID: GOSHI-09MAY01-C79695_1.pep
MSLRPNSRTEVRRNRYKVAVDAEEGRRRREDNMVEIRKNRREESLQKKRREGLQAQPMPASLHSSAVEKKLENLGGMGSCFWAGHXNMHLEATFQFRKLL

SEQ ID NO: 73194 - protein, 173 aa, Gossypium hirsutum
  Clone ID: GOSHI-09MAY01-C79675_1.pep
MTDACIRADVESIHSSPTQAVLYLSGGASLALGLLMSVPGASNTALEAAVPYSRMSMIQLLAKMPAKYCSQQTADEMALLAYNRALKLSSPGSPVLGVGFTGSLATTRPKQGDHRFHLSTRTSDRHWASTVTLSKGLRSRDQEEKVSSYFLLKAIANACKVSSTFDSELTESD

SEQ ID NO: 73195 - protein, 175 aa, Gossypium hirsutum
  Clone ID: GOSHI-09MAY01-C79175_1.pep
MKKMKNGDDFLNFLPCDLSIKILTALEGPSDLVRITAVSRNWRHFVIRHGLCKHLSLQMFPQLSRVDRVNELGGSTKGHAGAGSSNFMEWEALEREHRAYAFLARCCLSTTAGDCISEAIIASSTDNYPEESICNTLEPRDRVARTASYWSSKGQKNPAVPETLTYRLIADLCVV

SEQ ID NO: 73196 - protein, 317 aa, Gossypium hirsutum
  unsure (1)..(317): unsure at all Xaa locations
  Clone ID: GOSHI-09MAY01-C79395_1.pep
GNESWEGIIKKLWPKAKYIKSIITGTMSQYISLLXFYGGGIPLVSPSYGSSESTFGINLNPLSNPYDVSYTFLPNMAYFEFLPMDKDGEDQALESNLDGVSSQWSSEMTNANGNVEPVDFANVKLSQYYEVVVTTFAGLYRYRVGDVLKLTGFHNNSPQFQFVERRNTGLSIDMDKTSEEDLLKAIGNAKRHLEPLGFVLMTFSSYAETSSIPGRYVLFWELKFKERNRWLKLDAKIMEECCSIVEESLDFTYKSLREANKIAALEVRVVKHGTFDALMDFYVSKGASINQYKTPSCIKSEEAVKVLNSGVLEKFSV

SEQ ID NO: 73197 - protein, 90 aa, Gossypium hirsutum
  Clone ID: GOSHI-09MAY01-C79295_1.pep
MLSFQSSKNVLSLTEDLLVRIYELLAAESDRKSFRLVCREFRRIDSLTRRHLRVIRIEFLPILLRKYPRLQSLDLSACPRIDDGVVSLLL

SEQ ID NO: 73198 - protein, 149 aa, Gossypium hirsutum
  Clone ID: GOSHI-09MAY01-C79285_1.pep
MQGTDELSIHDLASSLSTYKEQLQQVRQLLADDPGNAEYVDMEKELAEVIALTEELLATAKQNEISGSDIGTSVSAAAAQSKEMVKPSDYKDKFPVGTKVQAVWSEDGEWYDATVEAVTPNGYYVSFDGWGNKEEVDPANVRAIEYKCL

SEQ ID NO: 73199 - protein, 210 aa, Gossypium hirsutum
  unsure (1)..(210): unsure at all Xaa locations
  Clone ID: GOSHI-09MAY01-C74765_1.pep
TSGLVIELTSKVREELYFQNYMNDPDAPGGTPVMQQPIPKDKPQRRKVMENRLKDERGLRRERDNRANGSDRFDRSENPQSSDFPSNNDGPDGGNHDDPMFDAFGGQGMHVAAPFSSDVAPPPVLMPVPGAGPLGPFVPAPPELAMQVFRRXGAPPFEGNGXVDALDTNLSGPAPFLLPPGFRQDPRRLRSYQDLDAPEXEVTVIDYRSL

SEQ ID NO: 73200 - protein, 127 aa, Gossypium hirsutum
  Clone ID: LIB3584-027-P1-K1-G8.pep
GRVGGRVGGRVGLKDDRDLHRERDRSDIPQTSDFSLNDDGLDGGNGNDPIFDAFGGQGMHVAAPFSSDVAPPPVLMPVPGAGPLGPFVPAPPELAMQVFRERGAPPFEGNGRRGRSGPNLSGPTPFL

SEQ ID NO: 73201 - protein, 209 aa, Gossypium hirsutum
  Clone ID: GOSHI-09MAY01-C74735_1.pep
IIAKGHYSERAAASICRAIVNVGHACHFMGVMHRDLKPENFLLSSKGENALLKATDFGLSVFFEDGKVYKDIVGSAYYVAPEVLLRKYGKEIDIWSAGVILYILLSGVPPFWAETEKGIFDAILEGEIDFESQPWPSISESAKDLVRRMLTQDPKKRITSTQVLEHPWIREGGSASDKPIDSAVLSRMKQFRRMNKLKQLALKVIAENL

SEQ ID NO: 73202 - protein, 217 aa, Gossypium hirsutum
  Clone ID: GOSHI-09MAY01-C74165_1.pep
MATHRISSLPIAISTSLSLPSKRHDYRLALPFNSLYGTRLLLKPSNLSCFVTKHHSSTTATVSLSLPTAKPERATSEKSPVWSARSIKSFAMAELEARKLKYPNTGTEALLMGILVEGTSHAAKFLRANGITLFKVREETVNLLGKSDMYFFSPEHPPLTEQAQKVLDWAVDEKLKSGESGEITTSYLLLGIWSEKESAGHKILATFGFNDEKAKTT

SEQ ID NO: 73203 - protein, 102 aa, Gossypium hirsutum
  Clone ID: GOSHI-09MAY01-C74305_1.pep
MDSSSPEEGSEQTDHYPLLMERVESHNGEEHIIDIMRRDDASSSTSQDERPSGVDLTQSEDRPSSSTQTPTNRTSSSSNRLNSRNSSFARIVKGMVDAAGAL

SEQ ID NO: 73204 - protein, 202 aa, Gossypium hirsutum
  Clone ID: GOSHI-09MAY01-C75535_1.pep
GRICKMQYHFSILALLSIFFCFIRVGLADDNTVKFDENYVITWGNDHVLSLNQDTEIQLSMDKSSGAGFGSKLSYGTGFFNMRIKLPDKDSAGVVTAYYLTSKGNKHDELDFEFLGNREGKPISLQTNVFAGGVGNREQRVILWFDPSADFHNYRILWNQHQIVFYVDDIPIRVFKNNTNIGVGYPSQAMKIEASLWDGDSW

SEQ ID NO: 73205 - protein, 197 aa, Gossypium hirsutum
  unsure (1)..(197): unsure at all Xaa locations
  Clone ID: GOSHI-09MAY01-C75745_1.pep
MGLSLSPLALIVLLACLTALHQCNGNPFRRNNPFRHHHHPRFAKHNYRDALTKSIMFFEGQRSGRLPSNQRITWRRDSGLSDGAAMHVDLVGGYYDAGDNVKFGFPMAFTTTMLSWSVIEFGGLMKGELQNAKQAIRWATDYLLKATAHPDTIYVQVGDAKQDHSCWERPEDMDTXPRSVFKIDKNSLVRCSRRNCC

SEQ ID NO: 73206 - protein, 274 aa, Gossypium hirsutum
  Clone ID: GOSHI-09MAY01-C75695_1.pep
AKSWSESAHRFLKNCADAGNVEACYTLGMILFYCLENRGSGASLMAKAAISCHAPALYSLAVIQFNGSGGSKNDKDLRAGVALCARAAFLGHIDALRELGHCLQDGYGVRQNITEGRRFLVQANARELAAGLSSASVSNIATCSWLTWSPHPIPHPTNRHPNVPGCPLLSDFGCNVPAPEAHPANKFLTDWFGSRDGIPGPGLRLCSHVGCGRPETRKHEFRRCSVCGAVNYCSRACQALDWKLRHKAECAPVERWLDEEGVGGDGMDEVIAES

SEQ ID NO: 73207 - protein, 187 aa, Gossypium hirsutum
  unsure (1)..(187): unsure at all Xaa locations
  Clone ID: GOSHI-09MAY01-C75615_1.pep
ARKTTGWMNSGLPWIPPKKXLDLSNLTETLSGAFGDESDGLSVTLGIAAATGLGLLAFSEIETILQVLGSAAIIQLLSKKLLFAEDRKKTLQQVDEFLSTKVAPNELVDDIKQIGVALIPTTTTSKALPAPTEANPEPKSEVSAETPTQINAVPESESKAKGSSGTPRPLSPYPSVMPVFNLRLILL

SEQ ID NO: 73208 - protein, 90 aa, Gossypium hirsutum
  Clone ID: GOSHI-09MAY01-C75155_1.pep
MVIMIHHTVLTVQDILFQGHEAPPREGRIMRGVEGAPWYMKILVVMAPTVQDILQELMDLNMRPMKDGTTATWIIHLGIVAIDITAGGDW

SEQ ID NO: 73209 - protein, 226 aa, Gossypium hirsutum
  unsure (1)..(226): unsure at all Xaa locations
  Clone ID: GOSHI-09MAY01-C75095_1.pep
RIIMLHQPSKVMDMEHELRALRIQLAEKSKRSLLLQKELARSKGVKDNLSNLFELDGAETLGSYLKIKPCSDIAPELSKCSIQWYRVSSEGGKKELISGACKSVYAPEPFDVGRSLQAEIIYDGQLIKLTTTGAMDPAAXGLGNYAEALVRKHDVEFTVMVTQVNAADQPSESIHVLHVGKMRMKLRKEKTAIAQEYYSSAMQVCGVRGGGNAAVQALFWVTKKGF

SEQ ID NO: 73210 - protein, 164 aa, Gossypium hirsutum
  Clone ID: LIB3584-035-P1-K1-D4.pep
KSLRSRHSSSQASKVNALYEGSLSPKSTSFKEGLIRNSSFPRSTTRDKLRRRGDNLPLAESLKVASTIINDSSNCNQAGTDNLLDSKSCSLTPNFLESLGKLAAPPTPSGVSQVSSVGPPLFSPYYCWCPLGSSTLQCSATSELPASCISSFKLPPLSSMLPTN

SEQ ID NO: 73211 - protein, 100 aa, Gossypium hirsutum
  unsure (1)..(100): unsure at all Xaa locations
  Clone ID: uC-gsronu33B138b11b1.pep
MVATGDGELGFDSSVGPPLFSPYYCWCPLGSSTLQCSATSELPASSIXLXKLPPLSSMLPTNGSSSSLKPTLPLGLTDVPSLDFPAYLPEPLVRLPLASS

SEQ ID NO: 73212 - protein, 120 aa, Gossypium hirsutum
  Clone ID: GOSHI-09MAY01-C75315_2.pep
VSDAGAVPALSKRMHYGKFVAEGKYQASPDAYRAAIREQDRDWLMKLLTYPSVEEAIKKRVEMKARAYGQVVPDNMNMKDADPVYKINPSLVADLYGDWIMPLTKEVQVEYLLRRLDGPE

SEQ ID NO: 73213 - protein, 267 aa, Gossypium hirsutum
  Clone ID: GOSHI-09MAY01-C75315_1.pep
PTSTTTAGNPRKQINKNQARVDKSENLTLEAVRYSLIRQEDSIIFSLLERAQYCYNKDTYDPDAFSMDGFHGSLVEYMLRESEKLHAKVGRYRSPDEHPFFPDELPEPLLPPLQYPQVLHPAADSININPKVWQMYFRNLIPRLVKAGDDGNCGSTAVCDTVCLQALSKRMHYGKFVAECKYQASPDAYRAAIREQDRDWLMKLLTYPSVEEAIKKRVEMKARTYGQVVPDNMNMKDADQFFLLNIILLLNVSCRNKLTFTMLLFSP

SEQ ID NO: 73214 - protein, 219 aa, Gossypium hirsutum
  unsure (1)..(219): unsure at all Xaa locations
  Clone ID: GOSHI-09MAY01-C75325_2.pep
SKRSQLEGRKKKKSKMEKDESLATVAPKAPVTSERKILDNLDEKLPKPYLARALVAPDVEHPKGTEGRVNNGMSVLQQHVAFFDRDNDGIIYPWDTYNGLRDIGFGPVSSFIFGVLINGAMSYPTLPXMPVNLENLFTKYARTEPGKLTFFEVLRLTEENRVPFDFLGWILAKAEWLVLYSLARDDDGFLSKEAARTCCEGSLFEQYAKMNKGDNKKRK

SEQ ID NO: 73215 - protein, 78 aa, Gossypium hirsutum
  Clone ID: GOSHI-09MAY01-C75325_1.pep
ETKIYICKIRGSNKQLCLISHKLLIWFDWEIWKGWIPNILLPIYIDRIHKAKHGSDSATFDTEGRFAYEISYIFQPLK

SEQ ID NO: 73216 - protein, 76 aa, Gossypium hirsutum
  Clone ID: LIB3828-028-Q6-K6-A3.pep
TIIPYISHKLLIWFDWKIWKGWIPNILLPIYIDRIHKAKHGSDSATFDTEGRFAYENQLYISTAENSFIPSKIQSC

SEQ ID NO: 73217 - protein, 141 aa, Gossypium hirsutum
  Clone ID: uC-gsflmaxxa055e12b1.pep
MEKDESLATVAPKAPVTSERKILDNLDEKLPKPYLARALVAPDVEHPKGTEGRVNNGMSVLQQHVAFFDRDNDGIIYPWDTYNGLRDIGFGPVSSFILGVLINGTMSYPTLPGWIPNILLPHYIDRIHKAKHGSDSATFDT

SEQ ID NO: 73218 - protein, 265 aa, Gossypium hirsutum
  Clone ID: GOSHI-09MAY01-C75205_1.pep
RKVNMEEERLEMMLGSYGGKVSVLEWETESGAAEETMLLWGIQQPTLSKQNAFVSHSSLQLLLDACGHSLSILQSPSSLGKPGVTGAVMWDSGVVLGKFLEHAVDLGILVLQGKKVVELGSGCGLVGCIAALLGAQVILTDLPDRLRLLKRNVESNLPPRPRGSAAVKELTWGDDPDNDLIEPPPDYGPGAVVSEGAVVDLLDSLTQLCRPQTTVFLSGELRNDTVLECFLEAAVKDFVVGRIDQSQWHPDYRSPRVVMYILVKK

SEQ ID NO: 73219 - protein, 407 aa, Gossypium hirsutum
  unsure (1)..(407): unsure at all Xaa locations
  Clone ID: GOSHI-09MAY01-C76945_1.pep
RKANVLTTKDFGSNSCNXKLIGARYFCSGYEASNGKMNETSEFRSPRDSDGHGTHTGWVAAGRYVFPASTLGYAKGVAAGMAPKARLAAYKVCWNAGCYDSDILAAFDSAVADGVDVISLSVGGAVVPYYLDAIAIGAYGAAEKGIFVSASAGNGGPGGLTVTNVAPWVATVGAGTIDRDFPADVKLGNGKVVTGAGVYNGRGLSPGRMYPLVYAGSGGGDGYSSSLCLEGSLDPDFVKGKIVLCDRGINSRAAKGEVVKKAGGVGMILANGVFDGEGLVVDCHVLPATAVGASNADEIRQYIDSASXKSKSSATATILFKGTRLGVRPAPVVASFSARGPNPETPEIXKPDVIAPGLNILAAWPDKVGPAGIPSDNRKTEFNILSSTSMACPHVSRLAALFEAAHP

SEQ ID NO: 73220 - protein, 149 aa, Gossypium hirsutum
  Clone ID: GOSHI-09MAY01-C76665_1.pep
MGLDDACNTGLVLGLGFSSTPETPSKADNQKPKKSTAKVAPVTSFEPFLTLGLSGDSYGVTVAKKVDVNNKGGGYLHHRHEDSPPTAAAGDLYRPGSPPSAGSSFSSGRVKRERDHSCEEVEVEKNSCRVSDEDDHGVNARKKLKPTKQ

SEQ ID NO: 73221 - protein, 96 aa, Gossypium hirsutum
  Clone ID: GOSHI-09MAY01-C76385_1.pep
EIAAAKTASTSPLFFMPKLSFFNFDLDEVNQEVDVVPTLVRISFLPFIFFLFGVHKKQRIKEIKKKREKMTEKITLKKTLCFDFPFVFNIPKKAPS

SEQ ID NO: 73222 - protein, 154 aa, Gossypium hirsutum
  Clone ID: GOSHI-09MAY01-C76355_1.pep
VVHRDVKCANILVDASGSVKLANFGLAKATKLNDVKSCKGTAFWMAPEVVNRKGQGYGLPADIWSLGCTVLEMLTRQIPYHQLERMQALFRIGRGEPPPVPDSLSKDARDFVLQCLQVNPDARPTAAKLLQHPFVKRPPPSHSGSASPHLGRRF

SEQ ID NO: 73223 - protein, 188 aa, Gossypium hirsutum
  Clone ID: GOSHI-09MAY01-C76275_1.pep
FFQELTSYITPMWGKDKTAEKRRVAICIFDDIAEHCREAALKYYDTYLPFLLEACNDESPDVRQAAAFGVGLRAEFGGSAFKPLIQEALSTLNAVIRHPNASHLDNVMAYDNAVSALGKICQFHRDSIDAAQILPAWLSGLPIKGDLIEAKIVHEQLCSMVERSDHELLGPNNQYLPKNISVFAKVLC

SEQ ID NO: 73224 - protein, 324 aa, Gossypium hirsutum
  unsure (1)..(324): unsure at all Xaa locations
  Clone ID: GOSHI-09MAY01-C77555_1.pep
PTRATTRPPTRSRVPENDRHGLTFGSFGVEHDSSRNFAPGFHATGVAXDSNGESAASLSVAPDTFSDDSAAGKPINIIDDQLRNSGSNSPPSGTPPVRQLPDKKDASSPQNLGSYADIGMVQDNGQSYAPSEPQQQHDPPELPSFSAYDPQTGYDLPYFRPSMDETARGQGLLSSQEALSGHAPRVPPPARPGVRQQQPPVAQMYPQVHVPHYANLMPYRQFVSPIYLPQMAMPGYSSNPAFPHPSNGSSYLLMPGGSTHLGANGVKYGIQQFKPVPAGNPTGFGNFTSPSGYAINAPGVDGSATGLEDSSRTKYKDGNIYVQN

SEQ ID NO: 73225 - protein, 197 aa, Gossypium hirsutum
  unsure (1)..(197): unsure at all Xaa locations
  Clone ID: LIB3585-032-P1-K1-C7.pep
IERRRSSGCRLHSNMYSFTQEDDWCFNCISGAESIGGKHPPNGHMPPSSEVALPLVTVPTSDFNKDNGIMWASSPDRLELPPKPFHHSNCSDSPRVSESGSDIYSKREVIQKLRQQLKRRDDMILEMQDQITELQNSLNAQISHSRYLHIQVXVANRDWFDPKREIQGLRKVIADHCVVRVNTDKTSTGTALAPDNK

SEQ ID NO: 73226 - protein, 182 aa, Gossypium hirsutum
  unsure (1)..(182): unsure at all Xaa locations
  Clone ID: LIB3583-004-P1-K1-G4.pep
ALLSTLSIRLGXKVKHALDTKQQHDSSTRSKGIGSSDRRRSSGCRLHSNMYSFTQEDDWCFNCIAGAESIGGKHPPNGHMPPSSEVALPLVTVPTSDFNKDNGIMWASSPDRLELPPKPFHHSNCSDSPRVSESGSDIYSKREVIQKLRQQLKRRDDMILEMQDQITELQNSLNAQISHSSH

SEQ ID NO: 73227 - protein, 145 aa, Gossypium hirsutum
  Clone ID: GOSHI-09MAY01-C77065_1.pep
ITWRANAVVPLDDVDLTPSSTTSTDVVSSRIHSLYLQRQSHLRRAARLTSLSSALNSAERMVEAIFRGNPVGRNQEQAPAAVVDDRDSFSSIAAVINSERQMDTAVEIDSVVSLSASSSRRRNDVLRVSDVDSGDSRAHRRRRLN

SEQ ID NO: 73228 - protein, 93 aa, Gossypium hirsutum
  Clone ID: GOSHI-09MAY01-C77025_1.pep
MGLLSIIRKIKRKEKEMRILMVGLDNSGKTTIVLKINGEDTSVISPTLGFNIGTITYQKYTLNIWDVGGQRTIRSYWRNYFEQTDGLVWVVDS

SEQ ID NO: 73229 - protein, 248 aa, Gossypium hirsutum
  unsure (1)..(248): unsure at all Xaa locations
  Clone ID: GOSHI-09MAY01-C77355_1.pep
QRPVLLYVRSQIEKAPILEIDQQLYAPLYRNVSMFKRSYELMESTLKVYIYKXKGKKPVFHKPVLKGIYASEGWFMKQLQANRNFVTKKPREAQLFYLPFSSRMLEETLYVPDSHSIQNLPRVRKNYVDTIAAKYPYWNRTQGADHFMVACHDWATSETKEYMANCIRALCNSDIREGYIFGKDVSLPETTIRNPQRPLRDLGGEPPSKRSILAFFAGGMHGYLRPILLQQWGNKDPDMKIFGTMHNG

SEQ ID NO: 73230 - protein, 72 aa, Gossypium hirsutum
  Clone ID: AI727746.1.pep
LYFNKFLIIFFFFFFFFFFFIFFFFFFFFFFFFFFFFFFAQFYGNIFAKMNLQQANEAKQEQRTPMIIDSKA

SEQ ID NO: 73231 - protein, 224 aa, Gossypium hirsutum
  unsure (1)..(224): unsure at all Xaa locations
  Clone ID: GOSHI-09MAY01-C77315_1.pep
EREKEKGRCSLNEPNSEEIAAYLNRVHFGSHPSEENDEDGEVEDAIECEEDSAESDLLELNMDNNSSNNNKNYKLVYAFAARDSREPQINEDITGRNSASSKLPRRSTSLQRSISDGIDWGMQKDRHQDSVDNDLEWNRXLDLEKHVETKGYGDEMHGYKAVKGLREHLLSGTRAGRVYASPTCSSRDINNVAQERPPLVPGSVPKSRLAECRSEANNARKSRW

SEQ ID NO: 73232 - protein, 205 aa, Gossypium hirsutum
  unsure (1)..(205): unsure at all Xaa locations
  Clone ID: GOSHI-09MAY01-C70975_1.pep
VVGPGLGRDPFLLECVSKIMTRAGQSNVPIVVDGDGLFLVTNSIELVSGYRLAVLTPNVIEYKRLVQKVLGCDVNDQNTHGELLSLSKQIGGVTILRKGKSDLISDGEKVQSVSIXGSPRRCGGQGDILSGSVAVFLSWARQCNLAAERESTISRTNPTVLGCIAGSALLRKAAALAFEHKKRSTLTTDIIEHLGQSLEAISPVS

SEQ ID NO: 73233 - protein, 207 aa, Gossypium hirsutum
  unsure (1)..(207): unsure at all Xaa locations
  Clone ID: GOSHI-09MAY01-C70965_1.pep
MDHFLRKASFSSGSKSIVRIIAIGAASAGLLYLNNNPDSKATVKLSIPTILREHLAFQGHPSFVSSDHWQFGKFPLFLSRVDPALAGDVAKGAPVAVGDGGKPSCGMFRXRDFIANAAAKIAPAVVNLSVQQDLYGFTTVRSMCSGTIIDADGTILTCAHGVVDSQGRQLTTKGKIDVTLQDGRTFEGTVGNSDLHSDIAIVKIKSK

SEQ ID NO: 73234 - protein, 173 aa, Gossypium hirsutum
  Clone ID: GOSHI-09MAY01-C70835_1.pep
MKSMEEMWQKQMVSLQTSLTAARKSLAADNGAGQLGRADVLSPRCYDSEDNVSMGSRTTGGNTPVLFSGAMPDVVGGRENGSLNALGNLLKEFEQRKQNFDADAKSLIDIRVPQQASNMNPDDELRTLRLRFETWKKDYKLRLKAAKARLHKRGHPESDKARRKWWGKLGSRA

SEQ ID NO: 73235 - protein, 220 aa, Gossypium hirsutum
  unsure (1)..(220): unsure at all Xaa locations
  Clone ID: GOSHI-09MAY01-C70595_1.pep
FFFFGSFGSHFLSSSPGGWGKPKHYRPPGKKKEGNAARYVTRSQAIKILQVSLSXAGEFRFLKGVFPREPKKKVKGNHPTYYHLKDVMYILHDPLLEKFREIRAYQRKIKKAKAKKNDELAKLLLSRAPSYRLDMGIRDRDPTFIDALRDLDDPLTMGHLFPMLPAXDRLKIEVKRIHNLAKGGSMNGQAYFSRTHKLRKAFVAVKGIYYQAEVDGQKIT

SEQ ID NO: 73236 - protein, 73 aa, Gossypium hirsutum
  Clone ID: LIB3582-005-P1-K1-F7.pep
EKQKALFVKQRIKSERDEVWLVPHHKFLKQSYNGTIYHLVKSPPYWLTIQHVLTSGKKKGRKCCEICDEVTSY

SEQ ID NO: 73237 - protein, 310 aa, Gossypium hirsutum
  unsure (1)..(310): unsure at all Xaa locations
  Clone ID: GOSHI-09MAY01-C70785_2.pep
PQNFFFFFFFFYFFFFFFFFFFFFRTNINPGIDINFTYKKGKAWKKAFGPLLIYLNSASPDKDCRKKLWNDSKKQLIEKIQSWPYNFTRSKNLPHAGNQRKICGQLLLQNRCLDEELMQAQSPFVGLAMPENFGSWQTEGKGYQFWTETNNTGRFNIKNVPRGEFNLYAWVHGFIGXYKSDLCIPIQPGKXMANSGTPIYDPPRYGPTLWAIGIPHRTVAEFFLPEPHPPFVIPFRLDAADRFRQYGLGDRYSDIYGHGDVVYTVGVSHHPRDWVCAHVLRNTGNITDWPTTTWQMKCTLHDVNEKGTYT

SEQ ID NO: 73238 - protein, 158 aa, Gossypium hirsutum
  Clone ID: GOSHI-09MAY01-C70785_1.pep
VTYKKGEAWRKAFGPVLIYLNSASSDDDCRKKLWNDAKRQLSEEIESWPYNFTRSEDLPHAGDRGEVCGQLLVRDRCVDEELMQAQSAFVGLAVPGNVGSWQTEGKGYQFWTETDNTGRFNIKNVRRGEYNLYAWVHGFIGDYKLDLSITIQPGKVNL

SEQ ID NO: 73239 - protein, 120 aa, Gossypium hirsutum
  Clone ID: GOSHI-09MAY01-C70185_1.pep
HRSVCQAPSVFGGFRSLTGTLTSFWNGRASGENDTGVTIASNSDGIPATNKFYFFGLRNTRSRGLKQSTEILNVGKVFFNRELTFFYGYNSCLTRDTLAPIDATTVDSQCSRHRKLTSRL

SEQ ID NO: 73240 - protein, 204 aa, Gossypium hirsutum
  Clone ID: GOSHI-09MAY01-C70005_2.pep
MLPPTRPGKTTLWHFVVQEIIRTEGLRAARATRENKSSLLEDVSPDMEEHYHNLGLEVVSHLSSELENVKKAASIDAETLTGTVAKLGHGLLKARDFLKSEMKNTNEQSGFHEALKSFVQNAEVDVTSLLEEEKRIMALVKSTGDYFHGNAHKDEGLRLFVIVRDFLIILDKVCKEVRNAPRKPVKTHKKHASNASSSSSESCL

SEQ ID NO: 73241 - protein, 99 aa, Gossypium hirsutum
  Clone ID: LIB3584-008-P1-K1-A2.pep
PEPKPPGFDPRRFFAHKDEGLRLFVIVRDFLIILDKVCKEVRNAPRKPVKTHKKHASNASSSSSESCLAPTSPDPHQKLFNAIAERRMENFSSSSDDES

SEQ ID NO: 73242 - protein, 123 aa, Gossypium hirsutum
  Clone ID: GOSHI-09MAY01-C70385_1.pep
MTAITDRGLALIGGGLPSLQSLDASYCRKLTDKGLSAVADGCHDLRSLHLAGCRFVTDGLLFSLSRNCKNLVELGLQGCTNISDSGLADLVNGCQHIRFLDINKCSNVGDVGISKVAEVCSSS

SEQ ID NO: 73243 - protein, 256 aa, Gossypium hirsutum
  Clone ID: GOSHI-09MAY01-C70315_1.pep
PTRPALASWRSLEALDLSHNALTGSLPSGLFQLQNLTKLLLISNDISGTIPPEIGNCSSLIRVRLVNNRISGMIPKEIGLLDNLSFLDLSENHLGGSVPDEIGNCTQLQMLNLSNNTIEGSFPSSLSSLTRLQVLDVSVNQFKGQIPESFGQLTSLNRLILSRNSLSGAIPSSLGHCLNLQLLDLSSNALSGTIPEELFDIQALDIALNLSWNALSGVIPPQVSALNKLSILDLSHNKLEGDLVAISGLDNLVSLN

SEQ ID NO: 73244 - protein, 199 aa, Gossypium hirsutum
  Clone ID: GOSHI-09MAY01-C70305_1.pep
MAMQEGSPADTHTPSAQVVGNAFVEQYYHILHQSPNLVHRFYQDSSCLSRPDMVGNMATVTTMQAINEKVLSLNYQDYTAEIKTADAQDSFEKGVIVVVTGCLTGKDNIRRKFTQTFFLAPQDKGYFVLNDVFRYVEDNELQNSVPANGISEQASISALTPEPELTDDQLAKEPLTYSEEEDINNGTEVCDPLDKRKDQ

SEQ ID NO: 73245 - protein, 115 aa, Gossypium hirsutum
  Clone ID: LIB3493-037-P1-M1-E4.pep
MAMQEGNPAGTPSAQVVGNAFVEQYYHILHQSPNLVHRFYQDSSCLSRPDMYGNMTTVTTMQAINEKVLSLNYEDYTAEIKTADAQDSFEKGVIVLVTGCLTGKDNVRRKFTQTF

SEQ ID NO: 73246 - protein, 196 aa, Gossypium hirsutum
  Clone ID: GOSHI-09MAY01-C71855_1.pep
MAPIRMIDIAVNFTDGMFKGIYNGKQHHVSDIATVLSRAWNAGVDRIIVTGGSLEESKEALAIAETDGRLFCTVGVHPTRCKEFEESGDPEKHFQGLLALAKEGIQKGKVVAIGECGLDYDRLHFCPPEVQKKYFEKQFELAYATKLPMFLHMRAAAEDFCEIMERNINKFTGGVTHSFTGSAEDRDKLLSFHNMY

SEQ ID NO: 73247 - protein, 189 aa, Gossypium hirsutum
  unsure (1)..(189): unsure at all Xaa locations
  Clone ID: GOSHI-09MAY01-C71785_1.pep
MHRSGTTMAWNVFKFCTVLKGLGSIMILLVLGXVGVTYYAVVFTNYGPALFDGGLHSFIAVVVLILFHFLLVMLLWSYLTVVLTDSGTVPPNWKPASDEERGEVDPLNESEFDGLQPDLSSQRIRYCWKCNQFKPPRCHHCSVCGRCVLKMDHHCVWVVNCVGALNYKYFLLFLVYTFLETSLVTLALF

SEQ ID NO: 73248 - protein, 293 aa, Gossypium hirsutum
  unsure (1)..(293): unsure at all Xaa locations
  Clone ID: GOSHI-09MAY01-C71665_1.pep
RTRGFKSNGKITALKLDILVDAGMSADISPVMPHNIIGSLKKYDWGALAFDIKVCKTNLASRSAMRAPGEVQASFIAEAIVEHVASSLALEVDSVRNINLHKFETLKLFFKTCAGEPLEYTLPSIWDKLAISSNFYHRTEMLKEFNRCNKWRKRGISRIPIVHPVILRATPGKVSILRDGSIVVEVGGIELGQGLWTKVKQMTAYALSLIQCAGNEELLEKVRVIQADTLSLIQGGFTSGSTTSESSCEAVGLCCNILVERLTAQXEKLEEQMGPVKWETLILQAYMISVNLS

SEQ ID NO: 73249 - protein, 253 aa, Gossypium hirsutum
  Clone ID: GOSHI-09MAY01-C71165_1.pep
MEGGGAQYNPRTVEEVFRDFKGRRAGMIKALTTDVEEFYQQCDPEKENLCSRGRPSEQWEVNLPAGEVPPELPEPALGINFARDGMQEKDWLSLVAVHSDAWLLSVAFYFGARFGFDKADRKRLFNMINDLPTIFEVVTGGVAKKQTKEKSLVSNHSCNKSKSNSKARESQAKHSKASQPKDEEQGLDEEDEDDHGETLCGACGENYASDEFWICCDACEKWFHGKCVKITPARAEHIKQYKCPSCSNKRARP

SEQ ID NO: 73250 - protein, 117 aa, Gossypium hirsutum
  Clone ID: LIB3583-024-P1-K1-D8.pep
MEGGGAQYNPRTVEEVFRDFKGRRAGMIKALTTDVEEFYQQCDPEKENLCLYGFPSEQWEVNLPAEEVPPELPEPALGINFARDGMQEKDWLSLVAVHSDAWLLSAAFYLGARFGYD

SEQ ID NO: 73251 - protein, 257 aa, Gossypium hirsutum
  unsure (1)..(257): unsure at all Xaa locations
  Clone ID: GOSHI-09MAY01-C71055_1.pep
SLFSSFLHQRKSDFNFNPLMADEPSLTRWSFLDFKLFYDAKFGRKRLPEPQNGQTADELDSNGTNSNVTSKENHPVRNTSDMAIYEQYRNQGTHSVHSNGAVSNGFDSRPQRSLLPAFESAEMRALGESLSRDIVRGNPDAKWESIKGLEDAKRLLKEAVVMPIKYPKYFTGLLSPWKGILLFGPPGTGKTMLAKAVATECKTTFFNISASSVVSKWRADSEKLIKVLFDLARHHAPSTIFLDEIDAIISXQRGGEG

SEQ ID NO: 73252 - protein, 148 aa, Gossypium hirsutum
  unsure (1)..(148): unsure at all Xaa locations
  Clone ID: LIB3583-019-P1-K1-B4.pep
SLFSSFLHQRKSDLNFNPLMADEPSLTRWSFLFGRKRLPEPQNGQTADELDSNGTNSNVTSKENHPVRNTSDMAIYEQYRNQXTHSVHSNGVVSNGFDSRPQRSLLPAFESAEMRALGESLSRDIVRGNPDVKWESIKGLEDAKRLLK

SEQ ID NO: 73253 - protein, 123 aa, Gossypium hirsutum
  Clone ID: GOSHI-09MAY01-C71075_2.pep
AWAYGMNIFDLEAWRKTNISLTYYHWLEENFKSDLSLWQLGTLPPGLIAFYGHVHVIDPFWHMLGLGYQDNTTLADAETAGVIHFNGRAKPWLDIAFPQLRPLWAKYIDFSDKFIKGCHIRAS

SEQ ID NO: 73254 - protein, 122 aa, Gossypium hirsutum
  unsure (1)..(122): unsure at all Xaa locations
  Clone ID: LIB3583-019-P1-K1-D2.pep
PILYCKNFDPNECAWAYGMNNLDLEAXQNFKSDLSLWQLGTLPPGLIAFYGHVHVIDPFWHMLGLGYQDNTTLADAETAGVIHFNGRAKPWLDIAFPQLRPLWAKYIDFSDKFIKGCHIRAS

SEQ ID NO: 73255 - protein, 134 aa, Gossypium hirsutum
  Clone ID: GOSHI-09MAY01-C71315_1.pep
MGSFLSSLLGSSGSPSEDSPSSSESSRVSTFHSAPRWQLHFNSVKESPELMVIDFSASWCGPCKFMEPVLNEMAAKFTDVDFVKLDVDELPDVAQEFGVQAMPTFVLVKQGKEVDRVVGAQKNELEKKVEKNRC

SEQ ID NO: 73256 - protein, 83 aa, Gossypium hirsutum
  Clone ID: GOSHI-09MAY01-C71265_1.pep
RSCPPYPLFPPGLIPGMVRKMQIGSGVPYSPLSPLDIPTVIPPSNVSPSEILERVSKFFKEIGEVNPSEGSLKSNSRDEDNGV

SEQ ID NO: 73257 - protein, 114 aa, Gossypium hirsutum
  unsure (1)..(114): unsure at all Xaa locations
  Clone ID: GOSHI-09MAY01-C72875_1.pep
RKGDPKVKELFNDIEKLRVEFEAIERPTLEIETPKIDTPNEDMQMVPESTQPKPDNTKAKTEAQPLLDPAAELAKLESEFGKCSQDYXSTEEIGDWEFDELERELRAGDTAPGK

SEQ ID NO: 73258 - protein, 124 aa, Gossypium hirsutum
  Clone ID: GOSHI-09MAY01-C72475_1.pep
GEQDRLCGLYPFKIELKDNPLDYIRDAKAKIDRKKATLEAKFRLFLAKVFVRFYPTKLAKFPSTTMWFSNVAGPQEPISILGNQVAFIAPSIYGQPVALTIHVVSYVNKMSMVLSVDEDIIADP

SEQ ID NO: 73259 - protein, 51 aa, Gossypium hirsutum
  Clone ID: GOSHI-09MAY01-C72115_1.pep
MDPQPEPVTYICGDCGQENTLKHGDVIQCRECGYRILYKKRTRRIVQYEAR

SEQ ID NO: 73260 - protein, 189 aa, Gossypium hirsutum
  Clone ID: GOSHI-09MAY01-C72355_1.pep
MACWGLYSILSAVFLYFVFITSRKRRRLPLPPGPKPWPIIGNLPHMSPVPHQGLAAMAKVYGPLMHLRLGFVDVVVAAPASMAAQFLKVHDSNFSSRPPNAGAKYVAYNYQDLVSAPYGPRWRLLRKMSSLHLFSGKALDDFRQIREEEIRVLVRALASAKTKVNLGQLLNVCTVNALGQVMMGKRVFG

SEQ ID NO: 73261 - protein, 148 aa, Gossypium hirsutum
  unsure (1)..(148): unsure at all Xaa locations
  Clone ID: GOSHI-09MAY01-C72365_1.pep
MIAYNRTIRGVMSDRDRCSIPLLGLSSLLNVAPFLXSSISFLRDLLGGPRSSPFXTYTRLTVCIDTASQSQALNSGNPILKTYDIVAVRPLNQXNAFDHACEKAEVDIISIDFSEKLPFRLKLPIVKAAIKRGIYFEITYSDLIVDVH

SEQ ID NO: 73262 - protein, 94 aa, Gossypium hirsutum
  Clone ID: GOSHI-09MAY01-C72315_1.pep
THASAERDLREKTCQLIVQTVLPVYRSYMQTYGPLVEKDASSSKYAKYTVQGLEQMLLSLFLPRRERYGSFKGRPTGSKIDNGVDLRRTASAVA

SEQ ID NO: 73263 - protein, 88 aa, Gossypium hirsutum
  Clone ID: LIB3493-054-P1-M1-A2.pep
MIENSSTSALRTLICTRYKIKPLKHEHFNPRDINRLDNHATADAVRRRSTPLSILLPVGLPLKLPYLSRLGRKRERSICSNPCTVYFA

SEQ ID NO: 73264 - protein, 155 aa, Gossypium hirsutum
  Clone ID: GOSHI-09MAY01-C72245_1.pep
MDVKKSKATVALMMMFMMLFLVNFPGCFSAASQQPINKKSTHLKPHNGFHSSFLFPVTGNVYPLGYYSISLSIGNPPKVFEFDIDTGSDLTWVQCDAPCTGCTKPIDHLYKPQKHILVSCEHPSCGVVHFPESPHCEKPDDQCDFEIDYLDHGSV

SEQ ID NO: 73265 - protein, 69 aa, Gossypium hirsutum
  Clone ID: GOSHI-09MAY01-C72265_1.pep
FLTTPRPMFQMIKHHPYFHHIKSSVFGFMFLLPTSLFALSLLLLARNGFSVFYMYLPGYIKSLPGPIKL

SEQ ID NO: 73266 - protein, 127 aa, Gossypium hirsutum
  Clone ID: GOSHI-09MAY01-C72215_1.pep
YGRAKKDLLIESHDAVYLVKAGEMLYGYQPFATKDPKIFENPEEFVPDRFMGDDGGRLLKHVLWSNGPETEDPTTANKQCAGKDFVVLVSRLFVVELFRRYDSFEIEVGKSPLGAAVTVTSLKRASF

SEQ ID NO: 73267 - protein, 100 aa, Gossypium hirsutum
  Clone ID: LIB3582-020-P1-K1-C12.pep
GPEPLIAALSGLSHHHYNQWPTTSEIGYLASVRGAFEGPKSLGRVPENKGTSQPPLWGSTPMEKEVSDDRPWGFSDDAWRATDGAAYEQTKRRGAVAKRS

SEQ ID NO: 73268 - protein, 81 aa, Gossypium hirsutum
  Clone ID: LIB3828-017-Q1-K6-G12.pep
KKLQESRSGLLKPFTIDSFLVFLFFALYFSALACFFLCYCACFRCQTTRGGRLMEQRASRRRGAGRWLNVPRVLLIFFALD

SEQ ID NO: 73269 - protein, 173 aa, Gossypium hirsutum
  unsure (1)..(173): unsure at all Xaa locations
  Clone ID: GOSHI-09MAY01-C73715_1.pep
PRVRQHIPFGASPQDVWSELGRPCGIHQKQVDQMVIHSASDPRPRTTLCAEYFCNHVTRGLDILFDGQTHKVXMFGLHTNYPGHADFNSYIKCNFVILVGGSFPDVNNYKNRITPSTKWEQVREILGDCGRAALQTQGXTSNPFGSTFGHGYQNAAFEVMKNGYIATVTLFQS

SEQ ID NO: 73270 - protein, 288 aa, Gossypium hirsutum
  Clone ID: GOSHI-09MAY01-C68585_1.pep
QVQMLFASKYGKEFVSAASELRPDCGVNRQLIELLSIRVPSPEVKLKILKEIAEEHELEWDPAATESEFFKPHEDLLNGPTNLETGSKLPPPVEKHDEAFTSAANRAQTEQPDSDSDFDPLDFPQVPNVSLKPSTNAASAPVTNPLSSAAPEPEIDHSSRHSGASRHVLQMSPLEPLEPDMTQEHSLTKESTMPNDPAGAKENKQFLPFISSPPVSASPISERPSDPTPAILKTNSEANIDLEDVLAAAQSAAETAERAAAAARAAASLAHVRIAVLTQKWNGQVNEG

SEQ ID NO: 73271 - protein, 274 aa, Gossypium hirsutum
  unsure (1)..(274): unsure at all Xaa locations
  Clone ID: GOSHI-09MAY01-C68635_1.pep
AIDPGNKEGLRQEVIVDLVEQCRTYKQRVGHLVNSTSDESLLCQGLALNDDLQRVLARHEAIASGTPSQANKPKPEPAKELVNVGSPLIDTGDSSKQSEGRSTSSTVTSSPFNQLXLPAPPATNGSTPPPAANPKMDLLRGDDFNSPKADNSLALVSLGEPQQAPPASQQNALVLFDMFSDGSNTSNSVNTQSSGLAGQTNPLTPQIQQQHQQQHNFHANGTAPNMGAPPQYEQPYAQGTVPAWNGQLVQQQQPPSPVNGAESSGSLPPPPWEA

SEQ ID NO: 73272 - protein, 110 aa, Gossypium hirsutum
  Clone ID: GOSHI-09MAY01-C68185_1.pep
MGEAILTTLSMETDHPSTLLSMDSGSFLPNELEREMNRSMLLSRPPDINLPLSSEPSPPPLAWNDSCEILHVSLAPHIYDAVVSVPKVAKMCIKPLDYVWGAWFFFTFYS

SEQ ID NO: 73273 - protein, 177 aa, Gossypium hirsutum
  Clone ID: GOSHI-09MAY01-C68385_1.pep
MKFGKEFAAQMVQEWRGAYMHYSKLKSILKDILRFKQKNKEPLTMATTTTTTTKGALNRRASLYRAFSGLTNRYKPVSAMKNNEDEVILVSAVQEGGVGGDYQTMFLMPGEEGGAFELPFFRRLDDEFNKVLRFYKKKVEEVMLEADELSKQMNALTALRIKVDNPVVKGTDMGNLA

SEQ ID NO: 73274 - protein, 197 aa, Gossypium hirsutum
  Clone ID: GOSHI-09MAY01-C69815_1.pep
LLSTNNICVFFLECSNGTTTNNNWHAGLAFAVGVFLALMPVKYQSMAPFETYNALMLMVIIVTLVYAAAWQIEYHLQTSNNNSSIHRIIVTKISLLSGSLVAVVLVLVIVPAIGWFVLLVWTLFLMKQIYEACQMLHRLYQSISLVSYVFNEVVGPRGHPSPICFAPYHPCASLLPPACTPLESANREDNSSKNKAK

SEQ ID NO: 73275 - protein, 288 aa, Gossypium hirsutum
  unsure (1)..(288): unsure at all Xaa locations
  Clone ID: GOSHI-09MAY01-C69525_1.pep
AFCWLCGGATGRDHTWSRIAGHSCGRYIEDREKKTERAKRDLYRYMHYHNRYKAHTDSFKLESKLKETILEKVSISEERESRLRDFSWVTNGLCRLFRSRRVLSYSYPFAFYMFGEELFKDEMTNEEREIKQHLFEDQQQQLEANVEKLSKFLEEPFDQYTDDKVMEIRMQVINLSVIIDSLCKKMYECIENDWLGSLQRNTHNIAPYKSKGIEKASEXLLSVWSGKASTTSGKCLPSDCGTSGKRDRSFSFGTSDDKGCPSPKQPKXESYGGGFFDLNLPAEVLDRN

SEQ ID NO: 73276 - protein, 213 aa, Gossypium hirsutum
  Clone ID: GOSHI-09MAY01-C69705_1.pep
TKYHLGYPYNLDFDYGALAQLLHFSINNLGDPFIESNYGVHSRQFEVGVLDWFARLWEIEKDEYWGYITNCGTEGNLHGILVGREVFPDGILYASRESHYSVFKAARMYRMECVKVDTLVSGEIDCSDLRPKLLANKDKPAILNVNIGTTVKGAVDDLDVVIQTLEECGFSHDRFYIHCDGALFGLMMPFVKRAPKVSFKKPIGSVSVSGHKF

SEQ ID NO: 73277 - protein, 175 aa, Gossypium hirsutum
  Clone ID: GOSHI-09MAY01-C69105_1.pep
MNVAPSTAAFTGQIQTMPFGAGAPAFAPVGNFSTLPPTGPLVAASGLTHTVPGSSGSSQIGVNNAGQWPNMQHQQTHFFSTAGGQTSQQLNGASPSQPWNFAPSPHMQGPQAVSKPFQDVTSAVASQQPPTETKASGRQELPADLFTATYSTYPAPTPGWQMAPSCGMGFTCNIY

SEQ ID NO: 73278 - protein, 129 aa, Gossypium hirsutum
  Clone ID: GOSHI-09MAY01-C69305_1.pep
MGSETNASVKTSVGRSCVPKTKGKVPKRVHKAEREKLKREHLNELFLDLANALDPNQPNNGKASILWEATRLLKELFGQIESLKKENASLVSESHYVNVEKNELHEENSTLETQIRELNSEIGTRLSQS

SEQ ID NO: 73279 - protein, 153 aa, Gossypium hirsutum
  Clone ID: GOSHI-09MAY01-C64915_1.pep
MAMLVEDILQSVEIWLKLIKKPPPYADPNLDPVLLVPGIAGSILTAVDDQNGKEERVWVRILGANYKFRTKLWSRFDPSTGRTESLDPNTTIKVPGGRYGLGAIDVLDPDMIVGRDCVCYFHDMIVEMLKGGFQEGKTLFGFGYDFRQSNRLQ

SEQ ID NO: 73280 - protein, 129 aa, Gossypium hirsutum
  Clone ID: GOSHI-09MAY01-C64585_1.pep
IKKAVPFAGFLSFFFLILKKEKIMGNCMMKTLGSRPHLEEEEEEEEIGEAASTDYKKENEGKKSSIKVKIVLTKEELDLLLVKLKNKGNGGKSLEEILGEIEKARSEKLDSSWKPSLESIMEDDDVINS

SEQ ID NO: 73281 - protein, 89 aa, Gossypium hirsutum
  Clone ID: GOSHI-09MAY01-C64535_1.pep
SLLFLCSFSPIFLPSNCCSLVHLKQFAKYYYQYAPSLNGETITTLFRCLSSSSVSCFQSLCYSIQLSGMEAMHNLALHHCLSYHRHPYT

SEQ ID NO: 73282 - protein, 130 aa, Gossypium hirsutum
  Clone ID: GOSHI-09MAY01-C64795_2.pep
LNSLSLKTNINSSSSYAFKTLSFSSNLSHNLFSKGNLSFSTVTPKPIPDGADAVVQVEDTEQVKAPSETKYVKILVQTSKGVDIRQVGCDIQKDAVVLKSGERLAASEVGLLATVGVTMVKVLPSPPFAV

SEQ ID NO: 73283 - protein, 188 aa, Gossypium hirsutum
  unsure (1)..(188): unsure at all Xaa locations
  Clone ID: GOSHI-09MAY01-C64795_1.pep
MATALNCCLSSSCFSLQSKLNSLSLKTNINSSSSYAFKTLSFSSNLSHNLFSKGNLSFSTVTPKPIHRSFVVCEAAPKKKADSAAKRARQAEKRRVYHKAKKSEVNTRMRKVLEALDVLRKKPDAAAXEIFPIEKLIAEAYSVIDKAVKVGSLHRNTGARRKSRLARRKKXIEIHHGWYAPAPAENAA

SEQ ID NO: 73284 - protein, 157 aa, Gossypium hirsutum
  unsure (1)..(157): unsure at all Xaa locations
  Clone ID: uC-gsflmaxxa058b04b1.pep
LASAHASAHASAVDEALQIVLSVAQKLPPVTVPLHQALGKVLAQDIVPPDPLPPYPASIKDGYAVIASDGPGEYPVIVESRAGNDGLGVTVTPGTVAYVTTGGPIPDGADAVVQVEDTEQVKAPSETKYVKIFGATSXGVDIRQVGCDIQKDAVVLK

SEQ ID NO: 73285 - protein, 74 aa, Gossypium hirsutum
  Clone ID: LIB3585-065-P1-K2-G10.pep
LGLKVLSEAPPFLKTDPIRPEFYHATIRWEANDGSGSARFVVESTDHQMSSPLLSMKSANALKLSSVIISKETF

SEQ ID NO: 73286 - protein, 157 aa, Gossypium hirsutum
  Clone ID: GOSHI-09MAY01-C64685_1.pep
MAVSKSSSGKQQNDRDQEYHKKSEPLIPGLPDEIAELCLLHLPYPYQSLARSVCCSWNRTITDPGFLLSRRSLSLSLPYLFVFAFHNSTARIQWQAFDPRSGRWFILPPMPCPKSVFPPGFACTSIPRQGQLYVLGGMRSDTQTSSTQRSSTLHHKS

SEQ ID NO: 73287 - protein, 360 aa, Gossypium hirsutum
  unsure (1)..(360): unsure at all Xaa locations
  Clone ID: GOSHI-09MAY01-C64165_1.pep
MDYFHSVTAIPTVAVIAFPLLRLFSLPWISRRNTNSKKTAPEAGGAWPIIGHLRLLGGPQPPHISLANMADKYGRIFAIKLGVHRALVVSDWEIAKECLTTNDKAFASRPMLACSELLAYNGAMFGFAPYGPYWRHVRKVATIELLSNHRLELLKPLRESEVKTSLQQLYQLGDQEEKGLLSVKVLVEMKGWFKEVTLNVIMRMIVGKRLPNSSEGGENLKGRNSLDDFFVLSGKFLISDALPVLRCLDIGGDIKCLKKTAKEXDQVLQGWLREHKQKRAENKQTXGRFMGVMLSILSEARXHHADTINKINCLGLILAXEDTTXITLTWXILLLKYRDKLSKVQQELDGHIVRIDYFCR

SEQ ID NO: 73288 - protein, 121 aa, Gossypium hirsutum
  unsure (1)..(121): unsure at all Xaa locations
  Clone ID: uC-gsronu33B132a06b1.pep
VENLKWKKYMDDFFELSGKFLISDALPFLRWLDIGGDMKYMKKTAKELDQVVEGWLREHKQKRAENKANSEEDFMGVILSILSDAEELHADTINKATCLGIVLAAEDXTSVTLTWALSLLL

SEQ ID NO: 73289 - protein, 135 aa, Gossypium hirsutum
  Clone ID: GOSHI-09MAY01-C64365_1.pep
MESPFRANILKRKVALVTGGGSGIGFEISVQLGKHGASVAIMGRRKHVLDSAVDVLRSHGIPAIGLEGDVRREDDAARTVESTFKHFGRLDILVNAAAGNFLVPAQDLSPNGFRTVIDIDSIGTFIMSHEAPKYL

SEQ ID NO: 73290 - protein, 93 aa, Gossypium hirsutum
  unsure (1)..(93): unsure at all Xaa locations
  Clone ID: GOSHI-09MAY01-C64215_1.pep
LCFCICSAHCSWETQGSSVGSINELIECLINRVDLTESEAEASLEFLLTEANEALISAFLVLLRAKGETFXEVVGLARAMLKHAWKVEGLNDA

SEQ ID NO: 73291 - protein, 210 aa, Gossypium hirsutum
  unsure (1)..(210): unsure at all Xaa locations
  Clone ID: GOSHI-09MAY01-C64235_2.pep
MAKTPIKYYLVDAFTDSAFKGNPAAVCLLEEERDEKWMQAVGGEINSHYWTXSDPQATSPNTTPPLRWFTPVTEVKLCGHATLASAHTLFTTGLVNSNIIEFDTVSGILTATRVPDVSPTNVSEVQNGGVTDCFLIELNFPSVPATDFNSAEASLVSKALNDAPPIDVKRTTPADDIFVVLPSGKSVTEMEPRFDDILKCSGLGLIVTGA

SEQ ID NO: 73292 - protein, 149 aa, Gossypium hirsutum
  unsure (1)..(149): unsure at all Xaa locations
  Clone ID: GOSHI-09MAY01-C64235_1.pep
MAKTPIKYYVVDAFTNSAFKGNPAAVCLLEEERDEKWMQSVAAEFNISETCYLTRITNSTSPNTRFRLRWFTPVAEVNLCXGHATLASAHTLFTTGLVNSNIIEFDTLSGILTATKVPEVCPTNVSEVQNGGVSDCSLIDLNFLHSAPI

SEQ ID NO: 73293 - protein, 304 aa, Gossypium hirsutum
  Clone ID: GOSHI-09MAY01-C65895_1.pep
TLNLISLSGKRGDRGDPNPAPPQTPWGELDEDDGEDLDFLLPPKQVIGPDENGIKKVIEYKFNDEGNKVKITTTTRVRKLANARLSKQAVERRSWPKFGDAVREDVGSRLTMVSTEEILLERPRAPGSKAEEPKAAGDSLAQLGKGGAVLMVCRTCGKKGDHWTSRCPYKDLALPAESFVDKPAVPETATAAAGSGKNTYVPPGMRAGADRSGTDMRRRNDENSVRVTNLSEDTREADLHELFRPFGAVSRVYVAIDQKTGMSRGFGFVNFVNKDDAQRAINKLNGYGYDNLILRVEWATPRTN

SEQ ID NO: 73294 - protein, 185 aa, Gossypium hirsutum
  Clone ID: GOSHI-09MAY01-C65825_1.pep
MAEKEDLGLSLSLSFPQNHHSLQRNLRPSLVPSSANSCSSLSTLTLNKHSWNDSSPPSDHNSESFRAEMGSIFRGIDMNILPSTVDCEEEAGVSSPNSTISSVSGKRSEREGNGDELEIEKSSSRGISDEEDGDTSRKKLRLSKDQSAILEENFKEHNTLNPKQKLALAKQLGLRPRQVEVWFQN

SEQ ID NO: 73295 - protein, 112 aa, Gossypium hirsutum
  Clone ID: LIB3829-003-Q6-K6-E1.pep
FLHAHNLESFRAEMGSIFRGIDMNILPSTADCEEEAGVSSPNSTISSVSGKRSEREGNGDELEIEKSSSRGISDEEDGDTSRKKLRLSKDQSAILEENFKEHNTLNPVSKFK

SEQ ID NO: 73296 - protein, 142 aa, Gossypium hirsutum
  Clone ID: GOSHI-09MAY01-C65505_1.pep
MDMDLSPKFPATFVETEDGGYYNWAAADSPVLREAKVAAGKLVLKPRGFALPHYADCSKVGYVLEGKCGVGLTTPASNTKEKRAFIGIKKGDIIPVPCASVSWWYNYGDSDVVIVFLADATNAYVAGEITYFLLTGPLGHLH

SEQ ID NO: 73297 - protein, 76 aa, Gossypium hirsutum
  Clone ID: LIB3272-019-P1-K1-E12.pep
PLWSTRIVWKSKASRLQHKLTSAALASRSTAESQLPNYSIRHLLSPERRRNLEPPHSIFLLSPSLLEILRAAPPLF

SEQ ID NO: 73298 - protein, 186 aa, Gossypium hirsutum
  unsure (1)..(186): unsure at all Xaa locations
  Clone ID: GOSHI-09MAY01-C65415_1.pep
MELKPGLSALVTGGASGIGKALCLALAAKGIFVTIVDFSEEKGKEVASLVEIENSKFHQNLGFPSAIFVKCDVTSLRDLNLAFEKHVSTYGGLDICINNAGIAYTALFWKDQTDGTKTWXKHTINVNLVAVIDCTRLAIKSMQALQKPGVIINMGSSAGLYPMYIDPIYSATKGGVVMFTRSLAPY

SEQ ID NO: 73299 - protein, 131 aa, Gossypium hirsutum
  Clone ID: GOSHI-09MAY01-C65115_1.pep
MEKDKAFMSEELKNRTTTRQQQPAWNPCGFMTEMSTNELNCGTEQGGNYFFNPNWDNSMDQSDPFESALSSMVSSPAASNVGSGENVMMRELIGRFGNICHSKDIITNSTNASWYSTPLNSPPFSTDPGIC

SEQ ID NO: 73300 - protein, 248 aa, Gossypium hirsutum
  unsure (1)..(248): unsure at all Xaa locations
  Clone ID: GOSHI-09MAY01-C65305_1.pep
MAMEDAEQPLLSPRLVGEDSRHQEQLLSRPSNTTFTPGIDDIPPINGVRDFFREYLIESKKLWFLAGPAIFTSLCRYSLGAITQVFSGQVGTLALAAVSVENSFIAGFSFGVMLGMGSALETLCGQAFGAGQVGMLGAYMQRSWVILNSTALMLSLLYIFAAKFLRVIGQTESISKAARMFAMWMLPQLFAYAFNCPMAKFLQAQSXIMVMAVIAXVVLVLHTVLSWLLMLKLGWGPTVQPCFNMSWI

SEQ ID NO: 73301 - protein, 157 aa, Gossypium hirsutum
  Clone ID: LIB3825-006-Q1-K6-A9.pep
GAEQPLLSSRLVGGDEQLLSRPSNITFTAGTDDIPPINSVRDFFREYLIESKKLWFLAGPAIFTSVCQYSLGAITQVFSGQVGTLALAAVSVENSVIAGFCFGIMLGMGSALETLCGQAYGAGQLDMLGVYMQRSCVILTATALNVSLVYIFRVQLL

SEQ ID NO: 73302 - protein, 198 aa, Gossypium hirsutum
  Clone ID: GOSHI-09MAY01-C66985_1.pep
LSVAKLPSTPLFLCLVLPLFTLMIWLKLQTNGRKRLKLPPSPPKLPFIGNIHQLGKLPHRSLRDLSRKYGSLLLLQLGHNQTLVVSSADMVKEIVKNHDVAFSDRPSTTAANILFYGRTDVAFAPYGEYWRQARKVCGTELLTLRRVNSFQFLRDDEVAVTIDKLRRASFKGEAVNLTEVLMVASNNQISRSALGRKF

SEQ ID NO: 73303 - protein, 155 aa, Gossypium hirsutum
  Clone ID: GOSHI-09MAY01-C66505_1.pep
MGVLYSPLNQTPHFHFLLINTPFPFLFLFSMCFFVDDPGLILSHFLYKTAVFLAVLRWVLSWLLNLRFKDINSFFFTPKFSSNSHQISSDMIRDNLVLTTYGDAKQRMPWVSDTCAVCLCELKEGDDVRELRNCCHVFHQDCIDRWASYDMTDMR

SEQ ID NO: 73304 - protein, 194 aa, Gossypium hirsutum
  unsure (1)..(194): unsure at all Xaa locations
  Clone ID: GOSHI-09MAY01-C66715_1.pep
HTLFPTSFHTRLSELRIYWFFYLFHLTMDSPQSVVSPLKNTVIAESGEKQKSNTKEAVLSKKDDNILGVLEVYVHQARDINNICIYHKQDVYAKLCLTTDPQTTVSTKIINGGGRNPXVFNDNLRLDVGNIVSGLKIEIFMMSRVKNYLEDQLLGFALVPXSEVIVKNGNGKESLFLTIVHSRCSSMRSYSIFP

SEQ ID NO: 73305 - protein, 148 aa, Gossypium hirsutum
  unsure (1)..(148): unsure at all Xaa locations
  Clone ID: uC-gsflnu33B028b05b1.pep
LYVGNIDSCLKIEIFMMSRVKNYLEDQLLGFALIPLSEVILKNGKLEKEFFLSSTDLIHSPAGFVQLSLEYIGSSPDVMTIPNVXADETDKDSETEELEKIEFPXDPKIVNENQMMASEYFGISCANLDSKNSEMGVNALDSIQVPEL

SEQ ID NO: 73306 - protein, 103 aa, Gossypium hirsutum
  Clone ID: GOSHI-09MAY01-C66145_1.pep
PGTPGDDPRVLIVLPVLRVYSFAAMKFRSFCFCIPGSKQEDSDSSSNKAKSHKKSDKSGKKEGNVDDADYQGATTTTTTASSDAGMAAAVAVGATTAHASAVE

SEQ ID NO: 73307 - protein, 184 aa, Gossypium hirsutum
  Clone ID: GOSHI-09MAY01-C66115_1.pep
MYRGERAAGGSKGEVGSVDRKRINETLDKQLVRSSPSTLRAINGKDKSANAHLMGKHPPDHHRDSRSASLPKAKASEDESETDSEESDVSGSDGDDTSWISWFCNLRGNEFFCEVDDDYIQDDFNLCGLSSQVPYYDYALDLILDVESHEEQNELVESAAEMLYGLIHARYILTSKGMAAMLDK

SEQ ID NO: 73308 - protein, 53 aa, Gossypium hirsutum
  Clone ID: LIB3582-004-P1-K1-A6.pep
RIKSLDFQQGDFCKNYIRIFKQISFSAALASNRRLTTWCTASLSIMEEFTAYN

SEQ ID NO: 73309 - protein, 68 aa, Gossypium hirsutum
  Clone ID: LIB3272-027-P1-K1-G2.pep
NFFFFFPHFIFSQTILLQTRKKIQKKLKIRGYSLKTDGLDEISHSSVASKMLKMKLLISSSTSSITNP

SEQ ID NO: 73310 - protein, 163 aa, Gossypium hirsutum
  Clone ID: GOSHI-09MAY01-C66305_1.pep
MATAKVSKASKWFSNKSLRLSLQRRGSKSRSTSLSSSPGPSSTPISPRTIPNMRTKRPEEDEMKQVFGYFDGDGDGKISALELRAYFGSIGEYMSHEDAQGVINDLDSDGDSMLHYQDFLKLMKREPSKDDEGDDYDDLKKALEMFELEKGSVCITPKGLQGC

SEQ ID NO: 73311 - protein, 190 aa, Gossypium hirsutum
  Clone ID: GOSHI-09MAY01-C66245_1.pep
CFKVYGYISMKQGITFLQDFKLGHYMKIPPRSMFIAQVGGTIIAALAHLTTAWWLMVTVPDICDREMLPTDSPWTCPGDHVFYDASVIWGLIGPRRIFGDLGYYSAINWFFLVGAIAPVLVWLASKAFPNKPWIKLITMPVLFGATVNMPPATAVNYTSWVLIAFASGFVAYRYYRGWWSPHNYVLSGAL

SEQ ID NO: 73312 - protein, 166 aa, Gossypium hirsutum
  Clone ID: GOSHI-09MAY01-C66265_1.pep
MLPSTSTQSGESSMTTIYCDWLTSQMSSSTLTVLFVLLGTLCSFIYFFSSPNRNNNGRKLPPGPAPLPVVGNIHMLGNLPHQSLHYLAKKYGPIMSIMLGKVPTIVVSSPEAAELFLKVHDVVFASRPNVQSAKYFAYGGQAVAFTQYGSYWRTVRIWCILHFLSA

SEQ ID NO: 73313 - protein, 60 aa, Gossypium hirsutum
  unsure (1)..(60): unsure at all Xaa locations
  Clone ID: uC-gsflmaxxa045f03b1.pep
PNRYTNGRKLPPDPAPLPIIGHTHMLRNLTHHIINYLGEKYGPTMSTMLSTXTTIQDSQP

SEQ ID NO: 73314 - protein, 171 aa, Gossypium hirsutum
  unsure (1)..(171): unsure at all Xaa locations
  Clone ID: GOSHI-09MAY01-C66235_1.pep
MKEQLATFRSQLEEFARKHKNDIRKNPSFRSQFHEMCAKVGVDPLASNKGFWAELLGIGDFYYELGVQIVEICLATRPLNGGLIDLQELCKLLRQKRKHDREAVSEDDCLRAISKLKTLRSGFEVISAGKKKLVRSVPTELNKDHNQILELAQAQGYVTVDEVXRRLSWTH

SEQ ID NO: 73315 - protein, 126 aa, Gossypium hirsutum
  Clone ID: GOSHI-09MAY01-C66225_1.pep
SSMGQRNMRSPIDLEIDQQAQEYLQHEPCVYLGGTTNYPSPDIPMTVTAPGNTTNLDAHPLPEHYDNSMFYGIPMYPGVQHPHHSPNLDLGIGSASNFYVPYVPTPSSSVPINHGIPDQMPSSSNY

SEQ ID NO: 73316 - protein, 200 aa, Gossypium hirsutum
  unsure (1)..(200): unsure at all Xaa locations
  Clone ID: GOSHI-09MAY01-C67915_1.pep
MESVDLHETTNANHVDHGWQKVSYPKRQRKTKPNADPNLPRPNGTLTNGSASVFHSLEQQSEDRRRRIVEAQRAYAAAAIDADAKPKPKRSVIDDSDDDDGSDLDGLKPNGKPADEEKKAKQKKPKKPKVTVVEAAAKIDPTDLSAYLAEWNGEQQEIQMQKFADYYGKAFQLVVAGQFPWLKLFREKXVAKPADIPLSH

SEQ ID NO: 73317 - protein, 160 aa, Gossypium hirsutum
  unsure (1)..(160): unsure at all Xaa locations
  Clone ID: uC-gsflnu33B108d04b1.pep
MSAKFVFKYIRSTWRPCPDDKLAAKWETILQFISPPTLCLWFWSFGRIPAMEGDCCSSSTSSSTSGEKPKAERTQQKEKPYRGIRMXRKWGKXGWLEIRXEPNKRSRIWLGSYTTPVAAARAYDTXVFYLRXGPSARLNXPDLIEKDNKLKDISATSIRK

SEQ ID NO: 73318 - protein, 62 aa, Gossypium hirsutum
  Clone ID: LIB3272-045-P1-K1-C6.pep
NLNIKDHPCYKKGIHNDIYIHKQRVEGKMNCSIVSHLPASLPSPHGRHVDRIYLNTKLADIN

SEQ ID NO: 73319 - protein, 249 aa, Gossypium hirsutum
  Clone ID: GOSHI-09MAY01-C67755_1.pep
MEDSGPPAPNLNQISGWSNVLKSQPPKPHTQSQTTATSQIFVESCKSTKGIAVAVVDANAVIEGGEKLNNTADRFVTVPEVLAEIRDPVSRHRLAFIPFSIDSVEPSPDALNKVIKFARATGDLQTLSDVDLKLIALTYTLESQIHGTNHLRDAPPPVHVVNVKRLPERDLPGWGSNVPNLEEWEALEPETGDGFNSNSRILPLKDLNMNYVSSDNNSEDVLVETKSETHSENREDIDQGFRRPKRYLP

SEQ ID NO: 73320 - protein, 119 aa, Gossypium hirsutum
  Clone ID: GOSHI-09MAY01-C60525_1.pep
PPLPDACGSSPAWPPGSATGFPPPKGSSGPSGPPQRTDPAPVHIFYCMHCDLGGRTEGGRRPRTSCDLAGLDLVFNPLLPRLPYRYGLCSALLAPVHRLLCELLHQAPLTPRVSVPLVL

SEQ ID NO: 73321 - protein, 101 aa, Gossypium hirsutum
  Clone ID: GOSHI-09MAY01-C60475_1.pep
MDKSKRLFLKSKRSFRRRLPPIQSGDRIDYRNMSLISRFISEQGKILSRRVNRLTLKQQRLITIAIKQARILSSLPFLNNERQFERSESTTRTTALRTRNK

SEQ ID NO: 73322 - protein, 132 aa, Gossypium hirsutum
  Clone ID: GOSHI-09MAY01-C60665_1.pep
MDPTAPSASVVGGGCGGGGGGPAPFLMKTFDMVDDSSTDDIVSWSSNKKSFVVWNPPDFARLLLPTYFKHNNFSSFIRQLNTYGFRKIDPERWEFANEDFVKDQRHLLKNIHRRKPIHSHSNPQGSLIDHER

SEQ ID NO: 73323 - protein, 142 aa, Gossypium hirsutum
  Clone ID: GOSHI-09MAY01-C60625_1.pep
MAAAAQSRVVRVLPMSRSAITAIATSVCHGPPCRQLHHAVIPHGKGGRSSVSGIVATVFGATGFLGRYVVNHLGRIGSQVIIPHRCDIYDTMHLRPMGDLGQLLFLEWDARDKDSIRRAVEHSNVVINLIGRDWETKNFDFD

SEQ ID NO: 73324 - protein, 206 aa, Gossypium hirsutum
  Clone ID: GOSHI-09MAY01-C60095_1.pep
MLAVFEKAIGNPPEELRLPSVGLDSDGKKTREEILQTFRLLWPESTFYHLSNGNFMTLSHGAQGPLHPRSMVVMDDIFCIFIGTLVNICELRRHYGLSRQATEAMLVVDAYKVLRDRAPYPPDQVIKDLEGKFAFILFDAKSSTLFVARDREGSIQLKWGMAGDGSLVLSDDPNTIEKACGKSSASFPPGCIFMNGNGLISIDHPL

SEQ ID NO: 73325 - protein, 105 aa, Gossypium hirsutum
  Clone ID: LIB3196-021-P1-M1-H5.pep
MLAVFEKATGNPPEELRLPSIGLDSDGKGTREEILQTFRLLWPESTFYHLSNGNFMTLSHGAQSPLHPRSMVVMDDIFCIFIGTLVNICELRRHYGLSRQATEAM

SEQ ID NO: 73326 - protein, 229 aa, Gossypium hirsutum
  Clone ID: GOSHI-09MAY01-C60355_1.pep
MEKPRQISAMEAFEKLEKVGEGTYGKVYRARERATGKIVALKKTRLHEDDEGVPPTTLREVSILRMLSRDPHVVRLMDVKQGQNKEGKTVLYLVFEYMDTDLKKYIRSFRQTGENIPVNIVKSLMYQLCKGVAFCHGHGVLHRDLKPHNLLMDRKTMTLKIADLGLARAFTLPIKKYTHEILTLWYRAPEVLLGATHYSTAVDMWSVACIFAELVTKQALFPGDSELQQ

SEQ ID NO: 73327 - protein, 52 aa, Gossypium hirsutum
  Clone ID: GOSHI-09MAY01-C60365_1.pep
FNQIRDLIFKNKGLKSENHRDRGQEVRKQRGFTNHHQALNGLEPQLIVPGNI

SEQ ID NO: 73328 - protein, 89 aa, Gossypium hirsutum
  Clone ID: GOSHI-09MAY01-C60315_1.pep
VSPKPQFNPGSEGRPVASPAVTPVRISTPRTHPAHFLSWMQSTSSKSSCTYESCSALGPGTLIWQRVPKSKTQKQDKIRGHQTFQHRPH

SEQ ID NO: 73329 - protein, 125 aa, Gossypium hirsutum
  unsure (1)..(125): unsure at all Xaa locations
  Clone ID: GOSHI-09MAY01-C60245_1.pep
AGAFNHSDLDAELRRLFRERYXLHPKFVAAVHYEQPTIQIELRLNTSHKAAGDVDIGDAAYYCERDVKGESLFQGRGGLDLRVRGEXPLQVEXTLIYYLDEIPPKFFMMRLTGGLIGVIVVVVVA

SEQ ID NO: 73330 - protein, 143 aa, Gossypium hirsutum
  Clone ID: GOSHI-09MAY01-C61915_1.pep
LLLKNLSSDTKTVTVNMTAWTIVYNGTLVHEVWKDSATMSLDPEEEAEHPVKISYAQYEKYLKSDNMIRITAVCKVPDEPGVVVERDIILDNPTLTLEVLDEARVRKPVNVQMLFSNPLDEPVRDCVLMVEGSGLLLGNLKIE

SEQ ID NO: 73331 - protein, 115 aa, Gossypium hirsutum
  Clone ID: GOSHI-09MAY01-C61865_1.pep
KDRSLKSFQILDTKTSNNQFGTDFGRYEGANPSSCVTDSRTRFLKIRRPKIVSKVSRSHPNKRSVATPIFVLKNGFDWYEGPFRVVKRVGRVAYKLELLAKLKVHPVFHVSMLKS

SEQ ID NO: 73332 - protein, 181 aa, Gossypium hirsutum
  Clone ID: GOSHI-09MAY01-C61825_1.pep
MERIRHKMVNVNGISMHVAEKGEGPVILFLHGFPELWYTWRHQIIALSSLGYHAVAPDLRGYGDTEAPTAISSYSCMQIVGDLVALIDSLGVEQVFLVAHDWGAIIGWYLCLFRPDRVKAFVCLSVPFMPRKPQMKPVESMRLFFGDDYYICRFQEPGKIEAKIARYGASNVLKKIISSRK

SEQ ID NO: 73333 - protein, 207 aa, Gossypium hirsutum
  Clone ID: GOSHI-09MAY01-C61795_1.pep
PHSRSTQRSVNTSGSSLKPQPHDSQMRPTAHQSMGSNPAVGGSTQAMNMMSGPKLERQNSSNDPNRLQGTSLSHFSSGSVPWQASPSKELNPGPFSSATYVKQESADQGADQHRSHLPATQGVSTTLAEQGKAVTTTAKDEPGEKQSSRVAFTTTPSITAQLDSNVLLGSRNPSVPAPTGMNARTPQKKPSIGQKKPLEALGSSPPP

SEQ ID NO: 73334 - protein, 53 aa, Gossypium hirsutum
  Clone ID: GOSHI-09MAY01-C61765_1.pep
PISREKTYVLSRTITPPNLSWVLASSKTKTGNAIQEFTKVNDHSSNFNHLKFQ

SEQ ID NO: 73335 - protein, 153 aa, Gossypium hirsutum
  unsure (1)..(153): unsure at all Xaa locations
  Clone ID: GOSHI-09MAY01-C61125_1.pep
VVVQLWKPRVESLVKDICSTTSIALPXLGGFWLYIXRNLAGKSEPPPPILSPPPVSVSTNKTVEAPKSNGTVSTPSLAITRPLSSSGRIESFLDKAADEGLVILQSPKVGFFMRSRTIKVKHAPPSCKEKQIVKEGKVLCYIEQLGCEIPIAV

SEQ ID NO: 73336 - protein, 154 aa, Gossypium hirsutum
  Clone ID: GOSHI-09MAY01-C61245_1.pep
VTLYNKFVQKSTLVPVPEWRHQRASWPAIYGGIDGGGTRSKVLLVSEDGKILAEADGLSTNHWLIGTDKRVERINETVNRAKRKAGVDPLVPLRSLGLSLSGGDQEDAGRILIEELTDRFPYLSESYLITTDAAGSIATATPDGGVVLIAGTGS

SEQ ID NO: 73337 - protein, 89 aa, Gossypium hirsutum
  Clone ID: GOSHI-09MAY01-C62925_1.pep
SKHFVSLCPSTLKKKKDELLYLPLHRIDSPKNTRWCGFATPQPGSCSTSLAYALPSSAHPLITGAFFFLHCVCDRFQSNRASQSAFSWI

SEQ ID NO: 73338 - protein, 76 aa, Gossypium hirsutum
  Clone ID: GOSHI-09MAY01-C62525_1.pep
FRPLIAAQHEVDVGWKLTARTLARVSQKLKLLKLVGPAGLCLFVGSKGYFGLIRVVNLGMGVMRIRGEFLGLICGF

SEQ ID NO: 73339 - protein, 73 aa, Gossypium hirsutum
  Clone ID: LIB3196-040-P1-M1-D3.pep
KALRAWVLIKRGSAIEEEMKIGQNIPFGSLDGKGKLLLKGITRSLCLAYLLVYGDEVGNEKFYSVIALITLPF

SEQ ID NO: 73340 - protein, 100 aa, Gossypium hirsutum
  Clone ID: LIB3196-040-P1-M1-D2.pep
AKHKDPVIPFNNNFPLPSKLPKGMFCPIFISSSIAYPLLIQIHALNTFPTKCNHLLTNSLLLNSHVTSPVASVLPKSAPALISFCFRHSPFPANPKCEHH

SEQ ID NO: 73341 - protein, 159 aa, Gossypium hirsutum
  unsure (1)..(159): unsure at all Xaa locations
  Clone ID: LIB3828-019-Q1-K6-G7.pep
NQENIKLVSNLVETNNRSWNTDVAIATFQPEIARKILQIPLAELAHEDFQVWRGDVKGXSVRSAYKLLQETSKDPSNINLQTETNNFYRKLWKLHIPSKVTLTVWRISXNFIPSLVNLKXKKAVANALCPQCRQNEEDSYHIFQQCPMTREVWNHLKLS

SEQ ID NO: 73342 - protein, 108 aa, Gossypium hirsutum
  Clone ID: LIB3196-045-P1-M1-A6.pep
ELAHEDFQVWRREMSGEFSVRSAYKLLQETSEDPSNINLQTETNNFYRKLWKLHIPSKVTLTIWRISWNFIPSLVNLKQKKAVANALCPRCRQNEEDSYHIFSSVLGL

SEQ ID NO: 73343 - protein, 106 aa, Gossypium hirsutum
  Clone ID: AW187443.2.pep
VNDMYWKKANKKIGANLVVSTQIYPGPLIPNLPQPKPPAEKNKQQTLGASTCTASPPPGPITSLKTFLRSGKGTYPRFRPSETLSTAWIWTKGRLSSPLFPSHEPR

SEQ ID NO: 73344 - protein, 58 aa, Gossypium hirsutum
  Clone ID: LIB3196-036-P1-M1-E6.pep
SLLGRSWVSSASHAPPPIVAHGSGTKETGGVHWSKSMPLKGSPMAETAGRFPSPTSKR

SEQ ID NO: 73345 - protein, 192 aa, Gossypium hirsutum
  Clone ID: GOSHI-09MAY01-C62345_1.pep
YYEALQLKVREPNLGPKLFLGGVGVQKTGTEIATALNNIDLSSEYVLKLKHEIEEQCAEVFPAPTEREKVKSCLSELADLSNTFKQAQNACMEQLAATVTPQIRPVLDSVATISYELSESEYAENEVNDPWVQRLLHAVEINVAWLQPLMTTNNYDSFVHLVIDFIVKRLEVIMMQKRLSQLGGLQLDRDTR

SEQ ID NO: 73346 - protein, 98 aa, Gossypium hirsutum
  Clone ID: GOSHI-09MAY01-C63495_1.pep
SSQTVWCICLWSCTYGENLCAPLQARSVMKLGKHSCQRWRQKVFTGSARLTRTSVYASASLIHWKHCTFLSVMPQGAQNGWIKDVGSALSFGPEFKNG

SEQ ID NO: 73347 - protein, 106 aa, Gossypium hirsutum
  Clone ID: GOSHI-09MAY01-C63665_1.pep
MGGEQEEERFDGMLLAMAQQHEGGVQELVNTFFSFLRRKTDFFIGGEEGMAEKLITQTFSHHNQLAQKTRREKRARQEAERREKAERAARLAKEAKSETSWPQIKE

SEQ ID NO: 73348 - protein, 79 aa, Gossypium hirsutum
  Clone ID: GOSHI-09MAY01-C63615_1.pep
APPLHGPVSPFRPTPPEDSLCAYASQAEKEEVDSRSIYVGNVRFINPFLCLIYVYSGKLAHLPYLWSNYYLNVKNLLVS

SEQ ID NO: 73349 - protein, 256 aa, Gossypium hirsutum
  Clone ID: GOSHI-09MAY01-C63195_1.pep
MHTHQFTAGHMSLFHLTFTFDQQRKDSFITHRAFCDALAEESARLSANQLAAAANPALNPSSLFPFQNPWDPIQTSNPNPNGPLQVKPESHHLTPYFQELPLPPPKALFTSPFQSLHVSNNPPSNAAATSATPQLSATALLQKATTAGATATQIKNNNYYYSMATHLYPDFSGFTAADLATWQKSSDRFTRDFLGLTRDNQGGNGNVNLSMNPRDVLSYTGGVELQHFERGQPLLRPQGFGFPEPYAATSETWGDC

SEQ ID NO: 73350 - protein, 117 aa, Gossypium hirsutum
  Clone ID: GOSHI-09MAY01-C63145_1.pep
MKHYQVEILDAKTREKLCFLDKVEPHATIAEIKNLFTKTHPQWYPARQSLRLDPKGKSLKDEDILQKLPVGTTATLYFRDLGAQISWVTVFLTEYAGPLFIYLLFYFRVPFIYGHKF

SEQ ID NO: 73351 - protein, 42 aa, Gossypium hirsutum
  Clone ID: GOSHI-09MAY01-C63315_1.pep
ETLPNLKFILSSAIIKEECLMVCGLDYVVQLEKKFFSHFYLR

SEQ ID NO: 73352 - protein, 313 aa, Gossypium hirsutum
  unsure (1)..(313): unsure at all Xaa locations
  Clone ID: GOSHI-09MAY01-C18945_1.pep
HASELISAVHFCHARGVYHRDLKXENLLLDENGDLKVSDFGLSAVSDQIRQDGLFHTFCGTPAFVAPEVLARKGYDAAKVDIWSCGVILFVLMAGYLPFQDQNIMAMYKKIYKGEFRCPRWFSPELIRLLTKLLDTNPETRITIPEIMEKRWFKKGFKHIKFYIEDDKLCSVEDDDNDVGPCSDQSSMSESETELETRKRVGTLPRPASLNAFDLISFSPGFNLSGLFEEGEEGSRFVSGAPVSTIISKLEEIAKVVSFTVRKKDCRVSLEGSREGAKGPLSIAAEIFELTPSLVVVEVKKKGGERGEYEDFL

SEQ ID NO: 73353 - protein, 102 aa, Gossypium hirsutum
  Clone ID: GOSHI-09MAY01-C18875_1.pep
ELKVKTQKEREKTIKSLEKDLEIAKMQMVADKEELLSLKAEVEKMRTANEEKLRKIHEETDRLRVTEEERSEYLRLQLELKEEIEKCRLREELLLKEADDLK

SEQ ID NO: 73354 - protein, 131 aa, Gossypium hirsutum
  Clone ID: GOSHI-09MAY01-C18515_1.pep
MGSKSKNLVLGFVVLAVFLISGVKSWTGEIHGRVVCDVCADSSIGPEDHILEGADVAVLCITKSGEVVNYQAFTNAKGIYTVAETMPESDRWNTCLARPISSFHDHCNHLGDRSTRIKFTYTRPSVICTLS

SEQ ID NO: 73355 - protein, 256 aa, Gossypium hirsutum
  Clone ID: GOSHI-09MAY01-C18495_1.pep
FPSRGSGYVSGGMYSRNGGKNWIKAMILTASLFPFMCFGIGFILNTIAIFYGSLAAIPFGTMVVVFVIWAFISFPLALLGTVVGRNWSGAPNNPCRVKTIPRPIPEKKWYLTPSVVSLMGGLLPFGSIFIEMYFVFTSFWNYKVYYVYGFMLLVFLILIIVTVCVTIVGTYFLLNAENYHWQWTSFFSAASTAVYVYLYSVYYYHVKTKMSGFFQTSFYFGYTLMFCLGLGILCGAVGYLGSNLFVRRIYRNIKCD

SEQ ID NO: 73356 - protein, 139 aa, Gossypium hirsutum
  Clone ID: LIB3120-054-P1-K1-B2.pep
IKSMILTACLFPFMCFGIGFMVNTVAIFYGSLAAIPFGTMVVVFVIWAFISFPLALLGTVVGRNWSGAPNNPCRVKTIPRPIPEKKWYLTPSVVSLMGGLLPFGSIFIEMYFIFTSFWNYKVKFFFLGFNHLTRDKNTF

SEQ ID NO: 73357 - protein, 88 aa, Gossypium hirsutum
  Clone ID: LIB3197-057-Q1-M1-H6.pep
PTHFLLNAENYHWQWTLFSFAASTAIYVYLYSVYYYHVKTKMSGLFQTSFYFGYTLMFCLASGILCGAAGYLRSNLDVRRIYRNITCY

SEQ ID NO: 73358 - protein, 421 aa, Gossypium hirsutum
  Clone ID: GOSHI-09MAY01-C18445_1.pep
MGDLVPIYLVILAFFCTAGAIALAVLHIYRHLLNYTEPIFQRYIVRIIFMVPVYALMSFLSLVLPRSAIYFNSIREGYEAWVIYNFLSLCLAWVGGPGAVVLSLSGRVLKPSWYLMTCCLPPMPLDGRFIRRCKQGCLQFVILKPILVAVTLVLYAKGKYKDGNFSPSQAYLYLTIIYTISYTVALYALVLFYMACRDLLQPFNPVPKFIIIKSVVFLTYWQGVLFFLAAKSGFIKDADEAAQFQNFIICVEMLLAALGHLYAFPYKEYAGANIGMSRGFTRSLAHALMLNDFYHDTVHQFAPTYHDYVLYNHNDGDEGTRKYRSRTFVPTGPEMDAARRNKHMIGNKLEDIQLSSLPSYGTSAPQNPSSVPDSTSGDLTKSSLLVDHSNSYSAPYDMSLIDMDLSSYPSKVPAAKDTEPR

SEQ ID NO: 73359 - protein, 197 aa, Gossypium hirsutum
  Clone ID: GOSHI-09MAY01-C18425_1.pep
PRVRKKRDYERLSRLREEERNHLENRKKKFFSEIVNAFRDFQLQIQATLKRRKQRNDGVQAWHGRQRQRATRAEKLRFQALKADDQEAYMRLVKESKNERLTMLLSETNKLLVNLGAAVQRQKDAKHSDGIEDLKDLDSDSPELDASKDGTPGDSLPEEDIGATDSDQNDESSDLLEGQRQYNLAIHSIQEKVAEQP

SEQ ID NO: 73360 - protein, 69 aa, Gossypium hirsutum
  Clone ID: GOSHI-09MAY01-C18705_1.pep
LTSKLPISREDPIEILIGFITCARSKKFKGAMMGLIQQVWAEHEMSNPYWTQNNIPCPYNVLHVVVCLV

SEQ ID NO: 73361 - protein, 178 aa, Gossypium hirsutum
  Clone ID: GOSHI-09MAY01-C18725_1.pep
LRVRPSPRVTSYTSRGPSYSCPLVLKPDIMAPGDSVLAAWPPNVAAARVNQDLVFTNFNLLSGTSMACPHVSGIAALLKAVYPNWSPAAIRSALMTTSDQIDNTGSPIKDIGGNLRPADPLAMGAGHVNPNRALNPGLIYDATVQDYVDLLCGLKFTQHQIKTITKTLSNNCSNPFFD

SEQ ID NO: 73362 - protein, 122 aa, Gossypium hirsutum
  Clone ID: GOSHI-09MAY01-C18675_1.pep
FCLNHFSSSVYVGPPSGNNWFEKQTDGTLDIVCSSWMDWFHGGLQFQIEHHLFPRLPRCHLRKVSPFVQELCKKHNLQYDTASFWKANVMTIETLRSAALQARILSNPVPKNLVLEAVKTHG

SEQ ID NO: 73363 - protein, 66 aa, Gossypium hirsutum
  Clone ID: LIB3828-024-Q6-N6-C11.pep
MKCHLRKVSPFVQELCKKHNLQYDTASFWKANVMTIETLRSAALQARILSNPVPKNLVLEAVKTHG

SEQ ID NO: 73364 - protein, 118 aa, Gossypium hirsutum
  Clone ID: GOSHI-09MAY01-C18625_1.pep
LSYHSVPTQKKRKGKIERKMQVLSNARNLARVLGSRTILFNSNQLYLSSLIQSPSSSLQCQLHSDASSGINGSCYYPMPLHSIYPMISRTFFSTEAGTVNSNPTEAVKELYDDMLQSV

SEQ ID NO: 73365 - protein, 211 aa, Gossypium hirsutum
  Clone ID: GOSHI-09MAY01-C18145_1.pep
MSFDTFLIGAPISAFHKIMEQKAWLILVIFTCLIASSCGRELKVDHKHKLPVYNHTLATILVEYASAVYISDLTELFTWTCERCNGLTKGFEVIELVVDIENCLQAFVGVAKDLNAVVIAFRGTQEHSIQNWVEDLFWKQLDLNYPGMPDAMVHHGFYTAYHNTTIRHGILHAVKEAKEFYGDLDIMVTGHSMGGAMASFCALDLVVNHEA

SEQ ID NO: 73366 - protein, 97 aa, Gossypium hirsutum
  Clone ID: GOSHI-09MAY01-C18105_1.pep
DPPSTNSKQKLKKWTKFKSGTGNLMSASFLVYLFSSINQSNSFSASHLKGVHSSTKEQRQRTKTQDKIYFKLQKITNHHNYSPGDLHVHSGFSSFNP

SEQ ID NO: 73367 - protein, 155 aa, Gossypium hirsutum
  Clone ID: GOSHI-09MAY01-C18005_1.pep
TNTIINDKDDQETVPKIITFLSSLLQRVAESNDHCRLFQSQKISVFHGLTRPTISIKSYLERIFKYANCSPSCFVVAYVYLDRFVQMQPSLPINSYNVHRLLITSVLVSAKFMDDMYYNNAYYAKVGGISTVEMNLLEVDFLFGLGFQLNVAPTT

SEQ ID NO: 73368 - protein, 154 aa, Gossypium hirsutum
  Clone ID: GOSHI-09MAY01-C18355_1.pep
VIHDAITKLEEALSINPTKHDASWRTGNAQTYFAFLTSTEDEARPYFEKAAQYFQQAADEDPSNEIYLKSLEISAKAPELHHEIIKQGLGQQMLGAGPSSSTSTSSSAKTATKNKKSSDLKYDLFGWVILAVGIVAWVGFAKSQMPPSQLPPPP

SEQ ID NO: 73369 - protein, 323 aa, Gossypium hirsutum
  Clone ID: GOSHI-09MAY01-C18315_1.pep
SGDSMCMEVQKNQKPQICETCEQCDYEIEYADRSSSLGVLAKDKLHLVTANGSITNLDVVFGCAYDQQGILLNTLSKTDGILGLSKAKVSLPSQLASKGIINNVVGHCLATDVASGGYMFLGDDFVPNRGMSWVPMLGSPSIEFYHTQLVKINYGSSSLSLGAKDSDKAGVVFDSGSSYTYFTKQAYAELVSSLSEVSELGFIQDASDPTLPICWRAPFPIRTIMDVKKYFKTLTLQFGSKWWIISKKFHIPPEGYLIISKKGNVCLGILDGSNVHDGSTLILGDISLRGQLVVYDNEKQKIGWGPSGCGKPSRFKSLPFFEG

SEQ ID NO: 73370 - protein, 473 aa, Gossypium hirsutum
  unsure (1)..(473): unsure at all Xaa locations
  Clone ID: GOSHI-09MAY01-C18295_1.pep
CFTLSPRAREAPRGAGGALGFILFSLLFSICRSSSLNHLLISNAERRIDLSSHIVKVDVAXKGGGAGSTPTSEVFLSFPPTQVDHLAAVEALVTKGKRKKTTLVRLDVKPTELPDAPNDAKYFAIYLENPLKSGESTTLEVLYLLTHSQEPFPAEIAQSESQLVYYRDSALILSPYHIKQQATFIKTPSTKVESFTRVEPSNRAGTEIKYGPYEDHPPYSFSPILIHFENNSPFAVVEELVREVEISHWGNLQVTEQYTLVHAGARHKGVFSRVDYQSRPTLNGASSLRYLLARLPPRVHSVYYRDEIGNISSSHLRTDSRKSELEIEPRYPLFGGWKATFVIGYGLPLQDFLFETSDDRRYLNFTFGCPLLETVVDKLTVKVVLPEGSKDPSAVVPFPVEQHLETKYSYLDVGGRTGVVMEKKNLVPAHNSHFQGYYTXKPIFMLAEPLMLASAFFLFFVACVAYLHIDLSI

SEQ ID NO: 73371 - protein, 112 aa, Gossypium hirsutum
  unsure (1)..(112): unsure at all Xaa locations
  Clone ID: LIB3197-058-Q1-M1-B2.pep
MEAWIRARVTLALTLFALLFFVSRSSPPRQFVISNAERRIDLSSHIINVHLTLKVENTGTRPASEVVLALTPTEVDHLAMVDALAIKGKRKKTTSVHLXVKPTELPDAPPID

SEQ ID NO: 73372 - protein, 130 aa, Gossypium hirsutum
  Clone ID: LIB3197-055-Q1-M1-C6.pep
MEAPIRAREALSFILFSLLFSICRSSSLNHLLISNAERRIDLSSHIVKVYLTLKVENAGSTPTSEVFLSFPPTQVDHLATVEALVTKGKRKKTTLVRLDVKPTELPDAPNDAKYFAIYLENPLKSGESTT

SEQ ID NO: 73373 - protein, 371 aa, Gossypium hirsutum
  unsure (1)..(371): unsure at all Xaa locations
  Clone ID: GOSHI-09MAY01-C18245_1.pep
MELGSALQFLDNKSILVTGGTGFLAKIFVEKILRVQPNVKKLYLLVRAADHKSAIHRLHHEIVGKDLFRNLKKKCGTNFSSFISQKITVIPGDLTHQDLGLHDSDLLQLLCKELDVLLNLAATTNFDERYDVALGLNTLGAKYVVDFAKKCAKLQVLVHVSTAYVSGERSGLIVENSYRMGETLNGVSGLNVNIEKQVVEDQLHLLRLQGASDKDITVAMKDLGIQRARRYGWPNTYVFTKAMGEMMVGELKDIIPAVIIRPTIVTSTYKEPFPGWVEGIRTIDSLPVGYAKGKLTFFLXDLEAIVDVIPADMVVNAIIVPMIAEARHQQPQTIYQVGSSIRNPLRYSNLQDYGFRYFTKNPWINKDGKPV

SEQ ID NO: 73374 - protein, 315 aa, Gossypium hirsutum
  Clone ID: GOSHI-09MAY01-C18275_1.pep
LIATSVAARGLDVKELELVINFDVPNHYEDYVHRVGRTGRAGRKGCAITFISEDDARYAPDLVKALELSEQVVPDDLKALADGFMAKVNQGLEQAHGTGYGGSGFKFNEEEDEKRKAAKKAQAKEYGFEEDKSDSEDEDEGVRKAGGDISQQTALAQIAAMAAASKASTALMQNPLSSGQLLPNAVLPISLPGVLGVSMPGTAAVVPGSGLSGLPNEEAARKAALQAALNLQHNLAKIQADVMPEHYEAELEIYEFPQNARWKGTHKETLGPISEWTGAAFTTRGQFFPPGRIPGPGERKLYLFIEGPTELSVKR

SEQ ID NO: 73375 - protein, 118 aa, Gossypium hirsutum
  Clone ID: GOSHI-09MAY01-C18265_1.pep
HGPLMFMILCQHPFCTQLEAKKQQKLKKNSDKKKKGKKWHKGNNSLRGGGKDNKQFHRGGGSLDKWYNYKPLELHGTVVNDASGNLDGFKVGSTDPYCGTSYLKNSLTRMHYSVAEAL

SEQ ID NO: 73376 - protein, 318 aa, Gossypium hirsutum
  Clone ID: GOSHI-09MAY01-C19925_1.pep
MEGIPKHIITKFNFFTDSPRSPLQPPTYGNLITLLSIDGGGIRGLIPGTLLAFLESQLQKLDGEQARLADYFDIISGTSTGGLVTAMLTTPDPKKENRPLFAAKDINEFYLEHCPKIFPQDSSPFAPAANVVKSLMGPKYDGKYLHDIVREKLGETKLHQTLTNVVIPTFDIKQLQPRIFSTYEVKSHPCTDALLSDICIATSAAPTYLPAHHFQTQDSTGKTKEFNLIDGGVAANNPTLVAMNEVTKEILRGNPEFFPIKPTDYARFLVVSLGTGSPKSEGKYHANMTAKWGVLGWLTSEHSTPLVDIFMQASSDMV

SEQ ID NO: 73377 - protein, 82 aa, Gossypium hirsutum
  Clone ID: LIB3585-050-P1-K1-G5.pep
LEHCPKIFPQDSSPFAPAANVVKSLVGPKYDGKYLHDIVREKLGETKLHQTLTNVVIPTFDIKQLQPRIFSTYEVHYNIYYL

SEQ ID NO: 73378 - protein, 496 aa, Gossypium hirsutum
  Clone ID: GOSHI-09MAY01-C19825_1.pep
DHADRLFNCIRDTWLRSAGKGNTSDVKELIPEFFYMPEFLENRFILDLGEKQSGEKVGDVGLPPWAKGSARESIRKHREALESDFVSENLHHWIDLIFGYKQRGKAAEEAVNVFYHYTYEGSVDIDSVTDPSMKAFILAQINHFGQTPKQLFLKPHVKRRSDRKLPSHPLKHSAFLVPHEIRKSSSSISQIVTFNEKILVAGANTLLKPRTYAKYFAWGFPDRSRRFMGYDQDRLLSTHENLHGGNQIQCAGVSHDGHILVTGADDGLVSVWRISEDGPRASRRLLLEKVLCGHTAKITCLRVSQPYMLVVSGSDDCTVIIWDLSSLVFVRQLPEFPAPVSAVYVNDLSGEIVTAAGILLAVWSINGDCLAVINTSQLPSDSILSVTSCTFSDWQDTNWYVTGHQSGAIKVWHMVHCTDQDKTNSKSNMIGTGGLDLGESPEYRLVLQKVLKFHKHPVTALHLTSGLKQLLSGDSSGHLLSWTLPDESLKSSFNQG

SEQ ID NO: 73379 - protein, 135 aa, Gossypium hirsutum
  Clone ID: GOSHI-09MAY01-C19595_1.pep
TLQYTQTASFRSITIVGVSLFLGLSIPTYFQQYQPESILMLPSYFVPYAAASDGPVHTINEQLDFSINALLSMSMVVTLLVAFVLDNTVPGSRDERGVYIWSCAEDVATDPSLQLDYSLPGKFSSLCCRSSCLRA

SEQ ID NO: 73380 - protein, 140 aa, Gossypium hirsutum
  Clone ID: GOSHI-09MAY01-C19575_1.pep
GRGRGRGRGRGARNVERDAHREIEPEPCSTLQQNNKSHSTSGMVIDDGSELKEPVKENTAAEDANQAVRNFDLNAEVDENVDTKASATAAKVAAPASSAKHEEYPGWSLSDMDKIAIDPLQLARLGGRLDEDEEDYDEEG

SEQ ID NO: 73381 - protein, 149 aa, Gossypium hirsutum
  Clone ID: GOSHI-09MAY01-C19475_1.pep
MAVGRRDKTASFRGSRIVVAIVIGVLLGCVIAFLFPYGLFNPAASVQNRRIGKTNFQIGSSSCESSERSKMLKSEIVSLSEKNSELKMQVRDLTERLQLAEQGKDQAQKQFLVLGEQHKAGPFGTVKALRTNPTVVPDDSVNPRLAKIL

SEQ ID NO: 73382 - protein, 213 aa, Gossypium hirsutum
  Clone ID: GOSHI-09MAY01-C19465_1.pep
VLMRKKSATLKVGKKDIADLLANGLDINAYGRVEGYIAELVLSSCYDFIDKCCDFVTNHVSVMQKLSDCPEDCREAVSSLMFAAARFSDLPELRELRHIFHERYENSLDVFANKQLVENSASNPSTMERKVMVMHDIASEFSIKWDSKAFERRMSEPVVIPQPQDRTKKYGSFHVNGEDNKSNYGKQDRLKKYGSFHVNGDDNKSNDGQQDRL

SEQ ID NO: 73383 - protein, 132 aa, Gossypium hirsutum
  unsure (1)..(132): unsure at all Xaa locations
  Clone ID: GOSHI-09MAY01-C19725_2.pep
DLWVMXVIPVDSPVTLPIIYERGLFGIYHDWCESFSTYPRSYDLLHADHIFSRVXKRCNFVAVVAEVDRILRPGGKLIARDDVETITKLENMVRSMHWEVRLSYSKDKEGLLCVQKSMWRPTEVETLTYAIA

SEQ ID NO: 73384 - protein, 599 aa, Gossypium hirsutum
  unsure (1)..(599): unsure at all Xaa locations
  Clone ID: GOSHI-09MAY01-C19725_1.pep
MIIRSWKKALMNQKMMVSLKNQSSNEVFPSGAQSELLNETVTQTGSFSTQATESKVEKETQLSSKKRPRVRGRAAAGPDYIPCLDNLEAIRHLPSTKHYEHRERHCPEEPPTCLVPLPEGYKRPIEWPKSREKIWYYNVPHTKLAQIKGHQNWVKVTGEYLTFPGGGTQFKHGALHYIDFIEESVPDVAWGKRSRVVLDVGCGVASFGGFLFDRSVVAMSFAPKDEHEAQVQFALERGIPAVSAVMGTKRLPYPGRVFDIVHCARCRVPWHIEGGKLLLELNRVLRPGGLFAWSATPIYQDKTENVEIWEAMVELTKSMCWELVNITIKDAVNGVAXTFRKPTSNDCYEQRSKQEPPVCPESDDPNAAWNVPLQTCMHKVPVDASERGSQWPDRWPERLEKAPYWLSSQVGVYGKAALEDFAADNEHWKRVVTKSYLNGMGISWSSVRNVMDMNAVYGGFAAALKDLSLWVMNVVPIDSPDTLPIIYERGLFGMYHDWCESFSTYPRSYDLLHADHLFSKLNKRCNLVAIVAEVDRILRPEGKLIVRDNVETMNELENMLKSMQWEVRMTYSKDKEGLLCVQKSMWRPKEVETIKYAIA

SEQ ID NO: 73385 - protein, 163 aa, Gossypium hirsutum
  Clone ID: GOSHI-09MAY01-C19675_2.pep
VKKQLETSRSKGITVRALVVINAGNPTGQVLAEENQKAIVEFCKREGLVLLADEVYQENVYVPEKKFHSFKKVSRSMGYGEKDIALVSFQSVSKGYYGECGKRGGYMEVTGFGADVREQIYKVASVNLCSNISGQILASLVMSPPKVGDESYESYSAERDGIL

SEQ ID NO: 73386 - protein, 235 aa, Gossypium hirsutum
  unsure (1)..(235): unsure at all Xaa locations
  Clone ID: GOSHI-09MAY01-C19675_1.pep
FCKQKXLVLLAERFIRKVYVPEKKFHSFKKVSRSMGYGEKDIALVSFQSVSKGYYGECAHAAGYMEVTGFGADVREQIYKVASVNLCSNISGQILASLVMSPPKVGDESYESYSAERDGILSSLARRAKTLEDAFNKLEGVTCNKAEGAMYLFPRIDLPEKAIKAAEAAKKAPDAYYCQRLLAATGIVLVPGSGFGQVPGTWHFRCTILPQEEKIPAIVTRLTDFHKSFMDEFRG

SEQ ID NO: 73387 - protein, 130 aa, Gossypium hirsutum
  Clone ID: GOSHI-09MAY01-C19615_1.pep
QQSYKVSESFPLRGINKTGKEGFHVTSMTTAASRWGVVMSRNAGFSDQVVELDFLYPSEGIHRRWESGYRITSMAATVDQAAFILSIPKRKTMDETQETLRTSAFPSTHVKEKWAKNLYIASICYGRTVC

SEQ ID NO: 73388 - protein, 203 aa, Gossypium hirsutum
  unsure (1)..(203): unsure at all Xaa locations
  Clone ID: GOSHI-09MAY01-C19605_2.pep
AALTNQRNQQNVHNISKXNLVKLHREGINNATNSVTVVAVLFATVAFAAIFTVPGGDQDSGVAVVVKSSSFKIFFIFNAIALFTSLAVVVVQITLVRGETKAEKQVVEVINKLMWLASVCTSVAFMASSYIVVGRKHKWAAILVTVVGGLIMAGVLGTMTYYVVRSKRTRRKRGKNSRRSGSNSLLHSDFTNSEVEVDRIYAL

SEQ ID NO: 73389 - protein, 161 aa, Gossypium hirsutum
  unsure (1)..(161): unsure at all Xaa locations
  Clone ID: AI055008.1.pep
RATSSGKTALHVATRKKRAEIVHELLSLPDTNVNALTRDHKTALDLAEGLPLSAESTEIKSCLSRCGALRANELNQPRDELRQTVTQIKKDVHTQLEQTKRTNKNVHNISKELRKLHREGINNATXXVTGXRCSIATVAFALFYRAGRDQIVCRGGKIKVF

SEQ ID NO: 73390 - protein, 65 aa, Gossypium hirsutum
  Clone ID: GOSHI-09MAY01-C19095_3.pep
CCCHSRIHELIKGGGEKKREIRKGIYLCLIYPVGRVKTYSFLLMGYPWILNHLEFEFLGVFFFKK

SEQ ID NO: 73391 - protein, 107 aa, Gossypium hirsutum
  unsure (1)..(107): unsure at all Xaa locations
  Clone ID: GOSHI-09MAY01-C19095_2.pep
VSRVRPRVRPRVRDIPETTVHPVPPVPSKTVRFSTVNIEEMGATNEKYQSPRIPEIEISTPPPNNGMDKEPMHSRKKWNNEESPPKAAKGFRKLLFFGRKSXNYASA

SEQ ID NO: 73392 - protein, 493 aa, Gossypium hirsutum
  Clone ID: GOSHI-09MAY01-C19095_1.pep
FMIQGPSVGEYQSDQLRIGIGMVPDLDATQQEHSRSGYVSKAAPVSYEPDDLYMVIGRGSAEETAMTSWTPEIDYEMNALSAEATSRHADVEITGANDKGPDAKKLGKSEGKLPNKEVRSRVSNGPLAKSKSDVVSKSRKPPAGSKTMIRRTKSDQEEENRKKMEELRIQRQKRIAERSAAGGLNPVTSRRSSAESKTSAASTKSQPSTQDTKKSPKPVLRSSTIERLATARNTSKVSSAELKSSQPKKPTLKEISSSTTQKAAPAKDKKSSTNKAKASDIKSGTNKELPSGDNAQGKRESNEVTVALPMEPAPSKATQPTDIVDDFKDIQELQTTPIEKTEGNATLKPNPSGEDQSSNAKMVTVNKPMQLDHVKGDEEFIMPTKVVSEDNIAPEGFGKDIPETTVHPVPPVPSKTVRFSTVNIEEMGATNEKYQSPRIPEIEISTPPPNDGMDKEPMHSRKKWNNEESPPKAAKGFRKLLFFGRKGKNYATA

SEQ ID NO: 73393 - protein, 75 aa, Gossypium hirsutum
  unsure (1)..(75): unsure at all Xaa locations
  Clone ID: GOSHI-09MAY01-C19015_1.pep
MRTGKQSQEEEEYEEEEFGSKKXGPSSNQIMSGNAINNSNKGGKNSDKANAIRSKHSVTEQRRRSKINERFQVLR

SEQ ID NO: 73394 - protein, 255 aa, Gossypium hirsutum
  Clone ID: GOSHI-09MAY01-C19005_1.pep
MAKPRLSRVPARKSSSSTMFLTLLIMFTFLVLILLALGILSIPSSNSRSSHKPNDLSSIVHNVVDKNDYDEGVGEQWVEVISWEPRAFIYHNFLSKEECEYLIDLAKPHMEKSTVVDTETGKSKDSRVRTSSGTFLPRGRDKIVGNIEQRIADFTFIPVEHGEGLQVLHYEVGQKYEPHFDYFMDEFNTKNGGQRIATVLMYLSDVEEGGETVFPSAKGNISAVPWWNELSECGKGGLSVKPKMGDALLFWSMKP

SEQ ID NO: 73395 - protein, 66 aa, Gossypium hirsutum
  Clone ID: LIB3493-046-P1-M1-C6.pep
SFTINGEAKAFARSGPEGCIVNHGGNSAHHVHLLVLILLALGILSIPTSNSRGGTNPTIELPLPIP

SEQ ID NO: 73396 - protein, 192 aa, Gossypium hirsutum
  Clone ID: GOSHI-09MAY01-C19325_1.pep
MQQNQLKKELKEMDFFTEYGDANRYKILEVIGKGSYGVVCAALDTHTGEKVAIKKIQDVFEHMSDAIRILREVKLLRLLRHPDIVEIKRIMLPPSKREFKDLFVVFELMESDLHQVIKANDDLTREHHQFFLYQMLRAMKYMHTANVYHRDLKPKNILANANCKLKVCDFGLARVAFNDTPTTVFWTDYVAT

SEQ ID NO: 73397 - protein, 142 aa, Gossypium hirsutum
  Clone ID: GOSHI-09MAY01-C19255_1.pep
MGFSCLVLVFVVQQLFGQSSAYLLIHGEPTNYVSAVGDPGMTNPNVRVALEAWNFCNEVGFEVPNVGSPRWADCTDLYCSSDSVYLGGGLVNNGSQCRVLHKVNETDNRLGAGDKCPIMGFESYADPDLFAKEKELYLGSLC

SEQ ID NO: 73398 - protein, 198 aa, Gossypium hirsutum
  unsure (1)..(198): unsure at all Xaa locations
  Clone ID: GOSHI-09MAY01-C14915_1.pep
LAVMRNIKSEVDAGSIRPYCFVEVNGLKLAAPENIYTVIYEALTGHRVSWKKALQLLNERFSDGKKIAKGDDRPCILLIDELDLLVTRNQSVLYNILDWPTKPHSKLIVVRPPVPMDLPEKLLPRISSRMGIQRLWFGPYNYQQLQEIISSRLKGIDAFEKQAVEFASRKVAAISGDARRALEICXRAAEIADYNMKN

SEQ ID NO: 73399 - protein, 103 aa, Gossypium hirsutum
  Clone ID: LIB3189-047-P1-K1-H6.pep
VLKKALHILNERCGEGIKTSLGEDLPYILLIDELDLFVTRNQSDLYNIIDYSTKPHSKIIVTGIANTMDLPEKLLPLISSRMGIQRLCFGPYNYQHLHEIISK

SEQ ID NO: 73400 - protein, 137 aa, Gossypium hirsutum
  Clone ID: LIB3189-047-P1-K1-E3.pep
SFTLQRGTISPGESDIKKIENASNRQVTYSKRRNGLFKKAQELTVLCDAKVSLIMFSSTGKFHEFLSPNISTKGFFDLYQKTTGIDLWNSHYERMEENYRSLKEINKKLRREIKQRMGGDLNELNIKELQALEAKMV

SEQ ID NO: 73401 - protein, 96 aa, Gossypium hirsutum
  Clone ID: LIB3145-010-Q1-K1-E6.pep
TIHLKKTNTGSREDRRLIIENATNRQVTYSKRRNGLFKTAQELTVLCDAHASLIMYCSTGKFHEFLSPNISTKGCFDLYQKTTRIDLWNSHYERME

SEQ ID NO: 73402 - protein, 198 aa, Gossypium hirsutum
  Clone ID: GOSHI-09MAY01-C14845_1.pep
MSTQSRAVGGTEHNWCRAVVGGTGIAVLAIISSKNPDVSHLKNALHKLQISHPILRSRLHYSPTANSYSFVTSPSPFIQIKYFNHSTTCQILENNQNISPLHLILEHELNQNAWVSSSCTTKHDVFFASVYALPGATRWVLVLRLHAAACDRTTAVSLLRELLTSMAIEEDETGFQQGPKDISMSQGDIGLAMEDFPP

SEQ ID NO: 73403 - protein, 130 aa, Gossypium hirsutum
  Clone ID: GOSHI-09MAY01-C14865_1.pep
LDFSKHSPISSLVPALVSKQFQRKESKACLPKMENPITSKCCNHQPWFVLLVFFVFCIELFSFDYSGFTAKKSALVTVLDDNHGNVINTQSSLPHDFTEITNASVYPLPKTDEKGDLKVGTEIDSCVGRY

SEQ ID NO: 73404 - protein, 365 aa, Gossypium hirsutum
  Clone ID: GOSHI-09MAY01-C14835_1.pep
MAQNMARRRVVLVQILALALAAVMPLLSGGVDIQQVRVLAAKFNVTCVVVFGDSSVDPGNNNYIATPFKGNFLPYGKDFFRGHPTGRFSNGRLATDFIAEALGYTNEIRPFLNKRLRPVDILHGVSFASAASGYDELTANLSHVLPVSKQLEYFREYKMRLRQLVGARKAENIIKNAVAVMSMGTNDFLQNYYLEPIRPKQYTLEEYQNYLASCMSDDVKTMHSLGITRLVVVGVPPLGCMPLVKTLMNQETCVEKYNNFSSSFNSKLQFKLEVARTTLGMKIGYVDAYGIFEDAVNNSKKYGFIEASKGCCGTGTINYGDTCRGMSTCPDASKYVFWDAVHPTERMYEIIAGQAIDSLRKQLMA

SEQ ID NO: 73405 - protein, 52 aa, Gossypium hirsutum
  Clone ID: LIB3189-046-P1-K1-F1.pep
RLPFLIKDRIPFPSFSKPDMAQNMASRTVVLALTLNLNHPSSSSSSSWRSDN

SEQ ID NO: 73406 - protein, 285 aa, Gossypium hirsutum
  Clone ID: GOSHI-09MAY01-C14575_1.pep
MWLWISLVLVLQYSKTVLSDSNYLIGMGSYDITGPAADVNMMGYANTEQIASGIHFRLRARSFIVAEPQGKRVVFVNLDACMASQLVTIKVLERLKARYGNLYTEQNVAISGIHTHAGPGGYLQYVVYIVTSLGFVRQSFDALVDGIEKSIVQAHENLQPGSIFVNKGELLDAGVNRSPSAYLNNPASERSKYKYNVDKEMTLLKFVDDQWGPVGSFNWFATHGTSMSRTNSLISGDNKGAAARFMEDWFEQNSAKSDELDTDEIPRRVSSIISSIHNNHHELLE

SEQ ID NO: 73407 - protein, 120 aa, Gossypium hirsutum
  unsure (1)..(120): unsure at all Xaa locations
  Clone ID: LIB3189-041-P1-K1-C1.pep
RGEVCRHFESGVATINQSHAILDLIEAKWADLVAEVPFKICYPAFEGQKCQIITGCDPKNTPLSYHIAGFCPTLLWQLTFSFININXPGLAAKSVSFALKRIFQLHIASSLFFLKWHCLF

SEQ ID NO: 73408 - protein, 72 aa, Gossypium hirsutum
  unsure (1)..(72): unsure at all Xaa locations
  Clone ID: LIB3189-037-P1-K1-C12.pep
ESYLIGNLQPAHMDFRFFSLGNLWAXVSGLATIDQSHAILDLIEAKWADLVAEMPFKICYPALEGQEWQIIT

SEQ ID NO: 73409 - protein, 241 aa, Gossypium hirsutum
  Clone ID: GOSHI-09MAY01-C14535_3.pep
MALSARILSKSRQLCGSQSILQKENTIPVRFYAKEAAAPIANKGDEILKNIFLEVKAKYEAALGIFRKEKITIDPDDPAAVSQYAKVMKTVRQKADLFSESQRIQYTIQTRTQDIPDARTYLLILKDIRIKRGLTDDLCAEAMMMSALDKVEKEIKKPLLRDDKKSMALLTAEFDKINKKLGIRKEDLPKYEEQLELKIAKAQLEELKKDALEAMETQKKREEFKDEAMPDVKSLDIRNFI

SEQ ID NO: 73410 - protein, 240 aa, Gossypium hirsutum
  Clone ID: GOSHI-09MAY01-C14535_1.pep
MAFSTRLLYKSRQLYGSQAVLRQEVAIPVRFYSKEASPPGLKGDEILKNIFVEVKNKFETALGIFRKEKITIDPDDPAAVSQYANVMKTVREKAGLFSESQRIKYTIETRTQGIPDVRTYLLTLKEIRSKRGLTDELGAEAMMMGALDKVEKEIKKPLMRDDKKSMALLTAEFDKINKKLGIRKEDLPKYEEQLELKIANAQLEELKKDAFEAMETQKKREEFKDEAMPDVKSLDIRNFL

SEQ ID NO: 73411 - protein, 205 aa, Gossypium hirsutum
  Clone ID: LIB3543-055-Q1-K6-B9.pep
MQQQHKQLQIQIPTCDTFYQCSSSTAHFSGRKVPGLCNGLSAFSSNRVHDDARATKNGTSLSRPNGSHRCMVFGVNLFNGSPELPSPQVLTSSEVQCLCSTPLTSQSSVSIASKGISSKQCNNCCSIGDQTCTKVLKYGTNLGRSVDLYRFNGYKGLILELDHMFDFNGKLIDGSSGWHITYTDEDGDMMLIGDPYPWQKFQHEV

SEQ ID NO: 73412 - protein, 69 aa, Gossypium hirsutum
  Clone ID: LIB3149-022-Q1-K1-B1.pep
QCNNCCSIGDQTCTKVLKYEEQLELKIAKAQLEELKKDALEAMETQKKREEFKDEAMPDVKSLDIRNFI

SEQ ID NO: 73413 - protein, 97 aa, Gossypium hirsutum
  Clone ID: uC-gsronu33B116h02b1.pep
TTRLLYKCRQLYGNQAALREEVAIPVRFYSKEASPPGFKGDEILKNICEEVKNKLETALGIFRKEKITIDPDDPAAVSQYANVMKTAREKAGLFSES

SEQ ID NO: 73414 - protein, 74 aa, Gossypium hirsutum
  Clone ID: LIB3189-030-P1-K1-A3.pep
ASRFPKQILETLLPNRSLIELSHGVFYPSPLQISPGLSSSLPKLKPTVFFSVPQTIRQSTSFLLCFNFFWRFGG

SEQ ID NO: 73415 - protein, 72 aa, Gossypium hirsutum
  Clone ID: uC-gsronu33B116h07b1.pep
PTRSYTNTRTPTAKWKIDRALSWRFLLVSSTNLAGLTVIKLICTRRLHTTVRLYSREASTPGTGGDETSKNL

SEQ ID NO: 73416 - protein, 62 aa, Gossypium hirsutum
  Clone ID: GOSHI-09MAY01-C14525_1.pep
MEDTKSVATLIGSTASKIQQLQKAFAEPESQRALTLNLRWKELEEHFSGLEKSLKRRFHELE

SEQ ID NO: 73417 - protein, 133 aa, Gossypium hirsutum
  Clone ID: GOSHI-09MAY01-C14495_3.pep
ERAALFFFFFFDERHDFIIFQKQSNDKIASQIVQIYKTTRQSTHLLPEARGFPAYPKQQNTLRMDWVHCLNAQLLRISIASSVFCISCRNTYLCIYIELILQSLHNLISFLPRGVLYKSATSPSKSQNKWLRS

SEQ ID NO: 73418 - protein, 51 aa, Gossypium hirsutum
  Clone ID: GOSHI-09MAY01-C14495_2.pep
EGSCHAHHSYDAFTRLCVGQIFCTVTVAPEMFGGDPCPNVMKKLSVEVICS

SEQ ID NO: 73419 - protein, 553 aa, Gossypium hirsutum
  unsure (1)..(553): unsure at all Xaa locations
  Clone ID: GOSHI-09MAY01-C14495_1.pep
INYYMYQGGTNFGRTAGGPFIATSYDYDAPLDEYGLKRQPKWGHLKDLHRAIKLCEPALVNGDPTVIRLGNYEEAHVFNYKTGGCAAFLANYNPNSYAKVAFRNMHYNLPPWSISILPDCKNTVYNTARIGAQIARKKMVPVPMHGGLSWQAYNEETASVADSSFTMVGLLEQINTTRDATDYLWYTTDVKIDPHEGFLRNGKSPVLTVLSAGHALHVFVNGQLSGSSYGSLEFPKLTFSQRVNLRAGINTISLLSIAVGLPNVGPHFETWNAGVLGPVTLNGLNEGRRDLSWQKWSYKIGLKGEALNLLSLSGSSSVEWAQRSFVSQRQPLTWYKTTFNAPAGNSPLALDMGSMGKGQIWINGKSIGRHWPAYKASGNCGICSYAGTFNEKKCGTNCGGASQRWYHVPRSWLNPTGNLLVVFEEWGGDPNGITLVRRETDSVCADIYEWQPNLMNYLMKASGKVNKPLRPKVHLECDAGQKISAVKFASFGTPGGVCGSYREGSCHAHHSYDAFTRLCVGQNFCSVTVSPEXFGGDPCPIVLKKLLGGHLSC

SEQ ID NO: 73420 - protein, 129 aa, Gossypium hirsutum
  unsure (1)..(129): unsure at all Xaa locations
  Clone ID: LIB3048-019-Q1-L1-H2.pep
ALKTGGSPGLKKFAPGYTLTFNENKCGTKCXGHNLRWYHIPRSWLNPSGNLLVVFDEIRGDPNGITLVLLETDSVCADIYEWHPNLMNYLMKASGXSTHPYSSNFIYXCDAGQKISSPKFAIFGTPLRV

SEQ ID NO: 73421 - protein, 46 aa, Gossypium hirsutum
  Clone ID: LIB3147-040-Q1-K1-H4.pep
PTRPPTRPNRLCVGQNFCSVTVAPEMFGGDPCPNVMKKLSVEVICS

SEQ ID NO: 73422 - protein, 413 aa, Gossypium hirsutum
  unsure (1)..(413): unsure at all Xaa locations
  Clone ID: GOSHI-09MAY01-C14405_1.pep
KVLLSSAFSEFFSDNGPVDMMDEDAISNLSVRVKLSLTVWDFIIPTTPSLPAVFGISDTVIEDRFGVGHGSSEWYDALEHHFKWLLQYRISPYFCRWGDSMRVLTYTSPWPADHPKSDEYFSDPRLAAYAVPHSPVVSCNDAAKDYLQKEVEILRTKSHWKKAYFYLWDEPLNMEQYESLCNMASEVHAYAPDARVLTTYYCGPSDAPLAPTPFEAFLKVPKFLRPHTQIYCTSEWVFGNREDLVKDVISELHPENGEEWWTYVCMGPSDPHPNWHLGMRGTQHRAVMWRVWKEGGTGFLYWGANCYEKATVPSAEIRFRRGLPPGDGVLYYPGEVFSSSKKPVASLRLERILSGLXGDFEYLKLYASRYGKEEALTLLEKTGVYLGPERYTHEHMAIDIMRGEIFSSCRSCS

SEQ ID NO: 73423 - protein, 86 aa, Gossypium hirsutum
  Clone ID: GOSHI-09MAY01-C14425_3.pep
MAAMEKLKIFVVQEPVVAASCLIAGFGLFLPAVVRPILDSMDSSKQVPQPALRDAVSGVTGKKRGRYDLWIQKRQKFTCSLESPTK

SEQ ID NO: 73424 - protein, 65 aa, Gossypium hirsutum
  Clone ID: GOSHI-09MAY01-C14425_1.pep
MAVMQKLKIFVVQEPVVAASCLIAGFGLFLPAVVRPILDSLESSKQVPQPALRDVVAGVTGKKQG

SEQ ID NO: 73425 - protein, 112 aa, Gossypium hirsutum
  Clone ID: uC-gsflnu33B080c11b1.pep
RRASFFWYVFLSYPTRDSPILILILISNFLKSGIIHFNFGGFHQRTESWLVEKLKIFVVQEPVVAASCLIAGFGLFLPAVVRPILDSMDSSKQVPQPALRDVVSGVIGKKQG

SEQ ID NO: 73426 - protein, 47 aa, Gossypium hirsutum
  Clone ID: uC-gsflnu33B062e06b1.pep
LVKNGVVMIYGSKRGKNLRVACNHRRNKSNFFNLRNFLKCLSTSCLV

SEQ ID NO: 73427 - protein, 103 aa, Gossypium hirsutum
  Clone ID: GOSHI-09MAY01-C14695_2.pep
GRVGGRVGEREMCTRTVYCTNIDKKVSQTEMKSFFESTCGEVSRLRLLGDHVHSTRIAFVEFAMAESAIVALNCSGLVLGTQPIRVSPSKTPVRPRVARPTLR

SEQ ID NO: 73428 - protein, 305 aa, Gossypium hirsutum
  Clone ID: GOSHI-09MAY01-C14695_1.pep
MAAVADKSGEAALVAAAANDKNGLVVETPKSESKKFNVQTLAGVFTKLNPLAKEFFPSSYQQNQTKNDGKFNQVPVGNKSVGNENFSNRGRRNNSNQGRRRLNGKAFRAQRDDSIRQTVYVSDIDQNVTDERLARFFSNSPRPVDCRVCGDPHSVLRFAFVEFADEEGARAALNLNGIMLGFYPVRVLPSKTAILPVNPTFLPRSEDEREMCTRTVYCTNIDKKVSQAEVKNFFESACGEVTRLRLLGDNVHSTRIAFVEFAMNNQHEMVYLCRHIYIYGAWNPVLIFVSQLITSWHYDLRFIRD

SEQ ID NO: 73429 - protein, 182 aa, Gossypium hirsutum
  Clone ID: GOSHI-09MAY01-C14615_1.pep
MSLAEKEPCEFPSQTPAQPQPNPHPVAKKRTRQDNHSPFRGVRKRRWGRYVSEIRFPGQKTRIWLGSFGSPEMAARAYDSAAFFLKGDSAILNFPELVGSLPRPGSCSRRDIQSAAAKAALEEPVGRVKDEEGPESIGWWDDVGMAAFEEVKASPLRFDSMEGELLSFMEDDHHFFTPCFEL

SEQ ID NO: 73430 - protein, 188 aa, Gossypium hirsutum
  Clone ID: GOSHI-09MAY01-C14625_1.pep
MDTKIGSLDNCKPASNDVCSPVNGTVSTIQGSVYPAVVNCSEATLGRHLARRLVQIGVNDVFSVPGDFNLTLLDHLIAEPGLNLIGCCNELNAGYAADGYARSRGVGACVVTFTRGGLSVLNAIAGAYSESLPLICIVGGPNSNDYGTNRILHHTVGLPDFSQELRCFQTVTCYQAVVNNLEDAHDMI

SEQ ID NO: 73431 - protein, 135 aa, Gossypium hirsutum
  unsure (1)..(135): unsure at all Xaa locations
  Clone ID: LIB3083-060-Q1-L1-E2.pep
DNCKPASNDVCSPVNGTVSTIQGSVSPAVVNCSEATLGRHLARRLVQIGVNDVFSVPXDFNLTLLDHLIAEPGLNLIGCCNELNAWSPLNGFPQPLAVVPCVAPLTVXGLNLLKCIGRAYQEKLPFNLLGGRPHF

SEQ ID NO: 73432 - protein, 113 aa, Gossypium hirsutum
  Clone ID: GOSHI-09MAY01-C14195_1.pep
MKVVAAYLLAVLGGNLSPSADDLKDILGSVGAEADDDRIELLLSEVKGKDITELIASGREKLASVPSGGGAVAAAPTAGGGGASAAPAAEAKKEEKVEEKEESDDDMGFSLFD

SEQ ID NO: 73433 - protein, 83 aa, Gossypium hirsutum
  unsure (1)..(83): unsure at all Xaa locations
  Clone ID: uC-gsflnu33B022a06b1.pep
KDITELIASGWEELASVPSGGGAVAAAPTAGGGGASAVPAAEAMKEEKVDEKXESDDYMGFNLFLLSSFCSSYRSLYSQICNI

SEQ ID NO: 73434 - protein, 363 aa, Gossypium hirsutum
  unsure (1)..(363): unsure at all Xaa locations
  Clone ID: GOSHI-09MAY01-C14185_1.pep
RWLFCPALXKAVKTMKKGEKVLLTVKPQYGFGEDGRPATGGECAVPPNATLHITLELVSWKSVSDITKDKKVSKKIVKEGEGYERPNDGTVVQVKLIGKLPDGTIFIKKGYDEEPFEFKIDEEQVIDGLDKAVKTMKKGENALITIPPRPAFGSSESHQELAVVPANSTVYYEVEMVSFVKEKESWEMDTPQKIEAAGKKKEEGNALFKAGKFERASKRYEKAVSFIEYDSSFNDEEKKQAKLLKVNCNLNNAASKLKHKDYKQAAKLCTKVLELDSGNVKALYRRAQAYIQLVDLDLAEADIKKALEIDPDNRDVKLEYRVLKEKIKEYNKRDALFYXNIFAEMIKSAGKQVAAPMAIVIKA

SEQ ID NO: 73435 - protein, 124 aa, Gossypium hirsutum
  Clone ID: GOSHI-09MAY01-C14115_1.pep
VAQNTHQAQIFKKKPLTQQIRDQTETLGLSAARPGFQRRTPPAHATAVALQSPASHVGRASDHLSRPLGPPPMELHRRRMWVQGGAEALLFPLVSVFAASTYERTSRRRWGASSHGSDHRTTEA

SEQ ID NO: 73436 - protein, 112 aa, Gossypium hirsutum
  Clone ID: LIB3189-025-P1-K1-F8.pep
KKTLRQQIRDKTETLGLSAARPGFQRRTPPAHATAVALQSPASHVGRASDHLSRPLGPPPMELHRRRMWVQGGAEALLFPLVSVFAASTYERTSRRRWGASSHGSDHRTTEA

SEQ ID NO: 73437 - protein, 80 aa, Gossypium hirsutum
  Clone ID: LIB3145-035-Q1-K1-A3.pep
NPAAAMPPSSDDRSRARTPPNGALKCAHKSRPRTPRRGGREELRPLLEPTSGDDEVPSAVGLRADSGSLLLPFNHILIIF

SEQ ID NO: 73438 - protein, 321 aa, Gossypium hirsutum
  Clone ID: GOSHI-09MAY01-C14095_1.pep
MQTGNLPQSLSMNSPFGGPSASNPTAAGAPANKDRKMATAEHLVLDLSNPDLRENALLELSKKRELFQDLAPLLWNSFGTIAALLQEIVSIYPVLSPPNLTPAQSNRVCNALALLQCVASHPDTRMLFLNAHIPLYLYPFLNTTSKSRPFEYLRLTSLGVIGALVKVDDTEVISFLLSTEIIPLCLRTMEMGSELSKTVATFIVQKILLDDVGLDYICTTAERFFAVGRVLGNMVAALAEQPSSRLLKHIIRCYLRLSDNPRACDALRSCLPDMLRDATFSSCLREDQTTRRWLQQLLHNVGVNRVPTLQAGAGFDHMLVN

SEQ ID NO: 73439 - protein, 149 aa, Gossypium hirsutum
  Clone ID: AI726350.1.pep
MKQMMNMPQNLSMNAPFGLPSTSNPTSAGVPATKDRKMASAEHLVLDLSNPDLRESALLELSKKRELFQDLAPLLWNSFGTIAALLQEIVCIYPVLSPPNLTPVQSNRVCNALALLQCVASHPDTRMLFLNAHIPLYLYPFLNTTSKSK

SEQ ID NO: 73440 - protein, 194 aa, Gossypium hirsutum
  unsure (1)..(194): unsure at all Xaa locations
  Clone ID: LIB3543-065-Q6-K6-A11.pep
MQTGNLPPYLSRVRFAPFWEGPEPPSXSPTXLPXASRRGGGVRKMATAEHLVLDLSNPDLRENALLELSKKRELFQDLAPLLWNSFGTIAALLQEIVSIYPVLSPPNLTPAQSNRVCNALALLQCVASHPDTRMLFLNAHIPLYLYPFLNTTSKSRPFEYLRLTSLXVIGALVKVDDTEVISFLLSTEIIPLCL

SEQ ID NO: 73441 - protein, 147 aa, Gossypium hirsutum
  unsure (1)..(147): unsure at all Xaa locations
  Clone ID: AI055623.1.pep
MKQMMNMPQNLSMNAPFGLPSTSNPTSAGVPVTKDRKMASAEHLVLDLSNPDLRENALLELSKKRELFQDLAPLLWNSFGTIAALLQENVFYLPWFFSLPNLIPTYSNGVXMPLLYFRVWVFHPDTRMXFLYANIPVYLNPFLNTTG

SEQ ID NO: 73442 - protein, 119 aa, Gossypium hirsutum
  Clone ID: LIB3582-010-P1-K1-G7.pep
HASADAWAGAPANKDRKMATAEHLVLDLSNPDLRENALLELSKKRELFQDLAPLLWNSFGTIAALLQEIVSIYPVLSPPNLTPAQSNRVCNALALLQVISFCPFPLLLRLNFTCLMLTH

SEQ ID NO: 73443 - protein, 193 aa, Gossypium hirsutum
  Clone ID: GOSHI-09MAY01-C14045_1.pep
NQNPNPIFFSFLIVENKASPQLDNMGSEQNQGTSFPPSEPKLCANGCGFFGTAANMNLCSKCYRDLRAGEEQAAKAKAAMEKSLSVKPKEDVVVETFKPVEKLPHAGSSSAAVEQPAVALSGDEQPEPKLSSRCFICRKKIGLTGFKCRCGSTFCGEHRYPEKHECSFDFKGTGRDAIASANPVIKADKLERF

SEQ ID NO: 73444 - protein, 116 aa, Gossypium hirsutum
  unsure (1)..(116): unsure at all Xaa locations
  Clone ID: GOSHI-09MAY01-C14075_1.pep
MAGPAPFVDLGKKAKDLLTKDYNFDQKFTLSMLSTTGMGLTATGLKKDQNFFGDINTVFXSGSSSVDMXVGTYSYVSPKVTVNDVWPCSKAALSFRIPDHKSGKLDVQYLHPHAAI

SEQ ID NO: 73445 - protein, 82 aa, Gossypium hirsutum
  Clone ID: GOSHI-09MAY01-C14015_1.pep
VEGALSRPFEIPFRSSILCRLHQDTDPSLSNSKVNRHRATGCMLCFSKVLPRDPNDTYASNELLEEFLKFLLVAATAANTTA

SEQ ID NO: 73446 - protein, 66 aa, Gossypium hirsutum
  Clone ID: LIB3189-023-P1-K1-F9.pep
HTCFISQKPCFSVSHVTLKPPSFLQRTQAEGALSRPFEIPFHSSILCRLHQDTDPSLSNSKANCHR

SEQ ID NO: 73447 - protein, 177 aa, Gossypium hirsutum
  Clone ID: GOSHI-09MAY01-C14395_1.pep
FPLAAKAFSRSITPLVLLFIFLSFAQGKEIMVGGKTGAWKIPSSESDSLNKWAEKARFQIGDSLVWKYDGGKDSVLQVSKEDYTSCNTSNPIAEYKDGNTKVKLEKSGPYFFMSGAKGHCEQGQKMIVVVMSQKHRYIGISPAPSPVDFEGPAVAPTSGVAGLKAGLLVTVGVLGLF

SEQ ID NO: 73448 - protein, 71 aa, Gossypium hirsutum
  Clone ID: GOSHI-09MAY01-C14385_1.pep
IKIRIPNPNHPSTPKSKHPTYRFLAGKSLKFHCLSIAGIFNKTETQPHRPDSISCGQSNQVSLLDHPGKKP

SEQ ID NO: 73449 - protein, 124 aa, Gossypium hirsutum
  unsure (1)..(124): unsure at all Xaa locations
  Clone ID: GOSHI-09MAY01-C14345_3.pep
PTRTATRPTTFSYILNREENQCVACPSXNGLLGWSQXCQPKKVNCRPNGFSFYKLEGVDHFMSQYNEGEGIKESDCGRKCTSDCTCLGYFYHRETSKCWIANELKTLARTSNSSHVGYIKAPNK

SEQ ID NO: 73450 - protein, 440 aa, Gossypium hirsutum
  Clone ID: GOSHI-09MAY01-C14345_1.pep
MSLHSSLTMSLLSFSFLLLFTFSAKAVVPPSETFRFVNDGEFGPFVVEYDANYRVISIANAPFQLAFYNTTPNAFTLALRMATTRSESLFRWVWEANRGNPVRENATFSLGTDGNLVLADADGRIAWQSNTANKGVVGFQLLPNGNMVLHDSNGKFIWQSFDHPTDTLLVGQSLRIGGATKLVSRASAQNNVDGAYSLVMEPKQLVLQYKGMNPPLPLVYFKSSVWPSTQDGTLQTVTLNVEETNDGFAYYVLLDYTVANSSIGTGNLILTRPKYNSTLSILRLGIDGNLRVFTYYDKVDSQAWEETFTLFSRDSIWGTECELPERCGNFGLCEENQCVACPSTNGLLGWSQNCQPKKVNCRPNGFSYYKLEGVDHFMSQYNEGEGIKESDCGRKCTSDCKCLGYFYHRETSKCWIANELKTLAKTSNSSHVGYIKAPNK

SEQ ID NO: 73451 - protein, 183 aa, Gossypium hirsutum
  unsure (1)..(183): unsure at all Xaa locations
  Clone ID: AI054542.1.pep
ISIANAPFQLAFYNTTPNAFTLALRMATTRSESLFRWVWEANRGNPVRENATFSLGTDGNLVLADADGRIAWQSNTANKGVVGFQLLPNGNMVLHDSNGKFIWQSXDHPTDTLLVGQSVKXEGPTNLESRAFAQTIVNEAYTXVMEPKRCFAVQGMNSPNHLSSNIRLAKSQMYLQLDTNVEE

SEQ ID NO: 73452 - protein, 92 aa, Gossypium hirsutum
  Clone ID: LIB3272-046-P1-K1-F7.pep
ADTWSQNNVDGSYILMGGPKQLVLQYKVINSTKPLVYFKSSVWPNTQDGTLQTVTLNFDETNNGFAYNDVLDYTRANSFIFTPNFILTRPKY

SEQ ID NO: 73453 - protein, 75 aa, Gossypium hirsutum
  Clone ID: GOSHI-09MAY01-C14305_1.pep
MADMDGSSVDSKEESSEDSKLDFSEDEETLIIRMFNLVGERWSLIAGRIPGRTAEEIQKYWASRFSYNNPMPNLS

SEQ ID NO: 73454 - protein, 112 aa, Gossypium hirsutum
  Clone ID: GOSHI-09MAY01-C14335_1.pep
MVELGIQIPTTFDPFAEAEEFGRTGTKDYVHIRIQQRNGRKSLTTVEGLKQELSSDKILKSLKKEFCCNGNVVHDKELGKIIQLQGDQRKKVAHFLVNAGIVKKEQIKIHGF

SEQ ID NO: 73455 - protein, 104 aa, Gossypium hirsutum
  Clone ID: LIB3825-028-Q6-K6-F6.pep
VRLQITLLSFWEPGIRRTDQDLFISDPTEKGRKSLTTVEGLKQELSSDKILKSLKKEFCCNGNVVHDKELGKIIQLQGDQRKKVAHFLVNAGIVKKEQIKIHGF

SEQ ID NO: 73456 - protein, 53 aa, Gossypium hirsutum
  unsure (1)..(53): unsure at all Xaa locations
  Clone ID: LIB3189-034-P1-K1-E4.pep
VFLKRSXCCNGNVVHDKELGKIIQLQGDQRKKVAHLLVNAGIVKKEQIKIHGV

SEQ ID NO: 73457 - protein, 141 aa, Gossypium hirsutum
  unsure (1)..(141): unsure at all Xaa locations
  Clone ID: GOSHI-09MAY01-C14285_1.pep
MVGNTLVQIPACPSLSSSTLTTLPHSSPKVLPCLPPKLRMRLAKVRAMSASTEHNPQPRSSEQKNPLAVVLDIPRNIWRQTLRPLSDFGFGRKXIWEGGVGLFLVSGTVLLALILAWLKRFQIRSKFRKYXTVFEFAQASG

SEQ ID NO: 73458 - protein, 170 aa, Gossypium hirsutum
  Clone ID: GOSHI-09MAY01-C14245_1.pep
INATNGTAGAFDVTTKGILHSALERCEYWRLSDKKGKPPGVVGWWPSRAVTFIENHDTGSTQGHWRFPGGKEMEGYAYILTHPGTPAVFYDHIFSHHRSEIASLISVRNRNGIHCRSLVKIVKAERDVYAAIIDEKVAMKIGPGYYEPPSGSQRWSLALEGRDYKVWETS

SEQ ID NO: 73459 - protein, 200 aa, Gossypium hirsutum
  Clone ID: GOSHI-09MAY01-C14275_1.pep
PRVRPRVRGRESSKASKWFSSKTLRLSLHRRRSKSSSSSTLTSPASSPSSPRERPKRPHQVDEMKQVFRYFDGDDDGKISALELRAYFGSIGEYMSHEDAQMVINELDSDGDSMLDYEDFLKLMKIEKRDDDDDDDDLKKAFEMFELEKGSGCITPKGLQKMLNRLGDAKSYDECVAMIQVYDIDGNGVLDFHEFHQMMA

SEQ ID NO: 73460 - protein, 131 aa, Gossypium hirsutum
  unsure (1)..(131): unsure at all Xaa locations
  Clone ID: LIB3148-018-Q1-K1-A2.pep
RTGRAEPSDPSDCERNAYYGSIGEYMSHENAXGVINGLDCHRDSMLDYEDFLKLMKIEKRDDDDDDDDLKKAFEMFELEKGSGCITPKGLQKMLNRLGDAKSYDECVAMIQVYDIDGNGVLDFHEFHQMMA

SEQ ID NO: 73461 - protein, 82 aa, Gossypium hirsutum
  unsure (1)..(82): unsure at all Xaa locations
  Clone ID: LIB3189-032-P1-K1-H6.pep
SSETIRLSVYRRRSKSCRCSTLRAXDSSPCCARERPKTPHRVDEMKQVPRYFDGDDDGKISALELRAYFGSIGEYMSHEDAK

SEQ ID NO: 73462 - protein, 193 aa, Gossypium hirsutum
  unsure (1)..(193): unsure at all Xaa locations
  Clone ID: GOSHI-09MAY01-C14235_1.pep
MRPLDEKETTAVFEKIFKFTGNNLKNIVENPSHEGPDKEPGRYCFRLHKNKVYYVSDSLVKRATNVARTKLASIGTCVGRFTHGGNFHLTIECLNLLAANAKRKVWLKPTSEMSFLYANHVLKGGLGRITESIAPGDGVVVFSMSDLPLGFGVAAKITQDCRNXNPNAIVVLHQADIGEYLRMENQHEQIIED

SEQ ID NO: 73463 - protein, 161 aa, Gossypium hirsutum
  unsure (1)..(161): unsure at all Xaa locations
  Clone ID: GOSHI-09MAY01-C15945_1.pep
MARAAGAGPCGGGGGMFVQEEKIFAGKVLRLHICASDGAEWLEEATEDTSVEKLKERCLKHCAHGSLEDPKSITHHKLIHAASERVLSDARTILEENIQDQDVLLLIKKRAPSPLPKMAEVSAEEKKKQDQKAPDKEAILRATXNLPFYNMDRAAVHTNMR

SEQ ID NO: 73464 - protein, 200 aa, Gossypium hirsutum
  unsure (1)..(200): unsure at all Xaa locations
  Clone ID: GOSHI-09MAY01-C15965_1.pep
LFFIPVPTWANARNIWRDAXQVPHKTYHYYHPESKGLDFAAMIDDIKNAPNGSFFLLHACAHNPTGVDPSEEQWREISHHIKAKGHFAFFDMAYQGFASGDPEKDANAIRIFLEDGHHIGIAQSYAKNMGLYGQRVGCLSVLCEDEKQAVAVKSQLQQLARPMYSNPPVHGALIVSTILSDPDLKKQWLKEXKVMADRIN

SEQ ID NO: 73465 - protein, 287 aa, Gossypium hirsutum
  unsure (1)..(287): unsure at all Xaa locations
  Clone ID: GOSHI-09MAY01-C15895_1.pep
ERKTFNVNEYLLRNKLCSIFIRSREVLAREAINHSFKALKTRLLIEEGAHAPAYIALYRPIISQGSEWKEKAENLEMVLQQCYKAQSRLSEQLVVEVAESRALKASLQEKEMAIAELEKELNQTRDECSQLKTDLEEKIRALELLMVEHQELKAQLEQMAIKAKNAEAXNKMLVDRWMLXKMQDAERLNEANXAYEDMIERXKAHGLEKLAREQVDGIVRRSEDGAEFFAESTVPSVCSHKINAHDRCGASILFEYNFRQIDQWDRDHQSNVGFRYRIFTHKLSVAL

SEQ ID NO: 73466 - protein, 171 aa, Gossypium hirsutum
  unsure (1)..(171): unsure at all Xaa locations
  Clone ID: AI054527.1.pep
EAINHAFKALKKRHLIEEGAHAPAYIALSRPIISQGSEWKEKAENLEMELQQCYKAQSRLSEQLVVEVSESRALKASLQEKEMAIAELEKELNQTRDECSQLKTDLEEKIRALELLMVELQELKAHLEQMAIKAXNAXAENKMLVERWMLQKMQDAERFNKQCPLRELMDG

SEQ ID NO: 73467 - protein, 136 aa, Gossypium hirsutum
  Clone ID: GOSHI-09MAY01-C15885_1.pep
KWQACLYLGRRLDPFSEQEVEQILCIPLSLYEHEDFVIWRGEPTGEYSVQSRHKLLLYNDQNDLQTNYKQFYKKLWNLDLPSKIKITVWRVSRNFFPAFSNLQYRRLRGSATVVGAKTVWNRGNTCSTNVLLNVSV

SEQ ID NO: 73468 - protein, 170 aa, Gossypium hirsutum
  unsure (1)..(170): unsure at all Xaa locations
  Clone ID: LIB3582-029-P1-K1-E5.pep
NHLYTQQPLIYPHAPFAAYELPSGSHPRSPPLSSQDVNQVAAHKDTPPLLQQRRMLFVESGIEINFLSRSNRTNPTSYTETFNRTFVEQVFPRFHTVLAPTTVADPLNLRYCRLLKAGKKLRETRQTVIFILEVGSPRQITKSSCSYKDKGMHRXCSTXCSEKGSKRLPK

SEQ ID NO: 73469 - protein, 73 aa, Gossypium hirsutum
  Clone ID: LIB3135-034-Q1-K1-B2.pep
RGKPTEEYSVRSDHKLLLHNDQNDLKTNYKQFYKKLWNLDLPSKIKITAWRVSRNFLPTFSNLQYRRLRGCAS

SEQ ID NO: 73470 - protein, 133 aa, Gossypium hirsutum
  Clone ID: GOSHI-09MAY01-C15865_3.pep
MAENKYNLKNPAAKRILQEVKELQSSPSDDFTSLPLEENIFEWQFALRGPRDSEFEGGIYHGRIQLPAEYPFKPPSFMLLTPNGRFETQTKICLSISNHHPEHWQPSWNVRTVLVALIAFMPPTQGGFRFSSI

SEQ ID NO: 73471 - protein, 152 aa, Gossypium hirsutum
  Clone ID: GOSHI-09MAY01-C15865_2.pep
MAEDKYNLKNPAVKRILQEVKELQSNPSDDFMSLPLEENIFEWQFAIRGPRDSEFEGGIYHGRIQLPAEYPFKPPSFMLLTPNGRFETQTKICLSISNHHPEHWQPSWTVRTALVALIAFMPTSPNGALGSLDYTKEERRTLAVKSRESPPN

SEQ ID NO: 73472 - protein, 308 aa, Gossypium hirsutum
  Clone ID: GOSHI-09MAY01-C15865_1.pep
MAEDKYNLKNPAVKRILQEVKEMQSNPSDDFTSLPLEENIFEWQFAIRGPRDSEFEGGIYHGRIQLPAEYPFKPPSFMLLTPNGRFETQTKICLSISNHHPEHWQPSWSVRTALVALIAFMPTNPNGALGSLDYTKEERRALAVKSRESPPKYGNPERQKLIDEIHEYMLSKTPSVPQHSPSKSSEEHPTEAKTEAEAEANQQDSVTVGAGNPGIPNPTLNERVVEEPPVAPANAYPYPVAMRLVREIPGEGPSNQPLRRPEIRVQRSVVDDRLFTWAAVGLTIAILVLLFKKYIKSSGHGAVFMDGS

SEQ ID NO: 73473 - protein, 157 aa, Gossypium hirsutum
  unsure (1)..(157): unsure at all Xaa locations
  Clone ID: GOSHI-09MAY01-C15805_1.pep
NGDPCAPTDWDAWEGVTCHTNKNGTGLVITQIELGSQGLKGYISEQISLLSNLINLNLSTNSLDGTLPIGLGXKSLARLDLSDNQFSGSIPESLTSSNLQLVRLNNNLLEGXVPEELYSVGVHGGTIDLSGNKGLVWSSPFTGLSPFLGEWSLVERW

SEQ ID NO: 73474 - protein, 255 aa, Gossypium hirsutum
  Clone ID: GOSHI-09MAY01-C15835_1.pep
MSPSMKETSLETMEKKGEDVNGIMKKEQDKLFDPSEAPPFRINDIRAAIPKHCWVKNPWRSMSYVFRDAIVISALLAAALYFRSWFFWPFYWVAQGTMFWALFVLGHDCGHGSFSDNPILNNVMGHILHSTILVPYHGWRISHRTHHQNHGNVEKDESWVPMSEDLYNSLSSRTKFLRFKIPFPLFAYPVYLWHRSPGKTGSPFNPYSNLFAPQERKHIMTSTTCWIAMVVFLVYLSFVIGPSMTFKLYGVPYLI

SEQ ID NO: 73475 - protein, 102 aa, Gossypium hirsutum
  Clone ID: LIB3197-029-Q1-M1-E4.pep
MEKKGEDVNGIMKKEQDKLFDPSEATPFRINDIRAAIKKHCWVKNLWRTMSYDFRNSIVFSGLLGASLYLRILILLSKYLGAEGTMFWPVFVLGHDCEMKLL

SEQ ID NO: 73476 - protein, 111 aa, Gossypium hirsutum
  Clone ID: GOSHI-09MAY01-C15595_4.pep
MRITVMTADEQILSLDVDPHETVENLKALLEVETMVPLQQQQLLFNGREMNNSEKLSALGVKDDDLVMMVSGVASSGSASRNDLSLNPDGSAVNPAAFQQQIRQDSNLMGQ

SEQ ID NO: 73477 - protein, 148 aa, Gossypium hirsutum
  Clone ID: GOSHI-09MAY01-C15595_2.pep
KIGEIFYPCSFLVLDSPSWARRFGLDVLREHQCIIDLKDNVLRVGGGEVSVPFLQEKDIPSRFLDEEWLLKQASSSGAAVTTGTTKKANVPSGGQSSGGARGVATHKPEFEAKVAKLIELGFAREMAIEALKLCDGNEEQAAGILFGG

SEQ ID NO: 73478 - protein, 403 aa, Gossypium hirsutum
  unsure (1)..(403): unsure at all Xaa locations
  Clone ID: GOSHI-09MAY01-C15595_1.pep
MRITVMTADEQILSLDVDPHETVENLKALLEVETMVPLQQQQLLFNGREMNNSEKLSALGVKDDDLVMMVSGVASSGSASRNDLNLNPDGSAVNPAAFQQQIRQDSNLIGQLFQTDPELAQAVVGNDLNKLQEILRARHQRRSDLRRQEEEELALLQADPFDVEAQKKIEAAIRQKGIDENWAAALEYNPEGFAXVMLYVDMEVNGVPLGRGVYFFXSTIISKSCAERCGLLRLMDQRYKGIAHGVGQSEILGRIHVAPIKIGEIFYPCSFLVLDSPNMEFLFGLDMLRKHHXDNVLRVGGGEVSVPFLQEKDIPXPFLDEEGHLKQASSSGAAVTTGTTKKANVPSGGQSSGGARGVATHKPEFEAKVAKLIELGFAREMAIEALKLCDGNEEQAAGILFGG

SEQ ID NO: 73479 - protein, 173 aa, Gossypium hirsutum
  Clone ID: uC-gsflnu33B024h10b1.pep
QISKSVRWQHHPQLPSCRSEASASRNDLNLNPDGSAVNPAAFQQQIRQDSNLIGQLFQTDPELAQAVVGNDLNKLQEILRARHQRRSDLRRQEEEELALLQADPFDVEAQKKIEAAIRQKGIDENWAAALEYNPEGFARVVMLYVDMEVNGVPLKAFVDSGAQSTIISKAVLS

SEQ ID NO: 73480 - protein, 172 aa, Gossypium hirsutum
  Clone ID: GOSHI-09MAY01-C15585_1.pep
PQLTICFQSSNLLRLSCFWKAKHKLETVVVSHARPQENMMYAVFPASSSCHVEPKAYYPIAWRSVLPFLPRSIPINRFKTNSSAVKTNRKSNLLPNYRNSLLKVEIPRTAVKCQSLYMFNVATYPCWYMLMLHILILDMLLFIFFPCNYFLEEIATSLLLYSIRYPASHSII

SEQ ID NO: 73481 - protein, 170 aa, Gossypium hirsutum
  Clone ID: GOSHI-09MAY01-C15415_2.pep
MAEESIGSPVTLDISGSDGGNLRKNSLAVADSVSSREKTLPRYLRASTGSCHDFCKYGKKHESEEIARHPFRKRIVEKLCDEPNLFRSLDLVQRKQTSTSESKSFPNSRSHTPDMPDTIELQLPTCSPGGNNSTIHGVQLKKEKTSAAKLMSEHPPNSRSRHKSSDVVTP

SEQ ID NO: 73482 - protein, 81 aa, Gossypium hirsutum
  Clone ID: AW187233.1.pep
SKNALIVTVESNWICQMILYFFYDISRTRMYDEIKLNCLYMKWLYLSLPFFCPCSCILSSSCRFLSLEVYFEINSIIGTSS

SEQ ID NO: 73483 - protein, 157 aa, Gossypium hirsutum
  Clone ID: GOSHI-09MAY01-C15435_1.pep
MHLIRENLFIGNIGDAAQVLQNGSSEITHILSVLSSASISFFSEWRSGITIPAEEIKKVFVGGSGDAAAAPEGHSDDGSKSCLSPQKLLYLLEYAGKDLKLVRMAVPIRDMESENLLDYLDACIDFIDRSKKEGSVLVHCFAGVSRSAAIIMAYLMR

SEQ ID NO: 73484 - protein, 134 aa, Gossypium hirsutum
  unsure (1)..(134): unsure at all Xaa locations
  Clone ID: GOSHI-09MAY01-C15755_4.pep
MMAAPEAPLRCVGIPRQSAAVRLMQHMGWEEREGLGKDKQGIQSYVRIKNKQDTIGVGLEKPDPWAFDTAQFDSILKRLKVQAAQINDEVKXQVVKATRPQGRYKKRERGKIVQAYSSEDLEGILAKRVEESSP

SEQ ID NO: 73485 - protein, 205 aa, Gossypium hirsutum
  Clone ID: GOSHI-09MAY01-C15755_2.pep
TESQDVPTGGDTSESVPPEWWGHKYGFISGGFLGESTRRKSIKTGEAKISTGRTVCFEDDQENLYKLVQDNATTGKQGLGIKDRPKKVAGVHFQGKKTSFSDSGGEDSDDVGPPAKRMRENALETEKADEPKLRLKKLCKRLLCQVPGDSLKLKQLKILIDEQSTSVFSSFSTKKDAIAYLKRKLEGSSKFSVEGKRVSLTSRSW

SEQ ID NO: 73486 - protein, 245 aa, Gossypium hirsutum
  Clone ID: GOSHI-09MAY01-C15755_1.pep
MMAAPEAPLRYVGIPRQSAAFRLMKQMGWEEGEGLGKDKQGIKGHVRVKNKQDTTGIGLDKPNPWAFDTAQFDSILKGLKVKQAVQTNDEAEKNENQVETKRDEPNDTEEQVVKATRPQGRYKKRERGKLVHAYSSKDLEGILAKKVEESPQVNPDVVAEMEVIETTETNDFSTEGNKVESVSPEWWGFKYGFVSGGFLGETTRRKSIKTGEAKNSTERTVFYEDDQENLYKLVQISTTGKQVWH

SEQ ID NO: 73487 - protein, 49 aa, Gossypium hirsutum
  Clone ID: LIB3147-007-Q1-K1-C5.pep
IKPKPIITWMLLCNQDLLLNADIFLLPDFATSSTGSITAIDLFATNNTT

SEQ ID NO: 73488 - protein, 75 aa, Gossypium hirsutum
  Clone ID: LIB3135-029-Q1-K1-F12.pep
MAAPEAPIQYVSIPLQYSAFCLMQQMGWEDREWLCKDKQGIKSYVRIKNKHDTIGVGLEKPYPGAFDTAHFDSIL

SEQ ID NO: 73489 - protein, 211 aa, Gossypium hirsutum
  unsure (1)..(211): unsure at all Xaa locations
  Clone ID: GOSHI-09MAY01-C15775_1.pep
YKQPVFVYIPMMGELRGGAWVFVDSRINSDHIEMYAERTAKGNVLEPEGMIEIXFRTKELLECMGRLDQQLINMKAKLQEAKSNGAHAQMDSLQQQIRSREKQLLPVYTQIATKFAELHDTSLRMAAKGVIKEVVDWDRSRSFFYRRLRRRIAESSLVKIVKDAAGDQLSHKSAMDLIKKWFLDSSVAKGREDAWVNDEAFFSWEDDLGNY

SEQ ID NO: 73490 - protein, 117 aa, Gossypium hirsutum
  unsure (1)..(117): unsure at all Xaa locations
  Clone ID: LIB3149-032-Q1-K1-C4.pep
MENTFWTRVFLLCLFRLDQPVSYMKERRADTNSNGPHAQMESLXTRFXSREKQLLPVYTQIATKFAELHDTVMKMAPNGVIKEVVDWDRSRSFLYRRLRPRIAESSLVKIVKDAAGD

SEQ ID NO: 73491 - protein, 165 aa, Gossypium hirsutum
  Clone ID: GOSHI-09MAY01-C15155_1.pep
MESLAMGKKLLTSVLVGLVVASAITQTVLAQNCGCAPNLCCSQHGYCGQGNDYCGTGCKEGPCFSKSPTGASVASIVSPQFFNGIINQARADCAGKKFYTRQAFLTALDSFPDFGKLGSDVESKREIAAFFAHATHETEFFCYTEEQDKSNSYCEANPKFPCAPG

SEQ ID NO: 73492 - protein, 74 aa, Gossypium hirsutum
  Clone ID: LIB3196-037-P1-M1-C8.pep
VFGLCLSLGTGGSLGVWVGSRPTLTQRLALPPGVDSAMKEEVQRLQSRVDLLEEKLQLVLAPLHKLASQALEHG

SEQ ID NO: 73493 - protein, 129 aa, Gossypium hirsutum
  Clone ID: LIB3196-002-P1-M1-G2.pep
TMHPISWPGLLLSRVTCLKPGLTSSNRSTLACSLCTPAFIALSTPGGRARRWVRVGQLPTHTPRLPPVPRERQSPKTQIQASAGPDACLALARGLRAVPPKYIGAHGSAQLLRVPATLREVGAVVSAAH

SEQ ID NO: 73494 - protein, 94 aa, Gossypium hirsutum
  Clone ID: GOSHI-09MAY01-C15105_1.pep
MATSSRRTSGPVLRSLSPSGRFCSHYASQSSSSSSSFAFSSSSFSSRSSTFFNQHRSISPPRVNMYNHSSSAPSVRFSLDKPPVPAEPFDSHHP

SEQ ID NO: 73495 - protein, 115 aa, Gossypium hirsutum
  Clone ID: LIB3585-052-P1-K1-A12.pep
PHLIDQRAVLLSDPSPHPAASDLTTLLTHHLLPISLLLPLPVQAFLYALQLSLINTYLSLRHVSICTTTLHRTHIFTSTFITALSPRTLSIFTILINTDAVHNLQNLHPKLTLMF

SEQ ID NO: 73496 - protein, 95 aa, Gossypium hirsutum
  Clone ID: LIB3585-042-P1-K1-H12.pep
SSRTIRIWSGSPDPLSREIFSKSVSHYCFSDLHLSSSSFAFSSSSFSSRSSTFFNQHRSISPPRVNMYNHSLSAPFVRLSLCNRPIFLEPFSSHH

SEQ ID NO: 73497 - protein, 208 aa, Gossypium hirsutum
  Clone ID: GOSHI-09MAY01-C15005_1.pep
FESLRDSQGGRLIALVSKAGSSYCIRSDITRGRTGQNVAFGVVNNAEAPIMKEKSVNFSSLSCKNARVAPFFPLETVGFRSKRRNGVIVAASPPTEDALIATEPLTKQDLVGYLASGCKSKEKWRIGTEHEKFGFEIKTLRPMKYEQIAELLNGISERFDWEKVMEGDKIIGLKQGKQSISLEPGGQFELSGAPLETLHQTCAEVNSH

SEQ ID NO: 73498 - protein, 88 aa, Gossypium hirsutum
  Clone ID: LIB3145-037-Q1-K1-C3.pep
GKEAKNSQHLISLPLPLTLPVRPSLTPRSSACRQPTMILNIRRQRSSLIFLIFAFRCQNGYSTTSRHIDLESPSPSASIFSITLKIEP

SEQ ID NO: 73499 - protein, 74 aa, Gossypium hirsutum
  Clone ID: LIB3197-044-Q1-M1-D10.pep
SSFPLSLLPSLTPRSSACRQPTMILNTRRQCSSLIFLIFTFHFQNGYCTTNRHIYLESPSTSASIFSISLKIKP

SEQ ID NO: 73500 - protein, 71 aa, Gossypium hirsutum
  unsure (1)..(71): unsure at all Xaa locations
  Clone ID: LIB3189-050-P1-K1-B3.pep
WRIGTEHEKFGFEIKTLRPMKXEQIAELLNGISERFDWEKVMGGDKIIGLKQGKQSICRSSRRGTRCRRGK

SEQ ID NO: 73501 - protein, 113 aa, Gossypium hirsutum
  Clone ID: LIB3197-004-P1-M1-G5.pep
MAVAAVKWVMSKRTILKHLFPIQNGALYCVCHKSTYSPLPDDYNCNVELALTSDGRTIVCYHPSVDIPYEHTKPVPRPDPVHNNEETHDQVLKTRLEEKVEHLEEGPMIEKLS

SEQ ID NO: 73502 - protein, 97 aa, Gossypium hirsutum
  Clone ID: LIB3197-004-P1-M1-G10.pep
PYNVCNMNRLWRVLYLIHGQYVQRNLMLQKLIEFQGWLLGSEYLMLYLTGHLLRCFLIKRLLPLAKLRIVRQLLPPRLLMGKKCLLKTGLGIYNMNC

SEQ ID NO: 73503 - protein, 222 aa, Gossypium hirsutum
  Clone ID: GOSHI-09MAY01-C15305_1.pep
MDSLGPNRFDIFEIYRRFCELRTGYEHVCDGEGYRQGEESQRAKFTRDALNQLLKMVESRMRERHMNAIFDELLKLMLQLDLMVDFSVFSCFYDFVFFVCRENGQKNITVSRAVAAWRLVLAGRFRLLNQWCDFVEKNQRHNISEDTWQQVLAFSRCVHETLEGYDPEGAWPVLIDDFVEHMYRISGSNKDTNGFCSYGDSGSQLCAYDDSLPGPGVEEEVA

SEQ ID NO: 73504 - protein, 80 aa, Gossypium hirsutum
  Clone ID: GOSHI-09MAY01-C15245_1.pep
STLPKFTSICFLSRATIQKANWDWINFVSNICHLFLICSPNINHCHLYSLHLNTSNFMGTSFVGEKDDIQTTHNLQLQFQ

SEQ ID NO: 73505 - protein, 59 aa, Gossypium hirsutum
  Clone ID: LIB3197-002-P1-M1-F8.pep
AILVIHLPFLGIELSVIFQYNNFTLSHASAQQLVPEPGSYLGNTTVYGTIHVYGRTRGR

SEQ ID NO: 73506 - protein, 101 aa, Gossypium hirsutum
  Clone ID: GOSHI-09MAY01-C16995_2.pep
HTHKFRSSGFHLFPSSPTVLMPVGFQIAPDLDLKGFSFPFKTWRKPASGQIATFSGFFYSKKYLTGGLLSMEILFWFLLSIALSAQSPLNTQHGAAMNFVF

SEQ ID NO: 73507 - protein, 101 aa, Gossypium hirsutum
  Clone ID: GOSHI-09MAY01-C16995_1.pep
HTHKFRSSGFHLFPSSPTVLMPVGFQIAPDLDLKGFSFPFKTWRKPASGQIATFSGFFYSKKHLTGGLLSMEILFWFLLSIALSAQPPLNTQHGAPVHFVF

SEQ ID NO: 73508 - protein, 85 aa, Gossypium hirsutum
  Clone ID: LIB3189-040-P1-K1-E1.pep
FFSDTHTNFEALDSTSSASSPTVLMPVGFQIAPDLDLKGFSFSFKTCRKPASVQIVTFFRDLLLIETLITLYSICIYFSSLFIIL

SEQ ID NO: 73509 - protein, 92 aa, Gossypium hirsutum
  unsure (1)..(92): unsure at all Xaa locations
  Clone ID: GOSHI-09MAY01-C16985_1.pep
MSIICGLPLLECIYCLACARWAWNRCLHTAGHDSVTWGLATXEFEPVPRLCRYILAVYEDNIRHPLWEPXGGYGINPDWLILRKTYKDTRGR

SEQ ID NO: 73510 - protein, 311 aa, Gossypium hirsutum
  Clone ID: GOSHI-09MAY01-C16935_1.pep
GRVDGFKRIYLHEEGIPGSRRGSLVPPPANDMPAEGEFIQAAALVSQPALYSKELMDQHPVGPAMVHPAETASEGPVWTALLDPGVKRALLVGIGIQILQQFSGINGVLYYTPQILEEAGVEVLLSNLGLGSDSASFLISAFTTLLMLPCIGVAMKLMDISGRRRLLLTTIPVLIVSLIILVFSELVDLGTVVNAAISTACVIVYFCCFVMGYGPIPNILCSEIFPTRVRGLCIAICALVYWIGDIIVTDARPVARGSIGLAGIFGIYAVVCLISWVFVFLKVPETKGMPLEVITEFFSVGARQAGATKNE

SEQ ID NO: 73511 - protein, 54 aa, Gossypium hirsutum
  Clone ID: LIB3197-033-Q1-M1-E6.pep
SVTSLILCSTSLSCTNKNTSVILQWHSFVFVLHNPNTHISAIYSIYLNMPLSIK

SEQ ID NO: 73512 - protein, 326 aa, Gossypium hirsutum
  Clone ID: GOSHI-09MAY01-C16895_1.pep
MEACFFDTLKAQPFWVIFLFTLGSLSLLKFSFVFLKWVWINFLRPGKNLKKYGSWGLVTGPTDGIGKGFAFQLARKGLNLVLVGRNPDKLKDVSDSILAKYAKIQIRTVVVDFTGDLDEGVKKIKETIEGLDVGVLINNVGISYPYARYFHEVDEELLVNLIKVNVEGTTKVTQAVLPGMVKRKKGAIVNIGSGAAIVIPSDPLYAVYAATKAYIDQFSRCLYVEYKNSGIDVQCQVPLYVATKMASIKRSSFFVPSTDGYARAAMRWIGYEPRCTPYWPHSILWGLAYSLPESVGDAWRLRFCLGIRERGQMEDSRKNGWKHIVE

SEQ ID NO: 73513 - protein, 84 aa, Gossypium hirsutum
  unsure (1)..(84): unsure at all Xaa locations
  Clone ID: LIB3583-042-Q6-K7-D8.pep
PPPXPPHNPNNPPPPPPPPPPPPPPPPPPPPPTHTPPHKNKPTTTNTQKTHPPPKTXNPHTPKKKNTPLKNNFKPKKRKITQKG

SEQ ID NO: 73514 - protein, 148 aa, Gossypium hirsutum
  Clone ID: uC-gsflnu33B079d01b1.pep
IRVRPRVRPRVRFVGVLINNAGISYPYARYFHEVDEELLVNLIKVNVEGTTKVTQAVLPGMVKRKKGAIVNIGSGAAIVIPSDPLYAVYAATKAYIDQFSRCLYVEYKNSGIDVQCQVPLSVATKMASIKRSSFFVPSTDGYARAAMR

SEQ ID NO: 73515 - protein, 349 aa, Gossypium hirsutum
  unsure (1)..(349): unsure at all Xaa locations
  Clone ID: GOSHI-09MAY01-C16595_1.pep
GLLGEVLRINNGSVELDSSIMGVQQEGKKXKVPLNSSDKLFKEIRDLNFEVVVQVLRQKATSMKQDYTEMTTTNQTVSELKDFVKKLNSLPEMTRHINLAQHLSTFTSKPSFLAKLDMEHTIIETSSYDICFDYIEEMIHKQEPLVNVLRLLILFSVTNSGLPKKHFDYLRRELLHSYGFEHMATLNNLEKAGLLKKQESKSNWLTVKRALQLVVEDTDTANPNDIAYVFSGYAPLSIRLVQHAVRSGWRAMEEILKLLPGPHTETKRLGFALRPPPPARQGASNGLDKIADGRRSLVLVVFVGGVTFAEIAALRFLSAQEGMAYDLIIGTTKMVNGHSLVETFLETIG

SEQ ID NO: 73516 - protein, 218 aa, Gossypium hirsutum
  Clone ID: GOSHI-09MAY01-C16545_1.pep
MDRRSWLWRRKSTEKSPGETESSGGSISSFSERFSDEQASATISSQSLEVTSKAVPVDEENNNVRSLTEKLSTALMNISAKEELVKQHAKVAEEAVSGWEKAEKDVVALKQQLDAAMKKNAALEDRVGHLDGALKECVRQLRQAREEQERKIHEAVSKKCHEWESSKSELESQLLNLKAQLETAKSDAAASVDPDLQLKLDACEKENSSLKLQLHSRA

SEQ ID NO: 73517 - protein, 217 aa, Gossypium hirsutum
  Clone ID: GOSHI-09MAY01-C16525_1.pep
GIQILQQFSGINGVLYYTPQILEQAGVGVLLSNLGISSSSASLLISGITTLLMLPSIAVAMRLMDIAGTRSLLLSTLPVLIISLLVLVIGSVVKMGNVVHAAISTVSVVLYFCFFVMGFGPIPNILCAEIFPTRVRGICIAMCALTFWICDIIVTYSLPVLLKSVGLAGVFGMYAVVCVISWVFVFLKVPETKGMPLEVITEFFSVGAKQVAAAKNN

SEQ ID NO: 73518 - protein, 95 aa, Gossypium hirsutum
  Clone ID: GOSHI-09MAY01-C16495_3.pep
MGDEKSMIVMASRDRESRDRELLIPVADAVHDDSSKPSPSSSSSHAGRETFYKVFPSWASKEFMTGCVILFPMAISFYITWWVIHFVGGFFSPIC

SEQ ID NO: 73519 - protein, 278 aa, Gossypium hirsutum
  Clone ID: GOSHI-09MAY01-C16495_2.pep
MGDEKSMIVMASRDRESRDRELLIPVADAVHDDSSKPSPSSSSHHAGRETFYKVFRSWASKKFMTGCVILFPIAITFYITWWFVHFVDGFFSPIYAQLGIEIFGLGFVTSITFIFLVGVFMSSWLGASVLGLGEWFIKRMPFVRHIYNASKQISSAISPDQNTQAFKEVAIIRHPRIGEYAFGFITSSVSLQSYTGEEELCCVYVPTNHLYIGDIFLINTNDVIRPNLSVREGIEIVVSGGMSMPQILSTLDSRLPLGGCSPNRKLIVAWVLRTVFWC

SEQ ID NO: 73520 - protein, 142 aa, Gossypium hirsutum
  unsure (1)..(142): unsure at all Xaa locations
  Clone ID: GOSHI-09MAY01-C16495_1.pep
MGDEKSMIVMASRDRESRDRELLIPVADAVHDDSSKPSPSSSSSHAGRETFYKVFRSWASKKFMTGWXGFVTSITFIFLVGLXRVRSWLGASVLGLGEWFIKRMPFVRHIYNASKQISSAISPDQNTQAFKEVAIIRHPRIG

SEQ ID NO: 73521 - protein, 122 aa, Gossypium hirsutum
  Clone ID: AW187079.1.pep
MGDEKSMIVMASRDRESRDRELLIPVADAVHDDSSKPSPSSSSSHAGREDSRIIYWSFFRSWASKKFMTGCVILFPIAITFYITWWFIHFVDGFFSPIYAPIGIELFGLGFVTTIAFIFLVG

SEQ ID NO: 73522 - protein, 103 aa, Gossypium hirsutum
  Clone ID: uC-gsronu33B132a02b1.pep
QNTQAFKEVAIIRHPRIGEYAFAFITSSVTLQSDAGEEELCCVFVPTNHLYLGDIFLINTKDVIRLNLSVREGIEIVISGGMSMPQILSTLDTQLERSRPERS

SEQ ID NO: 73523 - protein, 50 aa, Gossypium hirsutum
  Clone ID: LIB3083-024-Q1-L1-B1.pep
DIFLINTKDVIRLNLSVRKGIEIVISGGMSMLQILSTLDTQLKRSRHERS

SEQ ID NO: 73524 - protein, 102 aa, Gossypium hirsutum
  unsure (1)..(102): unsure at all Xaa locations
  Clone ID: LIB3165-047-Q1-K1-G11.pep
LEAENREGLEESSWRASATGIRSSRSILSLIHTGHHDHRFLIAHHLETLLLISFSTIPETLTCFHPFSXVTVSHXXXYTFKPPPDIFNFFPSDRPRVRPRVR

SEQ ID NO: 73525 - protein, 399 aa, Gossypium hirsutum
  unsure (1)..(399): unsure at all Xaa locations
  Clone ID: GOSHI-09MAY01-C16465_1.pep
MIECSVCHSKIAPPASGARASAYDKHRTFVSSKTRFLNVHXVAGDCLLVGFQPILVYMSKVDGGFKYSPISVNFLIEVAKVIFAIVMLLFQSRHKKVGEKSLLSVSALVQAARNNVLLAVPALLYAINNYLKFIMQLYFNPATVKMLSNLKVLVIAILLKMIMKRRFSIIQWEALALLLIGISINQLRSLPEGTTSFGLPVATGAYLYTLIFVTVPSLASVFNEYALKSQFETSIYHQNLFLYGYGAIFNFLAILGTAIFKGPNSLDILQGHSKATVLLICNNAAQGILSSFFFKYADTILKKYSSTIATIFTGIASAVLFGHTLTINFXLGISVVIISMHQFFSSYSKVKDEQRSGNFKMVESIDSQRSRDASFPNMTDVSENASHHVNEEKGPLLPV

SEQ ID NO: 73526 - protein, 123 aa, Gossypium hirsutum
  Clone ID: LIB3048-041-Q1-L1-B3.pep
KRAWNRRFPFFHGEALALCLMGISLNQLRSSRGTTSFGLPVATGAYLYTLIFVTVPSLASVFNEYALKSQFETSIYHQNLVLYGYGAIFNFLAILGTAIFKGPNSLDILQGHSKATVLLICNN

SEQ ID NO: 73527 - protein, 75 aa, Gossypium hirsutum
  Clone ID: LIB3048-025-Q1-L1-B9.pep
GFEFLSRSAFHYHTFLASRYSAQEQVGMIECSVCHSKIAPPASKSISRAYDKHRTFVSSKTRFLNVILVAGDCLL

SEQ ID NO: 73528 - protein, 306 aa, Gossypium hirsutum
  Clone ID: GOSHI-09MAY01-C16785_1.pep
MKNQSKMLTIGLVSAWYSSNIGVLLLNKYLLSNYGFKYPIFLTMCHMTACSLLSYIAIAWMKMVPMQTIRSRVQFFKISALSLVFCVSVVFGNISLRYLPVSFNQAVGATTPFFTAVFAYLMTLKREAWLTYLTLVPVVTGVIIASGGEPSFHLFGFIMCVSATAARALKSVLQGILLSSEGEKLNSMNLLLYMAPIAVVFLLPATLIMEENVVGITLALARDDVKIIWYLLFNSALAYFVNLTNFLVTKHTSALTLQVLGNAKGAVAVVVSILIFRNPVSVTGMLGYTLTVFGVILYSEAKKRSK

SEQ ID NO: 73529 - protein, 174 aa, Gossypium hirsutum
  unsure (1)..(174): unsure at all Xaa locations
  Clone ID: AI731735.1.pep
LTLVPVVTGVIIASGGEPSFHLFGFIMCVAATAARALKSVLQGILLSSEGEKLNSMNLLLYMAPIAVVFLLPAALIMEENVVGITIALARDDMKIVWYLIFNSALAYFVNLTNFLVTKHTSALTLQVLXNAKGAVXVVVSILIFRNPVSVTGMLGYTLTVFGVILYSEAKKRNK

SEQ ID NO: 73530 - protein, 69 aa, Gossypium hirsutum
  Clone ID: AI054673.1.pep
FHQIISKEPIFHTKNTHNFPSSTQIHLHIIPISFSIKNPVFFFTQIKNTQILKTQKETMKNQSKMSRSG

SEQ ID NO: 73531 - protein, 106 aa, Gossypium hirsutum
  Clone ID: LIB3197-030-Q1-M1-C10.pep
MKTNSKLITIGLVTAWYSYNIGVLGVNKYLLSNYGFKYPIFLTMCHMTACSLLSYIAIAWMKMVPMQTIRSRVQFFKISALSSVFCVSVVFGNIILRLLPVSFNQA

SEQ ID NO: 73532 - protein, 84 aa, Gossypium hirsutum
  Clone ID: LIB3585-051-P1-K1-G11.pep
MKNTSKLFTIGLVASWYSTNIGVLLLNKYLLSNYGFKYPIFLTMCHMTACSLLSYIAIAWMKMVPMQTIRSRVQFFKIFALEFG

SEQ ID NO: 73533 - protein, 82 aa, Gossypium hirsutum
  Clone ID: uC-gsflnu33B050a03b1.pep
FTRTPTRPSRFFTIGLVTSWYSSNIGVLLLNKYLLSNYGFKYPIFLTMCHMTACSLLSYIAIAWMKMVPMQTIRSRVQFLKI

SEQ ID NO: 73534 - protein, 184 aa, Gossypium hirsutum
  unsure (1)..(184): unsure at all Xaa locations
  Clone ID: GOSHI-09MAY01-C16755_1.pep
MMGEDLGVEPKEAAVREVAKILPLPELXQSISTIKADYIXRQQANDAQLSTMGAEQVEQAQAGLESLNSSQKTISQLRENVISIENLCRECQNLIDNHDQIKLLSNVRNNLNTTLKDVEGMMSISVEASEARDSLSDDKELVNTYERLTALDGKRRFALAAVASHKEEVGRSKKYFENVDRPGK

SEQ ID NO: 73535 - protein, 419 aa, Gossypium hirsutum
  Clone ID: GOSHI-09MAY01-C16775_1.pep
LDELEEQRKSVASYMESLKNAQIEVESERVKLRVVEARNKDLERDLSVERELIKVAPEELKKEKYSLQLAIQDASFLRKQLGKKHTEFVEMNNVLQNKEVDLVEAKLEIQHLKSERASLQLILEEKDQELSDAKKNLEQLNQEIAELKMLMSSKENQLIQATALLKEKDEYALKVQDELNDTKMKFSEAETVIERIAELTNRLVISVKDEDNNVLRPVDDVSSELMHQLVDRPSSDFGLQKKQLETELRFTKESLKDKEMEVLAAQRALAIKDEELKMVLGRLEAREKELQRLKEEMIEDANDIKKLYALAQERIGEKSIGDLAIEKLQLEAAQLEVEAATSALQKLAEMSHELLIKASTSIESDSDTSIFLQSGSDPMISMMKNDESFTEVKTGVAKLSALTEQLVKDAGIVGVHLQS

SEQ ID NO: 73536 - protein, 167 aa, Gossypium hirsutum
  unsure (1)..(167): unsure at all Xaa locations
  Clone ID: GOSHI-09MAY01-C16715_1.pep
MATLSSTHSSSQNILITFTIIFLASSLLPSYSAITETDQRRPFKKIYAFGDSFTDTGNTESLTGPNGFVRVSNPPYGTTFFHHPTNRYSDGRLVIDFVAQSLSLPFLPPYRSQKSXSRTYRVYFAVVGSTAINLAFSVXNYPSLDTTPXSIHTPMMWFDYYLESECC

SEQ ID NO: 73537 - protein, 123 aa, Gossypium hirsutum
  unsure (1)..(123): unsure at all Xaa locations
  Clone ID: GOSHI-09MAY01-C16695_1.pep
MTGHPWPHDRASFRYQPSINRRRSSKNILHLLGKREVSPRTKYVPKKLWGEAPKRNVYSSPWTEPIRDARRGILSWAEEESLQHLSGKYCPLVAXPRSTFAPAFISDGRTLASTHGDHTVEDF

SEQ ID NO: 73538 - protein, 264 aa, Gossypium hirsutum
  Clone ID: GOSHI-09MAY01-C16655_1.pep
MGKRDKKRRHQQRSSHRGAASYYSVQHDDDYEDESSSFQQPSQDFEEEQQEEEPEQEEEEDDPNPSPEMPSKFILYQQSVQSPEGDISYLQKFFLMYVGGRLPLHLQEDFCGTALLSTEWLRSDPRRTAFGLDLDLEALQWCLENNINKVGADGYSRISLFHGNVLNPHEAKLVSFKPQELIRNIQLEESDYNSQMTATEPNINEGSITLSNEESVKADSKISARDIICAFNYSCCCLHKRAELVLYFKHILEALSKKGGIFVM

SEQ ID NO: 73539 - protein, 208 aa, Gossypium hirsutum
  unsure (1)..(208): unsure at all Xaa locations
  Clone ID: GOSHI-09MAY01-C16645_1.pep
FCVGRRSRSKSRSPIIYRRKSRSKSRSPISYRRRRRSRSYSPLPRFQRDRRSRSPVRSHHRSRNFCASHIEIGMTRQEWRPDSQRSRDRHASRSRRNRSMSPRTRKXTPVDSDSPKHSRESSPKLRKSSRPGSTSPRHHRRNRASPKNDDEKKLKYRKRSRSMSVDLDNKKNETPDGKTKHRMKKAIEVIIFRRETSKKKQVFFCKFI

SEQ ID NO: 73540 - protein, 393 aa, Gossypium hirsutum
  unsure (1)..(393): unsure at all Xaa locations
  Clone ID: GOSHI-09MAY01-C16675_2.pep
CPNFGLSPSADWSAGVAAITYLRSLLQQGPKGIQEVVQNFXKVMKLFFQHLDDPHHKVAQAALSTLADIIPSCRKPFESYMERILPHVFSRLIDPKELVRQPCSTTLEIVSKTYSIDSLLPALLRSLDEQRSPKAKLAVIEFAISSFNKHAVNPEGSGNIGILKLWLAKLTPLAHDKNTKLKDAAITCIISVYTHFDPTAVLNFILSLSVEEQNSLRRALKRGTPRIEVDLINFLQNKKERQRSKSSYDPYDVVGTSSEERYIGVPKKSAFLGRYSSGSIDSEGGRKWGTTQESTLITGSIGQATSDETRENLYQNFETSPNADVLLSKTNESSYMVYSMGQNLGSRNLESNFNLEGVSTPQLEINGLSRSDSLGAIGGVAHNYETSSGLDLN

SEQ ID NO: 73541 - protein, 278 aa, Gossypium hirsutum
  Clone ID: GOSHI-09MAY01-C16675_1.pep
RTRGRTRGRTRGRTRGRTRGRTHGWGPPLRSTLITGSIGQATSDETRENLYQNFETSPNADVLPSKTNESSYLVHSMGQNLGSRNWESNFNLEGVSTPQLEINGLSRSDSLGAIGGVAHNYETSSGLDLNHLKPAAVKINSMPDAGPSIPQILHMICNGNDESPTASKRSALEQLTEISAANDPSIWSKYFNQILTAILEVLDDSDSSITELALSLIVEMLKNQKDAMEDSVEIVIEKLLHVTKDIVSKVSNETVHCLNTVLSQYDPFRCLSVIRHLL

SEQ ID NO: 73542 - protein, 112 aa, Gossypium hirsutum
  unsure (1)..(112): unsure at all Xaa locations
  Clone ID: LIB3149-015-Q1-K1-E2.pep
REGRXNGVPXPGINXXDHXXSIGPGXTSDVNSGETYIXNFETSPNADVLPSKTNESSYMVYSMGQNLGSRNLESNFNLEGVSTPQLEINGLSRSDSLGAIGGVAHNYETHQV

SEQ ID NO: 73543 - protein, 110 aa, Gossypium hirsutum
  Clone ID: GOSHI-09MAY01-C16195_2.pep
PRVRPRVRPRARINTMAVSEGGVMATGGDNGSLWFWDWRSGHNFQQAQTIVQPGSLDSEAGIYALSYDVTGTRLISCEADKTIKMWKEDETATEQTHPLNFKPPKDIRRF

SEQ ID NO: 73544 - protein, 485 aa, Gossypium hirsutum
  Clone ID: GOSHI-09MAY01-C16195_1.pep
MAAPTLEMEPVERQSLKKLSLKSLKRALDLFSPIHGQFSAPDPESKKIRMSHKINVEYCGIKTASGQTSRQSNSGAADTGNQGSVPSNALALAGPADSRDSQKGGAQNALVVGPSLQPKGQNGTSGKSSAITSASAPFSERLTTSAIIERIPSKWPRPVWHRPWKNYRVISGHLGWVRSVALDPSNNWFCTGSADRTIKIWDVASGRLKLTLTGHIEQIRGLAVSSKHTYMFSAGDDKQVKCWDLEQNKVIRSYHGHLSGVYCLALHPTIDILLTGGRDSVCRVWDIRTKMQIFALSGHDNTVCSVFTRPTDPQIVTGSHDTTIKFWDLRYGKTMSTLTHHKKSVRAMAPHPKEHSFASASADNIKKFSLPKGEFLHNMLSQQKTIINTMAVNEDGVMATGGDNGSLWFWDWRKLGHNFQQAQTIVQPGSLDSEAGIYALSYDVTGTRLVSCEADKTIKMWKEDETATEQTHPLNFKPPKDIRRF

SEQ ID NO: 73545 - protein, 181 aa, Gossypium hirsutum
  Clone ID: LIB3825-009-Q1-K6-A11.pep
MYQKIRLSHKINVEYNGIKTAPGQPLKQVNSSVADDKCRGSAPSNALALTDSCDSQKEGTQNALLVGPSLQPKTQNNVGTSGKGTAMVSASAPFSERLTTSAIIERIPSKWPRPVWHRPWKNYRVISGHLGWVRSVAFDPSNNWFCTGSADRTIKIWDVASGRLKLTLTGHIEQIRGLAVS

SEQ ID NO: 73546 - protein, 86 aa, Gossypium hirsutum
  Clone ID: GOSHI-09MAY01-C16165_1.pep
MDGNDSVDSKQDTTDMALFVQNLLQQMQSRFQTMSDSIITKIDEMGSRIDELEQSINDLKAEMGAENSPPPVPPAVKDDSKSPNES

SEQ ID NO: 73547 - protein, 165 aa, Gossypium hirsutum
  Clone ID: GOSHI-09MAY01-C16085_1.pep
MEMSNDLDRLLFFEQARKISEATYASNPLDADNLTRWAGALLELSQFQSVPDSQKMIQDAISKLEEALSINPRKHDALWCLGNAQTSFAFLTNKEDEARPYFEKAAQYFQQAVDEDPSNDIYLKSLEISAKAPKLHQEIIKHGSGSQTLGAGPSTSTSSNSTKTA

SEQ ID NO: 73548 - protein, 105 aa, Gossypium hirsutum
  Clone ID: uC-gsflmaxxa119h05b1.pep
MEMSNDLDRLLFFEQARKISEATYASNPLDADNLTRWAGALLELYHLLICPFSYIPFHVFISFFSLVFYLLYFIIFLFSSILLSSLFLYLFSFFLSFLLLSFLYF

SEQ ID NO: 73549 - protein, 96 aa, Gossypium hirsutum
  Clone ID: GOSHI-09MAY01-C16075_1.pep
MSVAELKEKHAAATETVNNLRERLKQRRQQLLDTDVATYARSQGKSPVTFGPTDLVCCRTLQGHTGKVYSLDWTPERNRIVSASQDGRLIVWNALT

SEQ ID NO: 73550 - protein, 57 aa, Gossypium hirsutum
  Clone ID: LIB3272-041-P1-K1-F2.pep
AATVDNLTERLKQRLERVLDTDVATYARSQGKSPVTFGPTDLVCCRTLQGHTGKVYF

SEQ ID NO: 73551 - protein, 143 aa, Gossypium hirsutum
  Clone ID: GOSHI-09MAY01-C16035_1.pep
MDRYQRVEKPKAETPIDENEIRITSQGRMRSYITYAMTLLQEKGSSQVVFKAMGRAINKTVTIVELIKRRIVGLHQITSIGSMDITDMWEPLEEGLLPLETTRHVSMITITLSKIELNTSSVGYQPPLPADQVKASTEVDHER

SEQ ID NO: 73552 - protein, 88 aa, Gossypium hirsutum
  Clone ID: LIB3493-011-P1-M1-G9.pep
MDRYQRVEKPKAETPIDENEIRITSQGRMRSYITYAMTLLQEKGSSQVVFKAMGRAINKTVTIVELIKRRIVGLHQITSIGSMDITDM

SEQ ID NO: 73553 - protein, 82 aa, Gossypium hirsutum
  Clone ID: GOSHI-09MAY01-C16375_1.pep
SFFSDDPILDLTDPHFSFARILSVHNKKIKMESDLGKLFIGGISWDTDEERLKEYFGKYGEVVEAMIMRDRVTWRARGFGFV

SEQ ID NO: 73554 - protein, 126 aa, Gossypium hirsutum
  Clone ID: LIB3197-024-Q1-M1-F12.pep
TIRPPLLFPLSSFLISDLGKLFIGGISWDTDEERLKEYFGKYGEVVEAMIMRDRVTGRARGFGFVVFADSAVAERVIMDKHMIDGRKVEAKKAVPRDDQIVLNRNVVGVTGSTGFGRTKKIFVGGL

SEQ ID NO: 73555 - protein, 330 aa, Gossypium hirsutum
  unsure (1)..(330): unsure at all Xaa locations
  Clone ID: GOSHI-09MAY01-C16255_1.pep
WDAVRCTDVNEIAETIKDRGMNNMLVXQRIKDFLTRRVGDHGSIDLEWLRDVPPDKAKEYLLSFRGLGLKSVECVRLLTLHHLAFPGDTNVGRIAVRLGWVPLQPLPESLQLHLLELYPVLESIQKYLWPRLCKLDQRTLYELHYQVITFGKVFCTKGKPNCNACPMRGECRHFASAFASARLALPGPEEKSIVSATENGTSDRNPAVIIDQLALPLPQPNELSDRNYQSEANQQLQAASTVNKCDPIIEEPASPEPECTQVAENDIEDMFSEDPDEIPTIKLNMEEFTQTLQNYMQNNIELQEGDMSKXLVALTAGAASIPTPRLKNVN

SEQ ID NO: 73556 - protein, 211 aa, Gossypium hirsutum
  Clone ID: GOSHI-09MAY01-C16215_1.pep
MIQKNPPFFLSLVDSSSKMLTDTDKEFLSLTATVTAGYQLFFFLIAAVFQFDKLTDFAGSTNFVIIALLTLVKKGSWHLRQVVLTAMIVIWSTRLALYLFFRILRWGEDKRYDRMRHNVGNLAVFFIFQGLWVWTVTLPVTVVNASDKDPSIQAEDIIGWIMWFVGTIVEILADHDKFSFKNSPQSKGQWCEIVLWKYSCHPNYCGDILLT

SEQ ID NO: 73557 - protein, 129 aa, Gossypium hirsutum
  Clone ID: GOSHI-09MAY01-C17955_1.pep
MGNTSSMLTQYDIEEVQQHCNNAFSQQEIVSLYERFCQLDRNGGGFVSGEEFLSVPEFAVNPLSQRLLTMLDGLNFKEFVAFLYAFSPRATVQQKIEFIVKVFDSDGNGKVTFNDMLDVLTDLTGPFIS

SEQ ID NO: 73558 - protein, 214 aa, Gossypium hirsutum
  unsure (1)..(214): unsure at all Xaa locations
  Clone ID: GOSHI-09MAY01-C17865_1.pep
PSLRDGPGVQIAAQTFSFRELAAATKNFRPESFLGEGGFGRVYKGRLESTGQVXAVKQLDRNGLQGNREFLVEVLMLSLLHHRNLVNLIGYCADGDQRLLVYEFMPLGSLEDHLHDLPPGKEPLDWNTRMKIAAGAAKGLEYLHDKANPPVIYRDFKSSNILLEEGFHPKLSDFGLAKLGPVGDKSRVSTQVMGTYGYCAXEYAMTGPLTVKSD

SEQ ID NO: 73559 - protein, 121 aa, Gossypium hirsutum
  Clone ID: GOSHI-09MAY01-C17595_1.pep
MNGAVLVALAAPIGNMLQGWDNATIARAVLYIKNAFKLLSAPTIEGLIVAMSLIGATCITTCSGGISDWLGRRPMLIISSVLYFLSGLVMVWSPNVYILLLARLLDGFGIGLAVTLVPVYI

SEQ ID NO: 73560 - protein, 84 aa, Gossypium hirsutum
  Clone ID: LIB3196-028-P1-M1-B7.pep
KKSGAVLVAVAATIGNLLQGWDNATIAGAVLYIKREFSLESEPTIEGLIVAMSLIGATCITTCSGGISDWLGRRPMLIISAGLY

SEQ ID NO: 73561 - protein, 261 aa, Gossypium hirsutum
  unsure (1)..(261): unsure at all Xaa locations
  Clone ID: GOSHI-09MAY01-C17545_1.pep
FRFHQILYERILSAKTNSTGVELKRKNSKESCSSDFYARFMSALYSLLDGSSDNMKFEDECRAIIGNQSYVLFTLDKLIYKLVKQLQACATDEMDNKLLQLFETMDSVYYENARVLLHEENIYRLKCSSSPSRLSIQLMDNVIEKPEAFAVSMEPNFSAFLHNDFLSVFPGKKEPHGVTLKRNKKXYANLDEFAAICMAMEGVELVNGLENKIACNSYKISYVLDTEDFFCRRRRNSPPKCGSYNTQARLQRFHKFLSASQ

SEQ ID NO: 73562 - protein, 98 aa, Gossypium hirsutum
  Clone ID: GOSHI-09MAY01-C17455_1.pep
MEKKKVTVPLVCHGHSRPVVDLFYSPITPDGFFLISASKDSSPMLRNGETGDWIGTFEGHKGAIWSSCLDTKALRAASASADFSAKLWDALTGDELHS

SEQ ID NO: 73563 - protein, 65 aa, Gossypium hirsutum
  Clone ID: LIB3825-026-Q6-K6-F12.pep
CVGNSDSRPMLRNGETGDWIGTFEGHKGAIWSSCLDTKALRAASASADFSAYVILFSYEITFLGE

SEQ ID NO: 73564 - protein, 156 aa, Gossypium hirsutum
  Clone ID: LIB3197-043-Q1-M1-F9.pep
GGDAEILKLQIALEDEVHQKKKLEEEIIILRSQMLQLTFEADQMRRCLARGGSGNAYPGLDSPMSQVRDSLSGHKTPVSALFDQVGVQKILDLLESEDANVRIHAVKVVANLAAEEANQERIVEAGGLTSLLMLLRSYEDETVRRVATGAIANLAM

SEQ ID NO: 73565 - protein, 99 aa, Gossypium hirsutum
  Clone ID: LIB3145-019-Q1-K1-A7.pep
GALSIYRAEANQERIVEAGGLTSLLMLLRSYEDETARRVAAGAIANLAMNEANQELIMVQGGISLLSTTASDAEDPQTLRMVAGAIANLCRNDKLQATL

SEQ ID NO: 73566 - protein, 77 aa, Gossypium hirsutum
  Clone ID: GOSHI-09MAY01-C17425_1.pep
LNSLDAIIIFAFACQNIKSVQMIAVPKISIFICYLFRFISPSTSSARILWPSFFWSSFIAFQRLSHQRQDVGMKNRF

SEQ ID NO: 73567 - protein, 233 aa, Gossypium hirsutum
  Clone ID: GOSHI-09MAY01-C17785_2.pep
NGKTVPPLGEELLDLATNFLINPGPSQPNVSGLILAGSADFKTELSQSDMFDQRLQAKILNVVDVSYGGENGFNQAIELSSEILANVKFIQEKRLIGKYFEEISQDTGKYVFGVDDTLKALEMGAVETLIVWENLDINRYQLKNSTTGEITIKHLNKEQEANESNFRDPVSSADLEVVEKMPLLEWLANEYRQFGCSLEFVPTIQEVLSLPWFAVWSILDPTYCDIEDFCEKL

SEQ ID NO: 73568 - protein, 364 aa, Gossypium hirsutum
  Clone ID: GOSHI-09MAY01-C17785_1.pep
MADGHESDKNIEIWKIKKLIKALEAARGNGTSMISLIMPPRDQISRVTKMLGDEFGTASNIKSRVNRQSVLGAITSAQQRLKLYSKVPPNGLVLYTGTIVTDDGKEKKVTIDFEPFRPINASLYLCDNKFHTEALNELLESDDKFGFIVMDGNGTLCGTLSGNAREVLHKFSVDLPKKHGRGGQSALRFARLRMEKRHNYVRKTAELATQFFINPSTSQPNVSGLILAGSADFKTELSQSDMFDQRLQAKILNVVDVSYGGENGFNQAIELSSEILANVKFIQEKRLIGKYFEEISQDTGKYVFGVDDTLKALEMGAVETLIVWENLDINRYQLKNSTTGEITIKHLNKEQEANESNFAIITCD

SEQ ID NO: 73569 - protein, 159 aa, Gossypium hirsutum
  Clone ID: LIB3585-009-P1-K1-C9.pep
LSAEILSNVKFIQEKRLIGKYFEEISQDTGKYVFGVDDTLKALEMGAVEILIVWENMDINRYMLKNSVTGEVVIKHLNKEQEANMTNFQDSSNSADLEVHEKMPLLEWFASEYKRFGCSLEFVTNKSQEGSQFCRGFGGIGGILRYQLDMRSFDEFSDD

SEQ ID NO: 73570 - protein, 107 aa, Gossypium hirsutum
  Clone ID: LIB3197-056-Q1-M1-H7.pep
NRYQLKNSTTGEITIKHLNKEQEANESNFRDPVSSADLEVVEKMPLLEWFANEYRQFGCSLEFVTNKSQEGSQFCRGFGGIGGILRYQLDMRSFDEFSDEKMYDDSE

SEQ ID NO: 73571 - protein, 269 aa, Gossypium hirsutum
  unsure (1)..(269): unsure at all Xaa locations
  Clone ID: GOSHI-09MAY01-C17725_1.pep
MVVKSIKEKSSSFFLYFCSKGFKKPASPQQGTKGNAVSSEQKPPGGWKAMPFILGNETFERFATIGLLSNFMVYLMKKFNMDQVSASNVLNIWSGVSNFAPLIGAFISDAYVGRFATIAVASVASFLGMLTITLTAWIPQLQPPQCPAEQQLHGHCISPSKAQLGVLLTGLGLLSIGTGGIRPCSIPFGIDQFDPTTEEGAKGINSFFNWYYTTFTLVILLTLTLVVYIQDSVSWVLGLGIPTLLMAASIVLFLIGTRXYVHVKPQRSI

SEQ ID NO: 73572 - protein, 163 aa, Gossypium hirsutum
  Clone ID: GOSHI-09MAY01-C17655_1.pep
MKNMGDFPTFLVVALLIFSCLSYVRSDASDHRYKDGDAVPLYANKVGPFHNPSETYRYFDLPFCSPDHVTEKREALGEVLNGDRLVSAPYKLNFKEEKDSSVVCKKHLSKDEGAFFRKAVDKDYYFQMYYDDLPIWGFIGKVDKEGKTDPSEYKYFLFKHIQF

SEQ ID NO: 73573 - protein, 183 aa, Gossypium hirsutum
  Clone ID: GOSHI-09MAY01-C17665_2.pep
MMAVGHDTAKRKGKKKKDSPKDLARESRIPPAVLFLQCYICLAEGLTMMLAALRNEIPVFHGPSPFNTEHEKFVQHFELLQRACIPDHVSYLSYKESTTHARFSTLAMYNYFKDAQRIAKEVKSSFSNDPERLAELRKLEQVAEHNSVAQNVICRLGALDPSLKVSFEFSHHPFFATVVVKRS

SEQ ID NO: 73574 - protein, 75 aa, Gossypium hirsutum
  unsure (1)..(75): unsure at all Xaa locations
  Clone ID: LIB3543-036-Q1-K1-A5.pep
WHSSYNLLFFYXCMAVCVCVSKYGVLCFTSCSVLKGLGLWKTGISFLKAASIWKDTEQINREHELTILKQNIDMR

SEQ ID NO: 73575 - protein, 51 aa, Gossypium hirsutum
  Clone ID: GOSHI-09MAY01-C17615_1.pep
SMKNFYWFKQISNNVKSERRLSLGEYKRAVSWSKYLVSSGGEIKGEGEEWS

SEQ ID NO: 73576 - protein, 253 aa, Gossypium hirsutum
  Clone ID: GOSHI-09MAY01-C17005_1.pep
DFLEGGPLFWGDSADKQPCIGTGGMIPWKLQVTGMLFHSGLPHMAINALELGMEALKEIQLRSYKDFPPHPDEQVSGCASPSTMKPTPWDSPRAGINQIPGECTISGDVRLTPFYNVKDVMNKLQEYVDYINENLNKLDTRGPVSKYILHDENLRGSLTLTFDEAMSGVACDLNSRGFHVLCKATEEAVGHVKPYSITGSLPLIRELQDEGFDVQTAGYGLMATYHAKNEYCLLSDMCQGYHVFTGIIAQLED

SEQ ID NO: 73577 - protein, 119 aa, Gossypium hirsutum
  Clone ID: LIB3197-034-Q1-M1-D9.pep
PSNSITCFTPFKLFTGGRLSFHFRTNLLVPILYLSVKDVMSKLQEYVDYINENLNKLYTRSPASKYILHDENLIGSLTLTFDEATFGVACDLNSPGFHVLCKATEEAVGHVKPYSITGS

SEQ ID NO: 73578 - protein, 163 aa, Gossypium hirsutum
  Clone ID: GOSHI-09MAY01-C17375_1.pep
PRVRTHLKVLDLRGCKSLGDESLAAIGSLCELKMLHLDNSDISDVGIAYLQHGIISSLVSLSVRGCKKLTDKCISVLFDGSSKLELQELDLSNLPNLSDNGVLALAKSRLPISELRMRQCPLIGDTSIMALASMQADDDRGHGSNLRLLDLYNCGGITQLSFR

SEQ ID NO: 73579 - protein, 154 aa, Gossypium hirsutum
  Clone ID: GOSHI-09MAY01-C17365_2.pep
MAGRLSNVASRIMGGTGVVSRSVASSFRLRSGMGLPVGKHIVPDKPLPVNDELIWDNGTAFPEPCIDRIADTVGKYEALAWMCGGLSFFASLGFLAWWNDKASKIPFAPNVYPYDNLRVELGGEPHVDPYAQLYASCCHLSPHVFHFTSGTLNS

SEQ ID NO: 73580 - protein, 125 aa, Gossypium hirsutum
  Clone ID: GOSHI-09MAY01-C17365_1.pep
MAGRLSNVASKIMGGNGIVSRSAASSLRLRSGMGLPVGKHIVPDKPLPVNDELIWDNGTAFPEPCIDRIADTVGKYEALAWMCGGLSFFASLGFLAWWNDKASKIPFAPKVYPYDNLRVELGGEP

SEQ ID NO: 73581 - protein, 241 aa, Gossypium hirsutum
  Clone ID: GOSHI-09MAY01-C17315_1.pep
MQSAAYSLSSPCSIPSLKPRKFCSRAGFQPIRVSSSFAAPERHEHSVSLPNRSWRLSSSSSLPLRAWNLVPSDSKPDRFEVRAKAAESAGEGEKSGSLVKISELGLLFGLWYLFNIYFNIYNKQVLKVFHYPVTISAVQFAVGTIIVSLMWTFNLYKRPKVSGEQLVAIVPLALVHILGNLFTNMSLGKVAVSFTHTIKAMEPFFSVVLSAMFLGEVIFFSCLVIFFIIFFIHIFIIIVYL

SEQ ID NO: 73582 - protein, 203 aa, Gossypium hirsutum
  Clone ID: GOSHI-09MAY01-C17305_1.pep
MILMRIQVTRIATLLVLVALILGQKGAEARKGRILESFEYIAMSCRAHSASITDFGGIGDGKTSNTKAFQDGVNHLSQYANDGGAQLYVPAGQWLTGSFSLSSHFTLYLHKDAVLLASQDMSEWPVLKALPSYGRGRDAAGGRFASLIFGTNLTDVVVTGANGTIDGQGAFWWQNFHKGKLKYTRPYLIEFMYSDNIQISNLT

SEQ ID NO: 73583 - protein, 175 aa, Gossypium hirsutum
  Clone ID: LIB3543-066-Q6-K6-B10.pep
YLFPQNQSRVCVTLRGGTLRFRSIFPFVSLSPVLRHQPGLLSFSSKADKPVESEVSAASGGAGVDVSNGGVIGNDWIDKVKDAWHSAEDVLGYTGEKAKEVSNKLKPHVEQLLDTYPYLKDVVAPVGFTLTGTILAWVVLPRLLRRFHNYAIQTSVLPSGSLLGNQVPYEKSFWG

SEQ ID NO: 73584 - protein, 94 aa, Gossypium hirsutum
  Clone ID: LIB3197-041-Q1-M1-B6.pep
IHFLGYVSTIVPLICLSAIMAGITVSRLRSLSNSLYSSLKLSSLPLYRSYTSLTRIADHSYVRASYAHLNSFYDKRETQSASMFMNTPIRGGSI

SEQ ID NO: 73585 - protein, 179 aa, Gossypium hirsutum
  Clone ID: GOSHI-09MAY01-C17245_1.pep
MPISGKEQKCVGNIFSCSFNAREKKLICVTSGNSYLGSFIVKELLAHGYLVRVTIQHPAEFEDVKDLLGVEDLNLLESVVVTKMEDLQSLCDAFRGCHAVFHTSSFIDPHGISGYSEQKVFLETEVARTVMEACAKAAYIKRCVFTSSLLASIWRNENIDGIIDDSCWSSEEFCRENKL

SEQ ID NO: 73586 - protein, 201 aa, Gossypium hirsutum
  unsure (1)..(201): unsure at all Xaa locations
  Clone ID: GOSHI-09MAY01-C17215_1.pep
CGLPGPQGQPGAAGIPGDPGSPGKDGVPGIRGGKGDVGFMGPRGLKGERGVKGACGLDGEKGDKGEAGPPGRPGLAGHKGEMGEPGVPGQSGAPGKEGLIGPKGDRGFDGQPGPKGDQGEKGERGTPGIGGFPGPRGSDGSAGSPGPPGGVGPRGPEGLQGQKGERGPPGERVVGAPGAPGAPGERGEQGXPGPACPRGEK

SEQ ID NO: 73587 - protein, 53 aa, Gossypium hirsutum
  Clone ID: GOSHI-09MAY01-C10955_1.pep
KDLITISIPTKSLSISIPNTTYIDNELIALSEIFLTTLVTKHNDTQIDKWCKY

SEQ ID NO: 73588 - protein, 142 aa, Gossypium hirsutum
  Clone ID: GOSHI-09MAY01-C10945_2.pep
SRISDVFAVDIHPAAKIGKGILLDHATGVVIGETAVVGNNVSILHHVTLGGTGKACGDRHPKIGDGVLIGAGATILGNVKIGEGAKIGAGSVVLIDVPPRTTAGGNPARLVGGKEKPSRHEECPGESMDHTSFISEWSDYII

SEQ ID NO: 73589 - protein, 266 aa, Gossypium hirsutum
  Clone ID: GOSHI-09MAY01-C10945_1.pep
MPAGELRYPSSISCPQISQATETPMEEDEAWVWAQIKAEARRDAELEPALASYLYSTILSHSSLERSLAFHLGNKLCSSTLLSTLLYDLFLNTFSSDPSLRAAAVADLRAARVRDPACVSFSHCLLNYKGFLACQAHRVAHKLWTQSRRPLALALHSRISDVFAVDIHPAAKIGKGILLDHATGVVIGETAVVGNNVSILHHVTLGGTGKACGDRHPKIGDGVLIGAGATILGNVKIGEGAKIGAGSVVLIDVPPRTTDSRWKSLH

SEQ ID NO: 73590 - protein, 63 aa, Gossypium hirsutum
  Clone ID: LIB3272-056-P1-N1-D3.pep
NILTLKGKKFFAEQSREPDKMGAQAHIISLEEIIELPFLQHCPLVLSSVYLKPRSKNTNLFQA

SEQ ID NO: 73591 - protein, 79 aa, Gossypium hirsutum
  Clone ID: LIB3166-031-P1-K1-H11.pep
YRRCCSLVHLLEASSIQNPDQRTQTCSKHKTFNRSLQLVIEGVVLGGRCEIPFSEKKTFFAQTTCIRNLVAMPRGEFKS

SEQ ID NO: 73592 - protein, 109 aa, Gossypium hirsutum
  Clone ID: GOSHI-09MAY01-C10925_3.pep
MSVIDILTRVDVICKRYDKYDVEKQRDQNVSGGDAFARAYAAVEADIESALEKVELASKEKSKASAVAVNAEIRRTKARLLEEVPTLQKLAVKKVKGISTEEMATRNDL

SEQ ID NO: 73593 - protein, 266 aa, Gossypium hirsutum
  Clone ID: GOSHI-09MAY01-C10925_1.pep
MTVIDILTRVDVICKKYDKYDVEKQRDQNISGDDAFARQYAAIEADIESALQKAELVSKEKSKASAVAVNAEIRRTKARLLEEVPKLQRLAVKKVKGISTEEMTARSDLVLALPDRIQAIPDGTAAPKTGGGMSSAPSASRTEIKFDSDGRFDNEYFQESEQSSQFRQEYEMRRIKQDQGLDMISEGLDTLKNMAHDMNEELDRQVPLMDEIETKVDKAAGDLKNTNVRLKHTVTQLRSSRNFCIDIVLLCIVLGIAAYLYNVLKK

SEQ ID NO: 73594 - protein, 93 aa, Gossypium hirsutum
  Clone ID: uC-gsflnu33B088b02b1.pep
MTVIDILTRVDVICKKYDKYDVEKQRDQNISGDDAFARQYAAIEADIVSALQKAELVSKERSKASAVAVNAGIRRTKARMLVEVRKMLRFECL

SEQ ID NO: 73595 - protein, 65 aa, Gossypium hirsutum
  Clone ID: LIB3166-032-P1-K1-B2.pep
YVQELDRQVPLMDEIETKVDKAAGDLKNTNVRLKHTVTQLRSSRNFCIDIVLLCIVLGIAAYLYN

SEQ ID NO: 73596 - protein, 74 aa, Gossypium hirsutum
  Clone ID: LIB3048-027-Q1-L1-H2.pep
MTVIDILTRVDVICKKYDKYDVEKQRDQNISGDDAFARQYAAIEADIESALQKAELVSKEKSKASAVAVNAEIR

SEQ ID NO: 73597 - protein, 111 aa, Gossypium hirsutum
  Clone ID: LIB3582-007-P1-K1-G1.pep
PPNPINLAQTLTQNQIGPNGPTPENPNQKQKTSRVSRRSRRRRLCPRTNRAFEPLPSRAPLSPHVLCHGSLRTRTLRPILALSVGIGVGAEIGDVRTLPERRTALREFFPD

SEQ ID NO: 73598 - protein, 89 aa, Gossypium hirsutum
  Clone ID: LIB3272-053-P1-K1-H7.pep
KPKTKSAQMAQHQKTQIRNGKLLGFPEDLGTAGSTLARTAPSSRSPHVSLCTLCICHAPAHLCTRTFVVKPNPRPLRRNQRSGVGSGGL

SEQ ID NO: 73599 - protein, 109 aa, Gossypium hirsutum
  Clone ID: LIB3166-031-P1-K1-G2.pep
TQNQIGPNGPTPHNPNQKQKTSRVSRRSRRRRLCPRTNRAFEPLPSRAPLSPHVLCHGSLRTRTCKGQANERKSRESKEKAEIPEKKIAANIGDFFHFFYFRTRGRTRG

SEQ ID NO: 73600 - protein, 69 aa, Gossypium hirsutum
  Clone ID: GOSHI-09MAY01-C10885_2.pep
TPFEPTTSSPPSDCRGRAIKSLEDPTIDSLTVEPFERCINSSEDSFMRFEAGSSSSTPPMKCAPQPIYY

SEQ ID NO: 73601 - protein, 171 aa, Gossypium hirsutum
  Clone ID: GOSHI-09MAY01-C10885_1.pep
MGGVEDDEPASKRMKLSSEELRRLSNGSTIKEPVAGSSRDLMARPLQSEGGEEVVGSKGVINKVEFVRIIAKALYSLGYIKSGAHLEEESGIPLHSSVVNVFMRQILEGNWDDSVVTLRNIGLTDERTVKSASFLILEQKFFELLDEEKLMDALNTLRTEIAPLGVNDSRV

SEQ ID NO: 73602 - protein, 187 aa, Gossypium hirsutum
  Clone ID: GOSHI-09MAY01-C10845_1.pep
MVSLEDSHSNSNRFPLGRNFYTPSSASTTKIHRHVGRSMRTIRSNLYQNDNSSCSFTSSVPERSAFVSENLTESVIDMRLGELAAKSNAKSVTSESENEAFLEISQAFSDFSACSSDISGELQRLASLPSPENSLMNERNNGVQSEPEPEPCHGFLQRENFSTEIIESISPEDLQPTVKICIDGLES

SEQ ID NO: 73603 - protein, 152 aa, Gossypium hirsutum
  Clone ID: GOSHI-09MAY01-C10875_1.pep
VLLADLSVTLLTLLQFYWISLGIFLAVLLILPLSLLSPFPAGLNALFSKEPRRASLARIYSLWNATSLSNIAVAFICGIIHYGFSSFLPPDKGNTWNTRSEDNKWWLLPTILLIFKSIQARFVDWHIANLEVQDFSLFCPDPDAFWAHEPTA

SEQ ID NO: 73604 - protein, 123 aa, Gossypium hirsutum
  Clone ID: GOSHI-09MAY01-C10555_1.pep
EIKGGFLLNNVRRRRFSMTEVYRRMLSDEDEDTPAKCRQRRRRRIEMRRHAAVSASGALRSLGPTEDPAESSDCGREGKRLHVLEAGDLVVTNSTHSSSGEEESMAREARAELNNGRFTELCR

SEQ ID NO: 73605 - protein, 162 aa, Gossypium hirsutum
  Clone ID: GOSHI-09MAY01-C10545_1.pep
HASADVNSWVEMPAGMGDGWPARQAGTKLSVTVDGELYALDPSNSPESVRIKVYDYQDDAWKVVVGEVPIPDFTDSDFPYLLSGVRGKLHVITKDANNNISVLQADVQNHFTSLSSASLDSSPGAHPESAEPATAFETDLWRVIATRTTGSSELVSCQALNI

SEQ ID NO: 73606 - protein, 190 aa, Gossypium hirsutum
  Clone ID: GOSHI-09MAY01-C10515_1.pep
DIWHEYRKKRKEFDVARERVDTYIRSSLRAAFVQIMEKLKSSKRSSNKNQQNQLPFLSILAQGVSTLAFSEKAIFSPILKRWHPLSAGVAVATLHSCYGNELKQFVSGIGDLTPDILQVLRAADKLEKDLVQIAVENSVDSEDGGKSIIREMPPYEAESVVSNLVKSWIMTRLDRLKEWVDRNPQQEVWD

SEQ ID NO: 73607 - protein, 262 aa, Gossypium hirsutum
  Clone ID: GOSHI-09MAY01-C10525_4.pep
MCGGAIISDCGAPKHDPKLTGDDLWSELDIFSDLLGFDNNGKSFVNHQFHNNNNNKLINPKDNQLNKERSETIQKTSRVTKKVEKTQRTRKNFYRGIRQRPWGKWAAEIRDPQKGVRVWLGTHNTAEEAARAYDEAAKRIRGDKAKLNFPQTPTKNQAASPALTLLPPAKKRCIVPELTQPSFQTDSPPYPMGLGYGRSEDYKPIEVVESELELKEQIWSLESFLGLETNHETMTQLSGNGGTDSLELWTLDDLVTQYKQRR

SEQ ID NO: 73608 - protein, 164 aa, Gossypium hirsutum
  Clone ID: GOSHI-09MAY01-C10525_3.pep
MCGGAIISDFIAVKRGRKLTAEDLWSELDTFSDLLGLDYGNGKDPFTQFDNTKAGSKAKNLEKVTNESTQKTSRGREKEGKTQRTRKNIYRGIRRRPWGKWAAEIRDPHKGVRIWLGTYNTAEEAARAYDEAAKRIRGDKAKLNFPQTPRLTQPPAKKRCMMAP

SEQ ID NO: 73609 - protein, 70 aa, Gossypium hirsutum
  Clone ID: GOSHI-09MAY01-C10525_2.pep
SFILIYIYIMHDSINKKTLSNTKTLINANYYLIFAPTNEHVSAVAYTELRGHQVSKAPVSQSHRYHSAEA

SEQ ID NO: 73610 - protein, 216 aa, Gossypium hirsutum
  Clone ID: GOSHI-09MAY01-C10525_1.pep
PTRPSSFTQFDNTKAGSKAKNLEKVANETTQKTSRGREKEGKTQRTRKNIYRGIRQRPWGKWAAEIRDPHKGVRVWLGTYNTAEEAARAYDEAAKRIRGDKAKLNFPQTPRLTQPPAKKRCMMAPELTPPSSETKSPPTPQPFMGFGYENGVYRPSEAMESEMELKEQISSLESFLGLEPDEMTTELSGSAEPESVNLWMLDHLVTHHQQQPQLFY

SEQ ID NO: 73611 - protein, 106 aa, Gossypium hirsutum
  Clone ID: uC-gsronu33B111f02b1.pep
IVNEFELSQKPIVYLDEVLSMISLLTLSVMCETVNMSMLRTPLFFILAGPGPCCLDSSVKVFPSSLSLFNIFSDTACLMNRLDSLFVKMIVFWIDQHPVVAMKHDD

SEQ ID NO: 73612 - protein, 109 aa, Gossypium hirsutum
  Clone ID: LIB3166-040-P1-K1-C5.pep
RSIETLFKTQYKMCGGAIISDFIAVKRGRKLTAEDLWSELDTFSDLLGLDYGNGKESSFTQFDNTKAGSKAKNLEKGMIYASGFSSKFGCFFLFSFCRKPCFSICFLHV

SEQ ID NO: 73613 - protein, 224 aa, Gossypium hirsutum
  unsure (1)..(224): unsure at all Xaa locations
  Clone ID: GOSHI-09MAY01-C10445_1.pep
HTASDFLTPWILIQDYDMVDSGSVSESGTDRPVNFSDEYVMLASSYPKSXAGRKKFRETRHPVYRGVRRRNPGKWVSEVREPNKKSRIWLGTFPTADMAARAHDVAAIALRGKSACLNFADSAWNLPVPASSHPKDIQKTAAEVAETFRTAEXSCGNSRNDSRRRENXQMEKGFYLDEKALFGTQKFWANMAAGIIMSPPRSGHDGGWEEHEVDDYVPLWSYSI

SEQ ID NO: 73614 - protein, 107 aa, Gossypium hirsutum
  Clone ID: LIB3166-055-P1-K1-A5.pep
GILTDRQTFITAECSCGNSRNDSKRSENTEMEKGFYLDEEALFGTQRFWANMAAGMMMSPPRSGHDGGWEEHEVDDYVPFWSLFYLKVIFSDIFKHFIGIFSSYKSP

SEQ ID NO: 73615 - protein, 108 aa, Gossypium hirsutum
  unsure (1)..(108): unsure at all Xaa locations
  Clone ID: LIB3166-026-P1-K1-A9.pep
KKGAGHASGHSNSHTTVHSFKPKKQAGGEKFRETRHPQYRGVRRRNTREVVLXVREPNNNSRIWLGTFPTADMAARAHHMAAIALRGKSACLNLADSDWNHSVPACFD

SEQ ID NO: 73616 - protein, 189 aa, Gossypium hirsutum
  unsure (1)..(189): unsure at all Xaa locations
  Clone ID: GOSHI-09MAY01-C10465_1.pep
EGSRSLSQLIQKFKDSSTLGXLEYDSLLPWALDVAKQQGIYGASFFTNSAAVCSIFSRIHHGRLALPLTPESKPLMLPGLPPLNFRVLPTFLRFPDSCPAYLAMKLSQYSNLNEADRVFDNSFEDLEGKEAKGVSELWQAKLIGPMVPSAYLDERIKGDRGYGSSLWKPLSEECMEWLETKPSQSRVYI

SEQ ID NO: 73617 - protein, 196 aa, Gossypium hirsutum
  Clone ID: GOSHI-09MAY01-C10415_1.pep
TPVGNSLRDAKLSFKDIDEVILVGGSTRIPAVQELVRKMTGKEPNVTVNPDEVVALGAAVQAGVLSGDVSDIVLLDVSPLSLGLETLGGVMTKIIPRNTTLPTSKSEVFSTAADGQTSVEINVLQGEREFVRDNKSLGSFRLDGIPPAPRGVPQIEVKFDIDANGILSVTAVDKGTGKKQDITITGASTLPNDEVD

SEQ ID NO: 73618 - protein, 64 aa, Gossypium hirsutum
  unsure (1)..(64): unsure at all Xaa locations
  Clone ID: LIB3135-009-Q1-K1-C3.pep
RPEYFCIFNNRAKNMYVKFYIKXRTFTHSNEFFSKIFLGKTAVCNLKNRDQFINQPRTPKTPKI

SEQ ID NO: 73619 - protein, 55 aa, Gossypium hirsutum
  unsure (1)..(55): unsure at all Xaa locations
  Clone ID: LIB3166-025-P1-K1-F1.pep
LKLAFSLFDXMKRFRVQRGLLTYNKLLRARSKYGSLHEVQQCLAVYQEMRKAGYF

SEQ ID NO: 73620 - protein, 129 aa, Gossypium hirsutum
  unsure (1)..(129): unsure at all Xaa locations
  Clone ID: LIB3146-025-Q1-K2-C2.pep
PRVRPRVRLKVLKCDKSVIPSIYDFRSVYFFHAYLTLDEAENLSELEEVEEVGFPMSEVPRKAKRTRSRTSNGLLKAKKQKTSMGSILSQRRQNKEKWRYNEDFEPEPESDIKGLEEDDXSEDDLLDDY

SEQ ID NO: 73621 - protein, 120 aa, Gossypium hirsutum
  Clone ID: LIB3166-030-P1-K1-C4.pep
FRTLGGFNPNLPWDEAENLSELKEVEVIDFPSMSEVARKAKRTRSRTSNGLLKAKKQKTSMGSIISQRRQNKEKLRYNEGMPHLNFNYLDVLCISHSTRGVIRFIANVLESLQIFGHFCM

SEQ ID NO: 73622 - protein, 80 aa, Gossypium hirsutum
  Clone ID: GOSHI-09MAY01-C10705_1.pep
VTNVNILRRISSHILHNCRIRMAFHTPGMVVAPMLAKSLMDIYIESSSARVPSPLCRPISFCRGLMSSVCRLLMLSFCRG

SEQ ID NO: 73623 - protein, 76 aa, Gossypium hirsutum
  Clone ID: LIB3145-057-Q1-K1-C5.pep
IYACISLLLIGIYDMVNAFLSFGCCTTSQKERKFIMFISKVHNNNANKPYTAWRFEARTIDGITISLFEHRMETIN

SEQ ID NO: 73624 - protein, 209 aa, Gossypium hirsutum
  unsure (1)..(209): unsure at all Xaa locations
  Clone ID: GOSHI-09MAY01-C10615_1.pep
MRPLFSVPFLTFLFFHFYSVPTLSSYVYDTSATTTNVINSTDFIRTSCYATLYPDICYTSLYGYANAIQQDPARLARAAISVSLSKARNMAVYVSNLSREADYGADPRASAALHDCFSNMGDAVDEIRGSLKQMQRVVAPGSESFRFQMGNVQTWMSAALTDEETCTDGFEDVAGGPMKTEVCKRAAKVKXFTSNALALVNSYAEKGTV

SEQ ID NO: 73625 - protein, 204 aa, Gossypium hirsutum
  Clone ID: GOSHI-09MAY01-C10605_1.pep
MDDNGEKEENIPRGIEWEVVSLTASAYAAAPGPKEVETKDDNKGDPYEVGEAETSHALFMSGHFVFPPSEHENLPLEPENSSERVGKDVVHELGVVEEGGRSRTKEEEEDWSLRGLNVHEEFSGMQFFDKKHGTEFDEGTTLQGLDLIDKGQSLYSAATFGSFHGEEALGGTTTFGEDATVSELIETSEQGLGFPSKYSLTPKA

SEQ ID NO: 73626 - protein, 152 aa, Gossypium hirsutum
  Clone ID: AI054595.1.pep
MDDNGEKEENIPRGIEWEVVSLTASAYAAAPGPKEVETKDDNKGDPYEVGEAETSHALFMSGHFVFPPSEHENLPLEPENSSERVGKDVVHELGVVEEGGRSRTKEEDDDWSLRGLNVHEDFQVCNFLIKNMVQKLMNEQHCKTVFDDKGQI

SEQ ID NO: 73627 - protein, 265 aa, Gossypium hirsutum
  Clone ID: GOSHI-09MAY01-C10635_1.pep
FTRPYPHVKDIWVTYLSKFVKRYGKSKLERARELFEHAVETAPADLVKPLYLQYAKLEEDYGLAKRAMKVYDQATKAVSNHEKLGMYEIYIARAAEIFGVPKTREIYEQAIQSGLPDKDVKTMCWKYAELEKSLGEIDRARAIYVFASQFADPRSDADFWDKWREFEVQHGNEDTFREMLRIKRSVSASYSQTHFILPEYLMQKDQNIDEAKDKMKQAGISEDEMAALERQLLPAADNAIAKDNSRKVGFVSAAVESQADGGLKT

SEQ ID NO: 73628 - protein, 417 aa, Gossypium hirsutum
  unsure (1)..(417): unsure at all Xaa locations
  Clone ID: GOSHI-09MAY01-C10175_1.pep
VSKSIKXDEGERTRFRSDVLSFQQMSEQFNQEIXFDWKNPSGHFNSMFEFSGCWQKDAGWXKTLAFDGVFITLYSVALEKSQIVLRDHVKKAVPSTWEPAALARFIDTYGTHIIVGVKMGGKDVIYIKQQHSSTLQPADIQKRLKDMADKRFLDASGHYNLAPEQVFQSDKFEIREQRLRFASNSPSSSYAQKEDIISIYKRRGGSDNRNLSHNDWLQTVQSEPDVISMSFIPITSLLNGVPGSGFLSHAINLYLRYKPPVEELHQFLEFQLPRQWAPVFSELPLGPQRKRPRAPSRRFSFMGPKLWGNTTPVDVGKRPVTGLRLYLEGKRSNRLAIHLQHLSSLPKIFQLVDDPKGNFCQESHDRKYYERVYWKNYSHVCTAPIESQEELSIVTGAQLQVENHGFKNILFLRLCFS

SEQ ID NO: 73629 - protein, 134 aa, Gossypium hirsutum
  Clone ID: GOSHI-09MAY01-C10135_1.pep
KKKMGIWDLISWSTDSVKGFWQSSCDHGSTVITKGKEVSVDALQKVNHHGSAAISKGKEVLCTALEKVNHHLSDPETRSKISKVATDIAKNATVEGLKTIPGAYPTYKIVSKSISDDDQKFKSENKSKKQEEAL

SEQ ID NO: 73630 - protein, 176 aa, Gossypium hirsutum
  Clone ID: GOSHI-09MAY01-C10055_1.pep
MAPRSKPSPISPNPDPNSKEIRYRGVRKRPWGRYAAEIRDPRKKTRVWLGTFDTAEEAARAYDAKAREFRGAKAKTNFADNNANDFTRSPSQSSTVESSSPPPLDLTLASPCSSLPVTAQRPVYFFDAFATGGSGCPASGFAQSDSDSSSSVVDFEGGVRRRVFDLDLNQLPAEMD

SEQ ID NO: 73631 - protein, 113 aa, Gossypium hirsutum
  Clone ID: LIB3166-052-P1-K1-D10.pep
RKENARAPRSKPSPISPNPDPNSKEIRYRGVRKRPWGRYAAEIRDPRKKTRVWLGTFDTAEEAARAYDAKAREFRGAKAKTNFADNNANDFTRSPSQSSTAASGLLLRCLRYW

SEQ ID NO: 73632 - protein, 123 aa, Gossypium hirsutum
  unsure (1)..(123): unsure at all Xaa locations
  Clone ID: GOSHI-09MAY01-C10045_2.pep
APYLRKVDLLLFKSYQELSGACXGKMFSSFTIGNCGGSQGMKDFMNESKLIDLLNGSEYVPTYEDKDGDWMLVGDVPWEMFVDSCKRLRIMKGSEAIGLAPRAVEKCKEQKLMLASLQNNNLS

SEQ ID NO: 73633 - protein, 142 aa, Gossypium hirsutum
  Clone ID: GOSHI-09MAY01-C10045_1.pep
QKNSSDNKGEKTGCGNTINTAVPAAFVKVSMDGAPYLRKVDLKLYKSYQQLSDALSKMFSSFTIGNCGSHGMKDFMNESKLIDLLNGSEYVPTYEDKDGDWMLVGDVPWEMFVDSCKRLRIMKGSEAIGLAPRAVEKCKNRS

SEQ ID NO: 73634 - protein, 79 aa, Gossypium hirsutum
  Clone ID: LIB3135-024-Q1-K1-D3.pep
AEICGSHGMKDFMNESKLIDLLSGAEYVPTYEDRDGDWMLVGDVPWEMFVDSCKRLRIMKGSEAIGLAPRAVEKCKNRG

SEQ ID NO: 73635 - protein, 133 aa, Gossypium hirsutum
  Clone ID: GOSHI-09MAY01-C10015_1.pep
VRKYRGGPSRPNKEHSAEVVKEKGNQAYKDKQWQKAIGFYTEAIKLSGNNATYYSNRAAAYLELGSFLQAETDCTKAISLDKKNVKAYLRRGTAREMLGYYKEAIEDFSYALVLEPTNKRAALSADRLRKVFQ

SEQ ID NO: 73636 - protein, 308 aa, Gossypium hirsutum
  Clone ID: GOSHI-09MAY01-C10035_1.pep
MDSLGPNRFDIFEIYRQFCELRRGDTYVCGEEGYRQDEESQRAKYSWDRLNHLLKMVESRMHTRTAIFDELHKLMLQLDLTVDFSEFSCFYDFVFFMCRENGQKNITISRAVAAWRLVLAGRFRLLDKWCNFVEEYQRHNISEDTWQQVLAFSRCVHENLEGYDPEGAWPVLIDDFVEHMYRISGSNRDSNAFCCCVDSEPQLCAYEDTLPGLRVFPGMKRKLLECHDDEMESSDSHLSDTPDLNCSLNSKRSRLIAHRLVTPDASDDCMEVAKHSSPVCCSKSPCAIEGCLSKGFAGLLSSYSYFAV

SEQ ID NO: 73637 - protein, 57 aa, Gossypium hirsutum
  Clone ID: LIB3828-029-Q6-K6-B9.pep
KRRYLCLWRRSYRQDEESQTAKYSRDRLNDLLKDGWRQGMHTRDCHLVMNFTSSCYN

SEQ ID NO: 73638 - protein, 100 aa, Gossypium hirsutum
  Clone ID: LIB3493-056-P1-M1-F8.pep
YVCGEEGYRQDEESQRAKYSRDRLNQLLKMVESRMHTRTAIFDELHKLMLQLDLMVDFSEFSCFYDFVFFMCRENGQKNISKLSHASSLNANACTDLSLE

SEQ ID NO: 73639 - protein, 189 aa, Gossypium hirsutum
  Clone ID: GOSHI-09MAY01-C10025_1.pep
FLHTGIIGGVYSNNLKITDVLMDQNLVAKISSYNLPLLAESAGKVDHRTSALPKDSSSRTRASYEDKADVYDFGVILLEMILGRPSKAKSEVEILKNQLQAVVATDDATRRSIADPAVQTSCSDQSLKTMMEICVRCLLKDPAERPSVEDVMWNLQFAAQVQDAWRGDSRSSSPGGSPSQPAILPVAFH

SEQ ID NO: 73640 - protein, 228 aa, Gossypium hirsutum
  Clone ID: GOSHI-09MAY01-C10345_1.pep
MEGIGLEGDGSNGEALGKCLSGLVDDGSTESHRYYLSRRTVLEMLRDRGYAVPNTEIDLSLHEFRAIHGQSPDFDRLKLSVTHKTDSSKRTLVVFYGPGVVKVSGIRLIAGLITSKETLTGLILIVQNHITNQALKALDLFSFKVEIFQITDLLVNITKHVLKPQHRVLTEHEKQRLLQKYSIEEKQLPRLLKKDAIARYYGFEKGQVIKVTYGGEITESHVTYRCVW

SEQ ID NO: 73641 - protein, 111 aa, Gossypium hirsutum
  Clone ID: GOSHI-09MAY01-C10365_1.pep
SIKAMATGAAPTEMMLRCVLDGSLVMREIEVERRPYHRNCSCALHSLKGSVLCSSACSRSRNNIAFPKKKTWNVDCSLSMAATDPQSISSRSSLLGGLSVRKHGFEDINDV

SEQ ID NO: 73642 - protein, 192 aa, Gossypium hirsutum
  Clone ID: GOSHI-09MAY01-C10325_2.pep
IVERLYATSMVTKCKSCDFGEGSNGYQLNNESNPHEGGEEGVEGSPFSPQSDNENDDFDPYGGLFDDEQKRVLEIKERLELPDQSEDTLVDLLQSLADMDITFQALKETDIGRHVNKLRKHSSNDVRRLVKHLVRKWKDIVDEWVRVNQPGEHEPAALMDGDSPQQKPPQNGRQQVPDFAYSPNPHNGGSGS

SEQ ID NO: 73643 - protein, 216 aa, Gossypium hirsutum
  Clone ID: GOSHI-09MAY01-C10325_1.pep
MDLDDFRSVLETAGVDVWTFIDTAILVASLDYGQEFKQRRDGIVERLYATSMVTRCKSCDFGERSNVYQVNKEDSPHEGKGGGKGSPFTPQSDNEDDDFDPYGGLFDDEQKRVLEIKERLELPDQSEDTLVDLLQSLADMDITFQALKETDIGRHVNKLRKHSSNDVRRLVKHLVRKWKDIVDEWVRVNQPGEHEPAALMDGDSPQQKQPQNGRQQ

SEQ ID NO: 73644 - protein, 117 aa, Gossypium hirsutum
  Clone ID: LIB3166-024-P1-K1-F6.pep
MVGNPPHEKLPKNGRHQVPDFAYSPNPHNGGSGSEKNNSEPERKPKLIPPRKDPPSRPTHLTPPQNVQRQREQKETNFDAERLASARKRLQESYKEAENAKKQRTVQVMDIHELPKP

SEQ ID NO: 73645 - protein, 267 aa, Gossypium hirsutum
  Clone ID: GOSHI-09MAY01-C10295_1.pep
TMSGDTSDSSSYFDGREPDELIRAIVEKRPGTDGKTTLGLHFIDLESNKVFIKAMPPAAPSCPTAVSCGNRVYVLGGMRENDANFRGYEGVNDVFQLDLKDLERGWRKTTSMLFPRAYPHVLAAEGMIYVFECMGSESFGEVYDISGDIWEPLSPPPEAIDIRVVCVPVLDSSRSRILVHCDASDTLYAYYYDRKSWVCLEQKFSYWSGSAAIVDDLLYTFIYKCSLEAYNLLDKKHLPVKWSSEFRVAPPPESTLYRLGNGKLILG

SEQ ID NO: 73646 - protein, 91 aa, Gossypium hirsutum
  Clone ID: GOSHI-09MAY01-C10285_2.pep
LPPLGRPLFFFLAKMDYLLRWFLEMADLCSFNGIMIMFVAVMLSLTTTASAQDSAMAPAPSMDTGAAFSPMVSGVAVMFPLIISLVALLKH

SEQ ID NO: 73647 - protein, 68 aa, Gossypium hirsutum
  Clone ID: uC-gsronu33B137c09b1.pep
EMAELCFSKGIMIMFVAVVLSLTTTASAQDSAMAPAPSMDTGAAFSPAVSGIAVMFSLIVSLVALLKH

SEQ ID NO: 73648 - protein, 95 aa, Gossypium hirsutum
  unsure (1)..(95): unsure at all Xaa locations
  Clone ID: LIB3083-014-Q1-L1-C7.pep
LINNKLNMIQYSITQMYSTQCFKSATRETIRENITAIPETAGEKAAPVSIDGAGAIALSLADAVVVSESTTATNMIITPLEKPSSAIXKTSKKKK

SEQ ID NO: 73649 - protein, 168 aa, Gossypium hirsutum
  Clone ID: GOSHI-09MAY01-C10215_1.pep
MGKDLSDEQVSSMKEAFTLFDTDGDGKIAPSELGILMRSLGGNPTQAQLKAIIAEEKLTAPFDFPRFLDLMSKHMKPEPFDRQLRDAFKVLDKDNTGFVSVADLRHILTSIGEKLEPSEFDEWIREVDVGPDGKIRYEEFIARAAAHAAGLLTFVFLACCFLFGGTRL

SEQ ID NO: 73650 - protein, 161 aa, Gossypium hirsutum
  Clone ID: GOSHI-09MAY01-C11995_1.pep
PVDEEGVEDAFELLHETNERVRTGIWVGDCFIYNNTSWRLNFCVGGEVSTRWHLDRPMYLLGYLASQSRVYLIDKEFNAMGYTLLLSLIEYKTLVMRGDLEMANEILPSIPKEHHNSVAHFLESRGMVEDALVVSTDPDYRFELAIQLGKLEIAKVIAAEF

SEQ ID NO: 73651 - protein, 83 aa, Gossypium hirsutum
  Clone ID: GOSHI-09MAY01-C11985_1.pep
QLWTKTNTSFIITQLTFNMLIDIHGPVSISLSFPSPMMFLTKTGNIMECSSNLQEKMIAVVIASFILHPSAHSRTNGLCKIPP

SEQ ID NO: 73652 - protein, 95 aa, Gossypium hirsutum
  unsure (1)..(95): unsure at all Xaa locations
  Clone ID: GOSHI-09MAY01-C11965_2.pep
LVQDVCYRLAGQFCSNARMKFIVLLWGAKSRLANNETLGVPVFSYKEMVKLGRENCAVLIDSLDARKGCRYEVIGXHDIAAIVYTSGTTSNPKGI

SEQ ID NO: 73653 - protein, 535 aa, Gossypium hirsutum
  unsure (1)..(535): unsure at all Xaa locations
  Clone ID: GOSHI-09MAY01-C11965_1.pep
HIYNHSESVGLVIDNPELVRRLAGKFCSNARMRPRGLLWGAKSRLANNETLGVPVFSYKEIVKLGREYRAALIDSLDARKGCRYEVIGSHDIAAIVYTSGTTSNPKGIMLSHKNLLHQIENLGVLGPAKAGDRFLSMLPTWHTYERACXYFVCTHGIEQVYTTDDLRNYKPNYMISVPLVYETFYSGIQKQISSSPNAIKLIVFSFIRISLAYTELKIIXNMVTCLAVXESGPTCIMHIVSMFDYLWSKTIATILWPLHVLATKFVYKKISSAIGIQKTAKSGGGSLPTHIEKFYEAIGLEVQNGYGLTETSPCIAGRRPYYNVLGSVGHPIPLTEFKVVDSETGEILPPGSKGIIKVRGPPVMKGYYKNPLATRQALDEYGWLNTGDIGWIAPHHSVGRSRRCGGVIVFEGRAKDTIVLSSGENVEPLEIEEAALRSTLIQQIVVIGQDQRRLGAVIVPNKDEALLAAKEASIVDADAVDLSKDKITSMLYEELRKWTSECSFQIGPILVVDEPFTIESGLLTPTMKIRRDRVV

SEQ ID NO: 73654 - protein, 406 aa, Gossypium hirsutum
  Clone ID: GOSHI-09MAY01-C11885_1.pep
MLEQQLPEASQVNLVDTAVQEQQSSPPTKDQNANETIADTTSTLPTDVNMTDNPPMPVKPDNISSNGANTDPSDAPPAEPLEQKVNGDATPLRSLAPESGPEKVEKSKSWLLDPEMGEADEAGTPEERAAFMKELESFYKDRSLEFKPPKFYGEPLNCLKLWRAVIKLGGYEVVTASKLWRQVGESFHPPKTCTTVSWTFRIFYEKALLEYEKYKRENGEIQLPASSLPHASGEKESSGFLALGSGRARRDAAARAMQGWHAQRSVGYGEITEPIVKEKIMGSAPKRERHLKSIGLQKQKMPISAELDKSAHDKQLITEIVDVGTPADWGEINVRETHDCFEVYALVPGLLREEVRVQSDPAGRVVITGQPEQVDNPWGITPFKKVVNLPSRIDPLLTTAVVSLHG

SEQ ID NO: 73655 - protein, 189 aa, Gossypium hirsutum
  Clone ID: GOSHI-09MAY01-C11815_1.pep
VNNNNCNGPNLPGPYKDKKQNENTKNKITKKNMYTTVQVFGTKQPKYINPSPIPIMSPNRNKPNRPIPLTAPETLGPPLFSFCATTKKQSHTSTALVCHACTRTHANRLCTCKKETKTAANGNKYIVFFRFISFFAYKSPASNLCKGREEKKRKAFFFTNTQQAIKKSKHKHKRKINHKKAFLKKVTTR

SEQ ID NO: 73656 - protein, 109 aa, Gossypium hirsutum
  Clone ID: LIB3165-052-Q1-K1-G11.pep
WRYGAVSWLWRKTKRGGDLKFLELVKGMALLGLFRFGLMMGIGLGLMYLGCFVPKTWTVVYIFFCDFFFVFSFWFLSLYGPGKFGPLHLSYHSLYILTTKNSNYIVLNH

SEQ ID NO: 73657 - protein, 210 aa, Gossypium hirsutum
  Clone ID: GOSHI-09MAY01-C11595_1.pep
MDILGSGEVENLSDIKHAMVRTCFNDVNESNDTNTSKVEELLEQRQKSKPPSKCLAKSASFPSAVSTPDDDDDDDDDDEIVTAMQRMFSEDSVQSPSTYSRSISLPTPLKLVSALKGSREKQGLPPKKLTVKWAPDVYDPPPTSVLHTVRSKKQQKSKKKNDKKKNGKKGQKGNNSGRGCGGGKDIRLVRPVGGSPDRCYKPPPEVHPDR

SEQ ID NO: 73658 - protein, 129 aa, Gossypium hirsutum
  unsure (1)..(129): unsure at all Xaa locations
  Clone ID: LIB3829-021-Q6-K6-E12.pep
ETXLPPKKLTVKWAPDVYDPPPTSVLHTVIFLNSRNQIIRGGEEKGKKGXKGNNSRRGCGGGKDNKQIRRGGGSSDRCYKPPPEVHPDRLADSSVSLEGFNVCSPDPYCGSSFLKKSPTRMHYSVAEAL

SEQ ID NO: 73659 - protein, 96 aa, Gossypium hirsutum
  Clone ID: LIB3166-040-P1-K1-G8.pep
DFLYSLVVEMDILGSGEVENLSDIKHATVRTCFNDVNESNYTNTSKVEELLEQRQKSKPPSKCLAKSASFPSAVSTPDDDDDDEIVTAMQRMFSED

SEQ ID NO: 73660 - protein, 134 aa, Gossypium hirsutum
  Clone ID: GOSHI-09MAY01-C11555_3.pep
MAGRGKTLGSGASKKATSRSSKAGLQFPVGRIARFLKAGKYAERVGAGAPVYLAAVLEYLAAEVLELAGNAARDNKKTRIVPRHIQLAVRNDEELSKLLGDVTIANGGVMPNIHNLLLPKKAGGSSKVSGGDDD

SEQ ID NO: 73661 - protein, 133 aa, Gossypium hirsutum
  Clone ID: GOSHI-09MAY01-C11555_2.pep
MAGRGKTLGSGASKKATSRSSKAGLQFPVGRIARFLKAGKYAERVGAGAPVYLAAVLEYLAAEVLELAGNAARDNKKTRIVPRHIQLAVRNDEELSKLLGDVTIANGGVMPNIHNLLLPKKTGTSKTSGADDD

SEQ ID NO: 73662 - protein, 134 aa, Gossypium hirsutum
  Clone ID: GOSHI-09MAY01-C11555_1.pep
MAGRGKTLGSGASKKATSRSSKAGLQFPVGRIARFLKAGKYAERVGAGAPVYLAAVLEYLAAEVLELAGNAARDNKKTRIVPRHIQLAVRNDEELSKLLGDVTIANGGVMPNIHNLLLPKKAGTSSKASGGDED

SEQ ID NO: 73663 - protein, 167 aa, Gossypium hirsutum
  unsure (1)..(167): unsure at all Xaa locations
  Clone ID: GOSHI-09MAY01-C11515_1.pep
RSSIPIFSHFHFQNFGLLLSIRIFRENSGLLLCFTLLGGCGLGIENRDKRNGEGKQASSCFSIAIRLHRRCAHQSRHCRKAVVNEDASGDVVAMRLQIQQLKEEVSHLRAFVNGKSENLDNAIGTCHHAXPASPRSFKWECPPGSFSPLSSDKRMSQKKXYEVALVG

SEQ ID NO: 73664 - protein, 159 aa, Gossypium hirsutum
  Clone ID: uC-gsronu33B126f04b1.pep
PLRPGNRQVVVGALQFACTDDVPTNLATAERLVRAAHAKGANIILIQELFEGYYFCQAQREDFFRRAKPYNDHPTIKRMQELAKELGVVLPVSFFEEANSAHYNSVAIIDADGTDLGLYRKSHIPDGPGYQEKFYFNPGDTGFKVFQTKFGKNGVAICW

SEQ ID NO: 73665 - protein, 224 aa, Gossypium hirsutum
  unsure (1)..(224): unsure at all Xaa locations
  Clone ID: GOSHI-09MAY01-C11525_1.pep
AAGLLGLGRGXISFPTQTGRRLNRKSPRGLVXDGPSSSKPSSLLFGDTAIPRTAVFTPLLTNPKLDTFYYVQLLGISVGGTRVPKIRPSLFKMDRDGDGGVIIDSGTSVTRLTRPAYIALRNAFRLGSSNLKRAPAFSLFDTCYDFSGKTSVKVPTVVLHFRGADVSLPATNYLIPVDSSGTFCFAFAGTMSGLSIIGNIQQQGFLVAYDLAGSRIGFKPNGCA

SEQ ID NO: 73666 - protein, 128 aa, Gossypium hirsutum
  unsure (1)..(128): unsure at all Xaa locations
  Clone ID: GOSHI-09MAY01-C11485_1.pep
RTRGQDWVLFDVDIVEIQVQSPGSGLRPSAPPAVPHADSLNFEPXQPSAVSAKSGHFSRQESSDPYVGSSPPKSEGRTIYYHVADENGEVDDEAVEGDLFXVLKGNGVDEPTHKLXEKTGLEDVVVCT

SEQ ID NO: 73667 - protein, 56 aa, Gossypium hirsutum
  Clone ID: GOSHI-09MAY01-C11435_3.pep
NAFRGFKNYLGRCFYLMNGDEGRVWGQSGCLFIVWLWQKVLLIKRPRSLKFSATVT

SEQ ID NO: 73668 - protein, 337 aa, Gossypium hirsutum
  Clone ID: GOSHI-09MAY01-C11435_2.pep
MAPELVQAGVKPTVLAKPVTLPKRAYVTFLAGDGDYVKGVVGLAKGLRQVKSAYPLVVAVLPDVPEEHRRILENQGCIVREIEPVYPPENQTQFAMAYYVINYSKLRIWKFVEYSKMIYLDGDIQVYENIGLLFDLPDGQFYAVMDCFCEKTWSHTPQFKIGYCQQCPDKVKWPAEMGQPPALYFNAGMFVFEPSLTTYENLLATLKSTPPTPFAEQDFLNMYFKDIYKPIPLVYNLVLAMLWRHPDNVELDKVKVVHYCAAGSKPWRYTGKEENMQREDVKMLVQKWWDIYNDESLDYEKPTIGEGQAAEPVNMQPFLVALSEAGAVQYVTAPSAA

SEQ ID NO: 73669 - protein, 336 aa, Gossypium hirsutum
  Clone ID: GOSHI-09MAY01-C11435_1.pep
MAPPELVQPSDKTNVFAKQVSLRNRAYVTFLAGNGDYVKGVVGLAKGLRKVKSAYPLVVAVLPDVPEEHRRILENQGCIVREIEPVYPPENQTQFAMAYYVINYSKLRIWEFVEYSKMIYLDGDIQVYDNIDHLFDLPDGHFYAVMDCFCEKTWSHTPQYRIGYCQQCPDMVKWPAEMGNPPALYFNAGMFVFEPSLVTYESLLKTLKITQPTPFAEQDFLKMFFKDIYKPIPLIYNLALAMSWRHPENVELEKVKVVHYCAAGSKPWRYTGKEANMQREDIKMLVQKWWDIYNDESLDYRTSAAEGGTETVNLQPFLVALSEVGAVHFVAAPSAA

SEQ ID NO: 73670 - protein, 102 aa, Gossypium hirsutum
  Clone ID: GOSHI-09MAY01-C11425_2.pep
MDFFFRGLNEEFSSSQMDILRCPFSRNIYEPTNFSFSSALPFPMPVRGAKGPIFEDGPNFHMAFRLFHGRDGVVPLSVQSSLRIEKAETETAPPIVNPLLQR

SEQ ID NO: 73671 - protein, 358 aa, Gossypium hirsutum
  unsure (1)..(358): unsure at all Xaa locations
  Clone ID: GOSHI-09MAY01-C11425_1.pep
MDFFFRGLNEEFSSSQMDILRCPFLRNINEPTNFSFSSALPFPMPVRGAKGPIFEDGPNFDMAFRLFHGRDGVVPLSGQSSLRIEKAETETAPPKFNPLAAKAATISLSSFGPGGPFSFDAFSXKWNNQKGKGKGKSSKKESSSQGGKSNHEAMGNEWLQNGNCPIAKSYRAVSGVLPLVAKVLQPPPGMKYRCPPAVVAARAALAQTAFAKNLRPQSLPTKVLVIGVLGMAANVPLGIWREHTEKFSPSWFVAIHAAVPFIAMLRKSVLMPKTAMAFTIAASVLGQVIGSRAERYRLKAVAAKRLGMEESSVSVGGANQLDIVAVKNSDCRKDVAEWEPVSIQVAMARPSSSTDVFC

SEQ ID NO: 73672 - protein, 86 aa, Gossypium hirsutum
  Clone ID: LIB3272-036-P1-K1-F4.pep
MDFFFRGLNEDFSSSQMDILRCPFLRNINEPTNFSFSSALPFPMPVRGAKGPIFEDGPNFDMAFRLFHGRDGVVPLSGRSSLRFEK

SEQ ID NO: 73673 - protein, 168 aa, Gossypium hirsutum
  Clone ID: GOSHI-09MAY01-C11795_3.pep
MWRRLVTSPFKTLATVPCRSASKTPSPSPLRFKSHVSPFPSTYFLTRRFSTGSAGTAVKKRVEDVMPIATGHERKELQAELEGKKILEDVNNPVGPFGTKESPAVVKSYYNKRIVGCPGGVGEDEHDVVWFWLEKGKPHECSVCSQYFVLEVVGPGGPPDGHGDNDHH

SEQ ID NO: 73674 - protein, 166 aa, Gossypium hirsutum
  Clone ID: GOSHI-09MAY01-C11795_2.pep
MWRRLLTSQLKTLATAPCRSASKTVPLPFKSNVSSSPFSCLLTRHFSASSADSAVKKTVEDVMPIATGHEREELEVELQGKKILEDVNNPVGPFGTKEAPAVVKSYYDKRIVGCPGGEGEDQHDVGWFWLEKGNPHECSVCSQYFVLEVVGPGGTPHRHGDNDHHH

SEQ ID NO: 73675 - protein, 165 aa, Gossypium hirsutum
  Clone ID: GOSHI-09MAY01-C11795_1.pep
MWRRLLTSQFKYLATLPCRSASKTAPLPFKSHISPSPSASLLVRHFSAESADTAVKKRVEDVMPIATGHEREELESELQGKKILEDVNNPVGPFGTKEAPAVVKSYYDKRIVGCPGGEGEDEHDVVWFWLEKGKPHECPVCSQYFVLEVVGPGGPPDGHGDDDHH

SEQ ID NO: 73676 - protein, 95 aa, Gossypium hirsutum
  Clone ID: LIB3166-044-P1-K1-B1.pep
RKIAVGFFDRHKEKAPARDLRSSKPKHDPLISEICGEGYLLHSSNIWQHLHADPSIKRRRVHTKLTVLLPMMRAILVASSPASQRILLRRRELMM

SEQ ID NO: 73677 - protein, 134 aa, Gossypium hirsutum
  unsure (1)..(134): unsure at all Xaa locations
  Clone ID: GOSHI-09MAY01-C11745_1.pep
MAESVELPGRLAILPFRNKVLLPGAFIRIRCTSQSSVKLVEQELWQREEKGLIGILPVQDAAETTSMDSMLSQGVGSESGERSSNVQVSTSDAHKVDGKNPSEVIHWHNRGVAARALHLSRGVEKPXSGRVTFL

SEQ ID NO: 73678 - protein, 137 aa, Gossypium hirsutum
  Clone ID: GOSHI-09MAY01-C11705_2.pep
MLRVATRRLTSYSSAWRSHQATSAIASRPFIDGADSSDCLRSNSSSSSSSFSFSFASQFLLPTRGFASESLTPKSDHSVIPDVPATVAAIKNPSSKIVYDEYNHERFPPGDPSKRAFAYFVLTSGKFVYASVIRLLI

SEQ ID NO: 73679 - protein, 169 aa, Gossypium hirsutum
  Clone ID: LIB3829-022-Q6-K6-G12.pep
EWQRGGSLLIRLRGGRTRPPPLSPLVLSSTAPILLRGGRANSSSSSSSFSFSFASQFLLPTRGFASESLTPKSDHSVIPDVPATVAAIKNPSSKIVYDEYNHERFPPGDPSKRAFAYFVLTGGRFVYASVIRLLILKLVLSMSASKDVLALASLEVDLSSIEPGSTVTV

SEQ ID NO: 73680 - protein, 90 aa, Gossypium hirsutum
  Clone ID: LIB3166-043-P1-K1-A7.pep
EWQRGGSVLVRLRGGRTRPPPLSPLVLSSTAPILLIVSDPISPPPHFPSLSLLNSFFPPEVRVSFCFSNFLRFVSLFRPNMAVISNTIIG

SEQ ID NO: 73681 - protein, 249 aa, Gossypium hirsutum
  unsure (1)..(249): unsure at all Xaa locations
  Clone ID: GOSHI-09MAY01-C11725_2.pep
MGEIYLFFSSYLTRGLKYLHSANIPLHXDLKPGNXLLVNANCDSKICDFGPCARARAEVMEQFMTEYVVTPVGTRAXPELLLCCDNYGTSIDVWSVGCIFAEILGRKPIFPGTXCLSQLKLIIGVLGSQQEADLQFIDNPKARRYIESLPFSTGSHLSPLYPQADPLAIDLLQRMLIFDPSKRITVTEALQHPYMATLYDPRCNPPARVPINLDIDENMGEEMIRGMMLSEMLHYHPEAASTNAYTTLF

SEQ ID NO: 73682 - protein, 264 aa, Gossypium hirsutum
  unsure (1)..(264): unsure at all Xaa locations
  Clone ID: GOSHI-09MAY01-C11725_1.pep
GDVYLVYELMDTGFXHRIIKSSQPLSNDHCKYFIFQLLRGLKYLHSANILHRDLKPGNLLVNANCDLKICDFGLARTSRGNEQFMTEYVVTRWYRXAPELLLCCDNYGTSIDVWSVGCIFAEILGRKPIFPGTECLSQLKLIIDVLGSQQEADLQFIDNPKARRYIKSLPYSRGTHLSHLYPQADPLAIDLLQRMLVFDPSKRITVTEALLHPYMSGLYDPRCNPPAQVPIDLDIDENMREEMIREMMWAEMLHYHPEAASANA

SEQ ID NO: 73683 - protein, 101 aa, Gossypium hirsutum
  Clone ID: LIB3583-023-P1-K1-E9.pep
TRILKVKQNLGTPFSLLYPQADPLAIDLLQRMLVFDPSKRITVTEALLHPYLLGLYDPRCNPPAQVPIDLEIDENMGESMIREMMWSEMLHYHPEAVSANA

SEQ ID NO: 73684 - protein, 159 aa, Gossypium hirsutum
  Clone ID: AI729211.1.pep
RQIRHDNVVALKDIMMPTQRTSFKDVYLVYELMDTDLLQIIKSSQPLSNDHCKYFLFQLLRGLKYLHSANILHRDLKPGNLLINANCDLKICDFGLARTSRGNEQFMTEYVVTRWYRSPELLLCCDNYGTSIDVWSVGCIFAEILGRRPIFPGTGCLNQ

SEQ ID NO: 73685 - protein, 94 aa, Gossypium hirsutum
  Clone ID: LIB3197-029-Q1-M1-C12.pep
IFGDWFLYQAKLLRGLKYLHSANILHRDLKPGNLLVNANCDLKICDFGLARTSRGNEQFMTEYVVTRWYRAPELLLCCDNYGTSIDVWSVRCIF

SEQ ID NO: 73686 - protein, 75 aa, Gossypium hirsutum
  Clone ID: GOSHI-09MAY01-C11165_1.pep
ILLQFQLILLQTYSLVSMVTLTYQQEEEEKKKVFFEKEPHAAPTIFLAAFLSLEDAVEPTPIALFLLLLQASKFW

SEQ ID NO: 73687 - protein, 164 aa, Gossypium hirsutum
  Clone ID: GOSHI-09MAY01-C11115_1.pep
MWASSEGGAPEVTLETSMGAFTVELYYKHAPRTCRNFIELSRRGYYDNVKFHRIIKDFIVQGGDPTGTGKGGESIYGPVFDDEIRSELKHTGAGILSMANAGPNSNGSQFFITLSPAPSLDGKHTIFGRVCRGMEIIKRLGSVQTDNNDRPIHDVKILRTSVKD

SEQ ID NO: 73688 - protein, 338 aa, Gossypium hirsutum
  Clone ID: GOSHI-09MAY01-C11105_1.pep
MSSDGNVTGGGGANTVGVTNKPFFCYQCNRTVNVTISPPSSDPTCPICNEGFLEEYDNPNPNQGSGFLNPNPNSIPFHDPFLTLSDPFASLLPLLFPSSSSTTTSSSASIDPNNPSLSGPTRSGRGDPFAFDPFTFIQNHLNDLRSSGAQIEFVIQNNPSDQGFRLPANIGDYFIGPGLEQLIQQLAENDPNRYGTPPASKSAIEALPLVNITKSNLNSEFNQCAVCMDDFEEGTEAKQMPCKHLYHKDCLLPWLELHNSCPVCRHELPTDDPDYERRVRGAQGTSGGNDGDNSGQRSDGDNRTVERSFRISLPWPFQARGPGPAPGDNAETRQEDLD

SEQ ID NO: 73689 - protein, 153 aa, Gossypium hirsutum
  Clone ID: GOSHI-09MAY01-C11095_1.pep
RLGDLKPTYLDDAFGSLEPSLLSPLKGLSIKSGIQAQLQSPTGLKIRQNSNQLRSSYPTNLTSSPVRKPSAFGYDSSAAVAAAVMNSRSSAFAKRSQSFIDRGAVTNPAGLAAPANPTSTMSSNNLDWSSPNGKLDWGIQGDELNQLRKIRFV

SEQ ID NO: 73690 - protein, 235 aa, Gossypium hirsutum
  Clone ID: GOSHI-09MAY01-C11075_1.pep
MWEREGRAFSMYKRMPSRDRSDVMDVEENSAFSQDSMDVETTNPSMWLSFPHVVVGTLSSFLFGYHLGVVNEPLESISLDLGFSGNTLAEGLVVSTCWGGALIGSLFSGWIADGGGRRRAFQLCALPMIIGAATSATTRTLAGMLIGRFLVGTGMGIGPPVASLYLAEVSPASLRGTYGSFIQIATCLGLMGALFIGIPVREIAGWWRICFWVSTVPAGILAFAMIFCAESPHWL

SEQ ID NO: 73691 - protein, 99 aa, Gossypium hirsutum
  Clone ID: uC-gsflmaxxa004h08b1.pep
MWGRHREAFSMYKRMPSRDHSTLVDDVEENSALLQNSMDVETTNPSWLLSFPHVVVATISSLLFGYHLWVVNEPLESISIDLGFRGNTLAEGLVVSTCL

SEQ ID NO: 73692 - protein, 98 aa, Gossypium hirsutum
  Clone ID: GOSHI-09MAY01-C11015_1.pep
LSSSPLHVLLSTNRTKPTALPNPAPNTKKRKKKKKKDKEEENLDEEDGFSQEEETKPYLLHLHAFFTELKGSLFSSSMNKGLFHFTSSFLLFSSFLGK

SEQ ID NO: 73693 - protein, 148 aa, Gossypium hirsutum
  unsure (1)..(148): unsure at all Xaa locations
  Clone ID: GOSHI-09MAY01-C11025_1.pep
MADNSACNPDLIIAHKFPDTTYAHTERDVAVYALGVGACGRDAVDTDELKYVYHENGQQFIKVLPTFSTVLSLTGLPQLSGVPGLKFDKRLLLHGQQYIEIHKPLTSNASLLNKXTIAGFHDIGKAAILELVTRRYEKETGELLTLNR

SEQ ID NO: 73694 - protein, 124 aa, Gossypium hirsutum
  unsure (1)..(124): unsure at all Xaa locations
  Clone ID: LIB3166-033-P1-K1-F9.pep
LSIIIIIIIFEKFPWLINLLATRTSLLLINSPIDVAVYALGVGACGRNAVDTDELKYVYHENGQQFIKVLPTFSTLFSLRGLPQLSGVPGLKFDKRLLXHGQQYIEIHKPLPLNASLLNKTNHC

SEQ ID NO: 73695 - protein, 173 aa, Gossypium hirsutum
  Clone ID: GOSHI-09MAY01-C11395_1.pep
KNFIDGRSNSAQTTSLATVMENTDELKRVFDQFDANKDGQISITELRDVLKAMGSNYSEEEFKRVMEDIDSDQDGYINFSEFSTFWSTSSDAVKAASELREAFDLYDQNKNGLISATELHQVLNRLGMACSADDCVGMIKSVDSDGDGHVNFEEFRKMMNASSIPGNGDGSKP

SEQ ID NO: 73696 - protein, 272 aa, Gossypium hirsutum
  unsure (1)..(272): unsure at all Xaa locations
  Clone ID: GOSHI-09MAY01-C11365_1.pep
MQRIIAVVLFLFCATSQLASSLNDGLLPNGNFEYGPKPSELKGTKVMSPKAIPNWEISGYVEYIKSGQKQGDMLLIVPEGGFAVRLGNEALIKQKIKVIKGMFYSLTFSAARTCAQEEKVXVSVSLNYEKNDFGLFPIQTMYSSNGWDSYAWAFQASESVIEISIHNPGVEEDAACGPLIDSIALKTLYPPKRTRVNLLKNGNFEEGPYIFAGPMSEGVIIPPHIEDDHSPLPGWIIDSLKAVKYIDSDHFTVPKGKRAIELIAGKESSLSQ

SEQ ID NO: 73697 - protein, 149 aa, Gossypium hirsutum
  Clone ID: uC-gsflmaxxa047e07b1.pep
MQRIIAVVLFLFCATSQLASSLNDGYVEYIKSGQKQGDMLLIVPEGGFAVRLGNEALIKQKIKVIKGMFYSLTFSAARTCAQEEKLNVSVSLNYEKNDSGLFPIQTMYSSNGWDSYAWAFQASESVIEISIHNPGVEEDAACGPLIDSI

SEQ ID NO: 73698 - protein, 245 aa, Gossypium hirsutum
  unsure (1)..(245): unsure at all Xaa locations
  Clone ID: GOSHI-09MAY01-C11325_1.pep
MAATASSPWGKAGAWALDAEEHEAELQQQSRADSAAEKLAVFPSLSAAASTKTXKSSAHXISLAEFAAYGSAKPSEPTGLTHEDLLLLPTGPRQRSPEELDRNRLGGGFKSYGSNRYNSNGDDSSSNSRWGSSRVSNRDSNKEMAPSRADEMDNWASAKKSTRAGNGFGVGFERRERGGGGFFDSQSKADEVDNWASNKSSKSVNAAAPPRRFGGGFERRSSFDSLQRDSQRDLDNWGKKKEETG

SEQ ID NO: 73699 - protein, 241 aa, Gossypium hirsutum
  unsure (1)..(241): unsure at all Xaa locations
  Clone ID: GOSHI-09MAY01-C11205_1.pep
MGQDNFAPQKRSSTGGGGGLPTIRNEAGAGGRNRGFPSMPRGRQMHKTFNNIKITILCGFVTILVLRGTIGVGNLGSSEAEAINQNLIEETNRILAEIRSDSDPTDPDESPETELGPNVTYTLGPKITDWDQQRKVWLSKNPEFPNFVNGKARILLVTGSPPNPCDNAIGDHYLLKAINNKIDYCRLHGIEIVYNMAHLYKELAGYWAKLPLIRRLMLSHPELEWIWWMDXDAFFTDMVFE

SEQ ID NO: 73700 - protein, 60 aa, Gossypium hirsutum
  Clone ID: LIB3585-016-P1-K1-A5.pep
GLPTILNEAGAGGRYRGFPSMPRGLQMHKTFNNIQITILCGFFTILVLRGTIGVQKFLSF

SEQ ID NO: 73701 - protein, 55 aa, Gossypium hirsutum
  unsure (1)..(55): unsure at all Xaa locations
  Clone ID: LIB3585-028-P1-K1-H2.pep
RSDFTPIPMVEIRPRKSLLAGRSYRQXATRLALAEETVDFPVCRVAGRCTRHSTT

SEQ ID NO: 73702 - protein, 176 aa, Gossypium hirsutum
  Clone ID: GOSHI-09MAY01-C11235_1.pep
MAQADQISNSPEIKEPSPKVPKLGQNGVHEVTHGPASLLKVKKLSEKAVLPSRGSPLAAGYDLSSATDTKVPARGKALIPTDLSIAIPEGTYGRVAPRSGLAWKHSIDVGAGVIDADYRGPLGVILFNHSDVDFEVKVGDRIAQLIIEKIMTPDVLEVDDLDSTTRGAGGFGSTGV

SEQ ID NO: 73703 - protein, 42 aa, Gossypium hirsutum
  Clone ID: LIB3829-018-Q6_N6-E1.pep
RVRFGGLLPTGETKLSFVLLIGYCLVRNPEWVNGSILSSNRQ

SEQ ID NO: 73704 - protein, 44 aa, Gossypium hirsutum
  Clone ID: GOSHI-09MAY01-C12965_1.pep
TTNGTFQNSLFRFLLYSSVGFQVVTTLKNPPMCLFVHLLNYVLN

SEQ ID NO: 73705 - protein, 106 aa, Gossypium hirsutum
  unsure (1)..(106): unsure at all Xaa locations
  Clone ID: GOSHI-09MAY01-C12895_1.pep
MAEEPAPPSAPPQSSAPPLGSSVLPLVNKLQDIFAKLGSQSTIELPQVAVVGSQSSGKXSSVLESLVGRDFLPRGSDICTRRPLVLQLLQTKRKPDGSDEEYGECL

SEQ ID NO: 73706 - protein, 131 aa, Gossypium hirsutum
  Clone ID: AI726394.1.pep
MAEEAAVASTPPQSSAPPLGSTVIPLYRHKKKVHSVAWNYTGTKLASGSVDQTGRVWHIEPHGHGKAKDIELKGHTDSVDQLCWDPKHADPIATASGDKTVRLWDARRQSNNWTMDSSGSAVGRENGTVPP

SEQ ID NO: 73707 - protein, 151 aa, Gossypium hirsutum
  Clone ID: GOSHI-09MAY01-C12865_2.pep
MDTGSNVKKGAGGRKGGGPKKKPVSRSVKAGLQFPVGRIGRYLKKGRYSQRVGTGAPVYLAAVLEYLAAEVLELAGNAARDNKKNRIIPRHVLLAVRNDEELGKLLAGVTIAHGGVLPNINPVLLPKKNEKVATKEPKSPSKATKKSPKKA

SEQ ID NO: 73708 - protein, 154 aa, Gossypium hirsutum
  Clone ID: GOSHI-09MAY01-C12865_1.pep
MDAGSKVKKGAGGRKGGGPKKKPVSRSVKAGLQFPVGRIGRYLKKGRYSQRVGTGAPVYLAAVLEYLAAEVLELAGNAARDNKKNRIIPRHVLLAVRNDEELGKLLAGVTIAHGGVLPNINPVLLPKKNEKAAAKEPKSPSKATKSPKKSPKKA

SEQ ID NO: 73709 - protein, 128 aa, Gossypium hirsutum
  Clone ID: GOSHI-09MAY01-C12805_1.pep
MAGKEENRIFVGGLSWDVTERQLEHAFSPFGKILESQIMLERDTGRPRGFGFITFADRRSMDEAIREMHGRELGERTISVNKAQPKMGEDLDHGYRGGYSSSGRGRYAGGDRPVAQDECFKCGRFGHW

SEQ ID NO: 73710 - protein, 211 aa, Gossypium hirsutum
  Clone ID: GOSHI-09MAY01-C12585_1.pep
LASTQCQQFHPPTVAEPTEGFQLSAQNQVPPSQTDQSFVRSDLKYEYKMSVNEQAISPDRLNHISQGPDINSLISSSAVKAQVLDSIKLSFIVDPQPEPSLEQVSSQFHGALTLGTREQSCESQELIILNMNNHVLEDQVLSAEEASTAASPSPPDSSEHSVNFKGTTTSNGANAIMPEKSVSTGQTNILISAKTSETALLDERSLVACIV

SEQ ID NO: 73711 - protein, 137 aa, Gossypium hirsutum
  unsure (1)..(137): unsure at all Xaa locations
  Clone ID: GOSHI-09MAY01-C12545_1.pep
IRKIVSEMAGKGAEDVRGGVSPYRICPLGAHVDHQGGIVSAMTINKGILLGFVPSGSTEVALRSGQFKGEVRFRVNENHKPRQTISKGEEITADKSSPSXDEFEWGIYARGALYALQSRGNHLAQGIIGYICDLRVW

SEQ ID NO: 73712 - protein, 98 aa, Gossypium hirsutum
  Clone ID: GOSHI-09MAY01-C12505_6.pep
MSPTESSREENVYMAKLAEQAERYEEMVEFMEEVAKTVDVEELTVEERNLLSVAYKNVIGARRASWRIISSIEQKEESRGNEDHVAQLKEYRGKIEAE

SEQ ID NO: 73713 - protein, 263 aa, Gossypium hirsutum
  Clone ID: GOSHI-09MAY01-C12505_5.pep
MSSTGSTREENVYMAKLAEQAERYEEMVEFMEKVVKAVNVEELTVEERNLLSVAYKNVIGARRASWRIISSIEQKEESKGNGDHVAIIKEYRGKIEAELSKICDGILSLLESHLIPSASTAESKVFYLKMKGDYHRYLAEFKTAAERKEAAESTLLAYKSAQDIAIVELAPTHPIRLGLALNFSVFYYEILNSPDRACNLAKQAFDDAISELDTLGEESYKDSTLIMQLLRDNLTLWTSDITDEAGDEIKEAPPKPESGEGQQ

SEQ ID NO: 73714 - protein, 211 aa, Gossypium hirsutum
  Clone ID: GOSHI-09MAY01-C12505_4.pep
MSPTESSREENVYMAKLAEQAERYEEMVEFMENVAKTVNVGELTVEERNLLSVAYKNVIGARRASWRIISSIEQKEESRGNEDHVATIKKYRSKIEAELSKICDGILSLLESHLIPSASSAESKVFYLKMKGDYHRYLAEFRTAAERKEAAESTSLAYTSAPDLALGVLLLTYPFRLLHAFIFFAFFFSFSLSYHLFFSFFPFLFFFFFLL

SEQ ID NO: 73715 - protein, 214 aa, Gossypium hirsutum
  unsure (1)..(214): unsure at all Xaa locations
  Clone ID: GOSHI-09MAY01-C12505_3.pep
ANWWKSVARQVLEWYSKKSSTGSTREENVYMAKLAEQAERYEXMVEFMEKVVKAVNVEELTVEERNLLSVAYKNVIAHASGPGGRPGRIISSIEQKEESRGNGDHVALLKEYRGKIEAELSKICDGILSLLESHLIPSASSAESKVFYLKMKGDYHRYLAEFKTGAERKEAAESTLLAYKSAQDIAFAELAPTHPIRLLLAFIFYVLFYIIYYI

SEQ ID NO: 73716 - protein, 221 aa, Gossypium hirsutum
  unsure (1)..(221): unsure at all Xaa locations
  Clone ID: GOSHI-09MAY01-C12505_2.pep
MSPTESSREENVYMAKLAEQAERYEEMVEFMENVAKTVDVGELTVEERNLLSVAYKNVIGARRASWRIISSIEQKEESRGNEDHVATIKEYRSQVEAEFQSAAVRKEAAQSTGLAFKAAQDIALGDLAPPHPIRLGPALNFSVVYYEILHSPDRACYLAKQAFAEAISGSDTLGEESYKDSSLIMQLLRDNLTLLTSDITDXAGHDIKEASKPESGEGQQG

SEQ ID NO: 73717 - protein, 262 aa, Gossypium hirsutum
  Clone ID: GOSHI-09MAY01-C12505_1.pep
MSPTESSREENVYMAKLAEQAERYEEMVEFMEKVAKTVDVEELTVEERNLLSVAYKNVIGARRASWRIISSIEQKEESRGNEDHVAQLKEYRGKIEAELSKICDGILSLLESHLIPLASSAESKVFYLKMKGDYHRYLAEFKTGAERKEAAESTLLAYKSAQDIALAELAPTHPIRLGLALNFSVFYYEILNSPDRACNLAKQAFDEAISELDTLGEESYKDSTLIMQLLRDNLTLWTSDITDEAGDEIKEASKHESGEGQQ

SEQ ID NO: 73718 - protein, 69 aa, Gossypium hirsutum
  unsure (1)..(69): unsure at all Xaa locations
  Clone ID: uC-gsronu33B062f08b1.pep
FWQAFDEAICELXTLGEESYKDSTLIMQLLRDNLTLWTSDITVFPPPPHNKFVFAHNHEILMQLCCLQT

SEQ ID NO: 73719 - protein, 103 aa, Gossypium hirsutum
  Clone ID: LIB3148-059-Q1-K1-H11.pep
KVFPCYWLNGVIYIYLMHVAINFRMKLETTSRMLPNPSQERDSSDELSSYDMYSVIYVARCTFTYMQHELMYKDPTIILTFILAHLSILRVEILHSNTIIIQT

SEQ ID NO: 73720 - protein, 48 aa, Gossypium hirsutum
  Clone ID: uC-gsronu33B051g01b1.pep
LSLSHFHRPKERPFGSRIRLILQRCLQLLHFSAENVDMAKLAEQAERY

SEQ ID NO: 73721 - protein, 482 aa, Gossypium hirsutum
  Clone ID: GOSHI-09MAY01-C12785_1.pep
RALKTRLREFEKKNASVEIFGGFKNSEFVEKVKSSLKAIIKEPQESKDVPPLDVPELLAYLVRQSGPFLDQLGVRRDLCDKIVESLCSKRKNQLVLRSLAEGEPPTVDSDKINDELDLRIASVLQSTGHCYEGGFWTDFVKHDVSDGKRHVAIVTTASLPWMTGTAVNPLFRAAYLAKSAKQKVTLLAPWLCRSDQELVYPNNLTFSSPEEQENYIRNWLEERTGFKADFKISFYPGKFSKERRSIIPAGDTSQFIPSKDADICILEEPEHLNWYHHGKRWTDKFNHVVGIVHTNYLEYIKREKNGALQAFLVKHINNWVTRAYCHKVLRLSAATQDLPKSVICNVHGVNPKFLKIGEKVAEERELGQQAFSKEAYFLGKMVWAKGYKELIDLLAKHKNDLDGFKLDVYGNGEDAHEVQSTAKRLNLNLNFLKGRDHADDSLHGYKIFINPSVSDVLCTATAEALAMGKFVVCADHPSNEFF

SEQ ID NO: 73722 - protein, 161 aa, Gossypium hirsutum
  unsure (1)..(161): unsure at all Xaa locations
  Clone ID: GOSHI-09MAY01-C12765_1.pep
MQRIAIARAIMKALRILVVDEATSALDXESERVVQEAMXQASIGRTTIVIAHRLSTIRNAELIAVFQNGQVIEIGSHDELIENQNGHYTSLVHLQQTEKEKNPEEANSTLPTCASSSITNMDINNTSSRRLSLVSGSSSADSFSQNRAPLAGISEEEDLYK

SEQ ID NO: 73723 - protein, 85 aa, Gossypium hirsutum
  Clone ID: GOSHI-09MAY01-C12705_1.pep
VTPMGDTTLLVSITCTKRADAVLKLCQLFESLNLKIITANLTVVSANLFNTLFIRADEKEKEELKMQIQTAIAAFNGPQTPPITI

SEQ ID NO: 73724 - protein, 198 aa, Gossypium hirsutum
  Clone ID: GOSHI-09MAY01-C12615_1.pep
MEENPTVSPTTTPTNSSNKTTQELASEGLKHLEETIEAAFQILSSMNDELCNPALWSTNPTTNNTTTNTAAPNGSSLSNGAVLGNGDSSSDGGHHLEMGGIGGSGNGALDEARLRYKISVAALRTVLTAIPNSQKAKAFETGSTATSPADEADIEKLEEEASNLRKELANKNLYVKRLIDQLRELITDVSTWQSPCSM

SEQ ID NO: 73725 - protein, 105 aa, Gossypium hirsutum
  Clone ID: GOSHI-09MAY01-C12605_1.pep
SVFAGVGERTREGNDLYREMIESGVIKLGDNQAESKCALVYGQMNEPLGACARVGLTGLTVAEHSRDAEGQDVLLFIDNIFCFTQVRWFIVEALETFYITAPFGS

SEQ ID NO: 73726 - protein, 159 aa, Gossypium hirsutum
  unsure (1)..(159): unsure at all Xaa locations
  Clone ID: GOSHI-09MAY01-C12155_1.pep
PLVRGNTPGCSSSACVYGIQWGDSSFSVGIFAKEKLTLTSTDVFDDFLFGCGQNNQGLFGGAAGLIGLGRDKLSLPSQTASKYRKYFSYCLPSSASSTGFLSFGYGGVSKFVNFTTLTTLSQGASFYGIDIVGISVGGXKLPISASVFTAGGAIIDSGT

SEQ ID NO: 73727 - protein, 298 aa, Gossypium hirsutum
  Clone ID: GOSHI-09MAY01-C12165_1.pep
MPDEETATPTASAPATPGTPGGPLFNSMRVDSLSYDRKSMPRCKCFPVTAPTWGQPHTCFTDFPAPDVSLTRKLGAEFVGTFILIFAATAGPIVNQKYSGAETLLGNATCAGLAVMIIILSTGHISGAHLNPSLTIAFAACRHFPWTQVPAYIAAQVSASICASFALKGVFHPFMSGGVTVPSVSHGQAFALEFLITFNLLFVVTAVATDTRAVGELAGIAAGATVMLNILVAGPSSGGSMNPVRTLGPAVAAGNYRALWIYLIAPTLGAVIGSATYTLVKLREDEVDAPRQVRSFRR

SEQ ID NO: 73728 - protein, 160 aa, Gossypium hirsutum
  unsure (1)..(160): unsure at all Xaa locations
  Clone ID: GOSHI-09MAY01-C12125_1.pep
LLLNLPRILRIRQLPTRSPPCCNGRSEDSTNSRKKLPSKEKRGCYKRRRDEHAPTVVSSTVEDGHAWRKYGQKQILNSKHPRSYFRCTRKYDQGCKATKQVQKTGRCXSQMFQTTYIGTHTCRPDSFKAPQIIIDSEPRESYNKFSYGSSNPKIPTKKLH

SEQ ID NO: 73729 - protein, 363 aa, Gossypium hirsutum
  unsure (1)..(363): unsure at all Xaa locations
  Clone ID: GOSHI-09MAY01-C12095_1.pep
CAEAVHQNNLNLAEALVRRVGFLAISQAGAMRKVXTYFAEALARRIYRFYPQNPLDHSRPRGLHMHFYETCPYLKFAHFTANQAILEAFEGKKRVHVIDFSMNQGMQWPALMQALALRVGGPPXFRLTGFGPPSHDNSDHLQEVGWKLAQFAEKIHVEFEYRGFVANSLADLDASMLDLRPSEVEAVAVNSVFELHKLLARPGAIDKVFSVVKQMKPELVTIVEQEANHNGPVFLDRFTESLHFYSTLFDSLEGSVSSQDKVMSEVYLGKQICNVVACEGVDRIERHESLTQWRNRLSTAGFSPVHLGSNAFKQASMLLALFAGGDGYGVEENNGCLMLGWHNRPLITTSAWKLTNKTTAISQ

SEQ ID NO: 73730 - protein, 176 aa, Gossypium hirsutum
  Clone ID: GOSHI-09MAY01-C12075_1.pep
RKCIRKNASLGQLYGNMQEAYQQMQTPLVYQEPSARGLHELKESTVQAATCTGNIDAPIDETLFDIEKEIDDLLPVEVKEQRLSNLLQATMVGGCVAAMPILKMIPTSVLWGYFAFMAIESLPGNQFWERILLLFTAPSRRYKVLEQQHATFVETVPFKTIAMFTIFQTAYLLVCF

SEQ ID NO: 73731 - protein, 518 aa, Gossypium hirsutum
  unsure (1)..(518): unsure at all Xaa locations
  Clone ID: GOSHI-09MAY01-C12025_1.pep
PTRTPTRPLAFHQLGCVRLLRKEYDVAKGLFEKAVSLGHVYSIAGLARLGYIKGHKLFSYEKLSSVISSVNPLGWMYQERSLYCEGDKRSEDLDKATELDPALTYPYMYRAASLMMKQNVQAALAEINRVLGFKLALECMELRFCLYLAIEDYKAAIRDVPPRPTLSPXDYRMFEGRVAASHLRTLVREHVGSWTTADCWMQLYDRWSSVDDIGSLXSVIYQMLESGGAKGVLYFRQSLLLLRLNCPDAAMRSLELARRHASSEHERLVYEGWILYDTGHCEEGLRKAEESIRTRRSFEAFFLKAYALADSSLDSSCSSTVISLLENALKCPSDNLRKGQALNNLGSVLVDCGKLDSAADCYINALKIRHTRAHQGLARVHFLRNDKATAYVEMTKLIEKAKNNASAYEKRSEYCDRDRDLTKADLEMVTRIDPLRVYPYRYRAAVLMDSRKEKEAIAELSRAITFKADLHVLHLRAAFHEHVGDVLAALRDCRAALSVDPNHQEMLELHSRVNSHEP

SEQ ID NO: 73732 - protein, 127 aa, Gossypium hirsutum
  Clone ID: LIB3135-037-Q1-K1-F10.pep
RPRVREALGKAVESIRTKRSFEAFFLKAYALADSSMDFSCSSTVISLLENALKCPSDNLRKGQALNNLGSVYVDCGKLDLATDCYINALKIRHTTAHQGLARVHFLKNNKAAAYEEMTKLIEKAKNN

SEQ ID NO: 73733 - protein, 68 aa, Gossypium hirsutum
  Clone ID: LIB3048-018-Q1-L1-E5.pep
EALGKAEESIRTKRSFEAFFLKAYALADSSMDFSCSSTVISLLENALKCPSDNLRKGQVRFLLPYLFH

SEQ ID NO: 73734 - protein, 71 aa, Gossypium hirsutum
  Clone ID: uC-gsronu33B061d01b1.pep
LGKVFAFKTVVHGEVASSFAIETLACLQAVFMGKQMGFTLVVIEGDSVSVIKKSKSDKIGKSMIGSIIRNI

SEQ ID NO: 73735 - protein, 80 aa, Gossypium hirsutum
  unsure (1)..(80): unsure at all Xaa locations
  Clone ID: LIB3166-051-P1-K1-H4.pep
TSPNANKRVAINLLNRGSQTXIMIPLPFSIPTQRSPIEQHSVRSLLRISTSDVPCLGTLPVTYAHDSSLIASLFHTIKVT

SEQ ID NO: 73736 - protein, 140 aa, Gossypium hirsutum
  Clone ID: GOSHI-09MAY01-C12255_1.pep
VLLIFLCRFYVAEVLLALEYLHMLGIIYRDLKPENVLVREDGHIMLSDFDLSLRCAVSPTLVKSSNSTLESKNSAYCAQPACIEPTCVMQPDCIQPACFGPRFFSSKQKKDKKSKVKNETNHQVSPLPELIAEPTNARSM

SEQ ID NO: 73737 - protein, 493 aa, Gossypium hirsutum
  unsure (1)..(493): unsure at all Xaa locations
  Clone ID: GOSHI-09MAY01-C12215_1.pep
TGASTCAVAAITSDEIVGNGMSTCIVSASDNKGFGGAAIDVINTGDGGQKLANQSKAEESLSVSLPADLSVENPPISLWPPLPTPQNSSSQMISHFPGGPPSHFPFYDMNPMMGGPIFAFGPHEESSSTQSQSQKSSTPASGPLGTWQQCHSGVDSFYGPPTGFTGHFITPPGGIPGVQGPPHMVVYNHFAPVGQFGLSFMGTTYIPSGKQPDWKHNPASSAVGEGDVKNLNMAASQGNSSNIPAQMQHLPPGPGSPLLPIASPLAMFDVSPFQSTPDVSVQARWSPVPASPMQSATPSIPLQQQAEGVLHSQFSQGPPVDRAGTSNRFPDSRTSASSDCSRKFPVATDATITQLPDELGLVEPSSSSIPAASAPQDAKSPSIMKVADAAKNDVLNNDGIKSSGHSTNSALKSVQSSSQQKNISSQHYGEFFLXNHPRGNAISQKNGSGELTHRGMSFQGRNQSMGGDKNFPTSKMKQIYGPIQTNNGTSTSA

SEQ ID NO: 73738 - protein, 133 aa, Gossypium hirsutum
  Clone ID: LIB3048-038-Q1-L1-E11.pep
TLFFEKEKHPRESGVHMEECEAEAAASAVAAAAITSDEIVGNGMSTCIVSASDNKSFGGAAIDVINTGDGGQKLANPSKAEESLNVSLPADLSAENPPISLWPSLPSTQNSSSHMISHFPGGPPSHLHFYDMN

SEQ ID NO: 73739 - protein, 131 aa, Gossypium hirsutum
  unsure (1)..(131): unsure at all Xaa locations
  Clone ID: GOSHI-09MAY01-C13995_1.pep
SQCNFIIMNAQKHPLEAVQSEQHDRRLESAPSLALTTNIWLRLTYDIKSEQSGMLVCISIIAKMGPHFTICCRAESPASMDDLPLWMLADRVETFPTKDXPALSFSGQKAAQVEEPDPQVDVTLGASGPAL

SEQ ID NO: 73740 - protein, 75 aa, Gossypium hirsutum
  Clone ID: GOSHI-09MAY01-C13985_1.pep
RPLETVSRATQLHENRTATFSERASMMEVTSSSSTSHSGGDHSDQPEANEDDIWEMVNDLEDPPLGWEQMNWTGV

SEQ ID NO: 73741 - protein, 134 aa, Gossypium hirsutum
  unsure (1)..(134): unsure at all Xaa locations
  Clone ID: GOSHI-09MAY01-C13905_3.pep
MQLVPCAALALFIHPSTSHNLVNRIFWAFCVYLEAVSVLPQLRVMQNTKIVEPFTAHYVFALGVARFLSCAHWVLQVLDSRGHLLVALGYGLWPSMVLIXSEIVQTFILADFCYYYIKSVFGGQLVLRLPSGVV

SEQ ID NO: 73742 - protein, 269 aa, Gossypium hirsutum
  unsure (1)..(269): unsure at all Xaa locations
  Clone ID: GOSHI-09MAY01-C13905_1.pep
MRTQKRPIHAVSMWVRRQPPKVKAFLAVVSGMAALVLLRVIVHDHDNLFVAAEAVHSIGISVLIYKLTKEKTCAGLSLKSQELTAIFLAVRLYCSFVMEYDIHTLLDLATLATTLWVIYMIRFKLKSSYMEDKDNFAIYYVXLVPCAALALFIHPSTSHNLVNRIFWAFCVYLEAVSVLPQLRVMQNTKIVEPFTAHYVFALGVARFLSCAHWVLQVLDSRGRLLVALGYGLWPSMVLISEIVQTFILADFCYFYIKSLFSVYPLGWSK

SEQ ID NO: 73743 - protein, 102 aa, Gossypium hirsutum
  Clone ID: LIB3825-017-Q1-K6-C1.pep
IPKTGKKNKEDIRTQERPIHAVSMWVRRQPPKVKTFLAVVSGMAALVLLRVIVNDHDNLFVAAEAVHSIGISVLIYKLTKEKTCAGCPLCSTSSVYSSNNFP

SEQ ID NO: 73744 - protein, 66 aa, Gossypium hirsutum
  Clone ID: LIB3189-018-P1-K1-H6.pep
MRVQQRPIRALSMWVRRQPPKVKAFLGVVSGMAALVFFRFIVHDHDNFFDACQAVHSIGIFVLIYK

SEQ ID NO: 73745 - protein, 109 aa, Gossypium hirsutum
  Clone ID: GOSHI-09MAY01-C13925_5.pep
NDYTHWEMYAIGGSANPTINSQGNRYAAPTNPFAKEVTKRVDTAEGQWKSWNWRSEGDLLLNGAYFTPSGAGASASYARASSLGAKSSSMVGAMTSNAGALPCRRGKQC

SEQ ID NO: 73746 - protein, 206 aa, Gossypium hirsutum
  unsure (1)..(206): unsure at all Xaa locations
  Clone ID: GOSHI-09MAY01-C13925_3.pep
PRVRPRVRPRFRQRVRVNVHMVNGACITIQFVTNVIIHGLHIHDCKPTGNAMVRSSPSHFGWRTMADGDAISIFGSSHIWVDHNSLSNCADGLVDAVMGSTAPPVPNNHMTHHFVVMLLGHSGSYTRDKQVQVTIAYNHFGEGLIQRMPRCRHGYFHVVNNDYTHWXEMYAIGGSANPTSLLFFYSLFDYFIISIMNYDVFLFVLF

SEQ ID NO: 73747 - protein, 247 aa, Gossypium hirsutum
  unsure (1)..(247): unsure at all Xaa locations
  Clone ID: GOSHI-09MAY01-C13925_2.pep
MAVPMQWAFSSLALLFLFRVGGSIATNTTSRLGDIDPLNEHAVADPEAVALEVETIIDLNIRNLTERRKLGFFSCGTGNPIDDCWRCDPNWHKRRKRLAECGIGFGRNAVGGRDGRFYVVTDHTDDDPVNPKPGTLRHAVIQEPPLWIVFKRDMVIKLKQELLVNSFKTIDGRGVNVHIANGACITIQYVTNVIVHGLHIHDCKPTGNAMVRSSPTHFGWRTMADGDAISIFGSXHVWVDHNSLSNG

SEQ ID NO: 73748 - protein, 447 aa, Gossypium hirsutum
  Clone ID: GOSHI-09MAY01-C13925_1.pep
MAVSNNWAFASLALLFLLLVAAMATVRTGNVSSNVETEKVQSSKNSTMAARSEEVEPLNEHAVPDPEAVAAEVESIIDMNIRNVTERRKLGFFTCGTGNPIDDCWRCDPNWQKNRKRLADCGIGFGRNAIGGRDGRFYVVTDPNDDDPVNPKPGTLRHAVIQDQPLWIVFKKDMVIRLKQELIMNSFKTIDGRGVNVHIANGACITIQYVTNVIIHGLHIHDCKPTGNAMVRSSPSHFGWRTMADGDAISIFGSSHIWVDHNSLSNCADGLVDAVMGSTAITISNNHMTHHNEVMLLGHSDSYTRDKQMQVTIAYNHFGEGLIQRMPRCRHGYFHVVNNDYTHWEMYAIGGSANPTINSQGNRYAAPTNPFAKEVTKRVDTAESHWKSWNWRSEGDLLLNGAYFTPSGAGASASYARASSLGAKSSSMVGSMTSNAGALPCRRGRQC

SEQ ID NO: 73749 - protein, 106 aa, Gossypium hirsutum
  Clone ID: uC-gsflnu33B081d07b1.pep
KKKLKHCLPQSNIHLYYISPVLFSTPSTCFITYFDDVYKFTHCHYIWLVLPAHSSCLSICFIFSTSACFSFNSSNPNQKEIYVLGASCGALSPFSPPYEYFTGSFV

SEQ ID NO: 73750 - protein, 156 aa, Gossypium hirsutum
  Clone ID: GOSHI-09MAY01-C13855_1.pep
MIRLVNVSICVLFISVTGILVKADNAPSPSPKTTPVSPAKAPTTSSSPPITSPSKSPSSSPPSATPASSPSITSPPPATTPTAMPTPSQSPTATPPASSSPPAQSPATPSPAASSPPSMTPVGAPPVAEGPVGTPESSANIPSSSATPAESPAISH

SEQ ID NO: 73751 - protein, 244 aa, Gossypium hirsutum
  Clone ID: GOSHI-09MAY01-C13845_2.pep
LLEHQYHMMIYSVPPKVPMAPIQNGIHPMPVNNLPMGYPVLQQPQFPAAGQPHMDSMGISSCHVVNGVPATSNFQPMRMNSGNDMVMDSNASDVIPAVPPTTAMSSMSEMPLSCTSVASSGSFPFSASDMSGMGVDTSALDSAFTTRVPSSVGLQLGQDNETGNSRDSFRPLDQIQWNFSLTDLTADLSNLGDLGALGNYPGSPFLPSDSEILLDSSEQENIVEEFFVDSVPEQPCFSSDEDKS

SEQ ID NO: 73752 - protein, 243 aa, Gossypium hirsutum
  Clone ID: GOSHI-09MAY01-C13845_1.pep
GRVGGAWADAWADAWADAWADAWVAPIQNGIHPMPVNNLPMGYPMLQPPIPAAGQPHLDSMGISSCHVVNGVPAPSNFQPMRMNSEKDNATDVTPAAPPTTTVSSMSEMPVSPTSVASSGNFPFTASDMSGIGVDTSALDSAFTTDVASSVGLQLGPENGAGNSRDSLRSLDQIQWNFSLTDLTADLSNLGDLGALGNYPGSPFLASDSEILLDSSEQEDIVEEFFVDSVPDQPNSPSEEEKP

SEQ ID NO: 73753 - protein, 119 aa, Gossypium hirsutum
  Clone ID: GOSHI-09MAY01-C13865_1.pep
MQQKSGFLILLLSLIFLPLIFSDARKEAPLGGWSPIKDTKDPHVIKIAEFAVEEYNKQSNGSLKLVKVVKGETQVVAGTNYRLILQAKEGAVDNTYQAVVWEKLWLNLRNLTSFNLVKG

SEQ ID NO: 73754 - protein, 131 aa, Gossypium hirsutum
  Clone ID: GOSHI-09MAY01-C13595_6.pep
MREILHIQGGQCGNQIGAKFWEVICDEHGVDNTGKYNGDSDLQLERINVYYNEASGGRYVPRAVLMDLEPGTMDSVRSGPFGQIFRPDNFVFGQSGAGNNWAKGHYTEGAELIDSVLDVVRKEAENCDCLL

SEQ ID NO: 73755 - protein, 78 aa, Gossypium hirsutum
  Clone ID: GOSHI-09MAY01-C13595_5.pep
RLPLIALAPRTLMQIRPNIGPNYLFRKTQITNEVHHVEKTQLKKTLYQIKREGCNTRTAREVTHPSTTLAQARLTAEF

SEQ ID NO: 73756 - protein, 47 aa, Gossypium hirsutum
  Clone ID: GOSHI-09MAY01-C13595_4.pep
LVSAHASAHASAHAFDHASGSDGIRCISAGMIAPINSCAFYLYKGYP

SEQ ID NO: 73757 - protein, 445 aa, Gossypium hirsutum
  Clone ID: GOSHI-09MAY01-C13595_2.pep
MREILHIQGGQCGNQIGAKFWEVICDEHGIDNTGKYNGDSDLQLERINVYYNEASGGRYVPRAVLMDLEPGTMDSVRSGLFGQIFRPDNFVFGQSGAGNNWAKGHYTEGAELIDSVLDVVRKEAENCDCLQGFQVCHSLGGGTGSGMGTLLISKIREEYPDRMMLTFSVFPSPKVSDTVVEPYNATLSVHQLVENADECMVLDNEALYDICFRTLKLATPTFGDLNHLISATMSGVTCCLRFPGQLNSDLRKLAVNLIPFPRLHFFMVGFAPLTSRGSQQYRALTVPELTQQMWDAKNMMCAADPRHGRYLTACAMFRGKMSTKEVDEQMINVQNKNSSYFVEWIPNNVKSSVCDIPPKGLKMASTFIGNSTSIQEMFRRVSEQFTAMFRRKAFLHWYTGEGMDEMEFTEAESNMNDLVAEYQQYQDATADDEYEEGEEEEEEAA

SEQ ID NO: 73758 - protein, 137 aa, Gossypium hirsutum
  Clone ID: GOSHI-09MAY01-C13595_1.pep
GLSRSDGSFIQGGQCGNQIRANFWEVICDEHGVDNTGKYNGDSDLQLERINVYYNEASGGRYVPRAVLMDLEPGTMDSVRSGPFGQTFRPDNFVFGQSGAGNNWAKGYYTEGAELIDSVLDVVRKVAENCDCLQAYS

SEQ ID NO: 73759 - protein, 132 aa, Gossypium hirsutum
  unsure (1)..(132): unsure at all Xaa locations
  Clone ID: LIB3825-001-Q1-N6-F6.pep
GAAISGANKLQCQQVIEELDVHKRLQLTLELVKKEMEISKIQDSIAKAIEEKISGEQRXYSLNEQLKAIKKELGLETDDKTALSVTQRGQMLLRICKKPWMYFSLVTHGVISKVFFCCFTTTKKEGDFFLLD

SEQ ID NO: 73760 - protein, 148 aa, Gossypium hirsutum
  unsure (1)..(148): unsure at all Xaa locations
  Clone ID: uC-gsronu33B126e10b1.pep
MREILHIQGGQCGNQIGAKFWEVICDEHGVDNTGKYNGDSDLQLERINVYYNEASGGRYVPRAVLMDLEPGTMDSVRSGPFGQIFRPDNFVFGQSGAGNNWAKGHYTEGAELIDSVLDVVRKEAENCDCXAGFQVCHSLGGGTGSGMG

SEQ ID NO: 73761 - protein, 105 aa, Gossypium hirsutum
  unsure (1)..(105): unsure at all Xaa locations
  Clone ID: LIB3197-019-Q1-M1-G7.pep
SLSRSDGSFIQGGQCGNXIRANFWEVICDEHEVDNTGKYNGDSDLQLECINVYYNEASGGRYVPRAVLMDLERYSHGSXPGTMDSVRSGPFGQTFLPDNFIFGQS

SEQ ID NO: 73762 - protein, 49 aa, Gossypium hirsutum
  Clone ID: uC-gsflnu33B068d12b1.pep
LTQQMWDAKNMMCAADPRHDRYLTACAMFRAYDELIRGEPSEVTIKIAD

SEQ ID NO: 73763 - protein, 29 aa, Gossypium hirsutum
  Clone ID: LIB3148-029-Q1-K1-E5.pep
CSLTLTHSCFSCIYDGLITSCLCICLQSL

SEQ ID NO: 73764 - protein, 69 aa, Gossypium hirsutum
  Clone ID: GOSHI-09MAY01-C13585_1.pep
CTSLIPTVHKWKAQGTKGSCGWQHIRHYPCFDGMVQGLKEKTYVAISVVTFYYFFHVMQFTDFNIFSSM

SEQ ID NO: 73765 - protein, 98 aa, Gossypium hirsutum
  Clone ID: GOSHI-09MAY01-C13555_1.pep
MKKEDTVKLISAEGMEFVIDKEAAMVSQTIRNMLTSPGGFAEAEHGEVTFPEISAVILEKICQYFYWSLQYSRGKETEFHIEPELTLELMMAANYLHT

SEQ ID NO: 73766 - protein, 113 aa, Gossypium hirsutum
  unsure (1)..(113): unsure at all Xaa locations
  Clone ID: LIB3828-034-Q6-K6-D3.pep
RGGIESFIDKQTIIFSQTIRNMLTSPGGFADAEHGEITFPEINAVILDKIFQSFHXALKYSKSKDTDFHIEPELTLELMIAANYLHTYPITSFSYYRKYYKSVLLPESNMYVA

SEQ ID NO: 73767 - protein, 83 aa, Gossypium hirsutum
  unsure (1)..(83): unsure at all Xaa locations
  Clone ID: LIB3189-012-P1-K1-F10.pep
EFVIDKEAAMVSQTIRNMLTSXGGFAEAEHGEVTFPEISAVILEKICQYFYWSLQYSRGKETEFHIEPELTLELMMAANYLHT

SEQ ID NO: 73768 - protein, 126 aa, Gossypium hirsutum
  Clone ID: GOSHI-09MAY01-C13545_1.pep
ADSSRRASKNQPNPLPVLAILAKDVGELAVHETKVFSPILKGWHPLAAGIAVATLHSCYANEIKQFISGIMELTPDAVQVLRAADKLEKDLVQIAVEDAVDSEDGGKAIIREMPPYEAETAIANLA

SEQ ID NO: 73769 - protein, 247 aa, Gossypium hirsutum
  Clone ID: GOSHI-09MAY01-C13525_1.pep
MMMSSNNMECSAKAKEEEEITKISLMRSMVETQDPSSKEVDDMTMRRFLRGRDLDVEKASSMFLKYLKWRRSFVPNGFISPSELTHEIQQNKMFLQGSDKKGRPISVLLAARHFQHNGGLDEFKRFIVYIFDKILTRMLPGQDKFIVIGDLEGWGYANCDIRAYLSALSLLQDYYPERLGKMFVVHAPYLFMAAWKVVHPFIDVKTRKKIVFVENKSLKSTLLEEIDESQLPEIYGGTLPLIPIQDS

SEQ ID NO: 73770 - protein, 142 aa, Gossypium hirsutum
  unsure (1)..(142): unsure at all Xaa locations
  Clone ID: LIB3083-053-Q1-L1-A10.pep
AKAKEEEEITKISLMRSMVETQDPSSKAKSXFFCYVKIMIEKLNQKSDKLNFRFLXEVDDMTMRRFLRGRDLDVEKASSMFLKYLKWRRSFVPNGFISPSELTHEIQQNKMFLQGSDKKGRPISVLLAARHFQHNGGLDEFK

SEQ ID NO: 73771 - protein, 123 aa, Gossypium hirsutum
  unsure (1)..(123): unsure at all Xaa locations
  Clone ID: GOSHI-09MAY01-C13425_1.pep
LFVNWEVKDKETDRYINKEMGSFKGHALPGTLFLMVGVWHIWSSVVRFVSNPKSFEVRVWSPVPGFNGKLKHLXLYVVAFGAFIDLWIGPLYSTHLKFFVDGVLNPSHLNDFEHSGMLLMFFL

SEQ ID NO: 73772 - protein, 203 aa, Gossypium hirsutum
  Clone ID: GOSHI-09MAY01-C13715_1.pep
YLSHESKIIQIFDFETDWKDEEEDRTLLSEPSLALPIVDDVFCNKSSSKFWEVELPAPVFDESIPRFTVVDVSCNKSSSKLSKLEALSEPMLEGFSELKLEVSRSLVSLKELRSISNLASGAAASNFGTFLVRRSSEIQIVGCTTFTGFAVLTGNRNTLNFSHQIQTAVADTIASMALLPGKSFGVDPSVIFAASFRSGAACI

SEQ ID NO: 73773 - protein, 301 aa, Gossypium hirsutum
  unsure (1)..(301): unsure at all Xaa locations
  Clone ID: GOSHI-09MAY01-C13195_2.pep
MGKTEQNSVLLIPIFFFLLTISLPVSVYAKKPVAXPRKEDVPHIKCQVCEKIASQLVQQVQSKQTQISPKKISEYQIIEIAENVCNLKKEEADWILKIDIVEQGDKLELVEQNAEGICNTECKTIERTCQEVMGYSDTDVAEYIYTSKPDVESLTNYLCKDLTKACKTKPPPLPKDRTPGEPFVPKPTKEAEMEKMLRSMEGMPGAPNMQMYSREELMNMKNFGGDADDDEDEDEDQFPSNLGKVLRDKESKQTDWKQKIIKGVKDAGETLKRHATKVSFRVQKWWKGFKAAQSKSGKTEL

SEQ ID NO: 73774 - protein, 200 aa, Gossypium hirsutum
  Clone ID: GOSHI-09MAY01-C13195_1.pep
MGKTEQNSVLLVPIFFFLLTISLPVSVYAKKPVAIPRKEDIPYIKCQVCEKIASQLVQQVQSKQTQISPKKISEYQIIEIAENVCNLKKEEADWILKIDIVEQGDKLELVEQDADRICNIYLFILHITCLEVLGVSDPDVLEYLFPLRNLQALFHGSLLRGSRLRSLVALSLSPPFWCGSDSPWNVCACCSWSFGRLLER

SEQ ID NO: 73775 - protein, 176 aa, Gossypium hirsutum
  unsure (1)..(176): unsure at all Xaa locations
  Clone ID: GOSHI-09MAY01-C13155_1.pep
MSEAKLRSHVPKFGDWDNGDLPYTTYFENARKEKAGIRMNPNDPEENPEALMYTRGGPESNYDGRSVPATADKHHQNAANKDGSSYDHQKSARRQRNTALESENNTGSDRSILHSSHRRRNSGQKNSRPGGSAFSASVSDNXRTGNHPLDGNKGTTSVPKFGEWDETDPTSGERFT

SEQ ID NO: 73776 - protein, 263 aa, Gossypium hirsutum
  Clone ID: GOSHI-09MAY01-C13065_1.pep
MVGVFRLVRGYPGPSGFGSASTAQEVTEGIDGTNLTALVTGGASGIGLETSRVLALRGVHVIIGARNMKAANEAKNKIVRENTRARIDVLELDLCSTSSIRSFADNFIALHLPLNILINNAGIMFCPFQLSQDGIEVQFATNHIGHFLLTNLLLDTMKNTVKATGIQGRIVNLSSIAHHYCYNKGIRFHKINHKQGYSEKRAYGQSKLANILHANELSRRLQEEGVNITVNSVHPGLIMTPLFRHSAALMKPLKFSSFFLWKN

SEQ ID NO: 73777 - protein, 110 aa, Gossypium hirsutum
  Clone ID: GOSHI-09MAY01-C13005_1.pep
MEIQAPHPITKSSDPEKHDATSGGNHDVEDDEISPIEQVRLTVTNTDDPTLPVWTFRMWFLGLFSCALLSFLNQFFSYRTEPLIITQITVQVSTLPIGHFMASVLPKTQF

SEQ ID NO: 73778 - protein, 70 aa, Gossypium hirsutum
  Clone ID: GOSHI-09MAY01-C13025_1.pep
SINTLPPITIEEVFRHIGPLYSGCGNNNTLFCLLSALFFNYPIIQLYLSSHPKKITCFFPTVRNEIKLKL

SEQ ID NO: 73779 - protein, 150 aa, Gossypium hirsutum
  Clone ID: GOSHI-09MAY01-C13335_1.pep
MLPLPLKLVRQAITHHPLLLSQTTHHRRRRSRRHDHHHRDLDEEEDDDSENDACNSKPSSYNFYHHSSKPTKPKSKTPFLFFLPTRELIGDTYRLANIAREMGMDLYPTPSLSHIIFSFSSSPPSPSSSSSISSASSSSASSSALLYLLL

SEQ ID NO: 73780 - protein, 107 aa, Gossypium hirsutum
  Clone ID: GOSHI-09MAY01-C13285_1.pep
FTQIFQVSKSILHFRLLWLNQKKNKSNHNSFFNNSINQSTKHDDNQTRKPKNSFLVKERGKRTIFRIKLGAAGNIFLSYCCFFIQNHWNSSWSWNWNLSHGILPFYL

SEQ ID NO: 73781 - protein, 102 aa, Gossypium hirsutum
  Clone ID: LIB3189-007-P1-K1-F8.pep
KKKKLYSTNSIGSTNKRYTKSTHNSFFNNSINQSTKHDDNQTRKPKNSFLVKERGKRTIFRIKLEMPNYIFLSFCRFFIQNHWHSSWSWNWNLSHGILPFYL

SEQ ID NO: 73782 - protein, 117 aa, Gossypium hirsutum
  Clone ID: GOSHI-09MAY01-C13255_3.pep
VSIQGQAICSSYAMYGLCKYGPTCRFDHPYMGCPYNYGLSVPLSVLDTSLLPYQRMSPTAHLSEAPLPSKLSDLAWNTDSVSKKHQNSEIKNSDDPPPQQVTSPHSLQGSSKTSHDD

SEQ ID NO: 73783 - protein, 174 aa, Gossypium hirsutum
  Clone ID: GOSHI-09MAY01-C13255_2.pep
LSVPHPPMPDNRQIQNNVVSNQSADSIEEAILRLKINDNNQEVGVSKSVSYPDRPGEPDCSYYLRTGSCGYGSNCRFNHPAYDAQAGQYREELPERVGQPDCGYFLKTGTCKYGSTCKYHHPKDRNGAGPVTFNTLGLPMRQDEKSCPYFMRTGSCKFGVACKFHHPSLLQLGL

SEQ ID NO: 73784 - protein, 450 aa, Gossypium hirsutum
  unsure (1)..(450): unsure at all Xaa locations
  Clone ID: GOSHI-09MAY01-C13255_1.pep
ETVLQNSVLPSPMPDNRQVQNNAVSNETADKIEEAIMRLKINDNNQEVGVSRSASYPDRPGEPDCSYFLRTGSCGYGSNCRFNHPVYDAQSGQYREELPERIGQPDCGYFLKTGTCKYGSTCKYHHPKDRNGAGPVTFNILGLPMRQEEKSCPYYMRTGSCKFGVACKFHHPQPASPGAGLPANAVGSSILPPSGVPYVGGLPAWSLPRPPLVSGPRVQTQSYMPVVVSPSQNTIPAHGWSTYMGNMSPVSSAGILGSNFAYNLMNPAESGSTEQMPLLINFXSNFPERPDQPECRYYMNTGTCKYGSDCKYHHPKERIANSAMSSVGPLGLPSRPGQPVCSSYAMYGLCKHGPTCRFDHPYKGYPYNYALSYPLSMFDTSLLTYQRMTPPPNLSEAPLPSRVPDWARNTDPASKKHQNLETKSSDDSSEQVVSPPHSLQSSSKTSHDQN

SEQ ID NO: 73785 - protein, 118 aa, Gossypium hirsutum
  Clone ID: LIB3825-017-Q1-N6-D10.pep
NYGRVGLDRERPPLCFFAFALQPCTCIVFTTNNKRKIAFLPPSILLIANIQTTYIDSAGSQVKGVQEVHIMKVSFEGFEFEQKESKLKEINKNDILNQFQSSCEVFEEPCKECGDVTC

SEQ ID NO: 73786 - protein, 152 aa, Gossypium hirsutum
  Clone ID: GOSHI-09MAY01-C13275_1.pep
KLEAPKKKKTMGRSISCFKIITCGTDSADKNDDVIDVPQDKRSSDKKGWSFRKRSERHRVLSNTVVQEASTGLEESPETASYVQQSDVSVAPEKTSTVQYTEEKLQSVAPKDYVEEKSQLLTQEDLKVPEPVVAATNEAKDDSNVDESVCVV

SEQ ID NO: 73787 - protein, 102 aa, Gossypium hirsutum
  Clone ID: GOSHI-09MAY01-C13215_4.pep
FPRLVLKADNCLSHYREEILDTNKKGDKKGTLSNVPGLWPKVISNKTTYHQITIIIYSQLLKTPLGPSFMLSLPLALLHPTFGSMGLMGMESPPLPSLLLGH

SEQ ID NO: 73788 - protein, 79 aa, Gossypium hirsutum
  Clone ID: GOSHI-09MAY01-C13215_3.pep
MDGHNLEDSKQSTVDMSVFVQNLLQQMQSRFQTMSESIITKIDEMGDRINELEQSINDLKAEMGMEGSPSSLAPPKHKS

SEQ ID NO: 73789 - protein, 89 aa, Gossypium hirsutum
  Clone ID: GOSHI-09MAY01-C13215_2.pep
MDGQNSDDSKQSTADMTVFVQNLLQQMQSRFQTMSDSIITKIDDMGNRINELEQSINDLKAEMGVEGTSSPLDPSKQKSDEAKQDEGSA

SEQ ID NO: 73790 - protein, 81 aa, Gossypium hirsutum
  Clone ID: GOSHI-09MAY01-C13215_1.pep
RLLSFLPHRQVLNAQFWEAIFSFSAELSWYTFSLDGHNLEDSKQSTADMSVFVQNLLQQMQSRFQTMSESIITKNILFVYL

SEQ ID NO: 73791 - protein, 49 aa, Gossypium hirsutum
  Clone ID: LIB3146-014-Q1-K1-C3.pep
MDGQSSDDSKQSTADMTVFVQNLLQQMQSRFQTMSDSIITKNILSHVLS

SEQ ID NO: 73792 - protein, 65 aa, Gossypium hirsutum
  Clone ID: LIB3189-006-P1-K1-G9.pep
MDGHNLEDSKQSTADMSVFVQNLLQHMQFRFQTMLFSIISKSVLLVDRINDLEQSINDLKAEMGL

SEQ ID NO: 73793 - protein, 59 aa, Gossypium hirsutum
  Clone ID: uC-gsflnu33B008b10b1.pep
MDGQNSDDSKQSTADMTVFVQNLLQQMQSRFQTMSDSIITKIDDMGNRINELEQSINDL

SEQ ID NO: 73794 - protein, 191 aa, Gossypium hirsutum
  unsure (1)..(191): unsure at all Xaa locations
  Clone ID: GOSHI-09MAY01-C8986_1.pep
PVSVLETGSACSSAKPAPIRAKLSFLVKRDRSKRRRASTFNLQFTLPFISSTGSTSLVGSESESESHLTEKSAKKRXKKKNLTWLSGSCEIDKSSSEETAVVRKCTHCEVTKTPQWREGPKGPKTLCNACGVRYRSGRLFPEYRPAASPTFVPSLHSNSHKKVIEMRKQCQAAEVGNTIYGVNSTRNRNAV

SEQ ID NO: 73795 - protein, 122 aa, Gossypium hirsutum
  Clone ID: GOSHI-09MAY01-C8886_1.pep
SQLWWKTDFFLYIKMRRNCNLELRLLPSSYPSDSHDMMEARIESPETQQQQLTIFYNGRVCVSDVTELQAKAILILANRERDERMKSPTGCEPVSPTLKSQVNSPNTSLSMKRSLQRFLQKR

SEQ ID NO: 73796 - protein, 267 aa, Gossypium hirsutum
  Clone ID: GOSHI-09MAY01-C8846_1.pep
ARSRSTTTSAFFFLCLYSSFYLTASTTPLFPKDALPTKSGYLPVNHATGSAIFYAFYEAQTPTSPLSKTPLLIWLQGGPGCSSMIGNLFELGPWRVVSSHMKNAHNLTLERNPGSWNRLFGLLFLDNPIGTGFSIASTPQEIPRDQLSVAKHLFAAITGFTSLDPVVKDRPIYITGESYAGKYVPAIGYYILKKNPQLPVSRRVNFRGVAIGDGLTDPVTQVTTHADNAYYCGLVNERQKGELEEAQREAVELVKMGNWSEASYARS

SEQ ID NO: 73797 - protein, 171 aa, Gossypium hirsutum
  Clone ID: GOSHI-09MAY01-C8816_1.pep
MSKPIEHDYIGLSEQQLPSMEKSSDKKDGLHLKDTELRLGLPGSESPEREDHDQNVLSLKSFVSGAKRGFSDALDGGGNWVFSGGSGGGTEGLFSPRPARKNNGGKDLSGSDSGSVLKDGAARKPSVGQEKKPQVAATSSHGNGNIAPASKAQVVGWPPIRSFRKNTMASH

SEQ ID NO: 73798 - protein, 118 aa, Gossypium hirsutum
  unsure (1)..(118): unsure at all Xaa locations
  Clone ID: GOSHI-09MAY01-C8516_2.pep
WNMYYIVFFEDHIPIRVFRNCFDLGVRFPFNQPMKIYSXLWNADDWATRGGLEKTDWSKAPFITADCVGSATCSLFTTIAAIGRGTPQCLPSARNTDTLDPRPPPPSPCSPLIFFTTI

SEQ ID NO: 73799 - protein, 294 aa, Gossypium hirsutum
  Clone ID: GOSHI-09MAY01-C8516_1.pep
MGSPPLWVLLLGVLFMASGTIAAPPKKPVDVPFSRNYMPTWAFDHIKYFNGGSEIQLHLDKYTGTGFQSKGSYLFGHFSMQIKLVPGDSAGTVTAFYLSSQNSEHDEIDFEFLGNRTGQPYILQTNVFTGGKGDREQRIYLWFDPTKEYHSYSVLWNMYQIVFFVDDIPIRVFKNCKDLGVRFPFNQPMKIYSSLWNADDWATRGGLEKTDWSKAPFIAAYKSFHIDGCESSVEAKFCATQGKRWWDQKAFQDLDAYQWRRLRWVRNKFTIYNYCSDRVRYPTMSPECKRDRDA

SEQ ID NO: 73800 - protein, 114 aa, Gossypium hirsutum
  Clone ID: LIB3145-014-Q1-K1-H11.pep
SSQNSEHDEIDFEFLGNRTGQGYILQTNVFTGGKGDREQRIYLWFDPTKEYHSYSVLWNMYQIVFFVDDIPIRVFKNCKDLGVRFPFNQPMKIYSSLWNADDWATRGGLEKTDW

SEQ ID NO: 73801 - protein, 77 aa, Gossypium hirsutum
  Clone ID: uC-gsronu33B014a11b1.pep
SCFGDDIPMRVSRNCKDLGVRFPFNQPMKIYSSLWNADDWATRGGLEKTDWSKAPFIATYKSFHIDGCESLVEAKFC

SEQ ID NO: 73802 - protein, 62 aa, Gossypium hirsutum
  Clone ID: uC-gsronu33b112a11b1.pep
FIICNFTPKTFVFVIILFKHRLQSLDRGQEHYLVSISIRSLDSISRNKSYSWGAGGVSSETV

SEQ ID NO: 73803 - protein, 87 aa, Gossypium hirsutum
  Clone ID: GOSHI-09MAY01-C8496_2.pep
MGRGRVQLKRIENKINRQVTFSKRRAGLLKKAHEISILCDAEVALIVFSHKGKLFEYSTDSCMEKILERYERYSYAERQLVATEPES

SEQ ID NO: 73804 - protein, 101 aa, Gossypium hirsutum
  unsure (1)..(101): unsure at all Xaa locations
  Clone ID: GOSHI-09MAY01-C8496_1.pep
KKKLGRGRVQLKRGENKINRRVTFSKRRAGLLKKAHEISILXTAEVPLVVFSHKGKLFEYSTDSWYFPPSFWVFLFFVKSILQGFEKQRYSYFCFLALKLK

SEQ ID NO: 73805 - protein, 113 aa, Gossypium hirsutum
  Clone ID: GOSHI-09MAY01-C8486_1.pep
IGEKEMDLSFRRGEAKGSVVAGSVWETRMKSDEVKDGIKVFNAGTITEENSNGVGGTKRLSLKKGQPVVGGVGMRKTWKNESFEGLEKNPIQIAKGKAEEQCKELSVSVGGIK

SEQ ID NO: 73806 - protein, 172 aa, Gossypium hirsutum
  Clone ID: GOSHI-09MAY01-C8476_2.pep
PRVRPVSSARIRRRIPLLGAFCVLGLGFPSLCSILPSSSYLKTSCPQSPHFVHIERSKFSTQSADKTVQAVKMEGNSNIVPSIVVYVTVPNREAGRKLAGSIVKEKLAACVNIVPGLESVYLWEGKINSDPEEMLIIKTRQSLLEALTEHVKANHEYDVPEVIALPITGGSP

SEQ ID NO: 73807 - protein, 179 aa, Gossypium hirsutum
  unsure (1)..(179): unsure at all Xaa locations
  Clone ID: GOSHI-09MAY01-C8476_1.pep
ASNLVSSATIRRRIPLLGAFCVLGLXVSILPSSSYLKTSCPQSSHFVHIERSKFSTQSADKTVQAVKMEGNSNIVPSIVVYVTVPNREAGRKLAGSIVKEKLAACVNIVPGLESVYLWEGKINSDPEEMLIIKTRQSLLEALTEHVKANHEYDVPEVIALPITGGSPQYLEWLKNSTRD

SEQ ID NO: 73808 - protein, 166 aa, Gossypium hirsutum
  Clone ID: GOSHI-09MAY01-C8466_1.pep
MAAFATAEACDSNTALLASGELRALEPIFKIYGQRRSFSGPIVTLKVFEDNVLVRQLLETRGEGRVLVIDGGGSKRCALVGGNLAQSAQNMGWSGIVVNGCIRDVDEINACDIGVRALGSNPLKSNKKAIGEKHAPISIAGTLIRDGEWLYADSDGILISKMELSI

SEQ ID NO: 73809 - protein, 59 aa, Gossypium hirsutum
  Clone ID: LIB3829-007-Q6-K6-F5.pep
MPRRKTYMAAFATAEACDSNTALLASGELRALEPIFKIYGQRRSFSGPIVTLKVFEDNV

SEQ ID NO: 73810 - protein, 132 aa, Gossypium hirsutum
  unsure (1)..(132): unsure at all Xaa locations
  Clone ID: GOSHI-09MAY01-C8796_1.pep
PPNAKDLSTIWVFYKLSMLNRVAXLVKTGVHGRVFSSDSGXPLPGLITINGINYTAKTRGTLADYHRLLVPGERYEAMATVPGSKSKATHIWLEKDEATNVDFILDPELSSDGTLLRSICDCGRKSRLLSKG

SEQ ID NO: 73811 - protein, 130 aa, Gossypium hirsutum
  Clone ID: GOSHI-09MAY01-C8746_1.pep
MGFQALVKLALICFHSLAWPLFALGYPLRASIQAIEANSNTDTKKLVTYWIIFSLISLFEHAFMGILQWLPFWPYMKLTIVCWMMIPHFDGAFYVYNRFVHPCLYMDLPTIINWFKKQQDLFLKDNFLLK

SEQ ID NO: 73812 - protein, 464 aa, Gossypium hirsutum
  unsure (1)..(464): unsure at all Xaa locations
  Clone ID: GOSHI-09MAY01-C8776_1.pep
NKSDPCGGRYIYVHKLPPRFNEDMLKECRSLSLWTNMCKFTSNKGLGPPLENVEGVFENTGWYATNQFAVDVIFSNRMKQYECLTNDSSIAAAIFVPFYAGFDIARYLCPLVRSTRDAASLDLVDWLMKRPEWGIMGGKDHFLVAGRITWDFRRLSDEESDWGNKLLFLPAARNMSMLVVESSPWNANDFGIPYPTYFHPAKDEEVFVWQDRMRNLERKWLFSFAGAPRPGNPKSIRGQIIDQCRQSKVCKLLECDFGESKCHSPSSIMQMFQSSLFCLQPQGDSYTRRSAFDSMLAGCIPVFFHPGSAYTQYTWHLPKNYTTYSVFIPEDDIRKRNVSIEERLSQISPEQVKIMREAVINLIPRLIYADPRSKLETLRDAFDVAVHAVINKVTKLRRNIIQGRSEYDNFVEENSWKARLFAEGQREVGAHEWDPFFXKPKDEQRDQSAEAAKNSWKXEQRDQS

SEQ ID NO: 73813 - protein, 144 aa, Gossypium hirsutum
  unsure (1)..(144): unsure at all Xaa locations
  Clone ID: GOSHI-09MAY01-C8726_1.pep
MHARTDSQVTSLAPSSPTRSPRRPVYYVQSPSRDSHDGEKTTTSFHSTPVISPMGSPPHSHSSMGRHSRESSSSRFSGSLKPGSRKISPNDAPLRGAHRKGHKQWKECDVIEEEGLLEDEXRELGLPRRCYVLAFLXGFFLLFS

SEQ ID NO: 73814 - protein, 122 aa, Gossypium hirsutum
  Clone ID: LIB3166-030-P1-K1-E12.pep
HLLKSGWKPPQAKWGVQAWPNIPTRSPRRPVYYVQSPSRDSHDGEKTTTSFHSTPVISPMGSPPHSHSSMGRHSRESSSSSFSGSLKPGSRKISPNDAPLRGAHRKGHKQWKECDVIEEEGL

SEQ ID NO: 73815 - protein, 235 aa, Gossypium hirsutum
  unsure (1)..(235): unsure at all Xaa locations
  Clone ID: GOSHI-09MAY01-C8686_1.pep
AICDKLHEPVRIAIVGKYTGLPDTXLSILKALLHASVARGKKLIVDWVPASDLEDMTEIENLDAYKAAWKLLKSADGVLVPGGFGDRGVQGKILAAKLARENRIPFLGICLGMQIAVIEFARSVLGLKECKWHLSSIPSTSKSLXLLFMPEGSKTHKGGTMRXGSRRTYFQVSDCKSVKLYGNRGFIDERHMHRYEVNPDMEHALKCRLSSLQGQLVTLGDMNTGLLQHCVILPI

SEQ ID NO: 73816 - protein, 64 aa, Gossypium hirsutum
  Clone ID: GOSHI-09MAY01-C8656_1.pep
LTVITPPESGRLYKSSLILGVRILNSLSYTLFPSIDSILAFLFRLIYKAIPALLNLKSKTEKQI

SEQ ID NO: 73817 - protein, 342 aa, Gossypium hirsutum
  unsure (1)..(342): unsure at all Xaa locations
  Clone ID: GOSHI-09MAY01-C8606_3.pep
AKQAQVFGLQTLFCIPSANGVXELGSTELITQSSEIMNKVRVLFNFNIEIEAGSWCMSNNTADQGENDPSSLWISDPHAGVEFKESSNTTTTTNHTSNQNQQTQKSIQFCDNRSSSSLTENPSSIPAGNHHQQQQSHPQGQSLCLNFSDYGFDESSSVRNGNSSSHLLKPESGEILNFGESKRSGNGNLFTGNSPFAVENKKRSPNSRGSNEEAMLSFTSGVILPSSGVVKSSGGAGDSXHSDLEASVVKEADSSRVVEPEKRPRKRGRKPANGREEPLNHVEAERXRREKLNQKFYALRAVVPNVSKMDKASLLGDAISYINELKSKLQSADLEKEEMQSH

SEQ ID NO: 73818 - protein, 154 aa, Gossypium hirsutum
  Clone ID: GOSHI-09MAY01-C8606_2.pep
MSIQFCDNRSSSSLTENPSSIPAGNHHQQQQSHQQGQSLCLNFSDYGFDESSSVRNGNSSSHLLKPESGEILNFGESKRSGNGNLFTGNSPFAVENKKRSPNSRGSNGEAMLSFTLRVILPSSGAVESTGGCRKKVVESFGFCFVDFFCFTFSY

SEQ ID NO: 73819 - protein, 83 aa, Gossypium hirsutum
  unsure (1)..(83): unsure at all Xaa locations
  Clone ID: GOSHI-09MAY01-C8606_1.pep
CEEWELSSHLLKPEAVENKKRSPNSKGCFEEAMLSFTSGVILPSSGVVKSSGGXGDSDHSDLEASVVKEADSSRVVEPEKRPR

SEQ ID NO: 73820 - protein, 119 aa, Gossypium hirsutum
  unsure (1)..(119): unsure at all Xaa locations
  Clone ID: uC-gsflnu33B074c06b1.pep
MEVLKAAWCLPKLVTGLVVLPRSVTVLIMLRVARGSNEEAMLSFTSGVILPSSGVVKSSGGAGDSDHSDLEASVVKEADSSRVVEPEKRPXKRGRKPANGRKEPFNHGEAEPXRREKLN

SEQ ID NO: 73821 - protein, 44 aa, Gossypium hirsutum
  Clone ID: LIB3166-003-P1-K1-H5.pep
GNTLTPPPPPIILPTIISILRSQFSFCDNHNSNSLTENPSSIPA

SEQ ID NO: 73822 - protein, 157 aa, Gossypium hirsutum
  Clone ID: GOSHI-09MAY01-C8636_1.pep
MAKFCSCFLLCCFLWIHIPTWAQSRQPSYAEQQETDRVTNLPGQPPVKFRHYAGYVKLRPQDSKALFYWFFEAQDGVSDKPLVLWLNGGPGCSSVAYGAAQELGPFLIRSNGTRLTFNKFSWNKVANILFLEAPVGVGFSYTNNSQDLHKLGDQVTA

SEQ ID NO: 73823 - protein, 115 aa, Gossypium hirsutum
  Clone ID: GOSHI-09MAY01-C8196_1.pep
MEGVKLDRWGYEVKTSSDSCISVINAYYHQVLSYGRNRKVILEAPVLDKDCVLANILAAHFLSSSDPSKAPSLIEAANAGIEQASSYEKAVFEAVNYLISQNRDDDVAVELHSKL

SEQ ID NO: 73824 - protein, 144 aa, Gossypium hirsutum
  Clone ID: GOSHI-09MAY01-C8166_1.pep
MAQRSRVPKFGNWESEGNVPYTAYFDKARQGRNGGKIVNPNDPQESPELHQDYGAPTRAPPASRPKPESDEPIGHGPARRGHERGRSREEGDLRQYANSPARNENVNRRAAGDSTPSRYGRGVSSGESQKRSMRTSIGSENSID

SEQ ID NO: 73825 - protein, 141 aa, Gossypium hirsutum
  Clone ID: GOSHI-09MAY01-C8106_1.pep
GPDPRVRPRVRNTNWKDFFITMLDVYRELIHEGLRIWIFSGDTDAVIPITSTRDRIDALKLATVKPWRAWYDDGQVGGWTQEYEGLKFVSVRGAGHEVPLHRPKQALALFKAFLSGTSMPAPASASAPAHAHASQLLISDS

SEQ ID NO: 73826 - protein, 112 aa, Gossypium hirsutum
  Clone ID: GOSHI-09MAY01-C8136_1.pep
MLLHFSPASSTSPPSPSSFTSNYFLHRLSISRPPYLEFPLKPRTHLFKPTSPPVSYSTKTKLLYPSANRAEFRSYALPGFDFGSVESVLEAAGVLTAIIVVHETGHFLAAYL

SEQ ID NO: 73827 - protein, 353 aa, Gossypium hirsutum
  Clone ID: GOSHI-09MAY01-C8036_1.pep
FFLVRENKDLHFLCHFPYFFNNNKKKNPSFLVAMAFRTLDINVISAKGLKNVNLIDKMDVYAVVSLKGDSSKQKLKTLVHKDCGKTPNWNFPVKFTVDESLAKNNKLSIKFKIMCERIFGDKELGVVNVPVKELLDSPGDGGSMKFVSFQVRKPSGKPEGTLDFSYKFGDKVSEPVGKNKGDDHPHHQPVTAYPAAYVAAGSSSAVPYGGPGAYPPPPQGAGYGYPPPPPHAVAGCGGYPPQGPPPPGYGYPHPPPGYAYPPPPPGAYGYQPVQQPPKKNSKFGLGLGAGLVGGAIGGMLIGDMVSDAADYDGGFDGGFDFMIFLLCILVWGLFMGFWYYKETDKRMYFIPLF

SEQ ID NO: 73828 - protein, 172 aa, Gossypium hirsutum
  Clone ID: GOSHI-09MAY01-C8356_1.pep
MNNLFSGSFSRFRSEEASPDHHVIEMTQSSSTSGGVNLDKFFEDVESIKDELKELERLNHDLSASHERSKTLHNAKAVKELRAKMDADVAMALKKAKLIKVRLEALDRSNASNRSLPGCGPGSSSDRTRTSVVNGLRKKLKDSMESFNGLREKISSEYRETVQRRYFTGTEK

SEQ ID NO: 73829 - protein, 119 aa, Gossypium hirsutum
  Clone ID: GOSHI-09MAY01-C8346_1.pep
AGLNPRTVREYDEAITRVSLGYKSVDEYYSNSCSCHVVQHVRIPLLCVQAANDPIAPIEATPYSDIKDNSNCMLIVTPQGGHLGWVAGDDAPFGAPWTDNVVIEFLEHLQKNASKPESS

SEQ ID NO: 73830 - protein, 270 aa, Gossypium hirsutum
  Clone ID: GOSHI-09MAY01-C8376_1.pep
MAGIVVVFDFDKTIIDRDSDNWVVDELGFTDLFNQLLPTMPWNTLMDTMMKEMHAQGTTIDDIVEVLKRSPIHPRIVPAIKSAHALGCELRIVSDANMFFIETILEHLGVKECFSELNSNPSFVDEEGRLRIFPYHDFTKTSHGCNLCPPNMCKGVIIEGIQAGLEGEKKIIYLGDGSGDYCPSLTLGEGDYVMPRKNFPVWELICRNPMLIKADIHEWSDGEDLERVLLDIINMVSVEHNSAPLFSVDCKLQTISTSNHALPHALPVPQ

SEQ ID NO: 73831 - protein, 136 aa, Gossypium hirsutum
  unsure (1)..(136): unsure at all Xaa locations
  Clone ID: GOSHI-09MAY01-C8316_1.pep
RKQVERHRSDPNMFIGTGTAEHNHPAPTHRNSLAGSTRQKPFTPQTVTAGDSVKPSSSKPADSLSPTASVDEGVAVQSPXVDSREDLVEDEGEDESGMSDTAASDDFFEGLKGLAEIVTRNCFPDNFPAKFDFPWT

SEQ ID NO: 73832 - protein, 196 aa, Gossypium hirsutum
  Clone ID: GOSHI-09MAY01-C8306_1.pep
PRVRLRGVGTDSDSTSIPFFSNYMSTAGNDFSVNPAMTPSSCIDKSGFLQSQENVGQSNPQTRTFVNVYKSGSFGRSLDISAFSNYNELRSELAHMFGLEGQLEDPLRSGWQLVFVDRENDVLLLGDDPWPEFVNSVWCIKILSPQEVQQMGKRGLELLNSVPVQRLSNGSCDDYVSRQDSRNLSSGIASVGSLDY

SEQ ID NO: 73833 - protein, 109 aa, Gossypium hirsutum
  Clone ID: LIB3120-008-Q1-K1-A10.pep
WTCFQVKEIVVIGHSACGGIKGLMSFPYDGTTSTDFIEDWVKIGMPARKKVNAKNRGEPLGLRCTFCEKVIILNLKSLLLNNAVNPDREIITILRGFKTKPDSETGLIK

SEQ ID NO: 73834 - protein, 127 aa, Gossypium hirsutum
  unsure (1)..(127): unsure at all Xaa locations
  Clone ID: LIB3165-028-P1-K1-C5.pep
EKREENPALXGVLARGKSPTCVIVACSDSRVCPSHVLNIQPGEAFVVRNVANMVPPYDQNKYSGTGSAIEYAVLHLKVKEIVVIGHSACGGIKGLMSFPYDGTTSTDFIEDWVKIGMPARKKVNAEN

SEQ ID NO: 73835 - protein, 203 aa, Gossypium hirsutum
  Clone ID: GOSHI-09MAY01-C8206_1.pep
RALSSIGEYKRAEDAHVKSIQLDRSFVEAWAHLTQFYQDLANSKKAFDCLQQVIQIDPRYAKAYHLRGLLLHGMGEHRKAIKDLSVGWSIEDSDIECLYLRASCYHAIGEYADAVKDYDAALDVELDSMEKFVLQCLAFYQKEIALYTASKVNSEFSWFDIDGDIDPLFKEYWCKRSHPKNVCEKVFRQPPLRDSLKKGKAKN

SEQ ID NO: 73836 - protein, 224 aa, Gossypium hirsutum
  Clone ID: GOSHI-09MAY01-C9976_1.pep
PFRKRYTQNILFFSKKRKMSRRFSDQVRVTSENLLEGPNDDGYSWRKYGQKDILEAKYPRTRPRCTYRNTQNCWATKQVQRSDEDPTLFEVTYRGTHTCANGNPAVPSPEKQHKSNSNGLNNTNYQPLQSQDALSEFRAGLRVNTEGLDNKEMAPPFSFASTSFGCIKSENHSFSPSGHSKSDLTELVSANTSATNSPIMDLDFSLDQVELDPNFPFDTPGFFS

SEQ ID NO: 73837 - protein, 231 aa, Gossypium hirsutum
  Clone ID: GOSHI-09MAY01-C9906_1.pep
MLVYETLTLFHAVGKFLHNKRDTENVVALDQNAFRVGEKFSRLPFKMDYPEKILCQAHGQSRPITDFLHENVLDFVSNEAMDDAWAVASYLGDADLLLATSRRTLNRHSEIENVLQSAAASVAVRGVLYGNFHPSPSRWHAIRKPKLWQIEQSSSHNQNEMLRQRFMEDGGSSSFSEVSVIATEYRPVLKWVGYRKARDVETHESEDESVKRMSIDEEESEISDDDDIEDW

SEQ ID NO: 73838 - protein, 54 aa, Gossypium hirsutum
  Clone ID: GOSHI-09MAY01-C9886_4.pep
LLGLQTKTLQEIHPFPLFSQNLLLQAFQLLQYEKHILKKCRFLGALVGFFKDIC

SEQ ID NO: 73839 - protein, 172 aa, Gossypium hirsutum
  unsure (1)..(172): unsure at all Xaa locations
  Clone ID: GOSHI-09MAY01-C9886_2.pep
MAFKALFLLLLATFGLVSTTVASNEVGEKTEIKYAAPVPVKAPIPAPPVKPPTTPAPPFXAPTPAPPTKAPTPPYKPPAPAPPTKAPTPPYKPPAPAPPTKAPTPPYKPPAPAPPTKAPTPPYKPPTPAPAPSVKVPTPPYKPPTSAPXPPTKVPTPAPAPPTKAPTSPYKP

SEQ ID NO: 73840 - protein, 218 aa, Gossypium hirsutum
  unsure (1)..(218): unsure at all Xaa locations
  Clone ID: GOSHI-09MAY01-C9886_1.pep
TKGPTPYKPLTKAPTPPYKPATKAPTPPYKPPAPAPPTKAPTPPYKPPAPAPPTKAPTPPFKPPAPAPPPQAPTPPYKPPTPAPAPPVKAPTPPXYAPTPAPTPPTKAPTPAPAPPTKAPTPPYKPPVPTPPVKPPTTPAPPYKPPSPPLPPVRTKKDCIPLCGQRCKLHSRTNLCLRACMTCCDRCKCVPPGTYGNREMCGKCYTDMRTHRNKHKCP

SEQ ID NO: 73841 - protein, 117 aa, Gossypium hirsutum
  Clone ID: LIB3149-003-P1-K1-F4.pep
MAFKALLLLLLATFLLVSTTGACNEVGEKTEIKYAAPVPVKAPPTKAPTPPYKPPVPTPSVKPPTTSAPPYKPPSPPLPPVRTKKDCIPLCGQRCKLHSRTNLCLRACMTCCDRCKC

SEQ ID NO: 73842 - protein, 81 aa, Gossypium hirsutum
  unsure (1)..(81): unsure at all Xaa locations
  Clone ID: LIB3149-056-Q1-K1-C9.pep
YKSPPPPPPSSPKHPYKYKSPPPPPPSPPKYPYKHPRPXAPTPAPAPPTKAPTPPYKPXVPTPXVKPPTTPAPSYKPPSPP

SEQ ID NO: 73843 - protein, 492 aa, Gossypium hirsutum
  Clone ID: GOSHI-09MAY01-C9856_2.pep
MATSSSSSKLSLFFLFSFLFASTLARNSPSPTTKILDVLASLKQAQHILSFDPQISNGFSKSQPLFVNSSSSSGSGFSIPLHSRGSLRKTHHVDYKNLVRSRLDRDSARVNTLTTEVLLAVNGVRKTELKPVVTELEPEALSTPVISGTSQGSGEYFTRVGVGNPAKQFYMVLDTGSDVNWIQCEPCTDCYQQSDPIFDPSASSTYSPVTCESRQCSLLRQSACRGGKCLYQVSYGDGSYTVGDFVTETVSLGNSGDINGVALGCGHDNEGLFVGAAGLLGLGGGPLSLTSQIKATSFSYCLVDRDSTGSSTLDFNSGLPADSVIAPLMKSRKVNTFYYIGLTGFSVGGQAVNISPGLFEINESGEGGVIIDCGTAITRLQTQAYNALRDAFVKQTQGLPSASGVALFDTCYDLSSKSSVKVPTVSLHFGEGKSLDLPATNYLIPVDSSGTFCFAFAPTSSSMSIIGNVQQQGTRVSFDLANNRVGLSSHKC

SEQ ID NO: 73844 - protein, 494 aa, Gossypium hirsutum
  Clone ID: GOSHI-09MAY01-C9856_1.pep
MAPPAPNHFLLSFPLFLSFLFTSTLARLSPQTTTTTLDVSSSLSQAQHILSFDPQSLKAFAQTQTQPLFFNSSTSAAVFSVPLHSRGSIHKTHHTDYKALVLSRLERDSARVDSLSTKLLLALNGVKKSQLRPLPTQIQAEALSTPIISGTSQGSGEYFSRVGVGKPAKQFYMVLDTGSDINWIQCEPCNECYQQSDPIFNPSGSSTYSPVTCESKQCSSLEVSACRSGKCLYQVSYGDGSYTVGDFVTETVSFGNSGNMNGVALGCGHDNEGLFVGAAGLLGLGGGPLSLTSQIKATSFSYCLVDRDSAGSSTLDFNSGLPADSVVAPLIRSRKVDTFYYVGLTGLSVGGQPVQLPPGFFELEQSGNGGVIVDCGTAITRLQAEAYNALRDAFVKLSPDLPTTGGVALFDTCYDLSSRTSVRVPSVAFHFSGGMSLDLPAKNYLIPVDSSGTYCLAFAPTTSSLSIIGNVQQQGTRVSFDLANNKVGFSPHKC

SEQ ID NO: 73845 - protein, 91 aa, Gossypium hirsutum
  unsure (1)..(91): unsure at all Xaa locations
  Clone ID: uC-gsronu33B143d03b1.pep
TYPRELYEINETGEGGVIIDCGTAITRLQTQAYNALRDAIEKQTQGLPSASGEALGDTXIRLXTKSTVKVPTXVAFHLGGGKTLDIPATNT

SEQ ID NO: 73846 - protein, 69 aa, Gossypium hirsutum
  Clone ID: LIB3146-042-Q1-K1-G2.pep
NLIRPRVMHARVCNNYSIRLDSFHCPFKFQQLYYIMTLNLPHGESKSIQRRVIFINRPRTTLLLPHCFS

SEQ ID NO: 73847 - protein, 376 aa, Gossypium hirsutum
  unsure (1)..(376): unsure at all Xaa locations
  Clone ID: GOSHI-09MAY01-C9806_1.pep
TSFLAFKEEVAKEFGIPLQYQRFWIWAKRQNHTYRPNRPLTPQEEAQSVGQLREVSNKAHNAELKLFLEVECGQDLHPIPPPDKTRDDILLFFKLYDPEKGELRYVGRLLVKLSGKPIDYIAKLNQMAGFSPDEEIELYEEIKFEPCVMCEHLDKRCSFRLSQIEDGDIICFQKSSPIQSEEACRCPDVPSFLEYVHNRQIVRFRSLXRPEDDDFCLELSKIHTYXDVVERVAYKIGLDDPSKIRLTSHNCYSQQPKPQPIKYRGVEPLSEMLVHYNQTSDILYYEVLDIPLPELQGLKNLKVAFHHATKEEVVIHNIRLPKQSTVGDVIDELKTKVELSHPNAELRLLEVFYHKIYKIFPPSEKIENINDQYWTL

SEQ ID NO: 73848 - protein, 195 aa, Gossypium hirsutum
  Clone ID: GOSHI-09MAY01-C9596_2.pep
MDLRALKSSVRELTMQNTHHVFDDSLVMNVMNGAVAGEDFSIDCFLDFNNGEFEEGSVEEEEKNSVSTSYQQRVADDDSNSNSTSFTLSVPDDEIAGLEWVSHFVDESVPEIPLPCPVFKQETDNHAGTRFEAETGPVFVKTPSLSSSVPSKARSKRSKPTVPTWSVGSLPTSESSSSTASSSSTCSGSSMTSTE

SEQ ID NO: 73849 - protein, 128 aa, Gossypium hirsutum
  Clone ID: LIB3825-005-Q1-K6-D1.pep
DDEIAGLEWVSHFVDDSVPEIPLPCPVFKQETDNHAGTRFEAETGPVFVKTPSLSSSVPSKARSKRSKPTVPTWSVGSLPTSESSSSTASSSSTCSGSSMTSTELANGFGVPPTKKQKKKPVAVQGSG

SEQ ID NO: 73850 - protein, 102 aa, Gossypium hirsutum
  Clone ID: GOSHI-09MAY01-C9526_3.pep
YSNGCMSTGPDVIINNMAHGAPEDEVRHAGDLGNIIANADGVAEATIVDKQMPLSGPNAVVGRAFVVHELEDDLGKGGHELSLTTGNAGGRLACGVVGLTPV

SEQ ID NO: 73851 - protein, 214 aa, Gossypium hirsutum
  Clone ID: GOSHI-09MAY01-C9526_2.pep
MAAHIFTTTPSHLALSFPSSTNPSNPPVLLSSFRGVSLKLPRQSLSLAATIPKKPFSVFAVTKKAVAVLKGNSEVEGVVTLTQENDGPTTVNVRITGLTPGPHGFHLHEYGDTTNGCMSTGAHFNPNNMTHGAPEDEVRHAGDLGNIIANADGVAEATIVDNQIPLSGPNAVVGRAFVVHELEDDLGKGGHELSLTTGNAGGRLACGVVGLTPM

SEQ ID NO: 73852 - protein, 289 aa, Gossypium hirsutum
  Clone ID: GOSHI-09MAY01-C9526_1.pep
MAQGSAAVPSTELLEWPKKDNRRLLHAVYRVGDLDRTIKFYTECFGMKLLRKRDIPEEKYSNAFLGFGPEESHFVMELTYNYGVTSYDIGTGFGHFAIATADVYKMVEDIRAKGGNITREPGPVKGGSSVIAFVKDPDGYIFELIQRASTPEPLCQVMLRVGDLDRSVKFYEKALGMKLVKKVDRPEYKYSIAMMGYAEEHETTVLELTYNYGVTEYTKGNAYAQVAISTDDVYKSGEVVEHVIQELGGKVTRKPGPIPGINTKITSFLDPDGWKTVLVDNEDFLKELK

SEQ ID NO: 73853 - protein, 64 aa, Gossypium hirsutum
  Clone ID: uC-gsronu33B108f07b1.pep
RFHLLFFRLMSMLVLFFVFSIFFLSFFFLCRDAPMDHRNCIIDRFGLYHYQGMTVQVHLFIDLI

SEQ ID NO: 73854 - protein, 132 aa, Gossypium hirsutum
  Clone ID: GOSHI-09MAY01-C9486_2.pep
KKGGRTRTGDNQVVPWSIVANTPPPAPAASSSDDWAGGEREVSRSTNLFSLKRSRGNASDLHSEDDPDRLSSKRRYGYHTVVATRCRAEGGGVSVDSRTMRLSKDQQIKPEGTVQLQSNSRGATSTESLGKN

SEQ ID NO: 73855 - protein, 226 aa, Gossypium hirsutum
  Clone ID: GOSHI-09MAY01-C9486_1.pep
NIYIFFRVACSRRPVKCCELCKLAATTSCESDQASLCWDCDAVVHGAYFLVARHVRCLLCHACQSLTPWRATGSKLGRTVSVCERCIDGGDREESEAENDDDGDGEDDEGDDSDDDVSVGDDVEDGDNQVVPWSTVANTPPPAPSSSSSDNYSGGEREDDPDRLSSKRRYGYHTVVATRCRAEGGGVSVDSRTMRLSKDQQIKPEGTVQLQSNSRGATSTESLGKN

SEQ ID NO: 73856 - protein, 78 aa, Gossypium hirsutum
  Clone ID: LIB3166-014-P1-K1-H9.pep
MKSCELCKLAATTSCESDQASLCWDCDAVFHGAYFLVARHVRCLLCYALQFLTPWRATVSKLGRTCLLLCVVHILLFS

SEQ ID NO: 73857 - protein, 111 aa, Gossypium hirsutum
  unsure (1)..(111): unsure at all Xaa locations
  Clone ID: GOSHI-09MAY01-C9466_1.pep
NMQNLYETAKKXQWLPRLPAVKVQTXLAAAKFDGYCEGELHNATLSGNQHPIRIEITEAAMELGAXKLSFLVNEAIXDTHQKSVQAMKAKMSDLCQRLRMPQGLVEGLKQQ

SEQ ID NO: 73858 - protein, 83 aa, Gossypium hirsutum
  Clone ID: LIB3135-027-Q1-K1-C9.pep
PRVRELIKGLNDGQISTSQHLGELSIFIYTSMHKMLIYMLYTMKLRCGLIFLMELTLFILKCLEDLKIYVQLQGPIAHSKMKI

SEQ ID NO: 73859 - protein, 154 aa, Gossypium hirsutum
  unsure (1)..(154): unsure at all Xaa locations
  Clone ID: GOSHI-09MAY01-C9796_1.pep
MGKKPPGPLVMKELKRRGVTPTSLLEDAKRSIYELNEDXKIGKEMGSSTTRNAVSTEFEKSLSNQRERSMELNSEGLEGLVPRAKLLLTLGGTFFLAFWPLILLTIAFFSALYLYFGPSFIHNGNKTXVSLPQYIDPYELLEDERISETAPRLN

SEQ ID NO: 73860 - protein, 413 aa, Gossypium hirsutum
  unsure (1)..(413): unsure at all Xaa locations
  Clone ID: GOSHI-09MAY01-C9786_1.pep
FTRPTGDNKNTAEAICHEIGVFGPMEDISSKRLTGXKEFMALPDKKAHLRQSGGLLFSRAEPRHKQEIVRLLKEDGEVVAMTGDGVNDAPALKLADIGIAMGIAGTEVAKEASDMVLADDNFSTIVSAVGEGRSIYDNMKAFIRYMISSNIGEVASIFLTAALGIPEGLIPVQLLWVNLVTDGPPATALGFNPPDKDIMKKPPRRSDDSLITAWILFRYLVIGLYVGVATVGVFIIWYTHSSFLCIDLSGDGHTLVTYPQLANWAQCSSWKNFTVSPFTAGNQVFYFENNPCDYFQGGKVKAMTLSLSVLVAIEMFNSLNALSEDGSLLTMPPWVNPWLLLAMSVSFGLHFLILYVPFLAQVFGIVPLSFNEWLLVLAVAFPVILIDEVLKFVGRLGRRMRSSSQRPLKPKTE

SEQ ID NO: 73861 - protein, 489 aa, Gossypium hirsutum
  Clone ID: GOSHI-09MAY01-C9756_1.pep
MEKDCGKEIMEMRECYRKGNTKHVTWRRAQLKGLLSFLAEKEVEIFTALNLDLGKNYVEAFRDEVGLLKKSLNLALKDLRTWMASKEAKLPSIALLSYAELVPEPLGLILVISSWNFPMGLSLEPLIGAIAAGNAVVIKPSELAAASSSLLANTLPNYLDTQAIKVIEGGPAVGQQLLQHKWDKIFFTGSTKVGRIIVSEAAKNLTPVTLKLGGKCPAILDSLSWSWDKEVAINRIIGAKYGSCAGQACISIDYLLVEKPFSSTVVELMKAMIKKMYGDNPRESHSISRIINKHHFLRLRDLFTDQKVKDCIVYGGSMDEGSLFIEPTILVDPPLKSAMMTEEIFGPLRPIITLDKIEDSIDFINSRPKPLPLYAFTKNEVLKERLVSETSSGSVVFNDAIIQFAADTLPFGGIGESGIGKYHGTFSFDTFTHYKAVARRSLLTDFWYRFPPWNNYKLELLENTYNYHYFGLLLVILGLKRSRKTFLVN

SEQ ID NO: 73862 - protein, 169 aa, Gossypium hirsutum
  unsure (1)..(169): unsure at all Xaa locations
  Clone ID: GOSHI-09MAY01-C9716_1.pep
DVLFDPHSGEIYDRDEDHLAXLMMELLGIMPRKIALGGRYSRDFFNRYGDLRHIRRLHFWPLDKVLMEKYNFSEQDAKDMADFLIPILDFAPXEKRPTAAQCLNHPWISSGPQLLQLSTTAPKQHGDDGTSKRERKEKDDREAMEAGVGNIEIDGGSSKPLKETLPKLN

SEQ ID NO: 73863 - protein, 108 aa, Gossypium hirsutum
  unsure (1)..(108): unsure at all Xaa locations
  Clone ID: AI728161.1.pep
DHLALMMELLGIMPRKIALGGHYSRDFFNRYGDLRHIRRLRFWPLNKVLMEKYNFSEQDAKDMADFLIPILDFAPXXRPTAAQCLNHPWIISGLRTYNFPNCSQTVRR

SEQ ID NO: 73864 - protein, 338 aa, Gossypium hirsutum
  Clone ID: GOSHI-09MAY01-C9706_1.pep
SLKKSNNSGPLNRHGDPVKKSSGPQSGGVRASGPQNSGPIPPVLPATGLITSGPISSGPLNSSGAPRKVSGPLESLGSMKVQGSAVVHNQAVNVLGQDDDFSFRRNFPKPIFWALILLFVMGFIAGGFIFAAVHNVILLLVVVVLFGAVAALFAWNSCYGRTAIMGFIAGYPNAELRNAKNGQFVKISGVVTCGNVPLESSFQKVPRCVYTSTPLYEYRGWDSKAANPKHRRFTWGLRLLERRAVDFYISDFQSGLRALVKTGNGAVVTPYVDDSIVIDVNPANETLSPEFIRWLGERNLSSDDRLMRLKERYIKEGSTVSVMGVVQRNDNVLMIVPP

SEQ ID NO: 73865 - protein, 208 aa, Gossypium hirsutum
  Clone ID: GOSHI-09MAY01-C9726_1.pep
NPKILVNTFDALEHEALNAIENFNMVGIGPLIPSSFLNSNGSLDNSLRTDLFQSDSKDYIQWLDSKPKSAVVYVSFGSYAVLTKQQVEEIARALISSRRPFLWVVRNRKDGGEEEKEEDKLTCREELEQFGMVVPWCSQVEVLSHPSLGCFVTHCGWNSTLESLVAGVPMVAFPQWTDQGTSAKLIEDVWGTGVRVSTNEEGMVERDE

SEQ ID NO: 73866 - protein, 105 aa, Gossypium hirsutum
  Clone ID: GOSHI-09MAY01-C9666_1.pep
MGGFKHLVVVKFKEDVVVEEILKGMEKLVSEVDAVKSFEWGQDIESQEMLRQGYTHAFLMTFEKKEDYTAFTSHPSHIEFSATFVTAIDKFVVLDFPSVLAKSPA

SEQ ID NO: 73867 - protein, 663 aa, Gossypium hirsutum
  unsure (1)..(663): unsure at all Xaa locations
  Clone ID: GOSHI-09MAY01-C9196_1.pep
FSSLLLSSLLALGLVLLEIEVPGCCKKGAGGASHEDDLRGVYLVWQDLTVVLPNFGNKPTKRLLQGLSGYAEPGRIMAIMGPSGSGKSTLLDSLAGRLARNVVMTGNILLNGKKKRLEYGAVAYVTQEDVMLGTLTVRETLTYSAHLRLPTTLSKEEVKDIVEGTIMEMGLQDCGDTVIGNWHRRGISGGEKKRLSIALEILTMPKMLFLDEPTSGLDSASAFFVVQSLRNIARDGRTVVSSIHQPSSEVFALFDDLFLLSGGETVYFGEAKMAVQFFAEAGFPCPSRRNPSDHFLRCINSDFDAITATLKGSQRLRDKPTSSDPFMEMATAQIKAALVEKHRDSKYAKMARARSQEISKIEGLEVETNSGSQATWWKQLTTLTKRSFVNMCRDVGYYWARIVIYILVSICVGTVFYDVGYGNTAILARVACGAFITGFMTFMSIGGFPSFIEELKVFNKERLNGYYGVAAYTLSNFLSAFPFLVTISLITGTITFYLVKFRSGFSHYAFFCLNIFFSIAVIESLMMVVASMVPNYLMGIVTGAGIIGILMMTSGFFRLLPDLPKIFWRYPISYINFSSWALQGAYKNDFIGLEFDPLLPRDRKLTGDEIITKYFGVTVDRSKWWDLTAVVVILICYRLIFFIXLKMKEKASPFLQEIYAKKT

SEQ ID NO: 73868 - protein, 267 aa, Gossypium hirsutum
  Clone ID: GOSHI-09MAY01-C9126_1.pep
MASEQYGAVFEESQDDDEEPSSSGNDDVLNGHDEEDEELLEEEEEEDFNSPSLLPQPIAAVVPSASIPAVPLAVPSSTVVTVASVPLRGSTPDSKRQRIDSAVSEKKPPPPQQFDESRRLFQRLWTDEDEIELLKGFLDYTTSKTNSNSSHHHHHDTALFYDLIKSKLQLDFNKNQLVEKLRRLKKKYRNVMNKINSGKEFSFKSPHDQATFEISRKIWSSSVGKVEDNVLDYDENNITPTTTTNINLLDESGEKKNLTPKSAANKR

SEQ ID NO: 73869 - protein, 168 aa, Gossypium hirsutum
  Clone ID: LIB3583-010-P1-K1-D11.pep
LRRLKKKYRNVISKICSGKEFSFKSPHDQATFEISRRIWSDGVSKVEDNVLDDDENNNNNNASLIDESGEKKNLTQKPAATKKRSRNKGVKMEEKRDVNDGIVHMDSNSNDRVNNDNGNVEALGVGSSGGGANTGAAGVIEETVRSCVTPLFKELLGSVMVGGGGYGE

SEQ ID NO: 73870 - protein, 439 aa, Gossypium hirsutum
  Clone ID: GOSHI-09MAY01-C9056_1.pep
MYSSPPAPPSSLYPQVDLSNPDATSSSPSSSSSLYPSLDMKDLAENLFPDDATALHTHQDSAEQLLLKVPGAIVHLIERETSVELACGDLCIVSLLQGGNVVAVFARLGDDIQWPLAKDEPVVKLDASHYFFTLRVPSNGSFEDGKDSNQTEDVLNYGLTIAAKGQEGLLKELDRILETYSCFSAQQVKGIENWNLVDARNVAPEELNTKEKRDLIVGSSMAYWTTLAPNVEDYSGSIAKAIASGSGYVVKGILWCGDVTVDRLKWGNDFLSKRIKSGSTSEISPEALRRMKRVKKLTKMSEKVATGILSGVVKVSGFFTGSIVNSKVGKKFFNLLPGEIVLASLDGFNKVCDAVEVAGRNVMSTTSVVTTGLVSQRYGEKAGKVTNEGLDAAGHAIGTAWAVFKIRKALNPKSVFKPTTLAKAAAQANAAELKSKNNK

SEQ ID NO: 73871 - protein, 93 aa, Gossypium hirsutum
  Clone ID: LIB3829-021-Q6-K6-F10.pep
IENATWLVFLRCFCLYVHLDKVCDAVEVAGRNVMSTTSVVTTGLVSQRYGEKAGKVTNEGLDAAGHAIGTAWAVFKIRKALNPKSVFKPTTLA

SEQ ID NO: 73872 - protein, 204 aa, Gossypium hirsutum
  Clone ID: GOSHI-09MAY01-C9046_2.pep
LRLEEVSDMGYYPLGNPPCGEICVKGKTLFSEYYKNPELTRESFGDGWFHTGDIGQMLPNGIVKVIDRKKNLIKLSQGEYVALEYLENVYGVTPIIDDVWVYGNSFKSMLVAVVVLHEEKAKKWAELNGYTVSLFELCSLSKLQNYVLSELKSTADKNKMRGFEYIKGVILEARAFDMEQDLMTATLKKKRNNLLKYYQAEIDA

SEQ ID NO: 73873 - protein, 94 aa, Gossypium hirsutum
  Clone ID: GOSHI-09MAY01-C9046_1.pep
LASAHASAHAGAHASAELCSLSKLQNYVLSELKFTAEKNKMRGFEYIKGVILEARAFDMERDLVTATLKKKRNNLLKYYQAEIDALYHNLTTKK

SEQ ID NO: 73874 - protein, 171 aa, Gossypium hirsutum
  Clone ID: GOSHI-09MAY01-C9006_1.pep
MSNNGNNSNSSDPDRPVRVYADGIYDLFHFGHARSLEQAKKSFPNTYLLVGCCNDETTHKYKGKTVMTESERYESLRHCKWVDEVIPDAPWVIDQEFLDKHNIDYVAHDSLPYADASGAANDVYEFVKAAGKFKETKRTDGISTSDIIMRIVKDYNQYVLRNLDRGYSRKE

SEQ ID NO: 73875 - protein, 57 aa, Gossypium hirsutum
  Clone ID: GOSHI-09MAY01-C9026_4.pep
ITRLRRVFGDNFGRRWSAYGGNKAQALPTMNVSSLCIPQGDFYTCKIIMKKKKSLLL

SEQ ID NO: 73876 - protein, 243 aa, Gossypium hirsutum
  Clone ID: GOSHI-09MAY01-C9026_3.pep
GKKGYDGAKADIWSCGVILYVLLAGFLPFQDDNLVAMYKKIYRGDFKCPPWFSPEARRLISKLLDPNPKTRIAISKITESSWFKKSIPKTKTTKEEIEFEAFNGEKSSKPETLNACHIISLSEGFDLSPLFEEKKREEKEELRFATTRPASSVISRLEEVAKSGKFSVKKSECRVRLQGQECGRKGKLAIAADIFAVTPSFLVVEVKKDHGDTFEYNQFCSKELRPALKDILWTSPPENSTVA

SEQ ID NO: 73877 - protein, 55 aa, Gossypium hirsutum
  Clone ID: GOSHI-09MAY01-C9026_2.pep
INPDPREENTDLVCTLEIENGTGIRRSLDLCEVGSHCLMMKVIVVIVTVCLCDCF

SEQ ID NO: 73878 - protein, 386 aa, Gossypium hirsutum
  Clone ID: GOSHI-09MAY01-C9026_1.pep
MADKAKTENPSFLHGKYELGRMLGHGTFAKVYHAKNLQTGKNVAMKVVGKEKVIQVGMMEQIKREISVMKMVKHPNIVELHEVMASKSKIYFAMELVRGGELFSKIAKGRLKEDAARVYFQQLVSAVDCGRSRGVYHRDLKPENLLLDEEGNLKVTDFGLSAFTEHLKQDGLLHTTCGTPAYVAPEVIGKKGYDGAKADIWSCGVILYVLLAGFLPFQDDNLVAMYKKIYRGDFKCPPWFSPEARRLISKLLDPNPKTRIAISKITESSWFKKSIPKTKTTKEEIEFEAFNGEKSSKPETLNAFHIISLSEGFDLSPLFEEKKREEKEELRFATTRPASSVISRLEEVAKSGKFSVKKSECKVSLQGQECGESNLLVQLCGTRVLW

SEQ ID NO: 73879 - protein, 49 aa, Gossypium hirsutum
  Clone ID: LIB3148-053-Q1-K1-G7.pep
INPDPREENTDLVCTLEIENGTGIKMFTDSLSLEFDYRLRPCEICIHKA

SEQ ID NO: 73880 - protein, 42 aa, Gossypium hirsutum
  Clone ID: uC-gsronu33B157c10b1.pep
PCVRAFRPEPENPNRHLQDHGIILVQKIYPLRLIQLLMKLNL

SEQ ID NO: 73881 - protein, 260 aa, Gossypium hirsutum
  Clone ID: GOSHI-09MAY01-C9346_2.pep
EDPSIFSLFFSLIFVSLVVFVKDYTFTSFLLKKSFFFACLQTCVLKVNIHCDGCKHKVKKILQKIEGVFKTTIDSEQGKVTVLGNVDPNVLIRKLAKSGKHAEPWGSAKANNNQAHLAHQFKNMQMLDNGNKGGNNNNKNNNQNNNKGGQKGNNNNNNQPKGGQPTPQQLHQHLQQVQQMKGFQDLKLPQLKDMKMGPNPNQLQNNKAVKFAEEEDFSDDDYDDDDLDNDCDLDDDDFDDGDELDDPRHPFHKMKAMMGE

SEQ ID NO: 73882 - protein, 203 aa, Gossypium hirsutum
  Clone ID: GOSHI-09MAY01-C9346_1.pep
DLANLIFKNQKLKANIKRFRRKTRKEAEEHRCQAPEGHRLCVNNCGFLGSPATMNLCSKCYRDFRLKEQQQASSAKSSISTSPSSSSTAVESVSQVPLLTLPEVKGVPLVVSAVAISPVAEQKPQQQQQQQQQQQQQQQQPTRCTVCKKRVGLTGFKCKCGITFCGSHRYPENHGCTFDFKKIGREKIARANPVVKAEKIVRI

SEQ ID NO: 73883 - protein, 91 aa, Gossypium hirsutum
  Clone ID: uC-gsronu33B124e09b1.pep
YASAHASADAWAPVTEQKPQQQQQQQQQPTRCTVCRKRVGLTGFKCKCGITFCGSHRYPENHGCTFDFKKIGREEIARANPVVKAEKIVRI

SEQ ID NO: 73884 - protein, 85 aa, Gossypium hirsutum
  Clone ID: LIB3166-013-P1-K1-C7.pep
WQQRWKQQQQEQQQQQQQQQQQPTRCTVCKKRVGLTGFKCKCGITFCGSHRYPENHGCTFDFKKIGREKIARANPVVKAEKIVRI

SEQ ID NO: 73885 - protein, 192 aa, Gossypium hirsutum
  Clone ID: GOSHI-09MAY01-C9376_1.pep
WKLWKQFEIVLNFLGLVEKFFYLSGRYDIELAVGDAVMENSLLLAIGHIELDLPEPPEKATRPPPQPVDPYSRYGPKAEITHIFRAPEKRPPKELSLAFLGLTFLPLLGFLIGLLRLGVNLKNFPSNAVPATFATLFHVSIGAVLSLYVLFWLKLDLFQTLKLLGFLGVILVLVGHRVLSHLAATSAKLKSA

SEQ ID NO: 73886 - protein, 169 aa, Gossypium hirsutum
  Clone ID: GOSHI-09MAY01-C9366_1.pep
LEHLGLREYFSEIDSNPSFVDEEEKLRIFPYHDFTESSHGCNLCPPNMCKGRVIERIQASLEGKKKIIYLGDGSGDYCPGLKLGEADYMMPRKNYPVWDLICRNPMLIKAEIYEWTDGEELEKVLLQLINMISLEEDDANSSQFIFVDCKLQTMSASKNAFPHALPVPQ

SEQ ID NO: 73887 - protein, 47 aa, Gossypium hirsutum
  Clone ID: GOSHI-09MAY01-C9316_4.pep
YFWGFVIVSDKVQELHVYEMNERDRGSPAYLRLSQKPVNSLGDICPF

SEQ ID NO: 73888 - protein, 178 aa, Gossypium hirsutum
  unsure (1)..(178): unsure at all Xaa locations
  Clone ID: GOSHI-09MAY01-C9316_3.pep
MAASDKVQELHVYEMNERDRGSPAYLRLSQKPVNSLGDIVPFSNKIYRGDMEKRIGITAGMCILIEHKPELKGDRYEAIFSFYFGDYGHIAVQGPYLTYQDSYLAITGGSGIFEGVSGQVRLHQIVFPFKLFYTFYFYGVGVLPAELLCKPVDPRPAVEAVPAAKACXPHPTMANFTN

SEQ ID NO: 73889 - protein, 259 aa, Gossypium hirsutum
  Clone ID: GOSHI-09MAY01-C9316_2.pep
DAWAFFHSKHTLSMSALRSTISSGIIRSTSPTHSLLPAASSFKPIKNPCLPQTHKLFTSNSNTFSAPKRGFTCKSQAIPSDNSAPEKVQELHVYELNERDRGSPAYLRLSQKSVNSLGDLVPFSNKIYRGDLEKRIGITSGICILIEHKPEMKGDRYEAIFSFYFGDYGHIAVQGPYLTYQDTYLAITGGSGIFEGVSGQVRLHQIVFPFKIFYTFYLKGIGELPEELLCKPVDPHPAVEAVPAAKACEPHAAIANFTN

SEQ ID NO: 73890 - protein, 156 aa, Gossypium hirsutum
  Clone ID: GOSHI-09MAY01-C9316_1.pep
MDLRIMGFDSPLLNTLQHMMDLSDDTEKIPNAPSKVYMRDAKAMAATPADIKEYPKSYVFIVDMPGLKSGDIKVQVEDDNMLLISGERKREEEKEGAKYVRMERRVGKFMRKFALPENANADAISAICQDGVLTVTVEKLPPPEPKKPKTIEVKIA

SEQ ID NO: 73891 - protein, 113 aa, Gossypium hirsutum
  Clone ID: LIB3148-033-Q1-K1-G7.pep
FLSKHTLSMSALRSTISSGIIRSTSPTHSLLPAASSFKPIRNPCLPQTHKLFTSNSNTFSAPKRGFTCKSQAIPSDNSAPEKVQELHVYELNERDRGSPAYLRLMSEFYVVLC

SEQ ID NO: 73892 - protein, 50 aa, Gossypium hirsutum
  Clone ID: LIB3149-008-Q1-K1-A7.pep
QELHVYELNERDRGSPAYLRVSQKSVNSLGELVPFSNKGSLPFLFSLNSI

SEQ ID NO: 73893 - protein, 103 aa, Gossypium hirsutum
  Clone ID: GOSHI-09MAY01-C9236_6.pep
PTPATPQPKPTATGWCVPKAGISDAQLQSSLDYACGQGIDCSPIQPGGACFEPNTVASHAAYAMNLYYQSSAKNPWNCDFSQTATLTSQNPSYNNCIYPGGST

SEQ ID NO: 73894 - protein, 341 aa, Gossypium hirsutum
  Clone ID: GOSHI-09MAY01-C9236_5.pep
MATFFFFLLSFLICFHFSSAEPFIGVNYGQVADNLPPPSATAKLLKSTSIEKVRLYGADPAIIKALANTEIGIVIGAANGDIPSLASDPNSAAQWINSNVLPFYPASKIILITVGNEVLTTNDPNLINQLLPAMQNMQNAINGASLGGKIKVSTVHSMAVLGQSDPPSSGLFRPSYQPALKGLLQFHKDNGSPFAINPYPFFAYQSDSRPETLAFCLFQPNAGRVDSGNGIKYMNMFDAQVDSVHSALSAMGFKDVEIMVAETGWPYSGDSNEVGPSIENAKAYNGNLIAHLKSMVGTPLMPGKSVDTYLFALYDEDLKPGPRSERAFGLYKPDLSMAYDV

SEQ ID NO: 73895 - protein, 86 aa, Gossypium hirsutum
  Clone ID: GOSHI-09MAY01-C9236_1.pep
PKAGISDAQLQSSLDYACGQGIDCSPIQPGGACFEPNTIASHAAYAMNLYYQNSAKNPWNCDFSQTATLTSQNPTYSNCIYPGGST

SEQ ID NO: 73896 - protein, 55 aa, Gossypium hirsutum
  Clone ID: LIB3585-065-P1-K2-G6.pep
LDINILPQKKKTDHSKAISKENNFTVKVTSIRYPQPLFNHPFPFSNFNSHFVWLF

SEQ ID NO: 73897 - protein, 75 aa, Gossypium hirsutum
  Clone ID: LIB3829-008-Q6-K6-F11.pep
FTQKRTQTTANPYQRRITLQSKLLCISKIRPTYFIYFSKCSRQGRCNYYKLQSKENFLLEKKKWKLRYYIIEILI

SEQ ID NO: 73898 - protein, 50 aa, Gossypium hirsutum
  unsure (1)..(50): unsure at all Xaa locations
  Clone ID: LIB3148-033-Q1-K1-C4.pep
YFFFFFXXFFFSISKENNLTVRATNIRYPQPLFNHPFPFSNFNSHFVWLF

SEQ ID NO: 73899 - protein, 213 aa, Gossypium hirsutum
  unsure (1)..(213): unsure at all Xaa locations
  Clone ID: uC-gsronu33B004f03b1.pep
CRKRERKKKIKKKNXKNEEKKKDNERMRGRKEKXENKEKRAKRVKYKRXRGRRKKKKREMKKIERMKRKKNKSKKREKKKGRXENKEKKKENRGKEKNKDNVENNGKVYKXKSERKKNKRKERVKIKKKGEEKEKNRNKRKXVKRKEKEIIERKKKGEMKKRNKKXKIRRKKRKKKKKGKRIRKSRRKKRKRREKREEIGTEKGKIKNPKRKI

SEQ ID NO: 73900 - protein, 153 aa, Gossypium hirsutum
  Clone ID: LIB3543-030-Q1-K6-B9.pep
NKQKASVWGVESLLSAMGFKDVQIMVAETGWPYSGDSNEGGPSIENAKAYNGNLIAHLKSMVGTPVMPGKSVDTYLFALYDEDLKPGPGSERAFGLYKSDLSMTYDVGISKSSQTPPTPKTAVTPQPKPTATGWCVPKAGISDAQLQSSLDYA

SEQ ID NO: 73901 - protein, 90 aa, Gossypium hirsutum
  unsure (1)..(90): unsure at all Xaa locations
  Clone ID: LIB3583-033-Q6-K7-H5.pep
MSRILGWPYSGDSNEVGPSIENAKAYNGNLIAHLKSMVGTPLMPGKSVDTYLFALYDEDLKPGPGSERAFGLYKSDLSMTYDVGIXKSSK

SEQ ID NO: 73902 - protein, 53 aa, Gossypium hirsutum
  Clone ID: LIB3149-060-Q1-K1-H9.pep
FNFSSPIIKKKNHILLLACSMYHVFSKCIVLYIVNEFWPFLMPKMLVSYPSFS

SEQ ID NO: 73903 - protein, 124 aa, Gossypium hirsutum
  Clone ID: GOSHI-09MAY01-C9226_1.pep
RTRGQGTTWQIKFKLDCTANETETYKLRLALATAHAAELQVRVNDDGKSPLFSSGQIGKDNTIARHGIHGLYRLYHVGIPGNLLLEGDNTIFLTQPKSTSPFQGIMYDYIRLEGPASSNGNKKA

SEQ ID NO: 73904 - protein, 212 aa, Gossypium hirsutum
  Clone ID: GOSHI-09MAY01-C4976_1.pep
KLSEDELSSLKKQILEGFSPDDAYPFGAPLFMETPRPCSPLAQMEFLAFEEIMPLAAITDDEAFPEGNGSQSGRKASLSLSTLDVLSVNELLDSVLETARQVASFSVSPTPIPYEQMRSQCEALIIGKQQKMSVIHSFKHQQEAKATFEENGKEVLCLPNVKVEFSEDLKLISNEQVHARGQLALCSLEYGQHSFKLPPSSPYDKFLKAAGC

SEQ ID NO: 73905 - protein, 110 aa, Gossypium hirsutum
  Clone ID: GOSHI-09MAY01-C4936_2.pep
MISSVVVLASDLGIDARPFLSNQDTEIEDQDNWHDCSQDFSDEDFSDLEFLQFVCLQGSDKSGNRILRIVGKYFPAPVVSGERLKRYIYHKICSELPEGPFCLVYMHSTV

SEQ ID NO: 73906 - protein, 247 aa, Gossypium hirsutum
  Clone ID: GOSHI-09MAY01-C4936_1.pep
MGSSSNDDFSVVVLASDLGIDARPFLSNQDTEIEDQDNWHDCSQDFSDEDFSDLEFLQFVCLQGSDKSGNRILRIVGKYFPAPVVSGERLKRYIYHKICSELPEGPFCIVYMHSTVQKEDNSPGVTILRWIYEELPPEIKDRLQVIYFIHPGLRSRLVFATLGRFFLSGGLYWKIKYISRLQYLWEDIKKGEVEIPEFVQNHDDVLEHRPLTDYGIEPDPLHLTEVPNTAYSLGRYEERLTSREFMS

SEQ ID NO: 73907 - protein, 337 aa, Gossypium hirsutum
  Clone ID: GOSHI-09MAY01-C4876_1.pep
SGGDGGESTRKKSRLISMLDEVYRSYNQYYQQIQAVVASFEYVAGLGNAAPYANLALKAMSKHFRCLKNAITDQLQFINKPHGQTSPGKDEGPMFGNTERSLYNRAVHNAGFHEHQPVWRPQRGLPERAVTVLRAWLFEHFLHPYPTDTDKLMLAKRTGLSRSQVSNWFINARVRLWKPMVEEIHMLEQAQKNSQKEARNPNKSSDHLSSANSIAPENPSTSFQRAQDTPSKRTRSEPLSDIPLGSEPHNLTYNSLSSHPHVGMGVSMAGGSNGVSLTLGLHQNNGISLSEPFSFNAAQRFGLGLSSEGYVIGGYEAQNRHFGRDVMGGQLLHDFVG

SEQ ID NO: 73908 - protein, 232 aa, Gossypium hirsutum
  Clone ID: GOSHI-09MAY01-C4836_1.pep
MPSLAALTNELFGISTSEVLDAQKSSGGHSSTSAEMDEDTRPSDVSVNQFEARSDMQPPAQPVTTWGMTTVGSPWRPGPETTGTNWGAVHGNTSFHWDDLGQETTNLSWGTGHGTIQENRSSIHSGTSATNPAYFGNQQRYVDTRDQQRYVDPRDQQRYVDPRDQQRYVDTRDRDFHSRGRSSWNRHSSYGGGGPPPNRVGSFRPPPKGQRVCKFYESGYCNRGASCSYWHP

SEQ ID NO: 73909 - protein, 179 aa, Gossypium hirsutum
  Clone ID: GOSHI-09MAY01-C4596_1.pep
MATPSTLCCAILLFLFPLQFMATTTPSCPGDCEPNDADDNDRFHFAQNLEFLEAEFFLYGALGKGLDAFEPEFAKGGPPPIGGRRANLDYLTRRIIEEFGYQEIGHNREIVRRTGGIPRPLIDISSENFAKLFDKAAGYNLDPPFDPYEDPIKYMLAVYAIPYVGLNGYVGTTPLPQKF

SEQ ID NO: 73910 - protein, 113 aa, Gossypium hirsutum
  unsure (1)..(113): unsure at all Xaa locations
  Clone ID: LIB3584-053-P1-K2-H8.pep
MEQIYFSLAKIFLYGATXKSLDAFEPEFAKGGPPPIGGRRANLDYLTRRIIEEFGYQEIGHNREIVRRTGGIPKPLIDISSENFAKLFDKTARYNLDPPFDPYEDPIKYMLTV

SEQ ID NO: 73911 - protein, 282 aa, Gossypium hirsutum
  Clone ID: GOSHI-09MAY01-C4586_1.pep
MKGNAQNGLKKGPWTPEEDRILVDYIQKHGHSKWKSVPALAGLNRCGKSCRLPWTNYLRPNIKRGNFSSEEEQLIIDLHALMGNKWSAIARHLPGRTDNEVKNLWNSRLKRKLIQMGIDPITHEPLTDPRLHQLLAAASFSNLINNPLDIINALMLQSDAVATLAKSLHLSHNMLQALASTPTTMASQDPTKACSTSNEYQFGSSSESLPVNVPNLDTTPQPIPPMAPRPTIVDDHHETNNITNPSSTTFQEWDDFMDGGEASEPYWRDIIDQASSQSWPIS

SEQ ID NO: 73912 - protein, 222 aa, Gossypium hirsutum
  Clone ID: GOSHI-09MAY01-C4546_1.pep
MEDWEDEIPPLPAKEQLKSKWDDEDIDDSDIKESWEDEDEPAPPPQPVAKAPDEKAPKKAALKATEKKGKAVEVAKEEPLDPVAEKLRQQRLVEEADYKSTTELFSKKGDDKTLDNFIPKSESDFVEYAELISHKLRPYEKSYHYIALLKAVMRLSLTSLKAADVKDIASSVTAIANEKLKAEKEATTKKKTVGKKKQLHVDKPDDDLVVAAYDDIDDYDFM

SEQ ID NO: 73913 - protein, 76 aa, Gossypium hirsutum
  Clone ID: LIB3585-007-P1-K1-G5.pep
KTARMRFHLCLQRNNLKANGMMKILMTLISRNHGRMKMNLLRLQSNGLHCNLYDLVDEDDSKSTTELCSKRGLDQT

SEQ ID NO: 73914 - protein, 50 aa, Gossypium hirsutum
  Clone ID: LIB3584-016-P1-K1-C11.pep
MEDWEDEIPPLPTKEQLKSKWDDEDIDNSDIKESWEDKDELAPPLHCNLY

SEQ ID NO: 73915 - protein, 103 aa, Gossypium hirsutum
  Clone ID: LIB3165-060-Q1-K1-D7.pep
MEDWEDDIPPLVSKEQPKSKWDDEDVDDADIKESWEDEDEERLLQPVAKATEEKAPKKPLSKATEKKGKTIEIAKEEPLDPIAEKLRQQRLVEEADFRSTTEL

SEQ ID NO: 73916 - protein, 104 aa, Gossypium hirsutum
  Clone ID: GOSHI-09MAY01-C4536_22.pep
NMIKKKRTGSRQAICYFLFCFEGFLSCLHLGSRIIFIIPAYQAVWQGIETFSKPLLVYEDPRDRPRDRAWALHGILDAPKLSTDAGHNSLLLPMILKTIGRVGG

SEQ ID NO: 73917 - protein, 299 aa, Gossypium hirsutum
  unsure (1)..(299): unsure at all Xaa locations
  Clone ID: GOSHI-09MAY01-C4536_21.pep
MEVELPRPDNPAMTFDEVSMERSKNFVKALQELKNLRPQLYSAAEYCEKSYLHNEQKQMVLDNLKDYAVRALVNAVDHLGTVAYKLTDLLEQQTLEVSTIELKASCLNQKLLTCQTYTDKEGIRQQQLLAFFPXHHKHYILPNAVSKKVHFSPQVQTDPRQTYLHAKARLQPSDTPASKTLSWHLSSETKSTLKGTSQTLASNEISKPPAPASEVFQLVENGDNARAKSSAALFPASNALVPSLGITHRELEGSKPLTAFRSFDNPKRDIIRAPVRSKSVLSSFFVKQKQMKLKAGYVA

SEQ ID NO: 73918 - protein, 155 aa, Gossypium hirsutum
  Clone ID: GOSHI-09MAY01-C4536_20.pep
TRPPTRPPTRPEEEAAEKLAPIKLENLGTARLVVDFDRWWTGEESVNVLLESTGQVTTVKSARQVIDALNVEGPDIDIILTEVDLQMTKGMKLLKHIMRNNELRRIPVIMMSAQDEVSIVVKCLRLGAADYLVKPLRTNELLNLWTRMWRRRREG

SEQ ID NO: 73919 - protein, 60 aa, Gossypium hirsutum
  Clone ID: GOSHI-09MAY01-C4536_17.pep
LSKCIISFITKIYLIKKIHCIFYYLAYVLFILVLILKKVIKTKMKIKKEKNKKEPNKIKG

SEQ ID NO: 73920 - protein, 119 aa, Gossypium hirsutum
  Clone ID: GOSHI-09MAY01-C4536_15.pep
FVQYTKLMTDPNAPIIDFYPTDFEVDMNGKRYSWQGLAKLPFIDEEQLLAEVAKIEHTVTDEEAQRNSTVCDMLFVAASHRLSEQIFSLDSRKQSPERQRIEVKEEVKPNLRVYLYSSS

SEQ ID NO: 73921 - protein, 90 aa, Gossypium hirsutum
  Clone ID: GOSHI-09MAY01-C4536_7.pep
SFKLCPGIVENKLRIDLNLNICLTHAALLLKSACFVLFCFCQYSCCSYVKRMGPANNNKHVGTKSAVQIRSHAQKFFSKAHCFEFITRFP

SEQ ID NO: 73922 - protein, 67 aa, Gossypium hirsutum
  Clone ID: GOSHI-09MAY01-C4536_6.pep
LNKCIISFFTKIYLIKKMHYCLRKQIRILLSLELISHSEPAVVAFIYALEALTVLGFCCCNSLRDGT

SEQ ID NO: 73923 - protein, 150 aa, Gossypium hirsutum
  Clone ID: GOSHI-09MAY01-C4536_4.pep
VLKSGMVTSDSGHQYKLQSDAKCDTMGTLWRILGVNNGAQRVFGEATGFSLLLTTLHSFQGDGHSEEPYLLVYIKVFTYLLRLMTAGVCGNTINRTKLHAIISSHTFYDLLSESGLLCVDYEKQVIRLLLEPAQKFFSKAYCFEFITRFP

SEQ ID NO: 73924 - protein, 187 aa, Gossypium hirsutum
  unsure (1)..(187): unsure at all Xaa locations
  Clone ID: GOSHI-09MAY01-C4536_3.pep
CQNMVPVIGSXGKYITRPIITDDGQPIEGEDCHVTSAVSDNKKVAHWMLFLHQIGLDVFRTDRALVFYEDEANQAKLWDILAIYSWVDDDIGYVQGMNDICSPMVILLENEADAFWCFEHAMRRLRENFRCSTSSIGVQSQLGILSQVIKTVDPKLHQHLEDLDGGGVLVAXRMLMVLFRREFSFVD

SEQ ID NO: 73925 - protein, 61 aa, Gossypium hirsutum
  Clone ID: GOSHI-09MAY01-C4536_2.pep
MGFRNSYVGNLSLFYEIEEKLKQGHNVVLISNHHTEADPIIISLLLEKANPHIAENMVVLS

SEQ ID NO: 73926 - protein, 88 aa, Gossypium hirsutum
  Clone ID: GOSHI-09MAY01-C4536_1.pep
ENIHRFLTSPHHPIEINHKKLKVPCGPLNFLAVWERKGKLVFCQLKKFFFAAHSPIWCDVLIPLQFAAHSPIRSPYPLPFTMCICKVE

SEQ ID NO: 73927 - protein, 121 aa, Gossypium hirsutum
  unsure (1)..(121): unsure at all Xaa locations
  Clone ID: LIB3828-020-Q1-N6-F5.pep
HFKTYTDKEGIRQXXLLAFIPRHHKHYILPNSVSKKIHFSPQLQTDPRQSYLHAKSCLQPLGLLRTSKMLMVRQLALLNSRLFNTKTHILRVFQRRKILIIDGLCKKMGYKDAKLLMLFGL

SEQ ID NO: 73928 - protein, 79 aa, Gossypium hirsutum
  Clone ID: LIB3146-023-Q1-K1-G5.pep
LNKCIISFFTKIYLIKKMHYCLRKQIRILLFLELISHSEPAVVAFIYALEALTVLGFCCCNSCRDVHSMAILLKIEHYF

SEQ ID NO: 73929 - protein, 122 aa, Gossypium hirsutum
  Clone ID: LIB3825-014-Q1-K6-A11.pep
AAMRRNLGLSSADDQRPVVGCITRLVPQKGVHLIKHAIYRTLEMGGQFELLGSCPAPHIQREFEGIANQFQNHEHIRLILKYDESLSHAIYAASDMFIIPSIFEPCGLTQVSHLLHMLIHEF

SEQ ID NO: 73930 - protein, 79 aa, Gossypium hirsutum
  Clone ID: LIB3149-004-P1-K1-C9.pep
TADLVLTCFIIIGRLHSLYITTAVVIIGTAHSLYRFCHCHNEMTNPTLQQSWLFQHMLEIVFGHEQNMILCQSEGRIKI

SEQ ID NO: 73931 - protein, 51 aa, Gossypium hirsutum
  Clone ID: LIB3147-033-Q1-K1-D12.pep
SRKSCNELKAMSIRIEKKKRITIRKRDPELLFLWTPTLDSPRFNAIGYQSP

SEQ ID NO: 73932 - protein, 61 aa, Gossypium hirsutum
  Clone ID: LIB3146-055-Q1-K1-E3.pep
NNLKKLNGCTYLCHVHYGLNRLSYFYFHAEHVGTKFAVQIQSHAQKFFCKAHCFEFITRFP

SEQ ID NO: 73933 - protein, 47 aa, Gossypium hirsutum
  Clone ID: LIB3146-025-Q1-K2-F2.pep
TRPGLNSLSYSYFHAEHVGTKSAVQIRSHAQKFFSKAHCFEFITRFP

SEQ ID NO: 73934 - protein, 52 aa, Gossypium hirsutum
  Clone ID: LIB3582-053-P1-K1-C4.pep
NNAPSSVIPMLCTIPEAIATTEPKYSQGLKGIDEGYYSRLRNMNFQMLCLEI

SEQ ID NO: 73935 - protein, 129 aa, Gossypium hirsutum
  Clone ID: LIB3582-058-P1-K1-B1.pep
GNDNERETCDFIHFFGVRTSTSLLPLSYPSVGNRKRKYDCLKNSNINLLDCLKLIKLICDFQEKKFRIRKKNYKYKNSKIIKINKLSSESGKGRLYLGLRLLREHSQIPHQSTTYRNQPQVVQSLNFWQ

SEQ ID NO: 73936 - protein, 40 aa, Gossypium hirsutum
  Clone ID: LIB3148-029-Q1-K1-A6.pep
LSKCIISVITKIYLIKKMHCIIYYLAYVLFILILILNFYF

SEQ ID NO: 73937 - protein, 112 aa, Gossypium hirsutum
  unsure (1)..(112): unsure at all Xaa locations
  Clone ID: LIB3166-044-P1-K1-F9.pep
PRVRPRVRPRVRPRVRPRVRSSIAIFSKPDSVSKKVHFSPQLQTDPRQNYLHAKSCLQPSGIXFLASRNSSMLVNIMVLIKCFSSIDTPASNTLSWHLSSETKSTLKGTSQT

SEQ ID NO: 73938 - protein, 156 aa, Gossypium hirsutum
  Clone ID: LIB3543-053-Q1-K6-G3.pep
MGKKGSWFSAIKKIFFPHSKEKLNNESEKRSDKEKKKGPGKLRHGETNSFLPLFRKPSSIEKILGEAEREHNLIFRPPTPPEQPRTPPFVPHRPASPQGPSPRVASPRVASPRAASPPRAASPRAASPPPPAPSPPRAASPRVASPKGASPKPAPS

SEQ ID NO: 73939 - protein, 99 aa, Gossypium hirsutum
  Clone ID: uC-gsflnu33B092g11b1.pep
KPQAKVQSTSDGADSTLSNPLCEESAQNSSKYSNRQSIHPPPAFGSSPNLEALALEANKSKDQDGDSSLLDSSHLSRIDFSFSPMHEVSFSSEDQPKIS

SEQ ID NO: 73940 - protein, 83 aa, Gossypium hirsutum
  Clone ID: LIB3149-002-P1-K1-C12.pep
IKYPVKCRKQKPHSLFIKTISVMLDLRILREHSQIPHQSTTYRNQPQEIKCRAVPQFSGSMGKKGSWFSAIKKIFFTAHSNLV

SEQ ID NO: 73941 - protein, 68 aa, Gossypium hirsutum
  Clone ID: LIB3166-042-P1-K1-A7.pep
GICECSLRSRKPRPPYFLFLFPTLGYDNGSSEVEVLTPKKVQSISDGADSTLSNPLCEEFAQNSSKYS

SEQ ID NO: 73942 - protein, 103 aa, Gossypium hirsutum
  Clone ID: LIB3145-029-Q1-K1-D8.pep
KNFLSTLQGKLNNVHLHLMELIPLFQTPCARSLLKILQNTLTDRSLLLFSLWTLTVLLMMLTILAGFSIVSIHPPPAFGSSPNLEALALEANKSKDQNGDSSL

SEQ ID NO: 73943 - protein, 57 aa, Gossypium hirsutum
  unsure (1)..(57): unsure at all Xaa locations
  Clone ID: LIB3493-052-P1-M1-G7.pep
FGKRDVTXMQCKYIFSYCTCLIHEILKSYLLIEKPLRMWDASLQRLFQSEEFCFTFI
